United States Patent Application Publication US 2025/0222082 A1 - sequence listing, part 7

SEQ ID NO: 57630 - protein, 32 aa, unidentified
  source 1..32: note = methanogen bacteria
LGIPFIDAVFENMSAWTGSGMTFFINVEILPK

SEQ ID NO: 57631 - protein, 33 aa, unidentified
  source 1..33: note = methanogen bacteria
GLPIFDSVNLTFTSISTGGMSIKNANVGFYQND

SEQ ID NO: 57632 - protein, 34 aa, unidentified
  source 1..34: note = methanogen bacteria
NKTVPIEELFTIVSAITTTGANVVPPTDLATWKS

SEQ ID NO: 57633 - protein, 32 aa, unidentified
  source 1..32: note = methanogen bacteria
YGYDPFTALFDVISLQSNNGLSTGIVFGGLPT

SEQ ID NO: 57634 - protein, 30 aa, unidentified
  source 1..30: note = methanogen bacteria
FFKGWGADPNTFFTATLLQSQESVSGLTTF

SEQ ID NO: 57635 - protein, 25 aa, unidentified
  source 1..25: note = methanogen bacteria
LTLPGAMIGLKELFAPDWSLLLDFD

SEQ ID NO: 57636 - protein, 36 aa, unidentified
  source 1..36: note = methanogen bacteria
LGYMSLQSGTAVADLVTQGTGLVFIAYPTVLNVLGQ

SEQ ID NO: 57637 - protein, 30 aa, unidentified
  source 1..30: note = methanogen bacteria
FFKGWGADPNTYFATTLLQSQETFSGITNF

SEQ ID NO: 57638 - protein, 24 aa, unidentified
  source 1..24: note = methanogen bacteria
TLPGAMIGLNELFSPDWSLLLDFD

SEQ ID NO: 57639 - protein, 36 aa, unidentified
  source 1..36: note = methanogen bacteria
LGYMSLQSGTAVADLVAQGTGLVFVAYPTVLNVLGQ

SEQ ID NO: 57640 - protein, 23 aa, unidentified
  source 1..23: note = methanogen bacteria
GEWIISIFGHSMISSFLVDGVIG

SEQ ID NO: 57641 - protein, 78 aa, unidentified
  source 1..78: note = methanogen bacteria
MHNYKSKNNKINYNYIVNEKHNLVGTGNIDADYNWWGKNKLFKVSKSFKIKKFVVMYLNAPHNLKFNKTYKINILFKD

SEQ ID NO: 57642 - protein, 21 aa, unidentified
  source 1..21: note = methanogen bacteria
KISNILGKVDFAYEMISNPIR

SEQ ID NO: 57643 - protein, 16 aa, unidentified
  source 1..16: note = methanogen bacteria
TVKIVKGYYDNFLTFI

SEQ ID NO: 57644 - protein, 12 aa, unidentified
  source 1..12: note = methanogen bacteria
AFKNNVTFLRKK

SEQ ID NO: 57645 - protein, 65 aa, unidentified
  source 1..65: note = methanogen bacteria
KIKLYFKKHPKYLYGASKAAQKILWPGYKSKRSYSNKNTKPIKHSTKNILYKGLNFIKNKILKKS

SEQ ID NO: 57646 - protein, 10 aa, unidentified
  source 1..10: note = methanogen bacteria
LYVLDFSIPL

SEQ ID NO: 57647 - protein, 17 aa, unidentified
  source 1..17: note = methanogen bacteria
SLDAPINPIQDTIVFNL

SEQ ID NO: 57648 - protein, 15 aa, unidentified
  source 1..15: note = methanogen bacteria
IDTYVQRDLSFYTIP

SEQ ID NO: 57649 - protein, 11 aa, unidentified
  source 1..11: note = methanogen bacteria
YIDIGSVDKIS

SEQ ID NO: 57650 - protein, 17 aa, unidentified
  source 1..17: note = methanogen bacteria
HFPQEEADFIFNLPING

SEQ ID NO: 57651 - protein, 44 aa, unidentified; identical to SEQ ID NO: 57574
  source 1..44: note = methanogen bacteria

SEQ ID NO: 57652 - protein, 76 aa, unidentified
  source 1..76: note = methanogen bacteria
IYDVENDTSNIKTNDAFEEGINLENAKNQFFSSINDNPSNELEKTDSINIKNSKYNLVDSFVNLFRENFILDGLFN

SEQ ID NO: 57653 - protein, 31 aa, unidentified
  source 1..31: note = methanogen bacteria
SFFKGWGADPNAYFTTTLLQSSDSLSGLLSF

SEQ ID NO: 57654 - protein, 25 aa, unidentified
  source 1..25: note = methanogen bacteria
LTLPGASVGLAELFHPDWSLLGNFD

SEQ ID NO: 57655 - protein, 37 aa, unidentified
  source 1..37: note = methanogen bacteria
LGYMSLQSGTAVADLVTQGTGLVFIVYPTVFNVLGNW

SEQ ID NO: 57656 - protein, 58 aa, unidentified; identical to SEQ ID NO: 55546
  source 1..58: note = methanogen bacteria

SEQ ID NO: 57657 - protein, 47 aa, unidentified
  source 1..47: note = methanogen bacteria
INGLPFGFINQAREVSTETVSSNTAATPANDLFFYISSLPRFIYSPQ

SEQ ID NO: 57658 - protein, 18 aa, unidentified
  source 1..18: note = methanogen bacteria
SRLLSKQCEYKRTWRLSQ

SEQ ID NO: 57659 - protein, 10 aa, unidentified
  source 1..10: note = methanogen bacteria
LYVLDFSIPL

SEQ ID NO: 57660 - protein, 15 aa, unidentified
  source 1..15: note = methanogen bacteria
LYDPNNPVRDTIVLN

SEQ ID NO: 57661 - protein, 15 aa, unidentified
  source 1..15: note = methanogen bacteria
INTYVQRDLSFFTIP

SEQ ID NO: 57662 - protein, 11 aa, unidentified
  source 1..11: note = methanogen bacteria
YIDIDSVDKIS

SEQ ID NO: 57663 - protein, 19 aa, unidentified
  source 1..19: note = methanogen bacteria
RFPPEGTESFIFHMPVHGL

SEQ ID NO: 57664 - protein, 31 aa, unidentified
  source 1..31: note = methanogen bacteria
SFFKGWGADPNTYFTTTLLQSSNSMDGLFNF

SEQ ID NO: 57665 - protein, 25 aa, unidentified
  source 1..25: note = methanogen bacteria
LTLPGASIGLSELFHPDWSLLGNFE

SEQ ID NO: 57666 - protein, 37 aa, unidentified
  source 1..37: note = methanogen bacteria
LGYMSLQSGTAVSDLVVQGTGLVFIAYPTVFNVLGQW

SEQ ID NO: 57667 - protein, 31 aa, unidentified
  source 1..31: note = methanogen bacteria
SFTKAWGANPDLYFTNNVLHVANSWDGVFSI

SEQ ID NO: 57668 - protein, 24 aa, unidentified
  source 1..24: note = methanogen bacteria
LTLPGASVGYTQIFTPDWSALTNL

SEQ ID NO: 57669 - protein, 35 aa, unidentified
  source 1..35: note = methanogen bacteria
FMTVSSGIAFNELVTSGSGLAFVVFPQVFNTMGPA

SEQ ID NO: 57670 - protein, 29 aa, unidentified
  source 1..29: note = methanogen bacteria
SFNFGWGNDPASFFTNYVGGSSSSSLTTI

SEQ ID NO: 57671 - protein, 23 aa, unidentified
  source 1..23: note = methanogen bacteria
TLPGFQVGITTLLTPNWSALLDI

SEQ ID NO: 57672 - protein, 35 aa, unidentified
  source 1..35: note = methanogen bacteria
GYMSMHSSIPMNELISQGSGLIFIVFPQIFNTMGM

SEQ ID NO: 57673 - protein, 32 aa, unidentified
  source 1..32: note = methanogen bacteria
LSFSKGWGANPDTFFANTLLHSTDSVSGLLTF

SEQ ID NO: 57674 - protein, 25 aa, unidentified
  source 1..25: note = methanogen bacteria
LTLPGASIGLSELFNPNWSLLGHFE

SEQ ID NO: 57675 - protein, 37 aa, unidentified
  source 1..37: note = methanogen bacteria
LGYMSMQSGTAVADLVTQGTGLVFVVYPTVFNVLGQW

SEQ ID NO: 57676 - protein, 10 aa, unidentified
  source 1..10: note = methanogen bacteria
YILNFSHPLA

SEQ ID NO: 57677 - protein, 16 aa, unidentified
  source 1..16: note = methanogen bacteria
SLYVPSTIQYDHYISN

SEQ ID NO: 57678 - protein, 17 aa, unidentified
  source 1..17: note = methanogen bacteria
FFIDNYVDRNISFFNIP

SEQ ID NO: 57679 - protein, 12 aa, unidentified
  source 1..12: note = methanogen bacteria
YIDIDAVSKINL

SEQ ID NO: 57680 - protein, 19 aa, unidentified
  source 1..19: note = methanogen bacteria
EFPVYDTPKFVYSIPIDGI

SEQ ID NO: 57681 - protein, 31 aa, unidentified
  source 1..31: note = methanogen bacteria
SFTKAWGANPDLYFSNNVLHATDSVSGIFTI

SEQ ID NO: 57682 - protein, 24 aa, unidentified
  source 1..24: note = methanogen bacteria
LTLPGASIGYTQIFTPNWSALGNL

SEQ ID NO: 57683 - protein, 34 aa, unidentified
  source 1..34: note = methanogen bacteria
FMALSSGIPFNELVTEGTGLAFVVFPQVFNIMGP

SEQ ID NO: 57684 - protein, 57 aa, unidentified
  source 1..57: note = methanogen bacteria
QKPFMHIDEWFTQGILNISFKEMIHLTAKDVHPPLYYAIALVPVYLLKWLHIPFSMM

SEQ ID NO: 57685 - protein, 33 aa, unidentified
  source 1..33: note = methanogen bacteria
KQINSVSGSYWIDEITFETFVQFFASIFMDTSE

SEQ ID NO: 57686 - protein, 31 aa, unidentified
  source 1..31: note = methanogen bacteria
SFTKAWGANPDVFFTQNVLHATESMTGLFTI

SEQ ID NO: 57687 - protein, 24 aa, unidentified
  source 1..24: note = methanogen bacteria
LTLPGASVGYSQIFTPDWSALTNL

SEQ ID NO: 57688 - protein, 35 aa, unidentified
  source 1..35: note = methanogen bacteria
FMAVTTAIPFNELVTSGSGLAFVVFPQVFNIMGDA

SEQ ID NO: 57689 - protein, 91 aa, unidentified
  source 1..91: note = methanogen bacteria
MLIEGYGTSIDSSNFTSNNVTKNGGAIYILGSNTRISDSSLEFNNAIPDKADISRGLGGALYIKGNDNIVDGSNFTFNTARNGSAIYTDGI

SEQ ID NO: 57690 - protein, 31 aa, unidentified
  source 1..31: note = methanogen bacteria
SMFKAWGADPNLFYSSTLTHSTTNVSGVLNF

SEQ ID NO: 57691 - protein, 24 aa, unidentified
  source 1..24: note = methanogen bacteria
TLPGASIGLAELYTPDWSLLTDFN

SEQ ID NO: 57692 - protein, 36 aa, unidentified
  source 1..36: note = methanogen bacteria
LGYMSLQTATPVSDIVSQGTGLIFVVYPAVFNILGQ

SEQ ID NO: 57693 - protein, 31 aa, unidentified
  source 1..31: note = methanogen bacteria
SFTKAWGANPDLYFANNVLHATESVSGIFTI

SEQ ID NO: 57694 - protein, 23 aa, unidentified
  source 1..23: note = methanogen bacteria
TLPGASLGYTQIFNPDWSALTNL

SEQ ID NO: 57695 - protein, 34 aa, unidentified
  source 1..34: note = methanogen bacteria
FMALSSGVPFNELVTEGTGLAFVVFPQVFNTMGP

SEQ ID NO: 57696 - protein, 57 aa, unidentified
  source 1..57: note = methanogen bacteria
QKPFLHIDEWFTKGLMTLSLRDMVHITAGDVHPPLYYITVWAPAKVLNLLHIKFDKI

SEQ ID NO: 57697 - protein, 35 aa, unidentified
  source 1..35: note = methanogen bacteria
YKQTIEDKGGNWANTISLDAIFEFFSSAFSSSSDT

SEQ ID NO: 57698 - protein, 56 aa, unidentified
  source 1..56: note = methanogen bacteria
LNHVIVHYDEYFTLTLLNLPVMDMITITAGDVHPPLYYLMAEVFVNITKPLGWDLL

SEQ ID NO: 57699 - protein, 32 aa, unidentified
  source 1..32: note = methanogen bacteria
ISQLETVHHTYWIPGITISTIINALGYFAYNN

SEQ ID NO: 57700 - protein, 12 aa, unidentified
  source 1..12: note = methanogen bacteria
VAGLGAEPLAAI

SEQ ID NO: 57701 - protein, 15 aa, unidentified
  source 1..15: note = methanogen bacteria
LKIMGASSVLKYAMD

SEQ ID NO: 57702 - protein, 11 aa, unidentified
  source 1..11: note = methanogen bacteria
TIVSGSLAVAV

SEQ ID NO: 57703 - protein, 21 aa, unidentified
  source 1..21: note = methanogen bacteria
QIAFIFSYSESSSHLEPLIAS

SEQ ID NO: 57704 - protein, 13 aa, unidentified
  source 1..13: note = methanogen bacteria
ISQISADLNTDVS

SEQ ID NO: 57705 - protein, 57 aa, unidentified
  source 1..57: note = methanogen bacteria
VMGGISTAVDTYAPEHSGDEQFHQDVYDYFQKVGNIDDVKAQDSIIVNTADIIIQNA

SEQ ID NO: 57706 - protein, 41 aa, unidentified
  source 1..41: note = methanogen bacteria
VPGVQYFGGHNPSLISSMLPASLNGTLASMFNTGIVYVFSD

SEQ ID NO: 57707 - protein, 24 aa, unidentified
  source 1..24: note = methanogen bacteria
TIGSLNITDIVYVLNHNLVDPLSP

SEQ ID NO: 57708 - protein, 14 aa, unidentified
  source 1..14: note = methanogen bacteria
IVTNVFSSFIGGLI

SEQ ID NO: 57709 - protein, 10 aa, unidentified
  source 1..10: note = methanogen bacteria
TKSFSTAEYG

SEQ ID NO: 57710 - protein, 13 aa, unidentified
  source 1..13: note = methanogen bacteria
GPIAGGLFNGNVY

SEQ ID NO: 57711 - protein, 15 aa, unidentified
  source 1..15: note = methanogen bacteria
LLSITTFDIAQNGFF

SEQ ID NO: 57712 - protein, 12 aa, unidentified
  source 1..12: note = methanogen bacteria
PDIANELNFSAE

SEQ ID NO: 57713 - protein, 11 aa, unidentified
  source 1..11: note = methanogen bacteria
LHLQYILDIEA

SEQ ID NO: 57714 - protein, 18 aa, unidentified
  source 1..18: note = methanogen bacteria
IGNQQLGPDHIDHLFVQA

SEQ ID NO: 57715 - protein, 29 aa, unidentified
  source 1..29: note = methanogen bacteria
SSIDFSWGSDTALYFEKVGGSSDLSTMTT

SEQ ID NO: 57716 - protein, 24 aa, unidentified
  source 1..24: note = methanogen bacteria
ISLPGSGIGINALLNPKWEALTNI

SEQ ID NO: 57717 - protein, 35 aa, unidentified
  source 1..35: note = methanogen bacteria
GYMSSTSGIPIVNLIKEGTGLIFVVFPTIFNIMGP

SEQ ID NO: 57718 - protein, 30 aa, unidentified
  source 1..30: note = methanogen bacteria
FTKAWGSNPDLYFSQNVLHASDSISGIFTI

SEQ ID NO: 57719 - protein, 24 aa, unidentified
  source 1..24: note = methanogen bacteria
TLPGASIGYSQIFSPNWSALADPD

SEQ ID NO: 57720 - protein, 35 aa, unidentified
  source 1..35: note = methanogen bacteria
FMAMTSGIAFNDLVTEGTGLAFVVFPQALNMMQTG

SEQ ID NO: 57721 - protein, 38 aa, unidentified
  source 1..38: note = methanogen bacteria
VQYFGGHNPSLLTSSLPANLVNTLVAGYNTGIVYAFAN

SEQ ID NO: 57722 - protein, 25 aa, unidentified
  source 1..25: note = methanogen bacteria
GTIGSVNIADIIFVISNKFVQPYSP

SEQ ID NO: 57723 - protein, 15 aa, unidentified
  source 1..15: note = methanogen bacteria
NIVTDVFIPFAGGLI

SEQ ID NO: 57724 - protein, 15 aa, unidentified
  source 1..15: note = methanogen bacteria
MLGFGGLFGSSPIGI

SEQ ID NO: 57725 - protein, 14 aa, unidentified
  source 1..14: note = methanogen bacteria
LAPVSSLSGSDISG

SEQ ID NO: 57726 - protein, 67 aa, unidentified; identical to SEQ ID NO: 56680
  source 1..67: note = methanogen bacteria

SEQ ID NO: 57727 - protein, 16 aa, unidentified
  source 1..16: note = methanogen bacteria
TWASVGFLNLGITTRY

SEQ ID NO: 57728 - protein, 10 aa, unidentified
  source 1..10: note = methanogen bacteria
VSECGSASLI

SEQ ID NO: 57729 - protein, 15 aa, unidentified
  source 1..15: note = methanogen bacteria
LLALNIYEPAIEPAL

SEQ ID NO: 57730 - protein, 11 aa, unidentified
  source 1..11: note = methanogen bacteria
LLNSPPDLAAF

SEQ ID NO: 57731 - protein, 20 aa, unidentified
  source 1..20: note = methanogen bacteria
QITHLFVVNNDMAEIAALNF

SEQ ID NO: 57732 - protein, 56 aa, unidentified
  source 1..56: note = methanogen bacteria
LNHYILHVDEYFTISVLTLPLGDIVNITSWDVHPPLYYILGKIAVKIAEAIGIDSM

SEQ ID NO: 57733 - protein, 34 aa, unidentified
  source 1..34: note = methanogen bacteria
PLIRQMTQVRAAYWIRQVNPDLFIKSLGYIAYAN

SEQ ID NO: 57734 - protein, 38 aa, unidentified
  source 1..38: note = methanogen bacteria
IQYFGGHDPALLASSLPSNLVGTLVASYNTGIVYVFEN

SEQ ID NO: 57735 - protein, 24 aa, unidentified
  source 1..24: note = methanogen bacteria
TIGSVNINDIIFAISNNYVNPYAP

SEQ ID NO: 57736 - protein, 15 aa, unidentified
  source 1..15: note = methanogen bacteria
NIVTDVFIPFAGGLI

SEQ ID NO: 57737 - protein, 38 aa, unidentified
  source 1..38: note = methanogen bacteria
VQYFGGHNPSLLASSLPSNLLGTLAASYNTGIVYIFGN

SEQ ID NO: 57738 - protein, 24 aa, unidentified
  source 1..24: note = methanogen bacteria
TIGSVNINDIIYAISNNFVNPYSP

SEQ ID NO: 57739 - protein, 15 aa, unidentified
  source 1..15: note = methanogen bacteria
NIVTDVFIPFAGGLI

SEQ ID NO: 57740 - protein, 13 aa, unidentified
  source 1..13: note = methanogen bacteria
PYYMDDFAVSSAT

SEQ ID NO: 57741 - protein, 10 aa, unidentified
  source 1..10: note = methanogen bacteria
VQNVAYYSST

SEQ ID NO: 57742 - protein, 16 aa, unidentified
  source 1..16: note = methanogen bacteria
LANGKITHNQISVNSF

SEQ ID NO: 57743 - protein, 30 aa, unidentified
  source 1..30: note = methanogen bacteria
FTKVWGSNPDLFFSNNVLHSTDSITGIFTI

SEQ ID NO: 57744 - protein, 23 aa, unidentified
  source 1..23: note = methanogen bacteria
TLPGASIGYMQIFTPDWNALTNL

SEQ ID NO: 57745 - protein, 35 aa, unidentified
  source 1..35: note = methanogen bacteria
FMALSTGLNFNQLVTEGSGLAFIVFPQVFNIMGPS

SEQ ID NO: 57746 - protein, 33 aa, unidentified
  source 1..33: note = methanogen bacteria
SGDLSFIDAYFEGMSGITSTGFTMYANVPIAYS

SEQ ID NO: 57747 - protein, 33 aa, unidentified
  source 1..33: note = methanogen bacteria
GLDLFTAICYSFSGLGTGGFSSDPNYLNYFSNP

SEQ ID NO: 57748 - protein, 39 aa, unidentified
  source 1..39: note = methanogen bacteria
QNNIYDHNILVTLNHALFQVISVLTSTGFQTTDINAWPA

SEQ ID NO: 57749 - protein, 31 aa, unidentified
  source 1..31: note = methanogen bacteria
CNDFKIAYSIVAGSIGNTGLGPSYINPSIPF

SEQ ID NO: 57750 - protein, 31 aa, unidentified
  source 1..31: note = methanogen bacteria
SFTKAWGSNPDLYFTNNVLQATDSISGIFTI

SEQ ID NO: 57751 - protein, 24 aa, unidentified
  source 1..24: note = methanogen bacteria
LTLPGASIGYTQIFTPDWSALTNL

SEQ ID NO: 57752 - protein, 35 aa, unidentified
  source 1..35: note = methanogen bacteria
FMTLTSGIPFNELVTSGTGLAFVVFPQVFNTMGPA

SEQ ID NO: 57753 - protein, 31 aa, unidentified
  source 1..31: note = methanogen bacteria
SVTKAWGANPDLYFANNVLHATDSMSGLFTI

SEQ ID NO: 57754 - protein, 24 aa, unidentified
  source 1..24: note = methanogen bacteria
LTLPGASIGYSQIFTPDWSALGNL

SEQ ID NO: 57755 - protein, 35 aa, unidentified
  source 1..35: note = methanogen bacteria
FMTFTSGIPFNELVTEGTGLAFVVFPQVFNTMGDV

SEQ ID NO: 57756 - protein, 18 aa, unidentified
  source 1..18: note = methanogen bacteria
YILDLVNIPKSLLETSKT

SEQ ID NO: 57757 - protein, 18 aa, unidentified
  source 1..18: note = methanogen bacteria
IIFTLLNITSPQQQTYIE

SEQ ID NO: 57758 - protein, 32 aa, unidentified
  source 1..32: note = methanogen bacteria
LSFTKAWGANPDLYFTNNVLHATDSMSGIFTI

SEQ ID NO: 57759 - protein, 24 aa, unidentified
  source 1..24: note = methanogen bacteria
LTLPGASVGYTQIFTPDWSALTNL

SEQ ID NO: 57760 - protein, 36 aa, unidentified; identical to SEQ ID NO: 57475
  source 1..36: note = methanogen bacteria

SEQ ID NO: 57761 - protein, 57 aa, unidentified
  source 1..57: note = methanogen bacteria
LNHYIMHVDEYFTMSVLTLPIADVISITSWDVHPPVYYILAKIAVMMAEAVGMDSLH

SEQ ID NO: 57762 - protein, 32 aa, unidentified
  source 1..32: note = methanogen bacteria
IRQMTQVHAAYWIRQVNPEMLVKSVGYIAYAD

SEQ ID NO: 57763 - protein, 31 aa, unidentified
  source 1..31: note = methanogen bacteria
SFTKAWGSNPDLYFTNTVLQSTESVSGLFTI

SEQ ID NO: 57764 - protein, 24 aa, unidentified
  source 1..24: note = methanogen bacteria
LTLPGASAGYTQIFTPDWSALGNF

SEQ ID NO: 57765 - protein, 36 aa, unidentified; identical to SEQ ID NO: 57475
  source 1..36: note = methanogen bacteria

SEQ ID NO: 57766 - protein, 33 aa, unidentified
  source 1..33: note = methanogen bacteria
SLDIPFVDALFENMSAWTGSGMTFFVNVEILPK

SEQ ID NO: 57767 - protein, 33 aa, unidentified
  source 1..33: note = methanogen bacteria
GLPIFDAINLTFTSISTGGMSIKNANVGFYQNS

SEQ ID NO: 57768 - protein, 34 aa, unidentified
  source 1..34: note = methanogen bacteria
NKMVPIEELFTIVSAITTTGANVVPPYELARWSS

SEQ ID NO: 57769 - protein, 32 aa, unidentified
  source 1..32: note = methanogen bacteria
YGYDPFTALFDVISIQSNNGLSTGIVFGGLPM

SEQ ID NO: 57770 - protein, 32 aa, unidentified
  source 1..32: note = methanogen bacteria
LDISFIDAFFENISAWTGSGLTMFSDVESLPM

SEQ ID NO: 57771 - protein, 33 aa, unidentified
  source 1..33: note = methanogen bacteria
GLPLFDSINLTFTTISTGGMSIKNANVGFYNNN

SEQ ID NO: 57772 - protein, 34 aa, unidentified
  source 1..34: note = methanogen bacteria
THMAPMNVIFHIVSAVTTTGANIASSSELASWAP

SEQ ID NO: 57773 - protein, 32 aa, unidentified
  source 1..32: note = methanogen bacteria
YTNDPINSLFDVTSTIGNVGLSTGMINGSLAT

SEQ ID NO: 57774 - protein, 31 aa, unidentified
  source 1..31: note = methanogen bacteria
SMFKGWGADPNAFFTTTLTHSSTSVSGILNF

SEQ ID NO: 57775 - protein, 25 aa, unidentified
  source 1..25: note = methanogen bacteria
VTLPGASIGLAELYRPNWSLLSDPN

SEQ ID NO: 57776 - protein, 36 aa, unidentified
  source 1..36: note = methanogen bacteria
LGYMSLQTATPVGDLVSQGTGLIFIIYPAIFNILGQ

SEQ ID NO: 57777 - protein, 11 aa, unidentified
  source 1..11: note = methanogen bacteria
IHVLHFSIPLS

SEQ ID NO: 57778 - protein, 16 aa, unidentified
  source 1..16: note = methanogen bacteria
LYAPGAVEQTVITFNL

SEQ ID NO: 57779 - protein, 18 aa, unidentified
  source 1..18: note = methanogen bacteria
VIFEESYVVRDYGFLVLP

SEQ ID NO: 57780 - protein, 12 aa, unidentified
  source 1..12: note = methanogen bacteria
YLIDVGVTNKIN

SEQ ID NO: 57781 - protein, 19 aa, unidentified
  source 1..19: note = methanogen bacteria
IFPASEVPTLFIGSFPING

SEQ ID NO: 57782 - protein, 31 aa, unidentified
  source 1..31: note = methanogen bacteria
SFTKAWGANPDLYFANNVLHATDSMSGLFTI

SEQ ID NO: 57783 - protein, 23 aa, unidentified
  source 1..23: note = methanogen bacteria
TLPGASIGYTQIFTPDWSALTNL

SEQ ID NO: 57784 - protein, 35 aa, unidentified
  source 1..35: note = methanogen bacteria
FMTLSSGIPFNELVTEGTGLAFVVFPQVFNTMGPA

SEQ ID NO: 57785 - protein, 33 aa, unidentified
  source 1..33: note = methanogen bacteria
SLDIHFVDALFENMSAWTGSGMTFFVNVEILPK

SEQ ID NO: 57786 - protein, 33 aa, unidentified
  source 1..33: note = methanogen bacteria
GLPIFDAVNLTFTSISTGGMSIKNANVGFYQNS

SEQ ID NO: 57787 - protein, 34 aa, unidentified; identical to SEQ ID NO: 57768
  source 1..34: note = methanogen bacteria

SEQ ID NO: 57788 - protein, 32 aa, unidentified
  source 1..32: note = methanogen bacteria
YGYDPFTALFDIVSLQCNNGLSTGIVFGGLPT

SEQ ID NO: 57789 - protein, 31 aa, unidentified
  source 1..31: note = methanogen bacteria
SFTKAWGSNPDIYFANNVLHSTDSISGIFTI

SEQ ID NO: 57790 - protein, 24 aa, unidentified
  source 1..24: note = methanogen bacteria
LTLPGASEGYTQIFTPDWSALTNL

SEQ ID NO: 57791 - protein, 35 aa, unidentified
  source 1..35: note = methanogen bacteria
FMAVTSGIAFDNLVTEGSGLAFVVFPQVFNIMGPA

SEQ ID NO: 57792 - protein, 31 aa, unidentified
  source 1..31: note = methanogen bacteria
SFTKAWGANPDLYFSNNVLHATDSMSGLFTI

SEQ ID NO: 57793 - protein, 24 aa, unidentified
  source 1..24: note = methanogen bacteria
LTLPGASIGYTQIFTPDWSALLNL

SEQ ID NO: 57794 - protein, 36 aa, unidentified
  source 1..36: note = methanogen bacteria
GFMTATSGIPFNELVTEGTGLAFVVFPQVFNTMGGA

SEQ ID NO: 57795 - protein, 19 aa, unidentified
  source 1..19: note = methanogen bacteria
PDVTVFSSTVNVIFYDVNY

SEQ ID NO: 57796 - protein, 17 aa, unidentified
  source 1..17: note = methanogen bacteria
PKYILGIAFDSGGVTTG

SEQ ID NO: 57797 - protein, 30 aa, unidentified
  source 1..30: note = methanogen bacteria
AGISDLMVPNVTEATVDTVSLDTMMHHYKQ

SEQ ID NO: 57798 - protein, 20 aa, unidentified
  source 1..20: note = methanogen bacteria
SGFMPIAQEIGVYLIDNDAG

SEQ ID NO: 57799 - protein, 12 aa, unidentified
  source 1..12: note = methanogen bacteria
AEVLGGEIASEN

SEQ ID NO: 57800 - protein, 97 aa, unidentified
  source 1..97: note = methanogen bacteria
TPPFSFIDESAHFTRAELISEGSLYPETTDKGIYVNDYYFPFQESYYGVTILSENNYNNPITDHKNYWLMTTKTPFYSYLLSGFGILIAKLLNLTAI

SEQ ID NO: 57801 - protein, 63 aa, unidentified
  source 1..63: note = methanogen bacteria
IFISTTAANNSGGVITNISMIGQARFIASNPAIILTLIKDMIVSIPNLFLLKSNFFHYTGYKG

SEQ ID NO: 57802 - protein, 18 aa, unidentified
  source 1..18: note = methanogen bacteria
LIGTPMKSQVILGVQSRY

SEQ ID NO: 57803 - protein, 31 aa, unidentified
  source 1..31: note = methanogen bacteria
SFTKAWGSNPDLYFTNSVLHSTDSISGIFTI

SEQ ID NO: 57804 - protein, 24 aa, unidentified
  source 1..24: note = methanogen bacteria
LTLPGASVGYTQIFTPDWSALTNL

SEQ ID NO: 57805 - protein, 34 aa, unidentified
  source 1..34: note = methanogen bacteria
FMTLTSGIPFNELVTSGTGLAFVVFPQVFNIMGP

SEQ ID NO: 57806 - protein, 56 aa, unidentified
  source 1..56: note = methanogen bacteria
LNHLVCQIDEYFTRTILLLPVSDIITVTAGDVHPPLYYLMGKAVAELSAVLGVDLL

SEQ ID NO: 57807 - protein, 32 aa, unidentified
  source 1..32: note = methanogen bacteria
LSQMAHVHNGYWIPEITWESALLFYGYYGYNE

SEQ ID NO: 57808 - protein, 12 aa, unidentified
  source 1..12: note = methanogen bacteria
QMFEWDIEGWTY

SEQ ID NO: 57809 - protein, 23 aa, unidentified
  source 1..23: note = methanogen bacteria
SGEFEFSNITDNITAPGWSWDFE

SEQ ID NO: 57810 - protein, 30 aa, unidentified
  source 1..30: note = methanogen bacteria
GSFDQSNPDDAALMTNAILAPLSEAVFGDT

SEQ ID NO: 57811 - protein, 31 aa, unidentified
  source 1..31: note = methanogen bacteria
SSLNFSWGSDSALYFVKNVGGSSNLSNMGNF

SEQ ID NO: 57812 - protein, 24 aa, unidentified
  source 1..24: note = methanogen bacteria
TLPGAGIGIGALLNPDWNMLLNVN

SEQ ID NO: 57813 - protein, 35 aa, unidentified
  source 1..35: note = methanogen bacteria
GYMSYTSGTPMVQLVSEGSSLVFIVFPMIFNAMGF

SEQ ID NO: 57814 - protein, 21 aa, unidentified
  source 1..21: note = methanogen bacteria
TVTESPALSSDSLDVDNAYSK

SEQ ID NO: 57815 - protein, 89 aa, unidentified
  source 1..89: note = methanogen bacteria
DVYEPFSITVNVTVNKIASQLSSRNVTAFFNEGKIVARLTDKYGKPLADSNVSLHLAYIHRTFKTNQSGEVEFEIEGLTEGNHTGQIVF

SEQ ID NO: 57816 - protein, 31 aa, unidentified
  source 1..31: note = methanogen bacteria
SLTKAWGANPDLFFANNVLQATDSISGIFKI

SEQ ID NO: 57817 - protein, 24 aa, unidentified
  source 1..24: note = methanogen bacteria
LTLPGASIGYTQIFTPDWSALTNL

SEQ ID NO: 57818 - protein, 36 aa, unidentified
  source 1..36: note = methanogen bacteria
GFMALTTGMPFNELVTEGTGLAFVVFPQVFNTMGDV

SEQ ID NO: 57819 - protein, 30 aa, unidentified
  source 1..30: note = methanogen bacteria
FTKAWGSNPDLYFSQNVLHATDSISGIFTI

SEQ ID NO: 57820 - protein, 24 aa, unidentified
  source 1..24: note = methanogen bacteria
TLPGASIGYSQIFAPNWSALADPD

SEQ ID NO: 57821 - protein, 35 aa, unidentified
  source 1..35: note = methanogen bacteria
FMAMTSGIAFNDLVTEGTGLAFVVFPQALNLMQTG

SEQ ID NO: 57822 - protein, 57 aa, unidentified
  source 1..57: note = methanogen bacteria
ANSLFHIDEFFTLSLIKYSINNAITITSYDVHPPLYYIILKIVTKILTLLNINFNTI

SEQ ID NO: 57823 - protein, 35 aa, unidentified
  source 1..35: note = methanogen bacteria
NQISRVHQSFWVEPVTFITIMDSLSYFMIPITCDD

SEQ ID NO: 57824 - protein, 16 aa, unidentified
  source 1..16: note = methanogen bacteria
FGQAWSIADLPVSDYV

SEQ ID NO: 57825 - protein, 10 aa, unidentified
  source 1..10: note = methanogen bacteria
VNVNFDLISV

SEQ ID NO: 57826 - protein, 12 aa, unidentified
  source 1..12: note = methanogen bacteria
KLYLTFYEFNIY

SEQ ID NO: 57827 - protein, 44 aa, unidentified
  source 1..44: note = methanogen bacteria
ISNVIDRNHVSEAINLSAADNIVSAIMEYVMSGVKYVADSLASG

SEQ ID NO: 57828 - protein, 31 aa, unidentified
  source 1..31: note = methanogen bacteria
SFTKGWGANPDLYFANNVLHATDSVSGIFTI

SEQ ID NO: 57829 - protein, 25 aa, unidentified
  source 1..25: note = methanogen bacteria
LTLPGASIGYTQILTPDWSALGNAE

SEQ ID NO: 57830 - protein, 36 aa, unidentified
  source 1..36: note = methanogen bacteria
GFMTLTSGIPFNELVTEGSGLAFVVFPQVFNTMGPA

SEQ ID NO: 57831 - protein, 97 aa, unidentified
  source 1..97: note = methanogen bacteria
GPPLAFLDESAHFTRAELLSEGVINPEEKDNGFYVNNYYFGLNKAQKGLTVLDNPAVNNPINESKGYWSFTTETPFYSYIPSAIGISIAKFLDLTAI

SEQ ID NO: 57832 - protein, 65 aa, unidentified
  source 1..65: note = methanogen bacteria
LDIIFPVATQVKSHMPSNISPGKQLNYILTNPLIMFDLMKYIVTSIPSVFVIDLTIFHYADFKGL

SEQ ID NO: 57833 - protein, 19 aa, unidentified
  source 1..19: note = methanogen bacteria
YLTYTPIGSGEILGVQARY

SEQ ID NO: 57834 - protein, 32 aa, unidentified
  source 1..32: note = methanogen bacteria
ISFFKGWGSDPEQFFGTVLLQSSTTPDGLFHV

SEQ ID NO: 57835 - protein, 24 aa, unidentified
  source 1..24: note = methanogen bacteria
TLPGASLGVATLFTPDWNSIVNPV

SEQ ID NO: 57836 - protein, 34 aa, unidentified
  source 1..34: note = methanogen bacteria
GYMSTTSNIPIGNLVSQGTTLAFIAFPQIFNIMG

SEQ ID NO: 57837 - protein, 44 aa, unidentified
  source 1..44: note = methanogen bacteria
FHPGIATLDSFDQLHQIASSQFTNWHPFFHTFIEILCLKVYPSI

SEQ ID NO: 57838 - protein, 30 aa, unidentified
  source 1..30: note = methanogen bacteria
SFTFSWGTDAAAYFTQNVGGSSNLSNVGFL

SEQ ID NO: 57839 - protein, 23 aa, unidentified
  source 1..23: note = methanogen bacteria
TLPGAGIGVNTLLTPDWSKLMDV

SEQ ID NO: 57840 - protein, 35 aa, unidentified
  source 1..35: note = methanogen bacteria
GYMSFTSGTPMVQLITEGTGLIFIVFPMIFNIMGP

SEQ ID NO: 57841 - protein, 79 aa, unidentified
  source 1..79: note = methanogen bacteria
MHNYKSKNNKINYNYIVNEKHNLVGTGNIDADYNWWGKNKLFKVSKSFKIKKFVVMYLNAPHNLKFNKTYKINILFKDN

SEQ ID NO: 57842 - protein, 26 aa, unidentified
  source 1..26: note = methanogen bacteria
FLSFLSKYSKVSKIIKGYYDNVLSTI

SEQ ID NO: 57843 - protein, 53 aa, unidentified
  source 1..53: note = methanogen bacteria
SKQHKKKSVRGAVRKIVKNNPKIVYKAVKIAKRILMPKYNSNRNPNKNNKSKD

SEQ ID NO: 57844 - protein, 17 aa, unidentified
  source 1..17: note = methanogen bacteria
SIRKVIYQGVKYIKKYL

SEQ ID NO: 57845 - protein, 30 aa, unidentified
  source 1..30: note = methanogen bacteria
SFTFSWGTDAAAYFTQNVGGSSNLSNANFL

SEQ ID NO: 57846 - protein, 23 aa, unidentified
  source 1..23: note = methanogen bacteria
TLPGAGIGINTLLTPDWSKLMDV

SEQ ID NO: 57847 - protein, 35 aa, unidentified
  source 1..35: note = methanogen bacteria
GYMSYTAGTPMVQLITEGTGLIFIVFPMIFNIMGP

SEQ ID NO: 57848 - protein, 88 aa, unidentified
  source 1..88: note = methanogen bacteria
YWEGGSNYDVSLNPIVIANPINVNKPNNNLTFIVPEEYEGILTLTIGGEKRSVNVTHGIVSIELFNLNSTEYDDEYESFVLRYDLRFE

SEQ ID NO: 57849 - protein, 13 aa, unidentified
  source 1..13: note = methanogen bacteria
TEIMADFHVSSTS

SEQ ID NO: 57850 - protein, 12 aa, unidentified
  source 1..12: note = methanogen bacteria
FVQSVAYHSATE

SEQ ID NO: 57851 - protein, 17 aa, unidentified
  source 1..17: note = methanogen bacteria
FAGGNPTHNNVSVSAFG

SEQ ID NO: 57852 - protein, 31 aa, unidentified
  source 1..31: note = methanogen bacteria
SSFNFAWGNDAGLFFTNVVGGSSNLNSITTF

SEQ ID NO: 57853 - protein, 25 aa, unidentified
  source 1..25: note = methanogen bacteria
LTLPGAGIGINTLLTPDWSKLLDVN

SEQ ID NO: 57854 - protein, 35 aa, unidentified
  source 1..35: note = methanogen bacteria
GYMSHTAGTPMVELVAEGTGLIFIVFPMIFNIMGP

SEQ ID NO: 57855 - protein, 31 aa, unidentified
  source 1..31: note = methanogen bacteria
SFYHGWGSNPNLFFTETLLHSTSSISGLGDI

SEQ ID NO: 57856 - protein, 25 aa, unidentified
  source 1..25: note = methanogen bacteria
VTLPGASIGYSALFNPKWYSICDPH

SEQ ID NO: 57857 - protein, 35 aa, unidentified
  source 1..35: note = methanogen bacteria
GYMSFVQDVPLRYLVTEGTGLIFVAFPSIFNEMGV

SEQ ID NO: 57858 - protein, 32 aa, unidentified
  source 1..32: note = methanogen bacteria
IKFPLIDGLFENMSMLTGTGLTLFLDIEALPK

SEQ ID NO: 57859 - protein, 33 aa, unidentified
  source 1..33: note = methanogen bacteria
GMPLFDSITLCFAMICTGGMSIKNQNIGFYHSN

SEQ ID NO: 57860 - protein, 33 aa, unidentified
  source 1..33: note = methanogen bacteria
KVFNIDILFAIITTISTTGANSVPSNVMMSWPR

SEQ ID NO: 57861 - protein, 32 aa, unidentified
  source 1..32: note = methanogen bacteria
CGYSDFNALFDVISAIGNNGLSSGFTNPGLPI

SEQ ID NO: 57862 - protein, 31 aa, unidentified
  source 1..31: note = methanogen bacteria
SSLNFNWGSNSTLYFLENVGGSSNLSNMTNF

SEQ ID NO: 57863 - protein, 23 aa, unidentified
  source 1..23: note = methanogen bacteria
TLPGANIGINTLLKPDWQMLLNV

SEQ ID NO: 57864 - protein, 35 aa, unidentified
  source 1..35: note = methanogen bacteria
LGYMSYTSGTPMTKLVSEGTGLVFIVFPMIFNKMG

SEQ ID NO: 57865 - protein, 32 aa, unidentified
  source 1..32: note = methanogen bacteria
GSSFNFAWGSDSALYFIENVGGSSNLSHISNF

SEQ ID NO: 57866 - protein, 23 aa, unidentified
  source 1..23: note = methanogen bacteria
TLSGASIGVNALLNPDWQMLLNV

SEQ ID NO: 57867 - protein, 36 aa, unidentified
  source 1..36: note = methanogen bacteria
LGYMSYTSGTPIAKLVSEGTGLVFIVFPKIFNIMGP

SEQ ID NO: 57868 - protein, 25 aa, unidentified
  source 1..25: note = methanogen bacteria
YTDGIMYGTSSVDLSDYGLAMGASD

SEQ ID NO: 57869 - protein, 35 aa, unidentified
  source 1..35: note = methanogen bacteria
LSWDSLPAVAQVLVFAIPFSHPMMVMNNLVFGNIS

SEQ ID NO: 57870 - protein, 57 aa, unidentified
  source 1..57: note = methanogen bacteria
VRYPFLTVDGWFTKGLLSLPITQQISITAIDVHPPLYYLILNAVVSVLGVFNADLIL

SEQ ID NO: 57871 - protein, 33 aa, unidentified
  source 1..33: note = methanogen bacteria
RQMRSVKSGYWIEPASLKLVVDCFGSYITFYPS

SEQ ID NO: 57872 - protein, 33 aa, unidentified
  source 1..33: note = methanogen bacteria
SLDIHFIDALFENMSAWTGSGMTFFVNVEILPK

SEQ ID NO: 57873 - protein, 33 aa, unidentified
  source 1..33: note = methanogen bacteria
GLPIFDSVNLTFTSISTGGMSIKNANIGFYQNS

SEQ ID NO: 57874 - protein, 34 aa, unidentified
  source 1..34: note = methanogen bacteria
NTGVPIEELYTIISAVTTTGANVIPPQELATWKG

SEQ ID NO: 57875 - protein, 32 aa, unidentified
  source 1..32: note = methanogen bacteria
YGYDPFTALFDVISLQSNNGLSTGIVWGGLPI

SEQ ID NO: 57876 - protein, 34 aa, unidentified
  source 1..34: note = methanogen bacteria
VIDISFLDAFFENISAWTGSGLTLISDVESLPHS

SEQ ID NO: 57877 - protein, 33 aa, unidentified
  source 1..33: note = methanogen bacteria
GLPLFDSVNLTFTTISTGGMSIKNANIGFYHNN

SEQ ID NO: 57878 - protein, 34 aa, unidentified
  source 1..34: note = methanogen bacteria
ANLAPIDAMFHVISAITTTGANIASPDDMVGWAP

SEQ ID NO: 57879 - protein, 32 aa, unidentified
  source 1..32: note = methanogen bacteria
YTNDPIMTLFDVTSTIGNVGLSTGIVNGSLDP

SEQ ID NO: 57880 - protein, 13 aa, unidentified
  source 1..13: note = methanogen bacteria
VPAIAQEFAMNNV

SEQ ID NO: 57881 - protein, 11 aa, unidentified
  source 1..11: note = methanogen bacteria
YHFQYVRGWDA

SEQ ID NO: 57882 - protein, 12 aa, unidentified
  source 1..12: note = methanogen bacteria
MGTLPLATKYAG

SEQ ID NO: 57883 - protein, 44 aa, unidentified
  source 1..44: note = methanogen bacteria
YNPGILTYDSFNQLHQIATGNFNNWQPFFHTFIEMVCIKIYASP

SEQ ID NO: 57884 - protein, 10 aa, unidentified
  source 1..10: note = methanogen bacteria
GGNAWFGITA

SEQ ID NO: 57885 - protein, 40 aa, unidentified
  source 1..40: note = methanogen bacteria
ANEDGGAICSKNSVYINNCTFKDNCADNSGGAIYTYYTII

SEQ ID NO: 57886 - protein, 23 aa, unidentified
  source 1..23: note = methanogen bacteria
LFDSNKADNDGGAINAINNAQLK

SEQ ID NO: 57887 - protein, 21 aa, unidentified
  source 1..21: note = methanogen bacteria
IFTRNTAKNGGASYAYVLNSD

SEQ ID NO: 57888 - protein, 21 aa, unidentified
  source 1..21: note = methanogen bacteria
STFKDNKADNGGAIYASSALI

SEQ ID NO: 57889 - protein, 42 aa, unidentified
  source 1..42: note = methanogen bacteria
IADNCGGAIFSKNKIEAINSEFYKNNACEDGGAIFSDNAYVS

SEQ ID NO: 57890 - protein, 30 aa, unidentified
  source 1..30: note = methanogen bacteria
SFTFGWGSDPSAFFTANVGGSSNLSGITSI

SEQ ID NO: 57891 - protein, 25 aa, unidentified
  source 1..25: note = methanogen bacteria
FTLPGFELGLTTLLTPNWEMLLDIN

SEQ ID NO: 57892 - protein, 35 aa, unidentified
  source 1..35: note = methanogen bacteria
GYMSVTSSIPITELISDGTSLIFIVLPEVFEVMGP

SEQ ID NO: 57893 - protein, 25 aa, unidentified
  source 1..25: note = methanogen bacteria
YTDGVMYGADSVNLGDYGLAMGASD

SEQ ID NO: 57894 - protein, 34 aa, unidentified
  source 1..34: note = methanogen bacteria
MSWDSLPAAAQALIFAIPFSHPMMVMNNLVFGNI

SEQ ID NO: 57895 - protein, 12 aa, unidentified
  source 1..12: note = methanogen bacteria
ASGLGDEDLSAL

SEQ ID NO: 57896 - protein, 19 aa, unidentified
  source 1..19: note = methanogen bacteria
DPIISFMGADDVRDGCREY

SEQ ID NO: 57897 - protein, 10 aa, unidentified
  source 1..10: note = methanogen bacteria
IAGGTVAVMM

SEQ ID NO: 57898 - protein, 20 aa, unidentified
  source 1..20: note = methanogen bacteria
PLIGVFTTEPSMAEHRDEMV

SEQ ID NO: 57899 - protein, 31 aa, unidentified
  source 1..31: note = methanogen bacteria
LSFFKGWGTDTNAFFNNVVLEASNPGGIFHI

SEQ ID NO: 57900 - protein, 24 aa, unidentified
  source 1..24: note = methanogen bacteria
TLPGASIGIMTLLTPQPSTLTNVN

SEQ ID NO: 57901 - protein, 35 aa, unidentified
  source 1..35: note = methanogen bacteria
GFMSTTNNIPIDQLVTQGTGLAFIVFPQIFNAMGI

SEQ ID NO: 57902 - protein, 56 aa, unidentified
  source 1..56: note = methanogen bacteria
KVNLGLNVDEAFSLMITNTNFMDTISLTASDVHPPLYYLILKVFMKIFAFENIDRI

SEQ ID NO: 57903 - protein, 33 aa, unidentified
  source 1..33: note = methanogen bacteria
SQINKYQGDYWIQPLYLQQLIETYWYVFSSYTT

SEQ ID NO: 57904 - protein, 30 aa, unidentified
  source 1..30: note = methanogen bacteria
SFNFGWGNDPTSFFTSYVGGSSNLSSSTTI

SEQ ID NO: 57905 - protein, 24 aa, unidentified
  source 1..24: note = methanogen bacteria
TLPGFHMGVTTLLNPNWSALLNIN

SEQ ID NO: 57906 - protein, 35 aa, unidentified
  source 1..35: note = methanogen bacteria
GYMSLNSSIPMNELISEGTGLIFIIFPQIFNTMGM

SEQ ID NO: 57907 - protein, 44 aa, unidentified
  source 1..44: note = methanogen bacteria
YNPGILTTQSFSQLHQIASGQFNSSVPFLYTVIVMIFLKVFQTP

SEQ ID NO: 57908 - protein, 95 aa, unidentified
  source 1..95: note = methanogen bacteria
FAYHVEDAHTNSAGGVPMVWSVLRGDDWEGQAYYLTANADPVKEAQNKFYTQGKITPTESYEKLTSANYGKGSYNMVNSYALYFKDHTLTDTLFM

SEQ ID NO: 57909 - protein, 10 aa, unidentified
  source 1..10: note = methanogen bacteria
TCPLNENRFL

SEQ ID NO: 57910 - protein, 31 aa, unidentified
  source 1..31: note = methanogen bacteria
TSFSFGWGADTAAYFTNTVGGSADLAKGGIF

SEQ ID NO: 57911 - protein, 23 aa, unidentified
  source 1..23: note = methanogen bacteria
TLPGHMIGIDALLRPKWSMLLDI

SEQ ID NO: 57912 - protein, 35 aa, unidentified
  source 1..35: note = methanogen bacteria
GYMSLNSGMALSKLVTEGTGLVFIVFPMIFNVMGT

SEQ ID NO: 57913 - protein, 30 aa, unidentified
  source 1..30: note = methanogen bacteria
SLTFSWGTDTAAYFVHNVGGGENLSKIGNF

SEQ ID NO: 57914 - protein, 23 aa, unidentified
  source 1..23: note = methanogen bacteria
TLPGAGIGINALINPNWNLLWDI

SEQ ID NO: 57915 - protein, 35 aa, unidentified
  source 1..35: note = methanogen bacteria
GYMSATSGTPLVELVSEGTGLIFVVFPKIFSLMGF

SEQ ID NO: 57916 - protein, 31 aa, unidentified
  source 1..31: note = methanogen bacteria
SSFTFSWGTNAANYFVSTVGGSSNLSNASFL

SEQ ID NO: 57917 - protein, 25 aa, unidentified
  source 1..25: note = methanogen bacteria
LTLPGAGLGVSTLLSPDWGKLTDVN

SEQ ID NO: 57918 - protein, 35 aa, unidentified
  source 1..35: note = methanogen bacteria
GYMSHISGTPMVQLITEGTGLIFIVFPMIFNIMGP

SEQ ID NO: 57919 - protein, 28 aa, unidentified
  source 1..28: note = methanogen bacteria
SFTFSWGSDTTSFFANTVGGGSDFANAG

SEQ ID NO: 57920 - protein, 24 aa, unidentified
  source 1..24: note = methanogen bacteria
FTLPGHMIGIDTLLRPRWGMLWNI

SEQ ID NO: 57921 - protein, 35 aa, unidentified
  source 1..35: note = methanogen bacteria
GFMSLHSGTAMSHLVSEGTSLVFVVFPMIFNIMGP

SEQ ID NO: 57922 - protein, 44 aa, unidentified
  source 1..44: note = methanogen bacteria
FNPGIATTDTFNQFHQIASGAFTNWHPFFHTFIEMMCLSVYPST

SEQ ID NO: 57923 - protein, 29 aa, unidentified
  source 1..29: note = methanogen bacteria
ITFGWGSDTAAYFVQNVGGSENLANIGNF

SEQ ID NO: 57924 - protein, 24 aa, unidentified
  source 1..24: note = methanogen bacteria
TLPGASIGIDALIHPNWNLLSDIN

SEQ ID NO: 57925 - protein, 35 aa, unidentified
  source 1..35: note = methanogen bacteria
GYMSATSGTPLVQLVSEGTGLIFVVFPKIFSLMGV

SEQ ID NO: 57926 - protein, 30 aa, unidentified
  source 1..30: note = methanogen bacteria
SFTFNWGTNTAEYFVQTVGGSSNLSNASFL

SEQ ID NO: 57927 - protein, 24 aa, unidentified
  source 1..24: note = methanogen bacteria
TLPGAGIGINTLLKPDWNMLLDVN

SEQ ID NO: 57928 - protein, 35 aa, unidentified
  source 1..35: note = methanogen bacteria
GYMSVTAGTPMVQLVTEGTGLVFIVFPMIFNIMGP

SEQ ID NO: 57929 - protein, 30 aa, unidentified
  source 1..30: note = methanogen bacteria
SFTFSWGSDTAAYFVQNVGGSENLSKIGEF

SEQ ID NO: 57930 - protein, 23 aa, unidentified
  source 1..23: note = methanogen bacteria
TLPGASIGINALINPNWNLLWDI

SEQ ID NO: 57931 - protein, 35 aa, unidentified
  source 1..35: note = methanogen bacteria
GYMSATSGTPMVQLVSEGTGLIFVVFPKIFSLMGF

SEQ ID NO: 57932 - protein, 30 aa, unidentified
  source 1..30: note = methanogen bacteria
SFTFNWGTDTAAYFVQNVGGSSNLSNAGFL

SEQ ID NO: 57933 - protein, 24 aa, unidentified
  source 1..24: note = methanogen bacteria
TLPGAGLGINTLLTPDWGRLADVN

SEQ ID NO: 57934 - protein, 35 aa, unidentified
  source 1..35: note = methanogen bacteria
GYMSVTAGTPMTQLVTEGTGLIFVVFPMIFNIMGP

SEQ ID NO: 57935 - protein, 31 aa, unidentified
  source 1..31: note = methanogen bacteria
SSFSFQWGADAALYFVDSVGGSSNLNNIGLF

SEQ ID NO: 57936 - protein, 23 aa, unidentified
  source 1..23: note = methanogen bacteria
TLPGANIGIETLLKPDWMKLLDI

SEQ ID NO: 57937 - protein, 35 aa, unidentified
  source 1..35: note = methanogen bacteria
GYMSFTSGTPMIQLVSEGTGLIFIVFPMIFNIMGV

SEQ ID NO: 57938 - protein, 30 aa, unidentified
  source 1..30: note = methanogen bacteria
SFNFSWGADPTIFFAGFVGGSSNLANAWTL

SEQ ID NO: 57939 - protein, 25 aa, unidentified
  source 1..25: note = methanogen bacteria
FTLPGHMIGIDALIRPNWSTLLDID

SEQ ID NO: 57940 - protein, 35 aa, unidentified
  source 1..35: note = methanogen bacteria
GFMSLHSGIRLSNLATEGTGLVFNVFPMIFNVMGP

SEQ ID NO: 57941 - protein, 30 aa, unidentified
  source 1..30: note = methanogen bacteria
SFTFSWGADTAAYFTTTVGGSSDLASAGFL

SEQ ID NO: 57942 - protein, 25 aa, unidentified
  source 1..25: note = methanogen bacteria
LTLPGHMIGVDALLRPRWSMLLDIN

SEQ ID NO: 57943 - protein, 35 aa, unidentified
  source 1..35: note = methanogen bacteria
GYMSLHSGMAMSKLVTEGTGLVFVVFPMIFNIMGP

SEQ ID NO: 57944 - protein, 31 aa, unidentified
  source 1..31: note = methanogen bacteria
SSFTFRWGTDAALYFVDSVGGSSNLNNICFL

SEQ ID NO: 57945 - protein, 23 aa, unidentified
  source 1..23: note = methanogen bacteria
TLPGANIGIETLLKPDWTKLLDI

SEQ ID NO: 57946 - protein, 35 aa, unidentified
  source 1..35: note = methanogen bacteria
GYMSFTSGTPMIQLVSEGTGLIFIVFPMIFNIMGI

SEQ ID NO: 57947 - protein, 30 aa, unidentified
  source 1..30: note = methanogen bacteria
SFNLGWGNDPSSFFSHYVGGSSNLSSPITI

SEQ ID NO: 57948 - protein, 25 aa, unidentified
  source 1..25: note = methanogen bacteria
FTLPGSHLGITTLLTPNWSALYDIN

SEQ ID NO: 57949 - protein, 36 aa, unidentified
  source 1..36: note = methanogen bacteria
LGYMSVTSSTPMNELISEGTGLIFIVFPQIFNSMGI

SEQ ID NO: 57950 - protein, 30 aa, unidentified
  source 1..30: note = methanogen bacteria
SFTFGWGSDTAAYFIQNVGGSENLSNIGNF

SEQ ID NO: 57951 - protein, 23 aa, unidentified
  source 1..23: note = methanogen bacteria
TLPGASIGTDALLNPDWNLLFNI

SEQ ID NO: 57952 - protein, 35 aa, unidentified
  source 1..35: note = methanogen bacteria
GYMSATSGTPLVQLVTEGTGLIFVVFPKIFSLMGI

SEQ ID NO: 57953 - protein, 12 aa, unidentified
  source 1..12: note = methanogen bacteria
PEISSKLNFSAE

SEQ ID NO: 57954 - protein, 11 aa, unidentified
  source 1..11: note = methanogen bacteria
LHLQYVLDTTE

SEQ ID NO: 57955 - protein, 18 aa, unidentified
  source 1..18: note = methanogen bacteria
VGNRELGPQHLDFLLIQS

SEQ ID NO: 57956 - protein, 30 aa, unidentified
  source 1..30: note = methanogen bacteria
SFTFSWGNDTATYFVQNVGGGRNPADISNF

SEQ ID NO: 57957 - protein, 23 aa, unidentified
  source 1..23: note = methanogen bacteria
TLPGAGIGINALIEPNWNLLWNI

SEQ ID NO: 57958 - protein, 35 aa, unidentified
  source 1..35: note = methanogen bacteria
GYMSATSGIPLTQLVSEGTGLIFVVFPKIFTLMGV

SEQ ID NO: 57959 - protein, 30 aa, unidentified
  source 1..30: note = methanogen bacteria
SFSFGWGSDTAAYFVHNVGGSENLSKIGNF

SEQ ID NO: 57960 - protein, 24 aa, unidentified
  source 1..24: note = methanogen bacteria
TLPGASIGIDALINPNWNLLSDIN

SEQ ID NO: 57961 - protein, 35 aa, unidentified
  source 1..35: note = methanogen bacteria
GYMSATSGTPLAQLVSEGTGLIFVVFPKIFSLMGV

SEQ ID NO: 57962 - protein, 31 aa, unidentified
  source 1..31: note = methanogen bacteria
NSFNFGWGNDPTAFFTNHVGGSSNLASATTL

SEQ ID NO: 57963 - protein, 23 aa, unidentified
  source 1..23: note = methanogen bacteria
TLPGFHLGITTLLTPDWSALFNI

SEQ ID NO: 57964 - protein, 35 aa, unidentified
  source 1..35: note = methanogen bacteria
GYMSLTSSVPMNELISEGTGLVFIVFPQIFNTMGV

SEQ ID NO: 57965 - protein, 32 aa, unidentified
  source 1..32: note = methanogen bacteria
TGIGIVDSIFECMSALTGSGITIYPDVEILPY

SEQ ID NO: 57966 - protein, 33 aa, unidentified
  source 1..33: note = methanogen bacteria
GMPLFDSICNTFCIISTGGMSVKNANIGFYQND

SEQ ID NO: 57967 - protein, 34 aa, unidentified
  source 1..34: note = methanogen bacteria
SNIVPMDNLFTVVSAVTTTGASIQSATVMGGWPP

SEQ ID NO: 57968 - protein, 32 aa, unidentified
  source 1..32: note = methanogen bacteria
YGHDPFNSLFFTMSMQGNVGLEIGQISQTMEW

SEQ ID NO: 57969 - protein, 29 aa, unidentified
  source 1..29: note = methanogen bacteria
LTFGWGTDTAAYFVQNVGGSENLKNIGRF

SEQ ID NO: 57970 - protein, 23 aa, unidentified
  source 1..23: note = methanogen bacteria
TLPGASIGINALINPNWNLLWDI

SEQ ID NO: 57971 - protein, 35 aa, unidentified
  source 1..35: note = methanogen bacteria
GYMSATSGIPLVQLVSEGTGLIFVVFPKIFSLMGV

SEQ ID NO: 57972 - protein, 12 aa, unidentified
  source 1..12: note = methanogen bacteria
PDISNDLNIPLN

SEQ ID NO: 57973 - protein, 10 aa, unidentified
  source 1..10: note = methanogen bacteria
YLQVILGLDT

SEQ ID NO: 57974 - protein, 17 aa, unidentified
  source 1..17: note = methanogen bacteria
ILKNENMKSDIVGLSYS

SEQ ID NO: 57975 - protein, 33 aa, unidentified
  source 1..33: note = methanogen bacteria
VTDIGVIDSIFECMSALTGSGITIYPDVEILPH

SEQ ID NO: 57976 - protein, 33 aa, unidentified
  source 1..33: note = methanogen bacteria
GMPFFDSICNTFCIISTGGMSVKNANIGFYQND

SEQ ID NO: 57977 - protein, 34 aa, unidentified
  source 1..34: note = methanogen bacteria
SNIVPMDNLFTVVSAVTTTGASIQSSTVMGGWPP

SEQ ID NO: 57978 - protein, 32 aa, unidentified
  source 1..32: note = methanogen bacteria
YGHDPLNSLFFTISMQGNVGLEIGQISQTLEL

SEQ ID NO: 57979 - protein, 32 aa, unidentified
  source 1..32: note = methanogen bacteria
NYGLHYFGGYQPMTDNVTNIIYHPAITYSFNF

SEQ ID NO: 57980 - protein, 24 aa, unidentified
  source 1..24: note = methanogen bacteria
ITGTVNVTDIVAIIRGGLIDATSP

SEQ ID NO: 57981 - protein, 16 aa, unidentified
  source 1..16: note = methanogen bacteria
DVVTSGISNYVGGLLL

SEQ ID NO: 57982 - protein, 32 aa, unidentified
  source 1..32: note = methanogen bacteria
NYGLHFFGGYEPMVDNVTNILYHPAITYSFDF

SEQ ID NO: 57983 - protein, 24 aa, unidentified
  source 1..24: note = methanogen bacteria
MTGTVNVTDIVAILRGGLLNVTSP

SEQ ID NO: 57984 - protein, 16 aa, unidentified
  source 1..16: note = methanogen bacteria
NVVTSGISNYVGGLLL

SEQ ID NO: 57985 - protein, 31 aa, unidentified
  source 1..31: note = methanogen bacteria
SSFNFSWGADSALYFVRNVGGSSNLSNMTSF

SEQ ID NO: 57986 - protein, 23 aa, unidentified
  source 1..23: note = methanogen bacteria
TLPGAGIGINALLNPDWQMLFNV

SEQ ID NO: 57987 - protein, 35 aa, unidentified
  source 1..35: note = methanogen bacteria
GYMSYTSGTPMVELVSEGTGLVFVVFPMIFNIMGP

SEQ ID NO: 57988 - protein, 30 aa, unidentified
  source 1..30: note = methanogen bacteria
SFTFHWGTDTAAYFVQSVGGSSNLSNASFL

SEQ ID NO: 57989 - protein, 25 aa, unidentified
  source 1..25: note = methanogen bacteria
LTLPGASLGISTLLTPDWGMLLDIN

SEQ ID NO: 57990 - protein, 36 aa, unidentified
  source 1..36: note = methanogen bacteria
LGYMSTTSGTPMVQLVTEGTGLVFIVFPMIFNIMGP

SEQ ID NO: 57991 - protein, 33 aa, unidentified
  source 1..33: note = methanogen bacteria
LDMSFIDAFFENISAWTGSGLTMISDVESLPMS

SEQ ID NO: 57992 - protein, 33 aa, unidentified
  source 1..33: note = methanogen bacteria
GLPLFDAVNLTFTTISTGGMSIKNANVGFYNND

SEQ ID NO: 57993 - protein, 34 aa, unidentified
  source 1..34: note = methanogen bacteria
THMAPMNVVFHIVSAITTTGANIATSSELASWAP

SEQ ID NO: 57994 - protein, 32 aa, unidentified
  source 1..32: note = methanogen bacteria
YTDNPMNALFDVTSTIGNVGLSTGVINASLDT

SEQ ID NO: 57995 - protein, 31 aa, unidentified
  source 1..31: note = methanogen bacteria
NSFNFGWGDNPSSFFINNVGGSTNLANATSF

SEQ ID NO: 57996 - protein, 23 aa, unidentified
  source 1..23: note = methanogen bacteria
TLPNSNLGIKTLLNPNWSALLNI

SEQ ID NO: 57997 - protein, 36 aa, unidentified
  source 1..36: note = methanogen bacteria
LGYMSSVSPIPMNELISEGTGLIFIVFPQICNEMGM

SEQ ID NO: 57998 - protein, 32 aa, unidentified
  source 1..32: note = methanogen bacteria
NYGLHFFGGYQPIMDNVTNVIYHPAITYSFDF

SEQ ID NO: 57999 - protein, 24 aa, unidentified
  source 1..24: note = methanogen bacteria
MTGTVNVTDIVSIIRGGLLDVTSP

SEQ ID NO: 58000 - protein, 16 aa, unidentified
  source 1..16: note = methanogen bacteria
DVVTSGISNYVGGLLP

SEQ ID NO: 58001 - protein, 32 aa, unidentified
  source 1..32: note = methanogen bacteria
NYGLHYFGGYQPVLEPITNMTYHPAITYSFNF

SEQ ID NO: 58002 - protein, 24 aa, unidentified
  source 1..24: note = methanogen bacteria
LTGSVNITDIVLAIRSGIVNFKSP

SEQ ID NO: 58003 - protein, 16 aa, unidentified
  source 1..16: note = methanogen bacteria
DVVTNGISQYVGGMIH

SEQ ID NO: 58004 - protein, 32 aa, unidentified
  source 1..32: note = methanogen bacteria
TGTGIIDCAFECMSALTGSGITIYADVEALPY

SEQ ID NO: 58005 - protein, 33 aa, unidentified
  source 1..33: note = methanogen bacteria
GMPIFDAVCNTFSIISTGGMSIKNANIGFYQND

SEQ ID NO: 58006 - protein, 34 aa, unidentified
  source 1..34: note = methanogen bacteria
SNILPMDVLFTVVSAITTTGASIESSTVMGAWPS

SEQ ID NO: 58007 - protein, 32 aa, unidentified
  source 1..32: note = methanogen bacteria
YCHDPFNSLFFSMSMQGNIGLEIGQLSQTMEW

SEQ ID NO: 58008 - protein, 31 aa, unidentified
  source 1..31: note = methanogen bacteria
NSFSFSWGSDTAAYFVHNVGGSENLSKIGNF

SEQ ID NO: 58009 - protein, 24 aa, unidentified
  source 1..24: note = methanogen bacteria
TLPGAMIGINALLNPNWMALTDIN

SEQ ID NO: 58010 - protein, 35 aa, unidentified
  source 1..35: note = methanogen bacteria
GFMSVTSGTPMVELVSEGTGLIFVVFPKIFDMMGI

SEQ ID NO: 58011 - protein, 31 aa, unidentified
  source 1..31: note = methanogen bacteria
NYGLHYFGGYEPMINDAVKMMYHPAITYSFT

SEQ ID NO: 58012 - protein, 25 aa, unidentified
  source 1..25: note = methanogen bacteria
LTGSVNVTDIAAAVHNGLVDATSPV

SEQ ID NO: 58013 - protein, 15 aa, unidentified
  source 1..15: note = methanogen bacteria
DVVTNGISNFVGGIL

SEQ ID NO: 58014 - protein, 31 aa, unidentified
  source 1..31: note = methanogen bacteria
SSFTFSWGVDTAHYFVSTVGGSSNLSNANFL

SEQ ID NO: 58015 - protein, 24 aa, unidentified
  source 1..24: note = methanogen bacteria
TLPGAGIGVNTLLTPDWSKLADVN

SEQ ID NO: 58016 - protein, 36 aa, unidentified
  source 1..36: note = methanogen bacteria
LGYMSLTNGTPMVQLITEGTGLIFIVFPMIFNIMGP

SEQ ID NO: 58017 - protein, 32 aa, unidentified
  source 1..32: note = methanogen bacteria
NYGLHYFGGYEPMLDNVTNVMFHPAITYSFTF

SEQ ID NO: 58018 - protein, 25 aa, unidentified
  source 1..25: note = methanogen bacteria
MTGSVNITDIAAAVHNGLVDVTSPV

SEQ ID NO: 58019 - protein, 16 aa, unidentified
  source 1..16: note = methanogen bacteria
PDVVTNGISNFVGGIL

SEQ ID NO: 58020 - protein, 30 aa, unidentified
  source 1..30: note = methanogen bacteria
SFTFSWGTDAAAYFTQTVGGSSNLSNASFL

SEQ ID NO: 58021 - protein, 24 aa, unidentified
  source 1..24: note = methanogen bacteria
TLPGADIGVSTLLTPDWGKLMDVN

SEQ ID NO: 58022 - protein, 35 aa, unidentified
  source 1..35: note = methanogen bacteria
GYMSATSGTPMVQLITEGTGLIFVVFPMIFNIMGP

SEQ ID NO: 58023 - protein, 31 aa, unidentified
  source 1..31: note = methanogen bacteria
NYGLHYFGGYQPMLDNVTGVMYHPAITYSFT

SEQ ID NO: 58024 - protein, 24 aa, unidentified
  source 1..24: note = methanogen bacteria
LTGSVNVSDIAAAVHAGLVNATSP

SEQ ID NO: 58025 - protein, 15 aa, unidentified
  source 1..15: note = methanogen bacteria
DVVTSGISNFVGGIL

SEQ ID NO: 58026 - protein, 10 aa, unidentified
  source 1..10: note = methanogen bacteria
VSECGEGSLI

SEQ ID NO: 58027 - protein, 15 aa, unidentified
  source 1..15: note = methanogen bacteria
MALHIHEFALDDAFT

SEQ ID NO: 58028 - protein, 20 aa, unidentified
  source 1..20: note = methanogen bacteria
FIAGLFVTDGNMMEMEAIKY

SEQ ID NO: 58029 - protein, 32 aa, unidentified
  source 1..32: note = methanogen bacteria
NYGLHYFGGYEPILDNVTNVMYHPAITYSFTF

SEQ ID NO: 58030 - protein, 24 aa, unidentified
  source 1..24: note = methanogen bacteria
MTGSVNVTDIAAAVHNGLISSTSP

SEQ ID NO: 58031 - protein, 15 aa, unidentified
  source 1..15: note = methanogen bacteria
DVVTNGISNFVGGIL

SEQ ID NO: 58032 - protein, 30 aa, unidentified
  source 1..30: note = methanogen bacteria
SFYFGWGADTALFFVNNVGGGSNFNSPVTI

SEQ ID NO: 58033 - protein, 24 aa, unidentified
  source 1..24: note = methanogen bacteria
FTLPNFHLGISTLFKPNWNMLLDI

SEQ ID NO: 58034 - protein, 35 aa, unidentified
  source 1..35: note = methanogen bacteria
GYMSVKSGIPIDKLITDGSGLIFVVFPQIFNSMGF

SEQ ID NO: 58035 - protein, 31 aa, unidentified
  source 1..31: note = methanogen bacteria
NYGLHYFGGYEPILDNVTNVMYHPAITYSFT

SEQ ID NO: 58036 - protein, 24 aa, unidentified
  source 1..24: note = methanogen bacteria
LTGSVNVTDIVAAVHNGLVNVKSP

SEQ ID NO: 58037 - protein, 15 aa, unidentified
  source 1..15: note = methanogen bacteria
DVVTNGISNFVGGIL

SEQ ID NO: 58038 - protein, 32 aa, unidentified
  source 1..32: note = methanogen bacteria
GSSFNFSWGSDTALYFIKNVGGSSNLSNMTQI

SEQ ID NO: 58039 - protein, 24 aa, unidentified
  source 1..24: note = methanogen bacteria
TLPGAYIGINALMTPEWSLLFNVN

SEQ ID NO: 58040 - protein, 36 aa, unidentified
  source 1..36: note = methanogen bacteria
LGYMTYTSGTPLTQLVSEGTGLVFVVLPRIFDAMGP

SEQ ID NO: 58041 - protein, 31 aa, unidentified
  source 1..31: note = methanogen bacteria
SSFTFSWGTDAAYYFVSKVGGSSNLSNASFL

SEQ ID NO: 58042 - protein, 24 aa, unidentified
  source 1..24: note = methanogen bacteria
TLPGAEIGINTLLTPDWGKLMDVN

SEQ ID NO: 58043 - protein, 36 aa, unidentified
  source 1..36: note = methanogen bacteria
LGYMSFTNGTPMVQLITEGTGLIFIVFPMIFNIMGP

SEQ ID NO: 58044 - protein, 30 aa, unidentified
  source 1..30: note = methanogen bacteria
SFTLGWGNDPSSFFTSYVGGSSNLASATTI

SEQ ID NO: 58045 - protein, 25 aa, unidentified
  source 1..25: note = methanogen bacteria
FTLPGFSIGITTLLTPDWSALLNVN

SEQ ID NO: 58046 - protein, 35 aa, unidentified
  source 1..35: note = methanogen bacteria
GYMSLTSSMPMNELVSEGTGLIFIVFPQIFTTMGP

SEQ ID NO: 58047 - protein, 31 aa, unidentified
  source 1..31: note = methanogen bacteria
NYGLHFFGGYAPIADNVTGLIFHPAITYSFT

SEQ ID NO: 58048 - protein, 24 aa, unidentified
  source 1..24: note = methanogen bacteria
MTGSVNITDIAAAVHNGLVSSTSP

SEQ ID NO: 58049 - protein, 15 aa, unidentified
  source 1..15: note = methanogen bacteria
DVVTNGISNFVGGIL

SEQ ID NO: 58050 - protein, 31 aa, unidentified
  source 1..31: note = methanogen bacteria
SSINFGWGADSALYFVRNVGGSSNLANMANF

SEQ ID NO: 58051 - protein, 23 aa, unidentified
  source 1..23: note = methanogen bacteria
TLPGAGIGISALLNPDWQMLLNV

SEQ ID NO: 58052 - protein, 35 aa, unidentified
  source 1..35: note = methanogen bacteria
GYMSYTSGTPMVELVSEGTGLVFVVFPMIFNVMGF

SEQ ID NO: 58053 - protein, 30 aa, unidentified
  source 1..30: note = methanogen bacteria
SFTFAWGTDTSSYFINNVGGSANLLDATTF

SEQ ID NO: 58054 - protein, 23 aa, unidentified
  source 1..23: note = methanogen bacteria
TLPGHMIGIDALLRPKWHTLLDI

SEQ ID NO: 58055 - protein, 35 aa, unidentified
  source 1..35: note = methanogen bacteria
GYMSLHTGTALEHIVSEGTGLVFVVFPMVFNIMGP

SEQ ID NO: 58056 - protein, 31 aa, unidentified
  source 1..31: note = methanogen bacteria
SSFNFSWGADTTSFFINSVGGSTNLARPGTF

SEQ ID NO: 58057 - protein, 25 aa, unidentified
  source 1..25: note = methanogen bacteria
LTLPGHMIGIDTLLRPKWFMLLDVN

SEQ ID NO: 58058 - protein, 36 aa, unidentified
  source 1..36: note = methanogen bacteria
LGYMSLHTGTAMSKLVTEGTSLVFVVFPMIFNIMGT

SEQ ID NO: 58059 - protein, 31 aa, unidentified
  source 1..31: note = methanogen bacteria
SSINFNWGSDASLYFVNVVGGSSNLSNMTTF

SEQ ID NO: 58060 - protein, 24 aa, unidentified
  source 1..24: note = methanogen bacteria
LTLPGAYIGIETLLKPDWNMLWNI

SEQ ID NO: 58061 - protein, 36 aa, unidentified
  source 1..36: note = methanogen bacteria
LGYMSYSSGTPMIELISEGTGLVFVVFPRIFNVMGP

SEQ ID NO: 58062 - protein, 31 aa, unidentified
  source 1..31: note = methanogen bacteria
SSLSFGWGSDTALYFVKNVGGTANIADFANF

SEQ ID NO: 58063 - protein, 25 aa, unidentified
  source 1..25: note = methanogen bacteria
LTLPGAGIGIDALINPNWAGLLDIN

SEQ ID NO: 58064 - protein, 35 aa, unidentified
  source 1..35: note = methanogen bacteria
GYMTATSGTPLVQLVSEGTGLIFVVFPKIFSLMGP

SEQ ID NO: 58065 - protein, 31 aa, unidentified
  source 1..31: note = methanogen bacteria
NYGLHYFGGYEPILDNVTSFVYHPAITYSFT

SEQ ID NO: 58066 - protein, 25 aa, unidentified
  source 1..25: note = methanogen bacteria
LTGSVNVTDIATAVHNGLVDATSPV

SEQ ID NO: 58067 - protein, 15 aa, unidentified
  source 1..15: note = methanogen bacteria
DVVVNGISSFVGGIL

SEQ ID NO: 58068 - protein, 31 aa, unidentified
  source 1..31: note = methanogen bacteria
SSFNFNWGSDSALYFVKNVGGSSNLSNMANF

SEQ ID NO: 58069 - protein, 23 aa, unidentified
  source 1..23: note = methanogen bacteria
TLPGAGIGINALLKPDWQMLLNV

SEQ ID NO: 58070 - protein, 35 aa, unidentified; identical to SEQ ID NO: 57987
  source 1..35: note = methanogen bacteria

SEQ ID NO: 58071 - protein, 30 aa, unidentified
  source 1..30: note = methanogen bacteria
SFTFGWGNDPSSFFTSYVGGNSNLASATTI

SEQ ID NO: 58072 - protein, 24 aa, unidentified
  source 1..24: note = methanogen bacteria
TLPGFHIGVATLLTPDWSALFNIN

SEQ ID NO: 58073 - protein, 35 aa, unidentified
  source 1..35: note = methanogen bacteria
GYMSISSSIPMNELISEGTGLIFIIFPQIFNSMGM

SEQ ID NO: 58074 - protein, 31 aa, unidentified
  source 1..31: note = methanogen bacteria
SSFTFSWGADAAHYFVNNVGGSSNLSNASFL

SEQ ID NO: 58075 - protein, 24 aa, unidentified
  source 1..24: note = methanogen bacteria
TLPGANVGIATLLTPDWSKLVDVN

SEQ ID NO: 58076 - protein, 36 aa, unidentified
  source 1..36: note = methanogen bacteria
LGYMSVTNGTPMVQLITEGTGLIFIVFPMIFNIMGP

SEQ ID NO: 58077 - protein, 30 aa, unidentified
  source 1..30: note = methanogen bacteria
YGLHYFGGYEPMLDTVSGVLYHPAITYSFT

SEQ ID NO: 58078 - protein, 24 aa, unidentified
  source 1..24: note = methanogen bacteria
LTGSVNVTDIAVAVHNGLVDVTSP

SEQ ID NO: 58079 - protein, 15 aa, unidentified
  source 1..15: note = methanogen bacteria
DMATGGISNFVGGIL

SEQ ID NO: 58080 - protein, 32 aa, unidentified
  source 1..32: note = methanogen bacteria
NYGLHYFGGYAPMLDNVTSVMYHPAITYSFTF

SEQ ID NO: 58081 - protein, 25 aa, unidentified
  source 1..25: note = methanogen bacteria
LTGSVNVTDIAAAVHNGLVDATSPV

SEQ ID NO: 58082 - protein, 15 aa, unidentified
  source 1..15: note = methanogen bacteria
DLVTSGISNFVGGIL

SEQ ID NO: 58083 - protein, 30 aa, unidentified
  source 1..30: note = methanogen bacteria
SLTFDWGADAANYFVNTVGGSSNLADASSF

SEQ ID NO: 58084 - protein, 24 aa, unidentified
  source 1..24: note = methanogen bacteria
FTLPGAKIGIDTLIYPKWEMLWDV

SEQ ID NO: 58085 - protein, 35 aa, unidentified
  source 1..35: note = methanogen bacteria
GYMSFTSGTPMIQLITEGTGLIFIVFPRIFNVMGL

SEQ ID NO: 58086 - protein, 31 aa, unidentified
  source 1..31: note = methanogen bacteria
SSFTFSWGTDAAQYFVSNVGGSSNLSNASFL

SEQ ID NO: 58087 - protein, 23 aa, unidentified
  source 1..23: note = methanogen bacteria
TLPGAGIGISTLLTPDWAKLMDI

SEQ ID NO: 58088 - protein, 36 aa, unidentified
  source 1..36: note = methanogen bacteria
LGYMSYTGGTPMVQLITEGTGLIFIVFPMIFNIMGP

SEQ ID NO: 58089 - protein, 31 aa, unidentified
  source 1..31: note = methanogen bacteria
SSFTFSWGTDAAHYFVNNVGGSSNLSNASFL

SEQ ID NO: 58090 - protein, 24 aa, unidentified
  source 1..24: note = methanogen bacteria
LSLPGANIGIGTLLTPDWSKLLDV

SEQ ID NO: 58091 - protein, 36 aa, unidentified
  source 1..36: note = methanogen bacteria
LGYMSFTNGTPMVQLITEGTGLIFVVFPMIFNIMGP

SEQ ID NO: 58092 - protein, 30 aa, unidentified
  source 1..30: note = methanogen bacteria
SFTFGWGNDPSSFFTTYVGGSSNLTSSTTI

SEQ ID NO: 58093 - protein, 24 aa, unidentified
  source 1..24: note = methanogen bacteria
TLPGFNIGVATLLTPDWSALFNIN

SEQ ID NO: 58094 - protein, 35 aa, unidentified
  source 1..35: note = methanogen bacteria
GYMSLSSSIPMNELISEGTGLIFIIFPQIFNSMGM

SEQ ID NO: 58095 - protein, 10 aa, unidentified
  source 1..10: note = methanogen bacteria
ARYLGTTNFG

SEQ ID NO: 58096 - protein, 12 aa, unidentified
  source 1..12: note = methanogen bacteria
NMLTTSAVVGEY

SEQ ID NO: 58097 - protein, 15 aa, unidentified
  source 1..15: note = methanogen bacteria
IILFIYGPAYVNTIP

SEQ ID NO: 58098 - protein, 31 aa, unidentified
  source 1..31: note = methanogen bacteria
ASFNFSWGADSALYFVKNVGGSSNLSNVASF

SEQ ID NO: 58099 - protein, 23 aa, unidentified
  source 1..23: note = methanogen bacteria
TLPGAGIGINALLKPDWQMLFNI

SEQ ID NO: 58100 - protein, 35 aa, unidentified; identical to SEQ ID NO: 57987
  source 1..35: note = methanogen bacteria

SEQ ID NO: 58101 - protein, 30 aa, unidentified
  source 1..30: note = methanogen bacteria
SFTFSWGADAAAYFTQTVGGSSNLSNAGFL

SEQ ID NO: 58102 - protein, 24 aa, unidentified
  source 1..24: note = methanogen bacteria
TLPGAGIGMNALLSPDWSKLGDVN

SEQ ID NO: 58103 - protein, 35 aa, unidentified
  source 1..35: note = methanogen bacteria
GYMSFTAGTPMIELITEGTGLIFVVFPMIFNIMGP

SEQ ID NO: 58104 - protein, 31 aa, unidentified
  source 1..31: note = methanogen bacteria
NYGLHYFGGYEPILDNVTGITYHPAIVYSFT

SEQ ID NO: 58105 - protein, 24 aa, unidentified
  source 1..24: note = methanogen bacteria
LTGSVNITDIVYAVHNGLVDSKSP

SEQ ID NO: 58106 - protein, 15 aa, unidentified
  source 1..15: note = methanogen bacteria
DVVTNGISNFVGGIL

SEQ ID NO: 58107 - protein, 30 aa, unidentified
  source 1..30: note = methanogen bacteria
GLHYFGGYAPILDNVTSTVYHPAITYSFTF

SEQ ID NO: 58108 - protein, 24 aa, unidentified
  source 1..24: note = methanogen bacteria
LTGSVNITDIAAAVHNGLVDMTSP

SEQ ID NO: 58109 - protein, 15 aa, unidentified
  source 1..15: note = methanogen bacteria
DVVVSGITSFVGGIL

SEQ ID NO: 58110 - protein, 31 aa, unidentified
  source 1..31: note = methanogen bacteria
SSFTFSWGTDVAHYFVNNVGGSSNLSNASFL

SEQ ID NO: 58111 - protein, 25 aa, unidentified
  source 1..25: note = methanogen bacteria
LTLPGASIGINTLLTPDWTKLTDVN

SEQ ID NO: 58112 - protein, 36 aa, unidentified
  source 1..36: note = methanogen bacteria
LGYMSFTHGTPMVQLITEGTGLVFVVFPMIFNIMGP

SEQ ID NO: 58113 - protein, 31 aa, unidentified
  source 1..31: note = methanogen bacteria
NYGLHYFGGYEPILDNVTGVMYHPAITYSFT

SEQ ID NO: 58114 - protein, 25 aa, unidentified
  source 1..25: note = methanogen bacteria
LTGSVNVTDIAAAVHSGLIDATSPV

SEQ ID NO: 58115 - protein, 15 aa, unidentified
  source 1..15: note = methanogen bacteria
DVVTQGISNFVGGIL

SEQ ID NO: 58116 - protein, 31 aa, unidentified
  source 1..31: note = methanogen bacteria
SFNFGWGNDPSSFFTSYVGGSSNLASSGTII

SEQ ID NO: 58117 - protein, 23 aa, unidentified
  source 1..23: note = methanogen bacteria
TLKGFNVGITTLLTPNWSALFNI

SEQ ID NO: 58118 - protein, 35 aa, unidentified
  source 1..35: note = methanogen bacteria
GYMSLTSSVPMNELISEGTGLIFIIFPQIFNTMGL

SEQ ID NO: 58119 - protein, 31 aa, unidentified
  source 1..31: note = methanogen bacteria
NYGLHYFGGYAPIMDNVTNVMFHPAITYSFT

SEQ ID NO: 58120 - protein, 24 aa, unidentified
  source 1..24: note = methanogen bacteria
LTGSVNVTDIAAAVHNGLVNVTSP

SEQ ID NO: 58121 - protein, 15 aa, unidentified
  source 1..15: note = methanogen bacteria
DAVTSGISNFVGGIL

SEQ ID NO: 58122 - protein, 30 aa, unidentified; identical to SEQ ID NO: 58020
  source 1..30: note = methanogen bacteria

SEQ ID NO: 58123 - protein, 24 aa, unidentified
  source 1..24: note = methanogen bacteria
TLPGAGIGISTLLTPNWAMLLDVN

SEQ ID NO: 58124 - protein, 35 aa, unidentified
  source 1..35: note = methanogen bacteria
GYMSATSGTPMVQLVTEGTGLIFIVFPMIFNVMGP

SEQ ID NO: 58125 - protein, 31 aa, unidentified
  source 1..31: note = methanogen bacteria
SSFTFSWGADAAQYFTSTVGGSSNLSNASFL

SEQ ID NO: 58126 - protein, 24 aa, unidentified
  source 1..24: note = methanogen bacteria
TLPGAEIGINTLLTPDWTKLMDVN

SEQ ID NO: 58127 - protein, 36 aa, unidentified; identical to SEQ ID NO: 58043
  source 1..36: note = methanogen bacteria

SEQ ID NO: 58128 - protein, 30 aa, unidentified
  source 1..30: note = methanogen bacteria
SFTFGWGNDPSSFFASYVGGSSNLASATTI

SEQ ID NO: 58129 - protein, 23 aa, unidentified
  source 1..23: note = methanogen bacteria
TLPGFNIGITTLLTPDWSALFNI

SEQ ID NO: 58130 - protein, 35 aa, unidentified
  source 1..35: note = methanogen bacteria
GYMSLTSSIPMNELITEGTGLIFIIFPQIFNAMGS

SEQ ID NO: 58131 - protein, 31 aa, unidentified
  source 1..31: note = methanogen bacteria
SSLNFQWGNDAALYFVESVGGSSNLNNIGFL

SEQ ID NO: 58132 - protein, 23 aa, unidentified
  source 1..23: note = methanogen bacteria
TLPGANIGIETLLKPDWTKLLDI

SEQ ID NO: 58133 - protein, 35 aa, unidentified; identical to SEQ ID NO: 57946
  source 1..35: note = methanogen bacteria

SEQ ID NO: 58134 - protein, 31 aa, unidentified
  source 1..31: note = methanogen bacteria
SSFTFSWGTDAANYFVSTVGGSSNLSNASFL

SEQ ID NO: 58135 - protein, 24 aa, unidentified
  source 1..24: note = methanogen bacteria
TLPGAGIGINTLLTPDWSKLTDVN

SEQ ID NO: 58136 - protein, 36 aa, unidentified; identical to SEQ ID NO: 58043
  source 1..36: note = methanogen bacteria

SEQ ID NO: 58137 - protein, 30 aa, unidentified
  source 1..30: note = methanogen bacteria
SFTFGWGNDPASFFTSYVGGSSDLSSSTTI

SEQ ID NO: 58138 - protein, 23 aa, unidentified
  source 1..23: note = methanogen bacteria
TLPGFHIGVSTLLTPNWSMLLDI

SEQ ID NO: 58139 - protein, 36 aa, unidentified
  source 1..36: note = methanogen bacteria
GYMSLHSSIPMNELISEGTGLIFIVFPQIFNTMGGM

SEQ ID NO: 58140 - protein, 32 aa, unidentified
  source 1..32: note = methanogen bacteria
TGISIVDSIFESMSALTGSGITIYADVEVLPH

SEQ ID NO: 58141 - protein, 33 aa, unidentified
  source 1..33: note = methanogen bacteria
GMPVFDSICNTFSTISTGGMSVKNANIGYYQSD

SEQ ID NO: 58142 - protein, 34 aa, unidentified
  source 1..34: note = methanogen bacteria
SNIVPMEILFHVVSAITTTGASIQSSTVMGTWPA

SEQ ID NO: 58143 - protein, 32 aa, unidentified
  source 1..32: note = methanogen bacteria
YGHDPFNSLFFTISMQGNVGLEIGQMSQVIEW

SEQ ID NO: 58144 - protein, 32 aa, unidentified
  source 1..32: note = methanogen bacteria
NYGLHYFGGYEPILDNVTNAVYHPAITYSFTF

SEQ ID NO: 58145 - protein, 24 aa, unidentified
  source 1..24: note = methanogen bacteria
MTGTVNVTDIAAAVHNGLINVTSP

SEQ ID NO: 58146 - protein, 15 aa, unidentified
  source 1..15: note = methanogen bacteria
DIVINGISNFVGGIL

SEQ ID NO: 58147 - protein, 30 aa, unidentified
  source 1..30: note = methanogen bacteria
SFTFSWGTDAAAYFTQTVGGSSNLSNANFL

SEQ ID NO: 58148 - protein, 25 aa, unidentified
  source 1..25: note = methanogen bacteria
LTLPGAGIGINTLLTPNWGMLLNVN

SEQ ID NO: 58149 - protein, 36 aa, unidentified
  source 1..36: note = methanogen bacteria
LGYMSATAGTPMTQLITEGTGLIFVVFPMIFNIMGP

SEQ ID NO: 58150 - protein, 31 aa, unidentified
  source 1..31: note = methanogen bacteria
SSVTFSWGSDVAAYFVQNVGGSSNLSNLGSL

SEQ ID NO: 58151 - protein, 23 aa, unidentified
  source 1..23: note = methanogen bacteria
TLPGASIGIQTLLQPDWSKLTDI

SEQ ID NO: 58152 - protein, 35 aa, unidentified
  source 1..35: note = methanogen bacteria
GFMSFSTGTPMVQLVSEGTGLIFVVFPMIFNIMGI

SEQ ID NO: 58153 - protein, 29 aa, unidentified
  source 1..29: note = methanogen bacteria
FTSAWGSDTTSFFVNNVGGSSNLTSSVSI

SEQ ID NO: 58154 - protein, 23 aa, unidentified
  source 1..23: note = methanogen bacteria
SLPGSFSGISTLFTPNWNALYDI

SEQ ID NO: 58155 - protein, 35 aa, unidentified
  source 1..35: note = methanogen bacteria
GYMSLMSSVPINELITSGPSLIFVVFPQIFNVMGP

SEQ ID NO: 58156 - protein, 31 aa, unidentified
  source 1..31: note = methanogen bacteria
SSFNFAWGSDVVGYFTNSVGGSSNLSLTTSL

SEQ ID NO: 58157 - protein, 24 aa, unidentified
  source 1..24: note = methanogen bacteria
TLPGANIGINALLTPDWYKLLDVN

SEQ ID NO: 58158 - protein, 35 aa, unidentified
  source 1..35: note = methanogen bacteria
GFMSLNSGLPIAQLVSEGTGLIFMVLPMIFNKMGL

SEQ ID NO: 58159 - protein, 30 aa, unidentified
  source 1..30: note = methanogen bacteria
SINFSWGSDPALYFANSVGGSPDLSQITSF

SEQ ID NO: 58160 - protein, 25 aa, unidentified
  source 1..25: note = methanogen bacteria
ISLPGSAIGINTLLNPDWNSLTKVE

SEQ ID NO: 58161 - protein, 35 aa, unidentified
  source 1..35: note = methanogen bacteria
GYMSATAGTPIVHLISEGTGLVFIVFPMIFNIMGP

SEQ ID NO: 58162 - protein, 21 aa, unidentified
  source 1..21: note = methanogen bacteria
MSGLDSFIDSLSDSVNDGIAF

SEQ ID NO: 58163 - protein, 25 aa, unidentified
  source 1..25: note = methanogen bacteria
NLGGVPHAFKMIFEYAFTVPSALGG

SEQ ID NO: 58164 - protein, 30 aa, unidentified
  source 1..30: note = methanogen bacteria
SYGNFESILAFGEKGSVLVQSIASESVGND

SEQ ID NO: 58165 - protein, 30 aa, unidentified
  source 1..30: note = methanogen bacteria
SFNFGWGNDPASFFTSYVGGSSNLASFTTI

SEQ ID NO: 58166 - protein, 24 aa, unidentified
  source 1..24: note = methanogen bacteria
TLPGFNMGIATLLNPNWSALLNIN

SEQ ID NO: 58167 - protein, 35 aa, unidentified
  source 1..35: note = methanogen bacteria
GYMSMASSIPMDELITQGTGLIFIVFPQIFNSMGI

SEQ ID NO: 58168 - protein, 14 aa, unidentified
  source 1..14: note = methanogen bacteria
IDVLEFDIIQDQTV

SEQ ID NO: 58169 - protein, 44 aa, unidentified
  source 1..44: note = methanogen bacteria
YNPGILTAASFSQLHQIATGEFTGAYPILHTIIEMICLKIYASP

SEQ ID NO: 58170 - protein, 75 aa, unidentified
  source 1..75: note = methanogen bacteria
IYQTDANNNFPANDAFEDGVNLENAKSQFFKGINDVPKEGFENATQVNVKTDKFKSLNSIVDMTRENIILDGLLN

SEQ ID NO: 58171 - protein, 12 aa, unidentified
  source 1..12: note = methanogen bacteria
PSIAAEYGMSNI

SEQ ID NO: 58172 - protein, 12 aa, unidentified
  source 1..12: note = methanogen bacteria
YHLQYIKGLDSQ

SEQ ID NO: 58173 - protein, 18 aa, unidentified
  source 1..18: note = methanogen bacteria
IMGDVAIIEPYYPLLVQS

SEQ ID NO: 58174 - protein, 30 aa, unidentified
  source 1..30: note = methanogen bacteria
SFNFGWGTDTAAYFANTVGGSSNLSNSGFL

SEQ ID NO: 58175 - protein, 24 aa, unidentified
  source 1..24: note = methanogen bacteria
TLPGAGIGIDALLKPNWAMLLDVN

SEQ ID NO: 58176 - protein, 35 aa, unidentified
  source 1..35: note = methanogen bacteria
GFMSLNSGIPINELVTEGTGLIFIVFPRIFNLMGP

SEQ ID NO: 58177 - protein, 30 aa, unidentified
  source 1..30: note = methanogen bacteria
SFTFGWGTDTVSYFTHTVGGSSNLESAGFL

SEQ ID NO: 58178 - protein, 25 aa, unidentified
  source 1..25: note = methanogen bacteria
LTLPGAGIGINTLLTPDWSKLLDVN

SEQ ID NO: 58179 - protein, 35 aa, unidentified
  source 1..35: note = methanogen bacteria
GYMSHTAGTPMIQLITEGTGLIFIVFPMIFNIMGP

SEQ ID NO: 58180 - protein, 52 aa, unidentified
  source 1..52: note = methanogen bacteria
LSNMMIHVDEYWTVSLINLPFIEGMRVAACDVHPPLHYLIIYALSPITHNSL

SEQ ID NO: 58181 - protein, 34 aa, unidentified
  source 1..34: note = methanogen bacteria
RQIGTQMNVTYKDMTLADIFNYITSFAINNPDFT

SEQ ID NO: 58182 - protein, 28 aa, unidentified
  source 1..28: note = methanogen bacteria
SFNFGWGNDPASFFTNYVGGSSNLTSAT

SEQ ID NO: 58183 - protein, 25 aa, unidentified
  source 1..25: note = methanogen bacteria
FTLPGFNTGITTLLTPDWSALFNIN

SEQ ID NO: 58184 - protein, 35 aa, unidentified
  source 1..35: note = methanogen bacteria
GYMSLTSSIPMNELISEGTGLIFIVFPHIFNTMGV

SEQ ID NO: 58185 - protein, 29 aa, unidentified
  source 1..29: note = methanogen bacteria
NRCDGQGDCIKNCPSEAIRFVDNKSFSCM

SEQ ID NO: 58186 - protein, 16 aa, unidentified
  source 1..16: note = methanogen bacteria
PNHAIFKNKYGGYVVD

SEQ ID NO: 58187 - protein, 15 aa, unidentified
  source 1..15: note = methanogen bacteria
KFTCPIESIHLDNGV

SEQ ID NO: 58188 - protein, 46 aa, unidentified
  source 1..46: note = methanogen bacteria
VKCGRCAYYCPTRAIEVIIQDEGYCVGCKVCEDLCPTGALKDGQYD

SEQ ID NO: 58189 - protein, 34 aa, unidentified
  source 1..34: note = methanogen bacteria
ISDALSVKDFEIVRSIKDDTLYSNAEGSIVSCLN

SEQ ID NO: 58190 - protein, 22 aa, unidentified
  source 1..22: note = methanogen bacteria
GLCVDTFDSPAMVRKLNALRYD

SEQ ID NO: 58191 - protein, 12 aa, unidentified
  source 1..12: note = methanogen bacteria
LTENEDNKLFGY

SEQ ID NO: 58192 - protein, 14 aa, unidentified
  source 1..14: note = methanogen bacteria
GKCVEVCNEDARNF

SEQ ID NO: 58193 - protein, 25 aa, unidentified
  source 1..25: note = methanogen bacteria
AELCPKEAITLKKGKINVDLDECIM

SEQ ID NO: 58194 - protein, 21 aa, unidentified
  source 1..21: note = methanogen bacteria
ETCGIHCPKDAIPKKSSVKYE

SEQ ID NO: 58195 - protein, 10 aa, unidentified
  source 1..10: note = methanogen bacteria
NYIDENLCVK

SEQ ID NO: 58196 - protein, 11 aa, unidentified
  source 1..11: note = methanogen bacteria
PEDAIYTIDIS

SEQ ID NO: 58197 - protein, 31 aa, unidentified
  source 1..31: note = methanogen bacteria
SSFTFSWGNDVALYFVKNVGGSSNLSNLSSF

SEQ ID NO: 58198 - protein, 23 aa, unidentified
  source 1..23: note = methanogen bacteria
TLPGANIGIQTLLQPDWSKLTDI

SEQ ID NO: 58199 - protein, 35 aa, unidentified
  source 1..35: note = methanogen bacteria
GFMSFSSGTPMVQLVSEGTGLIFVVFPMIFNIMGA

SEQ ID NO: 58200 - protein, 34 aa, unidentified
  source 1..34: note = methanogen bacteria
MYLTTNKCDGQGDCIRNCPSEAIRFVDNKAFSCM

SEQ ID NO: 58201 - protein, 47 aa, unidentified
  source 1..47: note = methanogen bacteria
EACPNHAIFKNKYGGYVVDRAKCNGCGVCQFTCPIESIHLDDGIVKG

SEQ ID NO: 58202 - protein, 48 aa, unidentified
  source 1..48: note = methanogen bacteria
VKCGRCAYYCPTRSIEVIIQDEGYCVGCKVCEDVCPTGALKDGEYDKS

SEQ ID NO: 58203 - protein, 34 aa, unidentified
  source 1..34: note = methanogen bacteria
INEALCVDDFKIKRSIKDDTLYSNVEGSIVSCLN

SEQ ID NO: 58204 - protein, 45 aa, unidentified
  source 1..45: note = methanogen bacteria
NCPVSSLTESEDNKLFGYCVSCGKCVNECKEDARNFQVISWDGEV

SEQ ID NO: 58205 - protein, 68 aa, unidentified
  source 1..68: note = methanogen bacteria
GICAELCPEDAITLQRGAINVDLDKCIMCETCAIHCPKDAIPKTTSVKYEISGGFNYIDDNLCVKCGL

SEQ ID NO: 58206 - protein, 15 aa, unidentified
  source 1..15: note = methanogen bacteria
AINAVEIPSDEVNLG

SEQ ID NO: 58207 - protein, 51 aa, unidentified
  source 1..51: note = methanogen bacteria
LTQVITNINEFFTLTLINFPISDILHILGGETNPPLYFLLVKGLSKLANDF

SEQ ID NO: 58208 - protein, 29 aa, unidentified
  source 1..29: note = methanogen bacteria
KLLQSMNPLGNLTTDSIIQSFAHFAYSGD

SEQ ID NO: 58209 - protein, 35 aa, unidentified
  source 1..35: note = methanogen bacteria
MYLTTNKCDGQGDCIRNCPSEAIRFIDNTSFSCMC

SEQ ID NO: 58210 - protein, 48 aa, unidentified
  source 1..48: note = methanogen bacteria
EACPNHAIFENKYGGYVVDRAKCNGCGVCEFTCPIESIHLDNGIVKGI

SEQ ID NO: 58211 - protein, 54 aa, unidentified
  source 1..54: note = methanogen bacteria
EKCVKCGRCAYYCPTRSIEVIIQDEGYCVGCKVCEDLCPTGALKDGEYDKSLCT

SEQ ID NO: 58212 - protein, 50 aa, unidentified
  source 1..50: note = methanogen bacteria
ENCVNDALSVNDFKIIRNIKDDTLYSNVEGSIVSCLNCGLCKETFDSPAL

SEQ ID NO: 58213 - protein, 24 aa, unidentified
  source 1..24: note = methanogen bacteria
DICPEEAIYTVEISNDEANLGTKN

SEQ ID NO: 58214 - protein, 15 aa, unidentified
  source 1..15: note = methanogen bacteria
DKCIYCGACMNICPS

SEQ ID NO: 58215 - protein, 10 aa, unidentified
  source 1..10: note = methanogen bacteria
ARYLGTYDYG

SEQ ID NO: 58216 - protein, 10 aa, unidentified
  source 1..10: note = methanogen bacteria
LSGSYAVGLF

SEQ ID NO: 58217 - protein, 17 aa, unidentified
  source 1..17: note = methanogen bacteria
KDIIYIIYGSEYVVGAN

SEQ ID NO: 58218 - protein, 13 aa, unidentified
  source 1..13: note = methanogen bacteria
YDLIAIDDSNLTL

SEQ ID NO: 58219 - protein, 31 aa, unidentified
  source 1..31: note = methanogen bacteria
SSFTFSWGNDVALYFVQNVGGSSNLSNLSSF

SEQ ID NO: 58220 - protein, 23 aa, unidentified
  source 1..23: note = methanogen bacteria
TLPGANIGIQTLLQPDWSKLTDI

SEQ ID NO: 58221 - protein, 34 aa, unidentified
  source 1..34: note = methanogen bacteria
GFMSFSTGTPMVQLISEGTGLIFVVFPMIFNIMG

SEQ ID NO: 58222 - protein, 43 aa, unidentified
  source 1..43: note = methanogen bacteria
NPGIATHDTFNQLHQIASGHFTNWHPFFHTFISMLCLNVYPNT

SEQ ID NO: 58223 - protein, 31 aa, unidentified
  source 1..31: note = methanogen bacteria
SSFSFSWGNDVALYFVKNVGGSSNLSNLGSF

SEQ ID NO: 58224 - protein, 23 aa, unidentified
  source 1..23: note = methanogen bacteria
TLPGANIGIQTLLQPDWSKLFDI

SEQ ID NO: 58225 - protein, 35 aa, unidentified
  source 1..35: note = methanogen bacteria
GFMSFSTGTPMVQLVSEGTGLIFVVFPMIFNIMGF

SEQ ID NO: 58226 - protein, 15 aa, unidentified
  source 1..15: note = methanogen bacteria
GRSARVVDSVASGEY

SEQ ID NO: 58227 - protein, 22 aa, unidentified
  source 1..22: note = methanogen bacteria
MKQLRNILGFHSLVADLNTDVG

SEQ ID NO: 58228 - protein, 56 aa, unidentified
  source 1..56: note = methanogen bacteria
FMGGISHAVDVYAPDHSGDPQYEQGIYDYFQKVGSINDIKSDNLVMNIVDSILQDA

SEQ ID NO: 58229 - protein, 20 aa, unidentified
  source 1..20: note = methanogen bacteria
IFANSAQNKTVVNKASDNKT

SEQ ID NO: 58230 - protein, 97 aa, unidentified
  source 1..97: note = methanogen bacteria
NVILSLTEVTNVTEAVVGESIKYTITIHNSGLSDATDIKVWNILPAGVKYVSGADTYNETTRNATWTIDKIETGKSARFVLVIKVIQAGKLNNTFFA

SEQ ID NO: 58231 - protein, 99 aa, unidentified
  source 1..99: note = methanogen bacteria
KTVVNRTSDNITVIPNVVLSVDKSVDVSYVVVGDLVKYIIIVHNDGLSDATDVKVWDVLPVGVMYVSGADAYDEATHNATWTIAKIEAGKSASVVLVVN

SEQ ID NO: 58232 - protein, 74 aa, unidentified
  source 1..74: note = methanogen bacteria
RGNDSAFAYCCENTTVVNGTCGVVIIWNLEYSGLTDANDQFKLSAVDFAFGQSNSISHRKNNNPSNETFNFIVK

SEQ ID NO: 58233 - protein, 31 aa, unidentified
  source 1..31: note = methanogen bacteria
NSINFSWGTDTAAYFVQNVGGGSNLSKIGNF

SEQ ID NO: 58234 - protein, 24 aa, unidentified
  source 1..24: note = methanogen bacteria
TLPGANIGIDALLKPNWNALLDVN

SEQ ID NO: 58235 - protein, 35 aa, unidentified
  source 1..35: note = methanogen bacteria
GYMTATSGTPLVEIVSEGTGLIFVVFPRIFDIMGL

SEQ ID NO: 58236 - protein, 31 aa, unidentified
  source 1..31: note = methanogen bacteria
NSFTFNWGSDPAAYFVHNVGGSDNLSNIWNF

SEQ ID NO: 58237 - protein, 24 aa, unidentified
  source 1..24: note = methanogen bacteria
TLPGAIIGINALLNPNWNALLDVN

SEQ ID NO: 58238 - protein, 35 aa, unidentified
  source 1..35: note = methanogen bacteria
GYMSATSGTPLAEIVSEGTGLIFVVFPKIFDLMGF

SEQ ID NO: 58239 - protein, 11 aa, unidentified
  source 1..11: note = methanogen bacteria
VMGGWTLTDME

SEQ ID NO: 58240 - protein, 23 aa, unidentified
  source 1..23: note = methanogen bacteria
GHFEFSNITEAWRFPVDGRDDIA

SEQ ID NO: 58241 - protein, 27 aa, unidentified
  source 1..27: note = methanogen bacteria
YGEIGQAGVVGNDYHSLYPIAIAAFGD

SEQ ID NO: 58242 - protein, 11 aa, unidentified
  source 1..11: note = methanogen bacteria
PSEAIRFVDNK

SEQ ID NO: 58243 - protein, 23 aa, unidentified
  source 1..23: note = methanogen bacteria
YYCPTRAIEVIIQDDGYCVGCKV

SEQ ID NO: 58244 - protein, 14 aa, unidentified
  source 1..14: note = methanogen bacteria
EDVCPTGALKDGLY

SEQ ID NO: 58245 - protein, 10 aa, unidentified
  source 1..10: note = methanogen bacteria
NVCKEDARNF

SEQ ID NO: 58246 - protein, 16 aa, unidentified
  source 1..16: note = methanogen bacteria
VDAISLKRGSINVDLD

SEQ ID NO: 58247 - protein, 12 aa, unidentified
  source 1..12: note = methanogen bacteria
VMGGWELSDMQN

SEQ ID NO: 58248 - protein, 23 aa, unidentified
  source 1..23: note = methanogen bacteria
GNFQFSNISNAWHFPVVGYSDMM

SEQ ID NO: 58249 - protein, 28 aa, unidentified
  source 1..28: note = methanogen bacteria
YGEIGQGGLEAAGYHSLHPIAIDAFGDV

SEQ ID NO: 58250 - protein, 12 aa, unidentified
  source 1..12: note = methanogen bacteria
VMGGWELSDMQN

SEQ ID NO: 58251 - protein, 23 aa, unidentified
  source 1..23: note = methanogen bacteria
GNFQFSNISNAWHFPVVGYSDMM

SEQ ID NO: 58252 - protein, 28 aa, unidentified
  source 1..28: note = methanogen bacteria
YGEIGQGGLEAAGYHSLHPIAIDAFGEV

SEQ ID NO: 58253 - protein, 10 aa, unidentified
  source 1..10: note = methanogen bacteria
ARYLGTTNFG

SEQ ID NO: 58254 - protein, 12 aa, unidentified
  source 1..12: note = methanogen bacteria
NMLTTSAVVGEY

SEQ ID NO: 58255 - protein, 15 aa, unidentified
  source 1..15: note = methanogen bacteria
IIMFMYGSAYVNTVP

SEQ ID NO: 58256 - protein, 10 aa, unidentified
  source 1..10: note = methanogen bacteria
ARYLGTFNFG

SEQ ID NO: 58257 - protein, 11 aa, unidentified
  source 1..11: note = methanogen bacteria
FMSGSVAVGLF

SEQ ID NO: 58258 - protein, 15 aa, unidentified
  source 1..15: note = methanogen bacteria
DIINIIFGAEFLDAG

SEQ ID NO: 58259 - protein, 10 aa, unidentified
  source 1..10: note = methanogen bacteria
TKSFTTAEYG

SEQ ID NO: 58260 - protein, 13 aa, unidentified
  source 1..13: note = methanogen bacteria
GPIADALFNGSMQ

SEQ ID NO: 58261 - protein, 14 aa, unidentified
  source 1..14: note = methanogen bacteria
LYVITTPEIALGGY

SEQ ID NO: 58262 - protein, 48 aa, unidentified
  source 1..48: note = methanogen bacteria
MAFVGDDIHYAKILSNQSLSSFLTFRYYEWSSRLIIDCITVILAKENY

SEQ ID NO: 58263 - protein, 41 aa, unidentified
  source 1..41: note = methanogen bacteria
APGNSKRVIAETARFYAEYVNFGIIEKLYLGTIPTIGILLK

SEQ ID NO: 58264 - protein, 51 aa, unidentified
  source 1..51: note = methanogen bacteria
IDITSIPTYLKIGLMHNPIVISVFSTVDSITKSMPLINDTIRLLTYKGLPN

SEQ ID NO: 58265 - protein, 10 aa, unidentified
  source 1..10: note = methanogen bacteria
SPTVFASGSR

SEQ ID NO: 58266 - protein, 44 aa, unidentified
  source 1..44: note = methanogen bacteria
FNPGFLTFDSYNQMHQIATNSYNNWHPFFHTFIEMLCLKLYASP

SEQ ID NO: 58267 - protein, 44 aa, unidentified
  source 1..44: note = methanogen bacteria
FNPGFLAYDSYNQLHQIATNSYNNWHPFFHTFIEMLCLKVYASP

SEQ ID NO: 58268 - protein, 48 aa, unidentified
  source 1..48: note = methanogen bacteria
MSFIGDDIWYAKVLSNQPLVNFLSFRYYEWSSRLLIDCITVILAKENY

SEQ ID NO: 58269 - protein, 40 aa, unidentified
  source 1..40: note = methanogen bacteria
SPGNDKRVIAETARFYVEYANFGIIEKLYLGTIPTIGILL

SEQ ID NO: 58270 - protein, 51 aa, unidentified
  source 1..51: note = methanogen bacteria
IDITSIPNYLKIGLMHNPIVVSAFSTVDSITKSMPLINDTIHLFTYKGLPN

SEQ ID NO: 58271 - protein, 10 aa, unidentified
  source 1..10: note = methanogen bacteria
SPTVFASGSR

SEQ ID NO: 58272 - protein, 43 aa, unidentified
  source 1..43: note = methanogen bacteria
NPGIATIDTFNQLHQIASGHFTNWHPFFHTFIEMLCLRIYPST

SEQ ID NO: 58273 - protein, 12 aa, unidentified
  source 1..12: note = methanogen bacteria
PNMLIDLNLTAD

SEQ ID NO: 58274 - protein, 11 aa, unidentified
  source 1..11: note = methanogen bacteria
FHLRYVLDYEE

SEQ ID NO: 58275 - protein, 19 aa, unidentified
  source 1..19: note = methanogen bacteria
FIDKQPLTLKYLNPLIIKS

SEQ ID NO: 58276 - protein, 10 aa, unidentified
  source 1..10: note = methanogen bacteria
IDGLGASAVI

SEQ ID NO: 58277 - protein, 19 aa, unidentified
  source 1..19: note = methanogen bacteria
KPICVMANIGEYSNMIYAY

SEQ ID NO: 58278 - protein, 19 aa, unidentified
  source 1..19: note = methanogen bacteria
NPIISLFSSEYLVVREVRN

SEQ ID NO: 58279 - protein, 86 aa, unidentified
  source 1..86: note = methanogen bacteria
KFEELRQLLEQLKDGDTFDFDRDCLFEIDGDLTINANNITINGNGYKIYGNDSLSCLFNIFGDNVRIIGLTFDFMSQCYSCPSFIT

SEQ ID NO: 58280 - protein, 23 aa, unidentified
  source 1..23: note = methanogen bacteria
GNNGMLVNCTFMGNAAKVGGTVN

SEQ ID NO: 58281 - protein, 11 aa, unidentified
  source 1..11: note = methanogen bacteria
GDNGLIDNCVF

SEQ ID NO: 58282 - protein, 16 aa, unidentified
  source 1..16: note = methanogen bacteria
GLLTGCSFIGNIAEFG

SEQ ID NO: 58283 - protein, 18 aa, unidentified
  source 1..18: note = methanogen bacteria
IIDNNEFIDNCALYAGGA

SEQ ID NO: 58284 - protein, 76 aa, unidentified
  source 1..76: note = methanogen bacteria
HSFIDGYVNDIDLDYLSTYQCVLGFADEYINLYPLVYAANMNAGVKYYNDDLYSYGNYNSENGEFTFNLVKEFRDF

SEQ ID NO: 58285 - protein, 10 aa, unidentified
  source 1..10: note = methanogen bacteria
TKSFTTAEYG

SEQ ID NO: 58286 - protein, 13 aa, unidentified
  source 1..13: note = methanogen bacteria
NAIANALFNGSMQ

SEQ ID NO: 58287 - protein, 14 aa, unidentified
  source 1..14: note = methanogen bacteria
LYIITTPEIALGGY

SEQ ID NO: 58288 - protein, 10 aa, unidentified
  source 1..10: note = methanogen bacteria
TKSFTTAEYG

SEQ ID NO: 58289 - protein, 13 aa, unidentified
  source 1..13: note = methanogen bacteria
NTIANALFNGSMQ

SEQ ID NO: 58290 - protein, 14 aa, unidentified
  source 1..14: note = methanogen bacteria
LYIITTPEIALGGY

SEQ ID NO: 58291 - protein, 12 aa, unidentified
  source 1..12: note = methanogen bacteria
PAISEYFTISLN

SEQ ID NO: 58292 - protein, 11 aa, unidentified
  source 1..11: note = methanogen bacteria
FYTEKILGISS

SEQ ID NO: 58293 - protein, 27 aa, unidentified
  source 1..27: note = methanogen bacteria
LSLSIPEGLLTNTIIRGSGIQEFLTGM

SEQ ID NO: 58294 - protein, 42 aa, unidentified
  source 1..42: note = methanogen bacteria
NPGIATVDSINQLHQIASGHFTNWHPFFHTFIEMLCLKIYPS

SEQ ID NO: 58295 - protein, 48 aa, unidentified
  source 1..48: note = methanogen bacteria
MGLMGDDVRFSKVLSNHTVIDYAYMRYHDWSSRMIIESVLISISHVNM

SEQ ID NO: 58296 - protein, 41 aa, unidentified
  source 1..41: note = methanogen bacteria
CPGNAVRVAAETARWYPEFASFGLMQKLYLGLVPTFGLLFE

SEQ ID NO: 58297 - protein, 55 aa, unidentified
  source 1..55: note = methanogen bacteria
DIAHLQDSLGAMGSVASLIKIPIVSSILGVFKSIVGILPGLENTIYLLTYEGIPK

SEQ ID NO: 58298 - protein, 10 aa, unidentified
  source 1..10: note = methanogen bacteria
TPTVFASGYR

SEQ ID NO: 58299 - protein, 47 aa, unidentified
  source 1..47: note = methanogen bacteria
TFIGDDIGYANVLSNQSLTDFISFRYHEWSSRLIIDCITVILAKENY

SEQ ID NO: 58300 - protein, 41 aa, unidentified
  source 1..41: note = methanogen bacteria
TPGNAKRVIVETARYYPEYVNFGIIEKLYLGTIPTIGILLK

SEQ ID NO: 58301 - protein, 51 aa, unidentified
  source 1..51: note = methanogen bacteria
IDISSIPEYLNIGLMHNPTVVSAFSAVDSISKCIPLIYDTLSLFAYKGLPN

SEQ ID NO: 58302 - protein, 10 aa, unidentified
  source 1..10: note = methanogen bacteria
SPTIFESGSR

SEQ ID NO: 58303 - protein, 44 aa, unidentified
  source 1..44: note = methanogen bacteria
FNPGILTVNSYSILHQIASGEFVGPYSIFYTFIVMVCLKIYPSA

SEQ ID NO: 58304 - protein, 73 aa, unidentified
  source 1..73: note = methanogen bacteria
VFNVHDSNEKLIESNGINLEKSKYDFFSRINENPSASYESATSINQGSDKYTSMNGFVSAFSNNPILGTLFEN

SEQ ID NO: 58305 - protein, 48 aa, unidentified
  source 1..48: note = methanogen bacteria
MGFIGDDIWYSKVLSRYTLPDFLSYRYYEWSGRLVIDAITIILTKESY

SEQ ID NO: 58306 - protein, 41 aa, unidentified
  source 1..41: note = methanogen bacteria
CPGNAERVIAETGRFYAEYVNFGIIEKLYLGTIPTIGIFLK

SEQ ID NO: 58307 - protein, 50 aa, unidentified
  source 1..50: note = methanogen bacteria
IDISSIPRYLNIGLMHEPIVKSLFSTVNSITKSIPLINSTIHVFTYKGIP

SEQ ID NO: 58308 - protein, 10 aa, unidentified
  source 1..10: note = methanogen bacteria
SPTIFASGSR

SEQ ID NO: 58309 - protein, 13 aa, unidentified
  source 1..13: note = methanogen bacteria
LQYLATNAAVGMY

SEQ ID NO: 58310 - protein, 15 aa, unidentified
  source 1..15: note = methanogen bacteria
PLMTLIYGSQYAGSG

SEQ ID NO: 58311 - protein, 52 aa, unidentified
  source 1..52: note = methanogen bacteria
SVDFYNKIYNQSTPIGDMNFIIPVLENFTIKFSKDYVSNCVFTNNVANGRGG

SEQ ID NO: 58312 - protein, 12 aa, unidentified
  source 1..12: note = methanogen bacteria
STFTSNKAGEKG

SEQ ID NO: 58313 - protein, 15 aa, unidentified
  source 1..15: note = methanogen bacteria
SKFTGNSASKYGGAV

SEQ ID NO: 58314 - protein, 80 aa, unidentified
  source 1..80: note = methanogen bacteria
HESSGHYEGSKWISEVKYFKNLIQTSSFTKNTASKGGAIYGFKSSSSDSHSAKAVKCNFTNNKATTGRDIFGATSSNCIY

SEQ ID NO: 58315 - protein, 85 aa, unidentified
  source 1..85: note = methanogen bacteria
TVTIKKSASKLTLTAKLTKGKTLIKGKKITFTFNGKTYSAKTNSKGIAKITISKTVLKKLKVGKTIKYQAKYGSLTVKKSAKVKK

SEQ ID NO: 58316 - protein, 43 aa, unidentified
  source 1..43: note = methanogen bacteria
YMPGILTFDSFNQLHQIAGNNYNNWQPFFHTFIEMLCIKVYPS

SEQ ID NO: 58317 - protein, 46 aa, unidentified
  source 1..46: note = methanogen bacteria
GFLGDDEGYSKLLSDYPLTRLIVDRYNEWSSRVIIDALTIILSREF

SEQ ID NO: 58318 - protein, 41 aa, unidentified
  source 1..41: note = methanogen bacteria
CPGNAERTVIETGRYYAEYANFGIVEKLYLGTIPTIEILLK

SEQ ID NO: 58319 - protein, 52 aa, unidentified
  source 1..52: note = methanogen bacteria
VDISSINTHLNIGLMHKPVVASLLSAAKTVTESVPLVNDAIGLFSYKGIPKT

SEQ ID NO: 58320 - protein, 10 aa, unidentified
  source 1..10: note = methanogen bacteria
SPTIFESGSR

SEQ ID NO: 58321 - protein, 11 aa, unidentified
  source 1..11: note = methanogen bacteria
SGLGHVEVSAV

SEQ ID NO: 58322 - protein, 19 aa, unidentified
  source 1..19: note = methanogen bacteria
DKILYVVGAGVSFEYCYDY

SEQ ID NO: 58323 - protein, 11 aa, unidentified
  source 1..11: note = methanogen bacteria
IYEGLVYITAY

SEQ ID NO: 58324 - protein, 18 aa, unidentified
  source 1..18: note = methanogen bacteria
FLSYTLYQTKDMVVINQI

SEQ ID NO: 58325 - protein, 12 aa, unidentified
  source 1..12: note = methanogen bacteria
PQIAVDLNFNID

SEQ ID NO: 58326 - protein, 11 aa, unidentified
  source 1..11: note = methanogen bacteria
FHLLYINDYGE

SEQ ID NO: 58327 - protein, 17 aa, unidentified
  source 1..17: note = methanogen bacteria
IVGGQLGDTNVDYLLIV

SEQ ID NO: 58328 - protein, 17 aa, unidentified
  source 1..17: note = methanogen bacteria
MSIADTLNGPISDAFYF

SEQ ID NO: 58329 - protein, 26 aa, unidentified
  source 1..26: note = methanogen bacteria
LNISGVVNAFVMIFQYAFNWQSMFGG

SEQ ID NO: 58330 - protein, 31 aa, unidentified
  source 1..31: note = methanogen bacteria
SYGSYDQILAIGAKGAPLVQNVIASTAIGEA

SEQ ID NO: 58331 - protein, 10 aa, unidentified
  source 1..10: note = methanogen bacteria
MNPNGPFSNS

SEQ ID NO: 58332 - protein, 16 aa, unidentified
  source 1..16: note = methanogen bacteria
PMVVVNDQTGMYSTGP

SEQ ID NO: 58333 - protein, 10 aa, unidentified
  source 1..10: note = methanogen bacteria
TKNFSTADYG

SEQ ID NO: 58334 - protein, 13 aa, unidentified
  source 1..13: note = methanogen bacteria
LPISQALFNGNMQ

SEQ ID NO: 58335 - protein, 15 aa, unidentified
  source 1..15: note = methanogen bacteria
LEILTTDIIASQGYM

SEQ ID NO: 58336 - protein, 10 aa, unidentified
  source 1..10: note = methanogen bacteria
TKNFSTSDYG

SEQ ID NO: 58337 - protein, 13 aa, unidentified
  source 1..13: note = methanogen bacteria
NQIAGALFDGNMQ

SEQ ID NO: 58338 - protein, 15 aa, unidentified
  source 1..15: note = methanogen bacteria
LYVLTTDIIANQGYM

SEQ ID NO: 58339 - protein, 10 aa, unidentified
  source 1..10: note = methanogen bacteria
TKSFSTAEYG

SEQ ID NO: 58340 - protein, 13 aa, unidentified
  source 1..13: note = methanogen bacteria
GPIAGALFNGNVY

SEQ ID NO: 58341 - protein, 15 aa, unidentified
  source 1..15: note = methanogen bacteria
LLSITTFDIAQNGFF

SEQ ID NO: 58342 - protein, 12 aa, unidentified
  source 1..12: note = methanogen bacteria
PQILIDFNFSSD

SEQ ID NO: 58343 - protein, 11 aa, unidentified
  source 1..11: note = methanogen bacteria
FHLQYILDFEE

SEQ ID NO: 58344 - protein, 18 aa, unidentified
  source 1..18: note = methanogen bacteria
IGDQALGPEHLDNMLLAS

SEQ ID NO: 58345 - protein, 10 aa, unidentified
  source 1..10: note = methanogen bacteria
TKSFSTADYG

SEQ ID NO: 58346 - protein, 13 aa, unidentified
  source 1..13: note = methanogen bacteria
NQIAGALFDGSMQ

SEQ ID NO: 58347 - protein, 15 aa, unidentified
  source 1..15: note = methanogen bacteria
LYILTTTVIADNGFM

SEQ ID NO: 58348 - protein, 12 aa, unidentified
  source 1..12: note = methanogen bacteria
PQILIDFNFSSE

SEQ ID NO: 58349 - protein, 10 aa, unidentified
  source 1..10: note = methanogen bacteria
YLQYILDFEE

SEQ ID NO: 58350 - protein, 17 aa, unidentified
  source 1..17: note = methanogen bacteria
IGNQALGPEHLDHMLLI

SEQ ID NO: 58351 - protein, 45 aa, unidentified
  source 1..45: note = methanogen bacteria
TGNIIEGYFENNTCTNTGGVMTSMATVQNNTFKGSFYKNSARIGG

SEQ ID NO: 58352 - protein, 46 aa, unidentified
  source 1..46: note = methanogen bacteria
NIIIGEFINNSATRYGSAIYFRGTPFNKIINSSFINNQIPSKNLNV

SEQ ID NO: 58353 - protein, 36 aa, unidentified
  source 1..36: note = methanogen bacteria
AINLNPGNYTIETIFNGTSVENNIEVLPTLIAQNLI

SEQ ID NO: 58354 - protein, 19 aa, unidentified
  source 1..19: note = methanogen bacteria
FLISLIDGKSNPVANVNIT

SEQ ID NO: 58355 - protein, 34 aa, unidentified
  source 1..34: note = methanogen bacteria
ILTAIDPLTGLMVSYNITVLPTLTVDDLNMTYLD

SEQ ID NO: 58356 - protein, 18 aa, unidentified
  source 1..18: note = methanogen bacteria
QFKAKLVDGQGKELENAG

SEQ ID NO: 58357 - protein, 12 aa, unidentified
  source 1..12: note = methanogen bacteria
RYTDSSGIAALN

SEQ ID NO: 58358 - protein, 19 aa, unidentified
  source 1..19: note = methanogen bacteria
SMYENAVTSNKITIFSKED

SEQ ID NO: 58359 - protein, 13 aa, unidentified
  source 1..13: note = methanogen bacteria
IPTIAAEFHMSNI

SEQ ID NO: 58360 - protein, 12 aa, unidentified
  source 1..12: note = methanogen bacteria
YHLQYIKGYDSQ

SEQ ID NO: 58361 - protein, 18 aa, unidentified
  source 1..18: note = methanogen bacteria
VMGNVPIVEEYYPLLISS

SEQ ID NO: 58362 - protein, 10 aa, unidentified
  source 1..10: note = methanogen bacteria
TKNFSTADYG

SEQ ID NO: 58363 - protein, 13 aa, unidentified
  source 1..13: note = methanogen bacteria
HQISDVLFDGSMQ

SEQ ID NO: 58364 - protein, 15 aa, unidentified
  source 1..15: note = methanogen bacteria
LHILTTTVIADNGFM

SEQ ID NO: 58365 - protein, 10 aa, unidentified
  source 1..10: note = methanogen bacteria
TKSFSTADYG

SEQ ID NO: 58366 - protein, 13 aa, unidentified
  source 1..13: note = methanogen bacteria
PQIADALFDGSLQ

SEQ ID NO: 58367 - protein, 15 aa, unidentified
  source 1..15: note = methanogen bacteria
LYILTTTIIADSGFM

SEQ ID NO: 58368 - protein, 10 aa, unidentified
  source 1..10: note = methanogen bacteria
TKNFSTADYG

SEQ ID NO: 58369 - protein, 13 aa, unidentified
  source 1..13: note = methanogen bacteria
HQIADALFDGSMQ

SEQ ID NO: 58370 - protein, 15 aa, unidentified
  source 1..15: note = methanogen bacteria
LYILTTTVIADNGFM

SEQ ID NO: 58371 - protein, 10 aa, unidentified
  source 1..10: note = methanogen bacteria
TKSFSTADYG

SEQ ID NO: 58372 - protein, 13 aa, unidentified
  source 1..13: note = methanogen bacteria
NQIASALFDGSMQ

SEQ ID NO: 58373 - protein, 15 aa, unidentified
  source 1..15: note = methanogen bacteria
LYILTTTVIADNGFM

SEQ ID NO: 58374 - protein, 32 aa, unidentified
  source 1..32: note = methanogen bacteria
VNAPFIDAFFENMSAWTGSGLTLFADVEILPY

SEQ ID NO: 58375 - protein, 33 aa, unidentified
  source 1..33: note = methanogen bacteria
GLPVFDAINLTFTTISTGGMSIKNANVGFYHDN

SEQ ID NO: 58376 - protein, 34 aa, unidentified
  source 1..34: note = methanogen bacteria
TRNEPVETLFHVISAITTTGANISSPAYMTTWPS

SEQ ID NO: 58377 - protein, 32 aa, unidentified
  source 1..32: note = methanogen bacteria
FGYDPFQSLFDIISTQGNVGLSLGVIGPGLPD

SEQ ID NO: 58378 - protein, 33 aa, unidentified
  source 1..33: note = methanogen bacteria
ATNIPIIDGVFESMSALTGTGITMFMDVEILPH

SEQ ID NO: 58379 - protein, 33 aa, unidentified
  source 1..33: note = methanogen bacteria
GMPLFDSICNTFHTVSTGGMSIKNANMGFYHNN

SEQ ID NO: 58380 - protein, 34 aa, unidentified
  source 1..34: note = methanogen bacteria
SNIVPIELLFTVVSAMTTTGASVASPTAMAGWQP

SEQ ID NO: 58381 - protein, 31 aa, unidentified
  source 1..31: note = methanogen bacteria
GYDPFKSLFAAMSLQGNNGLDLGIINYHLDP

SEQ ID NO: 58382 - protein, 32 aa, unidentified
  source 1..32: note = methanogen bacteria
TGISPVDSVFESMSALTGSGITIYSDVEALPY

SEQ ID NO: 58383 - protein, 33 aa, unidentified
  source 1..33: note = methanogen bacteria
GMPFFDSICNTFCIISTGGMSVKNANIGYYNDY

SEQ ID NO: 58384 - protein, 33 aa, unidentified
  source 1..33: note = methanogen bacteria
STIIPMDMLFTVVSSITTTGASIPNSTVMAAWP

SEQ ID NO: 58385 - protein, 32 aa, unidentified
  source 1..32: note = methanogen bacteria
YGHDPFNSLFFTFSMQGNIGLEIGQLSQTIEW

SEQ ID NO: 58386 - protein, 48 aa, unidentified
  source 1..48: note = methanogen bacteria
MGLNGDDIKYAKVLSNQTLVDYLHYRYYNWSSRLIIDGILVILARLDM

SEQ ID NO: 58387 - protein, 40 aa, unidentified
  source 1..40: note = methanogen bacteria
PGNSIRFAHEAAFWYPEFVNFTIIEKSYLGLVTTFGTLIE

SEQ ID NO: 58388 - protein, 57 aa, unidentified
  source 1..57: note = methanogen bacteria
IDISILDSSVKSLGSFSNVIKSSPLIVIPKMFKHVVGATPYLTETLKLFTYEGVPAL

SEQ ID NO: 58389 - protein, 10 aa, unidentified
  source 1..10: note = methanogen bacteria
SPVVFPSGAR

SEQ ID NO: 58390 - protein, 33 aa, unidentified
  source 1..33: note = methanogen bacteria
STNIPIVDGVFESMSALTGTGITMFEDVEILPH

SEQ ID NO: 58391 - protein, 33 aa, unidentified
  source 1..33: note = methanogen bacteria
GMPLFDSICNSFHIISTGGMSIKNANMGYYQND

SEQ ID NO: 58392 - protein, 34 aa, unidentified
  source 1..34: note = methanogen bacteria
SNIVPIDLLFTVVSAITTTGASVAMPAEMAGWPP

SEQ ID NO: 58393 - protein, 32 aa, unidentified
  source 1..32: note = methanogen bacteria
YGYDPFKSLFAAMSLQGNNGLDLGIVNHTLNP

SEQ ID NO: 58394 - protein, 48 aa, unidentified
  source 1..48: note = methanogen bacteria
MGFNGDDIKYAKVLTNQSLVDYINYRYYNWSSRLIIDGLLVILTRIDM

SEQ ID NO: 58395 - protein, 41 aa, unidentified
  source 1..41: note = methanogen bacteria
CPGNNIRFAHEVAYWYPEFANFTILDKSYLGLVTTFGSLIE

SEQ ID NO: 58396 - protein, 57 aa, unidentified
  source 1..57: note = methanogen bacteria
IDISVLETSLKSLGNVPGVIKNSPLMAIPHLFEQIVSATPYLTETLKLFTYEGLPKL

SEQ ID NO: 58397 - protein, 11 aa, unidentified
  source 1..11: note = methanogen bacteria
SPVVFPSGARV

SEQ ID NO: 58398 - protein, 33 aa, unidentified
  source 1..33: note = methanogen bacteria
TNMPYIDAVFESLSALTGTGITMFSDVEALPHS

SEQ ID NO: 58399 - protein, 33 aa, unidentified
  source 1..33: note = methanogen bacteria
GMPAFDSLCNTFTIISTGGMNIKNANMGYYQSD

SEQ ID NO: 58400 - protein, 34 aa, unidentified
  source 1..34: note = methanogen bacteria
SNIVPMELLFTIVSAITTTGANVAPQHVMAAWPS

SEQ ID NO: 58401 - protein, 31 aa, unidentified
  source 1..31: note = methanogen bacteria
GYDPFKSLFAAMTMQGNNGLELGIINHTLNP

SEQ ID NO: 58402 - protein, 33 aa, unidentified
  source 1..33: note = methanogen bacteria
ITGLSMIDSIFECMSALTGSGITIYPDVEILPY

SEQ ID NO: 58403 - protein, 33 aa, unidentified
  source 1..33: note = methanogen bacteria
GMPIFDSVCNTFCIISTGGMSVKNANIGFYQNN

SEQ ID NO: 58404 - protein, 34 aa, unidentified
  source 1..34: note = methanogen bacteria
SYIVPMDILFVVVSAITTTGASIQSSTVMGGWPA

SEQ ID NO: 58405 - protein, 32 aa, unidentified
  source 1..32: note = methanogen bacteria
YGHDTFDSLFFTISMQGNIGLEIGQISQSLDW

SEQ ID NO: 58406 - protein, 16 aa, unidentified
  source 1..16: note = methanogen bacteria
MINMYTIINIANLLNQ

SEQ ID NO: 58407 - protein, 23 aa, unidentified
  source 1..23: note = methanogen bacteria
FKNIPSMFILIFQDAFNFQSIFG

SEQ ID NO: 58408 - protein, 26 aa, unidentified
  source 1..26: note = methanogen bacteria
CTGIMPDASLAGAPYVQNSIQTVLGN

SEQ ID NO: 58409 - protein, 33 aa, unidentified
  source 1..33: note = methanogen bacteria
STNIPIVDGVFESMSALTGTGITMFENVEILPH

SEQ ID NO: 58410 - protein, 33 aa, unidentified; identical to SEQ ID NO: 58391
  source 1..33: note = methanogen bacteria

SEQ ID NO: 58411 - protein, 34 aa, unidentified
  source 1..34: note = methanogen bacteria
SNIVPIDLLFTVVSAITTTGASVAMPHDMAGWPS

SEQ ID NO: 58412 - protein, 31 aa, unidentified
  source 1..31: note = methanogen bacteria
GYDPFKSLFAAMSLQGNNGLDLGIVNHTLNP

SEQ ID NO: 58413 - protein, 47 aa, unidentified
  source 1..47: note = methanogen bacteria
GFNGDDIKYAKVLSNQTLIDYLHFRYYNWSSRLIIDGLLVILVRLDM

SEQ ID NO: 58414 - protein, 40 aa, unidentified; identical to SEQ ID NO: 58387
  source 1..40: note = methanogen bacteria

SEQ ID NO: 58415 - protein, 57 aa, unidentified
  source 1..57: note = methanogen bacteria
IDISILDSSLKSLGSSSNAIKSSPLIGITKMFKQIVGATPFLTETLKLFTYEGVPAL

SEQ ID NO: 58416 - protein, 10 aa, unidentified
  source 1..10: note = methanogen bacteria
SPVVFPSGAR

SEQ ID NO: 58417 - protein, 32 aa, unidentified
  source 1..32: note = methanogen bacteria
THMPAIDAVFESMSALTGTGITMFEDVEVLPH

SEQ ID NO: 58418 - protein, 33 aa, unidentified
  source 1..33: note = methanogen bacteria
GMPVFDSICNTFSIISTGGMSIKNANMGFYQND

SEQ ID NO: 58419 - protein, 34 aa, unidentified
  source 1..34: note = methanogen bacteria
SNIVPIDLLFTVVSAITTTGASVASPLAMGNWPS

SEQ ID NO: 58420 - protein, 31 aa, unidentified
  source 1..31: note = methanogen bacteria
GYDPFRSLFAAMSLQGNNGLELGVINHTLHP

SEQ ID NO: 58421 - protein, 32 aa, unidentified
  source 1..32: note = methanogen bacteria
TDISIVDSIFESMSALTGSGITIYSDVEVLPQ

SEQ ID NO: 58422 - protein, 33 aa, unidentified
  source 1..33: note = methanogen bacteria
GMPVFDSVCNTFCIISTGGMSIKNANIGFYQND

SEQ ID NO: 58423 - protein, 34 aa, unidentified
  source 1..34: note = methanogen bacteria
SNILPMDIVFVVVSAVTTTGASIQSSTVMGGWHP

SEQ ID NO: 58424 - protein, 32 aa, unidentified
  source 1..32: note = methanogen bacteria
YGHDPLNSLFFSMSMQGNVGLEIGSMSQTIEM

SEQ ID NO: 58425 - protein, 33 aa, unidentified
  source 1..33: note = methanogen bacteria
ITDANIVNCLFECMSALTGSGITIFADVESLPQ

SEQ ID NO: 58426 - protein, 33 aa, unidentified
  source 1..33: note = methanogen bacteria
GMPLFDSVCNTFTIISTGGMSIKNANIGFYQSD

SEQ ID NO: 58427 - protein, 34 aa, unidentified
  source 1..34: note = methanogen bacteria
SNIVPIEILFTVVSAITTTGASVQSSTVMGSWPP

SEQ ID NO: 58428 - protein, 33 aa, unidentified
  source 1..33: note = methanogen bacteria
CGHDVIDSLFYTISIQGNVGLEIGNISQALQPQ

SEQ ID NO: 58429 - protein, 100 aa, unidentified
  source 1..100: note = methanogen bacteria
SPMGSIAHEKSEFVHSEITSQGVLFPGYIDSQNNASGYLTIASAANLPKEKTIFTTDWSNENINYTKVSYNLDFKDNIFYSYVAQAIGIELAKILNLNNI

SEQ ID NO: 58430 - protein, 44 aa, unidentified
  source 1..44: note = methanogen bacteria
SSYIGFSQLKFVITDYPSLISIIKIPNQIAMQINLFSVIDNHPL

SEQ ID NO: 58431 - protein, 18 aa, unidentified
  source 1..18: note = methanogen bacteria
SLSKGIINLETGIDIIYY

SEQ ID NO: 58432 - protein, 34 aa, unidentified
  source 1..34: note = methanogen bacteria
ATNMAPIDAVFESMSALTGNGMTLYPDVEILPHS

SEQ ID NO: 58433 - protein, 33 aa, unidentified
  source 1..33: note = methanogen bacteria
GMPLFDSICSTLSIVSTGGMSIKNANMGYYHDD

SEQ ID NO: 58434 - protein, 34 aa, unidentified
  source 1..34: note = methanogen bacteria
SNIVPMDLLFTVVSAITTTGASVASPTAMGNWPS

SEQ ID NO: 58435 - protein, 32 aa, unidentified
  source 1..32: note = methanogen bacteria
YGYDPFKSLFAAMSLQGNNGLELGIITPSLDP

SEQ ID NO: 58436 - protein, 48 aa, unidentified
  source 1..48: note = methanogen bacteria
MGFNGDDIRYAKVLSNQTLIDYIGFRYYNWSSRIIIDGLTVFLTRQNM

SEQ ID NO: 58437 - protein, 39 aa, unidentified
  source 1..39: note = methanogen bacteria
PGNGVRFAYEVTSWYPEFAGFGVMEKSYLGLVTTFGKLI

SEQ ID NO: 58438 - protein, 57 aa, unidentified
  source 1..57: note = methanogen bacteria
IDISVLDSSLKSLGSVFDAIKNSPLMAIPDMFKHIVNAVPFVTGTLKLFTYEGVPGI

SEQ ID NO: 58439 - protein, 10 aa, unidentified
  source 1..10: note = methanogen bacteria
SPVIFPSGAR

SEQ ID NO: 58440 - protein, 33 aa, unidentified
  source 1..33: note = methanogen bacteria
ITGINIEDSLFESMSALTGSGITIYQDVEILPQ

SEQ ID NO: 58441 - protein, 33 aa, unidentified
  source 1..33: note = methanogen bacteria
GMPIFDSVCNTFTIISTGGMSIKNANIGFYQND

SEQ ID NO: 58442 - protein, 34 aa, unidentified
  source 1..34: note = methanogen bacteria
SDIVPIEILFTVVSAVTTTGASVQSSTVMGNWPP

SEQ ID NO: 58443 - protein, 33 aa, unidentified
  source 1..33: note = methanogen bacteria
YGHDPIEGLFFTMSLQGNVGLEIGHVTSALQPQ

SEQ ID NO: 58444 - protein, 13 aa, unidentified
  source 1..13: note = methanogen bacteria
LENIIGNFATGIY

SEQ ID NO: 58445 - protein, 16 aa, unidentified
  source 1..16: note = methanogen bacteria
DIILLIYGPEYIDSAP

SEQ ID NO: 58446 - protein, 33 aa, unidentified
  source 1..33: note = methanogen bacteria
ATHIPVLDGVFESMSALTGTGITMFMDVEILPH

SEQ ID NO: 58447 - protein, 33 aa, unidentified
  source 1..33: note = methanogen bacteria
GMPVFDSICNTFHMVSTGGMSIKNANMGFYHDD

SEQ ID NO: 58448 - protein, 34 aa, unidentified
  source 1..34: note = methanogen bacteria
SNIVPIDLLFTVVSAMTTTGASVASPATMAGWPP

SEQ ID NO: 58449 - protein, 31 aa, unidentified
  source 1..31: note = methanogen bacteria
GYDPFKSLFAAMSLQGNNGLELGIINYTLDP

SEQ ID NO: 58450 - protein, 15 aa, unidentified
  source 1..15: note = methanogen bacteria
LPSIEQSFSLTSRES

SEQ ID NO: 58451 - protein, 13 aa, unidentified
  source 1..13: note = methanogen bacteria
IDSSNFTASLLSM

SEQ ID NO: 58452 - protein, 11 aa, unidentified
  source 1..11: note = methanogen bacteria
LVILSMGLNDQ

SEQ ID NO: 58453 - protein, 32 aa, unidentified
  source 1..32: note = methanogen bacteria
THMPPLDAVFESMSALSGTGITMFNDVEILPH

SEQ ID NO: 58454 - protein, 33 aa, unidentified
  source 1..33: note = methanogen bacteria
GMPVFDSICNSFHIISTGGMGIKNANMGYYHND

SEQ ID NO: 58455 - protein, 34 aa, unidentified
  source 1..34: note = methanogen bacteria
SNIVPIELLFTVVSAMTTTGASVASSTTMAGWPS

SEQ ID NO: 58456 - protein, 31 aa, unidentified
  source 1..31: note = methanogen bacteria
GYDPFKSLFAAMTLQGNNGLELGIINNTLNP

SEQ ID NO: 58457 - protein, 44 aa, unidentified
  source 1..44: note = methanogen bacteria
YDPGILAQDSFYQMNQIARGSFTNWHPFFHTFIEMLCLKLYPDT

SEQ ID NO: 58458 - protein, 47 aa, unidentified
  source 1..47: note = methanogen bacteria
GFNGDDIKYAKILNNQTLIDYVNFRYYNWSSRIIIDTVLAILARQNM

SEQ ID NO: 58459 - protein, 40 aa, unidentified
  source 1..40: note = methanogen bacteria
PGNSIRFAQEVSYWYPEFANFTILQKSYLGLVTTFGNLIE

SEQ ID NO: 58460 - protein, 56 aa, unidentified
  source 1..56: note = methanogen bacteria
IDISVLETSLKSLGSVPNVIKSSPLMLIPQIFKQIVNIVPFITDTLKLFTYEGLPK

SEQ ID NO: 58461 - protein, 11 aa, unidentified
  source 1..11: note = methanogen bacteria
SPVIFPSGARV

SEQ ID NO: 58462 - protein, 14 aa, unidentified
  source 1..14: note = methanogen bacteria
LGYLASNSAVGLYN

SEQ ID NO: 58463 - protein, 15 aa, unidentified
  source 1..15: note = methanogen bacteria
LMNLIYGNQYVNAGS

SEQ ID NO: 58464 - protein, 14 aa, unidentified
  source 1..14: note = methanogen bacteria
AVPSIDAEYGMNNI

SEQ ID NO: 58465 - protein, 12 aa, unidentified
  source 1..12: note = methanogen bacteria
YHLQYIKGYDSQ

SEQ ID NO: 58466 - protein, 18 aa, unidentified
  source 1..18: note = methanogen bacteria
VMGNVPMTEKYFPQLIAS

SEQ ID NO: 58467 - protein, 32 aa, unidentified
  source 1..32: note = methanogen bacteria
TDIHIIDAIFESMSALTGSGITIYSDVESLPH

SEQ ID NO: 58468 - protein, 33 aa, unidentified
  source 1..33: note = methanogen bacteria
GMPLFDSVCNTFCIISTGGMSVKNANIGFYNNE

SEQ ID NO: 58469 - protein, 34 aa, unidentified
  source 1..34: note = methanogen bacteria
STIIPMDMFFTVVSAITTTGASIPNSVTMGGWPS

SEQ ID NO: 58470 - protein, 33 aa, unidentified
  source 1..33: note = methanogen bacteria
YGHDPFNSLFFTMSMQGNVGLEIGQISQTMELP

SEQ ID NO: 58471 - protein, 33 aa, unidentified
  source 1..33: note = methanogen bacteria
ATNMPIIDAVFESMSALTGSGMTMYPDVEILPH

SEQ ID NO: 58472 - protein, 33 aa, unidentified
  source 1..33: note = methanogen bacteria
GLPAFDSICNTLSIISTGGMSIKNANMGFYHDD

SEQ ID NO: 58473 - protein, 34 aa, unidentified
  source 1..34: note = methanogen bacteria
SNIVPMDLLFTVVSAITTTGANVASPATMASWPP

SEQ ID NO: 58474 - protein, 31 aa, unidentified
  source 1..31: note = methanogen bacteria
GYDPFRSLFAVMSLQGNNGLELGIINSALHP

SEQ ID NO: 58475 - protein, 30 aa, unidentified
  source 1..30: note = methanogen bacteria
SFTFNWGTDTAAYFVNTVGGSSNLSNASFL

SEQ ID NO: 58476 - protein, 24 aa, unidentified
  source 1..24: note = methanogen bacteria
TLPGAGIGINTLLTPDWSMLWNVD

SEQ ID NO: 58477 - protein, 35 aa, unidentified
  source 1..35: note = methanogen bacteria
GFMSFTNGTPMIQLITEGTGLVFIVFPMIFNIMGP

SEQ ID NO: 58478 - protein, 33 aa, unidentified
  source 1..33: note = methanogen bacteria
STNIPILDGVFESVSALTGTGITMFQDVEILPH

SEQ ID NO: 58479 - protein, 33 aa, unidentified
  source 1..33: note = methanogen bacteria
GMPIFDALCNTFHIISTGGMSVKNANMGYYHDD

SEQ ID NO: 58480 - protein, 34 aa, unidentified
  source 1..34: note = methanogen bacteria
SNILPMELLFTVVSAITTTGANIVPSNVMGSWPS

SEQ ID NO: 58481 - protein, 31 aa, unidentified
  source 1..31: note = methanogen bacteria
GYDPFKSLFVAMSLQGNNGLDIGLINHTLNP

SEQ ID NO: 58482 - protein, 32 aa, unidentified
  source 1..32: note = methanogen bacteria
TDISFIDSAFESMSALTGSGITIYSDVEVLPY

SEQ ID NO: 58483 - protein, 33 aa, unidentified
  source 1..33: note = methanogen bacteria
GMPFFDSICNTFCIISTGGMSVKNANMGFYNND

SEQ ID NO: 58484 - protein, 33 aa, unidentified
  source 1..33: note = methanogen bacteria
SQIVPIDMLFTVVSAVTTTGASIPNSTVMGNWP

SEQ ID NO: 58485 - protein, 32 aa, unidentified
  source 1..32: note = methanogen bacteria
YGHDAFNSLFFTISMQGNVGLEIGQISQTMQW

SEQ ID NO: 58486 - protein, 33 aa, unidentified
  source 1..33: note = methanogen bacteria
STNIPIIDGVFESMSALTGTGITMFMDVEILPH

SEQ ID NO: 58487 - protein, 33 aa, unidentified
  source 1..33: note = methanogen bacteria
GMPVFDSVCNTFTIISTGGMSIKNANMGFYHND

SEQ ID NO: 58488 - protein, 34 aa, unidentified
  source 1..34: note = methanogen bacteria
SNIIPIELLFTVVSAITTTGASIAMPHTMAGWPS

SEQ ID NO: 58489 - protein, 31 aa, unidentified
  source 1..31: note = methanogen bacteria
GYDPFKSLFAAMSLQGNNGLELGIINYTLNP

SEQ ID NO: 58490 - protein, 34 aa, unidentified
  source 1..34: note = methanogen bacteria
VTDIGIIDAVFESVSALTGSGITIYPDVESLPHS

SEQ ID NO: 58491 - protein, 33 aa, unidentified
  source 1..33: note = methanogen bacteria
GMPVFDSICNTFSIISTGGMNVKNANMGFYNND

SEQ ID NO: 58492 - protein, 34 aa, unidentified
  source 1..34: note = methanogen bacteria
STIIPMDNLFVVVSAVTTTGASIQSPMVMGGWPP

SEQ ID NO: 58493 - protein, 32 aa, unidentified
  source 1..32: note = methanogen bacteria
GGHDPFDSLFFTFSMQGNIGLEIGNISQALSS

SEQ ID NO: 58494 - protein, 32 aa, unidentified
  source 1..32: note = methanogen bacteria
TGISPIDGVFESMSALTGTGITMFVDVEVLPH

SEQ ID NO: 58495 - protein, 33 aa, unidentified
  source 1..33: note = methanogen bacteria
GMPVFDAICNTFHIVSTGGMGIKNANMGYYQSD

SEQ ID NO: 58496 - protein, 34 aa, unidentified
  source 1..34: note = methanogen bacteria
SDIVPIDLVFTVVSAITTTGASVAVPNVMAGWPS

SEQ ID NO: 58497 - protein, 31 aa, unidentified
  source 1..31: note = methanogen bacteria
GYDPFRSLFAAMSLQGNNGLELGIITPTLNP

SEQ ID NO: 58498 - protein, 33 aa, unidentified
  source 1..33: note = methanogen bacteria
ATHIPLLDGVFESLSALTGTGITMFNDVEILPH

SEQ ID NO: 58499 - protein, 33 aa, unidentified
  source 1..33: note = methanogen bacteria
GMPVFDSICATFHIISTGGMGIKNANMAYYNSD

SEQ ID NO: 58500 - protein, 35 aa, unidentified
  source 1..35: note = methanogen bacteria
TSTIVPMELLFTVVSAITTTGATIVPAPVMGNWPP

SEQ ID NO: 58501 - protein, 31 aa, unidentified
  source 1..31: note = methanogen bacteria
GYDPFKSLFSVITLQGNNGLDSGVITNALHP

SEQ ID NO: 58502 - protein, 33 aa, unidentified
  source 1..33: note = methanogen bacteria
VSDLSFINGVFESMSALTGSGITMYQNVEILPY

SEQ ID NO: 58503 - protein, 33 aa, unidentified
  source 1..33: note = methanogen bacteria
GMPVFDSICNTFTIISTGGMSIKNANIGYYQSD

SEQ ID NO: 58504 - protein, 34 aa, unidentified
  source 1..34: note = methanogen bacteria
SDIYPIELLFTVVSAATTTGASVVGFDVMRTWPS

SEQ ID NO: 58505 - protein, 33 aa, unidentified
  source 1..33: note = methanogen bacteria
YGHDPFYSLFDTISIQGNVGLTLGEINFSLEDP

SEQ ID NO: 58506 - protein, 32 aa, unidentified
  source 1..32: note = methanogen bacteria
TNIPLLDGIFESMSALTGTGITMFQDVEILPH

SEQ ID NO: 58507 - protein, 33 aa, unidentified
  source 1..33: note = methanogen bacteria
GMPLFDAICSTLHIVSTGGMGIKNANMAYYHND

SEQ ID NO: 58508 - protein, 34 aa, unidentified
  source 1..34: note = methanogen bacteria
SNIVPMELLFTVVSAITTTGATVVHPDIMAGWPS

SEQ ID NO: 58509 - protein, 31 aa, unidentified
  source 1..31: note = methanogen bacteria
GYDPFKSLFAAMTLQGNNGLELGIINHTLHP

SEQ ID NO: 58510 - protein, 33 aa, unidentified
  source 1..33: note = methanogen bacteria
ATNIPIIDAIFESMSALTGTGVTMYPDVEVLPH

SEQ ID NO: 58511 - protein, 33 aa, unidentified
  source 1..33: note = methanogen bacteria
GMPLFDSVCNTFSIISTGGMGIKNANMGFYQND

SEQ ID NO: 58512 - protein, 34 aa, unidentified
  source 1..34: note = methanogen bacteria
SNIIPMELLFTVVSAMTTTGASVVPAHVMAGWPS

SEQ ID NO: 58513 - protein, 31 aa, unidentified
  source 1..31: note = methanogen bacteria
GYDPFNSLFAAMTLQGNNGLELGVVTHKLHP

SEQ ID NO: 58514 - protein, 32 aa, unidentified
  source 1..32: note = methanogen bacteria
TGISIVDAIFESMSALTGSGITIYGDVESLPY

SEQ ID NO: 58515 - protein, 33 aa, unidentified
  source 1..33: note = methanogen bacteria
GMPLFDSICNTFCIISTGGMSVKNANIGFYNND

SEQ ID NO: 58516 - protein, 34 aa, unidentified
  source 1..34: note = methanogen bacteria
SKIVPMDILFTVVSAITTTGASIQSSTVMVGWPS

SEQ ID NO: 58517 - protein, 32 aa, unidentified
  source 1..32: note = methanogen bacteria
YGHDPIHSLFFTISMQGNVGLEIGQISSVLEW

SEQ ID NO: 58518 - protein, 48 aa, unidentified
  source 1..48: note = methanogen bacteria
MGLNGDDIKYAKILNNQTIIEYINFRYFNWSSRLIIDTLLAILARQNM

SEQ ID NO: 58519 - protein, 40 aa, unidentified
  source 1..40: note = methanogen bacteria
PGNSIRFAHEVSYWYPEFANFTIIEKSYLGLVTTFGNLIE

SEQ ID NO: 58520 - protein, 57 aa, unidentified
  source 1..57: note = methanogen bacteria
IDISVLETSIKSLGSVPEVIKNSQAMAVPAMFKQVVNATPYITETLKLFTYEGIPKV

SEQ ID NO: 58521 - protein, 10 aa, unidentified
  source 1..10: note = methanogen bacteria
SPTVFPSGAR

SEQ ID NO: 58522 - protein, 32 aa, unidentified
  source 1..32: note = methanogen bacteria
TDINILDGMFESMSALTGSGITIYSDVEVLPQ

SEQ ID NO: 58523 - protein, 33 aa, unidentified
  source 1..33: note = methanogen bacteria
GMPIFDSICNTFTTISTGGMSIKNANIGFYQND

SEQ ID NO: 58524 - protein, 33 aa, unidentified
  source 1..33: note = methanogen bacteria
SNIIPIELLFTVVSAVTTTGASVQPSTVMGTWP

SEQ ID NO: 58525 - protein, 31 aa, unidentified
  source 1..31: note = methanogen bacteria
GHDPIVGLFYTMSIQGNVGLEIGQITQVLQP

SEQ ID NO: 58526 - protein, 32 aa, unidentified
  source 1..32: note = methanogen bacteria
TGISIVDSVFESMSALTGSGITIYSDVEVLPY

SEQ ID NO: 58527 - protein, 33 aa, unidentified
  source 1..33: note = methanogen bacteria
GMPLFDSICNTFCIISTGGMSVKNANIGYYNDY

SEQ ID NO: 58528 - protein, 33 aa, unidentified
  source 1..33: note = methanogen bacteria
STIIPMDMLFTVVSSITTTGASIPNSTVMARWP

SEQ ID NO: 58529 - protein, 32 aa, unidentified
  source 1..32: note = methanogen bacteria
YGHDPFNSLFFTFSLQGNIGLEIGQLSQTIEW

SEQ ID NO: 58530 - protein, 33 aa, unidentified
  source 1..33: note = methanogen bacteria
VTGIGLIDGIFESMSALTGSGITIYDNVEILPY

SEQ ID NO: 58531 - protein, 33 aa, unidentified
  source 1..33: note = methanogen bacteria
GMPIFDSVCSTFSIISTGGMSIKNANIGYYQSD

SEQ ID NO: 58532 - protein, 35 aa, unidentified
  source 1..35: note = methanogen bacteria
TTTIVPIDLLFTIVSAVTTTGASVESPIMMGSWPT

SEQ ID NO: 58533 - protein, 32 aa, unidentified
  source 1..32: note = methanogen bacteria
YGHEPIASLFYTISLQGNVGLEISRMTSTLEL

SEQ ID NO: 58534 - protein, 33 aa, unidentified
  source 1..33: note = methanogen bacteria
STHIPIIDGVFESMSALTGTGITMFMDVEILPH

SEQ ID NO: 58535 - protein, 33 aa, unidentified
  source 1..33: note = methanogen bacteria
GMPLFDSVCNTFHMVSTGGMSIKNANMGFYHND

SEQ ID NO: 58536 - protein, 34 aa, unidentified
  source 1..34: note = methanogen bacteria
SNIVPIDLLFTVVSAMTTTGASVASPTTMAGWPS

SEQ ID NO: 58537 - protein, 31 aa, unidentified; identical to SEQ ID NO: 58449
  source 1..31: note = methanogen bacteria

SEQ ID NO: 58538 - protein, 32 aa, unidentified; identical to SEQ ID NO: 58526
  source 1..32: note = methanogen bacteria

SEQ ID NO: 58539 - protein, 33 aa, unidentified
  source 1..33: note = methanogen bacteria
GMPLFDSICNTFCIISTGGMSIKNANIGYYNDY

SEQ ID NO: 58540 - protein, 33 aa, unidentified
  source 1..33: note = methanogen bacteria
STIIPMDMLFTVVSAITTTGASIPNATVMARWP

SEQ ID NO: 58541 - protein, 32 aa, unidentified
  source 1..32: note = methanogen bacteria
YGHDPFHSLFFTFSMQGNIGLEIGQLSQTIEW

SEQ ID NO: 58542 - protein, 14 aa, unidentified
  source 1..14: note = methanogen bacteria
MLTNMVGSYENGIY

SEQ ID NO: 58543 - protein, 16 aa, unidentified
  source 1..16: note = methanogen bacteria
DIVVLFFGQKYSPTSS

SEQ ID NO: 58544 - protein, 48 aa, unidentified
  source 1..48: note = methanogen bacteria
MGFNGDDIKYAKVLANQSLVDYIHYRYYNWSSRVIIDGLLVILTRYNM

SEQ ID NO: 58545 - protein, 41 aa, unidentified
  source 1..41: note = methanogen bacteria
PGNSIRFAHEVSYWYPEFANFTIIDKSYLGLVTTFGNIIEQ

SEQ ID NO: 58546 - protein, 56 aa, unidentified
  source 1..56: note = methanogen bacteria
IDISVLDTSLKSLGSVPGFIKSSPLMAIPQIFKQIVSATPYLTETLKLFTYEGLPK

SEQ ID NO: 58547 - protein, 10 aa, unidentified
  source 1..10: note = methanogen bacteria
SPVIFPSGAR

SEQ ID NO: 58548 - protein, 32 aa, unidentified
  source 1..32: note = methanogen bacteria
TNLPILDGVFESMSALTGSGITMYENVEILPH

SEQ ID NO: 58549 - protein, 33 aa, unidentified
  source 1..33: note = methanogen bacteria
GMPMFDSICNAFSIISTGGMNVKNANMGYYQSD

SEQ ID NO: 58550 - protein, 34 aa, unidentified
  source 1..34: note = methanogen bacteria
SNIMPMDLLFTIVSAITTTGANVAPPTAMANWPP

SEQ ID NO: 58551 - protein, 31 aa, unidentified
  source 1..31: note = methanogen bacteria
GYDPFRSLFAIMSLQGNNGLELGIVNYTLHP

SEQ ID NO: 58552 - protein, 32 aa, unidentified
  source 1..32: note = methanogen bacteria
TEIHIVDGMFESMSALTGSGITIYGDVEVLPK

SEQ ID NO: 58553 - protein, 33 aa, unidentified
  source 1..33: note = methanogen bacteria
GMPLFDSICNTFSTISTGGMGIKNANMGFYQND

SEQ ID NO: 58554 - protein, 33 aa, unidentified
  source 1..33: note = methanogen bacteria
SYIVPIELLFTVVSAITTTGASVQPASVMGTWP

SEQ ID NO: 58555 - protein, 31 aa, unidentified
  source 1..31: note = methanogen bacteria
GYEPFSGLFYTMSIQGNVGLEISTIAPTLEL

SEQ ID NO: 58556 - protein, 12 aa, unidentified
  source 1..12: note = methanogen bacteria
LSKMVGNYATGI

SEQ ID NO: 58557 - protein, 16 aa, unidentified
  source 1..16: note = methanogen bacteria
DIIQLIYGHKYDAASS

SEQ ID NO: 58558 - protein, 12 aa, unidentified
  source 1..12: note = methanogen bacteria
SMLAGDYATGLY

SEQ ID NO: 58559 - protein, 14 aa, unidentified
  source 1..14: note = methanogen bacteria
LINLIYTNEFALAS

SEQ ID NO: 58560 - protein, 13 aa, unidentified
  source 1..13: note = methanogen bacteria
LGFMTTAYSTGIY

SEQ ID NO: 58561 - protein, 13 aa, unidentified
  source 1..13: note = methanogen bacteria
IVLIYGNAYISSS

SEQ ID NO: 58562 - protein, 10 aa, unidentified
  source 1..10: note = methanogen bacteria
ARYLGVEKYG

SEQ ID NO: 58563 - protein, 12 aa, unidentified
  source 1..12: note = methanogen bacteria
LQNMIGNYATGI

SEQ ID NO: 58564 - protein, 15 aa, unidentified
  source 1..15: note = methanogen bacteria
DIIQLIYGNKYDPSS

SEQ ID NO: 58565 - protein, 10 aa, unidentified
  source 1..10: note = methanogen bacteria
ARYLGVSDFG

SEQ ID NO: 58566 - protein, 13 aa, unidentified
  source 1..13: note = methanogen bacteria
TQFVGGYFTGLYN

SEQ ID NO: 58567 - protein, 16 aa, unidentified
  source 1..16: note = methanogen bacteria
GDVISIIYGNQYSDSA

SEQ ID NO: 58568 - protein, 13 aa, unidentified
  source 1..13: note = methanogen bacteria
LQNMVGNYATGIY

SEQ ID NO: 58569 - protein, 16 aa, unidentified
  source 1..16: note = methanogen bacteria
DIIQFIYGNKYDPASS

SEQ ID NO: 58570 - protein, 32 aa, unidentified
  source 1..32: note = methanogen bacteria
TGINIIDGVFESMSALTGSGITIYPDVEILPY

SEQ ID NO: 58571 - protein, 33 aa, unidentified
  source 1..33: note = methanogen bacteria
GMPIFDSICHTFTTISTGGMSIKNANIGFYHND

SEQ ID NO: 58572 - protein, 34 aa, unidentified
  source 1..34: note = methanogen bacteria
SNIVPMDILFHIVSAITTTGASIQSPTVMGTWPA

SEQ ID NO: 58573 - protein, 32 aa, unidentified
  source 1..32: note = methanogen bacteria
YGHDPFNSLFFAISMQGNVGLEIGQMSQTLEL

SEQ ID NO: 58574 - protein, 13 aa, unidentified
  source 1..13: note = methanogen bacteria
LTNIVGNYASGIY

SEQ ID NO: 58575 - protein, 17 aa, unidentified
  source 1..17: note = methanogen bacteria
NDIIHLIYGNKYDAASP

SEQ ID NO: 58576 - protein, 12 aa, unidentified
  source 1..12: note = methanogen bacteria
LTNMVGSYATGI

SEQ ID NO: 58577 - protein, 16 aa, unidentified
  source 1..16: note = methanogen bacteria
LDLIQLIYGHEYDSAY

SEQ ID NO: 58578 - protein, 13 aa, unidentified
  source 1..13: note = methanogen bacteria
KENKNNKEKEEKH

SEQ ID NO: 58579 - protein, 24 aa, unidentified
  source 1..24: note = methanogen bacteria
TYTIFFFIPPTIQTFTTSDSARHS

SEQ ID NO: 58580 - protein, 11 aa, unidentified
  source 1..11: note = methanogen bacteria
LNNIIGDYATG

SEQ ID NO: 58581 - protein, 15 aa, unidentified
  source 1..15: note = methanogen bacteria
DIMLIIYGQEYAMGG

SEQ ID NO: 58582 - protein, 14 aa, unidentified
  source 1..14: note = methanogen bacteria
MLTNMVSSYANGIY

SEQ ID NO: 58583 - protein, 16 aa, unidentified
  source 1..16: note = methanogen bacteria
DIVVFFFGQKYAPTSS

SEQ ID NO: 58584 - protein, 52 aa, unidentified
  source 1..52: note = methanogen bacteria
LANTFIHVDEYWTYTLVNLPFIDGMKVAFHDVHPPLYYMILYLLTPFGLDNL

SEQ ID NO: 58585 - protein, 38 aa, unidentified
  source 1..38: note = methanogen bacteria
IRQISTEAAGSHEGFEMSSLVHYMLGFAIKSENFRADS

SEQ ID NO: 58586 - protein, 13 aa, unidentified
  source 1..13: note = methanogen bacteria
LQNMVGSYATGIY

SEQ ID NO: 58587 - protein, 16 aa, unidentified
  source 1..16: note = methanogen bacteria
DIIQLIYGNKYDPASS

SEQ ID NO: 58588 - protein, 44 aa, unidentified
  source 1..44: note = methanogen bacteria
YDPGILTQDSFYQMNQIASSNFTNWHPFFHTFIEMLCLKLYPDT

SEQ ID NO: 58589 - protein, 32 aa, unidentified
  source 1..32: note = methanogen bacteria
TGINFIDCIFESMSALTGSGITIYSDVEVLPY

SEQ ID NO: 58590 - protein, 34 aa, unidentified
  source 1..34: note = methanogen bacteria
AGMPVFDSICHTFSTISTGGMSVKNANIGFYHSD

SEQ ID NO: 58591 - protein, 34 aa, unidentified
  source 1..34: note = methanogen bacteria
SNIVPMEVLFHVVSAITTTGASIQSATVMAGWPS

SEQ ID NO: 58592 - protein, 33 aa, unidentified
  source 1..33: note = methanogen bacteria
YGHDPFQSLFFTISMQGNVGLEIGQMSQAIELP

SEQ ID NO: 58593 - protein, 12 aa, unidentified
  source 1..12: note = methanogen bacteria
LSNIIGDYATGI

SEQ ID NO: 58594 - protein, 17 aa, unidentified
  source 1..17: note = methanogen bacteria
TDIIQLIFGIEFIESAS

SEQ ID NO: 58595 - protein, 10 aa, unidentified
  source 1..10: note = methanogen bacteria
ARYLGVSNYG

SEQ ID NO: 58596 - protein, 12 aa, unidentified
  source 1..12: note = methanogen bacteria
LTQIVGNYATGI

SEQ ID NO: 58597 - protein, 17 aa, unidentified
  source 1..17: note = methanogen bacteria
LDIIQLIYGHEYDAASS

SEQ ID NO: 58598 - protein, 10 aa, unidentified
  source 1..10: note = methanogen bacteria
ARYLGVEQYG

SEQ ID NO: 58599 - protein, 12 aa, unidentified
  source 1..12: note = methanogen bacteria
LTNMVGNYATGI

SEQ ID NO: 58600 - protein, 17 aa, unidentified
  source 1..17: note = methanogen bacteria
TDIIHLIYGHQYDASSS

SEQ ID NO: 58601 - protein, 32 aa, unidentified
  source 1..32: note = methanogen bacteria
TGINIIDGIFESMSALTGSGITIYPDVEVLPY

SEQ ID NO: 58602 - protein, 33 aa, unidentified
  source 1..33: note = methanogen bacteria
GMPFFDSVCHTFTTISTGGMSIKNANIGFYHND

SEQ ID NO: 58603 - protein, 34 aa, unidentified
  source 1..34: note = methanogen bacteria
SNIVPMDILFHIVSAITTTGASIQSSTVMGTWPA

SEQ ID NO: 58604 - protein, 32 aa, unidentified
  source 1..32: note = methanogen bacteria
YGHDPFNSLFFAISMQGNVGLEIGQISQNLEL

SEQ ID NO: 58605 - protein, 12 aa, unidentified
  source 1..12: note = methanogen bacteria
LTNIIGDYPTGI

SEQ ID NO: 58606 - protein, 16 aa, unidentified
  source 1..16: note = methanogen bacteria
DIIHFIYGHQYEEASS

SEQ ID NO: 58607 - protein, 13 aa, unidentified
  source 1..13: note = methanogen bacteria
LTNMVGSYATGIY

SEQ ID NO: 58608 - protein, 17 aa, unidentified
  source 1..17: note = methanogen bacteria
FDIVQLIYGHKFDPASS

SEQ ID NO: 58609 - protein, 14 aa, unidentified
  source 1..14: note = methanogen bacteria
MLTNMVGNYATGIY

SEQ ID NO: 58610 - protein, 17 aa, unidentified
  source 1..17: note = methanogen bacteria
TDIIHLIYGHQYDASAS

SEQ ID NO: 58611 - protein, 12 aa, unidentified
  source 1..12: note = methanogen bacteria
QFLVGDYPTGIY

SEQ ID NO: 58612 - protein, 15 aa, unidentified
  source 1..15: note = methanogen bacteria
YLINLIYSSEYALAA

SEQ ID NO: 58613 - protein, 32 aa, unidentified
  source 1..32: note = methanogen bacteria
TNIPIIDGVFESVSALTGTGITIFENVEALPY

SEQ ID NO: 58614 - protein, 33 aa, unidentified
  source 1..33: note = methanogen bacteria
GMPLFDAVCNTFCIISTGGMGVKNANMGYYQND

SEQ ID NO: 58615 - protein, 34 aa, unidentified
  source 1..34: note = methanogen bacteria
SDIIPMELVFTVTSVITTTGASVASVDAMASWPA

SEQ ID NO: 58616 - protein, 31 aa, unidentified
  source 1..31: note = methanogen bacteria
GYDPFKSLFASMSLQGNNGLELGIINHTMNP

SEQ ID NO: 58617 - protein, 12 aa, unidentified
  source 1..12: note = methanogen bacteria
LTKLVGNYATGI

SEQ ID NO: 58618 - protein, 17 aa, unidentified
  source 1..17: note = methanogen bacteria
TDIIHLIYGHEYDAASS

SEQ ID NO: 58619 - protein, 10 aa, unidentified
  source 1..10: note = methanogen bacteria
ARYLGVNNYG

SEQ ID NO: 58620 - protein, 12 aa, unidentified
  source 1..12: note = methanogen bacteria
LSELVGDYANGI

SEQ ID NO: 58621 - protein, 15 aa, unidentified
  source 1..15: note = methanogen bacteria
DIIQLIYGHQYDAAA

SEQ ID NO: 58622 - protein, 12 aa, unidentified
  source 1..12: note = methanogen bacteria
LTNMVGTYATGI

SEQ ID NO: 58623 - protein, 16 aa, unidentified
  source 1..16: note = methanogen bacteria
DIITLIYGHEYDAASS

SEQ ID NO: 58624 - protein, 32 aa, unidentified
  source 1..32: note = methanogen bacteria
TGLNIIDSIFESMSALTGSGVTMYHNVEILPH

SEQ ID NO: 58625 - protein, 33 aa, unidentified
  source 1..33: note = methanogen bacteria
GMPIFDSVCNTFSIISTGGMSIKNANIGFYHNN

SEQ ID NO: 58626 - protein, 34 aa, unidentified
  source 1..34: note = methanogen bacteria
TNIVPMELLFTIVSAITTTGASVQGPAVMMTWPS

SEQ ID NO: 58627 - protein, 31 aa, unidentified
  source 1..31: note = methanogen bacteria
YGHDPFKSLFDTISIQGNVGLDLGQITTCEL

SEQ ID NO: 58628 - protein, 13 aa, unidentified
  source 1..13: note = methanogen bacteria
LTALIGDYATGIY

SEQ ID NO: 58629 - protein, 15 aa, unidentified
  source 1..15: note = methanogen bacteria
EIITFIYGHEFDASA

SEQ ID NO: 58630 - protein, 12 aa, unidentified
  source 1..12: note = methanogen bacteria
LTKIVGDYATGI

SEQ ID NO: 58631 - protein, 15 aa, unidentified
  source 1..15: note = methanogen bacteria
DIIQLIYGHQYDAAA

SEQ ID NO: 58632 - protein, 11 aa, unidentified
  source 1..11: note = methanogen bacteria
ARYLGPSEFGI

SEQ ID NO: 58633 - protein, 14 aa, unidentified
  source 1..14: note = methanogen bacteria
LTQFSSTYDTGLYN

SEQ ID NO: 58634 - protein, 16 aa, unidentified
  source 1..16: note = methanogen bacteria
FDIINIYGSDYDGAAD

SEQ ID NO: 58635 - protein, 13 aa, unidentified
  source 1..13: note = methanogen bacteria
LTNLIGNSATGIY

SEQ ID NO: 58636 - protein, 14 aa, unidentified
  source 1..14: note = methanogen bacteria
IVLLIYGPEFTDSA

SEQ ID NO: 58637 - protein, 33 aa, unidentified
  source 1..33: note = methanogen bacteria
TDIGIVDSLFESMSALTGSGITIYPDVESLPNS

SEQ ID NO: 58638 - protein, 33 aa, unidentified
  source 1..33: note = methanogen bacteria
GMPLFDSICHTFSVISTGGMSTKNANIGFYHDD

SEQ ID NO: 58639 - protein, 34 aa, unidentified
  source 1..34: note = methanogen bacteria
SQITPMDNLFVVVSAITTTGSSIQSSTVMGGWPP

SEQ ID NO: 58640 - protein, 32 aa, unidentified
  source 1..32: note = methanogen bacteria
YGHDAFDSLFFSMSMQGNVGLEIGQMSQTIEW

SEQ ID NO: 58641 - protein, 44 aa, unidentified
  source 1..44: note = methanogen bacteria
YNPGVLTVSSYSQLHQIATGEFTTAHPIFHTLIEMLLIKIFGTP

SEQ ID NO: 58642 - protein, 71 aa, unidentified
  source 1..71: note = methanogen bacteria
YDVQTDKLKIPADDAFENNINLKGAQNQFFSTINAEPEQEYEKISSVNTKQGSYAIIDSYVDTWQENPILE

SEQ ID NO: 58643 - protein, 15 aa, unidentified
  source 1..15: note = methanogen bacteria
IKEIRITDTISFLLL

SEQ ID NO: 58644 - protein, 10 aa, unidentified
  source 1..10: note = methanogen bacteria
SGQSIETIFH

SEQ ID NO: 58645 - protein, 42 aa, unidentified
  source 1..42: note = methanogen bacteria
VSLLPYHPYAFAMASGIGSASMNAAALVPLVHMHPAMETQLE

SEQ ID NO: 58646 - protein, 16 aa, unidentified
  source 1..16: note = methanogen bacteria
GMPTSEFVTHYASQVE

SEQ ID NO: 58647 - protein, 22 aa, unidentified
  source 1..22: note = methanogen bacteria
PPIMFEEMADLYSIPYWLTGFN

SEQ ID NO: 58648 - protein, 18 aa, unidentified
  source 1..18: note = methanogen bacteria
QYLWGTMGDSFYLKANIS

SEQ ID NO: 58649 - protein, 12 aa, unidentified
  source 1..12: note = methanogen bacteria
LSYLSGNYSTGL

SEQ ID NO: 58650 - protein, 17 aa, unidentified
  source 1..17: note = methanogen bacteria
RPLVDLIYRNQYSLATT

SEQ ID NO: 58651 - protein, 10 aa, unidentified
  source 1..10: note = methanogen bacteria
ANYLGAEGFG

SEQ ID NO: 58652 - protein, 12 aa, unidentified
  source 1..12: note = methanogen bacteria
SFIQGDISVGLY

SEQ ID NO: 58653 - protein, 15 aa, unidentified
  source 1..15: note = methanogen bacteria
EIIFFIYSPEYLDSV

SEQ ID NO: 58654 - protein, 31 aa, unidentified
  source 1..31: note = methanogen bacteria
SSFNFAWGSDPALYFVKSVGGSSNISNFTSI

SEQ ID NO: 58655 - protein, 24 aa, unidentified
  source 1..24: note = methanogen bacteria
ISLPGAGIGIDTLLNPNWNSLTDA

SEQ ID NO: 58656 - protein, 35 aa, unidentified
  source 1..35: note = methanogen bacteria
GYMSLTSGTPMIQLISEGTGLVFIVFPMIFNIMGP

SEQ ID NO: 58657 - protein, 12 aa, unidentified
  source 1..12: note = methanogen bacteria
LTPMAGDYATGI

SEQ ID NO: 58658 - protein, 17 aa, unidentified
  source 1..17: note = methanogen bacteria
TDIVVLFFGREYAAAST

SEQ ID NO: 58659 - protein, 12 aa, unidentified
  source 1..12: note = methanogen bacteria
LSYLTGDYATGL

SEQ ID NO: 58660 - protein, 17 aa, unidentified
  source 1..17: note = methanogen bacteria
RPLVDLIYSNQYSLATT

SEQ ID NO: 58661 - protein, 44 aa, unidentified
  source 1..44: note = methanogen bacteria
FNPGVLTYDSFDQLSQIAYHNFGTWHPFFHTFIEMLCLKIYPDP

SEQ ID NO: 58662 - protein, 13 aa, unidentified
  source 1..13: note = methanogen bacteria
IQFLAGDYATGIY

SEQ ID NO: 58663 - protein, 17 aa, unidentified
  source 1..17: note = methanogen bacteria
PYIIDLIYSSEYALASS

SEQ ID NO: 58664 - protein, 12 aa, unidentified
  source 1..12: note = methanogen bacteria
QMIAGDYATGLY

SEQ ID NO: 58665 - protein, 16 aa, unidentified
  source 1..16: note = methanogen bacteria
YIINLIYSSQYALASP

SEQ ID NO: 58666 - protein, 14 aa, unidentified
  source 1..14: note = methanogen bacteria
MLTQMSNTYYVGLY

SEQ ID NO: 58667 - protein, 15 aa, unidentified
  source 1..15: note = methanogen bacteria
DMIVFCFGSKFSEAG

SEQ ID NO: 58668 - protein, 10 aa, unidentified
  source 1..10: note = methanogen bacteria
ARYLGPSEYG

SEQ ID NO: 58669 - protein, 14 aa, unidentified
  source 1..14: note = methanogen bacteria
MITQMSTTYNAGLY

SEQ ID NO: 58670 - protein, 15 aa, unidentified
  source 1..15: note = methanogen bacteria
YDLIGIYGAQFIEAG

SEQ ID NO: 58671 - protein, 12 aa, unidentified
  source 1..12: note = methanogen bacteria
SWLVGDYATGIY

SEQ ID NO: 58672 - protein, 17 aa, unidentified
  source 1..17: note = methanogen bacteria
PYLITLIYGSTYALAAI

SEQ ID NO: 58673 - protein, 12 aa, unidentified
  source 1..12: note = methanogen bacteria
ISYLSGDYATGL

SEQ ID NO: 58674 - protein, 17 aa, unidentified
  source 1..17: note = methanogen bacteria
RPLVDLIYSNQYSLATT

SEQ ID NO: 58675 - protein, 13 aa, unidentified
  source 1..13: note = methanogen bacteria
ISWLSGDYSTGIY

SEQ ID NO: 58676 - protein, 16 aa, unidentified
  source 1..16: note = methanogen bacteria
YIVTLIYSSQYALASA

SEQ ID NO: 58677 - protein, 12 aa, unidentified
  source 1..12: note = methanogen bacteria
IAGLGVDQLAAI

SEQ ID NO: 58678 - protein, 19 aa, unidentified
  source 1..19: note = methanogen bacteria
ELIIFMGGRGIALDYAMQY

SEQ ID NO: 58679 - protein, 12 aa, unidentified
  source 1..12: note = methanogen bacteria
LEVSTTDYIAVF

SEQ ID NO: 58680 - protein, 20 aa, unidentified
  source 1..20: note = methanogen bacteria
LAYLFSYGETSIRLLNPTTT

SEQ ID NO: 58681 - protein, 11 aa, unidentified
  source 1..11: note = methanogen bacteria
SFLTGNYATGL

SEQ ID NO: 58682 - protein, 17 aa, unidentified
  source 1..17: note = methanogen bacteria
RPIVDFIYSNQYSLAST

SEQ ID NO: 58683 - protein, 10 aa, unidentified
  source 1..10: note = methanogen bacteria
ARYLGKSDFG

SEQ ID NO: 58684 - protein, 13 aa, unidentified
  source 1..13: note = methanogen bacteria
LEYLSAQSSVGMY

SEQ ID NO: 58685 - protein, 13 aa, unidentified
  source 1..13: note = methanogen bacteria
MNFIYGSQYYGTG

SEQ ID NO: 58686 - protein, 12 aa, unidentified
  source 1..12: note = methanogen bacteria
ISWLANDYATGL

SEQ ID NO: 58687 - protein, 17 aa, unidentified
  source 1..17: note = methanogen bacteria
PYLIDLIYTNQYALASL

SEQ ID NO: 58688 - protein, 13 aa, unidentified
  source 1..13: note = methanogen bacteria
LTNMVSSYANGIY

SEQ ID NO: 58689 - protein, 16 aa, unidentified
  source 1..16: note = methanogen bacteria
DIVVLFFGKEFLAASS

SEQ ID NO: 58690 - protein, 13 aa, unidentified
  source 1..13: note = methanogen bacteria
IQFLAGDYATGIY

SEQ ID NO: 58691 - protein, 17 aa, unidentified
  source 1..17: note = methanogen bacteria
PYIIDLIYSSEYALASS

SEQ ID NO: 58692 - protein, 12 aa, unidentified
  source 1..12: note = methanogen bacteria
SQVVVDLNTDVS

SEQ ID NO: 58693 - protein, 54 aa, unidentified
  source 1..54: note = methanogen bacteria
IMGGISNAVGTYAPAHSGDEQFHQDVFNHFQKMASVNEIASQGSTVVTIVDSIF

SEQ ID NO: 58694 - protein, 10 aa, unidentified
  source 1..10: note = methanogen bacteria
ARYLGVYNNG

SEQ ID NO: 58695 - protein, 14 aa, unidentified
  source 1..14: note = methanogen bacteria
MLTQFSSAYQTGLY

SEQ ID NO: 58696 - protein, 17 aa, unidentified
  source 1..17: note = methanogen bacteria
NDIIVFCYGNQYASADN

SEQ ID NO: 58697 - protein, 12 aa, unidentified
  source 1..12: note = methanogen bacteria
SWLAGDYATGLY

SEQ ID NO: 58698 - protein, 17 aa, unidentified
  source 1..17: note = methanogen bacteria
PYLITLIYGSTYALAAV

SEQ ID NO: 58699 - protein, 13 aa, unidentified
  source 1..13: note = methanogen bacteria
ITQFSTTYATGLY

SEQ ID NO: 58700 - protein, 15 aa, unidentified
  source 1..15: note = methanogen bacteria
YDLIGIYGAEYIEAG

SEQ ID NO: 58701 - protein, 21 aa, unidentified
  source 1..21: note = methanogen bacteria
IGGYSFPAMSIENLHPAGLEL

SEQ ID NO: 58702 - protein, 32 aa, unidentified
  source 1..32: note = methanogen bacteria
AYYGGTGGLTASLDAHGASAVIYDLSIDVAGS

SEQ ID NO: 58703 - protein, 34 aa, unidentified
  source 1..34: note = methanogen bacteria
YLDDLNSYVLASTLNDYVQNSALDAYATAADLAR

SEQ ID NO: 58704 - protein, 10 aa, unidentified
  source 1..10: note = methanogen bacteria
DLTALQAIEN

SEQ ID NO: 58705 - protein, 13 aa, unidentified
  source 1..13: note = methanogen bacteria
AWTGSEWDQFGSI

SEQ ID NO: 58706 - protein, 18 aa, unidentified
  source 1..18: note = methanogen bacteria
VMNDGKVTAQESGILITT

SEQ ID NO: 58707 - protein, 12 aa, unidentified
  source 1..12: note = methanogen bacteria
EIECIDNCPIQG

SEQ ID NO: 58708 - protein, 14 aa, unidentified
  source 1..14: note = methanogen bacteria
SNGPAGFTGKVGDS

SEQ ID NO: 58709 - protein, 17 aa, unidentified
  source 1..17: note = methanogen bacteria
GSYAVVYDQSAKYPAVD

SEQ ID NO: 58710 - protein, 11 aa, unidentified
  source 1..11: note = methanogen bacteria
SYLTGNYSTGL

SEQ ID NO: 58711 - protein, 17 aa, unidentified
  source 1..17: note = methanogen bacteria
RPLVDLIYSNQYSLATT

SEQ ID NO: 58712 - protein, 80 aa, unidentified
  source 1..80: note = methanogen bacteria
SMVYDTDYWALVIRNIDSGNGLYGLDGYFYTPVWGYLLALEEWFNDSFLGLGESAVRVSEIVYFENGDHQTAATITSVAF

SEQ ID NO: 58713 - protein, 28 aa, unidentified
  source 1..28: note = methanogen bacteria
ISDGTVGECFRFITDRMGISFGDSAGSR

SEQ ID NO: 58714 - protein, 31 aa, unidentified
  source 1..31: note = methanogen bacteria
MPIAVWTDLLDVSSLAHYYDVWNAGPGVLTV

SEQ ID NO: 58715 - protein, 12 aa, unidentified
  source 1..12: note = methanogen bacteria
LGLDEELIDLIN

SEQ ID NO: 58716 - protein, 22 aa, unidentified
  source 1..22: note = methanogen bacteria
IFLRADEFTKGDAAADFDSFRP

SEQ ID NO: 58717 - protein, 16 aa, unidentified
  source 1..16: note = methanogen bacteria
LGFNLTAIITSAGLVS

SEQ ID NO: 58718 - protein, 25 aa, unidentified
  source 1..25: note = methanogen bacteria
ILATRPFKKGDLVAVGADVQVYRVR

SEQ ID NO: 58719 - protein, 83 aa, unidentified
  source 1..83: note = methanogen bacteria
LENWDNTDVFIMPNSLLTTNKIRNITRETLISKVYLTVDIAYGSDVNLARKLMQEAATENPHVISDGSVKRPYTRLEAFEDSN

SEQ ID NO: 58720 - protein, 52 aa, unidentified
  source 1..52: note = methanogen bacteria
THTILHIDEYWTYSLVNLPFMQGMTVAVHDVHPILYYLILYLFKPIAGSDNF

SEQ ID NO: 58721 - protein, 34 aa, unidentified
  source 1..34: note = methanogen bacteria
HQIQGQSDEFHQAINWSTIPNYFTYFAIKSDSFA

SEQ ID NO: 58722 - protein, 12 aa, unidentified
  source 1..12: note = methanogen bacteria
LSYISGDYATGL

SEQ ID NO: 58723 - protein, 17 aa, unidentified
  source 1..17: note = methanogen bacteria
RPIVDLIYSNQYSLAST

SEQ ID NO: 58724 - protein, 51 aa, unidentified
  source 1..51: note = methanogen bacteria
THTIINVDEYWTYSLVNLPFMQGMIVAVHDVHPPLYYMILYLLTPLGLENL

SEQ ID NO: 58725 - protein, 35 aa, unidentified
  source 1..35: note = methanogen bacteria
HQMQTQAGEPREGFELASAIHYLTAFAIKGQNFEF

SEQ ID NO: 58726 - protein, 10 aa, unidentified
  source 1..10: note = methanogen bacteria
TKSFTTAEYG

SEQ ID NO: 58727 - protein, 13 aa, unidentified
  source 1..13: note = methanogen bacteria
NTIANSLFNGSMQ

SEQ ID NO: 58728 - protein, 14 aa, unidentified
  source 1..14: note = methanogen bacteria
LYIITTPEIALGGY

SEQ ID NO: 58729 - protein, 21 aa, unidentified
  source 1..21: note = methanogen bacteria
SYIYPEFLQGYLYTVEGYDIY

SEQ ID NO: 58730 - protein, 20 aa, unidentified
  source 1..20: note = methanogen bacteria
FSGDPANISENAFSGSGGDA

SEQ ID NO: 58731 - protein, 32 aa, unidentified
  source 1..32: note = methanogen bacteria
GSVMDESQIQASMTGNGLVTADAMAIALGNQA

SEQ ID NO: 58732 - protein, 26 aa, unidentified
  source 1..26: note = methanogen bacteria
LSGDGILDAFGSIFGDALSPPSVIGG

SEQ ID NO: 58733 - protein, 30 aa, unidentified
  source 1..30: note = methanogen bacteria
SYADVGAFIGGDGDSIDCLQEVFKETIGSG

SEQ ID NO: 58734 - protein, 13 aa, unidentified
  source 1..13: note = methanogen bacteria
MSFDSFIDSVWEF

SEQ ID NO: 58735 - protein, 11 aa, unidentified
  source 1..11: note = methanogen bacteria
SFTGAYEFEYN

SEQ ID NO: 58736 - protein, 27 aa, unidentified
  source 1..27: note = methanogen bacteria
MNAGGIPDAIEAIFTCAFNVPAAVGGG

SEQ ID NO: 58737 - protein, 31 aa, unidentified
  source 1..31: note = methanogen bacteria
FFHGDYDAMMGLGIEDSMPLLEHVLSESLGG

SEQ ID NO: 58738 - protein, 26 aa, unidentified
  source 1..26: note = methanogen bacteria
LSGDGILDAFGSIFGDALSPPSVIGG

SEQ ID NO: 58739 - protein, 30 aa, unidentified
  source 1..30: note = methanogen bacteria
SYADVGAFIGGDGDSIDCLQEVFKDTIGSG

SEQ ID NO: 58740 - protein, 23 aa, unidentified
  source 1..23: note = methanogen bacteria
MDLLLKYSIFKNNYATTQAGAVL

SEQ ID NO: 58741 - protein, 10 aa, unidentified
  source 1..10: note = methanogen bacteria
IKNCSFINNS

SEQ ID NO: 58742 - protein, 51 aa, unidentified
  source 1..51: note = methanogen bacteria
THTIINIDEYWTYSLVNLPFMEGMAVAIHDVHPPLYYWILYLFTPFGLGNL

SEQ ID NO: 58743 - protein, 36 aa, unidentified
  source 1..36: note = methanogen bacteria
HQIQTHANDAKEGFELVNVIHYFTAFAIKSQNFRLD

SEQ ID NO: 58744 - protein, 22 aa, unidentified
  source 1..22: note = methanogen bacteria
LNPNYTIPEFTTPGLYLTDKPI

SEQ ID NO: 58745 - protein, 30 aa, unidentified
  source 1..30: note = methanogen bacteria
FFHSQPQLAASFAGTPSIGVYEMSSKLLNP

SEQ ID NO: 58746 - protein, 44 aa, unidentified
  source 1..44: note = methanogen bacteria
YNPGVLTAASFSQLHQIATGKFTGAYPILHTLIEIICLKIYASP

SEQ ID NO: 58747 - protein, 73 aa, unidentified
  source 1..73: note = methanogen bacteria
YHVDGTGNSNFPANDAFEDGVNLANAKNQFFTSVNDVPRENFENSTSANLKTDKFKSLNSFVDLTRENIILDG

SEQ ID NO: 58748 - protein, 17 aa, unidentified
  source 1..17: note = methanogen bacteria
LYYMASSIPEHSVFLFT

SEQ ID NO: 58749 - protein, 19 aa, unidentified
  source 1..19: note = methanogen bacteria
LFCKTYVSPTIPFTNFNIS

SEQ ID NO: 58750 - protein, 11 aa, unidentified
  source 1..11: note = methanogen bacteria
KTYDGSTPIDM

SEQ ID NO: 58751 - protein, 21 aa, unidentified
  source 1..21: note = methanogen bacteria
AYPSDPGVVTKFLGLIPVPDL

SEQ ID NO: 58752 - protein, 19 aa, unidentified
  source 1..19: note = methanogen bacteria
SYYAYGGAVYWAGDKGTLA

SEQ ID NO: 58753 - protein, 27 aa, unidentified
  source 1..27: note = methanogen bacteria
IVAVPFLSNGVIVAVPTIASDFAMNNV

SEQ ID NO: 58754 - protein, 11 aa, unidentified
  source 1..11: note = methanogen bacteria
YHFQYVRGWNT

SEQ ID NO: 58755 - protein, 19 aa, unidentified
  source 1..19: note = methanogen bacteria
WIMGDLPMLAKYADLIVQG

SEQ ID NO: 58756 - protein, 52 aa, unidentified
  source 1..52: note = methanogen bacteria
ISNVLIHVDEYWTLSLINLPFLEGMRIAISDVHPPLHYIILYAASPITSNNI

SEQ ID NO: 58757 - protein, 34 aa, unidentified
  source 1..34: note = methanogen bacteria
RQIGTQTSASHEATTFNNVANYLTVFAINKGGFS

SEQ ID NO: 58758 - protein, 15 aa, unidentified
  source 1..15: note = methanogen bacteria
VKEIKITDTISVLLL

SEQ ID NO: 58759 - protein, 41 aa, unidentified
  source 1..41: note = methanogen bacteria
SLIPFHPYAFAMASGIGSASMNAAALVPLVHTYPAMATQLE

SEQ ID NO: 58760 - protein, 16 aa, unidentified
  source 1..16: note = methanogen bacteria
GVPTAEFIVHYVSQVE

SEQ ID NO: 58761 - protein, 51 aa, unidentified
  source 1..51: note = methanogen bacteria
MNIYLHVDEYWTYTLINLPIRNAITVIVNDVHPPLYYGIVYLLTPFGLNNL

SEQ ID NO: 58762 - protein, 36 aa, unidentified
  source 1..36: note = methanogen bacteria
RQIMTESSGFHEGFKLDSLIHYLFAFAIKSEDFRHE

SEQ ID NO: 58763 - protein, 14 aa, unidentified
  source 1..14: note = methanogen bacteria
MLDVIVTILTEIDN

SEQ ID NO: 58764 - protein, 11 aa, unidentified
  source 1..11: note = methanogen bacteria
IEYSFYNPSTT

SEQ ID NO: 58765 - protein, 24 aa, unidentified
  source 1..24: note = methanogen bacteria
NYANIPSMFILILQDAFDFKSIAG

SEQ ID NO: 58766 - protein, 26 aa, unidentified
  source 1..26: note = methanogen bacteria
STGVARNAAVSGAPYVQDAISTVFGI

SEQ ID NO: 58767 - protein, 44 aa, unidentified
  source 1..44: note = methanogen bacteria
FNQGVATIDSFNQLHQIASGEFTNWHPFFHTFIEMLCLKIYPST

SEQ ID NO: 58768 - protein, 51 aa, unidentified
  source 1..51: note = methanogen bacteria
TNMFINVDEYWTYSLVNLPFMQGMIVAVHDVHPPLYYMILYLFAPFGLANL

SEQ ID NO: 58769 - protein, 34 aa, unidentified
  source 1..34: note = methanogen bacteria
HQIQTQSGEPNEGFELVNAIHYLTAFAIKSQNFE

SEQ ID NO: 58770 - protein, 13 aa, unidentified
  source 1..13: note = methanogen bacteria
MIDPSFILNQVDN

SEQ ID NO: 58771 - protein, 10 aa, unidentified
  source 1..10: note = methanogen bacteria
MDYSFYNSAT

SEQ ID NO: 58772 - protein, 24 aa, unidentified
  source 1..24: note = methanogen bacteria
NYHNIPSMFVLIFQDAFDFKSIAG

SEQ ID NO: 58773 - protein, 26 aa, unidentified
  source 1..26: note = methanogen bacteria
STGVARDATVAGAPYVQTAIGSVLGI

SEQ ID NO: 58774 - protein, 10 aa, unidentified
  source 1..10: note = methanogen bacteria
MDYAFYNANT

SEQ ID NO: 58775 - protein, 24 aa, unidentified
  source 1..24: note = methanogen bacteria
NYANIPSMIMIIFQDAFDFQSIAG

SEQ ID NO: 58776 - protein, 26 aa, unidentified
  source 1..26: note = methanogen bacteria
STGVARDAAVSGAPYVQNALSTVMGT

SEQ ID NO: 58777 - protein, 13 aa, unidentified
  source 1..13: note = methanogen bacteria
MLDIFTILNQIDS

SEQ ID NO: 58778 - protein, 24 aa, unidentified
  source 1..24: note = methanogen bacteria
LFYIPSMFMLIFQNAFDFQSIAGG

SEQ ID NO: 58779 - protein, 26 aa, unidentified
  source 1..26: note = methanogen bacteria
STGVARNAAVSGAPYVQNAIFSVFGP

SEQ ID NO: 58780 - protein, 13 aa, unidentified
  source 1..13: note = methanogen bacteria
MQNIVSILNQTDD

SEQ ID NO: 58781 - protein, 10 aa, unidentified
  source 1..10: note = methanogen bacteria
IDYSFYSPAT

SEQ ID NO: 58782 - protein, 24 aa, unidentified
  source 1..24: note = methanogen bacteria
NYQNVPAMVLLIFQDAFNFQSILG

SEQ ID NO: 58783 - protein, 26 aa, unidentified
  source 1..26: note = methanogen bacteria
STGVARNATVSGAPYVQNAIHTVFGT

SEQ ID NO: 58784 - protein, 23 aa, unidentified
  source 1..23: note = methanogen bacteria
YANIPSMFFLIFQDAFDFQSIAG

SEQ ID NO: 58785 - protein, 26 aa, unidentified
  source 1..26: note = methanogen bacteria
STGVARDAAVSGAPYVQNAISTVFGW

SEQ ID NO: 58786 - protein, 24 aa, unidentified
  source 1..24: note = methanogen bacteria
NIQNVPAMFLLIFQDAFDFHSILG

SEQ ID NO: 58787 - protein, 26 aa, unidentified
  source 1..26: note = methanogen bacteria
STGVARDAVVSGAPYVQNAISTVLGP

SEQ ID NO: 58788 - protein, 13 aa, unidentified
  source 1..13: note = methanogen bacteria
VPSIANEFGMNNV

SEQ ID NO: 58789 - protein, 11 aa, unidentified
  source 1..11: note = methanogen bacteria
YHFQYVRGWNA

SEQ ID NO: 58790 - protein, 18 aa, unidentified
  source 1..18: note = methanogen bacteria
IMGSLKLSSQYAGMVVQA

SEQ ID NO: 58791 - protein, 13 aa, unidentified
  source 1..13: note = methanogen bacteria
VYLMSDFSVSSTQ

SEQ ID NO: 58792 - protein, 12 aa, unidentified
  source 1..12: note = methanogen bacteria
LFIQGIAYNSAI

SEQ ID NO: 58793 - protein, 15 aa, unidentified
  source 1..15: note = methanogen bacteria
AGGAIGHNSASVVAF

SEQ ID NO: 58794 - protein, 10 aa, unidentified
  source 1..10: note = methanogen bacteria
MLEVLHFSVP

SEQ ID NO: 58795 - protein, 18 aa, unidentified
  source 1..18: note = methanogen bacteria
LFYLTANVAEHSSFLFSY

SEQ ID NO: 58796 - protein, 18 aa, unidentified
  source 1..18: note = methanogen bacteria
SMDYVNNIIPVINYEIFP

SEQ ID NO: 58797 - protein, 20 aa, unidentified
  source 1..20: note = methanogen bacteria
ALPSGGETTMLLGIIPISNI

SEQ ID NO: 58798 - protein, 22 aa, unidentified
  source 1..22: note = methanogen bacteria
YQNIPSMFMLIFQDAFNLKPII

SEQ ID NO: 58799 - protein, 26 aa, unidentified
  source 1..26: note = methanogen bacteria
STGVARDVSVSGAPYVQNAISTVFGT

SEQ ID NO: 58800 - protein, 15 aa, unidentified
  source 1..15: note = methanogen bacteria
MMSLSGMFGSGTMDV

SEQ ID NO: 58801 - protein, 18 aa, unidentified
  source 1..18: note = methanogen bacteria
SMLEPIKELASGISIGPT

SEQ ID NO: 58802 - protein, 10 aa, unidentified
  source 1..10: note = methanogen bacteria
MIDVLHFSDP

SEQ ID NO: 58803 - protein, 18 aa, unidentified
  source 1..18: note = methanogen bacteria
SLFNITANVHEHSALLFT

SEQ ID NO: 58804 - protein, 17 aa, unidentified
  source 1..17: note = methanogen bacteria
AESHVNNVIPFINQSVS

SEQ ID NO: 58805 - protein, 18 aa, unidentified
  source 1..18: note = methanogen bacteria
FPNQNPTMLFNIIPIANL

SEQ ID NO: 58806 - protein, 13 aa, unidentified
  source 1..13: note = methanogen bacteria
MIDIVAILTAIDD

SEQ ID NO: 58807 - protein, 22 aa, unidentified
  source 1..22: note = methanogen bacteria
YQNIPSMIMLIFQDAFNFKTIL

SEQ ID NO: 58808 - protein, 26 aa, unidentified
  source 1..26: note = methanogen bacteria
STGVARDVSVSGAPYVQNAISTVFGT

SEQ ID NO: 58809 - protein, 12 aa, unidentified
  source 1..12: note = methanogen bacteria
VGIMSDFHVSST

SEQ ID NO: 58810 - protein, 12 aa, unidentified
  source 1..12: note = methanogen bacteria
LFVQGVCNQSAT

SEQ ID NO: 58811 - protein, 18 aa, unidentified
  source 1..18: note = methanogen bacteria
VFTGGYVAHNKITVGAFS

SEQ ID NO: 58812 - protein, 10 aa, unidentified
  source 1..10: note = methanogen bacteria
MYEVLHFSVQ

SEQ ID NO: 58813 - protein, 19 aa, unidentified
  source 1..19: note = methanogen bacteria
SLYYLTEAVPTHSTLLFSY

SEQ ID NO: 58814 - protein, 17 aa, unidentified
  source 1..17: note = methanogen bacteria
IHYINNTIPFTNITIAP

SEQ ID NO: 58815 - protein, 20 aa, unidentified
  source 1..20: note = methanogen bacteria
CVPTPGHCTKLFGLIQINSL

SEQ ID NO: 58816 - protein, 22 aa, unidentified
  source 1..22: note = methanogen bacteria
MNPHYTIPEFTTPGLYLTTKSI

SEQ ID NO: 58817 - protein, 30 aa, unidentified
  source 1..30: note = methanogen bacteria
FFHGQPQLAVIYGATPAVGVNEMATTLVGS

SEQ ID NO: 58818 - protein, 11 aa, unidentified
  source 1..11: note = methanogen bacteria
VAGLGAEPLAA

SEQ ID NO: 58819 - protein, 16 aa, unidentified
  source 1..16: note = methanogen bacteria
LKMMGATSVLKYALDY

SEQ ID NO: 58820 - protein, 12 aa, unidentified
  source 1..12: note = methanogen bacteria
TIVSGPTSVAVY

SEQ ID NO: 58821 - protein, 21 aa, unidentified
  source 1..21: note = methanogen bacteria
QIAFIFSYSENSAQLEPLIAS

SEQ ID NO: 58822 - protein, 13 aa, unidentified
  source 1..13: note = methanogen bacteria
FPHIMVEYAISAG

SEQ ID NO: 58823 - protein, 10 aa, unidentified
  source 1..10: note = methanogen bacteria
YLETSLHTSS

SEQ ID NO: 58824 - protein, 25 aa, unidentified
  source 1..25: note = methanogen bacteria
IGQNNYLSAIANPTAVQHALALAKG

SEQ ID NO: 58825 - protein, 22 aa, unidentified
  source 1..22: note = methanogen bacteria
LNPSYSIPEFTTQGLYLTDKNI

SEQ ID NO: 58826 - protein, 30 aa, unidentified
  source 1..30: note = methanogen bacteria
FFHGQPQLAAIYGAQPAVAVKEMATVLVGP

SEQ ID NO: 58827 - protein, 10 aa, unidentified
  source 1..10: note = methanogen bacteria
VSSIGEAAVS

SEQ ID NO: 58828 - protein, 20 aa, unidentified
  source 1..20: note = methanogen bacteria
YIIDILFGQIGDDVFYNAHI

SEQ ID NO: 58829 - protein, 10 aa, unidentified
  source 1..10: note = methanogen bacteria
STFGTVAIAA

SEQ ID NO: 58830 - protein, 17 aa, unidentified
  source 1..17: note = methanogen bacteria
LSLYGLTPECKDLAAQM

SEQ ID NO: 58831 - protein, 13 aa, unidentified
  source 1..13: note = methanogen bacteria
VYLMSDFSVSSTQ

SEQ ID NO: 58832 - protein, 11 aa, unidentified
  source 1..11: note = methanogen bacteria
IFVQGVAYNSA

SEQ ID NO: 58833 - protein, 16 aa, unidentified
  source 1..16: note = methanogen bacteria
LAGGAIDHNAASVAGF

SEQ ID NO: 58834 - protein, 11 aa, unidentified
  source 1..11: note = methanogen bacteria
VAGLGPGALSA

SEQ ID NO: 58835 - protein, 16 aa, unidentified
  source 1..16: note = methanogen bacteria
LILIGAGNVLNYAMDY

SEQ ID NO: 58836 - protein, 10 aa, unidentified
  source 1..10: note = methanogen bacteria
MQVSNHISVA

SEQ ID NO: 58837 - protein, 21 aa, unidentified
  source 1..21: note = methanogen bacteria
QIATIFSYSSESAGLAPQIAS

SEQ ID NO: 58838 - protein, 31 aa, unidentified
  source 1..31: note = methanogen bacteria
SFTKGWGANPDTFFANTLLQSSESMAGLTHF

SEQ ID NO: 58839 - protein, 25 aa, unidentified
  source 1..25: note = methanogen bacteria
LTLPGASIGLAELFNPDWSLLTHFE

SEQ ID NO: 58840 - protein, 37 aa, unidentified
  source 1..37: note = methanogen bacteria
LGYMSLQSGTAVADLVTQGTGLVFVVYPTVFNVLGHW

SEQ ID NO: 58841 - protein, 30 aa, unidentified
  source 1..30: note = methanogen bacteria
NVTYTFLINGTVIKQATVAINETDASYTDK

SEQ ID NO: 58842 - protein, 15 aa, unidentified
  source 1..15: note = methanogen bacteria
ILIEYTGPTNTEQQQ

SEQ ID NO: 58843 - protein, 13 aa, unidentified
  source 1..13: note = methanogen bacteria
MGDAVGAYERMHL

SEQ ID NO: 58844 - protein, 16 aa, unidentified
  source 1..16: note = methanogen bacteria
SIVQDTIAKAEADGII

SEQ ID NO: 58845 - protein, 14 aa, unidentified
  source 1..14: note = methanogen bacteria
NDNIEFATGLPSID

SEQ ID NO: 58846 - protein, 18 aa, unidentified
  source 1..18: note = methanogen bacteria
SPEATSGLIKEVYSEIDE

SEQ ID NO: 58847 - protein, 12 aa, unidentified
  source 1..12: note = methanogen bacteria
VSSISSDAVVAM

SEQ ID NO: 58848 - protein, 17 aa, unidentified
  source 1..17: note = methanogen bacteria
VLKFMDVSESVELAKQY

SEQ ID NO: 58849 - protein, 15 aa, unidentified
  source 1..15: note = methanogen bacteria
YVYQSFSVVNMETSI

SEQ ID NO: 58850 - protein, 29 aa, unidentified
  source 1..29: note = methanogen bacteria
ITFSWGTDAALYFVNNVGGSSNLSDASFL

SEQ ID NO: 58851 - protein, 23 aa, unidentified
  source 1..23: note = methanogen bacteria
TLPGVDIGINTLLNPSWDKLFDV

SEQ ID NO: 58852 - protein, 35 aa, unidentified
  source 1..35: note = methanogen bacteria
GFMSYTNGTPMVQLITEGTGLIFIVFPMIFNIMGV

SEQ ID NO: 58853 - protein, 22 aa, unidentified
  source 1..22: note = methanogen bacteria
LNPAYTIPEFTTQGLYLTDKNI

SEQ ID NO: 58854 - protein, 30 aa, unidentified
  source 1..30: note = methanogen bacteria
FFHVQPQLAAGYAAAPTVAVYEMATKLLNP

SEQ ID NO: 58855 - protein, 21 aa, unidentified
  source 1..21: note = methanogen bacteria
IIDTFNVNIFDASTVKTAVMG

SEQ ID NO: 58856 - protein, 17 aa, unidentified
  source 1..17: note = methanogen bacteria
LYNLSTAIPTHSNFLFT

SEQ ID NO: 58857 - protein, 17 aa, unidentified
  source 1..17: note = methanogen bacteria
MNYVNNTVPFINYTLSP

SEQ ID NO: 58858 - protein, 21 aa, unidentified
  source 1..21: note = methanogen bacteria
AFPEKPGVVNSLFGLIPIPNL

SEQ ID NO: 58859 - protein, 10 aa, unidentified
  source 1..10: note = methanogen bacteria
SFLLTILSPE

SEQ ID NO: 58860 - protein, 10 aa, unidentified
  source 1..10: note = methanogen bacteria
FQTPISSGVS

SEQ ID NO: 58861 - protein, 22 aa, unidentified
  source 1..22: note = methanogen bacteria
IGNPRSGIAVYMSYLISEMTLN

SEQ ID NO: 58862 - protein, 36 aa, unidentified
  source 1..36: note = methanogen bacteria
TLNHWMDGAFELWTSCSTSSASKALPTTSHFSRPLS

SEQ ID NO: 58863 - protein, 20 aa, unidentified
  source 1..20: note = methanogen bacteria
VLCCRFRLAVCTHMSHICTC

SEQ ID NO: 58864 - protein, 15 aa, unidentified
  source 1..15: note = methanogen bacteria
SKTIPITSSVTIVIM

SEQ ID NO: 58865 - protein, 10 aa, unidentified
  source 1..10: note = methanogen bacteria
GQSIITIIQA

SEQ ID NO: 58866 - protein, 40 aa, unidentified
  source 1..40: note = methanogen bacteria
SVLPLHPYAFAMASGIGSGSMNAAALAPLLKTFPSMARDI

SEQ ID NO: 58867 - protein, 16 aa, unidentified
  source 1..16: note = methanogen bacteria
GMPTADFLINYTNQIE

SEQ ID NO: 58868 - protein, 17 aa, unidentified
  source 1..17: note = methanogen bacteria
FKTTMFGPIGGTLPLWN

SEQ ID NO: 58869 - protein, 17 aa, unidentified
  source 1..17: note = methanogen bacteria
FKTTLFGPIGGHLGFSS

SEQ ID NO: 58870 - protein, 18 aa, unidentified
  source 1..18: note = methanogen bacteria
FHTTLFGPIGDHLGYETY

SEQ ID NO: 58871 - protein, 18 aa, unidentified
  source 1..18: note = methanogen bacteria
FYTTIFGPIGGHLGYEEY

SEQ ID NO: 58872 - protein, 18 aa, unidentified
  source 1..18: note = methanogen bacteria
FETTLFGPIGDHLSYETY

SEQ ID NO: 58873 - protein, 17 aa, unidentified
  source 1..17: note = methanogen bacteria
FKTTLFGPIGGHLGFQS

SEQ ID NO: 58874 - protein, 11 aa, unidentified
  source 1..11: note = methanogen bacteria
VAGLGPGALSA

SEQ ID NO: 58875 - protein, 16 aa, unidentified
  source 1..16: note = methanogen bacteria
LILIGAGNVLNYAMDY

SEQ ID NO: 58876 - protein, 10 aa, unidentified
  source 1..10: note = methanogen bacteria
MQVSNHISVA

SEQ ID NO: 58877 - protein, 21 aa, unidentified
  source 1..21: note = methanogen bacteria
QIATIFTYTSESAGLAPQIAS

SEQ ID NO: 58878 - protein, 14 aa, unidentified
  source 1..14: note = methanogen bacteria
TTMFGPIGGHLSLE

SEQ ID NO: 58879 - protein, 18 aa, unidentified
  source 1..18: note = methanogen bacteria
FHTTIFGPIGGHLPLHSY

SEQ ID NO: 58880 - protein, 18 aa, unidentified
  source 1..18: note = methanogen bacteria
FKTTIFGPIGGHLPLQDY

SEQ ID NO: 58881 - protein, 18 aa, unidentified
  source 1..18: note = methanogen bacteria
FKTTIFGPIGGHLPIQSY

SEQ ID NO: 58882 - protein, 18 aa, unidentified
  source 1..18: note = methanogen bacteria
FNTTIFGPIGGHLGFYSY

SEQ ID NO: 58883 - protein, 15 aa, unidentified
  source 1..15: note = methanogen bacteria
KTTLFGPIGGHLGFI

SEQ ID NO: 58884 - protein, 18 aa, unidentified
  source 1..18: note = methanogen bacteria
FHTTLFGPIGEHLPLHDY

SEQ ID NO: 58885 - protein, 16 aa, unidentified
  source 1..16: note = methanogen bacteria
FKTTLFGPLGGSLPFM

SEQ ID NO: 58886 - protein, 16 aa, unidentified
  source 1..16: note = methanogen bacteria
FKTTLFGPLGGSLPFM

SEQ ID NO: 58887 - protein, 16 aa, unidentified
  source 1..16: note = methanogen bacteria
FKTTLFGPIGGHLGSI

SEQ ID NO: 58888 - protein, 15 aa, unidentified
  source 1..15: note = methanogen bacteria
KTTLFGPIGGHLGFF

SEQ ID NO: 58889 - protein, 16 aa, unidentified
  source 1..16: note = methanogen bacteria
KTTLFGPLGGHLGFQS

SEQ ID NO: 58890 - protein, 17 aa, unidentified
  source 1..17: note = methanogen bacteria
FKTTIFGPLGGSLPFTD

SEQ ID NO: 58891 - protein, 18 aa, unidentified
  source 1..18: note = methanogen bacteria
FKTTLFGPIGEHLPLQDY

SEQ ID NO: 58892 - protein, 17 aa, unidentified
  source 1..17: note = methanogen bacteria
FKTTLFGPLGGHLGFQS

SEQ ID NO: 58893 - protein, 17 aa, unidentified
  source 1..17: note = methanogen bacteria
ISVDDSGIVVNKLNQKA

SEQ ID NO: 58894 - protein, 10 aa, unidentified
  source 1..10: note = methanogen bacteria
IPKSTMYKNE

SEQ ID NO: 58895 - protein, 16 aa, unidentified
  source 1..16: note = methanogen bacteria
KTTMFGPIGGHLSFQS

SEQ ID NO: 58896 - protein, 17 aa, unidentified
  source 1..17: note = methanogen bacteria
FHTTLFGPIGKHLGGQS

SEQ ID NO: 58897 - protein, 15 aa, unidentified
  source 1..15: note = methanogen bacteria
PMMGMSGLFKSGIDQ

SEQ ID NO: 58898 - protein, 16 aa, unidentified
  source 1..16: note = methanogen bacteria
ILGPMRALAGMADDGS

SEQ ID NO: 58899 - protein, 17 aa, unidentified
  source 1..17: note = methanogen bacteria
FKTTLFGPIGGHLGLSS

SEQ ID NO: 58900 - protein, 17 aa, unidentified
  source 1..17: note = methanogen bacteria
FKTTLFGPIGGHLGFSS

SEQ ID NO: 58901 - protein, 15 aa, unidentified
  source 1..15: note = methanogen bacteria
PMMGMSGLFQSAMDT

SEQ ID NO: 58902 - protein, 15 aa, unidentified
  source 1..15: note = methanogen bacteria
LGPMRAMAGMADDGS

SEQ ID NO: 58903 - protein, 16 aa, unidentified
  source 1..16: note = methanogen bacteria
FETNIIGVGTHIAGIE

SEQ ID NO: 58904 - protein, 18 aa, unidentified
  source 1..18: note = methanogen bacteria
FKTTLFGPIGGHLGVDSY

SEQ ID NO: 58905 - protein, 17 aa, unidentified
  source 1..17: note = methanogen bacteria
FETTLFGPIGGHLGYDI

SEQ ID NO: 58906 - protein, 10 aa, unidentified
  source 1..10: note = methanogen bacteria
KFLTIDAYAG

SEQ ID NO: 58907 - protein, 10 aa, unidentified
  source 1..10: note = methanogen bacteria
QLLDTRSFAL

SEQ ID NO: 58908 - protein, 12 aa, unidentified
  source 1..12: note = methanogen bacteria
VSLFIKSYMDIF

SEQ ID NO: 58909 - protein, 57 aa, unidentified
  source 1..57: note = methanogen bacteria
TLNGAFIHIDEYFTLGFIRFPVNELITITANDVHPPLYYVLLKIINNSSIINDSVFT

SEQ ID NO: 58910 - protein, 33 aa, unidentified
  source 1..33: note = methanogen bacteria
HQLTQVHNGYWIEPLDFYDIIDCLSFYAVNLDV

SEQ ID NO: 58911 - protein, 13 aa, unidentified
  source 1..13: note = methanogen bacteria
VYLMSDFSVSSTQ

SEQ ID NO: 58912 - protein, 12 aa, unidentified
  source 1..12: note = methanogen bacteria
IFIQGIAYNSAI

SEQ ID NO: 58913 - protein, 16 aa, unidentified
  source 1..16: note = methanogen bacteria
LAGGAIDHNSASVVGF

SEQ ID NO: 58914 - protein, 11 aa, unidentified
  source 1..11: note = methanogen bacteria
VAGLGADALAA

SEQ ID NO: 58915 - protein, 17 aa, unidentified
  source 1..17: note = methanogen bacteria
ILNLMGAGNTIKYALDY

SEQ ID NO: 58916 - protein, 12 aa, unidentified
  source 1..12: note = methanogen bacteria
VIVAGTTAVAVY

SEQ ID NO: 58917 - protein, 22 aa, unidentified
  source 1..22: note = methanogen bacteria
QIATAFSYTSASSALAPEIATA

SEQ ID NO: 58918 - protein, 15 aa, unidentified
  source 1..15: note = methanogen bacteria
VKEIRITDTISVLLL

SEQ ID NO: 58919 - protein, 10 aa, unidentified
  source 1..10: note = methanogen bacteria
SGQSIDIIFN

SEQ ID NO: 58920 - protein, 41 aa, unidentified
  source 1..41: note = methanogen bacteria
SLIPYHPYAFAMASGIGSASMNAAALVPLVHMYPAMATQLE

SEQ ID NO: 58921 - protein, 16 aa, unidentified
  source 1..16: note = methanogen bacteria
GVPTSDIIITYVSQIE

SEQ ID NO: 58922 - protein, 13 aa, unidentified
  source 1..13: note = methanogen bacteria
VYLMSDFSVSSTQ

SEQ ID NO: 58923 - protein, 11 aa, unidentified
  source 1..11: note = methanogen bacteria
IFIQGVAYNSA

SEQ ID NO: 58924 - protein, 15 aa, unidentified
  source 1..15: note = methanogen bacteria
AGGAIDHNTASVVAF

SEQ ID NO: 58925 - protein, 12 aa, unidentified
  source 1..12: note = methanogen bacteria
PTISSDLSLNVE

SEQ ID NO: 58926 - protein, 18 aa, unidentified
  source 1..18: note = methanogen bacteria
VLGASNSLESNIPLFITS

SEQ ID NO: 58927 - protein, 10 aa, unidentified
  source 1..10: note = methanogen bacteria
TKSFTTAEYG

SEQ ID NO: 58928 - protein, 13 aa, unidentified
  source 1..13: note = methanogen bacteria
NQIANALFNGSMQ

SEQ ID NO: 58929 - protein, 14 aa, unidentified
  source 1..14: note = methanogen bacteria
LYIITTPEIALGGY

SEQ ID NO: 58930 - protein, 13 aa, unidentified
  source 1..13: note = methanogen bacteria
LNQLVGNYATGIY

SEQ ID NO: 58931 - protein, 17 aa, unidentified
  source 1..17: note = methanogen bacteria
TDIIQLIYGHKYDAAAE

SEQ ID NO: 58932 - protein, 11 aa, unidentified
  source 1..11: note = methanogen bacteria
VAGLGPDALAA

SEQ ID NO: 58933 - protein, 16 aa, unidentified
  source 1..16: note = methanogen bacteria
LVLMGAGKTMTYAYRY

SEQ ID NO: 58934 - protein, 11 aa, unidentified
  source 1..11: note = methanogen bacteria
VIVAGTDAVAA

SEQ ID NO: 58935 - protein, 20 aa, unidentified
  source 1..20: note = methanogen bacteria
ISSIFAYTSASASLGPQIAY

SEQ ID NO: 58936 - protein, 11 aa, unidentified
  source 1..11: note = methanogen bacteria
VASLGEVAISG

SEQ ID NO: 58937 - protein, 19 aa, unidentified
  source 1..19: note = methanogen bacteria
LINTLFGQIDQDVFDTANI

SEQ ID NO: 58938 - protein, 10 aa, unidentified
  source 1..10: note = methanogen bacteria
STFGTMAIAA

SEQ ID NO: 58939 - protein, 17 aa, unidentified
  source 1..17: note = methanogen bacteria
LQIYALSPATAAMTSEM

SEQ ID NO: 58940 - protein, 10 aa, unidentified
  source 1..10: note = methanogen bacteria
VNRTGSFDNL

SEQ ID NO: 58941 - protein, 17 aa, unidentified
  source 1..17: note = methanogen bacteria
TGYIFYVTKEATVVYGS

SEQ ID NO: 58942 - protein, 26 aa, unidentified
  source 1..26: note = methanogen bacteria
SKGLTSGLTDSSVDLAQYGLVMDTFD

SEQ ID NO: 58943 - protein, 35 aa, unidentified
  source 1..35: note = methanogen bacteria
FSSWESLGTVGQALMFLIPFSHPMMAMDNLIFGDM

SEQ ID NO: 58944 - protein, 29 aa, unidentified
  source 1..29: note = methanogen bacteria
SSIDFSWGSDTALYFEKVGGTSDLSTMTT

SEQ ID NO: 58945 - protein, 24 aa, unidentified
  source 1..24: note = methanogen bacteria
ISLPGSGIGINTLLNPKWEALTNI

SEQ ID NO: 58946 - protein, 35 aa, unidentified
  source 1..35: note = methanogen bacteria
GYMSSTSGVPIVNLIKEGTGLIFVVFPTIFNIMGP

SEQ ID NO: 58947 - protein, 10 aa, unidentified
  source 1..10: note = methanogen bacteria
SILGTKAFSA

SEQ ID NO: 58948 - protein, 18 aa, unidentified
  source 1..18: note = methanogen bacteria
NILLTLGASSVIDLALEY

SEQ ID NO: 58949 - protein, 10 aa, unidentified
  source 1..10: note = methanogen bacteria
SPDGFNLGIS

SEQ ID NO: 58950 - protein, 12 aa, unidentified
  source 1..12: note = methanogen bacteria
AHIANNHAVASY

SEQ ID NO: 58951 - protein, 18 aa, unidentified
  source 1..18: note = methanogen bacteria
LSLLFCLAEDSKSLTDLV

SEQ ID NO: 58952 - protein, 12 aa, unidentified
  source 1..12: note = methanogen bacteria
VAGLGPDALSAI

SEQ ID NO: 58953 - protein, 18 aa, unidentified
  source 1..18: note = methanogen bacteria
PILIWIGAGNVLSYAMDY

SEQ ID NO: 58954 - protein, 12 aa, unidentified
  source 1..12: note = methanogen bacteria
IQVSNHVSVAVF

SEQ ID NO: 58955 - protein, 20 aa, unidentified
  source 1..20: note = methanogen bacteria
IATIFSYSSESAGLTPQIAS

SEQ ID NO: 58956 - protein, 12 aa, unidentified
  source 1..12: note = methanogen bacteria
PDIGESLGVDTA

SEQ ID NO: 58957 - protein, 11 aa, unidentified
  source 1..11: note = methanogen bacteria
FYGRTVEGMSS

SEQ ID NO: 58958 - protein, 20 aa, unidentified
  source 1..20: note = methanogen bacteria
FSKSDGVDIGDVTRDAFLDG

SEQ ID NO: 58959 - protein, 11 aa, unidentified
  source 1..11: note = methanogen bacteria
LDGKPEHVVLN

SEQ ID NO: 58960 - protein, 17 aa, unidentified
  source 1..17: note = methanogen bacteria
TDAVFTVDSETGLYARG

SEQ ID NO: 58961 - protein, 10 aa, unidentified
  source 1..10: note = methanogen bacteria
MIDVLHFSDP

SEQ ID NO: 58962 - protein, 19 aa, unidentified
  source 1..19: note = methanogen bacteria
SLFALSTNIQEHSALLFTY

SEQ ID NO: 58963 - protein, 18 aa, unidentified
  source 1..18: note = methanogen bacteria
FAESHVNNIIPFINHEIA

SEQ ID NO: 58964 - protein, 10 aa, unidentified
  source 1..10: note = methanogen bacteria
GSIGSGMKLN

SEQ ID NO: 58965 - protein, 18 aa, unidentified
  source 1..18: note = methanogen bacteria
FPNDNPTMLFNIIPIANL

SEQ ID NO: 58966 - protein, 11 aa, unidentified
  source 1..11: note = methanogen bacteria
VAGIGSDALAA

SEQ ID NO: 58967 - protein, 16 aa, unidentified
  source 1..16: note = methanogen bacteria
LQLMGAGDTIGYALDY

SEQ ID NO: 58968 - protein, 12 aa, unidentified
  source 1..12: note = methanogen bacteria
VITAGTDAVAVY

SEQ ID NO: 58969 - protein, 21 aa, unidentified
  source 1..21: note = methanogen bacteria
QIATAFSYTNASAGLSSQIAT

SEQ ID NO: 58970 - protein, 20 aa, unidentified
  source 1..20: note = methanogen bacteria
GSGEVIYDTKILGIVVTKNS

SEQ ID NO: 58971 - protein, 12 aa, unidentified
  source 1..12: note = methanogen bacteria
PDIGESLGVDTA

SEQ ID NO: 58972 - protein, 11 aa, unidentified
  source 1..11: note = methanogen bacteria
FYGRTVEGMSS

SEQ ID NO: 58973 - protein, 20 aa, unidentified
  source 1..20: note = methanogen bacteria
FSGSGGVDISDVTRDAFLDG

SEQ ID NO: 58974 - protein, 13 aa, unidentified
  source 1..13: note = methanogen bacteria
LPDIGSSFGVDTG

SEQ ID NO: 58975 - protein, 10 aa, unidentified
  source 1..10: note = methanogen bacteria
YAEICLGMSS

SEQ ID NO: 58976 - protein, 21 aa, unidentified
  source 1..21: note = methanogen bacteria
LASGTDGIDIDSLTAPVFLSG

SEQ ID NO: 58977 - protein, 11 aa, unidentified
  source 1..11: note = methanogen bacteria
VAGLGADPLAA

SEQ ID NO: 58978 - protein, 17 aa, unidentified
  source 1..17: note = methanogen bacteria
LIIAMGGKDVLTHAVDY

SEQ ID NO: 58979 - protein, 11 aa, unidentified
  source 1..11: note = methanogen bacteria
AAVAGTTAVAV

SEQ ID NO: 58980 - protein, 22 aa, unidentified
  source 1..22: note = methanogen bacteria
YLAIMFSYSSSSASLAPLISEF

SEQ ID NO: 58981 - protein, 13 aa, unidentified
  source 1..13: note = methanogen bacteria
LPDIGSSFGVDTG

SEQ ID NO: 58982 - protein, 10 aa, unidentified
  source 1..10: note = methanogen bacteria
YAEICLGMSS

SEQ ID NO: 58983 - protein, 22 aa, unidentified
  source 1..22: note = methanogen bacteria
TIASGTDGIDIDSVTSAQFLSG

SEQ ID NO: 58984 - protein, 11 aa, unidentified
  source 1..11: note = methanogen bacteria
VAGLGPDALAA

SEQ ID NO: 58985 - protein, 18 aa, unidentified
  source 1..18: note = methanogen bacteria
PILQFMGAGNTIQYAMDY

SEQ ID NO: 58986 - protein, 12 aa, unidentified
  source 1..12: note = methanogen bacteria
VLAAGTTAVAVY

SEQ ID NO: 58987 - protein, 22 aa, unidentified
  source 1..22: note = methanogen bacteria
GQIAAVFSYTQASAGLASEIAT

SEQ ID NO: 58988 - protein, 11 aa, unidentified
  source 1..11: note = methanogen bacteria
VAGLGADALAA

SEQ ID NO: 58989 - protein, 18 aa, unidentified
  source 1..18: note = methanogen bacteria
PILQFMGAGDTIQYAMDY

SEQ ID NO: 58990 - protein, 12 aa, unidentified
  source 1..12: note = methanogen bacteria
VLAAGTTAVAVY

SEQ ID NO: 58991 - protein, 21 aa, unidentified
  source 1..21: note = methanogen bacteria
QIATLFSYTEASAALSPQIAT

SEQ ID NO: 58992 - protein, 11 aa, unidentified
  source 1..11: note = methanogen bacteria
VAGLGPDALAA

SEQ ID NO: 58993 - protein, 18 aa, unidentified
  source 1..18: note = methanogen bacteria
PILQFMGAGHTIQYAMDY

SEQ ID NO: 58994 - protein, 12 aa, unidentified
  source 1..12: note = methanogen bacteria
VLAAGTTAVAVY

SEQ ID NO: 58995 - protein, 21 aa, unidentified
  source 1..21: note = methanogen bacteria
PIATVFSYTQASAGLASEIAT

SEQ ID NO: 58996 - protein, 11 aa, unidentified
  source 1..11: note = methanogen bacteria
VAGLGADALAA

SEQ ID NO: 58997 - protein, 19 aa, unidentified
  source 1..19: note = methanogen bacteria
VPILEFMGAGNTMDYAMSY

SEQ ID NO: 58998 - protein, 12 aa, unidentified
  source 1..12: note = methanogen bacteria
VMADGTTAVAVY

SEQ ID NO: 58999 - protein, 22 aa, unidentified
  source 1..22: note = methanogen bacteria
QIATMFAYTSASASLAPQIADA

SEQ ID NO: 59000 - protein, 11 aa, unidentified
  source 1..11: note = methanogen bacteria
VAGLGADALAA

SEQ ID NO: 59001 - protein, 16 aa, unidentified
  source 1..16: note = methanogen bacteria
LEIMGAGESISYASSY

SEQ ID NO: 59002 - protein, 12 aa, unidentified
  source 1..12: note = methanogen bacteria
VIVAGTSAVAVY

SEQ ID NO: 59003 - protein, 21 aa, unidentified
  source 1..21: note = methanogen bacteria
QIATAFSYTSASSSLAPEIAT

SEQ ID NO: 59004 - protein, 11 aa, unidentified
  source 1..11: note = methanogen bacteria
AAWLGGSAVAG

SEQ ID NO: 59005 - protein, 18 aa, unidentified
  source 1..18: note = methanogen bacteria
DLMDLFGADESASEALDY

SEQ ID NO: 59006 - protein, 12 aa, unidentified
  source 1..12: note = methanogen bacteria
IGVGGEDVVGTY

SEQ ID NO: 59007 - protein, 18 aa, unidentified
  source 1..18: note = methanogen bacteria
AWAFTVSPDLEPLRGDMA

SEQ ID NO: 59008 - protein, 11 aa, unidentified
  source 1..11: note = methanogen bacteria
FAIGLGSTHPY

SEQ ID NO: 59009 - protein, 12 aa, unidentified
  source 1..12: note = methanogen bacteria
VVDGDPNQVVFN

SEQ ID NO: 59010 - protein, 18 aa, unidentified
  source 1..18: note = methanogen bacteria
TEFVFTVDDTTGLYSRAP

SEQ ID NO: 59011 - protein, 13 aa, unidentified
  source 1..13: note = methanogen bacteria
VPAIAAEFAMNNV

SEQ ID NO: 59012 - protein, 11 aa, unidentified
  source 1..11: note = methanogen bacteria
YHFQYVRGWNA

SEQ ID NO: 59013 - protein, 18 aa, unidentified
  source 1..18: note = methanogen bacteria
VMGSLELAPQYASMIVQA

SEQ ID NO: 59014 - protein, 11 aa, unidentified
  source 1..11: note = methanogen bacteria
VAGLGADALAA

SEQ ID NO: 59015 - protein, 18 aa, unidentified
  source 1..18: note = methanogen bacteria
PILQFMGAGNTIQYALDY

SEQ ID NO: 59016 - protein, 12 aa, unidentified
  source 1..12: note = methanogen bacteria
VMADGTTAVAVY

SEQ ID NO: 59017 - protein, 21 aa, unidentified
  source 1..21: note = methanogen bacteria
QIASMFAYTSASSTLAPQIAH

SEQ ID NO: 59018 - protein, 13 aa, unidentified
  source 1..13: note = methanogen bacteria
FHRGLIVNFNFNF

SEQ ID NO: 59019 - protein, 13 aa, unidentified
  source 1..13: note = methanogen bacteria
VYLMSDFSVSSTQ

SEQ ID NO: 59020 - protein, 12 aa, unidentified
  source 1..12: note = methanogen bacteria
IFIQGVAYNSAI

SEQ ID NO: 59021 - protein, 15 aa, unidentified
  source 1..15: note = methanogen bacteria
AGGAINHNSASVVAF

SEQ ID NO: 59022 - protein, 13 aa, unidentified
  source 1..13: note = methanogen bacteria
VYLMSDFSVSSTQ

SEQ ID NO: 59023 - protein, 12 aa, unidentified
  source 1..12: note = methanogen bacteria
IFIQGVGYNSAI

SEQ ID NO: 59024 - protein, 16 aa, unidentified
  source 1..16: note = methanogen bacteria
LAGGSIDHNHASVVAF

SEQ ID NO: 59025 - protein, 12 aa, unidentified
  source 1..12: note = methanogen bacteria
VSGLGPNALSAM

SEQ ID NO: 59026 - protein, 18 aa, unidentified
  source 1..18: note = methanogen bacteria
PILIFIGAEKVLNYAMDY

SEQ ID NO: 59027 - protein, 12 aa, unidentified
  source 1..12: note = methanogen bacteria
KRASNSVSVGVY

SEQ ID NO: 59028 - protein, 21 aa, unidentified
  source 1..21: note = methanogen bacteria
PIATIFSYSNKSAELTPLIAS

SEQ ID NO: 59029 - protein, 13 aa, unidentified
  source 1..13: note = methanogen bacteria
VPAIAREFAMNNV

SEQ ID NO: 59030 - protein, 11 aa, unidentified
  source 1..11: note = methanogen bacteria
YHFQYVRGWDA

SEQ ID NO: 59031 - protein, 18 aa, unidentified
  source 1..18: note = methanogen bacteria
IMGTLPLAHKYSGMILQS

SEQ ID NO: 59032 - protein, 11 aa, unidentified
  source 1..11: note = methanogen bacteria
AGLGPNALSAI

SEQ ID NO: 59033 - protein, 19 aa, unidentified
  source 1..19: note = methanogen bacteria
KPILIFIGARNVLSYAMDY

SEQ ID NO: 59034 - protein, 12 aa, unidentified
  source 1..12: note = methanogen bacteria
IQVSNHVSVAVF

SEQ ID NO: 59035 - protein, 21 aa, unidentified
  source 1..21: note = methanogen bacteria
HIATIFSYSNKSVGLTPKITS

SEQ ID NO: 59036 - protein, 12 aa, unidentified
  source 1..12: note = methanogen bacteria
PDISIDLDVPVD

SEQ ID NO: 59037 - protein, 10 aa, unidentified
  source 1..10: note = methanogen bacteria
YLQLVLKLNN

SEQ ID NO: 59038 - protein, 17 aa, unidentified
  source 1..17: note = methanogen bacteria
FVGYDEIQDDILGLCQS

SEQ ID NO: 59039 - protein, 12 aa, unidentified
  source 1..12: note = methanogen bacteria
VAGLGPNALSAI

SEQ ID NO: 59040 - protein, 18 aa, unidentified
  source 1..18: note = methanogen bacteria
PILIFVGAGDVLSYAMDY

SEQ ID NO: 59041 - protein, 10 aa, unidentified
  source 1..10: note = methanogen bacteria
TQASNSVSVG

SEQ ID NO: 59042 - protein, 21 aa, unidentified
  source 1..21: note = methanogen bacteria
PIATIFSYSNKSVGLTPQIAS

SEQ ID NO: 59043 - protein, 13 aa, unidentified
  source 1..13: note = methanogen bacteria
VPAIANDFAMNNV

SEQ ID NO: 59044 - protein, 11 aa, unidentified
  source 1..11: note = methanogen bacteria
YHFQYVRGWNA

SEQ ID NO: 59045 - protein, 18 aa, unidentified
  source 1..18: note = methanogen bacteria
VMGNLPLSTQYADLIVRS

SEQ ID NO: 59046 - protein, 13 aa, unidentified
  source 1..13: note = methanogen bacteria
VPAIAQDFAMNNV

SEQ ID NO: 59047 - protein, 11 aa, unidentified
  source 1..11: note = methanogen bacteria
YHFQYVRGWNA

SEQ ID NO: 59048 - protein, 19 aa, unidentified
  source 1..19: note = methanogen bacteria
WVMGSLELAPQYAGMIVQA

SEQ ID NO: 59049 - protein, 13 aa, unidentified
  source 1..13: note = methanogen bacteria
VPAIAAEFGMNNI

SEQ ID NO: 59050 - protein, 11 aa, unidentified
  source 1..11: note = methanogen bacteria
YHFQYVRGWNA

SEQ ID NO: 59051 - protein, 19 aa, unidentified
  source 1..19: note = methanogen bacteria
WIMGDLILSSQYANLIVQC

SEQ ID NO: 59052 - protein, 13 aa, unidentified
  source 1..13: note = methanogen bacteria
VPAIAQEFAMNNV

SEQ ID NO: 59053 - protein, 11 aa, unidentified
  source 1..11: note = methanogen bacteria
YHFQYVRGWDA

SEQ ID NO: 59054 - protein, 18 aa, unidentified
  source 1..18: note = methanogen bacteria
VMGNLELGPQYAAMVVQA

SEQ ID NO: 59055 - protein, 12 aa, unidentified
  source 1..12: note = methanogen bacteria
VAGLGPSALSAI

SEQ ID NO: 59056 - protein, 19 aa, unidentified
  source 1..19: note = methanogen bacteria
KPILIFVGAGDVLSYAMDY

SEQ ID NO: 59057 - protein, 10 aa, unidentified
  source 1..10: note = methanogen bacteria
TRASDSVSVG

SEQ ID NO: 59058 - protein, 21 aa, unidentified
  source 1..21: note = methanogen bacteria
PIATIFSYSNKSVGLTPQIAS

SEQ ID NO: 59059 - protein, 13 aa, unidentified
  source 1..13: note = methanogen bacteria
VYLMSDFSVSSTQ

SEQ ID NO: 59060 - protein, 12 aa, unidentified
  source 1..12: note = methanogen bacteria
IFMQGIAYNSAI

SEQ ID NO: 59061 - protein, 15 aa, unidentified
  source 1..15: note = methanogen bacteria
AGGSTGHNSASVVAF

SEQ ID NO: 59062 - protein, 13 aa, unidentified
  source 1..13: note = methanogen bacteria
VPAIANDFAMNNV

SEQ ID NO: 59063 - protein, 11 aa, unidentified
  source 1..11: note = methanogen bacteria
YHFQYVRGWNA

SEQ ID NO: 59064 - protein, 18 aa, unidentified
  source 1..18: note = methanogen bacteria
VMGNLALSTQYADLIVKS

SEQ ID NO: 59065 - protein, 14 aa, unidentified
  source 1..14: note = methanogen bacteria
LPDIGADFGVDTAT

SEQ ID NO: 59066 - protein, 10 aa, unidentified
  source 1..10: note = methanogen bacteria
FGEICMGMSS

SEQ ID NO: 59067 - protein, 21 aa, unidentified
  source 1..21: note = methanogen bacteria
FSKTDGIDIQDVSASAFENGF

SEQ ID NO: 59068 - protein, 12 aa, unidentified
  source 1..12: note = methanogen bacteria
VYLMSDFSVSST

SEQ ID NO: 59069 - protein, 12 aa, unidentified
  source 1..12: note = methanogen bacteria
IFMQGIAYNSAI

SEQ ID NO: 59070 - protein, 15 aa, unidentified
  source 1..15: note = methanogen bacteria
AGGTIDHNHASVVAF

SEQ ID NO: 59071 - protein, 10 aa, unidentified
  source 1..10: note = methanogen bacteria
SGLGSGPLAA

SEQ ID NO: 59072 - protein, 19 aa, unidentified
  source 1..19: note = methanogen bacteria
RDLLILFGASEVIDFAMDY

SEQ ID NO: 59073 - protein, 10 aa, unidentified
  source 1..10: note = methanogen bacteria
FITAGTMEVA

SEQ ID NO: 59074 - protein, 22 aa, unidentified
  source 1..22: note = methanogen bacteria
YPISEGFNFINGNPQMISRTAE

SEQ ID NO: 59075 - protein, 12 aa, unidentified
  source 1..12: note = methanogen bacteria
PAIAIDFGMNNV

SEQ ID NO: 59076 - protein, 11 aa, unidentified
  source 1..11: note = methanogen bacteria
YHFQYVRGWNA

SEQ ID NO: 59077 - protein, 18 aa, unidentified
  source 1..18: note = methanogen bacteria
IMGSLPLATKYAGMVVQA

SEQ ID NO: 59078 - protein, 13 aa, unidentified
  source 1..13: note = methanogen bacteria
VPAIAQEFAMNNV

SEQ ID NO: 59079 - protein, 11 aa, unidentified
  source 1..11: note = methanogen bacteria
YHFQYVRGWDA

SEQ ID NO: 59080 - protein, 18 aa, unidentified
  source 1..18: note = methanogen bacteria
VMGSLPLATKYAGMVVQT

SEQ ID NO: 59081 - protein, 10 aa, unidentified
  source 1..10: note = methanogen bacteria
SGLGNVEVSV

SEQ ID NO: 59082 - protein, 19 aa, unidentified
  source 1..19: note = methanogen bacteria
DKILALFCTNQIFDASYSY

SEQ ID NO: 59083 - protein, 11 aa, unidentified
  source 1..11: note = methanogen bacteria
LYEGLIYITAY

SEQ ID NO: 59084 - protein, 19 aa, unidentified
  source 1..19: note = methanogen bacteria
FLSYVLYQTKDMLVINQIS

SEQ ID NO: 59085 - protein, 11 aa, unidentified
  source 1..11: note = methanogen bacteria
VAGLGADALAA

SEQ ID NO: 59086 - protein, 19 aa, unidentified
  source 1..19: note = methanogen bacteria
VPILKFMGAGETIQYAMDY

SEQ ID NO: 59087 - protein, 12 aa, unidentified
  source 1..12: note = methanogen bacteria
VIAAGTTAVAVY

SEQ ID NO: 59088 - protein, 21 aa, unidentified
  source 1..21: note = methanogen bacteria
PIATMFSYTEASAALSPQIAQ

SEQ ID NO: 59089 - protein, 13 aa, unidentified
  source 1..13: note = methanogen bacteria
VPAIAQDFAMNNV

SEQ ID NO: 59090 - protein, 11 aa, unidentified
  source 1..11: note = methanogen bacteria
YHFQYVRGWDA

SEQ ID NO: 59091 - protein, 19 aa, unidentified
  source 1..19: note = methanogen bacteria
WVMGSLELAPQYASMIVQA

SEQ ID NO: 59092 - protein, 11 aa, unidentified
  source 1..11: note = methanogen bacteria
VAGLGADALAA

SEQ ID NO: 59093 - protein, 19 aa, unidentified
  source 1..19: note = methanogen bacteria
VPILEFMGAGNTIQYALDY

SEQ ID NO: 59094 - protein, 12 aa, unidentified
  source 1..12: note = methanogen bacteria
VLAAGTTAVAVY

SEQ ID NO: 59095 - protein, 21 aa, unidentified
  source 1..21: note = methanogen bacteria
QIATMFSYTEASAALSPQIAQ

SEQ ID NO: 59096 - protein, 42 aa, unidentified
  source 1..42: note = methanogen bacteria
MYPSHYYFNPIKVLPEILYPLISISSVRVFYPLTGDFVGSIG

SEQ ID NO: 59097 - protein, 14 aa, unidentified
  source 1..14: note = methanogen bacteria
GKNGNYLLKEVNVT

SEQ ID NO: 59098 - protein, 38 aa, unidentified
  source 1..38: note = methanogen bacteria
SKGGRAASLGIKAPFTFNRVEQAFSYFFSTTIDAIGIK

SEQ ID NO: 59099 - protein, 11 aa, unidentified
  source 1..11: note = methanogen bacteria
VKTDCWYQQRS

SEQ ID NO: 59100 - protein, 95 aa, unidentified
  source 1..95: note = methanogen bacteria
QKPVFEETNMLPNTNILAVKKFSNDIVDRLKKAEQQEFTELKLQVPNFKRNDNWPLGVYAGDAIANTLRKHGIIKRKLKVVIVPDNQMNKYYSLP

SEQ ID NO: 59101 - protein, 13 aa, unidentified
  source 1..13: note = methanogen bacteria
VPAIANDFAMNNV

SEQ ID NO: 59102 - protein, 11 aa, unidentified
  source 1..11: note = methanogen bacteria
YHFQYVRGWNA

SEQ ID NO: 59103 - protein, 18 aa, unidentified
  source 1..18: note = methanogen bacteria
IMGNLPLSTQYADLIVQS

SEQ ID NO: 59104 - protein, 13 aa, unidentified
  source 1..13: note = methanogen bacteria
VPSIAGDFAMNNI

SEQ ID NO: 59105 - protein, 11 aa, unidentified
  source 1..11: note = methanogen bacteria
YHFQYVRGWNA

SEQ ID NO: 59106 - protein, 18 aa, unidentified
  source 1..18: note = methanogen bacteria
VMGSLKLSSQYADMIVQS

SEQ ID NO: 59107 - protein, 11 aa, unidentified
  source 1..11: note = methanogen bacteria
VAGLGADALAA

SEQ ID NO: 59108 - protein, 18 aa, unidentified
  source 1..18: note = methanogen bacteria
ILQFMGAGDTIGYAMEYS

SEQ ID NO: 59109 - protein, 12 aa, unidentified
  source 1..12: note = methanogen bacteria
VLAAGTTAVAVY

SEQ ID NO: 59110 - protein, 21 aa, unidentified
  source 1..21: note = methanogen bacteria
QLAAMFSYTEASAALSPEIAT

SEQ ID NO: 59111 - protein, 12 aa, unidentified
  source 1..12: note = methanogen bacteria
ISIGEDFGVGSH

SEQ ID NO: 59112 - protein, 10 aa, unidentified
  source 1..10: note = methanogen bacteria
YLQSVGKMTA

SEQ ID NO: 59113 - protein, 21 aa, unidentified
  source 1..21: note = methanogen bacteria
AVVMGSMDNLGPDTLGSFVAA

SEQ ID NO: 59114 - protein, 57 aa, unidentified
  source 1..57: note = methanogen bacteria
TLNHWMDGAFELSSSYQMVCDRLNMTMDQLFNKLSIEGTPDNLTLLPTLERTAEINA

SEQ ID NO: 59115 - protein, 14 aa, unidentified
  source 1..14: note = methanogen bacteria
PEVCVTVAETLPIG

SEQ ID NO: 59116 - protein, 12 aa, unidentified
  source 1..12: note = methanogen bacteria
VYLMSDFSVSST

SEQ ID NO: 59117 - protein, 12 aa, unidentified
  source 1..12: note = methanogen bacteria
IFIQGIAYNSAI

SEQ ID NO: 59118 - protein, 15 aa, unidentified
  source 1..15: note = methanogen bacteria
AGGSIDHNSASVVAF

SEQ ID NO: 59119 - protein, 13 aa, unidentified
  source 1..13: note = methanogen bacteria
VPAIANDFAMNNV

SEQ ID NO: 59120 - protein, 11 aa, unidentified
  source 1..11: note = methanogen bacteria
YHFQYVKGWNA

SEQ ID NO: 59121 - protein, 18 aa, unidentified
  source 1..18: note = methanogen bacteria
VMGSLPLSTEYAGLIVQS

SEQ ID NO: 59122 - protein, 13 aa, unidentified
  source 1..13: note = methanogen bacteria
YADTINLAKSYHI

SEQ ID NO: 59123 - protein, 12 aa, unidentified
  source 1..12: note = methanogen bacteria
VVDGNPAQTTLN

SEQ ID NO: 59124 - protein, 18 aa, unidentified
  source 1..18: note = methanogen bacteria
TEFVFTIDETTGLYARAP

SEQ ID NO: 59125 - protein, 12 aa, unidentified
  source 1..12: note = methanogen bacteria
ISIGEDFGVGSH

SEQ ID NO: 59126 - protein, 10 aa, unidentified
  source 1..10: note = methanogen bacteria
YLQSVGKMTA

SEQ ID NO: 59127 - protein, 21 aa, unidentified
  source 1..21: note = methanogen bacteria
AIVMGSMDNLGPDTLGSFVAA

SEQ ID NO: 59128 - protein, 11 aa, unidentified
  source 1..11: note = methanogen bacteria
VAGLGADALAA

SEQ ID NO: 59129 - protein, 18 aa, unidentified
  source 1..18: note = methanogen bacteria
PILQFMGAGNTIQYALDY

SEQ ID NO: 59130 - protein, 12 aa, unidentified
  source 1..12: note = methanogen bacteria
VMADGTTAVAVY

SEQ ID NO: 59131 - protein, 21 aa, unidentified
  source 1..21: note = methanogen bacteria
QIAAMFAYTSASSSLAPQIAR

SEQ ID NO: 59132 - protein, 11 aa, unidentified
  source 1..11: note = methanogen bacteria
VAGLGSDALAA

SEQ ID NO: 59133 - protein, 18 aa, unidentified
  source 1..18: note = methanogen bacteria
PILQFMGAGNTIQYAMDY

SEQ ID NO: 59134 - protein, 14 aa, unidentified
  source 1..14: note = methanogen bacteria
LVIASGTDAVAAYT

SEQ ID NO: 59135 - protein, 22 aa, unidentified
  source 1..22: note = methanogen bacteria
QIAAVFSYTSASSSLAPQIASA

SEQ ID NO: 59136 - protein, 11 aa, unidentified
  source 1..11: note = methanogen bacteria
VAGLGPEPLAA

SEQ ID NO: 59137 - protein, 15 aa, unidentified
  source 1..15: note = methanogen bacteria
LLMMGAESVINYAMD

SEQ ID NO: 59138 - protein, 11 aa, unidentified
  source 1..11: note = methanogen bacteria
TIVSGPVSVAV

SEQ ID NO: 59139 - protein, 21 aa, unidentified
  source 1..21: note = methanogen bacteria
QIAFIFSYSENSAQLEPLIAS

SEQ ID NO: 59140 - protein, 13 aa, unidentified
  source 1..13: note = methanogen bacteria
PYYMDDFAVSSAT

SEQ ID NO: 59141 - protein, 10 aa, unidentified
  source 1..10: note = methanogen bacteria
VQNVAYYSST

SEQ ID NO: 59142 - protein, 16 aa, unidentified
  source 1..16: note = methanogen bacteria
LANGKITHNQISVNSF

SEQ ID NO: 59143 - protein, 12 aa, unidentified
  source 1..12: note = methanogen bacteria
VAGLGAEPLAAL

SEQ ID NO: 59144 - protein, 16 aa, unidentified
  source 1..16: note = methanogen bacteria
LIMMGATSVIDYAMEY

SEQ ID NO: 59145 - protein, 11 aa, unidentified
  source 1..11: note = methanogen bacteria
TIVSGPMAVAV

SEQ ID NO: 59146 - protein, 22 aa, unidentified
  source 1..22: note = methanogen bacteria
QIAFIFSYSESSADLAPSIASF

SEQ ID NO: 59147 - protein, 13 aa, unidentified
  source 1..13: note = methanogen bacteria
VPAIAQEFVMNNV

SEQ ID NO: 59148 - protein, 11 aa, unidentified
  source 1..11: note = methanogen bacteria
YHFQYVRGWNA

SEQ ID NO: 59149 - protein, 19 aa, unidentified
  source 1..19: note = methanogen bacteria
WVMGSLQLAPEYAAMIVQA

SEQ ID NO: 59150 - protein, 13 aa, unidentified
  source 1..13: note = methanogen bacteria
PYYIDDFAISSAT

SEQ ID NO: 59151 - protein, 16 aa, unidentified
  source 1..16: note = methanogen bacteria
LANGKITHNQFSVNSF

SEQ ID NO: 59152 - protein, 15 aa, unidentified
  source 1..15: note = methanogen bacteria
LPSIEQSFNLTSRES

SEQ ID NO: 59153 - protein, 13 aa, unidentified
  source 1..13: note = methanogen bacteria
IDSSNFISSLLSS

SEQ ID NO: 59154 - protein, 11 aa, unidentified
  source 1..11: note = methanogen bacteria
LVILSMGLNDQ

SEQ ID NO: 59155 - protein, 10 aa, unidentified
  source 1..10: note = methanogen bacteria
ARYLGVNDYG

SEQ ID NO: 59156 - protein, 12 aa, unidentified
  source 1..12: note = methanogen bacteria
LNQLVGDYATGI

SEQ ID NO: 59157 - protein, 16 aa, unidentified
  source 1..16: note = methanogen bacteria
TDIIQLIYGQEYNIAA

SEQ ID NO: 59158 - protein, 13 aa, unidentified
  source 1..13: note = methanogen bacteria
VPAIAQEFAMNNV

SEQ ID NO: 59159 - protein, 11 aa, unidentified
  source 1..11: note = methanogen bacteria
YHFQYVRGWDA

SEQ ID NO: 59160 - protein, 18 aa, unidentified
  source 1..18: note = methanogen bacteria
VMGNLELAPQYASMIVQS

SEQ ID NO: 59161 - protein, 13 aa, unidentified
  source 1..13: note = methanogen bacteria
NGIMNDFHILSTT

SEQ ID NO: 59162 - protein, 10 aa, unidentified
  source 1..10: note = methanogen bacteria
FVQSVDNYSA

SEQ ID NO: 59163 - protein, 16 aa, unidentified
  source 1..16: note = methanogen bacteria
FAGGSIGHNHLSVSAF

SEQ ID NO: 59164 - protein, 15 aa, unidentified
  source 1..15: note = methanogen bacteria
LPSIEQTFNLTSRES

SEQ ID NO: 59165 - protein, 13 aa, unidentified
  source 1..13: note = methanogen bacteria
IDSNNFVNSVLSL

SEQ ID NO: 59166 - protein, 11 aa, unidentified
  source 1..11: note = methanogen bacteria
LVIISMGLNDQ

SEQ ID NO: 59167 - protein, 12 aa, unidentified
  source 1..12: note = methanogen bacteria
PYYMADFSLSSA

SEQ ID NO: 59168 - protein, 16 aa, unidentified
  source 1..16: note = methanogen bacteria
LANGNIAHNQLSVNSF

SEQ ID NO: 59169 - protein, 22 aa, unidentified
  source 1..22: note = methanogen bacteria
LNPWYTIPEITTQGLYLTDKPI

SEQ ID NO: 59170 - protein, 30 aa, unidentified
  source 1..30: note = methanogen bacteria
FFHGQPQLGLIYAAEPAVAVYEMADKLLSH

SEQ ID NO: 59171 - protein, 14 aa, unidentified
  source 1..14: note = methanogen bacteria
LPSIEQSFNLTSRE

SEQ ID NO: 59172 - protein, 14 aa, unidentified
  source 1..14: note = methanogen bacteria
IDSSNFINSILSLN

SEQ ID NO: 59173 - protein, 11 aa, unidentified
  source 1..11: note = methanogen bacteria
LVILSMSLNDQ

SEQ ID NO: 59174 - protein, 12 aa, unidentified
  source 1..12: note = methanogen bacteria
TGIMADFHVSST

SEQ ID NO: 59175 - protein, 12 aa, unidentified
  source 1..12: note = methanogen bacteria
FVQNVSYYSATE

SEQ ID NO: 59176 - protein, 17 aa, unidentified
  source 1..17: note = methanogen bacteria
FAGGNINHNAVSVNAFG

SEQ ID NO: 59177 - protein, 12 aa, unidentified
  source 1..12: note = methanogen bacteria
PNMSLELGISIE

SEQ ID NO: 59178 - protein, 18 aa, unidentified
  source 1..18: note = methanogen bacteria
YMGNNSLYENISGFTQST

SEQ ID NO: 59179 - protein, 22 aa, unidentified
  source 1..22: note = methanogen bacteria
LNPAYHIPEFTTQGLYLTDKPI

SEQ ID NO: 59180 - protein, 30 aa, unidentified
  source 1..30: note = methanogen bacteria
FFHGQPQLAAIYAATPTVAVNEMATKLLGP

SEQ ID NO: 59181 - protein, 12 aa, unidentified
  source 1..12: note = methanogen bacteria
PSIASEFGMNNI

SEQ ID NO: 59182 - protein, 11 aa, unidentified
  source 1..11: note = methanogen bacteria
YHFQYVRGWNA

SEQ ID NO: 59183 - protein, 18 aa, unidentified
  source 1..18: note = methanogen bacteria
IMGNLELSSQYAGMIVQS

SEQ ID NO: 59184 - protein, 22 aa, unidentified
  source 1..22: note = methanogen bacteria
LNPSYPIPEFTTQGLYLTDKSI

SEQ ID NO: 59185 - protein, 30 aa, unidentified
  source 1..30: note = methanogen bacteria
FFHSQPQLAAIYAATPSVAANAMATELLGP

SEQ ID NO: 59186 - protein, 11 aa, unidentified
  source 1..11: note = methanogen bacteria
VAGLGADALAA

SEQ ID NO: 59187 - protein, 18 aa, unidentified
  source 1..18: note = methanogen bacteria
PILQFMGAGDTIGYAMDY

SEQ ID NO: 59188 - protein, 12 aa, unidentified
  source 1..12: note = methanogen bacteria
VMAAGTTAVAVY

SEQ ID NO: 59189 - protein, 21 aa, unidentified
  source 1..21: note = methanogen bacteria
QIATMFAYTSASSALAPEIAK

SEQ ID NO: 59190 - protein, 14 aa, unidentified
  source 1..14: note = methanogen bacteria
LPSIENTFNLTSRE

SEQ ID NO: 59191 - protein, 13 aa, unidentified
  source 1..13: note = methanogen bacteria
IDSSNFIKSLMSV

SEQ ID NO: 59192 - protein, 11 aa, unidentified
  source 1..11: note = methanogen bacteria
LVILSMGLNDQ

SEQ ID NO: 59193 - protein, 11 aa, unidentified
  source 1..11: note = methanogen bacteria
VAGLGQAAIAG

SEQ ID NO: 59194 - protein, 19 aa, unidentified
  source 1..19: note = methanogen bacteria
SLLKTYGASGQSLTEAIKY

SEQ ID NO: 59195 - protein, 12 aa, unidentified
  source 1..12: note = methanogen bacteria
SSVGGEYGIAAF

SEQ ID NO: 59196 - protein, 21 aa, unidentified
  source 1..21: note = methanogen bacteria
LSMIFAYTPETAPLIPEITNF

SEQ ID NO: 59197 - protein, 13 aa, unidentified
  source 1..13: note = methanogen bacteria
LSIGEEFGVGSHD

SEQ ID NO: 59198 - protein, 10 aa, unidentified
  source 1..10: note = methanogen bacteria
YLQSIGELSA

SEQ ID NO: 59199 - protein, 21 aa, unidentified
  source 1..21: note = methanogen bacteria
SVIMGTTDNLGPETYGTFVTV

SEQ ID NO: 59200 - protein, 13 aa, unidentified
  source 1..13: note = methanogen bacteria
VPAIAQEFVMNNV

SEQ ID NO: 59201 - protein, 11 aa, unidentified
  source 1..11: note = methanogen bacteria
YHFQYVRGWDA

SEQ ID NO: 59202 - protein, 18 aa, unidentified
  source 1..18: note = methanogen bacteria
VMGNLQLEPQYAAMIVQA

SEQ ID NO: 59203 - protein, 15 aa, unidentified
  source 1..15: note = methanogen bacteria
LPSIEQSFHLTSRDS

SEQ ID NO: 59204 - protein, 13 aa, unidentified
  source 1..13: note = methanogen bacteria
IDSSNFVNSLLSF

SEQ ID NO: 59205 - protein, 12 aa, unidentified
  source 1..12: note = methanogen bacteria
SLVILSMGLSEQ

SEQ ID NO: 59206 - protein, 13 aa, unidentified
  source 1..13: note = methanogen bacteria
PYYMNDFAISSAT

SEQ ID NO: 59207 - protein, 10 aa, unidentified
  source 1..10: note = methanogen bacteria
VQNVAYYSST

SEQ ID NO: 59208 - protein, 16 aa, unidentified
  source 1..16: note = methanogen bacteria
LANGNITHNQLSVNSF

SEQ ID NO: 59209 - protein, 12 aa, unidentified
  source 1..12: note = methanogen bacteria
VSGLNADALAAL

SEQ ID NO: 59210 - protein, 19 aa, unidentified
  source 1..19: note = methanogen bacteria
KDLMIFSGASSVVSYCLDY

SEQ ID NO: 59211 - protein, 12 aa, unidentified
  source 1..12: note = methanogen bacteria
ISTSGVNEVAAF

SEQ ID NO: 59212 - protein, 22 aa, unidentified
  source 1..22: note = methanogen bacteria
YPICGFFNSQAANFTLANRAAE

SEQ ID NO: 59213 - protein, 15 aa, unidentified
  source 1..15: note = methanogen bacteria
LPSIEQSFHLTSRES

SEQ ID NO: 59214 - protein, 13 aa, unidentified
  source 1..13: note = methanogen bacteria
IDSNNFMNSLLSL

SEQ ID NO: 59215 - protein, 11 aa, unidentified
  source 1..11: note = methanogen bacteria
LVILSMGLNDQ

SEQ ID NO: 59216 - protein, 22 aa, unidentified
  source 1..22: note = methanogen bacteria
LNPSYTIPEFTTQGLYLTDKTI

SEQ ID NO: 59217 - protein, 30 aa, unidentified
  source 1..30: note = methanogen bacteria
FFHGQPQLAVLYGSTPSVAVNQMATTLLGP

SEQ ID NO: 59218 - protein, 11 aa, unidentified
  source 1..11: note = methanogen bacteria
VAGLGADALAA

SEQ ID NO: 59219 - protein, 18 aa, unidentified
  source 1..18: note = methanogen bacteria
PILQFMGAGETIGYAMDY

SEQ ID NO: 59220 - protein, 12 aa, unidentified
  source 1..12: note = methanogen bacteria
VLAAGTTAVAVY

SEQ ID NO: 59221 - protein, 21 aa, unidentified
  source 1..21: note = methanogen bacteria
QIATIFAYTSASSALAPQIAS

SEQ ID NO: 59222 - protein, 13 aa, unidentified
  source 1..13: note = methanogen bacteria
VPAIANDFAMNNV

SEQ ID NO: 59223 - protein, 11 aa, unidentified
  source 1..11: note = methanogen bacteria
YHFQYVRGWDA

SEQ ID NO: 59224 - protein, 19 aa, unidentified
  source 1..19: note = methanogen bacteria
WVMGNLTMTPQYADMILRA

SEQ ID NO: 59225 - protein, 13 aa, unidentified
  source 1..13: note = methanogen bacteria
LPYYMADFSISSA

SEQ ID NO: 59226 - protein, 16 aa, unidentified
  source 1..16: note = methanogen bacteria
LANGNITHNQFSVNSF

SEQ ID NO: 59227 - protein, 12 aa, unidentified
  source 1..12: note = methanogen bacteria
PSIASEFGMNNV

SEQ ID NO: 59228 - protein, 11 aa, unidentified
  source 1..11: note = methanogen bacteria
YHFQYVRGWNA

SEQ ID NO: 59229 - protein, 18 aa, unidentified
  source 1..18: note = methanogen bacteria
IMGSLKLSSQYAGMVVQA

SEQ ID NO: 59230 - protein, 15 aa, unidentified
  source 1..15: note = methanogen bacteria
LPSIEQSFHLTSRES

SEQ ID NO: 59231 - protein, 13 aa, unidentified
  source 1..13: note = methanogen bacteria
IDSSNFTNSFLSI

SEQ ID NO: 59232 - protein, 11 aa, unidentified
  source 1..11: note = methanogen bacteria
LVILSMGLNEQ

SEQ ID NO: 59233 - protein, 15 aa, unidentified
  source 1..15: note = methanogen bacteria
LPSIEQSFHLTSRES

SEQ ID NO: 59234 - protein, 13 aa, unidentified
  source 1..13: note = methanogen bacteria
IDSSNFISSLLSL

SEQ ID NO: 59235 - protein, 11 aa, unidentified
  source 1..11: note = methanogen bacteria
LVIISMGLNDQ

SEQ ID NO: 59236 - protein, 22 aa, unidentified
  source 1..22: note = methanogen bacteria
LNPSYSIPEFTTQGMYLTDKSI

SEQ ID NO: 59237 - protein, 30 aa, unidentified
  source 1..30: note = methanogen bacteria
FFHGQPQLAAIYGAAPAVAVNEMATVLVGP

SEQ ID NO: 59238 - protein, 14 aa, unidentified
  source 1..14: note = methanogen bacteria
LPSIEQSFNLTSRE

SEQ ID NO: 59239 - protein, 13 aa, unidentified
  source 1..13: note = methanogen bacteria
IDSSNFINSLLSF

SEQ ID NO: 59240 - protein, 11 aa, unidentified
  source 1..11: note = methanogen bacteria
LVILSMGLNNQ

SEQ ID NO: 59241 - protein, 13 aa, unidentified
  source 1..13: note = methanogen bacteria
VYLMSDFSVSSTQ

SEQ ID NO: 59242 - protein, 11 aa, unidentified
  source 1..11: note = methanogen bacteria
IFIQGVAYNSA

SEQ ID NO: 59243 - protein, 15 aa, unidentified
  source 1..15: note = methanogen bacteria
AGGAIDHNSASVVAF

SEQ ID NO: 59244 - protein, 13 aa, unidentified
  source 1..13: note = methanogen bacteria
FFARYGPAYEFNF

SEQ ID NO: 59245 - protein, 13 aa, unidentified
  source 1..13: note = methanogen bacteria
VPAIASDFAMNNV

SEQ ID NO: 59246 - protein, 11 aa, unidentified
  source 1..11: note = methanogen bacteria
YHFQYVRGWNA

SEQ ID NO: 59247 - protein, 18 aa, unidentified
  source 1..18: note = methanogen bacteria
IMGNLELSPQYASMIVQS

SEQ ID NO: 59248 - protein, 13 aa, unidentified
  source 1..13: note = methanogen bacteria
VPAIAQEFVMNNV

SEQ ID NO: 59249 - protein, 11 aa, unidentified
  source 1..11: note = methanogen bacteria
YHFQYVRGWDA

SEQ ID NO: 59250 - protein, 18 aa, unidentified
  source 1..18: note = methanogen bacteria
VMGNLQLSPEYANMIVQA

SEQ ID NO: 59251 - protein, 15 aa, unidentified
  source 1..15: note = methanogen bacteria
LPSIEQSFNLTSRES

SEQ ID NO: 59252 - protein, 13 aa, unidentified
  source 1..13: note = methanogen bacteria
IDSSNFISSLLSM

SEQ ID NO: 59253 - protein, 11 aa, unidentified
  source 1..11: note = methanogen bacteria
LVILSMGLNDQ

SEQ ID NO: 59254 - protein, 12 aa, unidentified
  source 1..12: note = methanogen bacteria
PYYMADFSVSSA

SEQ ID NO: 59255 - protein, 16 aa, unidentified
  source 1..16: note = methanogen bacteria
LANGNITHNQISVNSF

SEQ ID NO: 59256 - protein, 15 aa, unidentified
  source 1..15: note = methanogen bacteria
LPSIEHTFHITSRES

SEQ ID NO: 59257 - protein, 13 aa, unidentified
  source 1..13: note = methanogen bacteria
IDSSNFISSLLSV

SEQ ID NO: 59258 - protein, 11 aa, unidentified
  source 1..11: note = methanogen bacteria
LVILSMGFNDQ

SEQ ID NO: 59259 - protein, 15 aa, unidentified
  source 1..15: note = methanogen bacteria
LPSIEQSFQLTSRDS

SEQ ID NO: 59260 - protein, 14 aa, unidentified
  source 1..14: note = methanogen bacteria
RIDSDNFINSLFSP

SEQ ID NO: 59261 - protein, 11 aa, unidentified
  source 1..11: note = methanogen bacteria
LVILSMGLNDQ

SEQ ID NO: 59262 - protein, 12 aa, unidentified
  source 1..12: note = methanogen bacteria
PSITETLKLSMD

SEQ ID NO: 59263 - protein, 10 aa, unidentified
  source 1..10: note = methanogen bacteria
YLQYHEDYDP

SEQ ID NO: 59264 - protein, 20 aa, unidentified
  source 1..20: note = methanogen bacteria
VFGDTGTYEGNLLHLIMTGE

SEQ ID NO: 59265 - protein, 15 aa, unidentified
  source 1..15: note = methanogen bacteria
LPSIEMAYNLTTRQS

SEQ ID NO: 59266 - protein, 13 aa, unidentified
  source 1..13: note = methanogen bacteria
IDSSDFINSLTSL

SEQ ID NO: 59267 - protein, 11 aa, unidentified
  source 1..11: note = methanogen bacteria
LVILSMGLNDQ

SEQ ID NO: 59268 - protein, 13 aa, unidentified
  source 1..13: note = methanogen bacteria
VPAIAQDFAMNNV

SEQ ID NO: 59269 - protein, 11 aa, unidentified
  source 1..11: note = methanogen bacteria
YHFQYVRGWDA

SEQ ID NO: 59270 - protein, 18 aa, unidentified
  source 1..18: note = methanogen bacteria
VMGSLKLDPQYAAMIVQA

SEQ ID NO: 59271 - protein, 12 aa, unidentified
  source 1..12: note = methanogen bacteria
SEIMIDFQISST

SEQ ID NO: 59272 - protein, 12 aa, unidentified
  source 1..12: note = methanogen bacteria
LFAQSVAYHSAT

SEQ ID NO: 59273 - protein, 17 aa, unidentified
  source 1..17: note = methanogen bacteria
FAGGNVAHNAISAAAFS

SEQ ID NO: 59274 - protein, 15 aa, unidentified
  source 1..15: note = methanogen bacteria
LPSIEQSFHLTSRES

SEQ ID NO: 59275 - protein, 13 aa, unidentified
  source 1..13: note = methanogen bacteria
IDSSNFINSLFSL

SEQ ID NO: 59276 - protein, 12 aa, unidentified
  source 1..12: note = methanogen bacteria
SLAILSMGLNDQ

SEQ ID NO: 59277 - protein, 15 aa, unidentified
  source 1..15: note = methanogen bacteria
LPSIEQSFNLTSRES

SEQ ID NO: 59278 - protein, 13 aa, unidentified
  source 1..13: note = methanogen bacteria
IDSSNFINSLTSL

SEQ ID NO: 59279 - protein, 12 aa, unidentified
  source 1..12: note = methanogen bacteria
SLAIISMGLNDQ

SEQ ID NO: 59280 - protein, 13 aa, unidentified
  source 1..13: note = methanogen bacteria
VPAIAQEFAMNNV

SEQ ID NO: 59281 - protein, 11 aa, unidentified
  source 1..11: note = methanogen bacteria
YHFQYVRGWDA

SEQ ID NO: 59282 - protein, 18 aa, unidentified
  source 1..18: note = methanogen bacteria
VMGSLELAPQYANMIVQA

SEQ ID NO: 59283 - protein, 15 aa, unidentified
  source 1..15: note = methanogen bacteria
LPSIEQSFHLTSRES

SEQ ID NO: 59284 - protein, 13 aa, unidentified
  source 1..13: note = methanogen bacteria
IDSSNFINSSISV

SEQ ID NO: 59285 - protein, 11 aa, unidentified
  source 1..11: note = methanogen bacteria
LVILSMGLNDQ

SEQ ID NO: 59286 - protein, 12 aa, unidentified
  source 1..12: note = methanogen bacteria
PYYMNDFAISSA

SEQ ID NO: 59287 - protein, 10 aa, unidentified
  source 1..10: note = methanogen bacteria
VQNVAYYSST

SEQ ID NO: 59288 - protein, 16 aa, unidentified
  source 1..16: note = methanogen bacteria
LANGKITHNQLSVNSF

SEQ ID NO: 59289 - protein, 11 aa, unidentified
  source 1..11: note = methanogen bacteria
VAGLGADALAG

SEQ ID NO: 59290 - protein, 17 aa, unidentified
  source 1..17: note = methanogen bacteria
ILIAMGVGGTISYALEY

SEQ ID NO: 59291 - protein, 12 aa, unidentified
  source 1..12: note = methanogen bacteria
ATVASTDAVAVY

SEQ ID NO: 59292 - protein, 21 aa, unidentified
  source 1..21: note = methanogen bacteria
QIAGVFTYAGTSSRLTPSLVA

SEQ ID NO: 59293 - protein, 28 aa, unidentified
  source 1..28: note = methanogen bacteria
IPLYGLSQAAVDQFAQLRAVMAGSFGSI

SEQ ID NO: 59294 - protein, 10 aa, unidentified
  source 1..10: note = methanogen bacteria
GSLVAIDQSY

SEQ ID NO: 59295 - protein, 35 aa, unidentified
  source 1..35: note = methanogen bacteria
TGTFNFLPASVASSTASGILPAFIQSIVGGAPNFT

SEQ ID NO: 59296 - protein, 39 aa, unidentified
  source 1..39: note = methanogen bacteria
SVFQKLGFPILGEVSGGRAVSGVALWLSTPNSYTVLFTN

SEQ ID NO: 59297 - protein, 12 aa, unidentified
  source 1..12: note = methanogen bacteria
AGIMADFHIPST

SEQ ID NO: 59298 - protein, 11 aa, unidentified
  source 1..11: note = methanogen bacteria
FAQSIANYDAT

SEQ ID NO: 59299 - protein, 16 aa, unidentified
  source 1..16: note = methanogen bacteria
FAGGNVGHNSISVSAF

SEQ ID NO: 59300 - protein, 22 aa, unidentified
  source 1..22: note = methanogen bacteria
LNPAYSIPEFTTQGLYLTEKSI

SEQ ID NO: 59301 - protein, 30 aa, unidentified
  source 1..30: note = methanogen bacteria
FFHGQPQLAVIYGAEPSVAVKQMATALVGP

SEQ ID NO: 59302 - protein, 13 aa, unidentified
  source 1..13: note = methanogen bacteria
VPAIAQDFAMNNV

SEQ ID NO: 59303 - protein, 11 aa, unidentified
  source 1..11: note = methanogen bacteria
YHFQYVRGWDA

SEQ ID NO: 59304 - protein, 18 aa, unidentified
  source 1..18: note = methanogen bacteria
VMGSLKLDPQYAAMIVQA

SEQ ID NO: 59305 - protein, 12 aa, unidentified
  source 1..12: note = methanogen bacteria
AGIMADFHVSST

SEQ ID NO: 59306 - protein, 11 aa, unidentified
  source 1..11: note = methanogen bacteria
FVQTVTSHNAT

SEQ ID NO: 59307 - protein, 16 aa, unidentified
  source 1..16: note = methanogen bacteria
FAGGALAHNRVSVAAF

SEQ ID NO: 59308 - protein, 12 aa, unidentified
  source 1..12: note = methanogen bacteria
LPSIAKAFNLNN

SEQ ID NO: 59309 - protein, 10 aa, unidentified
  source 1..10: note = methanogen bacteria
HLQYILGWNS

SEQ ID NO: 59310 - protein, 18 aa, unidentified
  source 1..18: note = methanogen bacteria
IMGSVEIIPKYYGLLSLS

SEQ ID NO: 59311 - protein, 12 aa, unidentified
  source 1..12: note = methanogen bacteria
IAGLGVDQLAAI

SEQ ID NO: 59312 - protein, 19 aa, unidentified
  source 1..19: note = methanogen bacteria
ELIVCVGGRGIALDYALEY

SEQ ID NO: 59313 - protein, 12 aa, unidentified
  source 1..12: note = methanogen bacteria
LAVSTTDSIAVF

SEQ ID NO: 59314 - protein, 20 aa, unidentified
  source 1..20: note = methanogen bacteria
QLAYLFSYGESARLLEPTIT

SEQ ID NO: 59315 - protein, 13 aa, unidentified
  source 1..13: note = methanogen bacteria
VPSIADEFAMNNV

SEQ ID NO: 59316 - protein, 11 aa, unidentified
  source 1..11: note = methanogen bacteria
YHFQYVRNWDA

SEQ ID NO: 59317 - protein, 18 aa, unidentified
  source 1..18: note = methanogen bacteria
IMGSLKLSSEHADLIVQC

SEQ ID NO: 59318 - protein, 13 aa, unidentified
  source 1..13: note = methanogen bacteria
VPAIAQEFAMNNV

SEQ ID NO: 59319 - protein, 11 aa, unidentified
  source 1..11: note = methanogen bacteria
YHFQYVRGWNA

SEQ ID NO: 59320 - protein, 19 aa, unidentified
  source 1..19: note = methanogen bacteria
WVMGSLELAPQYASMIVQA

SEQ ID NO: 59321 - protein, 12 aa, unidentified
  source 1..12: note = methanogen bacteria
SGIMADFNISST

SEQ ID NO: 59322 - protein, 10 aa, unidentified
  source 1..10: note = methanogen bacteria
FVQNVAYHSA

SEQ ID NO: 59323 - protein, 16 aa, unidentified
  source 1..16: note = methanogen bacteria
FAGGNVARNAVSVAAF

SEQ ID NO: 59324 - protein, 12 aa, unidentified
  source 1..12: note = methanogen bacteria
VYLMRDFSVSST

SEQ ID NO: 59325 - protein, 11 aa, unidentified
  source 1..11: note = methanogen bacteria
LFIQGVAYHSP

SEQ ID NO: 59326 - protein, 15 aa, unidentified
  source 1..15: note = methanogen bacteria
AGGNITHNQASVIGF

SEQ ID NO: 59327 - protein, 13 aa, unidentified
  source 1..13: note = methanogen bacteria
TGIMGDFQVHSTT

SEQ ID NO: 59328 - protein, 11 aa, unidentified
  source 1..11: note = methanogen bacteria
FVQNVGYFSAT

SEQ ID NO: 59329 - protein, 18 aa, unidentified
  source 1..18: note = methanogen bacteria
AFAGGTINHNTISVSAFG

SEQ ID NO: 59330 - protein, 13 aa, unidentified
  source 1..13: note = methanogen bacteria
TPEIAADFGMNNV

SEQ ID NO: 59331 - protein, 11 aa, unidentified
  source 1..11: note = methanogen bacteria
YHFQYVKGWDP

SEQ ID NO: 59332 - protein, 19 aa, unidentified
  source 1..19: note = methanogen bacteria
WVMGSLALSSQYSDMIVES

SEQ ID NO: 59333 - protein, 22 aa, unidentified
  source 1..22: note = methanogen bacteria
FNPAYTIPEFTTQGLYLTEKSI

SEQ ID NO: 59334 - protein, 30 aa, unidentified
  source 1..30: note = methanogen bacteria
FFHGQPQLAAIYSATPSVAVNEMATALVGP

SEQ ID NO: 59335 - protein, 22 aa, unidentified
  source 1..22: note = methanogen bacteria
LNPAYTIPEFTTQGLYLTDQSI

SEQ ID NO: 59336 - protein, 31 aa, unidentified
  source 1..31: note = methanogen bacteria
AFFHGQPQLAAVYGSSPAVAVEQMASALVGP

SEQ ID NO: 59337 - protein, 13 aa, unidentified
  source 1..13: note = methanogen bacteria
VPSIAGEFAMNNI

SEQ ID NO: 59338 - protein, 11 aa, unidentified
  source 1..11: note = methanogen bacteria
YHFQYVRGWNA

SEQ ID NO: 59339 - protein, 18 aa, unidentified
  source 1..18: note = methanogen bacteria
IMGSLKLSSEYAGMIVQS

SEQ ID NO: 59340 - protein, 11 aa, unidentified
  source 1..11: note = methanogen bacteria
VAGLGADALAA

SEQ ID NO: 59341 - protein, 18 aa, unidentified
  source 1..18: note = methanogen bacteria
PILEFMGAGNTISYAAEY

SEQ ID NO: 59342 - protein, 13 aa, unidentified
  source 1..13: note = methanogen bacteria
VIAANSDAVAVYT

SEQ ID NO: 59343 - protein, 22 aa, unidentified
  source 1..22: note = methanogen bacteria
QIAALFSYTDASAALAPQIATA

SEQ ID NO: 59344 - protein, 22 aa, unidentified
  source 1..22: note = methanogen bacteria
INPAYTIPEFTTSGLYLTDKNI

SEQ ID NO: 59345 - protein, 30 aa, unidentified
  source 1..30: note = methanogen bacteria
FFHSQPQLAAIYNASPAVAVNRMATVLVGP

SEQ ID NO: 59346 - protein, 15 aa, unidentified
  source 1..15: note = methanogen bacteria
LPSIEQSFHLTSRES

SEQ ID NO: 59347 - protein, 13 aa, unidentified
  source 1..13: note = methanogen bacteria
IDSSNFLNSLLSL

SEQ ID NO: 59348 - protein, 11 aa, unidentified
  source 1..11: note = methanogen bacteria
LVILSMGLNEQ

SEQ ID NO: 59349 - protein, 10 aa, unidentified
  source 1..10: note = methanogen bacteria
AGLGPDPLAA

SEQ ID NO: 59350 - protein, 16 aa, unidentified
  source 1..16: note = methanogen bacteria
LKLMGASSVLYYAIQY

SEQ ID NO: 59351 - protein, 11 aa, unidentified
  source 1..11: note = methanogen bacteria
TLVSGPIAVAV

SEQ ID NO: 59352 - protein, 21 aa, unidentified
  source 1..21: note = methanogen bacteria
QIAFVFSYSESSAQLEPLITS

SEQ ID NO: 59353 - protein, 12 aa, unidentified
  source 1..12: note = methanogen bacteria
PSIANDFGMNNI

SEQ ID NO: 59354 - protein, 11 aa, unidentified
  source 1..11: note = methanogen bacteria
YHFQYVRGWNA

SEQ ID NO: 59355 - protein, 18 aa, unidentified
  source 1..18: note = methanogen bacteria
MMGSLKLSSEYAALIVQS

SEQ ID NO: 59356 - protein, 12 aa, unidentified
  source 1..12: note = methanogen bacteria
AGIMSDFHVSST

SEQ ID NO: 59357 - protein, 16 aa, unidentified
  source 1..16: note = methanogen bacteria
FAGGVIGSNPMSVYAF

SEQ ID NO: 59358 - protein, 12 aa, unidentified
  source 1..12: note = methanogen bacteria
AGIMADFHISST

SEQ ID NO: 59359 - protein, 11 aa, unidentified
  source 1..11: note = methanogen bacteria
FAQSISNYDAT

SEQ ID NO: 59360 - protein, 16 aa, unidentified
  source 1..16: note = methanogen bacteria
FAGGNVGHNYVSVNAF

SEQ ID NO: 59361 - protein, 12 aa, unidentified
  source 1..12: note = methanogen bacteria
AGIMADFHISST

SEQ ID NO: 59362 - protein, 11 aa, unidentified
  source 1..11: note = methanogen bacteria
FAQSISNYDAT

SEQ ID NO: 59363 - protein, 15 aa, unidentified
  source 1..15: note = methanogen bacteria
FAGGNVGHNHVSVSA

SEQ ID NO: 59364 - protein, 13 aa, unidentified
  source 1..13: note = methanogen bacteria
VPAIAQDFAMNNV

SEQ ID NO: 59365 - protein, 11 aa, unidentified
  source 1..11: note = methanogen bacteria
YHFQYVRGWNA

SEQ ID NO: 59366 - protein, 18 aa, unidentified
  source 1..18: note = methanogen bacteria
IMGNLELSTQYAGMIIQA

SEQ ID NO: 59367 - protein, 22 aa, unidentified
  source 1..22: note = methanogen bacteria
INPAYNIPEFTTKGLYLTDKSI

SEQ ID NO: 59368 - protein, 30 aa, unidentified
  source 1..30: note = methanogen bacteria
FFHGQPQLAVIYGASPSVAVNEMALTLVGP

SEQ ID NO: 59369 - protein, 13 aa, unidentified
  source 1..13: note = methanogen bacteria
VPAIAQDFAMNNV

SEQ ID NO: 59370 - protein, 11 aa, unidentified
  source 1..11: note = methanogen bacteria
YHFQYVRGWDA

SEQ ID NO: 59371 - protein, 18 aa, unidentified
  source 1..18: note = methanogen bacteria
IMGSLELAPQYASMIVQA

SEQ ID NO: 59372 - protein, 13 aa, unidentified
  source 1..13: note = methanogen bacteria
VYLMSDFSVTSTQ

SEQ ID NO: 59373 - protein, 11 aa, unidentified
  source 1..11: note = methanogen bacteria
IFIQGVAYNSA

SEQ ID NO: 59374 - protein, 16 aa, unidentified
  source 1..16: note = methanogen bacteria
LAGGTIDHNNASVVAF

SEQ ID NO: 59375 - protein, 13 aa, unidentified
  source 1..13: note = methanogen bacteria
VYLMNDFSVSSTQ

SEQ ID NO: 59376 - protein, 12 aa, unidentified
  source 1..12: note = methanogen bacteria
IFMQGIAYNSAI

SEQ ID NO: 59377 - protein, 16 aa, unidentified
  source 1..16: note = methanogen bacteria
LAGGSIDHNTASVVAF

SEQ ID NO: 59378 - protein, 12 aa, unidentified
  source 1..12: note = methanogen bacteria
DGIMADFHIHST

SEQ ID NO: 59379 - protein, 11 aa, unidentified
  source 1..11: note = methanogen bacteria
FVQSITYHDAT

SEQ ID NO: 59380 - protein, 16 aa, unidentified
  source 1..16: note = methanogen bacteria
FAGGYIAHNDLSIAAF

SEQ ID NO: 59381 - protein, 12 aa, unidentified
  source 1..12: note = methanogen bacteria
AGIMADFHVHST

SEQ ID NO: 59382 - protein, 12 aa, unidentified
  source 1..12: note = methanogen bacteria
LFAQSVSNYDAT

SEQ ID NO: 59383 - protein, 16 aa, unidentified
  source 1..16: note = methanogen bacteria
FAGGNVGHNYLSVSAF

SEQ ID NO: 59384 - protein, 11 aa, unidentified
  source 1..11: note = methanogen bacteria
VPIMEDFHVTS

SEQ ID NO: 59385 - protein, 11 aa, unidentified
  source 1..11: note = methanogen bacteria
IFVQGIAGHDA

SEQ ID NO: 59386 - protein, 16 aa, unidentified
  source 1..16: note = methanogen bacteria
LAGGEVGQNLVSEVAF

SEQ ID NO: 59387 - protein, 80 aa, unidentified
  source 1..80: note = methanogen bacteria
LTHMGDSSAWPRIMASVESGNDIYGVMGNYYTPVWGYLLSFLDMMIQAVGAVPLFGDYFEGLLPLEGVRSYRPFVISPEM

SEQ ID NO: 59388 - protein, 28 aa, unidentified
  source 1..28: note = methanogen bacteria
ANGQIDDAFVFLTDRQGTDFGSLYEAAT

SEQ ID NO: 59389 - protein, 29 aa, unidentified
  source 1..29: note = methanogen bacteria
CLSCAYYGLIDYDTFTSLSVSFAEDLPVH

SEQ ID NO: 59390 - protein, 12 aa, unidentified
  source 1..12: note = methanogen bacteria
FAVVIDSTHPYH

SEQ ID NO: 59391 - protein, 12 aa, unidentified
  source 1..12: note = methanogen bacteria
VVDGDPNQVVFN

SEQ ID NO: 59392 - protein, 18 aa, unidentified
  source 1..18: note = methanogen bacteria
TEFVFTVDDTTGLYSRAP

SEQ ID NO: 59393 - protein, 31 aa, unidentified
  source 1..31: note = methanogen bacteria
SFFKGWGADPNAFFTTTLLQSSDSYTTLTSF

SEQ ID NO: 59394 - protein, 25 aa, unidentified
  source 1..25: note = methanogen bacteria
LTLPGASVGLAELFNPDWSLLSHFE

SEQ ID NO: 59395 - protein, 37 aa, unidentified
  source 1..37: note = methanogen bacteria
LGYMSVQSGTAVSELVTQGTGLVFIVYPTVFNVLGQW

SEQ ID NO: 59396 - protein, 11 aa, unidentified
  source 1..11: note = methanogen bacteria
DVVNNSSIHQL

SEQ ID NO: 59397 - protein, 12 aa, unidentified
  source 1..12: note = methanogen bacteria
AGIMADFHVSST

SEQ ID NO: 59398 - protein, 11 aa, unidentified
  source 1..11: note = methanogen bacteria
FVQTVTSHNAT

SEQ ID NO: 59399 - protein, 16 aa, unidentified
  source 1..16: note = methanogen bacteria
FAGGTLAHNRVSVTAF

SEQ ID NO: 59400 - protein, 22 aa, unidentified
  source 1..22: note = methanogen bacteria
MNPAYSIPEFTTQGLYLTDKNI

SEQ ID NO: 59401 - protein, 30 aa, unidentified
  source 1..30: note = methanogen bacteria
FFHGQPQLAAIYGATPAVGVEQMAKILLGP

SEQ ID NO: 59402 - protein, 12 aa, unidentified
  source 1..12: note = methanogen bacteria
PSIAVEFHMSNI

SEQ ID NO: 59403 - protein, 12 aa, unidentified
  source 1..12: note = methanogen bacteria
YHLQYIKGFDSQ

SEQ ID NO: 59404 - protein, 18 aa, unidentified
  source 1..18: note = methanogen bacteria
IMGDVPIIQQYYPLLIQS

SEQ ID NO: 59405 - protein, 12 aa, unidentified
  source 1..12: note = methanogen bacteria
AGIMTDFHIHST

SEQ ID NO: 59406 - protein, 11 aa, unidentified
  source 1..11: note = methanogen bacteria
FAQSIANHDAT

SEQ ID NO: 59407 - protein, 16 aa, unidentified
  source 1..16: note = methanogen bacteria
FAGGNMGHNNISVSAF

SEQ ID NO: 59408 - protein, 12 aa, unidentified
  source 1..12: note = methanogen bacteria
VSWLGGSAVGGL

SEQ ID NO: 59409 - protein, 19 aa, unidentified
  source 1..19: note = methanogen bacteria
GPLMDCFGDPSASDAAIAY

SEQ ID NO: 59410 - protein, 11 aa, unidentified
  source 1..11: note = methanogen bacteria
VGVAGADTVGV

SEQ ID NO: 59411 - protein, 18 aa, unidentified
  source 1..18: note = methanogen bacteria
AMVFTAADDLQYLRNNMV

SEQ ID NO: 59412 - protein, 13 aa, unidentified
  source 1..13: note = methanogen bacteria
VPSIANEFVMNNV

SEQ ID NO: 59413 - protein, 11 aa, unidentified
  source 1..11: note = methanogen bacteria
YHFQYVRGWDA

SEQ ID NO: 59414 - protein, 17 aa, unidentified
  source 1..17: note = methanogen bacteria
MGNLELNHQYANMIVQS

SEQ ID NO: 59415 - protein, 11 aa, unidentified
  source 1..11: note = methanogen bacteria
VAGLGQAAIAG

SEQ ID NO: 59416 - protein, 20 aa, unidentified
  source 1..20: note = methanogen bacteria
EPLLRAYGASGQNLAEGIKY

SEQ ID NO: 59417 - protein, 12 aa, unidentified
  source 1..12: note = methanogen bacteria
STIGGEYGIASF

SEQ ID NO: 59418 - protein, 21 aa, unidentified
  source 1..21: note = methanogen bacteria
LATLFAYTKETAVLVPEITRF

SEQ ID NO: 59419 - protein, 10 aa, unidentified
  source 1..10: note = methanogen bacteria
SGLGNIEVTA

SEQ ID NO: 59420 - protein, 19 aa, unidentified
  source 1..19: note = methanogen bacteria
DKILILFCNNQVFDASYSY

SEQ ID NO: 59421 - protein, 11 aa, unidentified
  source 1..11: note = methanogen bacteria
VYEGLIYITAY

SEQ ID NO: 59422 - protein, 19 aa, unidentified
  source 1..19: note = methanogen bacteria
FLSFMLYQTKDLIVINQIS

SEQ ID NO: 59423 - protein, 11 aa, unidentified
  source 1..11: note = methanogen bacteria
PLIARELSMSN

SEQ ID NO: 59424 - protein, 10 aa, unidentified
  source 1..10: note = methanogen bacteria
HFQYIMGLDS

SEQ ID NO: 59425 - protein, 18 aa, unidentified
  source 1..18: note = methanogen bacteria
IMGNVPIVPEYYPLLMES

SEQ ID NO: 59426 - protein, 11 aa, unidentified
  source 1..11: note = methanogen bacteria
PLIARELAMSN

SEQ ID NO: 59427 - protein, 10 aa, unidentified
  source 1..10: note = methanogen bacteria
HFQYIMGLDS

SEQ ID NO: 59428 - protein, 18 aa, unidentified
  source 1..18: note = methanogen bacteria
IMGNVPIVPENYPLLMAS

SEQ ID NO: 59429 - protein, 12 aa, unidentified
  source 1..12: note = methanogen bacteria
IAGLNVDSLIAI

SEQ ID NO: 59430 - protein, 17 aa, unidentified
  source 1..17: note = methanogen bacteria
QILLSLGAASVIDLSME

SEQ ID NO: 59431 - protein, 11 aa, unidentified
  source 1..11: note = methanogen bacteria
LILSSNLDVAT

SEQ ID NO: 59432 - protein, 21 aa, unidentified
  source 1..21: note = methanogen bacteria
QFAYIFSYTESTQVLIESLVF

SEQ ID NO: 59433 - protein, 12 aa, unidentified
  source 1..12: note = methanogen bacteria
PLISNDLHLTIE

SEQ ID NO: 59434 - protein, 10 aa, unidentified
  source 1..10: note = methanogen bacteria
HLQYVLGYDS

SEQ ID NO: 59435 - protein, 17 aa, unidentified
  source 1..17: note = methanogen bacteria
FIGNEVINSSNVSGLIK

SEQ ID NO: 59436 - protein, 13 aa, unidentified
  source 1..13: note = methanogen bacteria
MIDIAFILNQIDN

SEQ ID NO: 59437 - protein, 23 aa, unidentified
  source 1..23: note = methanogen bacteria
IQNIPAMFALIFKDAFDFTSIFG

SEQ ID NO: 59438 - protein, 26 aa, unidentified
  source 1..26: note = methanogen bacteria
STGVPITSVVSGAPYVQNAIASVFGW

SEQ ID NO: 59439 - protein, 12 aa, unidentified
  source 1..12: note = methanogen bacteria
PAIALEFHMSNI

SEQ ID NO: 59440 - protein, 10 aa, unidentified
  source 1..10: note = methanogen bacteria
HFQYLEGLNA

SEQ ID NO: 59441 - protein, 18 aa, unidentified
  source 1..18: note = methanogen bacteria
VMGNVPIEPSNYNLLVTS

SEQ ID NO: 59442 - protein, 11 aa, unidentified
  source 1..11: note = methanogen bacteria
IAGLGTEPLAA

SEQ ID NO: 59443 - protein, 18 aa, unidentified
  source 1..18: note = methanogen bacteria
PIIVLIGASEVLTYAESY

SEQ ID NO: 59444 - protein, 11 aa, unidentified
  source 1..11: note = methanogen bacteria
SIVAGTAIVAS

SEQ ID NO: 59445 - protein, 21 aa, unidentified
  source 1..21: note = methanogen bacteria
QIAYLFAYGSNSGSLNTLIVQ

SEQ ID NO: 59446 - protein, 12 aa, unidentified
  source 1..12: note = methanogen bacteria
VAGLGSDALAAI

SEQ ID NO: 59447 - protein, 16 aa, unidentified
  source 1..16: note = methanogen bacteria
LEIMGAGSSTQLALDY

SEQ ID NO: 59448 - protein, 12 aa, unidentified
  source 1..12: note = methanogen bacteria
VIVSGNVAVATY

SEQ ID NO: 59449 - protein, 19 aa, unidentified
  source 1..19: note = methanogen bacteria
ISIIFAYGSTASLAPRIAS

SEQ ID NO: 59450 - protein, 42 aa, unidentified
  source 1..42: note = methanogen bacteria
GTNGIYPIEIMSPLFQGLMPYLPMTYAILLLKDAVFGVIWPT

SEQ ID NO: 59451 - protein, 11 aa, unidentified
  source 1..11: note = methanogen bacteria
VSWLGGNAVGG

SEQ ID NO: 59452 - protein, 18 aa, unidentified
  source 1..18: note = methanogen bacteria
PLMDCFGNPAARDEAIAY

SEQ ID NO: 59453 - protein, 11 aa, unidentified
  source 1..11: note = methanogen bacteria
VGVAGADTVGV

SEQ ID NO: 59454 - protein, 18 aa, unidentified
  source 1..18: note = methanogen bacteria
AMVFTAADDLHYLRDNMF

SEQ ID NO: 59455 - protein, 11 aa, unidentified
  source 1..11: note = methanogen bacteria
VAGLGQAAIAG

SEQ ID NO: 59456 - protein, 19 aa, unidentified
  source 1..19: note = methanogen bacteria
EPVLKTYGASGQSLTEALK

SEQ ID NO: 59457 - protein, 12 aa, unidentified
  source 1..12: note = methanogen bacteria
SSVGGEYGIAAF

SEQ ID NO: 59458 - protein, 21 aa, unidentified
  source 1..21: note = methanogen bacteria
LSMIFAYTPETAPLIPEITSF

SEQ ID NO: 59459 - protein, 12 aa, unidentified
  source 1..12: note = methanogen bacteria
VAGLGADALAAV

SEQ ID NO: 59460 - protein, 16 aa, unidentified
  source 1..16: note = methanogen bacteria
LNLMGAGSSTQLGIEY

SEQ ID NO: 59461 - protein, 12 aa, unidentified
  source 1..12: note = methanogen bacteria
TIAAGTTAVAVY

SEQ ID NO: 59462 - protein, 21 aa, unidentified
  source 1..21: note = methanogen bacteria
YIALLFAYSDQSASLAPMISS

SEQ ID NO: 59463 - protein, 11 aa, unidentified
  source 1..11: note = methanogen bacteria
VAGLGADALAA

SEQ ID NO: 59464 - protein, 18 aa, unidentified
  source 1..18: note = methanogen bacteria
PILQFMGAGDTIQYAMDY

SEQ ID NO: 59465 - protein, 12 aa, unidentified
  source 1..12: note = methanogen bacteria
VIAAGTTAVAVY

SEQ ID NO: 59466 - protein, 22 aa, unidentified
  source 1..22: note = methanogen bacteria
SQIAGMFSYTQASAGMASEIAT

SEQ ID NO: 59467 - protein, 12 aa, unidentified
  source 1..12: note = methanogen bacteria
VSGLSADALTAI

SEQ ID NO: 59468 - protein, 20 aa, unidentified
  source 1..20: note = methanogen bacteria
DDLIVLVGGESVLPLCRAYI

SEQ ID NO: 59469 - protein, 11 aa, unidentified
  source 1..11: note = methanogen bacteria
FTAGVGEIASY

SEQ ID NO: 59470 - protein, 22 aa, unidentified
  source 1..22: note = methanogen bacteria
HQFCGIFSLTLSDTNVIDRAAE

SEQ ID NO: 59471 - protein, 11 aa, unidentified
  source 1..11: note = methanogen bacteria
VAGLGAEPLAA

SEQ ID NO: 59472 - protein, 16 aa, unidentified
  source 1..16: note = methanogen bacteria
LKLMGASSVLDYGMQY

SEQ ID NO: 59473 - protein, 11 aa, unidentified
  source 1..11: note = methanogen bacteria
TLVSGPVAVAV

SEQ ID NO: 59474 - protein, 21 aa, unidentified
  source 1..21: note = methanogen bacteria
QIAFVFSYSESSAHLEPLIAS

SEQ ID NO: 59475 - protein, 10 aa, unidentified
  source 1..10: note = methanogen bacteria
SQLSPEAFFA

SEQ ID NO: 59476 - protein, 18 aa, unidentified
  source 1..18: note = methanogen bacteria
DILNKMGVTKSIDLAITY

SEQ ID NO: 59477 - protein, 16 aa, unidentified
  source 1..16: note = methanogen bacteria
YGFALFSITGAETSVF

SEQ ID NO: 59478 - protein, 31 aa, unidentified
  source 1..31: note = methanogen bacteria
NSFTFGWGTNPAAFFTANVGESSDLAGIDYL

SEQ ID NO: 59479 - protein, 24 aa, unidentified
  source 1..24: note = methanogen bacteria
TLPGFHLGLVTLLNPNWGMLLDID

SEQ ID NO: 59480 - protein, 35 aa, unidentified
  source 1..35: note = methanogen bacteria
GYMSVTSSIPITELITEGTSLIFVVLPEVFEVMGP

SEQ ID NO: 59481 - protein, 11 aa, unidentified
  source 1..11: note = methanogen bacteria
VAGIGVNALAG

SEQ ID NO: 59482 - protein, 19 aa, unidentified
  source 1..19: note = methanogen bacteria
RPILVYMGAGSTIGYALEY

SEQ ID NO: 59483 - protein, 12 aa, unidentified
  source 1..12: note = methanogen bacteria
TIVSGTDAVAVY

SEQ ID NO: 59484 - protein, 21 aa, unidentified
  source 1..21: note = methanogen bacteria
IVMLFSYADSSVSLSDSLIDF

SEQ ID NO: 59485 - protein, 13 aa, unidentified
  source 1..13: note = methanogen bacteria
VPSLAQDFSMSNI

SEQ ID NO: 59486 - protein, 12 aa, unidentified
  source 1..12: note = methanogen bacteria
YHLQYIRGFDSQ

SEQ ID NO: 59487 - protein, 18 aa, unidentified
  source 1..18: note = methanogen bacteria
IMGNVPIIPEYYHLLTAS

SEQ ID NO: 59488 - protein, 12 aa, unidentified
  source 1..12: note = methanogen bacteria
PSIGVDLNLSIE

SEQ ID NO: 59489 - protein, 10 aa, unidentified
  source 1..10: note = methanogen bacteria
YLQYVLGYDS

SEQ ID NO: 59490 - protein, 18 aa, unidentified
  source 1..18: note = methanogen bacteria
IFGTSERIGDDIASFLIS

SEQ ID NO: 59491 - protein, 81 aa, unidentified
  source 1..81: note = methanogen bacteria
FTYPFDIEHWGVILQNTESGNGLFGLTGYFYTPVWGYILGFEDIILNLLPGITYGERFTDLLEIEGMAFPYYTATTTTPAF

SEQ ID NO: 59492 - protein, 24 aa, unidentified
  source 1..24: note = methanogen bacteria
LDGTLMNAFSFIFGRTSEYDLLLT

SEQ ID NO: 59493 - protein, 36 aa, unidentified
  source 1..36: note = methanogen bacteria
NSLSLLTTASEYLHLCDPQTVISWMHALEGPVFGIP

SEQ ID NO: 59494 - protein, 11 aa, unidentified
  source 1..11: note = methanogen bacteria
PAIAEEFGMNN

SEQ ID NO: 59495 - protein, 10 aa, unidentified
  source 1..10: note = methanogen bacteria
HFQYVMGWDA

SEQ ID NO: 59496 - protein, 18 aa, unidentified
  source 1..18: note = methanogen bacteria
IMGSRKLSSQYADMIVQS

SEQ ID NO: 59497 - protein, 10 aa, unidentified
  source 1..10: note = methanogen bacteria
IMPYDNSWDR

SEQ ID NO: 59498 - protein, 11 aa, unidentified
  source 1..11: note = methanogen bacteria
IQCTDPSSDLI

SEQ ID NO: 59499 - protein, 16 aa, unidentified
  source 1..16: note = methanogen bacteria
TSCLFTIENGVYTVTE

SEQ ID NO: 59500 - protein, 13 aa, unidentified
  source 1..13: note = methanogen bacteria
VPAIASEFGMNNV

SEQ ID NO: 59501 - protein, 11 aa, unidentified
  source 1..11: note = methanogen bacteria
YHFQYVRGWDA

SEQ ID NO: 59502 - protein, 18 aa, unidentified
  source 1..18: note = methanogen bacteria
VMGSLPLSTEYANLIVQS

SEQ ID NO: 59503 - protein, 12 aa, unidentified
  source 1..12: note = methanogen bacteria
IAGIGANAIAAT

SEQ ID NO: 59504 - protein, 19 aa, unidentified
  source 1..19: note = methanogen bacteria
RPMLEIMQAGDAMEYAMTY

SEQ ID NO: 59505 - protein, 14 aa, unidentified
  source 1..14: note = methanogen bacteria
LTMVAGTMAVGAYT

SEQ ID NO: 59506 - protein, 21 aa, unidentified
  source 1..21: note = methanogen bacteria
EYISLLFTYSPESIAMRPMLI

SEQ ID NO: 59507 - protein, 12 aa, unidentified
  source 1..12: note = methanogen bacteria
PTIEVDLNLNVE

SEQ ID NO: 59508 - protein, 10 aa, unidentified
  source 1..10: note = methanogen bacteria
LQNALGYDSR

SEQ ID NO: 59509 - protein, 18 aa, unidentified
  source 1..18: note = methanogen bacteria
VLGASNTLNKNIHSFLTS

SEQ ID NO: 59510 - protein, 12 aa, unidentified
  source 1..12: note = methanogen bacteria
VVGLGPEPLVAM

SEQ ID NO: 59511 - protein, 16 aa, unidentified
  source 1..16: note = methanogen bacteria
LILLGAGTSLKYGMDY

SEQ ID NO: 59512 - protein, 11 aa, unidentified
  source 1..11: note = methanogen bacteria
LKVAGHTAVAV

SEQ ID NO: 59513 - protein, 21 aa, unidentified
  source 1..21: note = methanogen bacteria
EIAHIFSYNNQNAILKPYIAS

SEQ ID NO: 59514 - protein, 10 aa, unidentified
  source 1..10: note = methanogen bacteria
IAGLGESAIA

SEQ ID NO: 59515 - protein, 17 aa, unidentified
  source 1..17: note = methanogen bacteria
YLSIYTHDEQTKIEAIT

SEQ ID NO: 59516 - protein, 11 aa, unidentified
  source 1..11: note = methanogen bacteria
ADIAGDLGLSI

SEQ ID NO: 59517 - protein, 22 aa, unidentified
  source 1..22: note = methanogen bacteria
QLAYLFMIVSENPQLTAGISHN

SEQ ID NO: 59518 - protein, 12 aa, unidentified
  source 1..12: note = methanogen bacteria
ISQINIHASFAV

SEQ ID NO: 59519 - protein, 19 aa, unidentified
  source 1..19: note = methanogen bacteria
QGLLYDVNQSESYLLVWDY

SEQ ID NO: 59520 - protein, 10 aa, unidentified
  source 1..10: note = methanogen bacteria
IVTMGEIGPI

SEQ ID NO: 59521 - protein, 16 aa, unidentified
  source 1..16: note = methanogen bacteria
QAYNFFSISGRATEIN

SEQ ID NO: 59522 - protein, 11 aa, unidentified
  source 1..11: note = methanogen bacteria
PSIAKEFGMNN

SEQ ID NO: 59523 - protein, 11 aa, unidentified
  source 1..11: note = methanogen bacteria
YYFQYVKGFNS

SEQ ID NO: 59524 - protein, 17 aa, unidentified
  source 1..17: note = methanogen bacteria
MGNLNLSTIYANMILKA

SEQ ID NO: 59525 - protein, 10 aa, unidentified
  source 1..10: note = methanogen bacteria
VNGLGTTAII

SEQ ID NO: 59526 - protein, 19 aa, unidentified
  source 1..19: note = methanogen bacteria
EPICVMAGIGEYTDMIFAY

SEQ ID NO: 59527 - protein, 19 aa, unidentified
  source 1..19: note = methanogen bacteria
NPIIGIFSTENVVLDEVRN

SEQ ID NO: 59528 - protein, 12 aa, unidentified
  source 1..12: note = methanogen bacteria
PKISSNLNFSAE

SEQ ID NO: 59529 - protein, 10 aa, unidentified
  source 1..10: note = methanogen bacteria
HLQYVLNIKE

SEQ ID NO: 59530 - protein, 18 aa, unidentified
  source 1..18: note = methanogen bacteria
VGNQRLGPDKLDSLLVQS

SEQ ID NO: 59531 - protein, 11 aa, unidentified
  source 1..11: note = methanogen bacteria
VSSLGADALAG

SEQ ID NO: 59532 - protein, 19 aa, unidentified
  source 1..19: note = methanogen bacteria
KDILLAIGASTTIGYAMDY

SEQ ID NO: 59533 - protein, 12 aa, unidentified
  source 1..12: note = methanogen bacteria
TVVATTDAVAVY

SEQ ID NO: 59534 - protein, 22 aa, unidentified
  source 1..22: note = methanogen bacteria
GQIVSLFVYAGTSARLESQLVS

SEQ ID NO: 59535 - protein, 10 aa, unidentified
  source 1..10: note = methanogen bacteria
VSGLGTAAII

SEQ ID NO: 59536 - protein, 19 aa, unidentified
  source 1..19: note = methanogen bacteria
EPICVMAGISEYTDMIFAY

SEQ ID NO: 59537 - protein, 11 aa, unidentified
  source 1..11: note = methanogen bacteria
LHLYASPIAVS

SEQ ID NO: 59538 - protein, 19 aa, unidentified
  source 1..19: note = methanogen bacteria
GPIVGLFSSEYVILEEVKN

SEQ ID NO: 59539 - protein, 10 aa, unidentified
  source 1..10: note = methanogen bacteria
GGLGAGALAA

SEQ ID NO: 59540 - protein, 15 aa, unidentified
  source 1..15: note = methanogen bacteria
LIQMGAGEVIEDALN

SEQ ID NO: 59541 - protein, 12 aa, unidentified
  source 1..12: note = methanogen bacteria
TLLSGTIAIASY

SEQ ID NO: 59542 - protein, 22 aa, unidentified
  source 1..22: note = methanogen bacteria
EPLSHIFAYSANSAVLSLRITE

SEQ ID NO: 59543 - protein, 11 aa, unidentified
  source 1..11: note = methanogen bacteria
VAGLGPAPLAA

SEQ ID NO: 59544 - protein, 16 aa, unidentified
  source 1..16: note = methanogen bacteria
LKIMGASDVLKYAMDY

SEQ ID NO: 59545 - protein, 12 aa, unidentified
  source 1..12: note = methanogen bacteria
TLVSGSTAVAVY

SEQ ID NO: 59546 - protein, 21 aa, unidentified
  source 1..21: note = methanogen bacteria
QVAFIFSYSEASSHLEPLIAS

SEQ ID NO: 59547 - protein, 11 aa, unidentified
  source 1..11: note = methanogen bacteria
VSGLGADALAG

SEQ ID NO: 59548 - protein, 18 aa, unidentified
  source 1..18: note = methanogen bacteria
KDILLGMGAGSTIDYAMD

SEQ ID NO: 59549 - protein, 12 aa, unidentified
  source 1..12: note = methanogen bacteria
VVVASTDAVAVY

SEQ ID NO: 59550 - protein, 21 aa, unidentified
  source 1..21: note = methanogen bacteria
QIVSVFAYTGTSTRLAPQLIA

SEQ ID NO: 59551 - protein, 11 aa, unidentified
  source 1..11: note = methanogen bacteria
VSGLGADALAG

SEQ ID NO: 59552 - protein, 18 aa, unidentified
  source 1..18: note = methanogen bacteria
KDILLGMGAGSTIDYAMD

SEQ ID NO: 59553 - protein, 12 aa, unidentified
  source 1..12: note = methanogen bacteria
VVVANTDAVAVY

SEQ ID NO: 59554 - protein, 21 aa, unidentified
  source 1..21: note = methanogen bacteria
QIVSVFAYTGTSTRLTPQLIA

SEQ ID NO: 59555 - protein, 11 aa, unidentified
  source 1..11: note = methanogen bacteria
AGLGPGPLAAI

SEQ ID NO: 59556 - protein, 16 aa, unidentified
  source 1..16: note = methanogen bacteria
LKVMGASEVMGYAMDY

SEQ ID NO: 59557 - protein, 12 aa, unidentified
  source 1..12: note = methanogen bacteria
TLVSGSTAVAVY

SEQ ID NO: 59558 - protein, 21 aa, unidentified
  source 1..21: note = methanogen bacteria
QVAYIFSYSEASAHLEPLIAS

SEQ ID NO: 59559 - protein, 12 aa, unidentified
  source 1..12: note = methanogen bacteria
PSIASEFHMSNI

SEQ ID NO: 59560 - protein, 12 aa, unidentified
  source 1..12: note = methanogen bacteria
YHLQYIKGFDSQ

SEQ ID NO: 59561 - protein, 18 aa, unidentified
  source 1..18: note = methanogen bacteria
IMGDVPIVEQYYPLLISS

SEQ ID NO: 59562 - protein, 12 aa, unidentified
  source 1..12: note = methanogen bacteria
VSGLGTEAGSAV

SEQ ID NO: 59563 - protein, 19 aa, unidentified
  source 1..19: note = methanogen bacteria
RPAIGFMGADDVAGEAEAY

SEQ ID NO: 59564 - protein, 10 aa, unidentified
  source 1..10: note = methanogen bacteria
IMAGGTSAVM

SEQ ID NO: 59565 - protein, 22 aa, unidentified
  source 1..22: note = methanogen bacteria
DPLMSVMTIEESMREMRPDFVK

SEQ ID NO: 59566 - protein, 11 aa, unidentified
  source 1..11: note = methanogen bacteria
VAGLGQAAIAG

SEQ ID NO: 59567 - protein, 16 aa, unidentified
  source 1..16: note = methanogen bacteria
LKIYGASDQSLIEGIK

SEQ ID NO: 59568 - protein, 13 aa, unidentified
  source 1..13: note = methanogen bacteria
ISTCGGEYGIAAF

SEQ ID NO: 59569 - protein, 21 aa, unidentified
  source 1..21: note = methanogen bacteria
LSLIFAYTPETASLIPEITNF

SEQ ID NO: 59570 - protein, 11 aa, unidentified
  source 1..11: note = methanogen bacteria
VAGLGQAAIAG

SEQ ID NO: 59571 - protein, 18 aa, unidentified
  source 1..18: note = methanogen bacteria
PLLKTYGASGQSLVEAMK

SEQ ID NO: 59572 - protein, 12 aa, unidentified
  source 1..12: note = methanogen bacteria
SSIGGEYGIAAF

SEQ ID NO: 59573 - protein, 21 aa, unidentified
  source 1..21: note = methanogen bacteria
LALIFAYTPDTAPLIPEITNF

SEQ ID NO: 59574 - protein, 13 aa, unidentified
  source 1..13: note = methanogen bacteria
ALPTIALDFNMSN

SEQ ID NO: 59575 - protein, 10 aa, unidentified
  source 1..10: note = methanogen bacteria
HFQYLNGLNP

SEQ ID NO: 59576 - protein, 17 aa, unidentified
  source 1..17: note = methanogen bacteria
MGNVPIIPSNYHLLVQS

SEQ ID NO: 59577 - protein, 25 aa, unidentified
  source 1..25: note = methanogen bacteria
GSNPNLFFTETLLHSTSSISGLGDI

SEQ ID NO: 59578 - protein, 25 aa, unidentified
  source 1..25: note = methanogen bacteria
VTLPGASIGYSALFNPKWYSICDPH

SEQ ID NO: 59579 - protein, 35 aa, unidentified; identical to SEQ ID NO: 57857
  source 1..35: note = methanogen bacteria

SEQ ID NO: 59580 - protein, 12 aa, unidentified
  source 1..12: note = methanogen bacteria
MYDMNSFTLIFD

SEQ ID NO: 59581 - protein, 11 aa, unidentified
  source 1..11: note = methanogen bacteria
LVMSMGDMGPI

SEQ ID NO: 59582 - protein, 17 aa, unidentified
  source 1..17: note = methanogen bacteria
YIFDLFGITEMSTEIFW

SEQ ID NO: 59583 - protein, 10 aa, unidentified
  source 1..10: note = methanogen bacteria
SGLGANQLAA

SEQ ID NO: 59584 - protein, 15 aa, unidentified
  source 1..15: note = methanogen bacteria
LIFIGAGNTISYSLD

SEQ ID NO: 59585 - protein, 12 aa, unidentified
  source 1..12: note = methanogen bacteria
AYIGTTDAVAVY

SEQ ID NO: 59586 - protein, 22 aa, unidentified
  source 1..22: note = methanogen bacteria
PQIVAIFTYGGTSQRLNGSLIA

SEQ ID NO: 59587 - protein, 11 aa, unidentified
  source 1..11: note = methanogen bacteria
VAGLGSNALAA

SEQ ID NO: 59588 - protein, 18 aa, unidentified
  source 1..18: note = methanogen bacteria
EILLLMGAGSSLQMGLDY

SEQ ID NO: 59589 - protein, 12 aa, unidentified
  source 1..12: note = methanogen bacteria
TLVAGTTAVAVY

SEQ ID NO: 59590 - protein, 21 aa, unidentified
  source 1..21: note = methanogen bacteria
YIALLFAYTDQSAMLAPLISE

SEQ ID NO: 59591 - protein, 10 aa, unidentified
  source 1..10: note = methanogen bacteria
SGLGPNALSA

SEQ ID NO: 59592 - protein, 16 aa, unidentified
  source 1..16: note = methanogen bacteria
LIFLNVGGALNYALDF

SEQ ID NO: 59593 - protein, 11 aa, unidentified
  source 1..11: note = methanogen bacteria
LQVSSTMSFAV

SEQ ID NO: 59594 - protein, 21 aa, unidentified
  source 1..21: note = methanogen bacteria
QIASLFTYNSTNAMLRPQISQ

SEQ ID NO: 59595 - protein, 10 aa, unidentified
  source 1..10: note = methanogen bacteria
SGLGSQPLAS

SEQ ID NO: 59596 - protein, 15 aa, unidentified
  source 1..15: note = methanogen bacteria
LYFMGASSVMKYATD

SEQ ID NO: 59597 - protein, 10 aa, unidentified
  source 1..10: note = methanogen bacteria
TLLSGPVAVA

SEQ ID NO: 59598 - protein, 22 aa, unidentified
  source 1..22: note = methanogen bacteria
YQIADIFAYTQATSNLKPAIAD

SEQ ID NO: 59599 - protein, 10 aa, unidentified
  source 1..10: note = methanogen bacteria
SGLGPKALAA

SEQ ID NO: 59600 - protein, 15 aa, unidentified
  source 1..15: note = methanogen bacteria
LIMIGAKEALDYALD

SEQ ID NO: 59601 - protein, 12 aa, unidentified
  source 1..12: note = methanogen bacteria
VVLGGHAAVAVY

SEQ ID NO: 59602 - protein, 21 aa, unidentified
  source 1..21: note = methanogen bacteria
NIASIFTYSSASASLAPKISA

SEQ ID NO: 59603 - protein, 12 aa, unidentified
  source 1..12: note = methanogen bacteria
PSIASEFHMSNI

SEQ ID NO: 59604 - protein, 12 aa, unidentified
  source 1..12: note = methanogen bacteria
YHLQYIKGFDSQ

SEQ ID NO: 59605 - protein, 18 aa, unidentified
  source 1..18: note = methanogen bacteria
VMGDVPIVEQYYPLLISS

SEQ ID NO: 59606 - protein, 11 aa, unidentified
  source 1..11: note = methanogen bacteria
VAGLGAEPLAA

SEQ ID NO: 59607 - protein, 16 aa, unidentified
  source 1..16: note = methanogen bacteria
LNMMGASSVINYAMEY

SEQ ID NO: 59608 - protein, 11 aa, unidentified
  source 1..11: note = methanogen bacteria
TIVSGPVAVAV

SEQ ID NO: 59609 - protein, 22 aa, unidentified
  source 1..22: note = methanogen bacteria
NQIAFIFSYSENSAQLEPLIAS

SEQ ID NO: 59610 - protein, 12 aa, unidentified
  source 1..12: note = methanogen bacteria
VSGLNTDSLAAL

SEQ ID NO: 59611 - protein, 18 aa, unidentified
  source 1..18: note = methanogen bacteria
DLVILLGASRVSSYCLNY

SEQ ID NO: 59612 - protein, 12 aa, unidentified
  source 1..12: note = methanogen bacteria
ITTSGVDEIASF

SEQ ID NO: 59613 - protein, 22 aa, unidentified
  source 1..22: note = methanogen bacteria
HPLCELFNFQTGNLTLINRSSE

SEQ ID NO: 59614 - protein, 11 aa, unidentified
  source 1..11: note = methanogen bacteria
VAGLGPEPLAA

SEQ ID NO: 59615 - protein, 15 aa, unidentified
  source 1..15: note = methanogen bacteria
LNMMGASSVIKYAMD

SEQ ID NO: 59616 - protein, 11 aa, unidentified
  source 1..11: note = methanogen bacteria
TIVSGPISVAV

SEQ ID NO: 59617 - protein, 21 aa, unidentified
  source 1..21: note = methanogen bacteria
QIAFIFSYSENSAQLEPLIAS

SEQ ID NO: 59618 - protein, 12 aa, unidentified
  source 1..12: note = methanogen bacteria
PLISGELNLSIE

SEQ ID NO: 59619 - protein, 10 aa, unidentified
  source 1..10: note = methanogen bacteria
HLQYVLGYDS

SEQ ID NO: 59620 - protein, 17 aa, unidentified
  source 1..17: note = methanogen bacteria
IGNQEIGGNNIPELILS

SEQ ID NO: 59621 - protein, 11 aa, unidentified
  source 1..11: note = methanogen bacteria
VSGLGADALAG

SEQ ID NO: 59622 - protein, 18 aa, unidentified
  source 1..18: note = methanogen bacteria
KDILLAMGAGATIDYAMD

SEQ ID NO: 59623 - protein, 12 aa, unidentified
  source 1..12: note = methanogen bacteria
VVVASTDAVAVY

SEQ ID NO: 59624 - protein, 21 aa, unidentified
  source 1..21: note = methanogen bacteria
QIVSIFAYAGTSTRLEPQLVA

SEQ ID NO: 59625 - protein, 11 aa, unidentified
  source 1..11: note = methanogen bacteria
VSGLGADALAG

SEQ ID NO: 59626 - protein, 16 aa, unidentified
  source 1..16: note = methanogen bacteria
LNVMGAGQTIGYATEY

SEQ ID NO: 59627 - protein, 12 aa, unidentified
  source 1..12: note = methanogen bacteria
VYVGSTDSVAVY

SEQ ID NO: 59628 - protein, 23 aa, unidentified
  source 1..23: note = methanogen bacteria
GDIASIFASSGSSARIAPELTSF

SEQ ID NO: 59629 - protein, 11 aa, unidentified
  source 1..11: note = methanogen bacteria
VAGLGADALAA

SEQ ID NO: 59630 - protein, 16 aa, unidentified
  source 1..16: note = methanogen bacteria
LKAMGAGDTIQYALDY

SEQ ID NO: 59631 - protein, 12 aa, unidentified
  source 1..12: note = methanogen bacteria
VIASGTTAVAVY

SEQ ID NO: 59632 - protein, 20 aa, unidentified
  source 1..20: note = methanogen bacteria
IAALFSYTSASVELAPEIAK

SEQ ID NO: 59633 - protein, 11 aa, unidentified
  source 1..11: note = methanogen bacteria
VSGLGADALAG

SEQ ID NO: 59634 - protein, 15 aa, unidentified
  source 1..15: note = methanogen bacteria
LILMGVGRTINYAMD

SEQ ID NO: 59635 - protein, 12 aa, unidentified
  source 1..12: note = methanogen bacteria
AYVGSTDSVAVY

SEQ ID NO: 59636 - protein, 23 aa, unidentified
  source 1..23: note = methanogen bacteria
PEITTIFSYSAASVRIAPELTSF

SEQ ID NO: 59637 - protein, 11 aa, unidentified
  source 1..11: note = methanogen bacteria
VAGLGQAAIAG

SEQ ID NO: 59638 - protein, 19 aa, unidentified
  source 1..19: note = methanogen bacteria
EPLLRAYGASGQALVEGLK

SEQ ID NO: 59639 - protein, 12 aa, unidentified
  source 1..12: note = methanogen bacteria
SAIGGEYGIAAF

SEQ ID NO: 59640 - protein, 21 aa, unidentified
  source 1..21: note = methanogen bacteria
LALIFAYTPDTAPLIPEITNF

SEQ ID NO: 59641 - protein, 12 aa, unidentified
  source 1..12: note = methanogen bacteria
PSIAAEFHMSNI

SEQ ID NO: 59642 - protein, 12 aa, unidentified
  source 1..12: note = methanogen bacteria
YHLQYIKGLDSQ

SEQ ID NO: 59643 - protein, 18 aa, unidentified
  source 1..18: note = methanogen bacteria
VMGDVPIVEEYYPLLISS

SEQ ID NO: 59644 - protein, 10 aa, unidentified
  source 1..10: note = methanogen bacteria
AGLGPEPLAA

SEQ ID NO: 59645 - protein, 17 aa, unidentified
  source 1..17: note = methanogen bacteria
LLIMMGAESVIGYATEY

SEQ ID NO: 59646 - protein, 10 aa, unidentified
  source 1..10: note = methanogen bacteria
TIVSGPVAVA

SEQ ID NO: 59647 - protein, 21 aa, unidentified
  source 1..21: note = methanogen bacteria
QIAFIFSYSENSAQLAQAIAG

SEQ ID NO: 59648 - protein, 13 aa, unidentified
  source 1..13: note = methanogen bacteria
VSGLGAVSSSAVA

SEQ ID NO: 59649 - protein, 18 aa, unidentified
  source 1..18: note = methanogen bacteria
RPLILIMGAESIVDECLL

SEQ ID NO: 59650 - protein, 21 aa, unidentified
  source 1..21: note = methanogen bacteria
EPLISILTYEDSMRELRPQFV

SEQ ID NO: 59651 - protein, 12 aa, unidentified
  source 1..12: note = methanogen bacteria
PSIAKAFGMNNV

SEQ ID NO: 59652 - protein, 12 aa, unidentified
  source 1..12: note = methanogen bacteria
YHLQYIMGMNSQ

SEQ ID NO: 59653 - protein, 18 aa, unidentified
  source 1..18: note = methanogen bacteria
IMGNVAIEPQYYPLLLQS

SEQ ID NO: 59654 - protein, 11 aa, unidentified
  source 1..11: note = methanogen bacteria
VAGLGSDPLAA

SEQ ID NO: 59655 - protein, 18 aa, unidentified
  source 1..18: note = methanogen bacteria
QILTIMGAGSVLTYAKPY

SEQ ID NO: 59656 - protein, 11 aa, unidentified
  source 1..11: note = methanogen bacteria
ITVANTTVVAA

SEQ ID NO: 59657 - protein, 21 aa, unidentified
  source 1..21: note = methanogen bacteria
QVAFIFSYSSTSENLGNLITE

SEQ ID NO: 59658 - protein, 11 aa, unidentified
  source 1..11: note = methanogen bacteria
VSGLGADALAG

SEQ ID NO: 59659 - protein, 16 aa, unidentified
  source 1..16: note = methanogen bacteria
LNAMGVGQTISYATDY

SEQ ID NO: 59660 - protein, 12 aa, unidentified
  source 1..12: note = methanogen bacteria
AFLSSTDSVAVY

SEQ ID NO: 59661 - protein, 23 aa, unidentified
  source 1..23: note = methanogen bacteria
GDIASVFASSGSSVRILGELTSF

SEQ ID NO: 59662 - protein, 12 aa, unidentified
  source 1..12: note = methanogen bacteria
VSGLGADALAGV

SEQ ID NO: 59663 - protein, 17 aa, unidentified
  source 1..17: note = methanogen bacteria
ILNSMGAGSTIGYATDY

SEQ ID NO: 59664 - protein, 12 aa, unidentified
  source 1..12: note = methanogen bacteria
AYVGSTDSVAVY

SEQ ID NO: 59665 - protein, 23 aa, unidentified
  source 1..23: note = methanogen bacteria
GDIAHVFASSGSSVRIASELTSF

SEQ ID NO: 59666 - protein, 12 aa, unidentified
  source 1..12: note = methanogen bacteria
VAGLGAEPLAAL

SEQ ID NO: 59667 - protein, 17 aa, unidentified
  source 1..17: note = methanogen bacteria
MLELMGASSVINYAMDY

SEQ ID NO: 59668 - protein, 11 aa, unidentified
  source 1..11: note = methanogen bacteria
TIVSGPTSVAV

SEQ ID NO: 59669 - protein, 21 aa, unidentified
  source 1..21: note = methanogen bacteria
QIAIIFSYSQSSADLAPLIAS

SEQ ID NO: 59670 - protein, 11 aa, unidentified
  source 1..11: note = methanogen bacteria
VSGLGADALAG

SEQ ID NO: 59671 - protein, 17 aa, unidentified
  source 1..17: note = methanogen bacteria
ILNAMGAGQTIGYATDY

SEQ ID NO: 59672 - protein, 12 aa, unidentified
  source 1..12: note = methanogen bacteria
AYVGSTDSVAVY

SEQ ID NO: 59673 - protein, 23 aa, unidentified
  source 1..23: note = methanogen bacteria
GDIASVFTSSGSSARIASELTAF

SEQ ID NO: 59674 - protein, 12 aa, unidentified
  source 1..12: note = methanogen bacteria
VSGLGADALAGI

SEQ ID NO: 59675 - protein, 18 aa, unidentified
  source 1..18: note = methanogen bacteria
PILNAMGAGSTIYYATDY

SEQ ID NO: 59676 - protein, 13 aa, unidentified
  source 1..13: note = methanogen bacteria
AYVGSADSVAVYS

SEQ ID NO: 59677 - protein, 23 aa, unidentified
  source 1..23: note = methanogen bacteria
GDIASIFASSGSSVRIAPELTSF

SEQ ID NO: 59678 - protein, 11 aa, unidentified
  source 1..11: note = methanogen bacteria
SGLNSDALAAL

SEQ ID NO: 59679 - protein, 18 aa, unidentified
  source 1..18: note = methanogen bacteria
DIVILLGAGSVSSYCLSY

SEQ ID NO: 59680 - protein, 12 aa, unidentified
  source 1..12: note = methanogen bacteria
MVTAGVGEVASF

SEQ ID NO: 59681 - protein, 22 aa, unidentified
  source 1..22: note = methanogen bacteria
YPICEIFNVYTTNVALVERSFE

SEQ ID NO: 59682 - protein, 12 aa, unidentified
  source 1..12: note = methanogen bacteria
PTISSDLHLSVK

SEQ ID NO: 59683 - protein, 10 aa, unidentified
  source 1..10: note = methanogen bacteria
LQHAIGFDAR

SEQ ID NO: 59684 - protein, 18 aa, unidentified
  source 1..18: note = methanogen bacteria
VLGSSNALEKNIPSLIFS

SEQ ID NO: 59685 - protein, 11 aa, unidentified
  source 1..11: note = methanogen bacteria
ITGLGINAITG

SEQ ID NO: 59686 - protein, 17 aa, unidentified
  source 1..17: note = methanogen bacteria
LDIYGGSYLINKEAISY

SEQ ID NO: 59687 - protein, 11 aa, unidentified
  source 1..11: note = methanogen bacteria
LIGGELGISIY

SEQ ID NO: 59688 - protein, 22 aa, unidentified
  source 1..22: note = methanogen bacteria
QIASIFMITTNYPPLTEGISQY

SEQ ID NO: 59689 - protein, 12 aa, unidentified
  source 1..12: note = methanogen bacteria
VSGLGADALAGV

SEQ ID NO: 59690 - protein, 17 aa, unidentified
  source 1..17: note = methanogen bacteria
ILNSMGAGSTIGYATDY

SEQ ID NO: 59691 - protein, 12 aa, unidentified
  source 1..12: note = methanogen bacteria
AYVGSTDSVAVY

SEQ ID NO: 59692 - protein, 23 aa, unidentified
  source 1..23: note = methanogen bacteria
GDIAHVFASSGSSVRIAPELTSF

SEQ ID NO: 59693 - protein, 11 aa, unidentified
  source 1..11: note = methanogen bacteria
VSGLGADALAG

SEQ ID NO: 59694 - protein, 18 aa, unidentified
  source 1..18: note = methanogen bacteria
PILNAMGAGQTINYATDY

SEQ ID NO: 59695 - protein, 12 aa, unidentified
  source 1..12: note = methanogen bacteria
TYVGSTDSVAVY

SEQ ID NO: 59696 - protein, 23 aa, unidentified
  source 1..23: note = methanogen bacteria
GDIAGIFASSGSSTRILPELTSF

SEQ ID NO: 59697 - protein, 10 aa, unidentified
  source 1..10: note = methanogen bacteria
AGLGPDPLAA

SEQ ID NO: 59698 - protein, 16 aa, unidentified
  source 1..16: note = methanogen bacteria
LIMMGASSVLSYAMEY

SEQ ID NO: 59699 - protein, 11 aa, unidentified
  source 1..11: note = methanogen bacteria
TIVSGPTAVAV

SEQ ID NO: 59700 - protein, 21 aa, unidentified
  source 1..21: note = methanogen bacteria
QIAFIFSYSESSAELAPLIAS

SEQ ID NO: 59701 - protein, 12 aa, unidentified
  source 1..12: note = methanogen bacteria
PTISSDLSLDVE

SEQ ID NO: 59702 - protein, 18 aa, unidentified
  source 1..18: note = methanogen bacteria
ILGTSNTLESNIPLFITS

SEQ ID NO: 59703 - protein, 11 aa, unidentified
  source 1..11: note = methanogen bacteria
VSGLGADALAG

SEQ ID NO: 59704 - protein, 17 aa, unidentified
  source 1..17: note = methanogen bacteria
ILKAMGAGQTIGYATDY

SEQ ID NO: 59705 - protein, 12 aa, unidentified
  source 1..12: note = methanogen bacteria
AYVGSTDSVAVY

SEQ ID NO: 59706 - protein, 23 aa, unidentified
  source 1..23: note = methanogen bacteria
GDIASVFASSGSSVRIASELTSF

SEQ ID NO: 59707 - protein, 12 aa, unidentified
  source 1..12: note = methanogen bacteria
PTIAAEFHMNNI

SEQ ID NO: 59708 - protein, 12 aa, unidentified
  source 1..12: note = methanogen bacteria
YHLQYIKGMDSQ

SEQ ID NO: 59709 - protein, 18 aa, unidentified
  source 1..18: note = methanogen bacteria
VMGDVPIVEQYYPLLISS

SEQ ID NO: 59710 - protein, 10 aa, unidentified
  source 1..10: note = methanogen bacteria
AGLGAEPLAA

SEQ ID NO: 59711 - protein, 16 aa, unidentified
  source 1..16: note = methanogen bacteria
LNMMGAGSVIGYAMDY

SEQ ID NO: 59712 - protein, 11 aa, unidentified
  source 1..11: note = methanogen bacteria
TIVSGPVAVAV

SEQ ID NO: 59713 - protein, 21 aa, unidentified
  source 1..21: note = methanogen bacteria
QIAFIFSYSKSSADLAPMIAS

SEQ ID NO: 59714 - protein, 13 aa, unidentified
  source 1..13: note = methanogen bacteria
SETFADRYGVSPS

SEQ ID NO: 59715 - protein, 15 aa, unidentified
  source 1..15: note = methanogen bacteria
GSFYTNVYSYGEHDA

SEQ ID NO: 59716 - protein, 11 aa, unidentified
  source 1..11: note = methanogen bacteria
VSGLGADVLAG

SEQ ID NO: 59717 - protein, 18 aa, unidentified
  source 1..18: note = methanogen bacteria
PILNVMGAGHTIEYAMDY

SEQ ID NO: 59718 - protein, 12 aa, unidentified
  source 1..12: note = methanogen bacteria
TVVGSTDSVAVY

SEQ ID NO: 59719 - protein, 23 aa, unidentified
  source 1..23: note = methanogen bacteria
ADITSIFTSAGSSVRIASQLTSF

SEQ ID NO: 59720 - protein, 74 aa, unidentified
  source 1..74: note = methanogen bacteria
QIVSTVNDLINNINDQIVGVLDWADKITGGRFHRQLSSAKEDKNITNALNSALTYVQDYLHLGSNDDVVNTLTS

SEQ ID NO: 59721 - protein, 11 aa, unidentified
  source 1..11: note = methanogen bacteria
VAGLGTEPLAA

SEQ ID NO: 59722 - protein, 16 aa, unidentified
  source 1..16: note = methanogen bacteria
LKLMGAESVLSYAMDY

SEQ ID NO: 59723 - protein, 11 aa, unidentified
  source 1..11: note = methanogen bacteria
TIVSGPTAVAV

SEQ ID NO: 59724 - protein, 21 aa, unidentified
  source 1..21: note = methanogen bacteria
QIAFIFSYSEGSAQLEPLIAS

SEQ ID NO: 59725 - protein, 11 aa, unidentified
  source 1..11: note = methanogen bacteria
VSGLGADALSG

SEQ ID NO: 59726 - protein, 18 aa, unidentified
  source 1..18: note = methanogen bacteria
PILNAMGAGQTIGYATDY

SEQ ID NO: 59727 - protein, 12 aa, unidentified
  source 1..12: note = methanogen bacteria
TFVGSTDSVAVY

SEQ ID NO: 59728 - protein, 23 aa, unidentified
  source 1..23: note = methanogen bacteria
SDIASIFTSSPGSARIASELTSF

SEQ ID NO: 59729 - protein, 11 aa, unidentified
  source 1..11: note = methanogen bacteria
VSGLGADALAG

SEQ ID NO: 59730 - protein, 16 aa, unidentified
  source 1..16: note = methanogen bacteria
LNTMGAGKTIGYATDY

SEQ ID NO: 59731 - protein, 12 aa, unidentified
  source 1..12: note = methanogen bacteria
AFVGSTDSVAVY

SEQ ID NO: 59732 - protein, 23 aa, unidentified
  source 1..23: note = methanogen bacteria
GDITSVFASNGSSVRIAPELTSF

SEQ ID NO: 59733 - protein, 12 aa, unidentified
  source 1..12: note = methanogen bacteria
PDIAIELNFSAE

SEQ ID NO: 59734 - protein, 11 aa, unidentified
  source 1..11: note = methanogen bacteria
LHLQYILDVEE

SEQ ID NO: 59735 - protein, 18 aa, unidentified
  source 1..18: note = methanogen bacteria
IGDHQLGPEYIDHLFIQS

SEQ ID NO: 59736 - protein, 10 aa, unidentified
  source 1..10: note = methanogen bacteria
AGLGADPLAA

SEQ ID NO: 59737 - protein, 16 aa, unidentified
  source 1..16: note = methanogen bacteria
MLIMMGASSVINYAMD

SEQ ID NO: 59738 - protein, 11 aa, unidentified
  source 1..11: note = methanogen bacteria
TIVSGPVSVAV

SEQ ID NO: 59739 - protein, 21 aa, unidentified
  source 1..21: note = methanogen bacteria
QIALAFSYSESSSQLAPLIAN

SEQ ID NO: 59740 - protein, 11 aa, unidentified
  source 1..11: note = methanogen bacteria
VSGLGADALAG

SEQ ID NO: 59741 - protein, 17 aa, unidentified
  source 1..17: note = methanogen bacteria
IMNAMGAGQTIGYATDY

SEQ ID NO: 59742 - protein, 12 aa, unidentified
  source 1..12: note = methanogen bacteria
TFVGSTDSVAVY

SEQ ID NO: 59743 - protein, 23 aa, unidentified
  source 1..23: note = methanogen bacteria
GDIASVFASGGSSSRIASELTSF

SEQ ID NO: 59744 - protein, 27 aa, unidentified
  source 1..27: note = methanogen bacteria
IPLYGLSPTAVDQFAQLRAVMAGSFGS

SEQ ID NO: 59745 - protein, 10 aa, unidentified
  source 1..10: note = methanogen bacteria
GSLVPIDQSY

SEQ ID NO: 59746 - protein, 34 aa, unidentified
  source 1..34: note = methanogen bacteria
GTFNFLPASAASTSASGILPAFIQSIFGGSPNFT

SEQ ID NO: 59747 - protein, 36 aa, unidentified
  source 1..36: note = methanogen bacteria
QKIGFPIFGEVSGGRAIRGLALWLTTPNSLSILFTN

SEQ ID NO: 59748 - protein, 10 aa, unidentified
  source 1..10: note = methanogen bacteria
AGLGPHPLAA

SEQ ID NO: 59749 - protein, 15 aa, unidentified
  source 1..15: note = methanogen bacteria
LLLMGAGEVINETMA

SEQ ID NO: 59750 - protein, 12 aa, unidentified
  source 1..12: note = methanogen bacteria
TILSGTIAVAAY

SEQ ID NO: 59751 - protein, 20 aa, unidentified
  source 1..20: note = methanogen bacteria
LSFIFSYSSDSSILAPKVVE

SEQ ID NO: 59752 - protein, 12 aa, unidentified
  source 1..12: note = methanogen bacteria
PDIAAELNFSAE

SEQ ID NO: 59753 - protein, 11 aa, unidentified
  source 1..11: note = methanogen bacteria
LHLQYVLNVEE

SEQ ID NO: 59754 - protein, 18 aa, unidentified
  source 1..18: note = methanogen bacteria
IGNQQLGPDHIDHLFVQS

SEQ ID NO: 59755 - protein, 11 aa, unidentified
  source 1..11: note = methanogen bacteria
VAGLGTEPLAA

SEQ ID NO: 59756 - protein, 15 aa, unidentified
  source 1..15: note = methanogen bacteria
LELMGAETVLNYAMD

SEQ ID NO: 59757 - protein, 11 aa, unidentified
  source 1..11: note = methanogen bacteria
TIVSGPIAVAV

SEQ ID NO: 59758 - protein, 21 aa, unidentified
  source 1..21: note = methanogen bacteria
QIAFIFSYSEGSAQLEPLISS

SEQ ID NO: 59759 - protein, 55 aa, unidentified
  source 1..55: note = methanogen bacteria
IGGISNAVDTYAPDHSGDGQFHQDIYDYFQNVGNINEIESQGSAVVTIVDEIFQD

SEQ ID NO: 59760 - protein, 11 aa, unidentified
  source 1..11: note = methanogen bacteria
VAGLGADALAG

SEQ ID NO: 59761 - protein, 18 aa, unidentified
  source 1..18: note = methanogen bacteria
PVLIIMGAAHTLPYAHEY

SEQ ID NO: 59762 - protein, 13 aa, unidentified
  source 1..13: note = methanogen bacteria
LAIVAGTDAVAVY

SEQ ID NO: 59763 - protein, 22 aa, unidentified
  source 1..22: note = methanogen bacteria
PQIVYVFSYSDNSAHLAAPMAA

SEQ ID NO: 59764 - protein, 10 aa, unidentified
  source 1..10: note = methanogen bacteria
AGLGPDPLAA

SEQ ID NO: 59765 - protein, 16 aa, unidentified
  source 1..16: note = methanogen bacteria
LMMMGASSVIDYAMEY

SEQ ID NO: 59766 - protein, 11 aa, unidentified
  source 1..11: note = methanogen bacteria
TIVSGPTSVAV

SEQ ID NO: 59767 - protein, 20 aa, unidentified
  source 1..20: note = methanogen bacteria
IALIFSYSQSSAKLAPLIAG

SEQ ID NO: 59768 - protein, 27 aa, unidentified
  source 1..27: note = methanogen bacteria
IPLYGLSPAAVDQFAQLRAVMAGSFGS

SEQ ID NO: 59769 - protein, 36 aa, unidentified
  source 1..36: note = methanogen bacteria
TGTFNFLPASAASTSASGILPAFIQSIIGGAPNFPI

SEQ ID NO: 59770 - protein, 37 aa, unidentified
  source 1..37: note = methanogen bacteria
FQKIGFPILGEVSGGRPISGLALWLTTPNSLSVLFTN

SEQ ID NO: 59771 - protein, 10 aa, unidentified
  source 1..10: note = methanogen bacteria
AGLGAEPLAA

SEQ ID NO: 59772 - protein, 16 aa, unidentified
  source 1..16: note = methanogen bacteria
LVLMGASSVLDYAMEY

SEQ ID NO: 59773 - protein, 11 aa, unidentified
  source 1..11: note = methanogen bacteria
TIVSGPTSVAV

SEQ ID NO: 59774 - protein, 21 aa, unidentified
  source 1..21: note = methanogen bacteria
QIALIFSYSENSARLAPLIAG

SEQ ID NO: 59775 - protein, 11 aa, unidentified
  source 1..11: note = methanogen bacteria
VSGLGADALAG

SEQ ID NO: 59776 - protein, 17 aa, unidentified
  source 1..17: note = methanogen bacteria
ILNAMGAGQTIGYATDY

SEQ ID NO: 59777 - protein, 12 aa, unidentified
  source 1..12: note = methanogen bacteria
AYVGSTDSVAVY

SEQ ID NO: 59778 - protein, 23 aa, unidentified
  source 1..23: note = methanogen bacteria
GDIASVFASTGSSVRIAPELTAF

SEQ ID NO: 59779 - protein, 12 aa, unidentified
  source 1..12: note = methanogen bacteria
ISGLGADALAGI

SEQ ID NO: 59780 - protein, 18 aa, unidentified
  source 1..18: note = methanogen bacteria
TILKTMGAGQTISYAMDY

SEQ ID NO: 59781 - protein, 12 aa, unidentified
  source 1..12: note = methanogen bacteria
TFVGSTDSVAVY

SEQ ID NO: 59782 - protein, 23 aa, unidentified
  source 1..23: note = methanogen bacteria
GDIASIFTSTGTSVRIAPELTSF

SEQ ID NO: 59783 - protein, 11 aa, unidentified
  source 1..11: note = methanogen bacteria
LEPAAVGYSFS

SEQ ID NO: 59784 - protein, 19 aa, unidentified
  source 1..19: note = methanogen bacteria
RIIVHGADSALGPGDFTDP

SEQ ID NO: 59785 - protein, 41 aa, unidentified
  source 1..41: note = methanogen bacteria
AGFTSNAHTLPDASLVSGITAPDLGLFAKVFTGFEMFPATL

SEQ ID NO: 59786 - protein, 10 aa, unidentified
  source 1..10: note = methanogen bacteria
AGLGPDPLAA

SEQ ID NO: 59787 - protein, 16 aa, unidentified
  source 1..16: note = methanogen bacteria
LMLMGASSVIGYATDY

SEQ ID NO: 59788 - protein, 10 aa, unidentified
  source 1..10: note = methanogen bacteria
TIVSGPVAVA

SEQ ID NO: 59789 - protein, 21 aa, unidentified
  source 1..21: note = methanogen bacteria
QIAVIFSYSESSAKLAPAIAG

SEQ ID NO: 59790 - protein, 11 aa, unidentified
  source 1..11: note = methanogen bacteria
VSGLGADALAG

SEQ ID NO: 59791 - protein, 18 aa, unidentified
  source 1..18: note = methanogen bacteria
PILNVMGAGQTINYATDY

SEQ ID NO: 59792 - protein, 12 aa, unidentified
  source 1..12: note = methanogen bacteria
VYVGSTDSVAVY

SEQ ID NO: 59793 - protein, 23 aa, unidentified
  source 1..23: note = methanogen bacteria
SDIASVFTSSGSSARISAELTSF

SEQ ID NO: 59794 - protein, 10 aa, unidentified
  source 1..10: note = methanogen bacteria
SGVGPNALAA

SEQ ID NO: 59795 - protein, 17 aa, unidentified
  source 1..17: note = methanogen bacteria
MFLMMGAEKVIEETMAY

SEQ ID NO: 59796 - protein, 11 aa, unidentified
  source 1..11: note = methanogen bacteria
SLLSGTVAVAA

SEQ ID NO: 59797 - protein, 20 aa, unidentified
  source 1..20: note = methanogen bacteria
LSWMFSFSQNSSILAPPIAD

SEQ ID NO: 59798 - protein, 12 aa, unidentified
  source 1..12: note = methanogen bacteria
VAGLGAEPLAAL

SEQ ID NO: 59799 - protein, 18 aa, unidentified
  source 1..18: note = methanogen bacteria
PMFNMMGASSVINYAMDY

SEQ ID NO: 59800 - protein, 11 aa, unidentified
  source 1..11: note = methanogen bacteria
TIVSGPVSVAV

SEQ ID NO: 59801 - protein, 21 aa, unidentified
  source 1..21: note = methanogen bacteria
QIAFIFSYSENSAQLEPLIAS

SEQ ID NO: 59802 - protein, 11 aa, unidentified
  source 1..11: note = methanogen bacteria
VSGLGADALAG

SEQ ID NO: 59803 - protein, 16 aa, unidentified
  source 1..16: note = methanogen bacteria
LNAMGAGETIGYATNY

SEQ ID NO: 59804 - protein, 12 aa, unidentified
  source 1..12: note = methanogen bacteria
AYLGSTDSVAVY

SEQ ID NO: 59805 - protein, 23 aa, unidentified
  source 1..23: note = methanogen bacteria
GDIALIFASSGSSVRIAGELTSF

SEQ ID NO: 59806 - protein, 12 aa, unidentified
  source 1..12: note = methanogen bacteria
PSIASEFHMSNI

SEQ ID NO: 59807 - protein, 12 aa, unidentified
  source 1..12: note = methanogen bacteria
YHLQYIKGFDSQ

SEQ ID NO: 59808 - protein, 18 aa, unidentified
  source 1..18: note = methanogen bacteria
VMGNVPISEEVYPLLISS

SEQ ID NO: 59809 - protein, 12 aa, unidentified
  source 1..12: note = methanogen bacteria
VAGINSDALAAL

SEQ ID NO: 59810 - protein, 18 aa, unidentified
  source 1..18: note = methanogen bacteria
DLIVLLGASGVITYCLSY

SEQ ID NO: 59811 - protein, 11 aa, unidentified
  source 1..11: note = methanogen bacteria
MITAGVNEVAS

SEQ ID NO: 59812 - protein, 22 aa, unidentified
  source 1..22: note = methanogen bacteria
HQICGMFNYSSGNLELVNRAAE

SEQ ID NO: 59813 - protein, 15 aa, unidentified
  source 1..15: note = methanogen bacteria
TYNMLTFIPNPTIVH

SEQ ID NO: 59814 - protein, 11 aa, unidentified
  source 1..11: note = methanogen bacteria
VAGLGAEPLAA

SEQ ID NO: 59815 - protein, 19 aa, unidentified
  source 1..19: note = methanogen bacteria
EPLLKIMGAVSVIDYAMDY

SEQ ID NO: 59816 - protein, 11 aa, unidentified
  source 1..11: note = methanogen bacteria
TIVSGPVAVAV

SEQ ID NO: 59817 - protein, 21 aa, unidentified
  source 1..21: note = methanogen bacteria
QIAFIFSYSENSAQLEPLIAS

SEQ ID NO: 59818 - protein, 11 aa, unidentified
  source 1..11: note = methanogen bacteria
VSALGADALAG

SEQ ID NO: 59819 - protein, 17 aa, unidentified
  source 1..17: note = methanogen bacteria
KILLIMGAGQTIDFAMD

SEQ ID NO: 59820 - protein, 12 aa, unidentified
  source 1..12: note = methanogen bacteria
TFISGTDSVAVY

SEQ ID NO: 59821 - protein, 22 aa, unidentified
  source 1..22: note = methanogen bacteria
QIASLFSYSANSARLSGQLTDF

SEQ ID NO: 59822 - protein, 11 aa, unidentified
  source 1..11: note = methanogen bacteria
VSGLGADALAG

SEQ ID NO: 59823 - protein, 17 aa, unidentified
  source 1..17: note = methanogen bacteria
ILNAMGAGKTIGYATDY

SEQ ID NO: 59824 - protein, 12 aa, unidentified
  source 1..12: note = methanogen bacteria
TFVGSTDSVAVY

SEQ ID NO: 59825 - protein, 23 aa, unidentified
  source 1..23: note = methanogen bacteria
GDIASVFASSGSSVRIAPELTSF

SEQ ID NO: 59826 - protein, 10 aa, unidentified
  source 1..10: note = methanogen bacteria
SGLGPDALAA

SEQ ID NO: 59827 - protein, 16 aa, unidentified
  source 1..16: note = methanogen bacteria
LLVMGAGEIIDLTMTY

SEQ ID NO: 59828 - protein, 12 aa, unidentified
  source 1..12: note = methanogen bacteria
TMLSGTVAVAAY

SEQ ID NO: 59829 - protein, 22 aa, unidentified
  source 1..22: note = methanogen bacteria
EPLSYIFSYSADAAVLSARVID

SEQ ID NO: 59830 - protein, 12 aa, unidentified
  source 1..12: note = methanogen bacteria
VAGINANALAAL

SEQ ID NO: 59831 - protein, 18 aa, unidentified
  source 1..18: note = methanogen bacteria
DLVILLGAGSVSTYCLSY

SEQ ID NO: 59832 - protein, 12 aa, unidentified
  source 1..12: note = methanogen bacteria
IVTAGVAEVAAF

SEQ ID NO: 59833 - protein, 22 aa, unidentified
  source 1..22: note = methanogen bacteria
YPLCDLFNFQAGNPALVNRSAE

SEQ ID NO: 59834 - protein, 11 aa, unidentified
  source 1..11: note = methanogen bacteria
VAGLGAEPLAA

SEQ ID NO: 59835 - protein, 18 aa, unidentified
  source 1..18: note = methanogen bacteria
PLLISMGAASVIDYAMEY

SEQ ID NO: 59836 - protein, 11 aa, unidentified
  source 1..11: note = methanogen bacteria
TIVSGPVAVAV

SEQ ID NO: 59837 - protein, 21 aa, unidentified
  source 1..21: note = methanogen bacteria
QIAFIFSYSENSADLAPRIAS

SEQ ID NO: 59838 - protein, 11 aa, unidentified
  source 1..11: note = methanogen bacteria
VSGLGADALAG

SEQ ID NO: 59839 - protein, 17 aa, unidentified
  source 1..17: note = methanogen bacteria
ILNAMGAGSTIGYATDY

SEQ ID NO: 59840 - protein, 12 aa, unidentified
  source 1..12: note = methanogen bacteria
AYVGSTDSVAVY

SEQ ID NO: 59841 - protein, 23 aa, unidentified
  source 1..23: note = methanogen bacteria
GDLASIFASSGSSVRIAHELTGF

SEQ ID NO: 59842 - protein, 16 aa, unidentified
  source 1..16: note = methanogen bacteria
PSEAIRFVDNKAFSCM

SEQ ID NO: 59843 - protein, 43 aa, unidentified
  source 1..43: note = methanogen bacteria
GRCAYYCPTRSIEVIIQDEGYCVGCKVCEDVCPTGALKDGEYD

SEQ ID NO: 59844 - protein, 26 aa, unidentified
  source 1..26: note = methanogen bacteria
DDFKIKRSIKDDTLYSNVEGSIVSCL

SEQ ID NO: 59845 - protein, 42 aa, unidentified
  source 1..42: note = methanogen bacteria
PVSSLTESEDNKLFGYCVSCGKCVNECKEDARNFQVISWDGE

SEQ ID NO: 59846 - protein, 21 aa, unidentified
  source 1..21: note = methanogen bacteria
ELCPEDAITLQRGAINVDLDK

SEQ ID NO: 59847 - protein, 17 aa, unidentified
  source 1..17: note = methanogen bacteria
IHCPKDAIPKTTSVKYE

SEQ ID NO: 59848 - protein, 11 aa, unidentified
  source 1..11: note = methanogen bacteria
VSGLGADALAG

SEQ ID NO: 59849 - protein, 16 aa, unidentified
  source 1..16: note = methanogen bacteria
LNAMGAGQTIGYAADY

SEQ ID NO: 59850 - protein, 12 aa, unidentified
  source 1..12: note = methanogen bacteria
TFVGSTDSVAVY

SEQ ID NO: 59851 - protein, 23 aa, unidentified
  source 1..23: note = methanogen bacteria
GDIASVFASGGSSVRLSQELSSF

SEQ ID NO: 59852 - protein, 12 aa, unidentified
  source 1..12: note = methanogen bacteria
VSGINADALADL

SEQ ID NO: 59853 - protein, 18 aa, unidentified
  source 1..18: note = methanogen bacteria
DLVILLGAGSVSTYCLSY

SEQ ID NO: 59854 - protein, 12 aa, unidentified
  source 1..12: note = methanogen bacteria
IVTAGVAEVAAF

SEQ ID NO: 59855 - protein, 22 aa, unidentified
  source 1..22: note = methanogen bacteria
YPLCDLFNIQAGSPALVSRSAE

SEQ ID NO: 59856 - protein, 13 aa, unidentified
  source 1..13: note = methanogen bacteria
PSMSSNLHLDFEM

SEQ ID NO: 59857 - protein, 11 aa, unidentified
  source 1..11: note = methanogen bacteria
YLQYVLGYDSR

SEQ ID NO: 59858 - protein, 17 aa, unidentified
  source 1..17: note = methanogen bacteria
FMGSANTYDGNVSAFLL

SEQ ID NO: 59859 - protein, 12 aa, unidentified
  source 1..12: note = methanogen bacteria
VSGLGADALAGV

SEQ ID NO: 59860 - protein, 18 aa, unidentified
  source 1..18: note = methanogen bacteria
PILEIMGAGQTIGYATDY

SEQ ID NO: 59861 - protein, 12 aa, unidentified
  source 1..12: note = methanogen bacteria
AFVGSTDSVAVY

SEQ ID NO: 59862 - protein, 23 aa, unidentified
  source 1..23: note = methanogen bacteria
ADIASIFASSGSSVRIAGELTAF

SEQ ID NO: 59863 - protein, 11 aa, unidentified
  source 1..11: note = methanogen bacteria
SGINADALAAL

SEQ ID NO: 59864 - protein, 19 aa, unidentified
  source 1..19: note = methanogen bacteria
EDIVVLLGASDVRSYCLSY

SEQ ID NO: 59865 - protein, 12 aa, unidentified
  source 1..12: note = methanogen bacteria
ILTAGVGEVAAF

SEQ ID NO: 59866 - protein, 22 aa, unidentified
  source 1..22: note = methanogen bacteria
YPLCEIFNFQAGNPALVHRSAE

SEQ ID NO: 59867 - protein, 13 aa, unidentified
  source 1..13: note = methanogen bacteria
IPSIAAEYGMSNI

SEQ ID NO: 59868 - protein, 12 aa, unidentified
  source 1..12: note = methanogen bacteria
YHLQYIKGFDSQ

SEQ ID NO: 59869 - protein, 18 aa, unidentified
  source 1..18: note = methanogen bacteria
VMGNVPMIEQYYPLLISS

SEQ ID NO: 59870 - protein, 11 aa, unidentified
  source 1..11: note = methanogen bacteria
VAGLGTISIAG

SEQ ID NO: 59871 - protein, 16 aa, unidentified
  source 1..16: note = methanogen bacteria
LNLFTASPEVYKEAID

SEQ ID NO: 59872 - protein, 12 aa, unidentified
  source 1..12: note = methanogen bacteria
NIVGGDLGVSIY

SEQ ID NO: 59873 - protein, 22 aa, unidentified
  source 1..22: note = methanogen bacteria
QISYVFLLTNDDPALLQGISTF

SEQ ID NO: 59874 - protein, 11 aa, unidentified
  source 1..11: note = methanogen bacteria
VAGLGADALAA

SEQ ID NO: 59875 - protein, 16 aa, unidentified
  source 1..16: note = methanogen bacteria
LIAMGAGSTLKYSLDY

SEQ ID NO: 59876 - protein, 12 aa, unidentified
  source 1..12: note = methanogen bacteria
VAVSGTTAVAVY

SEQ ID NO: 59877 - protein, 23 aa, unidentified
  source 1..23: note = methanogen bacteria
NQIASVFSYSASSAGMASDIATA

SEQ ID NO: 59878 - protein, 12 aa, unidentified
  source 1..12: note = methanogen bacteria
PTIANEFHMSNI

SEQ ID NO: 59879 - protein, 12 aa, unidentified
  source 1..12: note = methanogen bacteria
YHLQYIKGFDSQ

SEQ ID NO: 59880 - protein, 18 aa, unidentified
  source 1..18: note = methanogen bacteria
VMGNVPIVEQYYPLLINS

SEQ ID NO: 59881 - protein, 12 aa, unidentified
  source 1..12: note = methanogen bacteria
CSGLGGEALAAL

SEQ ID NO: 59882 - protein, 19 aa, unidentified
  source 1..19: note = methanogen bacteria
PVVDWMGSGGSVSGEAWEY

SEQ ID NO: 59883 - protein, 11 aa, unidentified
  source 1..11: note = methanogen bacteria
VKVGGPDGSAL

SEQ ID NO: 59884 - protein, 19 aa, unidentified
  source 1..19: note = methanogen bacteria
FAAVFASGDSAYLRADLAR

SEQ ID NO: 59885 - protein, 12 aa, unidentified
  source 1..12: note = methanogen bacteria
PTIASDFHLTAE

SEQ ID NO: 59886 - protein, 17 aa, unidentified
  source 1..17: note = methanogen bacteria
LGTSNTLEGNPLLFLAS

SEQ ID NO: 59887 - protein, 11 aa, unidentified
  source 1..11: note = methanogen bacteria
VAGLGTTAIAG

SEQ ID NO: 59888 - protein, 16 aa, unidentified
  source 1..16: note = methanogen bacteria
LNKFDTTPKVYGAAID

SEQ ID NO: 59889 - protein, 12 aa, unidentified
  source 1..12: note = methanogen bacteria
NILGGDLAISIY

SEQ ID NO: 59890 - protein, 22 aa, unidentified
  source 1..22: note = methanogen bacteria
QIAYVFLLANNDPALIQGISTF

SEQ ID NO: 59891 - protein, 10 aa, unidentified
  source 1..10: note = methanogen bacteria
VGLGQAAIAG

SEQ ID NO: 59892 - protein, 17 aa, unidentified
  source 1..17: note = methanogen bacteria
LILLGASGASLNEGLKY

SEQ ID NO: 59893 - protein, 10 aa, unidentified
  source 1..10: note = methanogen bacteria
IIGGDYGVAV

SEQ ID NO: 59894 - protein, 20 aa, unidentified
  source 1..20: note = methanogen bacteria
LASILAFTPETSHLIGGIAG

SEQ ID NO: 59895 - protein, 10 aa, unidentified
  source 1..10: note = methanogen bacteria
AGLGPESLAA

SEQ ID NO: 59896 - protein, 15 aa, unidentified
  source 1..15: note = methanogen bacteria
LLMMGAGEVIDYALS

SEQ ID NO: 59897 - protein, 12 aa, unidentified
  source 1..12: note = methanogen bacteria
TLLSGTVAVAAY

SEQ ID NO: 59898 - protein, 22 aa, unidentified
  source 1..22: note = methanogen bacteria
EPLSFIFSYSASSAVLSDRVVE

SEQ ID NO: 59899 - protein, 10 aa, unidentified
  source 1..10: note = methanogen bacteria
IDGLGTSAII

SEQ ID NO: 59900 - protein, 18 aa, unidentified
  source 1..18: note = methanogen bacteria
PICLMAGIPEYTNMIFAY

SEQ ID NO: 59901 - protein, 11 aa, unidentified
  source 1..11: note = methanogen bacteria
LHIYASPIAAF

SEQ ID NO: 59902 - protein, 18 aa, unidentified
  source 1..18: note = methanogen bacteria
NPIISIFSTEYVVMNEVR

SEQ ID NO: 59903 - protein, 12 aa, unidentified
  source 1..12: note = methanogen bacteria
PTIATEFHMSNI

SEQ ID NO: 59904 - protein, 12 aa, unidentified
  source 1..12: note = methanogen bacteria
YHLQYIDGFDSQ

SEQ ID NO: 59905 - protein, 18 aa, unidentified
  source 1..18: note = methanogen bacteria
VMGNVPIVEEYYPLLMSS

SEQ ID NO: 59906 - protein, 12 aa, unidentified
  source 1..12: note = methanogen bacteria
PSIAAEFHMSNI

SEQ ID NO: 59907 - protein, 12 aa, unidentified
  source 1..12: note = methanogen bacteria
YHLQYIKGFDSQ

SEQ ID NO: 59908 - protein, 18 aa, unidentified
  source 1..18: note = methanogen bacteria
VMGDVPIIEQYYPMLVQS

SEQ ID NO: 59909 - protein, 51 aa, unidentified
  source 1..51: note = methanogen bacteria
DWASETVTVSSSLLGNATSADSGTGLDVAGKKFFTEIDSNGNTVAVDDWHV

SEQ ID NO: 59910 - protein, 23 aa, unidentified
  source 1..23: note = methanogen bacteria
WDRFGTTEYSILGVKTAYDVSPE

SEQ ID NO: 59911 - protein, 11 aa, unidentified
  source 1..11: note = methanogen bacteria
VAGLGADALAA

SEQ ID NO: 59912 - protein, 16 aa, unidentified
  source 1..16: note = methanogen bacteria
LELMGAGSTIDYALNY

SEQ ID NO: 59913 - protein, 12 aa, unidentified
  source 1..12: note = methanogen bacteria
VTVAGTTAVAVY

SEQ ID NO: 59914 - protein, 21 aa, unidentified
  source 1..21: note = methanogen bacteria
QIAAMFSYTSASAELAPQIAT

SEQ ID NO: 59915 - protein, 12 aa, unidentified
  source 1..12: note = methanogen bacteria
VFFSGTEDLSNV

SEQ ID NO: 59916 - protein, 10 aa, unidentified
  source 1..10: note = methanogen bacteria
VWDGDQTLVT

SEQ ID NO: 59917 - protein, 17 aa, unidentified
  source 1..17: note = methanogen bacteria
TGLFFVIDSNALYVRSD

SEQ ID NO: 59918 - protein, 11 aa, unidentified
  source 1..11: note = methanogen bacteria
VAGLGSDALAA

SEQ ID NO: 59919 - protein, 18 aa, unidentified
  source 1..18: note = methanogen bacteria
QLLVMMGAGDTIQYALDY

SEQ ID NO: 59920 - protein, 12 aa, unidentified
  source 1..12: note = methanogen bacteria
VWASGTDAVAVY

SEQ ID NO: 59921 - protein, 22 aa, unidentified
  source 1..22: note = methanogen bacteria
QIATLFSYTSSSAALAPEIATA

SEQ ID NO: 59922 - protein, 11 aa, unidentified
  source 1..11: note = methanogen bacteria
VAGIGADALAA

SEQ ID NO: 59923 - protein, 16 aa, unidentified
  source 1..16: note = methanogen bacteria
LEMMGAGDSLKYALDY

SEQ ID NO: 59924 - protein, 12 aa, unidentified
  source 1..12: note = methanogen bacteria
VVVAGTTAVAVY

SEQ ID NO: 59925 - protein, 21 aa, unidentified
  source 1..21: note = methanogen bacteria
QIAAVFSYTSASSDLGPQIAT

SEQ ID NO: 59926 - protein, 10 aa, unidentified
  source 1..10: note = methanogen bacteria
AGLGPDALAA

SEQ ID NO: 59927 - protein, 16 aa, unidentified
  source 1..16: note = methanogen bacteria
LLTMGAGDIIDETMTY

SEQ ID NO: 59928 - protein, 12 aa, unidentified
  source 1..12: note = methanogen bacteria
TMLSGTIAVAAY

SEQ ID NO: 59929 - protein, 22 aa, unidentified
  source 1..22: note = methanogen bacteria
EPLSYIFSYSANAAILSARVVE

SEQ ID NO: 59930 - protein, 17 aa, unidentified
  source 1..17: note = methanogen bacteria
LKSYGATGQTLNEAIAY

SEQ ID NO: 59931 - protein, 11 aa, unidentified
  source 1..11: note = methanogen bacteria
SLVGGDYGIAT

SEQ ID NO: 59932 - protein, 22 aa, unidentified
  source 1..22: note = methanogen bacteria
PLATIFAYTPETANLVPGIAQY

SEQ ID NO: 59933 - protein, 30 aa, unidentified
  source 1..30: note = methanogen bacteria
NSFTFNWGSDPAAYFVHNVGGSDNLSNIWN

SEQ ID NO: 59934 - protein, 30 aa, unidentified
  source 1..30: note = methanogen bacteria
ISHKSINQGIGVASKILIPNPNWNALLDVN

SEQ ID NO: 59935 - protein, 35 aa, unidentified; identical to SEQ ID NO: 58238
  source 1..35: note = methanogen bacteria

SEQ ID NO: 59936 - protein, 26 aa, unidentified
  source 1..26: note = methanogen bacteria
PLYGLSAAAVDQFAALRAVMAGNFGS

SEQ ID NO: 59937 - protein, 32 aa, unidentified
  source 1..32: note = methanogen bacteria
GTFNFFPGQDGIMTGAIPGFIQTITMGSANFS

SEQ ID NO: 59938 - protein, 36 aa, unidentified
  source 1..36: note = methanogen bacteria
QKIGFPILGTVENGKAVSGIAWLLSTPNKISMFITE

SEQ ID NO: 59939 - protein, 11 aa, unidentified
  source 1..11: note = methanogen bacteria
VAGLGQEAIAG

SEQ ID NO: 59940 - protein, 19 aa, unidentified
  source 1..19: note = methanogen bacteria
MILSSYGASGQTLVEADAY

SEQ ID NO: 59941 - protein, 11 aa, unidentified
  source 1..11: note = methanogen bacteria
TQVGGDYAIAT

SEQ ID NO: 59942 - protein, 22 aa, unidentified
  source 1..22: note = methanogen bacteria
PLATMFAYTPETANLIPGIAEY

SEQ ID NO: 59943 - protein, 26 aa, unidentified
  source 1..26: note = methanogen bacteria
PLYGLSSAAVDQFAALRAVMAGSFGS

SEQ ID NO: 59944 - protein, 10 aa, unidentified
  source 1..10: note = methanogen bacteria
GNLVPIDNSY

SEQ ID NO: 59945 - protein, 32 aa, unidentified
  source 1..32: note = methanogen bacteria
GTFNFLPNSQGVLTGAIPGFIQSITMGSANFS

SEQ ID NO: 59946 - protein, 36 aa, unidentified
  source 1..36: note = methanogen bacteria
QKIGFPILGTVENGKAVSGVAWFLSTPNKISMFATE

SEQ ID NO: 59947 - protein, 19 aa, unidentified
  source 1..19: note = methanogen bacteria
PLLRSYGASGQTLNEAISY

SEQ ID NO: 59948 - protein, 11 aa, unidentified
  source 1..11: note = methanogen bacteria
AMIGGDYGIAT

SEQ ID NO: 59949 - protein, 22 aa, unidentified
  source 1..22: note = methanogen bacteria
PLATIFAYTPETANLVPGIAEY

SEQ ID NO: 59950 - protein, 11 aa, unidentified
  source 1..11: note = methanogen bacteria
SGINADALAAL

SEQ ID NO: 59951 - protein, 18 aa, unidentified
  source 1..18: note = methanogen bacteria
DLVVLLGASSVKSYCLSY

SEQ ID NO: 59952 - protein, 11 aa, unidentified
  source 1..11: note = methanogen bacteria
MKTAGVSEVAS

SEQ ID NO: 59953 - protein, 22 aa, unidentified
  source 1..22: note = methanogen bacteria
YPICGLFNFQTSNPALVERAAE

SEQ ID NO: 59954 - protein, 11 aa, unidentified
  source 1..11: note = methanogen bacteria
VAGLGQAAIAG

SEQ ID NO: 59955 - protein, 19 aa, unidentified
  source 1..19: note = methanogen bacteria
EPMLRAYGASGQSLAEGIK

SEQ ID NO: 59956 - protein, 12 aa, unidentified
  source 1..12: note = methanogen bacteria
STIGGEYGIAAF

SEQ ID NO: 59957 - protein, 22 aa, unidentified
  source 1..22: note = methanogen bacteria
QLSTLFAYTPETSILIPEITRF

SEQ ID NO: 59958 - protein, 80 aa, unidentified
  source 1..80: note = methanogen bacteria
VTHMGDTSAWPRIMASVESGNDIYGVMGNYYTPVWGYLLSFLDMLIQAVGAVPLFGDYFEGLLPLEGVRSYRPFVISPEM

SEQ ID NO: 59959 - protein, 28 aa, unidentified
  source 1..28: note = methanogen bacteria
MNGQIDDAFVFLTDRQETDFSSLYGVAT

SEQ ID NO: 59960 - protein, 28 aa, unidentified
  source 1..28: note = methanogen bacteria
CLSCAYYGLIDCDTFTSLSVSFAEDLPV

SEQ ID NO: 59961 - protein, 12 aa, unidentified
  source 1..12: note = methanogen bacteria
PSIATEFHMSNI

SEQ ID NO: 59962 - protein, 12 aa, unidentified
  source 1..12: note = methanogen bacteria
YHLQYIKGFDSQ

SEQ ID NO: 59963 - protein, 18 aa, unidentified
  source 1..18: note = methanogen bacteria
IMGDVPIIEQYYPLLIQS

SEQ ID NO: 59964 - protein, 25 aa, unidentified
  source 1..25: note = methanogen bacteria
TNGLTSGISGSSTDLSEYGLTMDPL

SEQ ID NO: 59965 - protein, 35 aa, unidentified
  source 1..35: note = methanogen bacteria
FSSWESLPLIGQIGLFAIPFSHPMMAMDNLMFGNI

SEQ ID NO: 59966 - protein, 10 aa, unidentified
  source 1..10: note = methanogen bacteria
VVANSADRST

SEQ ID NO: 59967 - protein, 10 aa, unidentified
  source 1..10: note = methanogen bacteria
AKEIFNSGYV

SEQ ID NO: 59968 - protein, 15 aa, unidentified
  source 1..15: note = methanogen bacteria
TNLMFGMDGLEISVG

SEQ ID NO: 59969 - protein, 10 aa, unidentified
  source 1..10: note = methanogen bacteria
VAGLGQTAIA

SEQ ID NO: 59970 - protein, 19 aa, unidentified
  source 1..19: note = methanogen bacteria
PLLKSYGATGQTLNEAVAY

SEQ ID NO: 59971 - protein, 12 aa, unidentified
  source 1..12: note = methanogen bacteria
SLVGGDYGIATF

SEQ ID NO: 59972 - protein, 22 aa, unidentified
  source 1..22: note = methanogen bacteria
PLATIFAYTPETANLVPGIAQY

SEQ ID NO: 59973 - protein, 10 aa, unidentified
  source 1..10: note = methanogen bacteria
AGLGPDALAA

SEQ ID NO: 59974 - protein, 18 aa, unidentified
  source 1..18: note = methanogen bacteria
PLLLTMGAGEIIDLTMTY

SEQ ID NO: 59975 - protein, 12 aa, unidentified
  source 1..12: note = methanogen bacteria
TTLSGTIAVAAY

SEQ ID NO: 59976 - protein, 22 aa, unidentified
  source 1..22: note = methanogen bacteria
EPLSYIFSYSTDSAVLSQRVVD

SEQ ID NO: 59977 - protein, 11 aa, unidentified
  source 1..11: note = methanogen bacteria
SGINSDALAAL

SEQ ID NO: 59978 - protein, 19 aa, unidentified
  source 1..19: note = methanogen bacteria
EDLIVLLGASSVRSYCLSY

SEQ ID NO: 59979 - protein, 11 aa, unidentified
  source 1..11: note = methanogen bacteria
IHTAGVSEVAS

SEQ ID NO: 59980 - protein, 21 aa, unidentified
  source 1..21: note = methanogen bacteria
PICDVFNFQAGNPELVERAAE

SEQ ID NO: 59981 - protein, 11 aa, unidentified
  source 1..11: note = methanogen bacteria
VSGLGADALAG

SEQ ID NO: 59982 - protein, 16 aa, unidentified
  source 1..16: note = methanogen bacteria
LNAMGAGQTIGYATDY

SEQ ID NO: 59983 - protein, 12 aa, unidentified
  source 1..12: note = methanogen bacteria
AYVGSTDSVAVY

SEQ ID NO: 59984 - protein, 22 aa, unidentified
  source 1..22: note = methanogen bacteria
GDIASVFASSGSSIRIAQELTS

SEQ ID NO: 59985 - protein, 10 aa, unidentified
  source 1..10: note = methanogen bacteria
VASLGEAAIS

SEQ ID NO: 59986 - protein, 19 aa, unidentified
  source 1..19: note = methanogen bacteria
LIGILFGQIEADVWANADV

SEQ ID NO: 59987 - protein, 10 aa, unidentified
  source 1..10: note = methanogen bacteria
STFGTMAIAA

SEQ ID NO: 59988 - protein, 17 aa, unidentified
  source 1..17: note = methanogen bacteria
LGIYNLSAQTAAMTTEM

SEQ ID NO: 59989 - protein, 12 aa, unidentified
  source 1..12: note = methanogen bacteria
VAGINADALAAL

SEQ ID NO: 59990 - protein, 18 aa, unidentified
  source 1..18: note = methanogen bacteria
DLIVFLGANSVKSYCLSY

SEQ ID NO: 59991 - protein, 11 aa, unidentified
  source 1..11: note = methanogen bacteria
MMTAGVSEVAS

SEQ ID NO: 59992 - protein, 22 aa, unidentified
  source 1..22: note = methanogen bacteria
YPICEIFNFQAGNLALVERSAE

SEQ ID NO: 59993 - protein, 10 aa, unidentified
  source 1..10: note = methanogen bacteria
VASLGEAAIS

SEQ ID NO: 59994 - protein, 18 aa, unidentified
  source 1..18: note = methanogen bacteria
IGLLFGQIEADVWNNADM

SEQ ID NO: 59995 - protein, 11 aa, unidentified
  source 1..11: note = methanogen bacteria
STFGTMAIAAN

SEQ ID NO: 59996 - protein, 17 aa, unidentified
  source 1..17: note = methanogen bacteria
LGIYNLSAHTTAMVTEM

SEQ ID NO: 59997 - protein, 11 aa, unidentified
  source 1..11: note = methanogen bacteria
SGINADALAAL

SEQ ID NO: 59998 - protein, 17 aa, unidentified
  source 1..17: note = methanogen bacteria
DLVVLLGASSVKLYCVS

SEQ ID NO: 59999 - protein, 12 aa, unidentified
  source 1..12: note = methanogen bacteria
MTTAGVGEVASF

SEQ ID NO: 60000 - protein, 22 aa, unidentified
  source 1..22: note = methanogen bacteria
YPICGLFNFQTANPALVERAAE

SEQ ID NO: 60001 - protein, 11 aa, unidentified
  source 1..11: note = methanogen bacteria
VAGLGSNALAA

SEQ ID NO: 60002 - protein, 16 aa, unidentified
  source 1..16: note = methanogen bacteria
LLIMGAGEVITETMTY

SEQ ID NO: 60003 - protein, 12 aa, unidentified
  source 1..12: note = methanogen bacteria
TLLSGTVAVAAY

SEQ ID NO: 60004 - protein, 22 aa, unidentified
  source 1..22: note = methanogen bacteria
EPLSFIFSYSNDAAVLSQRVVD

SEQ ID NO: 60005 - protein, 19 aa, unidentified
  source 1..19: note = methanogen bacteria
PLLRSYGATGQTLNEGIAY

SEQ ID NO: 60006 - protein, 10 aa, unidentified
  source 1..10: note = methanogen bacteria
LVGGDYGIAV

SEQ ID NO: 60007 - protein, 21 aa, unidentified
  source 1..21: note = methanogen bacteria
PLSTIFAYTPETANLVPGIAQ

SEQ ID NO: 60008 - protein, 11 aa, unidentified
  source 1..11: note = methanogen bacteria
VSGLGADALAG

SEQ ID NO: 60009 - protein, 18 aa, unidentified
  source 1..18: note = methanogen bacteria
PILRIMGAGQTISYAIDY

SEQ ID NO: 60010 - protein, 12 aa, unidentified
  source 1..12: note = methanogen bacteria
VYVGSTDSVAVY

SEQ ID NO: 60011 - protein, 23 aa, unidentified
  source 1..23: note = methanogen bacteria
SDIASVFATSGSSARISAELTSF

SEQ ID NO: 60012 - protein, 11 aa, unidentified
  source 1..11: note = methanogen bacteria
VAGLGQAAIAG

SEQ ID NO: 60013 - protein, 16 aa, unidentified
  source 1..16: note = methanogen bacteria
LKAYGASGQSLVEGIR

SEQ ID NO: 60014 - protein, 12 aa, unidentified
  source 1..12: note = methanogen bacteria
SSVGGEYGIAAF

SEQ ID NO: 60015 - protein, 21 aa, unidentified
  source 1..21: note = methanogen bacteria
LAMIFAYTPETAPLIPEITNF

SEQ ID NO: 60016 - protein, 11 aa, unidentified
  source 1..11: note = methanogen bacteria
VAGLGQAAIAG

SEQ ID NO: 60017 - protein, 20 aa, unidentified
  source 1..20: note = methanogen bacteria
EPLLRAYGASGQNLAEGIKY

SEQ ID NO: 60018 - protein, 12 aa, unidentified
  source 1..12: note = methanogen bacteria
STIGGEYGIASF

SEQ ID NO: 60019 - protein, 21 aa, unidentified
  source 1..21: note = methanogen bacteria
LATLFAYTKETSVLVPEITRF

SEQ ID NO: 60020 - protein, 11 aa, unidentified
  source 1..11: note = methanogen bacteria
VAGLGQAAIAG

SEQ ID NO: 60021 - protein, 20 aa, unidentified
  source 1..20: note = methanogen bacteria
EPLLRTYGASGQNLAEGLKY

SEQ ID NO: 60022 - protein, 12 aa, unidentified
  source 1..12: note = methanogen bacteria
STIGGEYGIASF

SEQ ID NO: 60023 - protein, 22 aa, unidentified
  source 1..22: note = methanogen bacteria
QLATLFAYTEETAVLVPEITRF

SEQ ID NO: 60024 - protein, 11 aa, unidentified
  source 1..11: note = methanogen bacteria
VAGLGQAAIAG

SEQ ID NO: 60025 - protein, 19 aa, unidentified
  source 1..19: note = methanogen bacteria
PLLKGYGASGQSLVEGIKY

SEQ ID NO: 60026 - protein, 12 aa, unidentified
  source 1..12: note = methanogen bacteria
SSIGGEYGIAAF

SEQ ID NO: 60027 - protein, 21 aa, unidentified
  source 1..21: note = methanogen bacteria
LAMIFAYTPDTAALVPEITSF

SEQ ID NO: 60028 - protein, 17 aa, unidentified
  source 1..17: note = methanogen bacteria
LKSYGATGQTLKEGIAY

SEQ ID NO: 60029 - protein, 10 aa, unidentified
  source 1..10: note = methanogen bacteria
LVGGDYGIAV

SEQ ID NO: 60030 - protein, 22 aa, unidentified
  source 1..22: note = methanogen bacteria
PLATIFAYTPETANLVPGIAQY

SEQ ID NO: 60031 - protein, 11 aa, unidentified
  source 1..11: note = methanogen bacteria
VAGLGQAAIAG

SEQ ID NO: 60032 - protein, 19 aa, unidentified
  source 1..19: note = methanogen bacteria
PLLISYGASGQSLAEGLKY

SEQ ID NO: 60033 - protein, 12 aa, unidentified
  source 1..12: note = methanogen bacteria
SSIGGEYGIAAF

SEQ ID NO: 60034 - protein, 21 aa, unidentified
  source 1..21: note = methanogen bacteria
PLATLFAYTPETSSLVPEIAL

SEQ ID NO: 60035 - protein, 27 aa, unidentified
  source 1..27: note = methanogen bacteria
IPLFGLSPGGIDQFAQLRAVMAGSFGS

SEQ ID NO: 60036 - protein, 33 aa, unidentified
  source 1..33: note = methanogen bacteria
VGSFNFLPNSYGALPGAIPGFIQSIIAGSADFS

SEQ ID NO: 60037 - protein, 36 aa, unidentified
  source 1..36: note = methanogen bacteria
QKIGFPIFGEVVNGKSVSGVAFYLSTPNSVGMFVTE

SEQ ID NO: 60038 - protein, 12 aa, unidentified
  source 1..12: note = methanogen bacteria
PTIAAEFHMSNI

SEQ ID NO: 60039 - protein, 11 aa, unidentified
  source 1..11: note = methanogen bacteria
FHLQYIKGFDS

SEQ ID NO: 60040 - protein, 18 aa, unidentified
  source 1..18: note = methanogen bacteria
VMGDVPIVKEYYPLLITS

SEQ ID NO: 60041 - protein, 11 aa, unidentified
  source 1..11: note = methanogen bacteria
SGLNADALAAL

SEQ ID NO: 60042 - protein, 19 aa, unidentified
  source 1..19: note = methanogen bacteria
EDIVILLGASSVKTYCLSY

SEQ ID NO: 60043 - protein, 12 aa, unidentified
  source 1..12: note = methanogen bacteria
MVTAGVGEVASF

SEQ ID NO: 60044 - protein, 22 aa, unidentified
  source 1..22: note = methanogen bacteria
QPICGAFNFQANDPVLVNRSAE

SEQ ID NO: 60045 - protein, 19 aa, unidentified
  source 1..19: note = methanogen bacteria
PLLKSYGAAGQTLNEAVAY

SEQ ID NO: 60046 - protein, 11 aa, unidentified
  source 1..11: note = methanogen bacteria
SQVGGDYGIAT

SEQ ID NO: 60047 - protein, 22 aa, unidentified
  source 1..22: note = methanogen bacteria
PLATIFAYTPETAGLVPGIAEY

SEQ ID NO: 60048 - protein, 11 aa, unidentified
  source 1..11: note = methanogen bacteria
IGSIGTSAIVC

SEQ ID NO: 60049 - protein, 17 aa, unidentified
  source 1..17: note = methanogen bacteria
GICFAVNLDGYADLIFA

SEQ ID NO: 60050 - protein, 10 aa, unidentified
  source 1..10: note = methanogen bacteria
HVYATPVAAF

SEQ ID NO: 60051 - protein, 19 aa, unidentified
  source 1..19: note = methanogen bacteria
IEILSFFSSDQIIYEEVRN

SEQ ID NO: 60052 - protein, 10 aa, unidentified
  source 1..10: note = methanogen bacteria
VASLGEAAIS

SEQ ID NO: 60053 - protein, 19 aa, unidentified
  source 1..19: note = methanogen bacteria
LIGILFGQIEADVWANADV

SEQ ID NO: 60054 - protein, 10 aa, unidentified
  source 1..10: note = methanogen bacteria
STFGTMAIAA

SEQ ID NO: 60055 - protein, 17 aa, unidentified
  source 1..17: note = methanogen bacteria
LGIYNLSPQTEAMAAEM

SEQ ID NO: 60056 - protein, 27 aa, unidentified
  source 1..27: note = methanogen bacteria
IPLYGLSPAAVDNFAALRAVMAGSFGS

SEQ ID NO: 60057 - protein, 10 aa, unidentified
  source 1..10: note = methanogen bacteria
GNLVPIDNSY

SEQ ID NO: 60058 - protein, 32 aa, unidentified
  source 1..32: note = methanogen bacteria
GTFNFLPGTDGIMTGAIPGFIQSIAAGAANFT

SEQ ID NO: 60059 - protein, 36 aa, unidentified
  source 1..36: note = methanogen bacteria
QKIGFPILGQIENGKAVNGAAWLLSTPNNIGMFATE

SEQ ID NO: 60060 - protein, 12 aa, unidentified
  source 1..12: note = methanogen bacteria
VAGINSNALAAL

SEQ ID NO: 60061 - protein, 18 aa, unidentified
  source 1..18: note = methanogen bacteria
DLVILLGAGGVRTYCLSY

SEQ ID NO: 60062 - protein, 12 aa, unidentified
  source 1..12: note = methanogen bacteria
IVTAGVEEVAAF

SEQ ID NO: 60063 - protein, 22 aa, unidentified
  source 1..22: note = methanogen bacteria
YPLCGLFNFQAGNSALVIRSSE

SEQ ID NO: 60064 - protein, 10 aa, unidentified
  source 1..10: note = methanogen bacteria
SGLGPDALAA

SEQ ID NO: 60065 - protein, 15 aa, unidentified
  source 1..15: note = methanogen bacteria
LLLMGAGEIIDLTMT

SEQ ID NO: 60066 - protein, 12 aa, unidentified
  source 1..12: note = methanogen bacteria
TMLSGTIAVAAY

SEQ ID NO: 60067 - protein, 21 aa, unidentified
  source 1..21: note = methanogen bacteria
PLSYIFSYSADAAVLSARVVD

SEQ ID NO: 60068 - protein, 11 aa, unidentified
  source 1..11: note = methanogen bacteria
VAGLGQSAIAG

SEQ ID NO: 60069 - protein, 17 aa, unidentified
  source 1..17: note = methanogen bacteria
LVSYGASGQSLTEAIKY

SEQ ID NO: 60070 - protein, 12 aa, unidentified
  source 1..12: note = methanogen bacteria
SSIGGEYGIAAF

SEQ ID NO: 60071 - protein, 21 aa, unidentified
  source 1..21: note = methanogen bacteria
LSLIFAYTPETVGLVPEITRF

SEQ ID NO: 60072 - protein, 27 aa, unidentified
  source 1..27: note = methanogen bacteria
IPLYGLSEAAVDNFAALRAVMAGSFGS

SEQ ID NO: 60073 - protein, 32 aa, unidentified
  source 1..32: note = methanogen bacteria
GTFNFLPGPDGLLTGAIPGFIQSIYMGAADFS

SEQ ID NO: 60074 - protein, 37 aa, unidentified
  source 1..37: note = methanogen bacteria
QKIGFPILGKIENGKAVSGIAWLLSTPNNVGMFTTEP

SEQ ID NO: 60075 - protein, 11 aa, unidentified
  source 1..11: note = methanogen bacteria
VAGLGQAAIAG

SEQ ID NO: 60076 - protein, 19 aa, unidentified
  source 1..19: note = methanogen bacteria
PLLVAYGASGQSLEEAMKY

SEQ ID NO: 60077 - protein, 12 aa, unidentified
  source 1..12: note = methanogen bacteria
SSISGEYGIAAF

SEQ ID NO: 60078 - protein, 21 aa, unidentified
  source 1..21: note = methanogen bacteria
LATLFAYTPETAALIPEITRF

SEQ ID NO: 60079 - protein, 27 aa, unidentified
  source 1..27: note = methanogen bacteria
IPLYGLSPAAVDQFAQLRAVMAGSFGS

SEQ ID NO: 60080 - protein, 35 aa, unidentified
  source 1..35: note = methanogen bacteria
TGTFNFLPATAASTTASGILPGFIQSIIGGSPNFA

SEQ ID NO: 60081 - protein, 37 aa, unidentified
  source 1..37: note = methanogen bacteria
FQKLGFPILGQVSGGRPISGLALWLTTPNSLSVLFTN

SEQ ID NO: 60082 - protein, 15 aa, unidentified
  source 1..15: note = methanogen bacteria
VKKLNITGTVSIVLM

SEQ ID NO: 60083 - protein, 10 aa, unidentified
  source 1..10: note = methanogen bacteria
SGQVFESLSF

SEQ ID NO: 60084 - protein, 40 aa, unidentified
  source 1..40: note = methanogen bacteria
TSLPLHPYALAMASGIGSASMNAAAIAPLLNIFPSMSHEI

SEQ ID NO: 60085 - protein, 16 aa, unidentified
  source 1..16: note = methanogen bacteria
FLPTAGYILPFVNAVD

SEQ ID NO: 60086 - protein, 27 aa, unidentified
  source 1..27: note = methanogen bacteria
IPLYGVSPGSYDSFAALRAVMAGSFGS

SEQ ID NO: 60087 - protein, 10 aa, unidentified
  source 1..10: note = methanogen bacteria
GNIVPIDGSY

SEQ ID NO: 60088 - protein, 33 aa, unidentified
  source 1..33: note = methanogen bacteria
VGTFSILPGQDGLLAGIIPKFIQQATVGMPDFY

SEQ ID NO: 60089 - protein, 35 aa, unidentified
  source 1..35: note = methanogen bacteria
QKIGFPILGHLDKGKAVDGIAWLLSTPKLHMFISE

SEQ ID NO: 60090 - protein, 12 aa, unidentified
  source 1..12: note = methanogen bacteria
PSIATEFHMSNI

SEQ ID NO: 60091 - protein, 12 aa, unidentified
  source 1..12: note = methanogen bacteria
YHLQYIKGFDSQ

SEQ ID NO: 60092 - protein, 18 aa, unidentified
  source 1..18: note = methanogen bacteria
VMGDVPIIQQYYPLLIQS

SEQ ID NO: 60093 - protein, 12 aa, unidentified
  source 1..12: note = methanogen bacteria
PDIAADLNFSAE

SEQ ID NO: 60094 - protein, 11 aa, unidentified
  source 1..11: note = methanogen bacteria
LHLQYILDVEE

SEQ ID NO: 60095 - protein, 18 aa, unidentified
  source 1..18: note = methanogen bacteria
IGGQQLGLDHIGHLFIQS

SEQ ID NO: 60096 - protein, 26 aa, unidentified
  source 1..26: note = methanogen bacteria
PLYGVAPGAIDNFAQVRAVMAGSFGS

SEQ ID NO: 60097 - protein, 32 aa, unidentified
  source 1..32: note = methanogen bacteria
GTFSILNGTDGLFAGIIPKFIQQATTGVYDFI

SEQ ID NO: 60098 - protein, 35 aa, unidentified
  source 1..35: note = methanogen bacteria
QKIGIPIFGHIDAGKPVDGIAWLLSTPKWYMFVTE

SEQ ID NO: 60099 - protein, 28 aa, unidentified
  source 1..28: note = methanogen bacteria
IPLYGLSSGAVDQFAQLRAVMAGSFGSI

SEQ ID NO: 60100 - protein, 32 aa, unidentified
  source 1..32: note = methanogen bacteria
GTFNFIPGASGALPGIIPGFIQGLVTGSPDFS

SEQ ID NO: 60101 - protein, 39 aa, unidentified
  source 1..39: note = methanogen bacteria
SMFQKLGWPILGKVEGGRAVSGAALYLSTPNQLSLIYTN

SEQ ID NO: 60102 - protein, 11 aa, unidentified
  source 1..11: note = methanogen bacteria
VAGLGQAAIAG

SEQ ID NO: 60103 - protein, 16 aa, unidentified
  source 1..16: note = methanogen bacteria
LKAYGASGQSLVEGLK

SEQ ID NO: 60104 - protein, 12 aa, unidentified
  source 1..12: note = methanogen bacteria
SSVGGEYGIAAF

SEQ ID NO: 60105 - protein, 21 aa, unidentified
  source 1..21: note = methanogen bacteria
LSMMFAYTPETAPLIPEITNF

SEQ ID NO: 60106 - protein, 27 aa, unidentified
  source 1..27: note = methanogen bacteria
IPLYGLAPGAIDSFAQLRAVMAGSFGS

SEQ ID NO: 60107 - protein, 10 aa, unidentified
  source 1..10: note = methanogen bacteria
GNLVPIDGSY

SEQ ID NO: 60108 - protein, 33 aa, unidentified
  source 1..33: note = methanogen bacteria
VGTFSVLPGTDGFLAGIIPKLIQQITVGSVNWY

SEQ ID NO: 60109 - protein, 38 aa, unidentified
  source 1..38: note = methanogen bacteria
NVFQKVGVPILGHIQNGKPVDGIAWLLSTPNLTMFITE

SEQ ID NO: 60110 - protein, 11 aa, unidentified
  source 1..11: note = methanogen bacteria
SGLGPEVLAAI

SEQ ID NO: 60111 - protein, 15 aa, unidentified
  source 1..15: note = methanogen bacteria
LMFFGAGEVIDYAIS

SEQ ID NO: 60112 - protein, 10 aa, unidentified
  source 1..10: note = methanogen bacteria
SSIGGIIAVG

SEQ ID NO: 60113 - protein, 19 aa, unidentified
  source 1..19: note = methanogen bacteria
AELFAYGESSQNINEYITH

SEQ ID NO: 60114 - protein, 11 aa, unidentified
  source 1..11: note = methanogen bacteria
IAGLGQAAIAG

SEQ ID NO: 60115 - protein, 18 aa, unidentified
  source 1..18: note = methanogen bacteria
PLLKAYGASGQSLVEGIK

SEQ ID NO: 60116 - protein, 12 aa, unidentified
  source 1..12: note = methanogen bacteria
SMVGGEYGIAAF

SEQ ID NO: 60117 - protein, 21 aa, unidentified
  source 1..21: note = methanogen bacteria
LSLIFAYTPETAALIPEITSF

SEQ ID NO: 60118 - protein, 27 aa, unidentified
  source 1..27: note = methanogen bacteria
IPLYGVSAASIDQFAQLRAVMAGSFGS

SEQ ID NO: 60119 - protein, 10 aa, unidentified
  source 1..10: note = methanogen bacteria
GNVIPIDGSY

SEQ ID NO: 60120 - protein, 32 aa, unidentified
  source 1..32: note = methanogen bacteria
GTFSILSGTDGLFAGIIPKFIQLATTGVYDFS

SEQ ID NO: 60121 - protein, 35 aa, unidentified
  source 1..35: note = methanogen bacteria
QKIGVPILGHIDKGKPVDGIAWLLSTPKLEMFITE

SEQ ID NO: 60122 - protein, 10 aa, unidentified
  source 1..10: note = methanogen bacteria
GGIGANALAA

SEQ ID NO: 60123 - protein, 15 aa, unidentified
  source 1..15: note = methanogen bacteria
LLKMGAGEVINDAAT

SEQ ID NO: 60124 - protein, 12 aa, unidentified
  source 1..12: note = methanogen bacteria
TLLSGTIAVASY

SEQ ID NO: 60125 - protein, 22 aa, unidentified
  source 1..22: note = methanogen bacteria
EPLSHIFAYSANSAILSQRITE

SEQ ID NO: 60126 - protein, 11 aa, unidentified
  source 1..11: note = methanogen bacteria
VAGLGADALAA

SEQ ID NO: 60127 - protein, 15 aa, unidentified
  source 1..15: note = methanogen bacteria
LYTMGAGEVINDAFT

SEQ ID NO: 60128 - protein, 11 aa, unidentified
  source 1..11: note = methanogen bacteria
TILSGPIAVAS

SEQ ID NO: 60129 - protein, 22 aa, unidentified
  source 1..22: note = methanogen bacteria
EPLSHIFAYSSNNPYLVQRIAE

SEQ ID NO: 60130 - protein, 10 aa, unidentified
  source 1..10: note = methanogen bacteria
SQLSMFDALA

SEQ ID NO: 60131 - protein, 18 aa, unidentified
  source 1..18: note = methanogen bacteria
DLLNLMNIVNNQIYILDY

SEQ ID NO: 60132 - protein, 17 aa, unidentified
  source 1..17: note = methanogen bacteria
EEVYASFLIFNMDTSIF

SEQ ID NO: 60133 - protein, 11 aa, unidentified
  source 1..11: note = methanogen bacteria
CSSLGETALAA

SEQ ID NO: 60134 - protein, 18 aa, unidentified
  source 1..18: note = methanogen bacteria
PILQLVGGDDTYAEGSDY

SEQ ID NO: 60135 - protein, 21 aa, unidentified
  source 1..21: note = methanogen bacteria
WAVILFTYDDSTIGMRGDMIH

SEQ ID NO: 60136 - protein, 11 aa, unidentified
  source 1..11: note = methanogen bacteria
VVGLGQAAIAG

SEQ ID NO: 60137 - protein, 19 aa, unidentified
  source 1..19: note = methanogen bacteria
PLIKTYGASGQSLAEGLKY

SEQ ID NO: 60138 - protein, 12 aa, unidentified
  source 1..12: note = methanogen bacteria
SSIAGEYGIAAF

SEQ ID NO: 60139 - protein, 21 aa, unidentified
  source 1..21: note = methanogen bacteria
LSLIFAYTPETANLVPEITNF

SEQ ID NO: 60140 - protein, 10 aa, unidentified
  source 1..10: note = methanogen bacteria
CSSLGVDAMS

SEQ ID NO: 60141 - protein, 19 aa, unidentified
  source 1..19: note = methanogen bacteria
DSLIIAMGAEDVLEECRDY

SEQ ID NO: 60142 - protein, 11 aa, unidentified
  source 1..11: note = methanogen bacteria
LRCGGTEGLAV

SEQ ID NO: 60143 - protein, 19 aa, unidentified
  source 1..19: note = methanogen bacteria
LRVYTHSSSISEYHDEMVH

SEQ ID NO: 60144 - protein, 12 aa, unidentified
  source 1..12: note = methanogen bacteria
VSGLGSVASSAV

SEQ ID NO: 60145 - protein, 19 aa, unidentified
  source 1..19: note = methanogen bacteria
EPAIVLMGAEDVLTESIEY

SEQ ID NO: 60146 - protein, 22 aa, unidentified
  source 1..22: note = methanogen bacteria
EPLITILTLEDSMVPLREDLVW

SEQ ID NO: 60147 - protein, 12 aa, unidentified
  source 1..12: note = methanogen bacteria
CAGLGTAAMSAV

SEQ ID NO: 60148 - protein, 19 aa, unidentified
  source 1..19: note = methanogen bacteria
GPVLDFVNNGGDTSLCEAY

SEQ ID NO: 60149 - protein, 12 aa, unidentified
  source 1..12: note = methanogen bacteria
VMRTGGEEGMVL

SEQ ID NO: 60150 - protein, 22 aa, unidentified
  source 1..22: note = methanogen bacteria
DPLTWVFTYSGDMADLHDKLAE

SEQ ID NO: 60151 - protein, 12 aa, unidentified
  source 1..12: note = methanogen bacteria
PSIATEFGMSNI

SEQ ID NO: 60152 - protein, 12 aa, unidentified
  source 1..12: note = methanogen bacteria
YHLQYIKGFDSQ

SEQ ID NO: 60153 - protein, 18 aa, unidentified
  source 1..18: note = methanogen bacteria
VMGDVPIIEQYYPLLISS

SEQ ID NO: 60154 - protein, 12 aa, unidentified
  source 1..12: note = methanogen bacteria
VSGLGADALAGV

SEQ ID NO: 60155 - protein, 18 aa, unidentified
  source 1..18: note = methanogen bacteria
PILNAMGAGQTIGYATDY

SEQ ID NO: 60156 - protein, 12 aa, unidentified
  source 1..12: note = methanogen bacteria
AYLGSTDSVAVY

SEQ ID NO: 60157 - protein, 23 aa, unidentified
  source 1..23: note = methanogen bacteria
GDVASVFASSGSSVRIASELTSF

SEQ ID NO: 60158 - protein, 11 aa, unidentified
  source 1..11: note = methanogen bacteria
VAGLGQAAIAG

SEQ ID NO: 60159 - protein, 19 aa, unidentified
  source 1..19: note = methanogen bacteria
PLLETYGANDQSLVEAINY

SEQ ID NO: 60160 - protein, 12 aa, unidentified
  source 1..12: note = methanogen bacteria
SSIGGEYGIAAF

SEQ ID NO: 60161 - protein, 21 aa, unidentified
  source 1..21: note = methanogen bacteria
LSMIFAYTPETAPLIPEITNF

SEQ ID NO: 60162 - protein, 11 aa, unidentified
  source 1..11: note = methanogen bacteria
VAGLGQAAIAG

SEQ ID NO: 60163 - protein, 16 aa, unidentified
  source 1..16: note = methanogen bacteria
LKAYGASGQSLVEGIK

SEQ ID NO: 60164 - protein, 13 aa, unidentified
  source 1..13: note = methanogen bacteria
IASVGGEYGIAAF

SEQ ID NO: 60165 - protein, 19 aa, unidentified
  source 1..19: note = methanogen bacteria
SLIFAYTPETAPLIPEITN

SEQ ID NO: 60166 - protein, 27 aa, unidentified
  source 1..27: note = methanogen bacteria
IPLYGLAPGAIDSFAQLRAVMAGSFGS

SEQ ID NO: 60167 - protein, 10 aa, unidentified
  source 1..10: note = methanogen bacteria
GNLVPIDGSY

SEQ ID NO: 60168 - protein, 33 aa, unidentified
  source 1..33: note = methanogen bacteria
VGTFSILPGTDGLLAGIIPKFIQQATMGMPDFS

SEQ ID NO: 60169 - protein, 36 aa, unidentified
  source 1..36: note = methanogen bacteria
FQKIGVPILGHIDKGKPVDGIAWLLSTPSLQNFITE

SEQ ID NO: 60170 - protein, 13 aa, unidentified
  source 1..13: note = methanogen bacteria
IPTIAAEYHMSNI

SEQ ID NO: 60171 - protein, 12 aa, unidentified
  source 1..12: note = methanogen bacteria
YHLQYIKGFDSQ

SEQ ID NO: 60172 - protein, 18 aa, unidentified
  source 1..18: note = methanogen bacteria
IMGDVPIIEQYYPLLIQS

SEQ ID NO: 60173 - protein, 12 aa, unidentified
  source 1..12: note = methanogen bacteria
VAGINADALAAL

SEQ ID NO: 60174 - protein, 18 aa, unidentified
  source 1..18: note = methanogen bacteria
DLVVLLGAGSVKTYCLSY

SEQ ID NO: 60175 - protein, 12 aa, unidentified
  source 1..12: note = methanogen bacteria
MTTAGVSEVASF

SEQ ID NO: 60176 - protein, 22 aa, unidentified
  source 1..22: note = methanogen bacteria
YPICDVFNFQAGNPALVNRSAE

SEQ ID NO: 60177 - protein, 27 aa, unidentified
  source 1..27: note = methanogen bacteria
IPLYGLAPGAIDSFAQLRAVMAGSFGS

SEQ ID NO: 60178 - protein, 10 aa, unidentified
  source 1..10: note = methanogen bacteria
GNLVPIDGSY

SEQ ID NO: 60179 - protein, 33 aa, unidentified
  source 1..33: note = methanogen bacteria
VGTFSILPGTDGFLAGIIPKFIQQIMAGTPNLA

SEQ ID NO: 60180 - protein, 36 aa, unidentified
  source 1..36: note = methanogen bacteria
FQKIGVPILGHMQQGKPVDGIAWLLSTPSLQHFITE

SEQ ID NO: 60181 - protein, 11 aa, unidentified
  source 1..11: note = methanogen bacteria
VSGLGADALAG

SEQ ID NO: 60182 - protein, 17 aa, unidentified
  source 1..17: note = methanogen bacteria
PILNIMGAAQTIEYATD

SEQ ID NO: 60183 - protein, 12 aa, unidentified
  source 1..12: note = methanogen bacteria
AYVGSTDSVAVY

SEQ ID NO: 60184 - protein, 23 aa, unidentified
  source 1..23: note = methanogen bacteria
GDIASIFTSTGSSMRIASELTGF

SEQ ID NO: 60185 - protein, 27 aa, unidentified
  source 1..27: note = methanogen bacteria
IPLYGIDPRAIDSFAALRAVMAGSFGS

SEQ ID NO: 60186 - protein, 31 aa, unidentified
  source 1..31: note = methanogen bacteria
TFSFLRGSNGDFGGILPRFIEQCVAGRPDFA

SEQ ID NO: 60187 - protein, 36 aa, unidentified
  source 1..36: note = methanogen bacteria
FQKIGFPILGHTVNGKAVDGVAWLLTTPNLSMFITE

SEQ ID NO: 60188 - protein, 15 aa, unidentified
  source 1..15: note = methanogen bacteria
DAAFTGSEPASSGDT

SEQ ID NO: 60189 - protein, 31 aa, unidentified
  source 1..31: note = methanogen bacteria
SLAFGSTGGIIGNLDFVFMNGLDEGQSDYSV

SEQ ID NO: 60190 - protein, 19 aa, unidentified
  source 1..19: note = methanogen bacteria
HWVWSGGFESIGLTVLDFA

SEQ ID NO: 60191 - protein, 12 aa, unidentified
  source 1..12: note = methanogen bacteria
NGGSGLFANGQA

SEQ ID NO: 60192 - protein, 20 aa, unidentified
  source 1..20: note = methanogen bacteria
FAESKYTGGTVGLLFGGTDL

SEQ ID NO: 60193 - protein, 27 aa, unidentified
  source 1..27: note = methanogen bacteria
IPLYGLAPGAIDSFAQLRAVMAGSFGS

SEQ ID NO: 60194 - protein, 10 aa, unidentified
  source 1..10: note = methanogen bacteria
GNLVPIDGSY

SEQ ID NO: 60195 - protein, 33 aa, unidentified
  source 1..33: note = methanogen bacteria
GTFSILQGTDGLLAGIIPKFIQQATMGTPDFYA

SEQ ID NO: 60196 - protein, 35 aa, unidentified
  source 1..35: note = methanogen bacteria
QKIGFPILGHLEKGKAVDGIAWLLTTPNLTMFITE

SEQ ID NO: 60197 - protein, 11 aa, unidentified
  source 1..11: note = methanogen bacteria
VAGLGQAAIAG

SEQ ID NO: 60198 - protein, 20 aa, unidentified
  source 1..20: note = methanogen bacteria
EPLLIAYGASGQSLAEGIKY

SEQ ID NO: 60199 - protein, 12 aa, unidentified
  source 1..12: note = methanogen bacteria
SSVGGEYGIAAF

SEQ ID NO: 60200 - protein, 21 aa, unidentified
  source 1..21: note = methanogen bacteria
LSMIFAYTPETAPLIPEITNF

SEQ ID NO: 60201 - protein, 12 aa, unidentified
  source 1..12: note = methanogen bacteria
PSIASEYGMSNI

SEQ ID NO: 60202 - protein, 12 aa, unidentified
  source 1..12: note = methanogen bacteria
YHLQYIKGFDSQ

SEQ ID NO: 60203 - protein, 18 aa, unidentified
  source 1..18: note = methanogen bacteria
VMGNVPIIEQYYPLLISS

SEQ ID NO: 60204 - protein, 11 aa, unidentified
  source 1..11: note = methanogen bacteria
VSGIGADALAG

SEQ ID NO: 60205 - protein, 19 aa, unidentified
  source 1..19: note = methanogen bacteria
KDILIFMGASQTLNYAMDY

SEQ ID NO: 60206 - protein, 12 aa, unidentified
  source 1..12: note = methanogen bacteria
AFISSTDSVAVY

SEQ ID NO: 60207 - protein, 21 aa, unidentified
  source 1..21: note = methanogen bacteria
QIASVFSYSSGSARISAELTA

SEQ ID NO: 60208 - protein, 26 aa, unidentified
  source 1..26: note = methanogen bacteria
PLYGLSPGAIDNLAQLRAVMAGSFGS

SEQ ID NO: 60209 - protein, 10 aa, unidentified
  source 1..10: note = methanogen bacteria
GNLVPIDGSY

SEQ ID NO: 60210 - protein, 32 aa, unidentified
  source 1..32: note = methanogen bacteria
GTFSFLQGTDGLFTGILPKFIQLATTGVYDVT

SEQ ID NO: 60211 - protein, 35 aa, unidentified
  source 1..35: note = methanogen bacteria
QKIGFPIFGHIQDGKPVDGIAWLLSTPKWYMFVTE

SEQ ID NO: 60212 - protein, 13 aa, unidentified
  source 1..13: note = methanogen bacteria
EYSLGIDTVNIVG

SEQ ID NO: 60213 - protein, 18 aa, unidentified
  source 1..18: note = methanogen bacteria
NIVNLFANENTVVEPGVI

SEQ ID NO: 60214 - protein, 10 aa, unidentified
  source 1..10: note = methanogen bacteria
LLINGEIQLG

SEQ ID NO: 60215 - protein, 12 aa, unidentified
  source 1..12: note = methanogen bacteria
PSIAAEFHMSNI

SEQ ID NO: 60216 - protein, 12 aa, unidentified
  source 1..12: note = methanogen bacteria
YHLQYIKGFDSQ

SEQ ID NO: 60217 - protein, 17 aa, unidentified
  source 1..17: note = methanogen bacteria
MGNVPIIEQYYPLLITS

SEQ ID NO: 60218 - protein, 11 aa, unidentified
  source 1..11: note = methanogen bacteria
VAGLGQAAIAG

SEQ ID NO: 60219 - protein, 17 aa, unidentified
  source 1..17: note = methanogen bacteria
LKAYGASGQSLAEAIKY

SEQ ID NO: 60220 - protein, 12 aa, unidentified
  source 1..12: note = methanogen bacteria
SSVGGEYGIAAF

SEQ ID NO: 60221 - protein, 21 aa, unidentified
  source 1..21: note = methanogen bacteria
LSLLFAYTPETASLVPEITNF

SEQ ID NO: 60222 - protein, 10 aa, unidentified
  source 1..10: note = methanogen bacteria
AFLSPYIPYS

SEQ ID NO: 60223 - protein, 11 aa, unidentified
  source 1..11: note = methanogen bacteria
VSGLGADALAG

SEQ ID NO: 60224 - protein, 17 aa, unidentified
  source 1..17: note = methanogen bacteria
ILNAMGAGQTIGYATDY

SEQ ID NO: 60225 - protein, 12 aa, unidentified
  source 1..12: note = methanogen bacteria
AYVGSTDSVAVY

SEQ ID NO: 60226 - protein, 23 aa, unidentified
  source 1..23: note = methanogen bacteria
GDIASIFASSGSSVRIAGELTSF

SEQ ID NO: 60227 - protein, 12 aa, unidentified
  source 1..12: note = methanogen bacteria
PSISSNLHLDFE

SEQ ID NO: 60228 - protein, 10 aa, unidentified
  source 1..10: note = methanogen bacteria
YLQYVMGYDA

SEQ ID NO: 60229 - protein, 18 aa, unidentified
  source 1..18: note = methanogen bacteria
TVGPTNTFMDNPSSIVLP

SEQ ID NO: 60230 - protein, 11 aa, unidentified
  source 1..11: note = methanogen bacteria
ITGIGKAAIAG

SEQ ID NO: 60231 - protein, 17 aa, unidentified
  source 1..17: note = methanogen bacteria
YLSTFNIDENAFNQSMM

SEQ ID NO: 60232 - protein, 11 aa, unidentified
  source 1..11: note = methanogen bacteria
SSIGGNYGTAI

SEQ ID NO: 60233 - protein, 23 aa, unidentified
  source 1..23: note = methanogen bacteria
EPLSFTFAYTVETSDLLNGLVEF

SEQ ID NO: 60234 - protein, 28 aa, unidentified
  source 1..28: note = methanogen bacteria
IPLYGLAPGAIDQFAQVRAVMAGSFGSI

SEQ ID NO: 60235 - protein, 10 aa, unidentified
  source 1..10: note = methanogen bacteria
GNLTPIDGSY

SEQ ID NO: 60236 - protein, 32 aa, unidentified
  source 1..32: note = methanogen bacteria
GTFSILNGTDGLFAGIIPKFIQNATMGVYDFS

SEQ ID NO: 60237 - protein, 36 aa, unidentified
  source 1..36: note = methanogen bacteria
FQKIGVPILGHIDKGKPVDGIAWLLSTPKLHMFITE

SEQ ID NO: 60238 - protein, 12 aa, unidentified
  source 1..12: note = methanogen bacteria
PSMASDLHLNVD

SEQ ID NO: 60239 - protein, 10 aa, unidentified
  source 1..10: note = methanogen bacteria
YLQHVLGYDA

SEQ ID NO: 60240 - protein, 18 aa, unidentified
  source 1..18: note = methanogen bacteria
VLGSNSTLDNNASSFILS

SEQ ID NO: 60241 - protein, 12 aa, unidentified
  source 1..12: note = methanogen bacteria
VSGINSNALAAL

SEQ ID NO: 60242 - protein, 18 aa, unidentified
  source 1..18: note = methanogen bacteria
DLVIFLGAGGVSTYCLSY

SEQ ID NO: 60243 - protein, 12 aa, unidentified
  source 1..12: note = methanogen bacteria
ITTAGVGEVAAF

SEQ ID NO: 60244 - protein, 22 aa, unidentified
  source 1..22: note = methanogen bacteria
YPLCEFFNFQAGNPALVHRSVE

SEQ ID NO: 60245 - protein, 10 aa, unidentified
  source 1..10: note = methanogen bacteria
VASLGEAAIS

SEQ ID NO: 60246 - protein, 18 aa, unidentified
  source 1..18: note = methanogen bacteria
IGILFGQIDAEVWHNADV

SEQ ID NO: 60247 - protein, 10 aa, unidentified
  source 1..10: note = methanogen bacteria
STFGTMAIAA

SEQ ID NO: 60248 - protein, 17 aa, unidentified
  source 1..17: note = methanogen bacteria
LGIYNLSAQTAAMATEM

SEQ ID NO: 60249 - protein, 26 aa, unidentified
  source 1..26: note = methanogen bacteria
PLYGLAPGAIDSFAQLRAVMAGSFGS

SEQ ID NO: 60250 - protein, 32 aa, unidentified
  source 1..32: note = methanogen bacteria
GTFSILNGSDGLLAGIIPKFIQLATKGTYDFS

SEQ ID NO: 60251 - protein, 35 aa, unidentified
  source 1..35: note = methanogen bacteria
QKIGVPILGHINKGKPVDGIAWLLSTPKLSMFVTE

SEQ ID NO: 60252 - protein, 10 aa, unidentified
  source 1..10: note = methanogen bacteria
MLAEGGMPAN

SEQ ID NO: 60253 - protein, 18 aa, unidentified
  source 1..18: note = methanogen bacteria
GIIVNDPSTYVTMGNLLA

SEQ ID NO: 60254 - protein, 40 aa, unidentified
  source 1..40: note = methanogen bacteria
GFGTGNPLMPSIPAQFISVNFDFSLFGGFLRGFAQLFSNI

SEQ ID NO: 60255 - protein, 10 aa, unidentified
  source 1..10: note = methanogen bacteria
SQMNAESFFA

SEQ ID NO: 60256 - protein, 16 aa, unidentified
  source 1..16: note = methanogen bacteria
LIYMGATSSMDISMQY

SEQ ID NO: 60257 - protein, 16 aa, unidentified
  source 1..16: note = methanogen bacteria
YGFALFSVTGASTSIF

SEQ ID NO: 60258 - protein, 12 aa, unidentified
  source 1..12: note = methanogen bacteria
PTVAAEFHMSNI

SEQ ID NO: 60259 - protein, 12 aa, unidentified
  source 1..12: note = methanogen bacteria
YHLQYIKGFDSQ

SEQ ID NO: 60260 - protein, 18 aa, unidentified
  source 1..18: note = methanogen bacteria
VMGNVAIVSDVYPLLISS

SEQ ID NO: 60261 - protein, 13 aa, unidentified
  source 1..13: note = methanogen bacteria
PAISADLHLDVEM

SEQ ID NO: 60262 - protein, 12 aa, unidentified
  source 1..12: note = methanogen bacteria
DYLQHILGYDAR

SEQ ID NO: 60263 - protein, 18 aa, unidentified
  source 1..18: note = methanogen bacteria
FMGSADTFANNAMPFMMS

SEQ ID NO: 60264 - protein, 10 aa, unidentified
  source 1..10: note = methanogen bacteria
VASLGEAAIS

SEQ ID NO: 60265 - protein, 19 aa, unidentified
  source 1..19: note = methanogen bacteria
LIGILFGQIEADVWANADM

SEQ ID NO: 60266 - protein, 10 aa, unidentified
  source 1..10: note = methanogen bacteria
STFGTMAIAA

SEQ ID NO: 60267 - protein, 18 aa, unidentified
  source 1..18: note = methanogen bacteria
ILGIYNLSAQTAVMASEM

SEQ ID NO: 60268 - protein, 10 aa, unidentified
  source 1..10: note = methanogen bacteria
AYLGPYIPYS

SEQ ID NO: 60269 - protein, 10 aa, unidentified
  source 1..10: note = methanogen bacteria
SIFDANAFYA

SEQ ID NO: 60270 - protein, 19 aa, unidentified
  source 1..19: note = methanogen bacteria
DDMIGAMRITNSVNLVKLY

SEQ ID NO: 60271 - protein, 16 aa, unidentified
  source 1..16: note = methanogen bacteria
SIFYAFQIFGMNEAVT

SEQ ID NO: 60272 - protein, 11 aa, unidentified
  source 1..11: note = methanogen bacteria
VASLGEAAISG

SEQ ID NO: 60273 - protein, 19 aa, unidentified
  source 1..19: note = methanogen bacteria
LIGMLFGQIEMDVWHNAEV

SEQ ID NO: 60274 - protein, 11 aa, unidentified
  source 1..11: note = methanogen bacteria
STFGTMAIAAN

SEQ ID NO: 60275 - protein, 17 aa, unidentified
  source 1..17: note = methanogen bacteria
LNIYDLSAQTAEMTTEM

SEQ ID NO: 60276 - protein, 10 aa, unidentified
  source 1..10: note = methanogen bacteria
VASLGEAAIS

SEQ ID NO: 60277 - protein, 18 aa, unidentified
  source 1..18: note = methanogen bacteria
IGLLFGQIEADVWHNADM

SEQ ID NO: 60278 - protein, 10 aa, unidentified
  source 1..10: note = methanogen bacteria
STFGTMAIAA

SEQ ID NO: 60279 - protein, 18 aa, unidentified
  source 1..18: note = methanogen bacteria
ILGIYNLSAQTATMASEM

SEQ ID NO: 60280 - protein, 10 aa, unidentified
  source 1..10: note = methanogen bacteria
VASLGEAAIS

SEQ ID NO: 60281 - protein, 19 aa, unidentified
  source 1..19: note = methanogen bacteria
LIGVLFGQIEADVWHNADI

SEQ ID NO: 60282 - protein, 10 aa, unidentified
  source 1..10: note = methanogen bacteria
STFGTMAIAA

SEQ ID NO: 60283 - protein, 17 aa, unidentified
  source 1..17: note = methanogen bacteria
LGIYNLSDQTAVMASEM

SEQ ID NO: 60284 - protein, 11 aa, unidentified
  source 1..11: note = methanogen bacteria
VASLGEAAISG

SEQ ID NO: 60285 - protein, 19 aa, unidentified
  source 1..19: note = methanogen bacteria
LITVLFGQIEADVWNTANM

SEQ ID NO: 60286 - protein, 10 aa, unidentified
  source 1..10: note = methanogen bacteria
STFGTMAIAA

SEQ ID NO: 60287 - protein, 17 aa, unidentified
  source 1..17: note = methanogen bacteria
LDIYGLSAKTAQMAFEM

SEQ ID NO: 60288 - protein, 19 aa, unidentified
  source 1..19: note = methanogen bacteria
GDILKLFIGAKQVPYVYIY

SEQ ID NO: 60289 - protein, 16 aa, unidentified
  source 1..16: note = methanogen bacteria
LSYFTNQANVISEVRS

SEQ ID NO: 60290 - protein, 11 aa, unidentified
  source 1..11: note = methanogen bacteria
VASLGEAAISG

SEQ ID NO: 60291 - protein, 19 aa, unidentified
  source 1..19: note = methanogen bacteria
FISVLFGQIEADVWNNADI

SEQ ID NO: 60292 - protein, 10 aa, unidentified
  source 1..10: note = methanogen bacteria
STFGTMAIAA

SEQ ID NO: 60293 - protein, 17 aa, unidentified
  source 1..17: note = methanogen bacteria
LGIYNLSAQTAQMTTEM

SEQ ID NO: 60294 - protein, 14 aa, unidentified
  source 1..14: note = methanogen bacteria
NYYGKLIISNSKLI

SEQ ID NO: 60295 - protein, 19 aa, unidentified
  source 1..19: note = methanogen bacteria
GKMTIKNCIINNNVGKKSV

SEQ ID NO: 60296 - protein, 80 aa, unidentified
  source 1..80: note = methanogen bacteria
FTGAIGNYGKLTVKNSKLNNNYVKYDGGAITNYESKVTLLKCAINNNQAMTAGGAICNVASLTISHCTLYKNKSPQGGAI

SEQ ID NO: 60297 - protein, 38 aa, unidentified
  source 1..38: note = methanogen bacteria
DHGKITIKNSKLKFNKPGGKGTIKIESGKVTIIKTTIK

SEQ ID NO: 60298 - protein, 10 aa, unidentified
  source 1..10: note = methanogen bacteria
VASLGEAAIS

SEQ ID NO: 60299 - protein, 19 aa, unidentified
  source 1..19: note = methanogen bacteria
LIGTLFGHIEADVWHNAEL

SEQ ID NO: 60300 - protein, 10 aa, unidentified
  source 1..10: note = methanogen bacteria
STFGTMAIAA

SEQ ID NO: 60301 - protein, 17 aa, unidentified
  source 1..17: note = methanogen bacteria
LGIYNLSAQTAQMATEM

SEQ ID NO: 60302 - protein, 23 aa, unidentified
  source 1..23: note = methanogen bacteria
TKWGAMAGAAIPNPYLASFVQKG

SEQ ID NO: 60303 - protein, 36 aa, unidentified
  source 1..36: note = methanogen bacteria
FPLGVPYGSQQSLLGMFGSAIAPVFKPLGFGTWQAA

SEQ ID NO: 60304 - protein, 25 aa, unidentified
  source 1..25: note = methanogen bacteria
GTLGGLEEDDEEGITSLVRDVFTPL

SEQ ID NO: 60305 - protein, 11 aa, unidentified
  source 1..11: note = methanogen bacteria
VASLGEVAISG

SEQ ID NO: 60306 - protein, 19 aa, unidentified
  source 1..19: note = methanogen bacteria
LIGLLFGQIESDVWAIAEM

SEQ ID NO: 60307 - protein, 11 aa, unidentified
  source 1..11: note = methanogen bacteria
STFGTMAIAAN

SEQ ID NO: 60308 - protein, 18 aa, unidentified
  source 1..18: note = methanogen bacteria
IIGIYNLSPETAAMASEM

SEQ ID NO: 60309 - protein, 10 aa, unidentified
  source 1..10: note = methanogen bacteria
SQLSPDAFFA

SEQ ID NO: 60310 - protein, 18 aa, unidentified
  source 1..18: note = methanogen bacteria
DILSLMNVTTSVDLAIDY

SEQ ID NO: 60311 - protein, 16 aa, unidentified
  source 1..16: note = methanogen bacteria
YGFALFSVTGVETSVF

SEQ ID NO: 60312 - protein, 31 aa, unidentified
  source 1..31: note = methanogen bacteria
SSLNFNWGTNSALYFLENVGGSSNLSNMTNF

SEQ ID NO: 60313 - protein, 24 aa, unidentified
  source 1..24: note = methanogen bacteria
TLPGANIGINTLLKPDWQMLLNVN

SEQ ID NO: 60314 - protein, 16 aa, unidentified
  source 1..16: note = methanogen bacteria
GYMSYTSGTPMTKLVS

SEQ ID NO: 60315 - protein, 12 aa, unidentified
  source 1..12: note = methanogen bacteria
MVASLGEAAISG

SEQ ID NO: 60316 - protein, 19 aa, unidentified
  source 1..19: note = methanogen bacteria
IIGLLFGQIEADVWANANV

SEQ ID NO: 60317 - protein, 11 aa, unidentified
  source 1..11: note = methanogen bacteria
STFGTMAIAAN

SEQ ID NO: 60318 - protein, 17 aa, unidentified
  source 1..17: note = methanogen bacteria
LGMYGLSTHTTSMTAEM

SEQ ID NO: 60319 - protein, 10 aa, unidentified
  source 1..10: note = methanogen bacteria
VASLGEAAIS

SEQ ID NO: 60320 - protein, 19 aa, unidentified
  source 1..19: note = methanogen bacteria
LIGVLFGQIEADVWHNADM

SEQ ID NO: 60321 - protein, 10 aa, unidentified
  source 1..10: note = methanogen bacteria
STFGTMAIAA

SEQ ID NO: 60322 - protein, 17 aa, unidentified
  source 1..17: note = methanogen bacteria
LGIYNLSAETARMTTEM

SEQ ID NO: 60323 - protein, 11 aa, unidentified
  source 1..11: note = methanogen bacteria
VASLGEAAISG

SEQ ID NO: 60324 - protein, 19 aa, unidentified
  source 1..19: note = methanogen bacteria
MIGILFGHIEADVWNNADI

SEQ ID NO: 60325 - protein, 11 aa, unidentified
  source 1..11: note = methanogen bacteria
STFGTMAIAAN

SEQ ID NO: 60326 - protein, 17 aa, unidentified
  source 1..17: note = methanogen bacteria
LDIYQLSEQTAAMTTEM

SEQ ID NO: 60327 - protein, 10 aa, unidentified
  source 1..10: note = methanogen bacteria
VASLGEAAIS

SEQ ID NO: 60328 - protein, 19 aa, unidentified
  source 1..19: note = methanogen bacteria
LIGLLFGHIEADVWANADV

SEQ ID NO: 60329 - protein, 10 aa, unidentified
  source 1..10: note = methanogen bacteria
STFGTMAIAA

SEQ ID NO: 60330 - protein, 18 aa, unidentified
  source 1..18: note = methanogen bacteria
VLGIYNLSAKTAAMTTEM

SEQ ID NO: 60331 - protein, 12 aa, unidentified
  source 1..12: note = methanogen bacteria
QFEEGDDLAGIF

SEQ ID NO: 60332 - protein, 17 aa, unidentified
  source 1..17: note = methanogen bacteria
DWIFGTFYGEEMEPYSR

SEQ ID NO: 60333 - protein, 11 aa, unidentified
  source 1..11: note = methanogen bacteria
SGINGDALAAL

SEQ ID NO: 60334 - protein, 18 aa, unidentified
  source 1..18: note = methanogen bacteria
DMVILLGASDVSSYCLSY

SEQ ID NO: 60335 - protein, 11 aa, unidentified
  source 1..11: note = methanogen bacteria
MQTSGIAEVAS

SEQ ID NO: 60336 - protein, 22 aa, unidentified
  source 1..22: note = methanogen bacteria
HPICEVFNVQAANPSLVARSAE

SEQ ID NO: 60337 - protein, 18 aa, unidentified
  source 1..18: note = methanogen bacteria
PNDAIVAKHLELKIQHPE

SEQ ID NO: 60338 - protein, 20 aa, unidentified
  source 1..20: note = methanogen bacteria
QGILEFVPDSKITLEGLCVE

SEQ ID NO: 60339 - protein, 11 aa, unidentified
  source 1..11: note = methanogen bacteria
KECKYGARKFA

SEQ ID NO: 60340 - protein, 10 aa, unidentified
  source 1..10: note = methanogen bacteria
VASLGEAAIS

SEQ ID NO: 60341 - protein, 19 aa, unidentified
  source 1..19: note = methanogen bacteria
LIGTLFGQIEADVWQNAEM

SEQ ID NO: 60342 - protein, 10 aa, unidentified
  source 1..10: note = methanogen bacteria
STFGTMAIAA

SEQ ID NO: 60343 - protein, 17 aa, unidentified
  source 1..17: note = methanogen bacteria
LGIYNLSSETAAMTTEM

SEQ ID NO: 60344 - protein, 10 aa, unidentified
  source 1..10: note = methanogen bacteria
AGLGADALAA

SEQ ID NO: 60345 - protein, 16 aa, unidentified
  source 1..16: note = methanogen bacteria
LIIMGASSVLDHALEY

SEQ ID NO: 60346 - protein, 11 aa, unidentified
  source 1..11: note = methanogen bacteria
TIISGPVAVAV

SEQ ID NO: 60347 - protein, 21 aa, unidentified
  source 1..21: note = methanogen bacteria
QIAYIFSYSKSSAQLEPLISN

SEQ ID NO: 60348 - protein, 10 aa, unidentified
  source 1..10: note = methanogen bacteria
VASLGEAAIS

SEQ ID NO: 60349 - protein, 19 aa, unidentified
  source 1..19: note = methanogen bacteria
LISVLFGQIEADVWHNADI

SEQ ID NO: 60350 - protein, 11 aa, unidentified
  source 1..11: note = methanogen bacteria
STFGTMAIAAN

SEQ ID NO: 60351 - protein, 17 aa, unidentified
  source 1..17: note = methanogen bacteria
LGIYNLSAQTAQMATEM

SEQ ID NO: 60352 - protein, 11 aa, unidentified
  source 1..11: note = methanogen bacteria
VASLGEVAISG

SEQ ID NO: 60353 - protein, 19 aa, unidentified
  source 1..19: note = methanogen bacteria
LIGILFGQIESDVWANADI

SEQ ID NO: 60354 - protein, 11 aa, unidentified
  source 1..11: note = methanogen bacteria
STFGTMAIAAN

SEQ ID NO: 60355 - protein, 18 aa, unidentified
  source 1..18: note = methanogen bacteria
ILDIYQLSDQTAAMASEM

SEQ ID NO: 60356 - protein, 35 aa, unidentified
  source 1..35: note = methanogen bacteria
GNYVITAEYNGVKASNYINVLPTLEAKDLSMKYRD

SEQ ID NO: 60357 - protein, 62 aa, unidentified
  source 1..62: note = methanogen bacteria
LDGTGDALTNANVNLNINGVLYTRISDDEGIARLNINLMPGQYIITSSYNTLNISNKITISS

SEQ ID NO: 60358 - protein, 10 aa, unidentified
  source 1..10: note = methanogen bacteria
MGDVFAKFPG

SEQ ID NO: 60359 - protein, 13 aa, unidentified
  source 1..13: note = methanogen bacteria
SKLSLILNNPSVL

SEQ ID NO: 60360 - protein, 12 aa, unidentified
  source 1..12: note = methanogen bacteria
ITLGITSLGLNN

SEQ ID NO: 60361 - protein, 48 aa, unidentified
  source 1..48: note = methanogen bacteria
MSFIGDDIWYAKILSNQPLVNFLSFRYYEWSSRLLIDCITVILAKENY

SEQ ID NO: 60362 - protein, 40 aa, unidentified; identical to SEQ ID NO: 58269
  source 1..40: note = methanogen bacteria

SEQ ID NO: 60363 - protein, 51 aa, unidentified
  source 1..51: note = methanogen bacteria
IDITSIPNYLNIELMHNPIVVSAFSTVDSITKSMPLINDTIHLFTYKGLPN

SEQ ID NO: 60364 - protein, 10 aa, unidentified
  source 1..10: note = methanogen bacteria
SPTVFASGSR

SEQ ID NO: 60365 - protein, 10 aa, unidentified
  source 1..10: note = methanogen bacteria
SIYSADAFYA

SEQ ID NO: 60366 - protein, 18 aa, unidentified
  source 1..18: note = methanogen bacteria
NLLHVMKITKSVQIVKLY

SEQ ID NO: 60367 - protein, 16 aa, unidentified
  source 1..16: note = methanogen bacteria
YIYNAFHIYGMESAVT

SEQ ID NO: 60368 - protein, 11 aa, unidentified
  source 1..11: note = methanogen bacteria
IANYSYDAIAA

SEQ ID NO: 60369 - protein, 16 aa, unidentified
  source 1..16: note = methanogen bacteria
LLLIGAGEVIEDALNY

SEQ ID NO: 60370 - protein, 12 aa, unidentified
  source 1..12: note = methanogen bacteria
EILSGAIAVAAY

SEQ ID NO: 60371 - protein, 19 aa, unidentified
  source 1..19: note = methanogen bacteria
PISTLFAPANSALSIKIIS

SEQ ID NO: 60372 - protein, 10 aa, unidentified
  source 1..10: note = methanogen bacteria
VASLGEAAIS

SEQ ID NO: 60373 - protein, 19 aa, unidentified
  source 1..19: note = methanogen bacteria
LIGILFGHIEAEVWANADV

SEQ ID NO: 60374 - protein, 10 aa, unidentified
  source 1..10: note = methanogen bacteria
STFGTMAIAA

SEQ ID NO: 60375 - protein, 18 aa, unidentified
  source 1..18: note = methanogen bacteria
ILGIYNLSAQTAVMAGEM

SEQ ID NO: 60376 - protein, 15 aa, unidentified
  source 1..15: note = methanogen bacteria
LPSIEQSFNLTSRES

SEQ ID NO: 60377 - protein, 13 aa, unidentified
  source 1..13: note = methanogen bacteria
IDSSSFISSLTSL

SEQ ID NO: 60378 - protein, 12 aa, unidentified
  source 1..12: note = methanogen bacteria
SLVILSMGLSDQ

SEQ ID NO: 60379 - protein, 10 aa, unidentified
  source 1..10: note = methanogen bacteria
SQMDSKSFFA

SEQ ID NO: 60380 - protein, 18 aa, unidentified
  source 1..18: note = methanogen bacteria
DLLIMIKADSCLDLSMAY

SEQ ID NO: 60381 - protein, 11 aa, unidentified
  source 1..11: note = methanogen bacteria
LIEQLGQIGVL

SEQ ID NO: 60382 - protein, 17 aa, unidentified
  source 1..17: note = methanogen bacteria
DYGFALFSVTGAPESVF

SEQ ID NO: 60383 - protein, 15 aa, unidentified
  source 1..15: note = methanogen bacteria
TRKIYLTKNIIIVLM

SEQ ID NO: 60384 - protein, 41 aa, unidentified
  source 1..41: note = methanogen bacteria
TALPLHPYALAMASGIGSASMNAAALSPLLSIYPSSISDDI

SEQ ID NO: 60385 - protein, 16 aa, unidentified
  source 1..16: note = methanogen bacteria
MVPSSHYIVPFVKAID

SEQ ID NO: 60386 - protein, 31 aa, unidentified
  source 1..31: note = methanogen bacteria
SFTKAWGANPDLYFANNVLHSTDSMTGIFTI

SEQ ID NO: 60387 - protein, 25 aa, unidentified
  source 1..25: note = methanogen bacteria
LTLPGASLGYSQIFTPDWSALTNLN

SEQ ID NO: 60388 - protein, 35 aa, unidentified
  source 1..35: note = methanogen bacteria
FMALTSGIPFNELVTEGTGLAFVVFPQVFNIMGPW

SEQ ID NO: 60389 - protein, 80 aa, unidentified
  source 1..80: note = methanogen bacteria
LTHLGDTSAWPRIMASVESGNDIYGVMGNYYTPVWGYILSFLDLMIQTAGAVPLFGDYFEGLLPLEGVRSYRPFVISPEM

SEQ ID NO: 60390 - protein, 26 aa, unidentified
  source 1..26: note = methanogen bacteria
SGQIDDAFIFLTDRQTADFSSLYGAA

SEQ ID NO: 60391 - protein, 23 aa, unidentified
  source 1..23: note = methanogen bacteria
SCAYYGLIDYDTFMSLSVSFAED

SEQ ID NO: 60392 - protein, 82 aa, unidentified
  source 1..82: note = methanogen bacteria
LNYGYDVHHWAIIMANASSGNGLYGLTGYFYTPVWGYILGFMNLIQQACLTLGETAFRVPEALGFEGYDGWISANTTSMTYT

SEQ ID NO: 60393 - protein, 31 aa, unidentified
  source 1..31: note = methanogen bacteria
QTMDGTLSYCFTFLTARAGGDGSQWDAIAGM

SEQ ID NO: 60394 - protein, 24 aa, unidentified
  source 1..24: note = methanogen bacteria
LTLACDSNLIAVTTVVSWSDAAAP

SEQ ID NO: 60395 - protein, 10 aa, unidentified
  source 1..10: note = methanogen bacteria
MLSQIGMPIN

SEQ ID NO: 60396 - protein, 18 aa, unidentified
  source 1..18: note = methanogen bacteria
GIIVKNSANILTLGNLTS

SEQ ID NO: 60397 - protein, 41 aa, unidentified
  source 1..41: note = methanogen bacteria
GFGVDSTILMPKIPSEVISLKLDTTVFFAFLTGFHELFTYN

SEQ ID NO: 60398 - protein, 15 aa, unidentified
  source 1..15: note = methanogen bacteria
LKLIVPESSILPTHI

SEQ ID NO: 60399 - protein, 10 aa, unidentified
  source 1..10: note = methanogen bacteria
KQFAPPSTLI

SEQ ID NO: 60400 - protein, 15 aa, unidentified
  source 1..15: note = methanogen bacteria
IGLFTKDPIVLRETQ

SEQ ID NO: 60401 - protein, 31 aa, unidentified
  source 1..31: note = methanogen bacteria
TGISIEDSLFESMSALTGSGITIYQDVEILP

SEQ ID NO: 60402 - protein, 33 aa, unidentified; identical to SEQ ID NO: 58441
  source 1..33: note = methanogen bacteria

SEQ ID NO: 60403 - protein, 33 aa, unidentified
  source 1..33: note = methanogen bacteria
SDIVPIEILFTVVSAVTTTGASVQSSTVMGNWP

SEQ ID NO: 60404 - protein, 33 aa, unidentified; identical to SEQ ID NO: 58443
  source 1..33: note = methanogen bacteria

SEQ ID NO: 60405 - protein, 10 aa, unidentified
  source 1..10: note = methanogen bacteria
MLADAGMPAT

SEQ ID NO: 60406 - protein, 18 aa, unidentified
  source 1..18: note = methanogen bacteria
GIIVADPANLVGLGTLTS

SEQ ID NO: 60407 - protein, 42 aa, unidentified
  source 1..42: note = methanogen bacteria
GFGVGGDIFMPAIPKEIISFSFDTTVLFGFASGFGELFSTNP

SEQ ID NO: 60408 - protein, 28 aa, unidentified
  source 1..28: note = methanogen bacteria
VSLYGLSPTAIDQFAQLRSVMAGSFGSI

SEQ ID NO: 60409 - protein, 10 aa, unidentified
  source 1..10: note = methanogen bacteria
GSLPPISGDY

SEQ ID NO: 60410 - protein, 33 aa, unidentified
  source 1..33: note = methanogen bacteria
GAFNFLPSAGSSEPAGKIPAFIYSLTSGQPNFG

SEQ ID NO: 60411 - protein, 39 aa, unidentified
  source 1..39: note = methanogen bacteria
GIFQSAGFPILGEVSQGQAISGIAYYLTTPTSISVLFTD

SEQ ID NO: 60412 - protein, 18 aa, unidentified
  source 1..18: note = methanogen bacteria
GIIIKNQSTFVTMGNLLS

SEQ ID NO: 60413 - protein, 39 aa, unidentified
  source 1..39: note = methanogen bacteria
GFGVGEIGMPTLPTQIISTNFDTTLFCGFIQGFKGLFSN

SEQ ID NO: 60414 - protein, 15 aa, unidentified
  source 1..15: note = methanogen bacteria
MKKFNLGGNVSIVIM

SEQ ID NO: 60415 - protein, 11 aa, unidentified
  source 1..11: note = methanogen bacteria
SGQALKLLFDV

SEQ ID NO: 60416 - protein, 41 aa, unidentified
  source 1..41: note = methanogen bacteria
STSLPFHPYALAMASGVGSASMNAAALAPLTAIFPDMKDTI

SEQ ID NO: 60417 - protein, 16 aa, unidentified
  source 1..16: note = methanogen bacteria
WCPLSPIIVTYVNNVE

SEQ ID NO: 60418 - protein, 28 aa, unidentified
  source 1..28: note = methanogen bacteria
VSLFGLSPTAVDQFAQLRSVMAGSFGSI

SEQ ID NO: 60419 - protein, 34 aa, unidentified
  source 1..34: note = methanogen bacteria
VGSFNFLPTAASSAPAGRIPGFIYSLMTGQPNFS

SEQ ID NO: 60420 - protein, 39 aa, unidentified
  source 1..39: note = methanogen bacteria
GLFQSLGFPILGEVSQGQAISGIAYYLSTPSSISVLFTD

SEQ ID NO: 60421 - protein, 17 aa, unidentified
  source 1..17: note = methanogen bacteria
ASNLISTDALSAINIDA

SEQ ID NO: 60422 - protein, 21 aa, unidentified
  source 1..21: note = methanogen bacteria
REPIIYALGARGSLYDLCEDY

SEQ ID NO: 60423 - protein, 10 aa, unidentified
  source 1..10: note = methanogen bacteria
MDLAGSDGVA

SEQ ID NO: 60424 - protein, 18 aa, unidentified
  source 1..18: note = methanogen bacteria
LASLFAAENADVLDLGVR

SEQ ID NO: 60425 - protein, 11 aa, unidentified
  source 1..11: note = methanogen bacteria
VAGLGADALAG

SEQ ID NO: 60426 - protein, 17 aa, unidentified
  source 1..17: note = methanogen bacteria
VLTIMGAAHTLPYAHEY

SEQ ID NO: 60427 - protein, 13 aa, unidentified
  source 1..13: note = methanogen bacteria
LAIVAGTDAVAVY

SEQ ID NO: 60428 - protein, 23 aa, unidentified
  source 1..23: note = methanogen bacteria
PQIVYVFSYSDNSAHLAAPMAAF

SEQ ID NO: 60429 - protein, 18 aa, unidentified
  source 1..18: note = methanogen bacteria
GIIISHPTNIVGLSHLTS

SEQ ID NO: 60430 - protein, 42 aa, unidentified
  source 1..42: note = methanogen bacteria
TGFGVHSAINMPMIPSEFVTLNFDTSATFAFISGFKELFGNL

SEQ ID NO: 60431 - protein, 12 aa, unidentified
  source 1..12: note = methanogen bacteria
ASQLTSDAFYAI

SEQ ID NO: 60432 - protein, 19 aa, unidentified
  source 1..19: note = methanogen bacteria
DNIFVLLKVEESMDLALIY

SEQ ID NO: 60433 - protein, 11 aa, unidentified
  source 1..11: note = methanogen bacteria
LIEELGKTGIL

SEQ ID NO: 60434 - protein, 13 aa, unidentified
  source 1..13: note = methanogen bacteria
YKSFNIMNMELSV

SEQ ID NO: 60435 - protein, 12 aa, unidentified
  source 1..12: note = methanogen bacteria
ISGLGPDSLAAI

SEQ ID NO: 60436 - protein, 17 aa, unidentified
  source 1..17: note = methanogen bacteria
ILIFLGAGGVISYASSY

SEQ ID NO: 60437 - protein, 11 aa, unidentified
  source 1..11: note = methanogen bacteria
VIIGGNMAVGA

SEQ ID NO: 60438 - protein, 19 aa, unidentified
  source 1..19: note = methanogen bacteria
NLASFFASDATNDMNIYII

SEQ ID NO: 60439 - protein, 11 aa, unidentified
  source 1..11: note = methanogen bacteria
VGYMGTNALAA

SEQ ID NO: 60440 - protein, 20 aa, unidentified
  source 1..20: note = methanogen bacteria
KEVLGIFGVTDSLYNYASDY

SEQ ID NO: 60441 - protein, 11 aa, unidentified
  source 1..11: note = methanogen bacteria
LVVGGSLALAA

SEQ ID NO: 60442 - protein, 16 aa, unidentified
  source 1..16: note = methanogen bacteria
MALLLTSDPILINNIS

SEQ ID NO: 60443 - protein, 13 aa, unidentified
  source 1..13: note = methanogen bacteria
DNLFAMPIHNWTF

SEQ ID NO: 60444 - protein, 13 aa, unidentified
  source 1..13: note = methanogen bacteria
IRYSSLGAVGIPG

SEQ ID NO: 60445 - protein, 48 aa, unidentified
  source 1..48: note = methanogen bacteria
FYYKYFEGKTATEDPNLLYTLMQAALEPGKDTIYKCTFTSNKANGRGG

SEQ ID NO: 60446 - protein, 95 aa, unidentified
  source 1..95: note = methanogen bacteria
YKLALKKSAVKKSAKKLVLKAKLKKGTKVAKGKTVVFKFKGKKYKAKTNKKGVAKVIIKKSVLKKLKVGKKITYKAAYKAFSGKVIAKKTVKVKK

SEQ ID NO: 60447 - protein, 31 aa, unidentified; identical to SEQ ID NO: 57792
  source 1..31: note = methanogen bacteria

SEQ ID NO: 60448 - protein, 24 aa, unidentified
  source 1..24: note = methanogen bacteria
LTLPGASTGYTQIFTPDWNALLNL

SEQ ID NO: 60449 - protein, 36 aa, unidentified
  source 1..36: note = methanogen bacteria
GFMTATSGIPFNELVTEGTGLAFVVFPQVFNTMGSV

SEQ ID NO: 60450 - protein, 10 aa, unidentified
  source 1..10: note = methanogen bacteria
ASLSKEALYA

SEQ ID NO: 60451 - protein, 17 aa, unidentified
  source 1..17: note = methanogen bacteria
ILQMMKITHNIGLVLTY

SEQ ID NO: 60452 - protein, 12 aa, unidentified
  source 1..12: note = methanogen bacteria
LTQELGPKGILL

SEQ ID NO: 60453 - protein, 17 aa, unidentified
  source 1..17: note = methanogen bacteria
YNIFHTFKIINMNASVT

SEQ ID NO: 60454 - protein, 12 aa, unidentified
  source 1..12: note = methanogen bacteria
ISGLGSEPLVAL

SEQ ID NO: 60455 - protein, 18 aa, unidentified
  source 1..18: note = methanogen bacteria
PMLVFLGAGTSLKYAMDY

SEQ ID NO: 60456 - protein, 11 aa, unidentified
  source 1..11: note = methanogen bacteria
LKAGGHTAVAA

SEQ ID NO: 60457 - protein, 21 aa, unidentified
  source 1..21: note = methanogen bacteria
QIAYMFSYNSQNAVLQPHISL

SEQ ID NO: 60458 - protein, 14 aa, unidentified
  source 1..14: note = methanogen bacteria
SDTLQDSFEVGSSS

SEQ ID NO: 60459 - protein, 14 aa, unidentified
  source 1..14: note = methanogen bacteria
GSFYKNIYDFSNTE

SEQ ID NO: 60460 - protein, 10 aa, unidentified
  source 1..10: note = methanogen bacteria
VISDKTLGEF

SEQ ID NO: 60461 - protein, 19 aa, unidentified
  source 1..19: note = methanogen bacteria
KQLTIKVNNKNYAKTTGSD

SEQ ID NO: 60462 - protein, 15 aa, unidentified
  source 1..15: note = methanogen bacteria
NEFEKTIKVLIQQFT

SEQ ID NO: 60463 - protein, 32 aa, unidentified
  source 1..32: note = methanogen bacteria
RIYLKGSADVISYKTLTISVGDKVFVKKTNSE

SEQ ID NO: 60464 - protein, 17 aa, unidentified
  source 1..17: note = methanogen bacteria
AVKYSGNEISKKIKCIK

SEQ ID NO: 60465 - protein, 56 aa, unidentified
  source 1..56: note = methanogen bacteria
ERALNTKLVKKNKYNYWPKTVTASLKGKSYTYPEVRDIQNTEYTCGPTSSSVCSQA

SEQ ID NO: 60466 - protein, 57 aa, unidentified
  source 1..57: note = methanogen bacteria
KKYSSEKYFQTKGHVTNGINVEVLKKVLSKNNFKASYFYSMNTAVKQLKKGGSALIA

SEQ ID NO: 60467 - protein, 33 aa, unidentified
  source 1..33: note = methanogen bacteria
SKNVKKQVGNYYKSMGTNWVGQNVNERIPDIGK

SEQ ID NO: 60468 - protein, 93 aa, unidentified
  source 1..93: note = methanogen bacteria
YLKKDSQEVKVVYENGKIKREKTQSISIVYDFDLLSSDYFTYGEDNLIEIILPDTMNNKLLTVEINGTKYAFKRPAYAGNNFIEINISKLQAG

SEQ ID NO: 60469 - protein, 28 aa, unidentified
  source 1..28: note = methanogen bacteria
INLYGLSSVAVDQFASLRAVLAGNFGSI

SEQ ID NO: 60470 - protein, 10 aa, unidentified
  source 1..10: note = methanogen bacteria
GAIAAKSAQY

SEQ ID NO: 60471 - protein, 36 aa, unidentified
  source 1..36: note = methanogen bacteria
VGAFNILPSPSTPGVSAGKIPAFIQSVAAGTPTFDN

SEQ ID NO: 60472 - protein, 37 aa, unidentified
  source 1..37: note = methanogen bacteria
QKLGFPILGTIENGRAINGVAYMLTAPTSLDMVITDP

SEQ ID NO: 60473 - protein, 11 aa, unidentified
  source 1..11: note = methanogen bacteria
SQMNAESFFAI

SEQ ID NO: 60474 - protein, 18 aa, unidentified
  source 1..18: note = methanogen bacteria
DILTFIGATSSMDLSMQY

SEQ ID NO: 60475 - protein, 17 aa, unidentified
  source 1..17: note = methanogen bacteria
DYGFALFSITSAPISVF

SEQ ID NO: 60476 - protein, 16 aa, unidentified
  source 1..16: note = methanogen bacteria
ISNMQTYTLNFVNRPM

SEQ ID NO: 60477 - protein, 18 aa, unidentified
  source 1..18: note = methanogen bacteria
VGGLPILKSSLRYSLKPA

SEQ ID NO: 60478 - protein, 87 aa, unidentified
  source 1..87: note = methanogen bacteria
RSLNELAISSNTNPFATLQNRADFTLNVLNLLNQISGDFGILHGKMIASSMPGSPLGPRMMVGKLIAWRSEVTVTPTLLGQMIVDFG

SEQ ID NO: 60479 - protein, 10 aa, unidentified
  source 1..10: note = methanogen bacteria
NFLSPYIPYS

SEQ ID NO: 60480 - protein, 11 aa, unidentified
  source 1..11: note = methanogen bacteria
MEFFLQTYPGL

SEQ ID NO: 60481 - protein, 13 aa, unidentified
  source 1..13: note = methanogen bacteria
NSLSTLLKNQTLL

SEQ ID NO: 60482 - protein, 11 aa, unidentified
  source 1..11: note = methanogen bacteria
TIAFNNIGVGY

SEQ ID NO: 60483 - protein, 11 aa, unidentified
  source 1..11: note = methanogen bacteria
VAGLGSDALAA

SEQ ID NO: 60484 - protein, 18 aa, unidentified
  source 1..18: note = methanogen bacteria
PILIARGAGKTMSYAYRY

SEQ ID NO: 60485 - protein, 12 aa, unidentified
  source 1..12: note = methanogen bacteria
VMVSGTDAVAAY

SEQ ID NO: 60486 - protein, 21 aa, unidentified
  source 1..21: note = methanogen bacteria
QIASIFSYTSASASLGPQIAY

SEQ ID NO: 60487 - protein, 11 aa, unidentified
  source 1..11: note = methanogen bacteria
VAGLGQAAIAG

SEQ ID NO: 60488 - protein, 20 aa, unidentified
  source 1..20: note = methanogen bacteria
EPLLRTYGASGQSLAEGIKY

SEQ ID NO: 60489 - protein, 12 aa, unidentified
  source 1..12: note = methanogen bacteria
STIGGEYGIAAF

SEQ ID NO: 60490 - protein, 21 aa, unidentified
  source 1..21: note = methanogen bacteria
LSTIFAYTPETAPLVPEITRF

SEQ ID NO: 60491 - protein, 10 aa, unidentified
  source 1..10: note = methanogen bacteria
NFLSPYIPYS

SEQ ID NO: 60492 - protein, 10 aa, unidentified
  source 1..10: note = methanogen bacteria
SQMNPESFFA

SEQ ID NO: 60493 - protein, 16 aa, unidentified
  source 1..16: note = methanogen bacteria
LEYMGATSSMELSMQY

SEQ ID NO: 60494 - protein, 16 aa, unidentified
  source 1..16: note = methanogen bacteria
YGFALFSVTGAPESVF

SEQ ID NO: 60495 - protein, 12 aa, unidentified
  source 1..12: note = methanogen bacteria
MEFFLKTYPGLM

SEQ ID NO: 60496 - protein, 13 aa, unidentified
  source 1..13: note = methanogen bacteria
NSISTLLKNQTLL

SEQ ID NO: 60497 - protein, 13 aa, unidentified
  source 1..13: note = methanogen bacteria
TLAFGNVGVGFPQ

SEQ ID NO: 60498 - protein, 13 aa, unidentified
  source 1..13: note = methanogen bacteria
YFTYEGAAAMKSY

SEQ ID NO: 60499 - protein, 18 aa, unidentified
  source 1..18: note = methanogen bacteria
PLVYSYTETDVGDNIFDF

SEQ ID NO: 60500 - protein, 21 aa, unidentified
  source 1..21: note = methanogen bacteria
ALILFMVNHASLEESTPFVVW

SEQ ID NO: 60501 - protein, 10 aa, unidentified
  source 1..10: note = methanogen bacteria
SQMNAESFFA

SEQ ID NO: 60502 - protein, 16 aa, unidentified
  source 1..16: note = methanogen bacteria
LEYMGATSSMELSMQY

SEQ ID NO: 60503 - protein, 17 aa, unidentified
  source 1..17: note = methanogen bacteria
DYGFALFSITSAPESVF

SEQ ID NO: 60504 - protein, 13 aa, unidentified
  source 1..13: note = methanogen bacteria
ITFQGGVATKSYT

SEQ ID NO: 60505 - protein, 18 aa, unidentified
  source 1..18: note = methanogen bacteria
ILYSFTEDAVADTAFDFI

SEQ ID NO: 60506 - protein, 23 aa, unidentified
  source 1..23: note = methanogen bacteria
EELIWFFVNHSSLEESSYVGVWT

SEQ ID NO: 60507 - protein, 24 aa, unidentified
  source 1..24: note = methanogen bacteria
IIDSFEVNMFDASTIKTAVMGAYP

SEQ ID NO: 60508 - protein, 13 aa, unidentified
  source 1..13: note = methanogen bacteria
YGLRNVMANHVVA

SEQ ID NO: 60509 - protein, 84 aa, unidentified
  source 1..84: note = methanogen bacteria
IMEQTAMIETGDASGAFERMHLLTLAYQGLNANNLVFDIVKENGNGTVGTVIQSLVGRAIEDNVIRVAKKMPSGYNMYEPVDWA

SEQ ID NO: 60510 - protein, 25 aa, unidentified
  source 1..25: note = methanogen bacteria
STVLYYNDMLEYETGLPGVDYGRTE

SEQ ID NO: 60511 - protein, 16 aa, unidentified
  source 1..16: note = methanogen bacteria
PGTFHGNHVVTRHAKG

SEQ ID NO: 60512 - protein, 25 aa, unidentified
  source 1..25: note = methanogen bacteria
YGTIDNLRNPIPNVAKVAGEIKDKI

SEQ ID NO: 60513 - protein, 10 aa, unidentified
  source 1..10: note = methanogen bacteria
SQMNAESFFA

SEQ ID NO: 60514 - protein, 19 aa, unidentified
  source 1..19: note = methanogen bacteria
EDILTYIGATSSMELSIQY

SEQ ID NO: 60515 - protein, 15 aa, unidentified
  source 1..15: note = methanogen bacteria
GFALFSVTGVPESIF

SEQ ID NO: 60516 - protein, 18 aa, unidentified
  source 1..18: note = methanogen bacteria
GIIVADPSAIVRMGSLIT

SEQ ID NO: 60517 - protein, 40 aa, unidentified
  source 1..40: note = methanogen bacteria
CGFGAGNILMPSLPSHIVSANFDLSLFCGFIRGFPQLFSN

SEQ ID NO: 60518 - protein, 10 aa, unidentified
  source 1..10: note = methanogen bacteria
SQMNADSFFA

SEQ ID NO: 60519 - protein, 17 aa, unidentified
  source 1..17: note = methanogen bacteria
ILTYMGATSSMALSMQY

SEQ ID NO: 60520 - protein, 17 aa, unidentified
  source 1..17: note = methanogen bacteria
DYAFALFSVTGVPESIF

SEQ ID NO: 60521 - protein, 10 aa, unidentified
  source 1..10: note = methanogen bacteria
SQMNAESFFA

SEQ ID NO: 60522 - protein, 19 aa, unidentified
  source 1..19: note = methanogen bacteria
DILTYMGATSSMELSMQYL

SEQ ID NO: 60523 - protein, 16 aa, unidentified
  source 1..16: note = methanogen bacteria
YGFALFSVTGAPESVF

SEQ ID NO: 60524 - protein, 10 aa, unidentified
  source 1..10: note = methanogen bacteria
MEFYLETFPG

SEQ ID NO: 60525 - protein, 13 aa, unidentified
  source 1..13: note = methanogen bacteria
GSITTLLKSQTLL

SEQ ID NO: 60526 - protein, 11 aa, unidentified
  source 1..11: note = methanogen bacteria
TTVLGNAGVNY

SEQ ID NO: 60527 - protein, 10 aa, unidentified
  source 1..10: note = methanogen bacteria
MLVEGGMPAT

SEQ ID NO: 60528 - protein, 18 aa, unidentified
  source 1..18: note = methanogen bacteria
GIVVSDSSTLVAMGNLLA

SEQ ID NO: 60529 - protein, 39 aa, unidentified
  source 1..39: note = methanogen bacteria
GFGTGNPLMPSIPAQVISVNFDMSLFGGFLRGFGQLFSN

SEQ ID NO: 60530 - protein, 10 aa, unidentified
  source 1..10: note = methanogen bacteria
LLSETGMPAT

SEQ ID NO: 60531 - protein, 18 aa, unidentified
  source 1..18: note = methanogen bacteria
GIIETDPETLLTLGNVLS

SEQ ID NO: 60532 - protein, 40 aa, unidentified
  source 1..40: note = methanogen bacteria
GFGAGNELMPTMPEHAITTTFDLSLFGGFARGFGELFSNI

SEQ ID NO: 60533 - protein, 19 aa, unidentified
  source 1..19: note = methanogen bacteria
NIIVLDSTTLTTMGDLFQP

SEQ ID NO: 60534 - protein, 39 aa, unidentified
  source 1..39: note = methanogen bacteria
GFGTGDPLMPTLPTEFISFEFDLSLFGGFLRGFEQLFSN

SEQ ID NO: 60535 - protein, 10 aa, unidentified
  source 1..10: note = methanogen bacteria
MLAEGGMSTS

SEQ ID NO: 60536 - protein, 18 aa, unidentified
  source 1..18: note = methanogen bacteria
GIIIDDLSTLVSMGHLLS

SEQ ID NO: 60537 - protein, 39 aa, unidentified
  source 1..39: note = methanogen bacteria
GFGTGNELMPSISPEIITTNIDTSLFLGFVRGFQGLFSN

SEQ ID NO: 60538 - protein, 18 aa, unidentified
  source 1..18: note = methanogen bacteria
GIIVSNLTTVVALGNMAS

SEQ ID NO: 60539 - protein, 39 aa, unidentified
  source 1..39: note = methanogen bacteria
GFTSPDAALPTIPKTWISFNLNFSVFGGFLSGFGELLSR

SEQ ID NO: 60540 - protein, 10 aa, unidentified
  source 1..10: note = methanogen bacteria
MLADGGMPAT

SEQ ID NO: 60541 - protein, 18 aa, unidentified
  source 1..18: note = methanogen bacteria
GIIVADPSTFVALGSMTS

SEQ ID NO: 60542 - protein, 40 aa, unidentified
  source 1..40: note = methanogen bacteria
VGYGTGNPIMPTMPSQFISFNFDFSLFGAFYTGFGELFKN

SEQ ID NO: 60543 - protein, 10 aa, unidentified
  source 1..10: note = methanogen bacteria
NFFSPYIPYS

SEQ ID NO: 60544 - protein, 13 aa, unidentified
  source 1..13: note = methanogen bacteria
VGDDIIDDVGGSK

SEQ ID NO: 60545 - protein, 13 aa, unidentified
  source 1..13: note = methanogen bacteria
ATYFDTVYDFALS

SEQ ID NO: 60546 - protein, 18 aa, unidentified
  source 1..18: note = methanogen bacteria
GIIIGNSSTLVGMGNISS

SEQ ID NO: 60547 - protein, 39 aa, unidentified
  source 1..39: note = methanogen bacteria
GFGTGNALMPSIPTHFISFNFDVSLVGAFTKGFSQLFSN

SEQ ID NO: 60548 - protein, 10 aa, unidentified
  source 1..10: note = methanogen bacteria
MLADGGMPAS

SEQ ID NO: 60549 - protein, 18 aa, unidentified
  source 1..18: note = methanogen bacteria
GIIISNPSTYVSMGTLAQ

SEQ ID NO: 60550 - protein, 40 aa, unidentified
  source 1..40: note = methanogen bacteria
GFGVGDALMPTIPAHPITTNMDTSLFCGFTRGFGQLFTNI

SEQ ID NO: 60551 - protein, 18 aa, unidentified
  source 1..18: note = methanogen bacteria
GIIVSNPMNIVSLGNISS

SEQ ID NO: 60552 - protein, 39 aa, unidentified
  source 1..39: note = methanogen bacteria
GFTVPDVALPTIPKTFISFNLDFSVFGGFVQGFGELFEN

SEQ ID NO: 60553 - protein, 10 aa, unidentified
  source 1..10: note = methanogen bacteria
ILSAEGMPVN

SEQ ID NO: 60554 - protein, 18 aa, unidentified
  source 1..18: note = methanogen bacteria
IVVSNLLTIVSLGNLTSP

SEQ ID NO: 60555 - protein, 40 aa, unidentified
  source 1..40: note = methanogen bacteria
MGFTDPNVAMPSIPSQWVSFNMNFSLFGGFLHGFGELLNN

SEQ ID NO: 60556 - protein, 18 aa, unidentified
  source 1..18: note = methanogen bacteria
GIIVADPSTFVTMGSLLS

SEQ ID NO: 60557 - protein, 39 aa, unidentified
  source 1..39: note = methanogen bacteria
GFGAGDMLMPAIPAQFISADFDLSLFAGFMKGFGQLFSN

SEQ ID NO: 60558 - protein, 18 aa, unidentified
  source 1..18: note = methanogen bacteria
GIVVSDPSTVVSLGNMAS

SEQ ID NO: 60559 - protein, 39 aa, unidentified
  source 1..39: note = methanogen bacteria
GFTTPDTALPAIPKTWISFNLDFSVFGGFISGFGELFKN

SEQ ID NO: 60560 - protein, 18 aa, unidentified
  source 1..18: note = methanogen bacteria
GIIVADPSTYVTMGSLMA

SEQ ID NO: 60561 - protein, 39 aa, unidentified
  source 1..39: note = methanogen bacteria
GFGAGDVLMPVVPTEFFSTNIDYSLFGGFIKGFGQLFSN

SEQ ID NO: 60562 - protein, 18 aa, unidentified
  source 1..18: note = methanogen bacteria
GIIVADPSTFVSMGALTT

SEQ ID NO: 60563 - protein, 39 aa, unidentified
  source 1..39: note = methanogen bacteria
GYGAGDMLMPAVPAQFITTSFDLSLVAGFTKGFGQLFSN

SEQ ID NO: 60564 - protein, 18 aa, unidentified
  source 1..18: note = methanogen bacteria
GIIVADPSTFVTLGAMTS

SEQ ID NO: 60565 - protein, 39 aa, unidentified
  source 1..39: note = methanogen bacteria
GFGAGDPLMPSVPAEFISFSFDTSLVGGFISGFGELFTN

SEQ ID NO: 60566 - protein, 10 aa, unidentified
  source 1..10: note = methanogen bacteria
MLAEGGMPAT

SEQ ID NO: 60567 - protein, 18 aa, unidentified
  source 1..18: note = methanogen bacteria
GIIVADPATLVGMGSILS

SEQ ID NO: 60568 - protein, 39 aa, unidentified
  source 1..39: note = methanogen bacteria
GFGAGDPIMPAIPAEFVSFSFDTSVVGAFATGFTQLFSN

SEQ ID NO: 60569 - protein, 11 aa, unidentified
  source 1..11: note = methanogen bacteria
EILGISNSEES

SEQ ID NO: 60570 - protein, 18 aa, unidentified
  source 1..18: note = methanogen bacteria
EIIESHPTTLVTLGNLFS

SEQ ID NO: 60571 - protein, 39 aa, unidentified
  source 1..39: note = methanogen bacteria
GFGAGNEIMPTLPNNPITTSFDLSIIGEFTKGFGELFSN

SEQ ID NO: 60572 - protein, 18 aa, unidentified
  source 1..18: note = methanogen bacteria
GIIVSDPSTFVSMGALTA

SEQ ID NO: 60573 - protein, 40 aa, unidentified
  source 1..40: note = methanogen bacteria
AGYGTGDILMPAVPAQFITTSFDLSLFAACFNGFGTLFNN

SEQ ID NO: 60574 - protein, 10 aa, unidentified
  source 1..10: note = methanogen bacteria
GALANVGLVA

SEQ ID NO: 60575 - protein, 15 aa, unidentified
  source 1..15: note = methanogen bacteria
YLFSVSDPSHIPIVM

SEQ ID NO: 60576 - protein, 12 aa, unidentified
  source 1..12: note = methanogen bacteria
AAIGTDWDLSKY

SEQ ID NO: 60577 - protein, 10 aa, unidentified
  source 1..10: note = methanogen bacteria
FLTEQGFDIV

SEQ ID NO: 60578 - protein, 18 aa, unidentified
  source 1..18: note = methanogen bacteria
GIIVDDPSTLVSMGSLMA

SEQ ID NO: 60579 - protein, 39 aa, unidentified
  source 1..39: note = methanogen bacteria
GFGKGDMLMPAVPAHFITTSFDLSLFAGFMKGFGQLFSN

SEQ ID NO: 60580 - protein, 10 aa, unidentified
  source 1..10: note = methanogen bacteria
MLSQTGMPAT

SEQ ID NO: 60581 - protein, 18 aa, unidentified
  source 1..18: note = methanogen bacteria
GIIEAHPTTYLTLGNLFT

SEQ ID NO: 60582 - protein, 40 aa, unidentified
  source 1..40: note = methanogen bacteria
GFGAGNEMMPSLPEHAITTTFDLSLFGGFARGFGELFSDI

SEQ ID NO: 60583 - protein, 10 aa, unidentified
  source 1..10: note = methanogen bacteria
MLADGGMPAS

SEQ ID NO: 60584 - protein, 18 aa, unidentified
  source 1..18: note = methanogen bacteria
GIITSDPSTFVTMGSLLY

SEQ ID NO: 60585 - protein, 40 aa, unidentified
  source 1..40: note = methanogen bacteria
GFGAGDMLMPSIPKQIITLNMDTTLVGGFSRGFGQLFSNI

SEQ ID NO: 60586 - protein, 18 aa, unidentified
  source 1..18: note = methanogen bacteria
GIIVSDPSTIVRMGSLLT

SEQ ID NO: 60587 - protein, 39 aa, unidentified
  source 1..39: note = methanogen bacteria
GFGTGNALMPSFPEHIISVNFDVSLFLGFIKGFGQLFSN

SEQ ID NO: 60588 - protein, 10 aa, unidentified
  source 1..10: note = methanogen bacteria
MLSQGGMPAS

SEQ ID NO: 60589 - protein, 18 aa, unidentified
  source 1..18: note = methanogen bacteria
GVIVANPATIIGMGTISS

SEQ ID NO: 60590 - protein, 39 aa, unidentified
  source 1..39: note = methanogen bacteria
GFGAGDPTMPALTSQVISFNFDMSVFGGFLSGFSELFSN

SEQ ID NO: 60591 - protein, 10 aa, unidentified
  source 1..10: note = methanogen bacteria
SQMNPESFFA

SEQ ID NO: 60592 - protein, 18 aa, unidentified
  source 1..18: note = methanogen bacteria
DILTFVGADSSMDLSMQY

SEQ ID NO: 60593 - protein, 16 aa, unidentified
  source 1..16: note = methanogen bacteria
YGFALFSVTGVPESVF

SEQ ID NO: 60594 - protein, 13 aa, unidentified
  source 1..13: note = methanogen bacteria
VYLMSDFSVSSTQ

SEQ ID NO: 60595 - protein, 12 aa, unidentified
  source 1..12: note = methanogen bacteria
IFMQGIAYNSAI

SEQ ID NO: 60596 - protein, 30 aa, unidentified
  source 1..30: note = methanogen bacteria
LAGGSSIQSNFTDSTYFTCYHAYFDNHLYQ

SEQ ID NO: 60597 - protein, 18 aa, unidentified
  source 1..18: note = methanogen bacteria
GIIVSDPSTIVSMGSLMT

SEQ ID NO: 60598 - protein, 39 aa, unidentified
  source 1..39: note = methanogen bacteria
GFGAGDILMPAFPKHIVSANFDMSLFCGFIKGFGQLFSN

SEQ ID NO: 60599 - protein, 15 aa, unidentified
  source 1..15: note = methanogen bacteria
VREIKITDNISFLLL

SEQ ID NO: 60600 - protein, 11 aa, unidentified
  source 1..11: note = methanogen bacteria
SGGSIYMIFNV

SEQ ID NO: 60601 - protein, 42 aa, unidentified
  source 1..42: note = methanogen bacteria
VSLLPLHPYAYAMASGVGSASMNAAGLVPLVNLYPSMATQLE

SEQ ID NO: 60602 - protein, 17 aa, unidentified
  source 1..17: note = methanogen bacteria
PGVPTANFVTHYASQVD

SEQ ID NO: 60603 - protein, 10 aa, unidentified
  source 1..10: note = methanogen bacteria
MLADGGMPAT

SEQ ID NO: 60604 - protein, 19 aa, unidentified
  source 1..19: note = methanogen bacteria
GIIVADPSTFVGMGSLMAP

SEQ ID NO: 60605 - protein, 39 aa, unidentified
  source 1..39: note = methanogen bacteria
GFGAGDMLMPTLPSTVITTNFDLSLFGGFAKGFSQLFSN

SEQ ID NO: 60606 - protein, 12 aa, unidentified
  source 1..12: note = methanogen bacteria
TTSLGSNVASAI

SEQ ID NO: 60607 - protein, 19 aa, unidentified
  source 1..19: note = methanogen bacteria
DPVITLMGAGDIRSECNDY

SEQ ID NO: 60608 - protein, 10 aa, unidentified
  source 1..10: note = methanogen bacteria
IMGAGTIGVM

SEQ ID NO: 60609 - protein, 22 aa, unidentified
  source 1..22: note = methanogen bacteria
EPLMSLFTYSDSMLEQKDMLVW

SEQ ID NO: 60610 - protein, 50 aa, unidentified
  source 1..50: note = methanogen bacteria
LPIIQDDIYFAKHASEIFLLNGNNFLLYRVTHWTSRIITEFFLPLLAKNP

SEQ ID NO: 60611 - protein, 10 aa, unidentified
  source 1..10: note = methanogen bacteria
LMSAGFISTT

SEQ ID NO: 60612 - protein, 41 aa, unidentified
  source 1..41: note = methanogen bacteria
NPGNQERFAVELAAYGGDLFNSLSLFNKIDIASTSILCMTL

SEQ ID NO: 60613 - protein, 22 aa, unidentified
  source 1..22: note = methanogen bacteria
FNIHGEIFSIFTPAGLLSSTIT

SEQ ID NO: 60614 - protein, 18 aa, unidentified
  source 1..18: note = methanogen bacteria
TPSVMITGYPFVDALGRW

SEQ ID NO: 60615 - protein, 52 aa, unidentified
  source 1..52: note = methanogen bacteria
LPSIEDDLIYSSFLNQNSDISSYINNYYLPHIHGWSSRYFTDLLTPIMATYT

SEQ ID NO: 60616 - protein, 38 aa, unidentified
  source 1..38: note = methanogen bacteria
NPGNDYRYHYEIANWVGNYSEVTLINKIDLATTSLYVM

SEQ ID NO: 60617 - protein, 24 aa, unidentified
  source 1..24: note = methanogen bacteria
FDGFNALSLAQNFAPNGLISHGLD

SEQ ID NO: 60618 - protein, 17 aa, unidentified
  source 1..17: note = methanogen bacteria
APSAQIWYFPLHKYPGR

SEQ ID NO: 60619 - protein, 11 aa, unidentified
  source 1..11: note = methanogen bacteria
VAGLGGDALAA

SEQ ID NO: 60620 - protein, 18 aa, unidentified
  source 1..18: note = methanogen bacteria
PILKFMGAGSTIGYAMNY

SEQ ID NO: 60621 - protein, 11 aa, unidentified
  source 1..11: note = methanogen bacteria
VIASGTDAVAV

SEQ ID NO: 60622 - protein, 22 aa, unidentified
  source 1..22: note = methanogen bacteria
QIAAMFSYTEASAVLAPEIATA

SEQ ID NO: 60623 - protein, 12 aa, unidentified
  source 1..12: note = methanogen bacteria
GFARGATGIGML

SEQ ID NO: 60624 - protein, 10 aa, unidentified
  source 1..10: note = methanogen bacteria
LEGPGYSFRN

SEQ ID NO: 60625 - protein, 16 aa, unidentified
  source 1..16: note = methanogen bacteria
AATLKNSFQATALASI

SEQ ID NO: 60626 - protein, 28 aa, unidentified
  source 1..28: note = methanogen bacteria
GDAIGAFERMHLLGLAYQGMNADNLVLG

SEQ ID NO: 60627 - protein, 24 aa, unidentified
  source 1..24: note = methanogen bacteria
DIMTDTIAKASDDGIISVEKDLNG

SEQ ID NO: 60628 - protein, 12 aa, unidentified
  source 1..12: note = methanogen bacteria
QTDDLAKWNAYV

SEQ ID NO: 60629 - protein, 15 aa, unidentified
  source 1..15: note = methanogen bacteria
PLKNSAIQNMIYDIK

SEQ ID NO: 60630 - protein, 41 aa, unidentified
  source 1..41: note = methanogen bacteria
IGGKSVFIPGRELDLPIVENAELIGEKIRKILQVNEDDDTT

SEQ ID NO: 60631 - protein, 36 aa, unidentified
  source 1..36: note = methanogen bacteria
GAARAAQAVASTVLYYNDMLEYETGLPGVDYGRTEG

SEQ ID NO: 60632 - protein, 31 aa, unidentified
  source 1..31: note = methanogen bacteria
FSHSIYGGGGPGTFHGNHVVTRHAKGTAIPC

SEQ ID NO: 60633 - protein, 48 aa, unidentified
  source 1..48: note = methanogen bacteria
AMCLDAGTQMFSVKRTSALIGTVYGTIDNLRNPIPNVANVAGEIKDNL

SEQ ID NO: 60634 - protein, 11 aa, unidentified
  source 1..11: note = methanogen bacteria
MGANLKTMLDV

SEQ ID NO: 60635 - protein, 24 aa, unidentified
  source 1..24: note = methanogen bacteria
LEGPGYSLRNIKANDFVAATLKNT

SEQ ID NO: 60636 - protein, 18 aa, unidentified
  source 1..18: note = methanogen bacteria
ASIFEQTAMFEMGDAVGA

SEQ ID NO: 60637 - protein, 88 aa, unidentified
  source 1..88: note = methanogen bacteria
QGLNADNMVLGLVQDNAKEGTVGSIVQDTIAKAEADGVIAVEKELTGYNMYATSDAAKWNAYAAAGCTAAIMVNVGAARAAQGIPSTI

SEQ ID NO: 60638 - protein, 13 aa, unidentified
  source 1..13: note = methanogen bacteria
VPAIANDFAMNNV

SEQ ID NO: 60639 - protein, 11 aa, unidentified
  source 1..11: note = methanogen bacteria
YHFQYVRGWNA

SEQ ID NO: 60640 - protein, 32 aa, unidentified
  source 1..32: note = methanogen bacteria
MGNLALSTQYADLIVKSSQISVNFCFIGWNKI

SEQ ID NO: 60641 - protein, 52 aa, unidentified
  source 1..52: note = methanogen bacteria
LPFQRLNVAADYSVSTMQTGAATIQAIIDSYDVNMFDASTIKTAVMGAYPRS

SEQ ID NO: 60642 - protein, 14 aa, unidentified
  source 1..14: note = methanogen bacteria
GYGLRNVMANHVVA

SEQ ID NO: 60643 - protein, 89 aa, unidentified
  source 1..89: note = methanogen bacteria
LSSIMEQTAMIETGDATGAFERMHLLTLAYQGLNADNLVFDLVKENGKGTVGTVIQSLVGRAIEDNVIQVAKKMSSGYSMYEPVDWALW

SEQ ID NO: 60644 - protein, 26 aa, unidentified
  source 1..26: note = methanogen bacteria
STVLYYNDMLEYETGLPGVDYGRTEG

SEQ ID NO: 60645 - protein, 21 aa, unidentified
  source 1..21: note = methanogen bacteria
GPGTFHGNHVVTRHAKGTAIP

SEQ ID NO: 60646 - protein, 14 aa, unidentified
  source 1..14: note = methanogen bacteria
MCLDAGTQMFSVQR

SEQ ID NO: 60647 - protein, 26 aa, unidentified
  source 1..26: note = methanogen bacteria
VYGTIDNLRNPIPNVAKVAGEIKDNL

SEQ ID NO: 60648 - protein, 80 aa, unidentified
  source 1..80: note = methanogen bacteria
EKGLKNAAMGGKSTYIPGRELDLDIIENSDIIAEKIRRILRVNEDDDTTVDIINNGQQLLVQLPYERLKVAADYSVSTLQ

SEQ ID NO: 60649 - protein, 31 aa, unidentified
  source 1..31: note = methanogen bacteria
QAIIDSFEINMFDASTIKTAVMGAYPRTVDL

SEQ ID NO: 60650 - protein, 21 aa, unidentified
  source 1..21: note = methanogen bacteria
GYGLRNVMANHVVAITNKQTL

SEQ ID NO: 60651 - protein, 56 aa, unidentified
  source 1..56: note = methanogen bacteria
ALSSIMEQTAMFETGDATGAFERMHLLTLAFQGLNANNLVFDLVKENGKGTVGTVI

SEQ ID NO: 60652 - protein, 27 aa, unidentified
  source 1..27: note = methanogen bacteria
GRAIEDNVIRVAKKMPSGYNMYDPVDW

SEQ ID NO: 60653 - protein, 65 aa, unidentified
  source 1..65: note = methanogen bacteria
ASTVLYYNDMLEYETGLPGVDYGRTEGVGVGFSFFSHSIYGGGGPGTFHGNHVVTRHAKGTAIPC

SEQ ID NO: 60654 - protein, 49 aa, unidentified
  source 1..49: note = methanogen bacteria
AAMCLDAGTQMFSVERTSALIGTVYGTIDNLRNPIPNVAKVAGEVKDIL

SEQ ID NO: 60655 - protein, 75 aa, unidentified
  source 1..75: note = methanogen bacteria
SPLKNSAIREMIYDIKRSAAVNLAGIEKGLKGAAMGGKSTYIPGRELDLPILENAEIIAQKVKKILKVNEDDDTT

SEQ ID NO: 60656 - protein, 44 aa, unidentified
  source 1..44: note = methanogen bacteria
IRSVVERAIEDKVIKVAKRMPSGYNMYEPVDWARWNGYAAAGLI

SEQ ID NO: 60657 - protein, 37 aa, unidentified
  source 1..37: note = methanogen bacteria
VGAARAAQGVASTVLYYNDILEYETGLPGVDYGRTEG

SEQ ID NO: 60658 - protein, 83 aa, unidentified
  source 1..83: note = methanogen bacteria
FFSHSIYGGGGPGTFHGNHVVTRHAKGTAIPCASAAMCLDAGTQMFSVERTSALIGTVYGTIDNLRNPIPNVAKVAWEIKDKI

SEQ ID NO: 60659 - protein, 14 aa, unidentified
  source 1..14: note = methanogen bacteria
EHESGLPGVDYGRA

SEQ ID NO: 60660 - protein, 24 aa, unidentified
  source 1..24: note = methanogen bacteria
TIPQITFEEFGMLYSIPEWHVGFD

SEQ ID NO: 60661 - protein, 16 aa, unidentified
  source 1..16: note = methanogen bacteria
LFGTMGDSFYLPVHLS

SEQ ID NO: 60662 - protein, 18 aa, unidentified
  source 1..18: note = methanogen bacteria
TISDLEVYSFDSLRYPIA

SEQ ID NO: 60663 - protein, 49 aa, unidentified
  source 1..49: note = methanogen bacteria
DAFIYSNDNQDYGQFLNRVKDGVLIGIRAATLGMAIHNVITYGSHVPNT

SEQ ID NO: 60664 - protein, 32 aa, unidentified
  source 1..32: note = methanogen bacteria
LNSADYNAAQKFLYDERVSFNDIDNIIAADDS

SEQ ID NO: 60665 - protein, 12 aa, unidentified
  source 1..12: note = methanogen bacteria
MEFFLKTYPGLM

SEQ ID NO: 60666 - protein, 13 aa, unidentified
  source 1..13: note = methanogen bacteria
DSLTTLLKNQTLL

SEQ ID NO: 60667 - protein, 13 aa, unidentified
  source 1..13: note = methanogen bacteria
TLAFGNIGIGFIE

SEQ ID NO: 60668 - protein, 11 aa, unidentified
  source 1..11: note = methanogen bacteria
FLPYIQAIFGL

SEQ ID NO: 60669 - protein, 10 aa, unidentified
  source 1..10: note = methanogen bacteria
NAISFIPYSE

SEQ ID NO: 60670 - protein, 10 aa, unidentified
  source 1..10: note = methanogen bacteria
RMISFVPYSE

SEQ ID NO: 60671 - protein, 10 aa, unidentified
  source 1..10: note = methanogen bacteria
AYLQPYIPNS

SEQ ID NO: 60672 - protein, 10 aa, unidentified
  source 1..10: note = methanogen bacteria
MSLIYSITST

SEQ ID NO: 60673 - protein, 17 aa, unidentified
  source 1..17: note = methanogen bacteria
VGGLPILKSSLRYSLKP

SEQ ID NO: 60674 - protein, 87 aa, unidentified
  source 1..87: note = methanogen bacteria
RSLNELAISSNTSIFSTLESRANFTMHVLNLLNQISGNFGLLHGKMIASAMPGSDLGPRMIVGKLIAWRTEVTVTPTLLGQMLVDFG

SEQ ID NO: 60675 - protein, 32 aa, unidentified
  source 1..32: note = methanogen bacteria
GQISEPNNPGMGEVSFMFLLKIIRSGMLISND

SEQ ID NO: 60676 - protein, 12 aa, unidentified
  source 1..12: note = methanogen bacteria
LSGGNVVVAVAV

SEQ ID NO: 60677 - protein, 29 aa, unidentified
  source 1..29: note = methanogen bacteria
ARAITSGQYNLAYDRVSTLIILYNANEAI

SEQ ID NO: 60678 - protein, 17 aa, unidentified
  source 1..17: note = methanogen bacteria
VGGVPLLKSSLRYSLKP

SEQ ID NO: 60679 - protein, 87 aa, unidentified
  source 1..87: note = methanogen bacteria
RSLNELAISSNTNMFSTLESRANFTMHVLNLLNQISGNFGILHGKMIASSMPGSDLGPRMLVGKLIAWRTEVTVTPTLLGQMLVDFG

SEQ ID NO: 60680 - protein, 11 aa, unidentified
  source 1..11: note = methanogen bacteria
NSTVGEPVLSV

SEQ ID NO: 60681 - protein, 10 aa, unidentified
  source 1..10: note = methanogen bacteria
EIGLDQAVVP

SEQ ID NO: 60682 - protein, 30 aa, unidentified
  source 1..30: note = methanogen bacteria
GMVDFSGFFAASIFEVPEFYMPFVNYSFNP

SEQ ID NO: 60683 - protein, 15 aa, unidentified
  source 1..15: note = methanogen bacteria
ATLSLVHGDISISIS

SEQ ID NO: 60684 - protein, 12 aa, unidentified
  source 1..12: note = methanogen bacteria
GFSRGATGIGML

SEQ ID NO: 60685 - protein, 12 aa, unidentified
  source 1..12: note = methanogen bacteria
RQTIASNIGETV

SEQ ID NO: 60686 - protein, 12 aa, unidentified
  source 1..12: note = methanogen bacteria
SNLIGAVALSAI

SEQ ID NO: 60687 - protein, 20 aa, unidentified
  source 1..20: note = methanogen bacteria
GPIIGILCPSAQIQPIVFQY

SEQ ID NO: 60688 - protein, 16 aa, unidentified
  source 1..16: note = methanogen bacteria
LMLYQVNNPSDIPIVL

SEQ ID NO: 60689 - protein, 10 aa, unidentified
  source 1..10: note = methanogen bacteria
HVIAPYIPYA

SEQ ID NO: 60690 - protein, 35 aa, unidentified
  source 1..35: note = methanogen bacteria
VEDPKEPERVYNPIHIKYQPNSYTCGPTSLSMCSQ

SEQ ID NO: 60691 - protein, 24 aa, unidentified
  source 1..24: note = methanogen bacteria
DETSINAFANACYTDSSGTSPTNL

SEQ ID NO: 60692 - protein, 16 aa, unidentified
  source 1..16: note = methanogen bacteria
PRNVDGVSEAIENGKP

SEQ ID NO: 60693 - protein, 34 aa, unidentified
  source 1..34: note = methanogen bacteria
IVIYEWNDDYYYIADPTKGLGRCSHSMIDNAMRG

SEQ ID NO: 60694 - protein, 11 aa, unidentified
  source 1..11: note = methanogen bacteria
GYSQWDIDATS

SEQ ID NO: 60695 - protein, 17 aa, unidentified
  source 1..17: note = methanogen bacteria
TNLFFEVNDAAEYSYTE

SEQ ID NO: 60696 - protein, 10 aa, unidentified
  source 1..10: note = methanogen bacteria
KYISFIPYSE

SEQ ID NO: 60697 - protein, 18 aa, unidentified
  source 1..18: note = methanogen bacteria
SVGGVPLLKSSLRYSLNP

SEQ ID NO: 60698 - protein, 87 aa, unidentified
  source 1..87: note = methanogen bacteria
RSLNELAISSSTDPFSTLESRANFTMHVLNLLNQISGNFGLLHGKMLASAMPGSELGPRMLVGKLIAWRTEVTVTPTLLGQMLVDFG

SEQ ID NO: 60699 - protein, 10 aa, unidentified
  source 1..10: note = methanogen bacteria
TITMGPIGPV

SEQ ID NO: 60700 - protein, 16 aa, unidentified
  source 1..16: note = methanogen bacteria
AFSVFSITGMQTEIYW

SEQ ID NO: 60701 - protein, 27 aa, unidentified
  source 1..27: note = methanogen bacteria
ISPEALSSLYAWSVGSIDIAGSGVNGW

SEQ ID NO: 60702 - protein, 21 aa, unidentified
  source 1..21: note = methanogen bacteria
GYSAGFDLSDGATVFSDFVSS

SEQ ID NO: 60703 - protein, 23 aa, unidentified
  source 1..23: note = methanogen bacteria
TLPGAGDGVAYYFEFRLSDVDGQ

SEQ ID NO: 60704 - protein, 30 aa, unidentified
  source 1..30: note = methanogen bacteria
AYTSMGGDISGGAGLVFITLPHIFGGMGMG

SEQ ID NO: 60705 - protein, 13 aa, unidentified
  source 1..13: note = methanogen bacteria
YGPLDFIQIAGKN

SEQ ID NO: 60706 - protein, 16 aa, unidentified
  source 1..16: note = methanogen bacteria
FGQSPIFPFTSLNLPL

SEQ ID NO: 60707 - protein, 20 aa, unidentified
  source 1..20: note = methanogen bacteria
PEILGGGYSMMSLIQVSIPP

SEQ ID NO: 60708 - protein, 20 aa, unidentified
  source 1..20: note = methanogen bacteria
GYLVGADMADPDLFGSFTAS

SEQ ID NO: 60709 - protein, 23 aa, unidentified
  source 1..23: note = methanogen bacteria
MQPGSMDGVMYYLSFDTDRLSFS

SEQ ID NO: 60710 - protein, 30 aa, unidentified
  source 1..30: note = methanogen bacteria
AYSHFSGDIEGGASLVFITLPYIFADMPGG

SEQ ID NO: 60711 - protein, 13 aa, unidentified
  source 1..13: note = methanogen bacteria
YGPLSFVEIAGKN

SEQ ID NO: 60712 - protein, 10 aa, unidentified
  source 1..10: note = methanogen bacteria
SQMNPESFFA

SEQ ID NO: 60713 - protein, 16 aa, unidentified
  source 1..16: note = methanogen bacteria
LIYMGATSSMDLSMQY

SEQ ID NO: 60714 - protein, 17 aa, unidentified
  source 1..17: note = methanogen bacteria
YGFALFSVTGASESVFY

SEQ ID NO: 60715 - protein, 12 aa, unidentified
  source 1..12: note = methanogen bacteria
SQLQSSLHFSAE

SEQ ID NO: 60716 - protein, 13 aa, unidentified
  source 1..13: note = methanogen bacteria
TYLEQERGLALLS

SEQ ID NO: 60717 - protein, 15 aa, unidentified
  source 1..15: note = methanogen bacteria
DICDVSIYDANFVKG

SEQ ID NO: 60718 - protein, 13 aa, unidentified
  source 1..13: note = methanogen bacteria
STLLYFNDNLEFA

SEQ ID NO: 60719 - protein, 19 aa, unidentified
  source 1..19: note = methanogen bacteria
PGLDYGRAEGVAVGFSFFS

SEQ ID NO: 60720 - protein, 10 aa, unidentified
  source 1..10: note = methanogen bacteria
KMISFIPYSE

SEQ ID NO: 60721 - protein, 11 aa, unidentified
  source 1..11: note = methanogen bacteria
FILGSNYLAVV

SEQ ID NO: 60722 - protein, 20 aa, unidentified
  source 1..20: note = methanogen bacteria
DFFTQMLCQAPELQPLVNQY

SEQ ID NO: 60723 - protein, 17 aa, unidentified
  source 1..17: note = methanogen bacteria
SLFIFNVNDPNTIPVVL

SEQ ID NO: 60724 - protein, 13 aa, unidentified
  source 1..13: note = methanogen bacteria
VPDSFLKNTLLVD

SEQ ID NO: 60725 - protein, 43 aa, unidentified
  source 1..43: note = methanogen bacteria
IKPGVGLNMAAAAQSSNVTINQTMTGTILNMVPDNPLNALANG

SEQ ID NO: 60726 - protein, 11 aa, unidentified
  source 1..11: note = methanogen bacteria
AQAYGIDLGTT

SEQ ID NO: 60727 - protein, 14 aa, unidentified
  source 1..14: note = methanogen bacteria
IEAAMPGSVPDGYV

SEQ ID NO: 60728 - protein, 14 aa, unidentified
  source 1..14: note = methanogen bacteria
NLGIPCRGIMGDGT

SEQ ID NO: 60729 - protein, 26 aa, unidentified
  source 1..26: note = methanogen bacteria
SGSGRSGTALALKEVIGDSLEGFCSE

SEQ ID NO: 60730 - protein, 13 aa, unidentified
  source 1..13: note = methanogen bacteria
VPDSFFKNIILVD

SEQ ID NO: 60731 - protein, 43 aa, unidentified
  source 1..43: note = methanogen bacteria
IKPGVGLNMAVTSQAGNVTLNQTMTDTILNMVPDNPLNSLASG

SEQ ID NO: 60732 - protein, 11 aa, unidentified
  source 1..11: note = methanogen bacteria
AQAYGMDLGTS

SEQ ID NO: 60733 - protein, 11 aa, unidentified
  source 1..11: note = methanogen bacteria
NTTVGEPVLSV

SEQ ID NO: 60734 - protein, 10 aa, unidentified
  source 1..10: note = methanogen bacteria
EIGLDQAVVP

SEQ ID NO: 60735 - protein, 30 aa, unidentified
  source 1..30: note = methanogen bacteria
GMVDFSGFFAASLFEIPDFYMPFINYSFNP

SEQ ID NO: 60736 - protein, 15 aa, unidentified
  source 1..15: note = methanogen bacteria
ATLSIVQGDLSVSIS

SEQ ID NO: 60737 - protein, 30 aa, unidentified
  source 1..30: note = methanogen bacteria
FFKGWGSNPNAFFNGSLLQVSESPMGLLTF

SEQ ID NO: 60738 - protein, 24 aa, unidentified
  source 1..24: note = methanogen bacteria
MLPGAGIGLQELFSPEWESLSNFG

SEQ ID NO: 60739 - protein, 36 aa, unidentified
  source 1..36: note = methanogen bacteria
GYMSLQTGTPVEQLVTQGAGLIFVVYPTAFNALGSW

SEQ ID NO: 60740 - protein, 10 aa, unidentified
  source 1..10: note = methanogen bacteria
VPDSFFKNII

SEQ ID NO: 60741 - protein, 43 aa, unidentified
  source 1..43: note = methanogen bacteria
IKPGAGLNMVAAAQSSNVTLNQTMTDTVLNMVPDNPLNALSNG

SEQ ID NO: 60742 - protein, 10 aa, unidentified
  source 1..10: note = methanogen bacteria
AQAYGMDLGV

SEQ ID NO: 60743 - protein, 11 aa, unidentified
  source 1..11: note = methanogen bacteria
NTTVGEPVLSV

SEQ ID NO: 60744 - protein, 10 aa, unidentified
  source 1..10: note = methanogen bacteria
EIGLDQAVIP

SEQ ID NO: 60745 - protein, 30 aa, unidentified
  source 1..30: note = methanogen bacteria
GMVDFSGFYAASLFEIPDFYMPFVNYSFNP

SEQ ID NO: 60746 - protein, 15 aa, unidentified
  source 1..15: note = methanogen bacteria
ATLSIAQGDLSVSIS

SEQ ID NO: 60747 - protein, 15 aa, unidentified
  source 1..15: note = methanogen bacteria
SIDAAVSDAVPEEYV

SEQ ID NO: 60748 - protein, 14 aa, unidentified
  source 1..14: note = methanogen bacteria
NLGIPCRGIMGEGT

SEQ ID NO: 60749 - protein, 26 aa, unidentified
  source 1..26: note = methanogen bacteria
SGSGRSGTALVLKEVIGDSLNGFCSE

SEQ ID NO: 60750 - protein, 14 aa, unidentified
  source 1..14: note = methanogen bacteria
ISILFGPAYASSTT

SEQ ID NO: 60751 - protein, 13 aa, unidentified
  source 1..13: note = methanogen bacteria
RYYSDYDYPSNQP

SEQ ID NO: 60752 - protein, 11 aa, unidentified
  source 1..11: note = methanogen bacteria
YFLESLGCSYA

SEQ ID NO: 60753 - protein, 11 aa, unidentified
  source 1..11: note = methanogen bacteria
DIFQNLGGGIG

SEQ ID NO: 60754 - protein, 10 aa, unidentified
  source 1..10: note = methanogen bacteria
IRSIKRRIRR

SEQ ID NO: 60755 - protein, 14 aa, unidentified
  source 1..14: note = methanogen bacteria
NSGHYSDYDYPPNQ

SEQ ID NO: 60756 - protein, 10 aa, unidentified
  source 1..10: note = methanogen bacteria
VDDPYIKNTI

SEQ ID NO: 60757 - protein, 44 aa, unidentified
  source 1..44: note = methanogen bacteria
IKPGMGLNLVATGQSTSVTINQTMTDTILNVIPENPFTSLASGD

SEQ ID NO: 60758 - protein, 11 aa, unidentified
  source 1..11: note = methanogen bacteria
AQAYGIDLGTS

SEQ ID NO: 60759 - protein, 13 aa, unidentified
  source 1..13: note = methanogen bacteria
VENNFIEDVILMD

SEQ ID NO: 60760 - protein, 44 aa, unidentified; identical to SEQ ID NO: 54360
  source 1..44: note = methanogen bacteria

SEQ ID NO: 60761 - protein, 12 aa, unidentified
  source 1..12: note = methanogen bacteria
AQCCGMDLGTSA

SEQ ID NO: 60762 - protein, 11 aa, unidentified
  source 1..11: note = methanogen bacteria
LVFTSVGLPVE

SEQ ID NO: 60763 - protein, 27 aa, unidentified
  source 1..27: note = methanogen bacteria
FGDWSLLEDGLELIMPEPGEDSTNTNY

SEQ ID NO: 60764 - protein, 11 aa, unidentified
  source 1..11: note = methanogen bacteria
VAGTDGGISVG

SEQ ID NO: 60765 - protein, 10 aa, unidentified
  source 1..10: note = methanogen bacteria
VNISDLKDTE

SEQ ID NO: 60766 - protein, 13 aa, unidentified
  source 1..13: note = methanogen bacteria
NTIVDGAPALSNS

SEQ ID NO: 60767 - protein, 10 aa, unidentified
  source 1..10: note = methanogen bacteria
VKNPFIKNTL

SEQ ID NO: 60768 - protein, 42 aa, unidentified
  source 1..42: note = methanogen bacteria
IKPGAGLNMVGLAQANVTTNTTITDTVLNFIPENPFSSLANG

SEQ ID NO: 60769 - protein, 10 aa, unidentified
  source 1..10: note = methanogen bacteria
AQAYGMDLGL

SEQ ID NO: 60770 - protein, 14 aa, unidentified
  source 1..14: note = methanogen bacteria
STTLQDAFGVGTAE

SEQ ID NO: 60771 - protein, 14 aa, unidentified
  source 1..14: note = methanogen bacteria
GSFYQNCGGFSKDD

SEQ ID NO: 60772 - protein, 10 aa, unidentified
  source 1..10: note = methanogen bacteria
SGSDGIVDSF

SEQ ID NO: 60773 - protein, 14 aa, unidentified
  source 1..14: note = methanogen bacteria
MLRSWNDYEFVYSE

SEQ ID NO: 60774 - protein, 32 aa, unidentified
  source 1..32: note = methanogen bacteria
YILYETTAGSGSELMSIFRSLADFVQYDIVKI

SEQ ID NO: 60775 - protein, 99 aa, unidentified
  source 1..99: note = methanogen bacteria
FTYAMNQYVWEDQEWSYVSRFSYGQLIVEGNGATLVGNGDYNFMYIGSEANVNFLNVNIKHFNHCFINHGTLMCEKCFFSDNRAYKFDVKISGSGTIVH

SEQ ID NO: 60776 - protein, 19 aa, unidentified
  source 1..19: note = methanogen bacteria
YNTVYFDWCSFNNNTAEYW

SEQ ID NO: 60777 - protein, 57 aa, unidentified
  source 1..57: note = methanogen bacteria
HQFFPLFEQSYISQYTYFSLVNSTAFSTNRTMEINVSNSEELLDAFLYINNFPDANN

SEQ ID NO: 60778 - protein, 43 aa, unidentified
  source 1..43: note = methanogen bacteria
INMKSGSYTVSVNDYSRVRTYDWRAKAYNPGILSSAVIKERYL

SEQ ID NO: 60779 - protein, 34 aa, unidentified
  source 1..34: note = methanogen bacteria
TINGNGAHIILSGNDLNDDYHFANIGKYGYLTLN

SEQ ID NO: 60780 - protein, 13 aa, unidentified
  source 1..13: note = methanogen bacteria
IPSIAAEFHMSNI

SEQ ID NO: 60781 - protein, 12 aa, unidentified
  source 1..12: note = methanogen bacteria
YHLQYIKGFDSQ

SEQ ID NO: 60782 - protein, 25 aa, unidentified
  source 1..25: note = methanogen bacteria
MGDVPIIQQYYPLLLESNLIASLIH

SEQ ID NO: 60783 - protein, 26 aa, unidentified
  source 1..26: note = methanogen bacteria
GALAGWVGGFLGEGLLSSLICDGVIG

SEQ ID NO: 60784 - protein, 48 aa, unidentified
  source 1..48: note = methanogen bacteria
TSVNSNIVVNKVSTSLTVNDINITYSDSANLIITLKDRNNAVLKGKDI

SEQ ID NO: 60785 - protein, 19 aa, unidentified
  source 1..19: note = methanogen bacteria
LNGKDYVVKTGNDGKATLP

SEQ ID NO: 60786 - protein, 89 aa, unidentified
  source 1..89: note = methanogen bacteria
ASSVSSDVVVDKLATALTAGNINITYGDSANLIITLKDAKGNALSGKVILINITDKIYSATTDNNGEVTLPIDILPGKYASKIEFGEDE

SEQ ID NO: 60787 - protein, 17 aa, unidentified
  source 1..17: note = methanogen bacteria
MQNKDNLFNGIYTDVFV

SEQ ID NO: 60788 - protein, 86 aa, unidentified
  source 1..86: note = methanogen bacteria
LNGLEVTYNGTENYPSAIGYLNLTVSQVNVTVSNETGEGKVGDEIEVEFTVTASDESEINEGKLTVTVKGTEYSAEVKDGKATFTF

SEQ ID NO: 60789 - protein, 42 aa, unidentified
  source 1..42: note = methanogen bacteria
NINLEAGKYVITAYHPFNNQTHSNNITVLSRVIDNDDLVKYY

SEQ ID NO: 60790 - protein, 41 aa, unidentified
  source 1..41: note = methanogen bacteria
GSQYVVTILGADGKVVGAGENVTFNINGVMYTRQTNESGQA

SEQ ID NO: 60791 - protein, 72 aa, unidentified
  source 1..72: note = methanogen bacteria
TITAMYNDCRVSNSIEVLPVLFAEDLVKKYGISDQFKALLVDGQGNPFPNQNITFNINGVFYQRTTNDEGYA

SEQ ID NO: 60792 - protein, 19 aa, unidentified
  source 1..19: note = methanogen bacteria
IITSSFNGTNISNKITIVD

SEQ ID NO: 60793 - protein, 11 aa, unidentified
  source 1..11: note = methanogen bacteria
VSALGADALAG

SEQ ID NO: 60794 - protein, 16 aa, unidentified
  source 1..16: note = methanogen bacteria
ILIAMGVGNTINFAMV

SEQ ID NO: 60795 - protein, 12 aa, unidentified
  source 1..12: note = methanogen bacteria
TYVASTDAVAVY

SEQ ID NO: 60796 - protein, 21 aa, unidentified
  source 1..21: note = methanogen bacteria
EIVYLFAYAGTSIRLAPQLVA

SEQ ID NO: 60797 - protein, 10 aa, unidentified
  source 1..10: note = methanogen bacteria
MTFFLQTFPG

SEQ ID NO: 60798 - protein, 11 aa, unidentified
  source 1..11: note = methanogen bacteria
SLETLLTNHSL

SEQ ID NO: 60799 - protein, 12 aa, unidentified
  source 1..12: note = methanogen bacteria
STILLGLTGVGF

SEQ ID NO: 60800 - protein, 17 aa, unidentified
  source 1..17: note = methanogen bacteria
LIYLQAFILNSQVCVVK

SEQ ID NO: 60801 - protein, 14 aa, unidentified
  source 1..14: note = methanogen bacteria
IISILFGEAYHNSI

SEQ ID NO: 60802 - protein, 15 aa, unidentified
  source 1..15: note = methanogen bacteria
LPSIEQSFNLTSRES

SEQ ID NO: 60803 - protein, 12 aa, unidentified
  source 1..12: note = methanogen bacteria
SLVILSMGLNDQ

SEQ ID NO: 60804 - protein, 13 aa, unidentified
  source 1..13: note = methanogen bacteria
VSDPFIKDTILAN

SEQ ID NO: 60805 - protein, 42 aa, unidentified
  source 1..42: note = methanogen bacteria
IQPGAGLNMAASQTSIASNTTITETILDMIPDNPFYALANGD

SEQ ID NO: 60806 - protein, 12 aa, unidentified
  source 1..12: note = methanogen bacteria
AAQAYGIDLGTS

SEQ ID NO: 60807 - protein, 10 aa, unidentified
  source 1..10: note = methanogen bacteria
VFNSVGLPAD

SEQ ID NO: 60808 - protein, 13 aa, unidentified
  source 1..13: note = methanogen bacteria
VKDPFIKDIVLID

SEQ ID NO: 60809 - protein, 43 aa, unidentified
  source 1..43: note = methanogen bacteria
IKPGEGLNMAGLAQANLTTAQSMADTVINIIPDNPINSLASGD

SEQ ID NO: 60810 - protein, 12 aa, unidentified
  source 1..12: note = methanogen bacteria
AAQAYGIDLGTS

SEQ ID NO: 60811 - protein, 10 aa, unidentified
  source 1..10: note = methanogen bacteria
VTDPFIKNIV

SEQ ID NO: 60812 - protein, 44 aa, unidentified
  source 1..44: note = methanogen bacteria
IQPGIGLNMAANSTASSQVAVNQTVADTLLNIIPDNPINSLANG

SEQ ID NO: 60813 - protein, 11 aa, unidentified
  source 1..11: note = methanogen bacteria
TAQAFGIDLGL

SEQ ID NO: 60814 - protein, 77 aa, unidentified
  source 1..77: note = methanogen bacteria
IFYLDNDTGYYSEYFNDTEDLIFTIYRNFTDNGILYSKGYNFKNLKEIAEVFPLMLNNSYSLDIDITKNLYVNDIDS

SEQ ID NO: 60815 - protein, 51 aa, unidentified
  source 1..51: note = methanogen bacteria
ESCLEPVMKYAKQDGLENIKTKVLTINLKKGMTIDCKNTIKPDSLDSMYSM

SEQ ID NO: 60816 - protein, 11 aa, unidentified
  source 1..11: note = methanogen bacteria
VDNPFIKNVIL

SEQ ID NO: 60817 - protein, 43 aa, unidentified
  source 1..43: note = methanogen bacteria
FKPGLGLNMASVAQSSSVVMNQTMTDTILNIIPDNPINSLANG

SEQ ID NO: 60818 - protein, 11 aa, unidentified
  source 1..11: note = methanogen bacteria
AQAYGMDLGTS

SEQ ID NO: 60819 - protein, 14 aa, unidentified
  source 1..14: note = methanogen bacteria
FVSDQFIKDVILLN

SEQ ID NO: 60820 - protein, 42 aa, unidentified
  source 1..42: note = methanogen bacteria
IKPGAGLNMVGVAQANVTTNASASNTVLNMIPDNPFNSLANG

SEQ ID NO: 60821 - protein, 10 aa, unidentified
  source 1..10: note = methanogen bacteria
AQAYGMDLGL

SEQ ID NO: 60822 - protein, 10 aa, unidentified
  source 1..10: note = methanogen bacteria
VFTSVGLPVD

SEQ ID NO: 60823 - protein, 10 aa, unidentified
  source 1..10: note = methanogen bacteria
VSDSFIKQII

SEQ ID NO: 60824 - protein, 43 aa, unidentified
  source 1..43: note = methanogen bacteria
IKPGVGLNLAGVATSANVTVNQTVPDAILNMIPDNPIASLATG

SEQ ID NO: 60825 - protein, 11 aa, unidentified
  source 1..11: note = methanogen bacteria
AAQAYGMDLGI

SEQ ID NO: 60826 - protein, 10 aa, unidentified
  source 1..10: note = methanogen bacteria
VFSSVGLPVD

SEQ ID NO: 60827 - protein, 13 aa, unidentified
  source 1..13: note = methanogen bacteria
VTDPFIKNIILMD

SEQ ID NO: 60828 - protein, 44 aa, unidentified
  source 1..44: note = methanogen bacteria
IKPGVGLHMASLIEQSNVTVNQTMTDTLLNMIPENPINSLASGD

SEQ ID NO: 60829 - protein, 12 aa, unidentified
  source 1..12: note = methanogen bacteria
AAQAYGIDLTTS

SEQ ID NO: 60830 - protein, 13 aa, unidentified
  source 1..13: note = methanogen bacteria
VHDHFIKNIVLMD

SEQ ID NO: 60831 - protein, 43 aa, unidentified
  source 1..43: note = methanogen bacteria
LKPGLGLNMAAAAQTSNVTINQTMTDTILNIIPENPLNALANG

SEQ ID NO: 60832 - protein, 11 aa, unidentified
  source 1..11: note = methanogen bacteria
AQAYGIDLGTS

SEQ ID NO: 60833 - protein, 11 aa, unidentified
  source 1..11: note = methanogen bacteria
VTDPFIKNIVL

SEQ ID NO: 60834 - protein, 43 aa, unidentified
  source 1..43: note = methanogen bacteria
IQPGAGLNMVSNATTSNVALNQTTADTLLNIIPDNPINSLANG

SEQ ID NO: 60835 - protein, 11 aa, unidentified
  source 1..11: note = methanogen bacteria
TAQAFGIDLGL

SEQ ID NO: 60836 - protein, 13 aa, unidentified
  source 1..13: note = methanogen bacteria
VSDHFIKNIILID

SEQ ID NO: 60837 - protein, 43 aa, unidentified
  source 1..43: note = methanogen bacteria
IQPGAGLNMVASADVANVTLNQTMTDTILNMVPDNPFSSLASG

SEQ ID NO: 60838 - protein, 10 aa, unidentified
  source 1..10: note = methanogen bacteria
AQAYGMDLTM

SEQ ID NO: 60839 - protein, 13 aa, unidentified
  source 1..13: note = methanogen bacteria
VDNHFIKDVILMD

SEQ ID NO: 60840 - protein, 44 aa, unidentified
  source 1..44: note = methanogen bacteria
FKPGVGVNLSAITQTSNVTLNQTMTELVLDIIPENPLNALASSE

SEQ ID NO: 60841 - protein, 12 aa, unidentified
  source 1..12: note = methanogen bacteria
AQYCGMDLGTSA

SEQ ID NO: 60842 - protein, 11 aa, unidentified
  source 1..11: note = methanogen bacteria
TLVFTSIGIPL

SEQ ID NO: 60843 - protein, 18 aa, unidentified
  source 1..18: note = methanogen bacteria
VGGIPILKPSIRYLLKPA

SEQ ID NO: 60844 - protein, 87 aa, unidentified
  source 1..87: note = methanogen bacteria
RSLGEFTITSSTSPIYTLQSRADFTLHVLNLLDFIGGNFGITHGKLLASTIPGSDLGPRMMVGKLIAWRTEVTVTPTLIGQMVTDFG

SEQ ID NO: 60845 - protein, 26 aa, unidentified
  source 1..26: note = methanogen bacteria
QLMFEMPTVSLILPGVDIPGSPLYIP

SEQ ID NO: 60846 - protein, 13 aa, unidentified
  source 1..13: note = methanogen bacteria
VDNHFIIDIVLMD

SEQ ID NO: 60847 - protein, 44 aa, unidentified
  source 1..44: note = methanogen bacteria
FKPGVGVNFTAITQTSNVTLNQTMTDLVLDIIPENPLNALASTE

SEQ ID NO: 60848 - protein, 13 aa, unidentified
  source 1..13: note = methanogen bacteria
AAQYCGMDLGTSA

SEQ ID NO: 60849 - protein, 12 aa, unidentified
  source 1..12: note = methanogen bacteria
TLVFTSVGIPLE

SEQ ID NO: 60850 - protein, 13 aa, unidentified
  source 1..13: note = methanogen bacteria
VDNYFIENVILMD

SEQ ID NO: 60851 - protein, 44 aa, unidentified
  source 1..44: note = methanogen bacteria
FKPGVGVNLSAINQTSHVTLNQTMTDLVLNIIPENPLNALASSE

SEQ ID NO: 60852 - protein, 13 aa, unidentified
  source 1..13: note = methanogen bacteria
AAQYCGMDLGTSA

SEQ ID NO: 60853 - protein, 12 aa, unidentified
  source 1..12: note = methanogen bacteria
TLVFSSVGIPLE

SEQ ID NO: 60854 - protein, 11 aa, unidentified
  source 1..11: note = methanogen bacteria
VTDPFIKDIVL

SEQ ID NO: 60855 - protein, 43 aa, unidentified
  source 1..43: note = methanogen bacteria
IQPGAGLHMSDIGGASNLTMNQTMTDTILNLVPDNPFSSLATG

SEQ ID NO: 60856 - protein, 11 aa, unidentified
  source 1..11: note = methanogen bacteria
AQAYGIDLGTS

SEQ ID NO: 60857 - protein, 11 aa, unidentified
  source 1..11: note = methanogen bacteria
NTTAGADILSI

SEQ ID NO: 60858 - protein, 10 aa, unidentified
  source 1..10: note = methanogen bacteria
EIGLDLTAVP

SEQ ID NO: 60859 - protein, 29 aa, unidentified
  source 1..29: note = methanogen bacteria
GMVDFAPVWSAHLIEMPHFYMPFVHYNLN

SEQ ID NO: 60860 - protein, 16 aa, unidentified
  source 1..16: note = methanogen bacteria
AALSFAYGDLSISVSG

SEQ ID NO: 60861 - protein, 13 aa, unidentified
  source 1..13: note = methanogen bacteria
ITDPFIKDIVLMN

SEQ ID NO: 60862 - protein, 44 aa, unidentified
  source 1..44: note = methanogen bacteria
VQPGAGLHMAGIADTANVTANQTMTDTILNMVPDNPFSSLASGD

SEQ ID NO: 60863 - protein, 11 aa, unidentified
  source 1..11: note = methanogen bacteria
AQAYGIDLGTS

SEQ ID NO: 60864 - protein, 11 aa, unidentified
  source 1..11: note = methanogen bacteria
NTTAGADILSI

SEQ ID NO: 60865 - protein, 10 aa, unidentified
  source 1..10: note = methanogen bacteria
EIGLDLVTVP

SEQ ID NO: 60866 - protein, 29 aa, unidentified
  source 1..29: note = methanogen bacteria
GMVDFAPVWSAHLIEVPKFYLPFMNYNLN

SEQ ID NO: 60867 - protein, 15 aa, unidentified
  source 1..15: note = methanogen bacteria
AALSFVYGDLSISIS

SEQ ID NO: 60868 - protein, 13 aa, unidentified
  source 1..13: note = methanogen bacteria
VTDSYIKKIILMD

SEQ ID NO: 60869 - protein, 44 aa, unidentified
  source 1..44: note = methanogen bacteria
IQPGAGLNMAGVAQSSNVTVNQTMTDTVLSLVPDNPFSSLATGD

SEQ ID NO: 60870 - protein, 11 aa, unidentified
  source 1..11: note = methanogen bacteria
AQAYGIDLGTS

SEQ ID NO: 60871 - protein, 13 aa, unidentified
  source 1..13: note = methanogen bacteria
VKDPFIKNTILMD

SEQ ID NO: 60872 - protein, 44 aa, unidentified
  source 1..44: note = methanogen bacteria
LQPGLGLTFTNSESVNNATINQTLADTLLSTIPENVIESLAKGE

SEQ ID NO: 60873 - protein, 11 aa, unidentified
  source 1..11: note = methanogen bacteria
TVMASVGLPLA

SEQ ID NO: 60874 - protein, 26 aa, unidentified
  source 1..26: note = methanogen bacteria
QLMFETPTVSLILPGVDIPGSPIYIP

SEQ ID NO: 60875 - protein, 19 aa, unidentified
  source 1..19: note = methanogen bacteria
SVGGIPLLKPSIRYLLKPA

SEQ ID NO: 60876 - protein, 88 aa, unidentified
  source 1..88: note = methanogen bacteria
RSIGELTVSSAIDPFYTLKNRADFTLHVLNLLDFLGGNFGATHGQILASSIPGSELGPRMMVGKLIAWRSEVTVTPTLIGQMVADYGK

SEQ ID NO: 60877 - protein, 11 aa, unidentified
  source 1..11: note = methanogen bacteria
NTTAGADILSI

SEQ ID NO: 60878 - protein, 10 aa, unidentified
  source 1..10: note = methanogen bacteria
EIGLDLTVVP

SEQ ID NO: 60879 - protein, 29 aa, unidentified
  source 1..29: note = methanogen bacteria
GMVDFAPVWSAHVIEIPKFYLPIMHYDLN

SEQ ID NO: 60880 - protein, 16 aa, unidentified
  source 1..16: note = methanogen bacteria
AALSLAYGDLSISISG

SEQ ID NO: 60881 - protein, 11 aa, unidentified
  source 1..11: note = methanogen bacteria
NTTAGADILSI

SEQ ID NO: 60882 - protein, 10 aa, unidentified
  source 1..10: note = methanogen bacteria
SIGLDLEVVP

SEQ ID NO: 60883 - protein, 29 aa, unidentified
  source 1..29: note = methanogen bacteria
GMVDFAPAMAAHVVEVPKFYLPFVNYNLN

SEQ ID NO: 60884 - protein, 15 aa, unidentified
  source 1..15: note = methanogen bacteria
AALSLVYGDLSISIS

SEQ ID NO: 60885 - protein, 11 aa, unidentified
  source 1..11: note = methanogen bacteria
VHNPFIKDVIL

SEQ ID NO: 60886 - protein, 43 aa, unidentified
  source 1..43: note = methanogen bacteria
IKPGLGLDMSHVAQTADVAINQTMADTVLNIVPDNPFNSLANG

SEQ ID NO: 60887 - protein, 11 aa, unidentified
  source 1..11: note = methanogen bacteria
AQAYGIDLGTS

SEQ ID NO: 60888 - protein, 13 aa, unidentified
  source 1..13: note = methanogen bacteria
VTDTFIKDIVLMN

SEQ ID NO: 60889 - protein, 35 aa, unidentified
  source 1..35: note = methanogen bacteria
IQPGLGLNMGGITETANLTVNQTMTDTILNIIPDN

SEQ ID NO: 60890 - protein, 11 aa, unidentified
  source 1..11: note = methanogen bacteria
AQAYGIDLGTS

SEQ ID NO: 60891 - protein, 13 aa, unidentified
  source 1..13: note = methanogen bacteria
VTDPYIKNIVLMD

SEQ ID NO: 60892 - protein, 44 aa, unidentified
  source 1..44: note = methanogen bacteria
LQPGAGLHMTGIAEASNVTINQTMTDTILGMIPDNPFSSLASGD

SEQ ID NO: 60893 - protein, 11 aa, unidentified
  source 1..11: note = methanogen bacteria
AQAYGIDLGTS

SEQ ID NO: 60894 - protein, 19 aa, unidentified
  source 1..19: note = methanogen bacteria
YVKGIPLFTPSLRYKLIAA

SEQ ID NO: 60895 - protein, 87 aa, unidentified
  source 1..87: note = methanogen bacteria
RSVNEMLITTSTNPFYTLQSRADFTIHVLDLLNALSGNLGLMHGGFILKSIPGSDYGPRMMVGKLISWRSGVTITPTIIGPMLIDFG

SEQ ID NO: 60896 - protein, 17 aa, unidentified
  source 1..17: note = methanogen bacteria
YIGMIQNVFTTNLSAES

SEQ ID NO: 60897 - protein, 15 aa, unidentified
  source 1..15: note = methanogen bacteria
FTLPEAEGQRGAHST

SEQ ID NO: 60898 - protein, 96 aa, unidentified
  source 1..96: note = methanogen bacteria
RGELLSGNADVSSILSSLAESGFALDTAYSAYYTSESFVYIIDKFTLFEIIALFCEFVKSIFLGANPDVLLTSISAQYTIHYGGGILPFYFFFYLG

SEQ ID NO: 60899 - protein, 10 aa, unidentified
  source 1..10: note = methanogen bacteria
SQLNMEATFA

SEQ ID NO: 60900 - protein, 16 aa, unidentified
  source 1..16: note = methanogen bacteria
IYLMQIDENVDIILAY

SEQ ID NO: 60901 - protein, 10 aa, unidentified
  source 1..10: note = methanogen bacteria
FLTVGQVGLV

SEQ ID NO: 60902 - protein, 16 aa, unidentified
  source 1..16: note = methanogen bacteria
LIYASFQIINMETPIF

SEQ ID NO: 60903 - protein, 18 aa, unidentified
  source 1..18: note = methanogen bacteria
SVGGVPILKPSIRYLLKP

SEQ ID NO: 60904 - protein, 87 aa, unidentified
  source 1..87: note = methanogen bacteria
RSIHELTISNAIDPFYTLKSRADFTLHVLDLLDIIGGNFGVTHGKLLASAIPGSELGPRMMIGKLIAWRTEVTITPTLIGQMVADFG

SEQ ID NO: 60905 - protein, 13 aa, unidentified
  source 1..13: note = methanogen bacteria
IHDPFIKDVLLMN

SEQ ID NO: 60906 - protein, 43 aa, unidentified
  source 1..43: note = methanogen bacteria
IQPGTGLTLTDVAPSNVTINQSMTNTLLNAIPDNPINSLASGD

SEQ ID NO: 60907 - protein, 11 aa, unidentified
  source 1..11: note = methanogen bacteria
AQVYGVDLGTS

SEQ ID NO: 60908 - protein, 22 aa, unidentified
  source 1..22: note = methanogen bacteria
LNPAYHIPEFTTPGLYLTDKPI

SEQ ID NO: 60909 - protein, 31 aa, unidentified
  source 1..31: note = methanogen bacteria
AFFHGQPQLAAMNAATPTVAVHEMATKLLGP

SEQ ID NO: 60910 - protein, 11 aa, unidentified
  source 1..11: note = methanogen bacteria
VAGLGADALAA

SEQ ID NO: 60911 - protein, 16 aa, unidentified
  source 1..16: note = methanogen bacteria
LEIMGAGDSISYAASY

SEQ ID NO: 60912 - protein, 12 aa, unidentified
  source 1..12: note = methanogen bacteria
VIVAGTSAVAVY

SEQ ID NO: 60913 - protein, 21 aa, unidentified
  source 1..21: note = methanogen bacteria
QIATVFSYTSASSSLAPQIAT

SEQ ID NO: 60914 - protein, 11 aa, unidentified
  source 1..11: note = methanogen bacteria
FLIGSFNLAAI

SEQ ID NO: 60915 - protein, 25 aa, unidentified
  source 1..25: note = methanogen bacteria
DPIVGLLCSANMEVSSQLFPLVKDF

SEQ ID NO: 60916 - protein, 17 aa, unidentified
  source 1..17: note = methanogen bacteria
LFLFSINDPAYIPVATD

SEQ ID NO: 60917 - protein, 10 aa, unidentified
  source 1..10: note = methanogen bacteria
MSVIYSTLTS

SEQ ID NO: 60918 - protein, 18 aa, unidentified
  source 1..18: note = methanogen bacteria
SVGGIPLIKPSIRYLLKP

SEQ ID NO: 60919 - protein, 87 aa, unidentified
  source 1..87: note = methanogen bacteria
RSLGEMTITSSTSPFYTLQSRADFTLHVLNLLDFIGGNFGLTHGHMLASSIPGSDLGPRMMVGKLIAWRTEVTVTPTLIGQMVVDFG

SEQ ID NO: 60920 - protein, 18 aa, unidentified
  source 1..18: note = methanogen bacteria
MSFIYSKLTSFLNIINDE

SEQ ID NO: 60921 - protein, 19 aa, unidentified
  source 1..19: note = methanogen bacteria
SVGGIPILKPSIRYLLKPA

SEQ ID NO: 60922 - protein, 88 aa, unidentified
  source 1..88: note = methanogen bacteria
RSIHELTVSSAIDPFYTLKSRADFTLHVLNLLDIIGGNFGTTHGQLIASTIPGSELGPRMMVGKLIAWRTEVTVTPTLIGQMVADFGK

SEQ ID NO: 60923 - protein, 17 aa, unidentified
  source 1..17: note = methanogen bacteria
MSAIYSKVSSFLNFVCD

SEQ ID NO: 60924 - protein, 17 aa, unidentified
  source 1..17: note = methanogen bacteria
VGGIPILKPSLRYLLKP

SEQ ID NO: 60925 - protein, 88 aa, unidentified
  source 1..88: note = methanogen bacteria
YRSINEYTISSAIDPFYTLRSRADFTLHVLNLLDGIGGNFGLTHGKLLASAIPGSETGPRMMVGRLISWRTEVTVTPSLIGQMVVDFG

SEQ ID NO: 60926 - protein, 12 aa, unidentified
  source 1..12: note = methanogen bacteria
STLTSLINKISD

SEQ ID NO: 60927 - protein, 18 aa, unidentified
  source 1..18: note = methanogen bacteria
SVGGIPLLKPSIRYLLKP

SEQ ID NO: 60928 - protein, 87 aa, unidentified
  source 1..87: note = methanogen bacteria
RSLGEMTITSSTSPIYSLQSRADFTLHVLNLLDFIGGNFGLTHGKMLASSIPGSDLGPRMMVGKLIAWRTEVTVTPTLIGQMVVDFG

SEQ ID NO: 60929 - protein, 18 aa, unidentified
  source 1..18: note = methanogen bacteria
MSFIYSKLTSLLNIINDE

SEQ ID NO: 60930 - protein, 19 aa, unidentified
  source 1..19: note = methanogen bacteria
SVGGIPILKPSIRYLLKPA

SEQ ID NO: 60931 - protein, 88 aa, unidentified
  source 1..88: note = methanogen bacteria
RSINELTVSSAIDPFYTLKSRADFTLHVLNLLDIIGGNFGATHGQILASSIPGSELGPRMMVGKLIAWRTEVTITPTLIGQMVADFGK

SEQ ID NO: 60932 - protein, 17 aa, unidentified
  source 1..17: note = methanogen bacteria
MSLIYSTLTSIINKISD

SEQ ID NO: 60933 - protein, 17 aa, unidentified
  source 1..17: note = methanogen bacteria
VGGIPLLKPSIRYLLKP

SEQ ID NO: 60934 - protein, 87 aa, unidentified
  source 1..87: note = methanogen bacteria
RSLGELTITSSTNPFYTLQSRADFTLHVLDLLDFIGGNFGLTHGKLLASAIPGSELGPRMMVGKLIAWRTEVTVTPTLIGQMVVDFG

SEQ ID NO: 60935 - protein, 17 aa, unidentified
  source 1..17: note = methanogen bacteria
MSVIYSTLTSLINRISD

SEQ ID NO: 60936 - protein, 19 aa, unidentified
  source 1..19: note = methanogen bacteria
SVGGIPLLKPSIRYLLKPA

SEQ ID NO: 60937 - protein, 87 aa, unidentified
  source 1..87: note = methanogen bacteria
RSLGEMTITSSTSPIYSLQSRADFTLHVLNLLDFIGGNFGMTHGHMLASSIPGSDLGPRMMVGKLIAWRTEVTVTPTLIGQMVVDFG

SEQ ID NO: 60938 - protein, 17 aa, unidentified
  source 1..17: note = methanogen bacteria
VGGIPLLKPSIRYLLKP

SEQ ID NO: 60939 - protein, 87 aa, unidentified
  source 1..87: note = methanogen bacteria
RSLGELTITSSTSPIYTLQSRADFTLHVLNLLDFIGGNFGLTHGHMLASSIPGSDLGPRMMVGKLIAWRTEVTVTPTLIGQMVVDFG

SEQ ID NO: 60940 - protein, 26 aa, unidentified
  source 1..26: note = methanogen bacteria
FNVITIDGHGSKITPVNGFNNSFDWA

SEQ ID NO: 60941 - protein, 40 aa, unidentified
  source 1..40: note = methanogen bacteria
NVFIVSNLVLEGYETPVYNSGICIFNNVTFKDNNGTPCGI

SEQ ID NO: 60942 - protein, 15 aa, unidentified
  source 1..15: note = methanogen bacteria
YHCVCNNCTFTRYQA

SEQ ID NO: 60943 - protein, 20 aa, unidentified
  source 1..20: note = methanogen bacteria
YNEGGLILNNVSFKDLFVNN

SEQ ID NO: 60944 - protein, 25 aa, unidentified
  source 1..25: note = methanogen bacteria
EYIFDYCKDYFSYKVDFLGEKIDII

SEQ ID NO: 60945 - protein, 47 aa, unidentified
  source 1..47: note = methanogen bacteria
RIYSLKNISAIYDIFPVLLKGNYDVNASLSKNLYISNQVDYDNALNY

SEQ ID NO: 60946 - protein, 26 aa, unidentified
  source 1..26: note = methanogen bacteria
DSFNKVYEFIKTFGYSGYVLKVLNIN

SEQ ID NO: 60947 - protein, 65 aa, unidentified
  source 1..65: note = methanogen bacteria
NGNGSLINGFSAKSDENKWLYIYSTNSIVTINNLMITEFNQAIYNLGCACILNNVTLDNNKMDYY

SEQ ID NO: 60948 - protein, 15 aa, unidentified
  source 1..15: note = methanogen bacteria
LPSIEQTLHLTSRES

SEQ ID NO: 60949 - protein, 12 aa, unidentified
  source 1..12: note = methanogen bacteria
DSSNFINSLFSM

SEQ ID NO: 60950 - protein, 13 aa, unidentified
  source 1..13: note = methanogen bacteria
SLVILSMGLNDQL

SEQ ID NO: 60951 - protein, 24 aa, unidentified
  source 1..24: note = methanogen bacteria
LSLSWVLVLSTKQNHMKEGQARQL

SEQ ID NO: 60952 - protein, 17 aa, unidentified
  source 1..17: note = methanogen bacteria
VRGIPLLKPSIRYLLKP

SEQ ID NO: 60953 - protein, 87 aa, unidentified
  source 1..87: note = methanogen bacteria
RSLGEMTITASTSPIYSLQSRADFTLHVLNLLDFIGGNFGITHGQLLASSIPGSDLGPRMMVGKLIAWRSEVTITPTLIGQMVIDFG

SEQ ID NO: 60954 - protein, 11 aa, unidentified
  source 1..11: note = methanogen bacteria
MSVIYSTLTSI

SEQ ID NO: 60955 - protein, 17 aa, unidentified
  source 1..17: note = methanogen bacteria
VGGIPLLKPSIRYLLKP

SEQ ID NO: 60956 - protein, 87 aa, unidentified
  source 1..87: note = methanogen bacteria
RSLGEMTITSSTSPLYSLQSRADFTLHVLNLLDFIGENFGLTHGHMLASSIPGSDLGPRMMVGKLISWRTEVTVTPTLIGQMVVDFG

SEQ ID NO: 60957 - protein, 14 aa, unidentified
  source 1..14: note = methanogen bacteria
MSVIYSTLTSLINK

SEQ ID NO: 60958 - protein, 17 aa, unidentified
  source 1..17: note = methanogen bacteria
VGGIPLLKPSIRYLLKP

SEQ ID NO: 60959 - protein, 87 aa, unidentified
  source 1..87: note = methanogen bacteria
RSLGEMTITSSTSPLYSLQSRADFTLHVLNLLDFIGGNFGLTHGHMLASSIPGSDLGPRMMVGKLISWRTEVTVTPTLIGQMVVDFG

SEQ ID NO: 60960 - protein, 10 aa, unidentified
  source 1..10: note = methanogen bacteria
TLIKSFFRRR

SEQ ID NO: 60961 - protein, 21 aa, unidentified
  source 1..21: note = methanogen bacteria
IGDTTLLGLLDMDFGNPENPS

SEQ ID NO: 60962 - protein, 10 aa, unidentified
  source 1..10: note = methanogen bacteria
TAGTSGGINI

SEQ ID NO: 60963 - protein, 10 aa, unidentified
  source 1..10: note = methanogen bacteria
VDLGSMSSAT

SEQ ID NO: 60964 - protein, 13 aa, unidentified
  source 1..13: note = methanogen bacteria
HLIVDGEPALSPE

SEQ ID NO: 60965 - protein, 15 aa, unidentified
  source 1..15: note = methanogen bacteria
IKLFNITNPQYIQIV

SEQ ID NO: 60966 - protein, 13 aa, unidentified
  source 1..13: note = methanogen bacteria
MSVIYSTLTSVIN

SEQ ID NO: 60967 - protein, 19 aa, unidentified
  source 1..19: note = methanogen bacteria
VRGIPLLKPSIRYLLKPAF

SEQ ID NO: 60968 - protein, 87 aa, unidentified
  source 1..87: note = methanogen bacteria
RSLGEMTITSSTSPLYSLQSRADFTLHVLNLLDFIGGNFGLTHGHMLASSIPGSDLGPRMMVGKLIAWRTEVTVTPTLIGQMVVDFG

SEQ ID NO: 60969 - protein, 13 aa, unidentified
  source 1..13: note = methanogen bacteria
DAIFGMPIHNWTF

SEQ ID NO: 60970 - protein, 13 aa, unidentified
  source 1..13: note = methanogen bacteria
IRYSSLGAVPIPG

SEQ ID NO: 60971 - protein, 17 aa, unidentified
  source 1..17: note = methanogen bacteria
MSVIYSTLTSVINRISD

SEQ ID NO: 60972 - protein, 19 aa, unidentified
  source 1..19: note = methanogen bacteria
VRGIPLLKPSIRYLLKPAL

SEQ ID NO: 60973 - protein, 87 aa, unidentified
  source 1..87: note = methanogen bacteria
RSLGEMTITSSTSPLYSLQSRADFTMHVLNLLDFIGGNFGLTHGHMLASSIPGSDLGPRMMVGKLIAWRTEVTVTPTLIGQMVVDFG

SEQ ID NO: 60974 - protein, 18 aa, unidentified
  source 1..18: note = methanogen bacteria
VGGIPILKPSIRYLLKPA

SEQ ID NO: 60975 - protein, 87 aa, unidentified
  source 1..87: note = methanogen bacteria
RSVKEFSITTATSPLSTLQNRADFTLHVLNLLDFLGGNFGLTHGKLLASAIPGSELGPRMMVGKLIAWRSEVTITPTLIGQMVIDFG

SEQ ID NO: 60976 - protein, 18 aa, unidentified
  source 1..18: note = methanogen bacteria
MSFIYSKLTSIINLINDE

SEQ ID NO: 60977 - protein, 19 aa, unidentified
  source 1..19: note = methanogen bacteria
SVGGIPILKPSIRYLLKPA

SEQ ID NO: 60978 - protein, 88 aa, unidentified
  source 1..88: note = methanogen bacteria
RSVNELTVSKAIDPFYTLKSRADFTLHVLNLLDVIGGNFGTTHGQILASSIPGSELGPRMMVGKLISWRTEVTITPTLIGQMVADFGK

SEQ ID NO: 60979 - protein, 18 aa, unidentified
  source 1..18: note = methanogen bacteria
MSVIYSTLTSLINKVSDE

SEQ ID NO: 60980 - protein, 18 aa, unidentified
  source 1..18: note = methanogen bacteria
SVGGIPLLKPSIRYLLKP

SEQ ID NO: 60981 - protein, 87 aa, unidentified; identical to SEQ ID NO: 55310
  source 1..87: note = methanogen bacteria

SEQ ID NO: 60982 - protein, 17 aa, unidentified
  source 1..17: note = methanogen bacteria
MSIIYSTLTSVINKISD

SEQ ID NO: 60983 - protein, 19 aa, unidentified
  source 1..19: note = methanogen bacteria
SVGGIPLLKPSIRYLLKPA

SEQ ID NO: 60984 - protein, 87 aa, unidentified
  source 1..87: note = methanogen bacteria
RSLGEMTITSSTSPIYSLQSRADFTLHVLNLLDFIGGNFGITHGKLLASSIPGSDLGPRMMVGKLIAWRTEVTVTPTLIGQMVVDFG

SEQ ID NO: 60985 - protein, 11 aa, unidentified
  source 1..11: note = methanogen bacteria
RLLKSFKDRVS

SEQ ID NO: 60986 - protein, 11 aa, unidentified
  source 1..11: note = methanogen bacteria
RLLKSFRDRVS

SEQ ID NO: 60987 - protein, 11 aa, unidentified
  source 1..11: note = methanogen bacteria
RLLKSFRDRVS

SEQ ID NO: 60988 - protein, 13 aa, unidentified
  source 1..13: note = methanogen bacteria
SYLTSVINRISDE

SEQ ID NO: 60989 - protein, 19 aa, unidentified
  source 1..19: note = methanogen bacteria
SVGGIPLLKPSIRYLLKPA

SEQ ID NO: 60990 - protein, 87 aa, unidentified
  source 1..87: note = methanogen bacteria
RSLGEMTITSSTSPLYTLQSRADFTLHVLNLLDFIGGNFGVTHGQMLAGAIPGSDLGPRMMVGKLIAWRTEVTVTPTLIGQMVADFG

SEQ ID NO: 60991 - protein, 12 aa, unidentified
  source 1..12: note = methanogen bacteria
MTFFLEAFPGLL

SEQ ID NO: 60992 - protein, 12 aa, unidentified
  source 1..12: note = methanogen bacteria
AVETLLTNPSLL

SEQ ID NO: 60993 - protein, 12 aa, unidentified
  source 1..12: note = methanogen bacteria
SYGLGVTGVGFD

SEQ ID NO: 60994 - protein, 11 aa, unidentified
  source 1..11: note = methanogen bacteria
TRLLDSFKGKI

SEQ ID NO: 60995 - protein, 41 aa, unidentified
  source 1..41: note = methanogen bacteria
FPVSIQLNTTYTSTATTNLWEVLSNIVITSISNPIELVSNG

SEQ ID NO: 60996 - protein, 11 aa, unidentified
  source 1..11: note = methanogen bacteria
CSLFGISSDIS

SEQ ID NO: 60997 - protein, 40 aa, unidentified
  source 1..40: note = methanogen bacteria
DNITARTGGAIYVEGSFDTSLIHNTKFTNNKAFTDNPDYG

SEQ ID NO: 60998 - protein, 24 aa, unidentified
  source 1..24: note = methanogen bacteria
VEGNASSIHIFNSDFINNTAKTHG

SEQ ID NO: 60999 - protein, 48 aa, unidentified
  source 1..48: note = methanogen bacteria
FMANDELNTFDGCIFYNNYAPYGGAVALGNTDYLVISESNFTNHIGAD

SEQ ID NO: 61000 - protein, 46 aa, unidentified
  source 1..46: note = methanogen bacteria
NLTNANIVDSLFENNSARAGIAVEEDATNNFFDSVTFVSNIAQTHG

SEQ ID NO: 61001 - protein, 19 aa, unidentified
  source 1..19: note = methanogen bacteria
EYNTFDGCIFYNNYAPYGG

SEQ ID NO: 61002 - protein, 18 aa, unidentified
  source 1..18: note = methanogen bacteria
NTYTVIDKSKFDSNYAPY

SEQ ID NO: 61003 - protein, 12 aa, unidentified
  source 1..12: note = methanogen bacteria
MTFFLETFPGLL

SEQ ID NO: 61004 - protein, 13 aa, unidentified
  source 1..13: note = methanogen bacteria
SSVETLLTNPSLL

SEQ ID NO: 61005 - protein, 12 aa, unidentified
  source 1..12: note = methanogen bacteria
LMFGTMGIGFDK

SEQ ID NO: 61006 - protein, 16 aa, unidentified
  source 1..16: note = methanogen bacteria
PLHYVSEYPKYYTYGA

SEQ ID NO: 61007 - protein, 12 aa, unidentified
  source 1..12: note = methanogen bacteria
VQIMNGFGLPAA

SEQ ID NO: 61008 - protein, 11 aa, unidentified
  source 1..11: note = methanogen bacteria
LLSEFPFNYDT

SEQ ID NO: 61009 - protein, 11 aa, unidentified
  source 1..11: note = methanogen bacteria
NTTVGEPVLSV

SEQ ID NO: 61010 - protein, 10 aa, unidentified
  source 1..10: note = methanogen bacteria
EIGLNLEVIP

SEQ ID NO: 61011 - protein, 30 aa, unidentified
  source 1..30: note = methanogen bacteria
GMVDFSGFLAANIFEVPEFYMPIVNYDFNA

SEQ ID NO: 61012 - protein, 15 aa, unidentified
  source 1..15: note = methanogen bacteria
ATLSIIQGNLSVSIS

SEQ ID NO: 61013 - protein, 12 aa, unidentified
  source 1..12: note = methanogen bacteria
MTFFLETFPGLL

SEQ ID NO: 61014 - protein, 13 aa, unidentified
  source 1..13: note = methanogen bacteria
SALETLLTNASLL

SEQ ID NO: 61015 - protein, 12 aa, unidentified
  source 1..12: note = methanogen bacteria
FALGVVGVGFDK

SEQ ID NO: 61016 - protein, 10 aa, unidentified
  source 1..10: note = methanogen bacteria
SRLLKSFQNR

SEQ ID NO: 61017 - protein, 12 aa, unidentified
  source 1..12: note = methanogen bacteria
MTFFLETFPGLL

SEQ ID NO: 61018 - protein, 12 aa, unidentified
  source 1..12: note = methanogen bacteria
AVETLLTNPSLL

SEQ ID NO: 61019 - protein, 12 aa, unidentified
  source 1..12: note = methanogen bacteria
YALGVVGVGFDK

SEQ ID NO: 61020 - protein, 13 aa, unidentified
  source 1..13: note = methanogen bacteria
ILSPAATGYEFDE

SEQ ID NO: 61021 - protein, 18 aa, unidentified
  source 1..18: note = methanogen bacteria
GIIVHGTDSALAPGDLSD

SEQ ID NO: 61022 - protein, 41 aa, unidentified
  source 1..41: note = methanogen bacteria
AGIGSDVGTIPDGDLLTGLTEPDFGLFGKVFTDFEMFPSSM

SEQ ID NO: 61023 - protein, 11 aa, unidentified
  source 1..11: note = methanogen bacteria
RLLKSFRDRVS

SEQ ID NO: 61024 - protein, 31 aa, unidentified
  source 1..31: note = methanogen bacteria
IRVPGTENVSSNLGFLELLNSMGGGAFKRFS

SEQ ID NO: 61025 - protein, 16 aa, unidentified
  source 1..16: note = methanogen bacteria
VTAFKSLVTFSTAQVA

SEQ ID NO: 61026 - protein, 18 aa, unidentified
  source 1..18: note = methanogen bacteria
VNKEGFSLFVQKYISYTT

SEQ ID NO: 61027 - protein, 19 aa, unidentified
  source 1..19: note = methanogen bacteria
SVGGIPLLKPSIRYLLKPA

SEQ ID NO: 61028 - protein, 87 aa, unidentified
  source 1..87: note = methanogen bacteria
RSLGEMTITSSTSPFYTLQSRADFTLHVLNLLDFIGGNFGLTHGHLLASSIPGSDLGPRMMVGKLIAWRTEVTVTPTLIGQMVVDFG

SEQ ID NO: 61029 - protein, 17 aa, unidentified
  source 1..17: note = methanogen bacteria
QGLNADNLVYDMVKENA

SEQ ID NO: 61030 - protein, 10 aa, unidentified
  source 1..10: note = methanogen bacteria
NTDDAAKWNA

SEQ ID NO: 61031 - protein, 10 aa, unidentified
  source 1..10: note = methanogen bacteria
LLKSFQNRSR

SEQ ID NO: 61032 - protein, 12 aa, unidentified
  source 1..12: note = methanogen bacteria
PTISSDLSLNVE

SEQ ID NO: 61033 - protein, 16 aa, unidentified
  source 1..16: note = methanogen bacteria
KNKKHPVLQNALGYDA

SEQ ID NO: 61034 - protein, 17 aa, unidentified
  source 1..17: note = methanogen bacteria
ILGTSNTLESNIPLFII

SEQ ID NO: 61035 - protein, 23 aa, unidentified
  source 1..23: note = methanogen bacteria
LGLGSSGFATLASSVAKSSQSLG

SEQ ID NO: 61036 - protein, 18 aa, unidentified
  source 1..18: note = methanogen bacteria
ANIGMNLNIAQAILLANL

SEQ ID NO: 61037 - protein, 12 aa, unidentified
  source 1..12: note = methanogen bacteria
MTFFLETFPGLL

SEQ ID NO: 61038 - protein, 12 aa, unidentified
  source 1..12: note = methanogen bacteria
AVETLLTNPSLL

SEQ ID NO: 61039 - protein, 12 aa, unidentified
  source 1..12: note = methanogen bacteria
YALGVVGVGFDK

SEQ ID NO: 61040 - protein, 14 aa, unidentified
  source 1..14: note = methanogen bacteria
YVDNHFIKDFILMN

SEQ ID NO: 61041 - protein, 43 aa, unidentified
  source 1..43: note = methanogen bacteria
IRPGVGLNIPASESVSNSTSMTLSNLILNIFPENPLNALTNGE

SEQ ID NO: 61042 - protein, 12 aa, unidentified
  source 1..12: note = methanogen bacteria
AQAYGIDFGATA

SEQ ID NO: 61043 - protein, 12 aa, unidentified
  source 1..12: note = methanogen bacteria
SMILSMVGLPIA

SEQ ID NO: 61044 - protein, 12 aa, unidentified
  source 1..12: note = methanogen bacteria
MTFFLEAFPGLL

SEQ ID NO: 61045 - protein, 13 aa, unidentified
  source 1..13: note = methanogen bacteria
SSVETLLTNPSLL

SEQ ID NO: 61046 - protein, 12 aa, unidentified
  source 1..12: note = methanogen bacteria
YIFNSIGVGFDK

SEQ ID NO: 61047 - protein, 12 aa, unidentified
  source 1..12: note = methanogen bacteria
MTFFLETFPGLL

SEQ ID NO: 61048 - protein, 12 aa, unidentified
  source 1..12: note = methanogen bacteria
AVETLLTNPSLL

SEQ ID NO: 61049 - protein, 12 aa, unidentified
  source 1..12: note = methanogen bacteria
YALGVVGVGFDK

SEQ ID NO: 61050 - protein, 13 aa, unidentified
  source 1..13: note = methanogen bacteria
VAPIRSSLNISAE

SEQ ID NO: 61051 - protein, 12 aa, unidentified
  source 1..12: note = methanogen bacteria
TYLADERGLTIV

SEQ ID NO: 61052 - protein, 17 aa, unidentified
  source 1..17: note = methanogen bacteria
LFLFNITNPSDIPIVTE

SEQ ID NO: 61053 - protein, 32 aa, unidentified; identical to SEQ ID NO: 56785
  source 1..32: note = methanogen bacteria

SEQ ID NO: 61054 - protein, 33 aa, unidentified; identical to SEQ ID NO: 56786
  source 1..33: note = methanogen bacteria

SEQ ID NO: 61055 - protein, 35 aa, unidentified; identical to SEQ ID NO: 56787
  source 1..35: note = methanogen bacteria

SEQ ID NO: 61056 - protein, 17 aa, unidentified
  source 1..17: note = methanogen bacteria
WTRPIECIIRCGFHHKQ

SEQ ID NO: 61057 - protein, 13 aa, unidentified
  source 1..13: note = methanogen bacteria
VDDPFIKNFILMD

SEQ ID NO: 61058 - protein, 43 aa, unidentified
  source 1..43: note = methanogen bacteria
VQPGAGLNLPASETVPNSVNMTLTDTILNIFPENPVHALINGD

SEQ ID NO: 61059 - protein, 10 aa, unidentified
  source 1..10: note = methanogen bacteria
AQAYGIDFGL

SEQ ID NO: 61060 - protein, 12 aa, unidentified
  source 1..12: note = methanogen bacteria
SMILSIVGLPIG

SEQ ID NO: 61061 - protein, 14 aa, unidentified
  source 1..14: note = methanogen bacteria
YVNDPFIKDFILMD

SEQ ID NO: 61062 - protein, 43 aa, unidentified
  source 1..43: note = methanogen bacteria
IRPGAGLNIPASDSVSSSVSMTLSDLILNIFPENPLNALTNGE

SEQ ID NO: 61063 - protein, 11 aa, unidentified
  source 1..11: note = methanogen bacteria
AQAYGIDFGTT

SEQ ID NO: 61064 - protein, 12 aa, unidentified
  source 1..12: note = methanogen bacteria
SMILSIIGLPIA

SEQ ID NO: 61065 - protein, 12 aa, unidentified
  source 1..12: note = methanogen bacteria
MTFFLETFPGLL

SEQ ID NO: 61066 - protein, 12 aa, unidentified
  source 1..12: note = methanogen bacteria
AVETLLSNPSLL

SEQ ID NO: 61067 - protein, 11 aa, unidentified
  source 1..11: note = methanogen bacteria
VFGVTGVGFEK

SEQ ID NO: 61068 - protein, 12 aa, unidentified
  source 1..12: note = methanogen bacteria
MTFFLETFPGLL

SEQ ID NO: 61069 - protein, 13 aa, unidentified
  source 1..13: note = methanogen bacteria
SSVETLLTNPSLL

SEQ ID NO: 61070 - protein, 12 aa, unidentified
  source 1..12: note = methanogen bacteria
LMFGTIGVGFNV

SEQ ID NO: 61071 - protein, 42 aa, unidentified
  source 1..42: note = methanogen bacteria
FPVSIHLSSISNITPPSGFEEIVSNMLLKIFSNPLKALVEGE

SEQ ID NO: 61072 - protein, 10 aa, unidentified
  source 1..10: note = methanogen bacteria
CHTLGISVSL

SEQ ID NO: 61073 - protein, 11 aa, unidentified
  source 1..11: note = methanogen bacteria
CSLFGISSDIS

SEQ ID NO: 61074 - protein, 12 aa, unidentified
  source 1..12: note = methanogen bacteria
MTFFLETFPGLL

SEQ ID NO: 61075 - protein, 13 aa, unidentified
  source 1..13: note = methanogen bacteria
SSVETLLTNPSLL

SEQ ID NO: 61076 - protein, 12 aa, unidentified
  source 1..12: note = methanogen bacteria
VLFKVAGVGFDK

SEQ ID NO: 61077 - protein, 12 aa, unidentified
  source 1..12: note = methanogen bacteria
MTFFLETFPGLL

SEQ ID NO: 61078 - protein, 13 aa, unidentified
  source 1..13: note = methanogen bacteria
SSLETLLTNPSLL

SEQ ID NO: 61079 - protein, 12 aa, unidentified
  source 1..12: note = methanogen bacteria
VVLGTVGVGFDK

SEQ ID NO: 61080 - protein, 42 aa, unidentified
  source 1..42: note = methanogen bacteria
FPVSMHLTQAGKVTAPGGLGEVISNMLLNIFTNPLQSLSQGD

SEQ ID NO: 61081 - protein, 11 aa, unidentified
  source 1..11: note = methanogen bacteria
VCHTLGISVDL

SEQ ID NO: 61082 - protein, 11 aa, unidentified
  source 1..11: note = methanogen bacteria
CSLFGIPADIS

SEQ ID NO: 61083 - protein, 61 aa, unidentified
  source 1..61: note = methanogen bacteria
IFEANTAYNGKGGAIFTNMFDADVNNATFNGNRAGDGATISDDGGAIYIKNKNNVTFKFCI

SEQ ID NO: 61084 - protein, 10 aa, unidentified
  source 1..10: note = methanogen bacteria
MTFFLEAFPG

SEQ ID NO: 61085 - protein, 13 aa, unidentified
  source 1..13: note = methanogen bacteria
SSVETLLTNPSLL

SEQ ID NO: 61086 - protein, 11 aa, unidentified
  source 1..11: note = methanogen bacteria
SIILKTAGVGF

SEQ ID NO: 61087 - protein, 44 aa, unidentified
  source 1..44: note = methanogen bacteria
FPVSVPLTASVDPSSSGAPLAIGSVFSKILTDMISNPVTALIEG

SEQ ID NO: 61088 - protein, 11 aa, unidentified
  source 1..11: note = methanogen bacteria
TCHSMGIAINF

SEQ ID NO: 61089 - protein, 11 aa, unidentified
  source 1..11: note = methanogen bacteria
CSLFGISQDIS

SEQ ID NO: 61090 - protein, 10 aa, unidentified
  source 1..10: note = methanogen bacteria
MTFFLETFPG

SEQ ID NO: 61091 - protein, 12 aa, unidentified
  source 1..12: note = methanogen bacteria
GSLETLLTNHSL

SEQ ID NO: 61092 - protein, 13 aa, unidentified
  source 1..13: note = methanogen bacteria
DSTGLMGLTGVGF

SEQ ID NO: 61093 - protein, 33 aa, unidentified
  source 1..33: note = methanogen bacteria
MNGKDFTVKTGNDGKAALPIDLLPGKYVAKIKF

SEQ ID NO: 61094 - protein, 82 aa, unidentified
  source 1..82: note = methanogen bacteria
NIYLSFSVSSNVVVNKLATGLTVNDINIVYGDSANLIISLKDRNNAVLKGKDISVNLNGKNLTVKTGNDGQVTLPIDLLPGK

SEQ ID NO: 61095 - protein, 100 aa, unidentified
  source 1..100: note = methanogen bacteria
TSKIKFSEDNIYLASSVSSNVVVNKLATALTAGDINITYGDSANLIITLKDGNANALSGKIIMININDKDYFTTTDNNGEAALPIDLLPGKYAAKIEFGE

SEQ ID NO: 61096 - protein, 84 aa, unidentified
  source 1..84: note = methanogen bacteria
MSLAMVYDSNYWAIVIRNINAGGGLYDYQGYYYTPVWGYILGLANAFQNLFLGLGESAVRVEDIFCFEDSGHQTTATVTYLAFN

SEQ ID NO: 61097 - protein, 35 aa, unidentified
  source 1..35: note = methanogen bacteria
IIDGNIADAFRFISDRTGSSSGSGSSSVLSFVIGR

SEQ ID NO: 61098 - protein, 29 aa, unidentified
  source 1..29: note = methanogen bacteria
AVSTGWIEVSSLAHFFDVWNAGGTWSVWN

SEQ ID NO: 61099 - protein, 10 aa, unidentified
  source 1..10: note = methanogen bacteria
SRLLKSFQNR

SEQ ID NO: 61100 - protein, 10 aa, unidentified
  source 1..10: note = methanogen bacteria
MTFFLETFPG

SEQ ID NO: 61101 - protein, 12 aa, unidentified
  source 1..12: note = methanogen bacteria
AVETLLTNPSLL

SEQ ID NO: 61102 - protein, 12 aa, unidentified
  source 1..12: note = methanogen bacteria
FALGVVGVGFDK

SEQ ID NO: 61103 - protein, 12 aa, unidentified
  source 1..12: note = methanogen bacteria
MTFFLETFPGLL

SEQ ID NO: 61104 - protein, 12 aa, unidentified
  source 1..12: note = methanogen bacteria
AIETLLTNPSLL

SEQ ID NO: 61105 - protein, 12 aa, unidentified
  source 1..12: note = methanogen bacteria
FASGLIGVGFDK

SEQ ID NO: 61106 - protein, 21 aa, unidentified
  source 1..21: note = methanogen bacteria
GNPRSGIAVYMSYLIFEMSLN

SEQ ID NO: 61107 - protein, 12 aa, unidentified
  source 1..12: note = methanogen bacteria
DSMEDYILTISG

SEQ ID NO: 61108 - protein, 14 aa, unidentified
  source 1..14: note = methanogen bacteria
QDEEDSLVQYGVLM

SEQ ID NO: 61109 - protein, 12 aa, unidentified
  source 1..12: note = methanogen bacteria
MTFFLKSFPGLL

SEQ ID NO: 61110 - protein, 13 aa, unidentified
  source 1..13: note = methanogen bacteria
SSIETLLTNPSLL

SEQ ID NO: 61111 - protein, 10 aa, unidentified
  source 1..10: note = methanogen bacteria
VILGLVGVGY

SEQ ID NO: 61112 - protein, 13 aa, unidentified
  source 1..13: note = methanogen bacteria
EGIVSGFCDPSFT

SEQ ID NO: 61113 - protein, 10 aa, unidentified
  source 1..10: note = methanogen bacteria
LRGGSEIIDC

SEQ ID NO: 61114 - protein, 15 aa, unidentified
  source 1..15: note = methanogen bacteria
NSGTIPVFGIIGGGT

SEQ ID NO: 61115 - protein, 26 aa, unidentified
  source 1..26: note = methanogen bacteria
SGSGRSGPCMAVKQVIGESLGGFCSE

SEQ ID NO: 61116 - protein, 14 aa, unidentified
  source 1..14: note = methanogen bacteria
MEEIVSGFCDPSFT

SEQ ID NO: 61117 - protein, 10 aa, unidentified
  source 1..10: note = methanogen bacteria
LRGGSEIIDC

SEQ ID NO: 61118 - protein, 15 aa, unidentified
  source 1..15: note = methanogen bacteria
NSEIIPVIGIMEGGT

SEQ ID NO: 61119 - protein, 26 aa, unidentified
  source 1..26: note = methanogen bacteria
SGSGRSGPSMAVKQVIGDSLGGFCSE

SEQ ID NO: 61120 - protein, 21 aa, unidentified
  source 1..21: note = methanogen bacteria
ANPDWGSVASSVVPQIHWEKD

SEQ ID NO: 61121 - protein, 27 aa, unidentified
  source 1..27: note = methanogen bacteria
ATINIAGTPVTDVQDIAHALIPVAGQY

SEQ ID NO: 61122 - protein, 11 aa, unidentified
  source 1..11: note = methanogen bacteria
NVTDPFIKDTI

SEQ ID NO: 61123 - protein, 44 aa, unidentified
  source 1..44: note = methanogen bacteria
INPGDGLNMVGTQYTTNLTENITLTDTILNMIPQNPISSLANGE

SEQ ID NO: 61124 - protein, 11 aa, unidentified
  source 1..11: note = methanogen bacteria
ATQAYGLDLGL

SEQ ID NO: 61125 - protein, 11 aa, unidentified
  source 1..11: note = methanogen bacteria
MLFVSVGLPLD

SEQ ID NO: 61126 - protein, 84 aa, unidentified
  source 1..84: note = methanogen bacteria
KIHTASKEVPSWDGNHFQGYRTIGSVLDFAWNDGNTVFNVDFDNKPINESYILYTSSFAHNPPYGYFAQAFGVFLAKLFDLNAI

SEQ ID NO: 61127 - protein, 65 aa, unidentified
  source 1..65: note = methanogen bacteria
LYSVPTYYNSFRIDHALKSNINMTNQISFMTTHLPETMFTLIQIPKSIGIHFNTLFIYSFHPYEY

SEQ ID NO: 61128 - protein, 16 aa, unidentified
  source 1..16: note = methanogen bacteria
WTPVGDFKEILGAVQR

SEQ ID NO: 61129 - protein, 19 aa, unidentified
  source 1..19: note = methanogen bacteria
INDTSLVTLLDLEERTNNY

SEQ ID NO: 61130 - protein, 10 aa, unidentified
  source 1..10: note = methanogen bacteria
VEIGSFDNFH

SEQ ID NO: 61131 - protein, 32 aa, unidentified
  source 1..32: note = methanogen bacteria
SSCIVDHMNFIKVNDTNSSFVAPDIVDGALMD

SEQ ID NO: 61132 - protein, 42 aa, unidentified
  source 1..42: note = methanogen bacteria
FPISITLTNASSVSAPGGLNQILSNLLLNIFLNPLYSLSEGN

SEQ ID NO: 61133 - protein, 11 aa, unidentified
  source 1..11: note = methanogen bacteria
VCHTLGIPVDV

SEQ ID NO: 61134 - protein, 11 aa, unidentified
  source 1..11: note = methanogen bacteria
CSLFGIPSDIS

SEQ ID NO: 61135 - protein, 16 aa, unidentified
  source 1..16: note = methanogen bacteria
LQIFNIVNPHHVEVVT

SEQ ID NO: 61136 - protein, 48 aa, unidentified
  source 1..48: note = methanogen bacteria
STLNINNTETNYGTTTNINVTYEGAEGITAKLNDELIIFKGNTIPIPI

SEQ ID NO: 61137 - protein, 52 aa, unidentified
  source 1..52: note = methanogen bacteria
YTLTVTTIPDKNHNSITKTATITINKVDSTIKANNITYTYESTGTTTVNYTG

SEQ ID NO: 61138 - protein, 33 aa, unidentified
  source 1..33: note = methanogen bacteria
FTATIEKGNLKIENNTITVYNQKPGTYKLTITT

SEQ ID NO: 61139 - protein, 14 aa, unidentified
  source 1..14: note = methanogen bacteria
TNIMVTVNKIETKI

SEQ ID NO: 61140 - protein, 29 aa, unidentified
  source 1..29: note = methanogen bacteria
TITLKDNKNKPITGAKIKINTQKTYTTNK

SEQ ID NO: 61141 - protein, 85 aa, unidentified
  source 1..85: note = methanogen bacteria
KITYTGNETHKATQKTTKIIIKKATPKINAKNKTFKSNNKNKKYQVSLKDNQRKPMKKAQIQLKIGKTTYKTTTNNKGTATFKIK

SEQ ID NO: 61142 - protein, 10 aa, unidentified
  source 1..10: note = methanogen bacteria
TKTTNALIKY

SEQ ID NO: 61143 - protein, 80 aa, unidentified
  source 1..80: note = methanogen bacteria
TKKIKLTVKTTFQTISYGSKNHQMVKKIQKALKNNGYYTTAYGHYLKIDGIYHIWTQQAVKQYQKDKKLKITGRVDEKTA

SEQ ID NO: 61144 - protein, 22 aa, unidentified
  source 1..22: note = methanogen bacteria
IGNPRSGIAVYMSYLIFEMGLN

SEQ ID NO: 61145 - protein, 12 aa, unidentified
  source 1..12: note = methanogen bacteria
SYLQADLHFSAE

SEQ ID NO: 61146 - protein, 13 aa, unidentified
  source 1..13: note = methanogen bacteria
TYLAQERGLAAVG

SEQ ID NO: 61147 - protein, 42 aa, unidentified
  source 1..42: note = methanogen bacteria
YPVDLHLSSVSNATAPGGLEDIVSNMLLNVFSNPIKSLSEGE

SEQ ID NO: 61148 - protein, 10 aa, unidentified
  source 1..10: note = methanogen bacteria
SESGLGIFTQ

SEQ ID NO: 61149 - protein, 11 aa, unidentified
  source 1..11: note = methanogen bacteria
VCHTVGISVSL

SEQ ID NO: 61150 - protein, 11 aa, unidentified
  source 1..11: note = methanogen bacteria
CSLFGITPDIS

SEQ ID NO: 61151 - protein, 10 aa, unidentified
  source 1..10: note = methanogen bacteria
FQTPISSGVS

SEQ ID NO: 61152 - protein, 22 aa, unidentified
  source 1..22: note = methanogen bacteria
IGNPRSGIAVYMSYLISEMNLN

SEQ ID NO: 61153 - protein, 12 aa, unidentified
  source 1..12: note = methanogen bacteria
MTFFLETFPGLL

SEQ ID NO: 61154 - protein, 12 aa, unidentified
  source 1..12: note = methanogen bacteria
SSVETLLTNPSL

SEQ ID NO: 61155 - protein, 13 aa, unidentified
  source 1..13: note = methanogen bacteria
DSTEILGLVGVGF

SEQ ID NO: 61156 - protein, 11 aa, unidentified
  source 1..11: note = methanogen bacteria
TFQTPISSGVS

SEQ ID NO: 61157 - protein, 22 aa, unidentified
  source 1..22: note = methanogen bacteria
IGNPRSGIAVYMSYLISEMTLN

SEQ ID NO: 61158 - protein, 10 aa, unidentified
  source 1..10: note = methanogen bacteria
FQTPISSGVS

SEQ ID NO: 61159 - protein, 22 aa, unidentified
  source 1..22: note = methanogen bacteria
IGNPRSGIAVYMSYLISEMNLN

SEQ ID NO: 61160 - protein, 12 aa, unidentified
  source 1..12: note = methanogen bacteria
QFEEGDDLAGIF

SEQ ID NO: 61161 - protein, 17 aa, unidentified
  source 1..17: note = methanogen bacteria
DWVFGTFYGEEMEPYSQ

SEQ ID NO: 61162 - protein, 88 aa, unidentified
  source 1..88: note = methanogen bacteria
MYITGSEFSQNKAKNGGAAYIKDVSMTIDGSEFIANEAKNDGGAIWSNKNSRIIKNSKFIENKALNEAGAIYRGTLEKLQLTNNTFID

SEQ ID NO: 61163 - protein, 10 aa, unidentified
  source 1..10: note = methanogen bacteria
QDQMTGYLFA

SEQ ID NO: 61164 - protein, 11 aa, unidentified
  source 1..11: note = methanogen bacteria
LQVDGGLDYSE

SEQ ID NO: 61165 - protein, 14 aa, unidentified
  source 1..14: note = methanogen bacteria
QNQQDSLVEYSVLL

SEQ ID NO: 61166 - protein, 10 aa, unidentified
  source 1..10: note = methanogen bacteria
ITGGGSNVSF

SEQ ID NO: 61167 - protein, 22 aa, unidentified
  source 1..22: note = methanogen bacteria
IGNPRSGIAVYMSYLISEMNLN

SEQ ID NO: 61168 - protein, 14 aa, unidentified
  source 1..14: note = methanogen bacteria
KEIKITETISVLLL

SEQ ID NO: 61169 - protein, 10 aa, unidentified
  source 1..10: note = methanogen bacteria
GQAISSIFQV

SEQ ID NO: 61170 - protein, 42 aa, unidentified
  source 1..42: note = methanogen bacteria
ASLIPMHPYAYAMASGVGSASMNAAALAPLMHMFPSMATHLE

SEQ ID NO: 61171 - protein, 17 aa, unidentified
  source 1..17: note = methanogen bacteria
PGVPTSDFLVHYVSQID

SEQ ID NO: 61172 - protein, 41 aa, unidentified
  source 1..41: note = methanogen bacteria
FPLSVQLKNISHAAVPSGFNEIIVNMLLKIFENPLYALAQG

SEQ ID NO: 61173 - protein, 11 aa, unidentified
  source 1..11: note = methanogen bacteria
VCHTLGIVVDL

SEQ ID NO: 61174 - protein, 11 aa, unidentified
  source 1..11: note = methanogen bacteria
CSLFGIPSDIS

SEQ ID NO: 61175 - protein, 10 aa, unidentified
  source 1..10: note = methanogen bacteria
NFLLTKVSPE

SEQ ID NO: 61176 - protein, 22 aa, unidentified
  source 1..22: note = methanogen bacteria
IGNPRSGIAVYMSYLISEMSIN

SEQ ID NO: 61177 - protein, 22 aa, unidentified
  source 1..22: note = methanogen bacteria
IGNPRSGIAVYMSYLIFEMGLN

SEQ ID NO: 61178 - protein, 42 aa, unidentified
  source 1..42: note = methanogen bacteria
FPISITLTDASSVSPPGGLSDVLTNMLLNIFANPLLSLTNGD

SEQ ID NO: 61179 - protein, 11 aa, unidentified
  source 1..11: note = methanogen bacteria
VCHTLGIGIDL

SEQ ID NO: 61180 - protein, 11 aa, unidentified
  source 1..11: note = methanogen bacteria
CALFGIPNDVA

SEQ ID NO: 61181 - protein, 14 aa, unidentified
  source 1..14: note = methanogen bacteria
KEIKITDTISILLL

SEQ ID NO: 61182 - protein, 10 aa, unidentified
  source 1..10: note = methanogen bacteria
GQAISSIFQV

SEQ ID NO: 61183 - protein, 42 aa, unidentified
  source 1..42: note = methanogen bacteria
ASIIPMHPYAYAMASGVGSASMNAAALAPLMHMFPSMATQLE

SEQ ID NO: 61184 - protein, 16 aa, unidentified
  source 1..16: note = methanogen bacteria
GVPTADFLVRYVSQVD

SEQ ID NO: 61185 - protein, 11 aa, unidentified
  source 1..11: note = methanogen bacteria
HISADFTVGPL

SEQ ID NO: 61186 - protein, 10 aa, unidentified
  source 1..10: note = methanogen bacteria
IPGVYVGFYG

SEQ ID NO: 61187 - protein, 10 aa, unidentified
  source 1..10: note = methanogen bacteria
SFLLTFLSPE

SEQ ID NO: 61188 - protein, 21 aa, unidentified
  source 1..21: note = methanogen bacteria
GNPRSGIAVYMSYLIFEMSVN

SEQ ID NO: 61189 - protein, 60 aa, unidentified
  source 1..60: note = methanogen bacteria
ESIGLMSSFLKAGGFSLGTNSSEVGTIIVQNLPVNVQDMIQPHIGRINAGISQLFSLLLN

SEQ ID NO: 61190 - protein, 10 aa, unidentified
  source 1..10: note = methanogen bacteria
GVLLGFISPE

SEQ ID NO: 61191 - protein, 10 aa, unidentified
  source 1..10: note = methanogen bacteria
FQTPISSGIS

SEQ ID NO: 61192 - protein, 22 aa, unidentified
  source 1..22: note = methanogen bacteria
IGNPRSGIAVYMSYLVEQMTLN

SEQ ID NO: 61193 - protein, 10 aa, unidentified
  source 1..10: note = methanogen bacteria
FQTPISSGTT

SEQ ID NO: 61194 - protein, 22 aa, unidentified
  source 1..22: note = methanogen bacteria
IGNPRSGIAVYMSYLIFEMGLN

SEQ ID NO: 61195 - protein, 10 aa, unidentified
  source 1..10: note = methanogen bacteria
SFLLGFLSPE

SEQ ID NO: 61196 - protein, 10 aa, unidentified
  source 1..10: note = methanogen bacteria
FQTPISSGIS

SEQ ID NO: 61197 - protein, 22 aa, unidentified
  source 1..22: note = methanogen bacteria
IGNPRSGIAVYMSYLVSEMTLN

SEQ ID NO: 61198 - protein, 10 aa, unidentified
  source 1..10: note = methanogen bacteria
MTFFLKAFPG

SEQ ID NO: 61199 - protein, 13 aa, unidentified
  source 1..13: note = methanogen bacteria
SSIETLLTNQTLL

SEQ ID NO: 61200 - protein, 11 aa, unidentified
  source 1..11: note = methanogen bacteria
TYLMGGTGVGF

SEQ ID NO: 61201 - protein, 17 aa, unidentified
  source 1..17: note = methanogen bacteria
LVQVPTRRIDVAAEYST

SEQ ID NO: 61202 - protein, 62 aa, unidentified
  source 1..62: note = methanogen bacteria
SASALVQSVIDICDVSIYDANFVKAAVLGRYPQSVDYKGSNIATMLDIPQKLEGAGYGLRNV

SEQ ID NO: 61203 - protein, 16 aa, unidentified
  source 1..16: note = methanogen bacteria
MFEMADALGSFERLHL

SEQ ID NO: 61204 - protein, 21 aa, unidentified
  source 1..21: note = methanogen bacteria
YQGLNANNLVYELVKENAAEG

SEQ ID NO: 61205 - protein, 34 aa, unidentified
  source 1..34: note = methanogen bacteria
VGSIVQATIARAEADGVIAPQEQLTDFAIYNTDD

SEQ ID NO: 61206 - protein, 43 aa, unidentified
  source 1..43: note = methanogen bacteria
GIPSTLLYFNDNLEFATGLPGLDYGRAEGVAVGFSFFSHSIYG

SEQ ID NO: 61207 - protein, 10 aa, unidentified
  source 1..10: note = methanogen bacteria
FNGNHVVTRH

SEQ ID NO: 61208 - protein, 28 aa, unidentified
  source 1..28: note = methanogen bacteria
QLFSPEATSGLIKEVYSQIDEFREPIKA

SEQ ID NO: 61209 - protein, 22 aa, unidentified
  source 1..22: note = methanogen bacteria
IGNPRSGIAVYMSYLISDMTLN

SEQ ID NO: 61210 - protein, 10 aa, unidentified
  source 1..10: note = methanogen bacteria
GFLLNYISPE

SEQ ID NO: 61211 - protein, 10 aa, unidentified
  source 1..10: note = methanogen bacteria
LQTPISSGIS

SEQ ID NO: 61212 - protein, 21 aa, unidentified
  source 1..21: note = methanogen bacteria
IGNPRSGIAVYMSYLISEFTI

SEQ ID NO: 61213 - protein, 19 aa, unidentified
  source 1..19: note = methanogen bacteria
MHIGILEIKISDTVSILLL

SEQ ID NO: 61214 - protein, 10 aa, unidentified
  source 1..10: note = methanogen bacteria
GQSIENIFDV

SEQ ID NO: 61215 - protein, 42 aa, unidentified
  source 1..42: note = methanogen bacteria
ASLIPMHPYAYAMASGVGSASMNAAALAPLMHLYPSMATDLE

SEQ ID NO: 61216 - protein, 16 aa, unidentified
  source 1..16: note = methanogen bacteria
GVPTASFISHYVSQID

SEQ ID NO: 61217 - protein, 22 aa, unidentified
  source 1..22: note = methanogen bacteria
IGNPRSGIAVYMSYLISKMSLN

SEQ ID NO: 61218 - protein, 41 aa, unidentified
  source 1..41: note = methanogen bacteria
FPVTIHLTGASTQAAPGGIGEIMHDIIITAFSNPVELVAQG

SEQ ID NO: 61219 - protein, 12 aa, unidentified
  source 1..12: note = methanogen bacteria
VCHTIGISVPLH

SEQ ID NO: 61220 - protein, 11 aa, unidentified
  source 1..11: note = methanogen bacteria
CSMFGISSDVS

SEQ ID NO: 61221 - protein, 14 aa, unidentified
  source 1..14: note = methanogen bacteria
KEIKITDTVSILLL

SEQ ID NO: 61222 - protein, 11 aa, unidentified
  source 1..11: note = methanogen bacteria
SGQSISSIFQV

SEQ ID NO: 61223 - protein, 42 aa, unidentified
  source 1..42: note = methanogen bacteria
ASVIPMHPYAYAMASGVGSASMNAAALAPLMHMFPSMATKLE

SEQ ID NO: 61224 - protein, 16 aa, unidentified
  source 1..16: note = methanogen bacteria
GMPTADFVSHYVSQID

SEQ ID NO: 61225 - protein, 10 aa, unidentified
  source 1..10: note = methanogen bacteria
GFLLSFLSPE

SEQ ID NO: 61226 - protein, 10 aa, unidentified
  source 1..10: note = methanogen bacteria
LQTPISSGIS

SEQ ID NO: 61227 - protein, 22 aa, unidentified
  source 1..22: note = methanogen bacteria
IGNPRSGIAVYMSYLISEFTLS

SEQ ID NO: 61228 - protein, 21 aa, unidentified
  source 1..21: note = methanogen bacteria
IGNPRSGIAVYMSYLISQFTL

SEQ ID NO: 61229 - protein, 10 aa, unidentified
  source 1..10: note = methanogen bacteria
AFLLNYISAE

SEQ ID NO: 61230 - protein, 21 aa, unidentified
  source 1..21: note = methanogen bacteria
IGNPRSGIAVYMSYLISEFTL

SEQ ID NO: 61231 - protein, 29 aa, unidentified
  source 1..29: note = methanogen bacteria
PFLGITKMGITANMTLMETATSMFVDNYE

SEQ ID NO: 61232 - protein, 10 aa, unidentified
  source 1..10: note = methanogen bacteria
LVSMVELQIG

SEQ ID NO: 61233 - protein, 29 aa, unidentified
  source 1..29: note = methanogen bacteria
FPIMITSSMGKNSAATIFEGIIFMWDTGA

SEQ ID NO: 61234 - protein, 10 aa, unidentified
  source 1..10: note = methanogen bacteria
AFLMNYISAE

SEQ ID NO: 61235 - protein, 21 aa, unidentified
  source 1..21: note = methanogen bacteria
IGNPRSGIAVYMSYLISEFTL

SEQ ID NO: 61236 - protein, 14 aa, unidentified
  source 1..14: note = methanogen bacteria
KEFKITDDISILLM

SEQ ID NO: 61237 - protein, 11 aa, unidentified
  source 1..11: note = methanogen bacteria
SGQAINSIFQV

SEQ ID NO: 61238 - protein, 41 aa, unidentified
  source 1..41: note = methanogen bacteria
ISGLPIHPYAFAMASGIGSASMNAAALAPLMHMYPAMATQL

SEQ ID NO: 61239 - protein, 16 aa, unidentified
  source 1..16: note = methanogen bacteria
GVPTSDFMIHYVSNIE

SEQ ID NO: 61240 - protein, 74 aa, unidentified
  source 1..74: note = methanogen bacteria
MAYTSIIDWITGVYSQHGWADPIQANPYYPFGDAYNLPYDLGMKLWNIIGGAIAWLLDLLFPGNDVSTWLVCDM

SEQ ID NO: 61241 - protein, 13 aa, unidentified
  source 1..13: note = methanogen bacteria
PLSPRWFVVNYDA

SEQ ID NO: 61242 - protein, 20 aa, unidentified
  source 1..20: note = methanogen bacteria
LAGSLNIGDIVMAQTKHFWY

SEQ ID NO: 61243 - protein, 28 aa, unidentified
  source 1..28: note = methanogen bacteria
GGWNLPFMEWTYFLGDGIASFHQNFMWW

SEQ ID NO: 61244 - protein, 42 aa, unidentified
  source 1..42: note = methanogen bacteria
FPLNIYLSSASVASALGGLGEIMRDMILNIFSNPIKSLAEGE

SEQ ID NO: 61245 - protein, 10 aa, unidentified
  source 1..10: note = methanogen bacteria
CYTLGIPVPF

SEQ ID NO: 61246 - protein, 11 aa, unidentified
  source 1..11: note = methanogen bacteria
CSLFGISQDIS

SEQ ID NO: 61247 - protein, 35 aa, unidentified
  source 1..35: note = methanogen bacteria
QLSFSSSTLLGFIGIPENLLMEGIGVNSLTDTIPT

SEQ ID NO: 61248 - protein, 14 aa, unidentified
  source 1..14: note = methanogen bacteria
WGGGWLMNMGAIDF

SEQ ID NO: 61249 - protein, 17 aa, unidentified
  source 1..17: note = methanogen bacteria
ASPAINGVAGLFYGNPG

SEQ ID NO: 61250 - protein, 14 aa, unidentified
  source 1..14: note = methanogen bacteria
IEIDLTDNIQIVLL

SEQ ID NO: 61251 - protein, 11 aa, unidentified
  source 1..11: note = methanogen bacteria
SGQSMDDIFNV

SEQ ID NO: 61252 - protein, 42 aa, unidentified
  source 1..42: note = methanogen bacteria
ISVLPIHPYAFSMASGIGSASMNAASLASISHVYPSMATEFE

SEQ ID NO: 61253 - protein, 17 aa, unidentified
  source 1..17: note = methanogen bacteria
PVVPTSNFVMHYVSQIN

SEQ ID NO: 61254 - protein, 10 aa, unidentified
  source 1..10: note = methanogen bacteria
PYLLQFTSSE

SEQ ID NO: 61255 - protein, 22 aa, unidentified
  source 1..22: note = methanogen bacteria
IGNPRSGIAVFISYIINDFTIF

SEQ ID NO: 61256 - protein, 14 aa, unidentified
  source 1..14: note = methanogen bacteria
PSSAIQVGDKQIIF

SEQ ID NO: 61257 - protein, 18 aa, unidentified
  source 1..18: note = methanogen bacteria
VDVCPPKTLELNDSAKMP

SEQ ID NO: 61258 - protein, 13 aa, unidentified
  source 1..13: note = methanogen bacteria
IGIPGVIEPASRE

SEQ ID NO: 61259 - protein, 11 aa, unidentified
  source 1..11: note = methanogen bacteria
ITLPAVGESIT

SEQ ID NO: 61260 - protein, 42 aa, unidentified
  source 1..42: note = methanogen bacteria
FPVTMHLSAASTATTPGGLGEIVSNLLLNIFQNPIKSLAEGE

SEQ ID NO: 61261 - protein, 10 aa, unidentified
  source 1..10: note = methanogen bacteria
CNTIGIHVAF

SEQ ID NO: 61262 - protein, 11 aa, unidentified
  source 1..11: note = methanogen bacteria
CSLFGISPDIS

SEQ ID NO: 61263 - protein, 19 aa, unidentified
  source 1..19: note = methanogen bacteria
MSIGVIEIKLTETIQIFLL

SEQ ID NO: 61264 - protein, 10 aa, unidentified
  source 1..10: note = methanogen bacteria
GQSLHNIYNV

SEQ ID NO: 61265 - protein, 42 aa, unidentified
  source 1..42: note = methanogen bacteria
ASVLPIHPYAFAMASGIGSASMNAASLASISHLFPAMATDLE

SEQ ID NO: 61266 - protein, 16 aa, unidentified
  source 1..16: note = methanogen bacteria
GVPTSGFISHYVSQVN

SEQ ID NO: 61267 - protein, 16 aa, unidentified
  source 1..16: note = methanogen bacteria
SLFGSLFSFSSGIECA

SEQ ID NO: 61268 - protein, 10 aa, unidentified
  source 1..10: note = methanogen bacteria
LSGGTGIVDR

SEQ ID NO: 61269 - protein, 14 aa, unidentified
  source 1..14: note = methanogen bacteria
DWGIPCTGILGEST

SEQ ID NO: 61270 - protein, 26 aa, unidentified
  source 1..26: note = methanogen bacteria
SGSGRSGTAMAVKEIIGDSLTGFCSE

SEQ ID NO: 61271 - protein, 41 aa, unidentified
  source 1..41: note = methanogen bacteria
FPVTMHLTAASTAAAPQDLGKVMSDMILAVFTNPIELLATG

SEQ ID NO: 61272 - protein, 11 aa, unidentified
  source 1..11: note = methanogen bacteria
VCHTMGISTPL

SEQ ID NO: 61273 - protein, 11 aa, unidentified
  source 1..11: note = methanogen bacteria
CSLFGISPDVS

SEQ ID NO: 61274 - protein, 12 aa, unidentified
  source 1..12: note = methanogen bacteria
QFEEGDDLAGIF

SEQ ID NO: 61275 - protein, 17 aa, unidentified
  source 1..17: note = methanogen bacteria
DWVFGTFYGEEMEPYSQ

SEQ ID NO: 61276 - protein, 22 aa, unidentified
  source 1..22: note = methanogen bacteria
IGNPRSGIAVYMSYLISQMTLN

SEQ ID NO: 61277 - protein, 11 aa, unidentified
  source 1..11: note = methanogen bacteria
TFNNNLGSTDT

SEQ ID NO: 61278 - protein, 37 aa, unidentified
  source 1..37: note = methanogen bacteria
HFTGDSCRTAVISDLGSISAGWPVFGLPSVLTDASAL

SEQ ID NO: 61279 - protein, 10 aa, unidentified
  source 1..10: note = methanogen bacteria
SSFFIKITTA

SEQ ID NO: 61280 - protein, 22 aa, unidentified
  source 1..22: note = methanogen bacteria
IGNPRSGIAVYITHFLQEFTFY

SEQ ID NO: 61281 - protein, 42 aa, unidentified
  source 1..42: note = methanogen bacteria
FPVSIHLSAASTAVSPGGLADILGEMLLKIFSNPIKSLSEGE

SEQ ID NO: 61282 - protein, 11 aa, unidentified
  source 1..11: note = methanogen bacteria
ACHTMGIPVHF

SEQ ID NO: 61283 - protein, 12 aa, unidentified
  source 1..12: note = methanogen bacteria
TCSLFGISQDIS

SEQ ID NO: 61284 - protein, 17 aa, unidentified
  source 1..17: note = methanogen bacteria
PTSAIEVTPNSIIHCDT

SEQ ID NO: 61285 - protein, 10 aa, unidentified
  source 1..10: note = methanogen bacteria
KVEEFEVVDG

SEQ ID NO: 61286 - protein, 17 aa, unidentified
  source 1..17: note = methanogen bacteria
GDFISANSASLTVAIPS

SEQ ID NO: 61287 - protein, 23 aa, unidentified
  source 1..23: note = methanogen bacteria
PTEAIRVVTKTGMSCPALVETDS

SEQ ID NO: 61288 - protein, 14 aa, unidentified
  source 1..14: note = methanogen bacteria
LKVDQYEVTIDGEP

SEQ ID NO: 61289 - protein, 13 aa, unidentified
  source 1..13: note = methanogen bacteria
EACPYDMIHKTDN

SEQ ID NO: 61290 - protein, 42 aa, unidentified
  source 1..42: note = methanogen bacteria
FPVSIHLSGVANATAAPTGIAEVMSDMIKTIFTNPIVLLSQG

SEQ ID NO: 61291 - protein, 12 aa, unidentified
  source 1..12: note = methanogen bacteria
VCHTMGISVPLP

SEQ ID NO: 61292 - protein, 11 aa, unidentified
  source 1..11: note = methanogen bacteria
CSLFGIAQDIS

SEQ ID NO: 61293 - protein, 10 aa, unidentified
  source 1..10: note = methanogen bacteria
VAFTDALEYI

SEQ ID NO: 61294 - protein, 22 aa, unidentified
  source 1..22: note = methanogen bacteria
SCGIISGIADAFGMDDPSIGSL

SEQ ID NO: 61295 - protein, 35 aa, unidentified
  source 1..35: note = methanogen bacteria
VFGLSGESRTIGDLGDLTGGWPGLGIPAVLSDASA

SEQ ID NO: 61296 - protein, 10 aa, unidentified
  source 1..10: note = methanogen bacteria
MILLKVYPST

SEQ ID NO: 61297 - protein, 41 aa, unidentified
  source 1..41: note = methanogen bacteria
FPVTIHLSGASTAAAPGGLGEVMSNMILEVFSNPIHLLAEG

SEQ ID NO: 61298 - protein, 11 aa, unidentified
  source 1..11: note = methanogen bacteria
VCHTMGITVPI

SEQ ID NO: 61299 - protein, 11 aa, unidentified
  source 1..11: note = methanogen bacteria
CSLFGIGADVS

SEQ ID NO: 61300 - protein, 13 aa, unidentified
  source 1..13: note = methanogen bacteria
AGIMADFHVSSTT

SEQ ID NO: 61301 - protein, 12 aa, unidentified
  source 1..12: note = methanogen bacteria
LFVQTVTSHNAT

SEQ ID NO: 61302 - protein, 26 aa, unidentified
  source 1..26: note = methanogen bacteria
KTNHWCNRICRCGGVNDCFCRRGTSS

SEQ ID NO: 61303 - protein, 42 aa, unidentified
  source 1..42: note = methanogen bacteria
FPVSIHLSGAANATAAPTGIAEVMSDMIKTIFTNPIDLISEG

SEQ ID NO: 61304 - protein, 11 aa, unidentified
  source 1..11: note = methanogen bacteria
VCHTIGISVPL

SEQ ID NO: 61305 - protein, 11 aa, unidentified
  source 1..11: note = methanogen bacteria
CSLFGISPDIS

SEQ ID NO: 61306 - protein, 42 aa, unidentified
  source 1..42: note = methanogen bacteria
FPVTVHLSQASTATAPNALGDVISDMILNIFSNPIHSLVEAN

SEQ ID NO: 61307 - protein, 11 aa, unidentified
  source 1..11: note = methanogen bacteria
TCHTLGISVPL

SEQ ID NO: 61308 - protein, 11 aa, unidentified
  source 1..11: note = methanogen bacteria
CSMFGISQDIS

SEQ ID NO: 61309 - protein, 42 aa, unidentified
  source 1..42: note = methanogen bacteria
FPVTIHLTTASTATAPGALQDVIMGMILKIFSNPIKSLAEGE

SEQ ID NO: 61310 - protein, 11 aa, unidentified
  source 1..11: note = methanogen bacteria
TCHTIGISVPL

SEQ ID NO: 61311 - protein, 11 aa, unidentified
  source 1..11: note = methanogen bacteria
CSLFGINQDIS

SEQ ID NO: 61312 - protein, 42 aa, unidentified
  source 1..42: note = methanogen bacteria
FPVSIHLSSASAAVSPGGLGDILGGMLLKIFSNPIKSLSEGE

SEQ ID NO: 61313 - protein, 11 aa, unidentified
  source 1..11: note = methanogen bacteria
ACHTMGIPVHF

SEQ ID NO: 61314 - protein, 12 aa, unidentified
  source 1..12: note = methanogen bacteria
TCSLFGISQDIS

SEQ ID NO: 61315 - protein, 14 aa, unidentified
  source 1..14: note = methanogen bacteria
IGLEDVLSALAMSN

SEQ ID NO: 61316 - protein, 10 aa, unidentified
  source 1..10: note = methanogen bacteria
AFGANVSLIS

SEQ ID NO: 61317 - protein, 10 aa, unidentified
  source 1..10: note = methanogen bacteria
YANAGITASV

SEQ ID NO: 61318 - protein, 41 aa, unidentified
  source 1..41: note = methanogen bacteria
FPVTIHLSGSNTANAPGNIADLMSNMILTSVSNPIQLLSEG

SEQ ID NO: 61319 - protein, 10 aa, unidentified
  source 1..10: note = methanogen bacteria
CHTLGVSLSL

SEQ ID NO: 61320 - protein, 12 aa, unidentified
  source 1..12: note = methanogen bacteria
ASSLFGISSDLS

SEQ ID NO: 61321 - protein, 10 aa, unidentified
  source 1..10: note = methanogen bacteria
MTFFIKTYPG

SEQ ID NO: 61322 - protein, 11 aa, unidentified
  source 1..11: note = methanogen bacteria
ASILLNNPTIL

SEQ ID NO: 61323 - protein, 36 aa, unidentified
  source 1..36: note = methanogen bacteria
IGSYPISFGDVYSTLWHHLKGDIENYSYDNVVWNQR

SEQ ID NO: 61324 - protein, 26 aa, unidentified
  source 1..26: note = methanogen bacteria
MLTADPNSASSVYTWSVGSIGMTTWE

SEQ ID NO: 61325 - protein, 41 aa, unidentified
  source 1..41: note = methanogen bacteria
FPVTIHLSDASTAAAPGGLGEVMSNMILGIFSNPIGLISEG

SEQ ID NO: 61326 - protein, 12 aa, unidentified
  source 1..12: note = methanogen bacteria
VCHTMGISVPLP

SEQ ID NO: 61327 - protein, 11 aa, unidentified
  source 1..11: note = methanogen bacteria
CSLFGIPADVS

SEQ ID NO: 61328 - protein, 22 aa, unidentified
  source 1..22: note = methanogen bacteria
INNPRSAISVYVNDLIQNITLN

SEQ ID NO: 61329 - protein, 10 aa, unidentified
  source 1..10: note = methanogen bacteria
MTYFLDLFPG

SEQ ID NO: 61330 - protein, 12 aa, unidentified
  source 1..12: note = methanogen bacteria
CESTLLTNPTLL

SEQ ID NO: 61331 - protein, 65 aa, unidentified
  source 1..65: note = methanogen bacteria
MERSELKGNTINAETKEIPKGEIYELLVLMPLDDFKNATYAKHVNENGKDKIIKNLNDSIGGRNF

SEQ ID NO: 61332 - protein, 12 aa, unidentified
  source 1..12: note = methanogen bacteria
TQLQADLHFSAE

SEQ ID NO: 61333 - protein, 12 aa, unidentified
  source 1..12: note = methanogen bacteria
TYLEQERGLALL

SEQ ID NO: 61334 - protein, 42 aa, unidentified
  source 1..42: note = methanogen bacteria
FPVGMHLTAASNVSAPSGLEEILTNILTTIFSNPIKSLTEGE

SEQ ID NO: 61335 - protein, 10 aa, unidentified
  source 1..10: note = methanogen bacteria
CNTLGIHISL

SEQ ID NO: 61336 - protein, 11 aa, unidentified
  source 1..11: note = methanogen bacteria
CSMFGIGNDIA

SEQ ID NO: 61337 - protein, 24 aa, unidentified
  source 1..24: note = methanogen bacteria
AVDVSSLVSLSNLSGMTGNTSDLN

SEQ ID NO: 61338 - protein, 18 aa, unidentified
  source 1..18: note = methanogen bacteria
AGIGANISIAQAILIAGL

SEQ ID NO: 61339 - protein, 12 aa, unidentified
  source 1..12: note = methanogen bacteria
LKQLAPDAPSVS

SEQ ID NO: 61340 - protein, 15 aa, unidentified
  source 1..15: note = methanogen bacteria
FGSDAPIVKTFNMHF

SEQ ID NO: 61341 - protein, 22 aa, unidentified
  source 1..22: note = methanogen bacteria
TTGLSSWMGAGISNLMGSNPPE

SEQ ID NO: 61342 - protein, 11 aa, unidentified
  source 1..11: note = methanogen bacteria
TTAMSMGFSPI

SEQ ID NO: 61343 - protein, 12 aa, unidentified
  source 1..12: note = methanogen bacteria
MTFFLEAFPGLL

SEQ ID NO: 61344 - protein, 13 aa, unidentified
  source 1..13: note = methanogen bacteria
SSVETLLTNPSLL

SEQ ID NO: 61345 - protein, 11 aa, unidentified
  source 1..11: note = methanogen bacteria
IFGVVGVGFDK

SEQ ID NO: 61346 - protein, 12 aa, unidentified
  source 1..12: note = methanogen bacteria
TQLQSSLHFSAE

SEQ ID NO: 61347 - protein, 13 aa, unidentified
  source 1..13: note = methanogen bacteria
TYLEQERGLALLG

SEQ ID NO: 61348 - protein, 12 aa, unidentified
  source 1..12: note = methanogen bacteria
SEIQASLNITTE

SEQ ID NO: 61349 - protein, 12 aa, unidentified
  source 1..12: note = methanogen bacteria
TYLTKERGLTMV

SEQ ID NO: 61350 - protein, 42 aa, unidentified
  source 1..42: note = methanogen bacteria
YPVSIHLNAAGNVTAPGGIGDVVGDMILKIFSNPLNSLMEGE

SEQ ID NO: 61351 - protein, 10 aa, unidentified
  source 1..10: note = methanogen bacteria
SQSGLSIFSQ

SEQ ID NO: 61352 - protein, 11 aa, unidentified
  source 1..11: note = methanogen bacteria
TCHTIGISVSI

SEQ ID NO: 61353 - protein, 12 aa, unidentified
  source 1..12: note = methanogen bacteria
TCSLFGISQDIS

SEQ ID NO: 61354 - protein, 12 aa, unidentified
  source 1..12: note = methanogen bacteria
SQLQSSLHFSAD

SEQ ID NO: 61355 - protein, 12 aa, unidentified
  source 1..12: note = methanogen bacteria
TYLEQERGMALL

SEQ ID NO: 61356 - protein, 15 aa, unidentified
  source 1..15: note = methanogen bacteria
PALPVMVDELGTTEA

SEQ ID NO: 61357 - protein, 11 aa, unidentified
  source 1..11: note = methanogen bacteria
YIYEDMFGMSE

SEQ ID NO: 61358 - protein, 19 aa, unidentified
  source 1..19: note = methanogen bacteria
SVPYSSADSAVTEADSGNI

SEQ ID NO: 61359 - protein, 36 aa, unidentified
  source 1..36: note = methanogen bacteria
SLAFSGDIFGIIGNLDKALSENIEYNVIPDGSTVPE

SEQ ID NO: 61360 - protein, 17 aa, unidentified
  source 1..17: note = methanogen bacteria
VWGGGLFDQYLTVLDFA

SEQ ID NO: 61361 - protein, 10 aa, unidentified
  source 1..10: note = methanogen bacteria
GSGLAADGIA

SEQ ID NO: 61362 - protein, 15 aa, unidentified
  source 1..15: note = methanogen bacteria
PALADMVDELDTTES

SEQ ID NO: 61363 - protein, 11 aa, unidentified
  source 1..11: note = methanogen bacteria
YIYEGTFGFGA

SEQ ID NO: 61364 - protein, 11 aa, unidentified
  source 1..11: note = methanogen bacteria
TEYATSMGTSA

SEQ ID NO: 61365 - protein, 10 aa, unidentified
  source 1..10: note = methanogen bacteria
LYAVEVDLVG

SEQ ID NO: 61366 - protein, 12 aa, unidentified
  source 1..12: note = methanogen bacteria
SQLQSSLHFSAG

SEQ ID NO: 61367 - protein, 13 aa, unidentified
  source 1..13: note = methanogen bacteria
TYLEQERGLALLS

SEQ ID NO: 61368 - protein, 41 aa, unidentified
  source 1..41: note = methanogen bacteria
WPATVTFVSVYAPFYSDEAYEIVEMIVSKLICNPVDAFAGA

SEQ ID NO: 61369 - protein, 10 aa, unidentified
  source 1..10: note = methanogen bacteria
SENGLDIFTE

SEQ ID NO: 61370 - protein, 10 aa, unidentified
  source 1..10: note = methanogen bacteria
ANTLGISIPL

SEQ ID NO: 61371 - protein, 12 aa, unidentified
  source 1..12: note = methanogen bacteria
ACSMLGVPGDAA

SEQ ID NO: 61372 - protein, 12 aa, unidentified
  source 1..12: note = methanogen bacteria
SHLQASLHFSAE

SEQ ID NO: 61373 - protein, 12 aa, unidentified
  source 1..12: note = methanogen bacteria
TYLEQERGLALL

SEQ ID NO: 61374 - protein, 11 aa, unidentified
  source 1..11: note = methanogen bacteria
SDKILNYTTPI

SEQ ID NO: 61375 - protein, 22 aa, unidentified
  source 1..22: note = methanogen bacteria
INNPRSAISVYISNILPNIEFM

SEQ ID NO: 61376 - protein, 13 aa, unidentified
  source 1..13: note = methanogen bacteria
ISEIQSSLNINAE

SEQ ID NO: 61377 - protein, 12 aa, unidentified
  source 1..12: note = methanogen bacteria
TYLAKERGLALI

SEQ ID NO: 61378 - protein, 99 aa, unidentified
  source 1..99: note = methanogen bacteria
MIASGEYKGTNNTELTIDKNLTIMKYGDGEAIFDAESQRRIWTVQATSINITGLTFKNGKTSGNGGAIYFKNSLTNSNINATFINNNANDNGGAVRING

SEQ ID NO: 61379 - protein, 18 aa, unidentified
  source 1..18: note = methanogen bacteria
ISGTFINNTANHAGAVDC

SEQ ID NO: 61380 - protein, 42 aa, unidentified
  source 1..42: note = methanogen bacteria
FINNTARSYGGAIDFYHLSGNISGTFINNSAINNVGGAIYIY

SEQ ID NO: 61381 - protein, 13 aa, unidentified
  source 1..13: note = methanogen bacteria
VSEIQASLNINAE

SEQ ID NO: 61382 - protein, 12 aa, unidentified
  source 1..12: note = methanogen bacteria
TYLTNERGLTMV

SEQ ID NO: 61383 - protein, 14 aa, unidentified
  source 1..14: note = methanogen bacteria
PTSAIDVTPNAIIH

SEQ ID NO: 61384 - protein, 12 aa, unidentified
  source 1..12: note = methanogen bacteria
DFIAANSASLTV

SEQ ID NO: 61385 - protein, 26 aa, unidentified
  source 1..26: note = methanogen bacteria
GTCPTSAIEVTPNSIIHCDTCGEEPK

SEQ ID NO: 61386 - protein, 17 aa, unidentified
  source 1..17: note = methanogen bacteria
PQGALKVEDYEVTEGVT

SEQ ID NO: 61387 - protein, 14 aa, unidentified
  source 1..14: note = methanogen bacteria
PQETIKVTGEKLKE

SEQ ID NO: 61388 - protein, 19 aa, unidentified
  source 1..19: note = methanogen bacteria
PVDVIGIPGVKEPVECDLD

SEQ ID NO: 61389 - protein, 16 aa, unidentified
  source 1..16: note = methanogen bacteria
PVSAITLEEVGSPVTV

SEQ ID NO: 61390 - protein, 15 aa, unidentified
  source 1..15: note = methanogen bacteria
FIAEKIPVKRSKEIK

SEQ ID NO: 61391 - protein, 22 aa, unidentified
  source 1..22: note = methanogen bacteria
EACPGDFIAANSASLTVAIPSV

SEQ ID NO: 61392 - protein, 16 aa, unidentified
  source 1..16: note = methanogen bacteria
ALEIDVEWGEGAPVDA

SEQ ID NO: 61393 - protein, 29 aa, unidentified
  source 1..29: note = methanogen bacteria
NKCPTEAIRVVTKTGMSCPALVETDAEPS

SEQ ID NO: 61394 - protein, 24 aa, unidentified
  source 1..24: note = methanogen bacteria
SVCSNDALKVEQYEVTIDGEPVTR

SEQ ID NO: 61395 - protein, 29 aa, unidentified
  source 1..29: note = methanogen bacteria
SFNPSKCDQCGDCIDACPYDMLHKTDNPK

SEQ ID NO: 61396 - protein, 25 aa, unidentified
  source 1..25: note = methanogen bacteria
GTCPTSAIDVTPEAIIHCDTCGGEP

SEQ ID NO: 61397 - protein, 12 aa, unidentified
  source 1..12: note = methanogen bacteria
LKVEEYEIADGI

SEQ ID NO: 61398 - protein, 10 aa, unidentified
  source 1..10: note = methanogen bacteria
TIKVTGAKLK

SEQ ID NO: 61399 - protein, 14 aa, unidentified
  source 1..14: note = methanogen bacteria
VNAITLEEVGSPIT

SEQ ID NO: 61400 - protein, 13 aa, unidentified
  source 1..13: note = methanogen bacteria
YISEKVPIKRSKE

SEQ ID NO: 61401 - protein, 20 aa, unidentified
  source 1..20: note = methanogen bacteria
ACPGDFIAANSASLTVAIPS

SEQ ID NO: 61402 - protein, 25 aa, unidentified
  source 1..25: note = methanogen bacteria
PTEAIRVVTKTGMSCPALVETDAEP

SEQ ID NO: 61403 - protein, 18 aa, unidentified
  source 1..18: note = methanogen bacteria
SNDALKVEQYEVTIGDEA

SEQ ID NO: 61404 - protein, 21 aa, unidentified
  source 1..21: note = methanogen bacteria
DQCGDCIEACPYDMLHKTDNP

SEQ ID NO: 61405 - protein, 60 aa, unidentified
  source 1..60: note = methanogen bacteria
TIFANIFFSSSNIVLGNGMDLNQTLVVLTHKLPVELQGFVNPYLSSISGSLENVVSYVLH

SEQ ID NO: 61406 - protein, 41 aa, unidentified
  source 1..41: note = methanogen bacteria
WPSTVTFVTPLDSSDIDDAYKLVESLVAKLICNPVDAFAET

SEQ ID NO: 61407 - protein, 10 aa, unidentified
  source 1..10: note = methanogen bacteria
AYTLGIGIPL

SEQ ID NO: 61408 - protein, 11 aa, unidentified
  source 1..11: note = methanogen bacteria
CSLLGISGDIA

SEQ ID NO: 61409 - protein, 16 aa, unidentified
  source 1..16: note = methanogen bacteria
TCPTSAIEVTPNAIIH

SEQ ID NO: 61410 - protein, 10 aa, unidentified
  source 1..10: note = methanogen bacteria
LKVEDYEITD

SEQ ID NO: 61411 - protein, 17 aa, unidentified
  source 1..17: note = methanogen bacteria
GDFISANSASLTVAIPS

SEQ ID NO: 61412 - protein, 10 aa, unidentified
  source 1..10: note = methanogen bacteria
IRVVTKTGML

SEQ ID NO: 61413 - protein, 15 aa, unidentified
  source 1..15: note = methanogen bacteria
TCPTSAINVTPESII

SEQ ID NO: 61414 - protein, 17 aa, unidentified
  source 1..17: note = methanogen bacteria
GDFISANSSSLTVAIPS

SEQ ID NO: 61415 - protein, 41 aa, unidentified
  source 1..41: note = methanogen bacteria
ASIVLNQNVVLNAFSVVSVRSSVQGVSRFDALFKNILIYNN

SEQ ID NO: 61416 - protein, 10 aa, unidentified
  source 1..10: note = methanogen bacteria
SNHSYIHYWM

SEQ ID NO: 61417 - protein, 20 aa, unidentified
  source 1..20: note = methanogen bacteria
GACPTSAIDVTPSTIIHCDT

SEQ ID NO: 61418 - protein, 13 aa, unidentified
  source 1..13: note = methanogen bacteria
NAITLEEVGSPIT

SEQ ID NO: 61419 - protein, 22 aa, unidentified
  source 1..22: note = methanogen bacteria
EACPGDFIAANSASLTVAIPSV

SEQ ID NO: 61420 - protein, 12 aa, unidentified
  source 1..12: note = methanogen bacteria
PTEAIRVVTKTG

SEQ ID NO: 61421 - protein, 13 aa, unidentified
  source 1..13: note = methanogen bacteria
EACPYDMLHKSEN

SEQ ID NO: 61422 - protein, 25 aa, unidentified
  source 1..25: note = methanogen bacteria
GTCPTSAIDVTPNAIIHCDTCGEEP

SEQ ID NO: 61423 - protein, 12 aa, unidentified
  source 1..12: note = methanogen bacteria
QETLKVTGEKLK

SEQ ID NO: 61424 - protein, 12 aa, unidentified
  source 1..12: note = methanogen bacteria
IGIPGVVEPAEY

SEQ ID NO: 61425 - protein, 14 aa, unidentified
  source 1..14: note = methanogen bacteria
VNAITLDEVGSPIT

SEQ ID NO: 61426 - protein, 19 aa, unidentified
  source 1..19: note = methanogen bacteria
PGDFISANSATLTVAIPSV

SEQ ID NO: 61427 - protein, 19 aa, unidentified
  source 1..19: note = methanogen bacteria
KCPTEAIRVVTKTGMLCPA

SEQ ID NO: 61428 - protein, 19 aa, unidentified
  source 1..19: note = methanogen bacteria
SMCSNDALKVEQYELTIDG

SEQ ID NO: 61429 - protein, 21 aa, unidentified
  source 1..21: note = methanogen bacteria
DQCGDCIEACPYDMLHKSDNP

SEQ ID NO: 61430 - protein, 17 aa, unidentified
  source 1..17: note = methanogen bacteria
GTCPTSAIDVTPNAIIH

SEQ ID NO: 61431 - protein, 17 aa, unidentified
  source 1..17: note = methanogen bacteria
GDFISANSASLTVAIPS

SEQ ID NO: 61432 - protein, 10 aa, unidentified
  source 1..10: note = methanogen bacteria
PTEAIRVVSK

SEQ ID NO: 61433 - protein, 10 aa, unidentified
  source 1..10: note = methanogen bacteria
LKVEKYELTI

SEQ ID NO: 61434 - protein, 20 aa, unidentified
  source 1..20: note = methanogen bacteria
GTCPTSAIEVTPNAIIHCDT

SEQ ID NO: 61435 - protein, 12 aa, unidentified
  source 1..12: note = methanogen bacteria
LKVEQYEIADGI

SEQ ID NO: 61436 - protein, 13 aa, unidentified
  source 1..13: note = methanogen bacteria
SAITLEEVGSPVT

SEQ ID NO: 61437 - protein, 17 aa, unidentified
  source 1..17: note = methanogen bacteria
GDFIAANGASLTVAIPS

SEQ ID NO: 61438 - protein, 23 aa, unidentified
  source 1..23: note = methanogen bacteria
PTEAIRVVTKTGMSCPALVETDA

SEQ ID NO: 61439 - protein, 19 aa, unidentified
  source 1..19: note = methanogen bacteria
SNDALKVEQYEITIDGEPV

SEQ ID NO: 61440 - protein, 11 aa, unidentified
  source 1..11: note = methanogen bacteria
IEACPYDMIHK

SEQ ID NO: 61441 - protein, 15 aa, unidentified
  source 1..15: note = methanogen bacteria
IHFFWEYIPEAINFN

SEQ ID NO: 61442 - protein, 18 aa, unidentified
  source 1..18: note = methanogen bacteria
TNTQTGLHSIGTTTLTNL

SEQ ID NO: 61443 - protein, 22 aa, unidentified
  source 1..22: note = methanogen bacteria
PLTMFSGEEQIYLLIDNGAQIG

SEQ ID NO: 61444 - protein, 17 aa, unidentified
  source 1..17: note = methanogen bacteria
GTCPTSAIEVTPESIIH

SEQ ID NO: 61445 - protein, 12 aa, unidentified
  source 1..12: note = methanogen bacteria
NAITLEEVGSPV

SEQ ID NO: 61446 - protein, 18 aa, unidentified
  source 1..18: note = methanogen bacteria
PGDFIAANSASLTVAIPS

SEQ ID NO: 61447 - protein, 19 aa, unidentified
  source 1..19: note = methanogen bacteria
PTQAIRVVTKTGMSCPALV

SEQ ID NO: 61448 - protein, 23 aa, unidentified
  source 1..23: note = methanogen bacteria
SMCSNDALKVEQYEITIDGEPVA

SEQ ID NO: 61449 - protein, 16 aa, unidentified
  source 1..16: note = methanogen bacteria
DCIEACPYDMLHETDN

SEQ ID NO: 61450 - protein, 13 aa, unidentified
  source 1..13: note = methanogen bacteria
GFVRGASGIGTIS

SEQ ID NO: 61451 - protein, 30 aa, unidentified
  source 1..30: note = methanogen bacteria
EDGFSMLSQAVAGVILNYYLTSFICDAVIG

SEQ ID NO: 61452 - protein, 37 aa, unidentified
  source 1..37: note = methanogen bacteria
SFPLGVKYGSAESILGMVGSFIAPIFAPLGFGTWQAA

SEQ ID NO: 61453 - protein, 26 aa, unidentified
  source 1..26: note = methanogen bacteria
GTLGGVDADDKSGVTHLIQDAFTPLS

SEQ ID NO: 61454 - protein, 11 aa, unidentified
  source 1..11: note = methanogen bacteria
YHLQYIRGWDV

SEQ ID NO: 61455 - protein, 18 aa, unidentified
  source 1..18: note = methanogen bacteria
FMGNVEIIPKYYGLLALS

SEQ ID NO: 61456 - protein, 16 aa, unidentified
  source 1..16: note = methanogen bacteria
GEMQVYLISHIELPIT

SEQ ID NO: 61457 - protein, 11 aa, unidentified
  source 1..11: note = methanogen bacteria
TEYATSMGTSA

SEQ ID NO: 61458 - protein, 11 aa, unidentified
  source 1..11: note = methanogen bacteria
LYAVETDLVSA

SEQ ID NO: 61459 - protein, 14 aa, unidentified
  source 1..14: note = methanogen bacteria
LYSNYQSILAITKA

SEQ ID NO: 61460 - protein, 12 aa, unidentified
  source 1..12: note = methanogen bacteria
STIALDQFGVKN

SEQ ID NO: 61461 - protein, 12 aa, unidentified
  source 1..12: note = methanogen bacteria
GFARGASGIGTI

SEQ ID NO: 61462 - protein, 15 aa, unidentified
  source 1..15: note = methanogen bacteria
NMQVYLISYVNLSLT

SEQ ID NO: 61463 - protein, 13 aa, unidentified
  source 1..13: note = methanogen bacteria
NELVNTDFEVNAI

SEQ ID NO: 61464 - protein, 14 aa, unidentified
  source 1..14: note = methanogen bacteria
NAFINIKNLEAYLP

SEQ ID NO: 61465 - protein, 37 aa, unidentified
  source 1..37: note = methanogen bacteria
IGSYPISFGDVYSTLWHHLKGDIENYSYDNVVWNQRM

SEQ ID NO: 61466 - protein, 27 aa, unidentified
  source 1..27: note = methanogen bacteria
MMLTADPNSASSVYTWSVGSIGMTTWE

SEQ ID NO: 61467 - protein, 13 aa, unidentified
  source 1..13: note = methanogen bacteria
GFSRGYTGIGMLS

SEQ ID NO: 61468 - protein, 12 aa, unidentified
  source 1..12: note = methanogen bacteria
YLTEKTGSAMVL

SEQ ID NO: 61469 - protein, 11 aa, unidentified
  source 1..11: note = methanogen bacteria
LITMEYFNGTP

SEQ ID NO: 61470 - protein, 14 aa, unidentified
  source 1..14: note = methanogen bacteria
VGFQRGSSGIGTIA

SEQ ID NO: 61471 - protein, 14 aa, unidentified
  source 1..14: note = methanogen bacteria
VGFARGSSGIGTIA

SEQ ID NO: 61472 - protein, 14 aa, unidentified
  source 1..14: note = methanogen bacteria
VGFVRGSSGIGTIA

SEQ ID NO: 61473 - protein, 14 aa, unidentified
  source 1..14: note = methanogen bacteria
VGFARGSSGIGTIA

SEQ ID NO: 61474 - protein, 25 aa, unidentified
  source 1..25: note = methanogen bacteria
EPGQKELSLEKTTKLNELHELYTGA

SEQ ID NO: 61475 - protein, 63 aa, unidentified
  source 1..63: note = methanogen bacteria
ASPNEMALENKIENGKSNSEVEMIDIINPATKDWKSYHQKSIKSNIDKYNRTMAVYSNESKNV

SEQ ID NO: 61476 - protein, 22 aa, unidentified
  source 1..22: note = methanogen bacteria
SQNEAIKIVNDNDARILSKIKF

SEQ ID NO: 61477 - protein, 10 aa, unidentified
  source 1..10: note = methanogen bacteria
PVLVSRLQAG

SEQ ID NO: 61478 - protein, 28 aa, unidentified
  source 1..28: note = methanogen bacteria
IVDIYSNLNESGENFSSNNTNPDISGCT

SEQ ID NO: 61479 - protein, 80 aa, unidentified
  source 1..80: note = methanogen bacteria
IMRYEENGEVDSEYSKSKMNVHGNVTNPQENSKKFSSNVLEMIKGSIMNGYDEKETFEMLKNYGVKLSNYERQINLGDLD

SEQ ID NO: 61480 - protein, 40 aa, unidentified
  source 1..40: note = methanogen bacteria
ETPQDKVNFILNNMDNIVLTIPTTNAPDWMVNEISSTYEN

SEQ ID NO: 61481 - protein, 14 aa, unidentified
  source 1..14: note = methanogen bacteria
VGFARGSSGIGTIA

SEQ ID NO: 61482 - protein, 12 aa, unidentified
  source 1..12: note = methanogen bacteria
MVAESLLNTGDT

SEQ ID NO: 61483 - protein, 35 aa, unidentified
  source 1..35: note = methanogen bacteria
QFTFGATIGGFIGAPTNFFLSGISLEMIHPDSTIP

SEQ ID NO: 61484 - protein, 14 aa, unidentified
  source 1..14: note = methanogen bacteria
WGGGWLYQLGALDF

SEQ ID NO: 61485 - protein, 17 aa, unidentified
  source 1..17: note = methanogen bacteria
AAPAINGATGLLYGNPS

SEQ ID NO: 61486 - protein, 10 aa, unidentified
  source 1..10: note = methanogen bacteria
TENRHGSFDT

SEQ ID NO: 61487 - protein, 17 aa, unidentified
  source 1..17: note = methanogen bacteria
TGDIFTVTKNATVIYGP

SEQ ID NO: 61488 - protein, 11 aa, unidentified
  source 1..11: note = methanogen bacteria
MVAESLLNTGD

SEQ ID NO: 61489 - protein, 34 aa, unidentified
  source 1..34: note = methanogen bacteria
FAFGETISGFIGAPTNFFLAGIGVDMLHPDTGIP

SEQ ID NO: 61490 - protein, 14 aa, unidentified
  source 1..14: note = methanogen bacteria
WGGGWLYQLGALDF

SEQ ID NO: 61491 - protein, 17 aa, unidentified
  source 1..17: note = methanogen bacteria
ATPAIGGVAGLICGNPE

SEQ ID NO: 61492 - protein, 11 aa, unidentified
  source 1..11: note = methanogen bacteria
RIRKSRRNRRS

SEQ ID NO: 61493 - protein, 17 aa, unidentified
  source 1..17: note = methanogen bacteria
KVYGVPHWAISIIGGII

SEQ ID NO: 61494 - protein, 40 aa, unidentified
  source 1..40: note = methanogen bacteria
AIYSEDHQDYSSFWTSVFAGVTQGMDMTAFGEDYVDYRRV

SEQ ID NO: 61495 - protein, 43 aa, unidentified
  source 1..43: note = methanogen bacteria
LEPGLGLNFAGVEYGNKATMNQTFADTMLNIIPENLIESMADG

SEQ ID NO: 61496 - protein, 10 aa, unidentified
  source 1..10: note = methanogen bacteria
QAFGIHFGPQ

SEQ ID NO: 61497 - protein, 15 aa, unidentified
  source 1..15: note = methanogen bacteria
SQPAAPTMSAVLNLN

SEQ ID NO: 61498 - protein, 13 aa, unidentified
  source 1..13: note = methanogen bacteria
MASAGTWEALFER

SEQ ID NO: 61499 - protein, 14 aa, unidentified
  source 1..14: note = methanogen bacteria
IGIDEVIEALKLSN

SEQ ID NO: 61500 - protein, 10 aa, unidentified
  source 1..10: note = methanogen bacteria
AFGARVSPII

SEQ ID NO: 61501 - protein, 10 aa, unidentified
  source 1..10: note = methanogen bacteria
YANAGITASL

SEQ ID NO: 61502 - protein, 38 aa, unidentified
  source 1..38: note = methanogen bacteria
ISSGGIIPINEAIASLISAIQKGGHDLDTTELYIFQSR

SEQ ID NO: 61503 - protein, 13 aa, unidentified
  source 1..13: note = methanogen bacteria
MGISISALSDFSN

SEQ ID NO: 61504 - protein, 23 aa, unidentified
  source 1..23: note = methanogen bacteria
SLEKDNLTNVMWWLYGSFANITW

SEQ ID NO: 61505 - protein, 32 aa, unidentified
  source 1..32: note = methanogen bacteria
FAFGSDINGLIGSPTNFFLQGIGLDDLNGTIP

SEQ ID NO: 61506 - protein, 14 aa, unidentified
  source 1..14: note = methanogen bacteria
WGGGWLMQMGALDF

SEQ ID NO: 61507 - protein, 17 aa, unidentified
  source 1..17: note = methanogen bacteria
AVPSVGEVAGLIAGNAN

SEQ ID NO: 61508 - protein, 32 aa, unidentified
  source 1..32: note = methanogen bacteria
FAFGSDVNGLIGSPTNFFLQGISLDDLNGTIP

SEQ ID NO: 61509 - protein, 14 aa, unidentified
  source 1..14: note = methanogen bacteria
WGGGWLMQMGALDF

SEQ ID NO: 61510 - protein, 18 aa, unidentified
  source 1..18: note = methanogen bacteria
FAVPAIGGTAGLLYGNPD

SEQ ID NO: 61511 - protein, 15 aa, unidentified
  source 1..15: note = methanogen bacteria
PSQVFIPLFMKIFGG

SEQ ID NO: 61512 - protein, 32 aa, unidentified
  source 1..32: note = methanogen bacteria
FAFGTDINGLIGAPTNFFLQGIGLDDLNGTIP

SEQ ID NO: 61513 - protein, 14 aa, unidentified
  source 1..14: note = methanogen bacteria
WGGGWLMQMGALDF

SEQ ID NO: 61514 - protein, 17 aa, unidentified
  source 1..17: note = methanogen bacteria
AVPAIGGVAGLIAGNPY

SEQ ID NO: 61515 - protein, 32 aa, unidentified
  source 1..32: note = methanogen bacteria
FAFGSDINGLIGAPTNFFLQGIGLDDLNGTIP

SEQ ID NO: 61516 - protein, 14 aa, unidentified
  source 1..14: note = methanogen bacteria
WGGGWLMQMGALDF

SEQ ID NO: 61517 - protein, 18 aa, unidentified
  source 1..18: note = methanogen bacteria
FAVPAIGGTAGLLYGNPN

SEQ ID NO: 61518 - protein, 34 aa, unidentified
  source 1..34: note = methanogen bacteria
QFAFGEPSLYGFIGSPTNFLLKGIGLNDLTGSIP

SEQ ID NO: 61519 - protein, 14 aa, unidentified
  source 1..14: note = methanogen bacteria
WGGGWLMQMNALDF

SEQ ID NO: 61520 - protein, 18 aa, unidentified
  source 1..18: note = methanogen bacteria
FAVPAIGGTAGLLYGNPG

SEQ ID NO: 61521 - protein, 32 aa, unidentified
  source 1..32: note = methanogen bacteria
FAFGNDINGLIGAPTNFFLQGIALDDLNGTIP

SEQ ID NO: 61522 - protein, 14 aa, unidentified
  source 1..14: note = methanogen bacteria
WGGGWLMQMGALDF

SEQ ID NO: 61523 - protein, 17 aa, unidentified
  source 1..17: note = methanogen bacteria
AVPSVGGVAGLIAGNPN

SEQ ID NO: 61524 - protein, 10 aa, unidentified
  source 1..10: note = methanogen bacteria
MISMLLDTGD

SEQ ID NO: 61525 - protein, 34 aa, unidentified
  source 1..34: note = methanogen bacteria
QVAFAPSSIAGFIGAPTNFFLEGIGINSLTGTIP

SEQ ID NO: 61526 - protein, 14 aa, unidentified
  source 1..14: note = methanogen bacteria
WGGGWLMNMGAIDF

SEQ ID NO: 61527 - protein, 17 aa, unidentified
  source 1..17: note = methanogen bacteria
ASPAINGVAGLFYGNPS

SEQ ID NO: 61528 - protein, 16 aa, unidentified
  source 1..16: note = methanogen bacteria
RLNGEYFSFIDSLLGL

SEQ ID NO: 61529 - protein, 11 aa, unidentified
  source 1..11: note = methanogen bacteria
GYSSDVLGVGS

SEQ ID NO: 61530 - protein, 10 aa, unidentified
  source 1..10: note = methanogen bacteria
PYSRETGLTD

SEQ ID NO: 61531 - protein, 70 aa, unidentified
  source 1..70: note = methanogen bacteria
MMAYSSIIDWVTATWGTPLMERGFYPFDDYNLPYHISMALWNIIGGAIAWLINLLFPGNSLSEWLISPYT

SEQ ID NO: 61532 - protein, 13 aa, unidentified
  source 1..13: note = methanogen bacteria
PLSSRWFVVNYDA

SEQ ID NO: 61533 - protein, 19 aa, unidentified
  source 1..19: note = methanogen bacteria
LAGSMNIGDIVNAQSEIWF

SEQ ID NO: 61534 - protein, 25 aa, unidentified
  source 1..25: note = methanogen bacteria
GGWTIPFVSLDYFLGPDAVDNCLYW

SEQ ID NO: 61535 - protein, 32 aa, unidentified; identical to SEQ ID NO: 61505
  source 1..32: note = methanogen bacteria

SEQ ID NO: 61536 - protein, 14 aa, unidentified
  source 1..14: note = methanogen bacteria
WGGGWLMQMGALDF

SEQ ID NO: 61537 - protein, 18 aa, unidentified
  source 1..18: note = methanogen bacteria
FAVPAVGGAAGLIAGNPN

SEQ ID NO: 61538 - protein, 14 aa, unidentified
  source 1..14: note = methanogen bacteria
IGIDEVIEALKLSN

SEQ ID NO: 61539 - protein, 32 aa, unidentified; identical to SEQ ID NO: 61505
  source 1..32: note = methanogen bacteria

SEQ ID NO: 61540 - protein, 14 aa, unidentified
  source 1..14: note = methanogen bacteria
WGGGWLMQMGALDF

SEQ ID NO: 61541 - protein, 17 aa, unidentified
  source 1..17: note = methanogen bacteria
AVPSIGGVAGLLYGNPG

SEQ ID NO: 61542 - protein, 32 aa, unidentified
  source 1..32: note = methanogen bacteria
FAFGSDINGLIGAPSNFFLQGIGLDDLNGTIP

SEQ ID NO: 61543 - protein, 14 aa, unidentified
  source 1..14: note = methanogen bacteria
WGGGWLMQMGALDF

SEQ ID NO: 61544 - protein, 18 aa, unidentified
  source 1..18: note = methanogen bacteria
FAVPAVGGVAGLIAGNPE

SEQ ID NO: 61545 - protein, 32 aa, unidentified
  source 1..32: note = methanogen bacteria
FAFGNDIYGLIGSPTNFFLQGIGLDDLNGTIP

SEQ ID NO: 61546 - protein, 14 aa, unidentified
  source 1..14: note = methanogen bacteria
WGGGWLMQMGALDF

SEQ ID NO: 61547 - protein, 18 aa, unidentified
  source 1..18: note = methanogen bacteria
FAVPAIGGAAGLFTGNPN

SEQ ID NO: 61548 - protein, 34 aa, unidentified
  source 1..34: note = methanogen bacteria
SISFGEPSLYGFIGSPSNLFLKGIGISDLTGSIP

SEQ ID NO: 61549 - protein, 14 aa, unidentified
  source 1..14: note = methanogen bacteria
WGGGWLMQINALDF

SEQ ID NO: 61550 - protein, 18 aa, unidentified
  source 1..18: note = methanogen bacteria
FAVPAINGAAGLLYGNPS

SEQ ID NO: 61551 - protein, 32 aa, unidentified
  source 1..32: note = methanogen bacteria
FAFGSDVYGLIGSPTNFFLKGIALDDLTETIP

SEQ ID NO: 61552 - protein, 14 aa, unidentified
  source 1..14: note = methanogen bacteria
WGGGWLMQMGALDF

SEQ ID NO: 61553 - protein, 18 aa, unidentified
  source 1..18: note = methanogen bacteria
FATPLIGEASGLLYGNPN

SEQ ID NO: 61554 - protein, 32 aa, unidentified
  source 1..32: note = methanogen bacteria
FAFGSDIYGLIGSPTNFFLQGIALDDLNGTIP

SEQ ID NO: 61555 - protein, 14 aa, unidentified
  source 1..14: note = methanogen bacteria
WGGGWLMQMGALDF

SEQ ID NO: 61556 - protein, 17 aa, unidentified
  source 1..17: note = methanogen bacteria
AIPSIGGVAGLIAGNPN

SEQ ID NO: 61557 - protein, 33 aa, unidentified
  source 1..33: note = methanogen bacteria
LAFGEPSLYGFIGTPSHFFLQGIGLEDLTGSIP

SEQ ID NO: 61558 - protein, 14 aa, unidentified
  source 1..14: note = methanogen bacteria
WGGGWLMQMNALDF

SEQ ID NO: 61559 - protein, 18 aa, unidentified
  source 1..18: note = methanogen bacteria
FAVPAIGGTAGLLYGNPG

SEQ ID NO: 61560 - protein, 34 aa, unidentified
  source 1..34: note = methanogen bacteria
SFAFGDTSLHGLIAAPANFLMMGIGIDDVTGTIP

SEQ ID NO: 61561 - protein, 14 aa, unidentified
  source 1..14: note = methanogen bacteria
WGGGWLMQMGALDF

SEQ ID NO: 61562 - protein, 17 aa, unidentified
  source 1..17: note = methanogen bacteria
ASPAINEAAGLVFGNPS

SEQ ID NO: 61563 - protein, 32 aa, unidentified
  source 1..32: note = methanogen bacteria
FAFGSDIMGIIGSPTNFFLQGIGLDDLNGTIP

SEQ ID NO: 61564 - protein, 15 aa, unidentified
  source 1..15: note = methanogen bacteria
VWGGGWLMQMGALDF

SEQ ID NO: 61565 - protein, 17 aa, unidentified
  source 1..17: note = methanogen bacteria
AVPSIGEVSGLIAGNPE

SEQ ID NO: 61566 - protein, 33 aa, unidentified
  source 1..33: note = methanogen bacteria
FAFGEPSLYGFIGSPSNFFLQGIGLDDLTGSIP

SEQ ID NO: 61567 - protein, 14 aa, unidentified
  source 1..14: note = methanogen bacteria
WGGGWLMQMNALDF

SEQ ID NO: 61568 - protein, 18 aa, unidentified
  source 1..18: note = methanogen bacteria
FAVPAIGGTAGLIYGNPE

SEQ ID NO: 61569 - protein, 32 aa, unidentified
  source 1..32: note = methanogen bacteria
FAFGDDINGLIGAPANFFLQGIGLEDLTGTIP

SEQ ID NO: 61570 - protein, 14 aa, unidentified
  source 1..14: note = methanogen bacteria
WGGGWLMQMGALDF

SEQ ID NO: 61571 - protein, 17 aa, unidentified
  source 1..17: note = methanogen bacteria
AVPAVGGVAGLIAGNPN

SEQ ID NO: 61572 - protein, 32 aa, unidentified
  source 1..32: note = methanogen bacteria
FAFGTDVSGLIGSPTNFFLQGMALDDLSGSIP

SEQ ID NO: 61573 - protein, 14 aa, unidentified
  source 1..14: note = methanogen bacteria
WGGGWLMQMGALDF

SEQ ID NO: 61574 - protein, 18 aa, unidentified
  source 1..18: note = methanogen bacteria
FAVPAINGAAGLIAGNPN

SEQ ID NO: 61575 - protein, 32 aa, unidentified
  source 1..32: note = methanogen bacteria
ISSFTSAWGSDTTSFFVNNVGGSSNLTSSVGI

SEQ ID NO: 61576 - protein, 23 aa, unidentified
  source 1..23: note = methanogen bacteria
SLPGSFSGISTLFTPNWNALYDI

SEQ ID NO: 61577 - protein, 35 aa, unidentified; identical to SEQ ID NO: 58155
  source 1..35: note = methanogen bacteria

SEQ ID NO: 61578 - protein, 32 aa, unidentified
  source 1..32: note = methanogen bacteria
FAFGSDIHGLIGSPTNFFLQGIGLDDLKGTIP

SEQ ID NO: 61579 - protein, 14 aa, unidentified
  source 1..14: note = methanogen bacteria
WGGGWLMQMGALDF

SEQ ID NO: 61580 - protein, 18 aa, unidentified
  source 1..18: note = methanogen bacteria
FAVPAVGGVAGLFYGNPN

SEQ ID NO: 61581 - protein, 32 aa, unidentified
  source 1..32: note = methanogen bacteria
FAFGSDMWGLIGSPTNFFLQGIALDDLNGTIP

SEQ ID NO: 61582 - protein, 14 aa, unidentified
  source 1..14: note = methanogen bacteria
WGEGWLMQMGALDF

SEQ ID NO: 61583 - protein, 18 aa, unidentified
  source 1..18: note = methanogen bacteria
FAVPAVGGVAGLIAGNAN

SEQ ID NO: 61584 - protein, 33 aa, unidentified
  source 1..33: note = methanogen bacteria
FAFGEPSIYGFIGSPSNFFLRGIGLDSLTGSIP

SEQ ID NO: 61585 - protein, 14 aa, unidentified
  source 1..14: note = methanogen bacteria
WGGGWLMQINALDF

SEQ ID NO: 61586 - protein, 16 aa, unidentified
  source 1..16: note = methanogen bacteria
AVPAIGGTAGLIYGNP

SEQ ID NO: 61587 - protein, 33 aa, unidentified
  source 1..33: note = methanogen bacteria
QFAFGSDISGLIGAPTHFFLQGIALDDLNGTIP

SEQ ID NO: 61588 - protein, 14 aa, unidentified
  source 1..14: note = methanogen bacteria
WGGGWLMQMGALDF

SEQ ID NO: 61589 - protein, 17 aa, unidentified
  source 1..17: note = methanogen bacteria
AVPSIGGVAGLIAGNPG

SEQ ID NO: 61590 - protein, 15 aa, unidentified
  source 1..15: note = methanogen bacteria
PSQVFIPLFMKIFGM

SEQ ID NO: 61591 - protein, 34 aa, unidentified
  source 1..34: note = methanogen bacteria
PFAFGDVSINGLIAQPAHFFLSGIGIEDLTGTIP

SEQ ID NO: 61592 - protein, 14 aa, unidentified
  source 1..14: note = methanogen bacteria
WGGGWLMQMGALDF

SEQ ID NO: 61593 - protein, 17 aa, unidentified
  source 1..17: note = methanogen bacteria
ASPAVGGVAGLIYGNPG

SEQ ID NO: 61594 - protein, 34 aa, unidentified
  source 1..34: note = methanogen bacteria
PFAFGDVSISGLIAEPAHFFMTGIGVNDLTGSIP

SEQ ID NO: 61595 - protein, 14 aa, unidentified
  source 1..14: note = methanogen bacteria
WGGGWLMQMGALDF

SEQ ID NO: 61596 - protein, 18 aa, unidentified
  source 1..18: note = methanogen bacteria
FASPAINGAAGLLFGNPG

SEQ ID NO: 61597 - protein, 10 aa, unidentified
  source 1..10: note = methanogen bacteria
QLASSTPIDS

SEQ ID NO: 61598 - protein, 23 aa, unidentified
  source 1..23: note = methanogen bacteria
LGGDISNALPIASIASANSAPLS

SEQ ID NO: 61599 - protein, 17 aa, unidentified
  source 1..17: note = methanogen bacteria
VGIGTTSIAQSILMAGL

SEQ ID NO: 61600 - protein, 12 aa, unidentified
  source 1..12: note = methanogen bacteria
LSEYYTPRITQK

SEQ ID NO: 61601 - protein, 10 aa, unidentified
  source 1..10: note = methanogen bacteria
ESVDIVDLST

SEQ ID NO: 61602 - protein, 13 aa, unidentified
  source 1..13: note = methanogen bacteria
TDINVPFEHDNNH

SEQ ID NO: 61603 - protein, 15 aa, unidentified
  source 1..15: note = methanogen bacteria
MISVNEPEANMDYMM

SEQ ID NO: 61604 - protein, 16 aa, unidentified
  source 1..16: note = methanogen bacteria
GNMQVYLISQINLALT

SEQ ID NO: 61605 - protein, 34 aa, unidentified
  source 1..34: note = methanogen bacteria
QIAFAPESLSGIIGIPQSLLMEGIGVDSLTGTIP

SEQ ID NO: 61606 - protein, 14 aa, unidentified
  source 1..14: note = methanogen bacteria
WGGGWLMNMGAIDF

SEQ ID NO: 61607 - protein, 17 aa, unidentified
  source 1..17: note = methanogen bacteria
ASPAINGVAGLFYGNPN

SEQ ID NO: 61608 - protein, 15 aa, unidentified
  source 1..15: note = methanogen bacteria
GNMQVYLISYIKLPL

SEQ ID NO: 61609 - protein, 34 aa, unidentified
  source 1..34: note = methanogen bacteria
QIAFAPESYAGIIGIPQNLFMEGIGVDSLTGTIP

SEQ ID NO: 61610 - protein, 13 aa, unidentified
  source 1..13: note = methanogen bacteria
WGGGWLMNMGAID

SEQ ID NO: 61611 - protein, 17 aa, unidentified
  source 1..17: note = methanogen bacteria
ACPAINGVAGLFYGNPN

SEQ ID NO: 61612 - protein, 10 aa, unidentified
  source 1..10: note = methanogen bacteria
QLATSAPIDS

SEQ ID NO: 61613 - protein, 21 aa, unidentified
  source 1..21: note = methanogen bacteria
LGVHISNALPIAGKIDSTALS

SEQ ID NO: 61614 - protein, 17 aa, unidentified
  source 1..17: note = methanogen bacteria
VGIGTTSIAQSILIAGL

SEQ ID NO: 61615 - protein, 12 aa, unidentified
  source 1..12: note = methanogen bacteria
IAGIGANAIAAT

SEQ ID NO: 61616 - protein, 16 aa, unidentified
  source 1..16: note = methanogen bacteria
LEIMQAGDAMEYAMTY

SEQ ID NO: 61617 - protein, 13 aa, unidentified
  source 1..13: note = methanogen bacteria
LTMVAGTMAVGAY

SEQ ID NO: 61618 - protein, 21 aa, unidentified
  source 1..21: note = methanogen bacteria
EYISLLFTYSPESIAMRPMLI

SEQ ID NO: 61619 - protein, 34 aa, unidentified
  source 1..34: note = methanogen bacteria
QLSFATTSIFGLIGVPQNLFLEGIGVDSLTGSIP

SEQ ID NO: 61620 - protein, 14 aa, unidentified
  source 1..14: note = methanogen bacteria
WGGGWLMNMGAVDF

SEQ ID NO: 61621 - protein, 17 aa, unidentified
  source 1..17: note = methanogen bacteria
ASPAINGIAGLFYGNPE

SEQ ID NO: 61622 - protein, 27 aa, unidentified
  source 1..27: note = methanogen bacteria
LTTITEVSSVSLVLPGVEVPGSPFFIP

SEQ ID NO: 61623 - protein, 16 aa, unidentified
  source 1..16: note = methanogen bacteria
TIIVKIASQFMTYLMA

SEQ ID NO: 61624 - protein, 11 aa, unidentified
  source 1..11: note = methanogen bacteria
TMLADGGMPAS

SEQ ID NO: 61625 - protein, 18 aa, unidentified
  source 1..18: note = methanogen bacteria
GIIISDPSTYVSMGTLAQ

SEQ ID NO: 61626 - protein, 40 aa, unidentified; identical to SEQ ID NO: 60550
  source 1..40: note = methanogen bacteria

SEQ ID NO: 61627 - protein, 23 aa, unidentified
  source 1..23: note = methanogen bacteria
CFVSILNSNNDDIKLFNLNRYCM

SEQ ID NO: 61628 - protein, 12 aa, unidentified
  source 1..12: note = methanogen bacteria
VQIMDGFGLPAA

SEQ ID NO: 61629 - protein, 11 aa, unidentified
  source 1..11: note = methanogen bacteria
LLSAEPFNYNT

SEQ ID NO: 61630 - protein, 17 aa, unidentified
  source 1..17: note = methanogen bacteria
GNMQVYLISYINLALTR

SEQ ID NO: 61631 - protein, 12 aa, unidentified
  source 1..12: note = methanogen bacteria
VQITNGFGLSAA

SEQ ID NO: 61632 - protein, 11 aa, unidentified
  source 1..11: note = methanogen bacteria
LLSDAPFNYNT

SEQ ID NO: 61633 - protein, 92 aa, unidentified
  source 1..92: note = methanogen bacteria
MENNTIIRMYRGIHSSYPHNYIIGNKIYDINGFDENNGVGGDYGIYGGNDTLIANNSIYNADVIGAGILVGSNSDVYGNYIQINSSGDGIRI

SEQ ID NO: 61634 - protein, 34 aa, unidentified
  source 1..34: note = methanogen bacteria
PFAFGDVSINGLIAQPAHFFLSGICINDLTGSIP

SEQ ID NO: 61635 - protein, 14 aa, unidentified
  source 1..14: note = methanogen bacteria
WGGGWLMQMGALDF

SEQ ID NO: 61636 - protein, 17 aa, unidentified
  source 1..17: note = methanogen bacteria
ASPLINEASGLVFGNPG

SEQ ID NO: 61637 - protein, 12 aa, unidentified
  source 1..12: note = methanogen bacteria
VQITNGFGLSAA

SEQ ID NO: 61638 - protein, 11 aa, unidentified
  source 1..11: note = methanogen bacteria
LLSDAPFNYNT

SEQ ID NO: 61639 - protein, 12 aa, unidentified
  source 1..12: note = methanogen bacteria
VQITNGFGLSAA

SEQ ID NO: 61640 - protein, 11 aa, unidentified
  source 1..11: note = methanogen bacteria
LLSAEPFNYNT

SEQ ID NO: 61641 - protein, 14 aa, unidentified
  source 1..14: note = methanogen bacteria
VNDPFIKDFILMDN

SEQ ID NO: 61642 - protein, 43 aa, unidentified; identical to SEQ ID NO: 61062
  source 1..43: note = methanogen bacteria

SEQ ID NO: 61643 - protein, 12 aa, unidentified
  source 1..12: note = methanogen bacteria
AQAYGIDFGATA

SEQ ID NO: 61644 - protein, 12 aa, unidentified
  source 1..12: note = methanogen bacteria
SMILSLVGLPLA

SEQ ID NO: 61645 - protein, 11 aa, unidentified
  source 1..11: note = methanogen bacteria
TNVMKQQLIPD

SEQ ID NO: 61646 - protein, 43 aa, unidentified
  source 1..43: note = methanogen bacteria
KYYATPKLLHSLIAIKYFESSQQFNYIVNNPTMIFTFFQSIFF

SEQ ID NO: 61647 - protein, 10 aa, unidentified
  source 1..10: note = methanogen bacteria
QHATTMGSTA

SEQ ID NO: 61648 - protein, 10 aa, unidentified
  source 1..10: note = methanogen bacteria
LYASQLHLES

SEQ ID NO: 61649 - protein, 14 aa, unidentified
  source 1..14: note = methanogen bacteria
IGIDEVIEALKLSN

SEQ ID NO: 61650 - protein, 10 aa, unidentified
  source 1..10: note = methanogen bacteria
YSRAGITPSI

SEQ ID NO: 61651 - protein, 15 aa, unidentified
  source 1..15: note = methanogen bacteria
HGMKGLEFIASNPNT

SEQ ID NO: 61652 - protein, 24 aa, unidentified
  source 1..24: note = methanogen bacteria
TYLSDPLTIADWGVHLLPISHSAY

SEQ ID NO: 61653 - protein, 18 aa, unidentified
  source 1..18: note = methanogen bacteria
IFMIGPIANNFIGSSFQY

SEQ ID NO: 61654 - protein, 34 aa, unidentified
  source 1..34: note = methanogen bacteria
DIVHTQSSSLHMIFGLPLEAVYYDTLYLWPALEN

SEQ ID NO: 61655 - protein, 23 aa, unidentified
  source 1..23: note = methanogen bacteria
LLIRAYIWQNILGPISYYNSPYL

SEQ ID NO: 61656 - protein, 14 aa, unidentified
  source 1..14: note = methanogen bacteria
IGIDEVLEDLKQSN

SEQ ID NO: 61657 - protein, 10 aa, unidentified
  source 1..10: note = methanogen bacteria
AFGATISPIV

SEQ ID NO: 61658 - protein, 11 aa, unidentified
  source 1..11: note = methanogen bacteria
YSNAGVTASIS

SEQ ID NO: 61659 - protein, 17 aa, unidentified
  source 1..17: note = methanogen bacteria
FRLSGDYTNFFDALRGL

SEQ ID NO: 61660 - protein, 10 aa, unidentified
  source 1..10: note = methanogen bacteria
QLASSSPIDS

SEQ ID NO: 61661 - protein, 23 aa, unidentified
  source 1..23: note = methanogen bacteria
LGGDISNALPIASITSAKSTALS

SEQ ID NO: 61662 - protein, 17 aa, unidentified
  source 1..17: note = methanogen bacteria
VGIGTTSIAQSILMAGL

SEQ ID NO: 61663 - protein, 23 aa, unidentified
  source 1..23: note = methanogen bacteria
YANIPAMFVLIFQDAFDFQSIAG

SEQ ID NO: 61664 - protein, 26 aa, unidentified
  source 1..26: note = methanogen bacteria
STGVARDAAVSGAPYVQNAISTVFGW

SEQ ID NO: 61665 - protein, 27 aa, unidentified
  source 1..27: note = methanogen bacteria
MGYGGYYYGSNDIDKPSDMYGIGKDSN

SEQ ID NO: 61666 - protein, 15 aa, unidentified
  source 1..15: note = methanogen bacteria
HGMGNIDFVASNPNN

SEQ ID NO: 61667 - protein, 24 aa, unidentified
  source 1..24: note = methanogen bacteria
LPPVEPITLENIGIYLLPISHSAY

SEQ ID NO: 61668 - protein, 15 aa, unidentified
  source 1..15: note = methanogen bacteria
TFMDAGAPMFVGYSF

SEQ ID NO: 61669 - protein, 36 aa, unidentified
  source 1..36: note = methanogen bacteria
YYDIIYPLSQNLHMWVGYPIEAVDDGILYMAPALEN

SEQ ID NO: 61670 - protein, 23 aa, unidentified
  source 1..23: note = methanogen bacteria
LIVRHYLWKTILNTSSYYNSSNL

SEQ ID NO: 61671 - protein, 15 aa, unidentified
  source 1..15: note = methanogen bacteria
PSQVFIPLFMKIFGM

SEQ ID NO: 61672 - protein, 13 aa, unidentified
  source 1..13: note = methanogen bacteria
YATYQTLYNIPNN

SEQ ID NO: 61673 - protein, 11 aa, unidentified
  source 1..11: note = methanogen bacteria
IMSLMQFGTNS

SEQ ID NO: 61674 - protein, 12 aa, unidentified
  source 1..12: note = methanogen bacteria
STMEDTLVSIAG

SEQ ID NO: 61675 - protein, 11 aa, unidentified
  source 1..11: note = methanogen bacteria
KDEILSLAHGE

SEQ ID NO: 61676 - protein, 14 aa, unidentified
  source 1..14: note = methanogen bacteria
QDQQDALIEYAVLI

SEQ ID NO: 61677 - protein, 13 aa, unidentified
  source 1..13: note = methanogen bacteria
LNGIEEEFGAGKL

SEQ ID NO: 61678 - protein, 11 aa, unidentified
  source 1..11: note = methanogen bacteria
DYLVDMGESMA

SEQ ID NO: 61679 - protein, 19 aa, unidentified
  source 1..19: note = methanogen bacteria
DIYDPDLSNNNASNSTFIP

SEQ ID NO: 61680 - protein, 65 aa, unidentified
  source 1..65: note = methanogen bacteria
YWNVTVVNHGPDAAVNVVVDDIIPKELVDVVVISKSAGIFDSDAGVWTGFSLASGANATLIIRTK

SEQ ID NO: 61681 - protein, 72 aa, unidentified
  source 1..72: note = methanogen bacteria
YGAHKGDVISWVIVVVNHGPDAAVNVVVNDVIPKELTNVTVSIITDGVFENNVWSGFDLNSGEFAVLIFDTT

SEQ ID NO: 61682 - protein, 10 aa, unidentified
  source 1..10: note = methanogen bacteria
LGSKASESKA

SEQ ID NO: 61683 - protein, 11 aa, unidentified
  source 1..11: note = methanogen bacteria
TEYSTKMGSTA

SEQ ID NO: 61684 - protein, 10 aa, unidentified
  source 1..10: note = methanogen bacteria
LYAIQINLQS

SEQ ID NO: 61685 - protein, 11 aa, unidentified
  source 1..11: note = methanogen bacteria
VIQLYFNVSIY

SEQ ID NO: 61686 - protein, 12 aa, unidentified
  source 1..12: note = methanogen bacteria
TYLRQVTMMDPE

SEQ ID NO: 61687 - protein, 29 aa, unidentified
  source 1..29: note = methanogen bacteria
MKLDIVDAIYFTFETIATIGYGDIVPVTN

SEQ ID NO: 61688 - protein, 19 aa, unidentified
  source 1..19: note = methanogen bacteria
LTGTSAGTHTIFGVSNTLS

SEQ ID NO: 61689 - protein, 17 aa, unidentified
  source 1..17: note = methanogen bacteria
VGMGSTSIAQSILLMGL

SEQ ID NO: 61690 - protein, 14 aa, unidentified
  source 1..14: note = methanogen bacteria
FRLSGDYSGFIEAL

SEQ ID NO: 61691 - protein, 57 aa, unidentified
  source 1..57: note = methanogen bacteria
VMGGINTAVDTYAPEYSGNEQFHQDVYDYFQKVGNIDEIKAQDSVIVNTADIIIQNA

SEQ ID NO: 61692 - protein, 10 aa, unidentified
  source 1..10: note = methanogen bacteria
QIASASPANS

SEQ ID NO: 61693 - protein, 19 aa, unidentified
  source 1..19: note = methanogen bacteria
LANSPVQAAAISGISKPLS

SEQ ID NO: 61694 - protein, 17 aa, unidentified
  source 1..17: note = methanogen bacteria
VGIGTNNVAHAILVMGL

SEQ ID NO: 61695 - protein, 24 aa, unidentified
  source 1..24: note = methanogen bacteria
KYWDEISAFLSKVGQWVYDNVIKP

SEQ ID NO: 61696 - protein, 14 aa, unidentified
  source 1..14: note = methanogen bacteria
VDFFVGLWESIKEI

SEQ ID NO: 61697 - protein, 21 aa, unidentified
  source 1..21: note = methanogen bacteria
HGIDQFVRPFTQPVLMGSSKG

SEQ ID NO: 61698 - protein, 61 aa, unidentified
  source 1..61: note = methanogen bacteria
RLSLGIDVFTIFVAMDPSPTTTSIYHSHLYKSIFGEILGALLIYIPAGIHTGSSLGTYTPS

SEQ ID NO: 61699 - protein, 83 aa, unidentified
  source 1..83: note = methanogen bacteria
SFYGSTPDSYELTIENAEDIDLSNYTILNSREDGNRTVVEISNEYNEMGLLNQLAETLKGKCDWYSLSMNAYSYFENGRMVFN

SEQ ID NO: 61700 - protein, 11 aa, unidentified
  source 1..11: note = methanogen bacteria
FTNKSLLPSPS

SEQ ID NO: 61701 - protein, 18 aa, unidentified
  source 1..18: note = methanogen bacteria
FLGGIPLFSGILKGKAAG

SEQ ID NO: 61702 - protein, 84 aa, unidentified
  source 1..84: note = methanogen bacteria
VKSIEWQHWTLNPIELISYRAAFTLNILDKVIPIQTTTHGNLFYSTITGYFTHTDPRILVGQAVLSQTKSITSTILGPSLLDFG

SEQ ID NO: 61703 - protein, 10 aa, unidentified
  source 1..10: note = methanogen bacteria
QIATSSSFDS

SEQ ID NO: 61704 - protein, 18 aa, unidentified
  source 1..18: note = methanogen bacteria
TGTTDGTNTLFGVSNALS

SEQ ID NO: 61705 - protein, 17 aa, unidentified
  source 1..17: note = methanogen bacteria
VGMGSDSIAQSILLMGL

SEQ ID NO: 61706 - protein, 10 aa, unidentified
  source 1..10: note = methanogen bacteria
QIGSVPEPNS

SEQ ID NO: 61707 - protein, 16 aa, unidentified
  source 1..16: note = methanogen bacteria
MGFTSHTYMTNPTDLG

SEQ ID NO: 61708 - protein, 18 aa, unidentified
  source 1..18: note = methanogen bacteria
ANIGAGYTIAQAILLANL

SEQ ID NO: 61709 - protein, 30 aa, unidentified
  source 1..30: note = methanogen bacteria
GSFERLHLLGLAYQGLNADNLVYDLVKDNA

SEQ ID NO: 61710 - protein, 40 aa, unidentified
  source 1..40: note = methanogen bacteria
SVVQATIARAEADSIIAPEEQLTDFAIYNTDDAAKWNAYT

SEQ ID NO: 61711 - protein, 26 aa, unidentified
  source 1..26: note = methanogen bacteria
GIPSTLLYFNDNLEFATGLPGLDYGR

SEQ ID NO: 61712 - protein, 69 aa, unidentified
  source 1..69: note = methanogen bacteria
MADYVSIRDWINYPDPMSNEFYPFGDAYNLPYDISLKLWDIIGGTLAWLLDLLFPGNTVSEWLVCDGTS

SEQ ID NO: 61713 - protein, 13 aa, unidentified
  source 1..13: note = methanogen bacteria
PLSNRWFVVDYGT

SEQ ID NO: 61714 - protein, 20 aa, unidentified
  source 1..20: note = methanogen bacteria
LAGTFNINELVAAQYDNVWF

SEQ ID NO: 61715 - protein, 17 aa, unidentified
  source 1..17: note = methanogen bacteria
GGWTLPFIDLNAWDLWW

SEQ ID NO: 61716 - protein, 51 aa, unidentified
  source 1..51: note = methanogen bacteria
FSSGFGDAEEYYHVAERFLSGKFSYSELGTDLPPLTVLLLIPPKLFSYSPE

SEQ ID NO: 61717 - protein, 38 aa, unidentified
  source 1..38: note = methanogen bacteria
PTHAFGEIPFITLPDRAASDSALGWLYGLLNWAPDASS

SEQ ID NO: 61718 - protein, 10 aa, unidentified
  source 1..10: note = methanogen bacteria
MTFFLETFPG

SEQ ID NO: 61719 - protein, 13 aa, unidentified
  source 1..13: note = methanogen bacteria
AVETLLSNPSLLT

SEQ ID NO: 61720 - protein, 11 aa, unidentified
  source 1..11: note = methanogen bacteria
TEYATSLGSSA

SEQ ID NO: 61721 - protein, 10 aa, unidentified
  source 1..10: note = methanogen bacteria
LYASEVNLTE

SEQ ID NO: 61722 - protein, 17 aa, unidentified
  source 1..17: note = methanogen bacteria
GIGGYHLMPIKNSATLT

SEQ ID NO: 61723 - protein, 16 aa, unidentified
  source 1..16: note = methanogen bacteria
CIGTVDISQAILISGL

SEQ ID NO: 61724 - protein, 16 aa, unidentified
  source 1..16: note = methanogen bacteria
TSLVEGNFSESREFAS

SEQ ID NO: 61725 - protein, 15 aa, unidentified
  source 1..15: note = methanogen bacteria
SGLPQMVDDFGTNEA

SEQ ID NO: 61726 - protein, 11 aa, unidentified
  source 1..11: note = methanogen bacteria
YIYQDKFGFST

SEQ ID NO: 61727 - protein, 12 aa, unidentified
  source 1..12: note = methanogen bacteria
TSIADDFGTSES

SEQ ID NO: 61728 - protein, 11 aa, unidentified
  source 1..11: note = methanogen bacteria
PFLLEAAGLSE

SEQ ID NO: 61729 - protein, 18 aa, unidentified
  source 1..18: note = methanogen bacteria
FAVKSYQPLPVANASALT

SEQ ID NO: 61730 - protein, 17 aa, unidentified
  source 1..17: note = methanogen bacteria
VGIGTLDISQAILIAGL

SEQ ID NO: 61731 - protein, 15 aa, unidentified
  source 1..15: note = methanogen bacteria
SGLPQMVEDFGTNES

SEQ ID NO: 61732 - protein, 11 aa, unidentified
  source 1..11: note = methanogen bacteria
YIYQEKFGFST

SEQ ID NO: 61733 - protein, 12 aa, unidentified
  source 1..12: note = methanogen bacteria
TSITDDFGTSES

SEQ ID NO: 61734 - protein, 11 aa, unidentified
  source 1..11: note = methanogen bacteria
PFLLDAAGLSD

SEQ ID NO: 61735 - protein, 20 aa, unidentified
  source 1..20: note = methanogen bacteria
VGNETFNATVVNGTAIINIT

SEQ ID NO: 61736 - protein, 11 aa, unidentified
  source 1..11: note = methanogen bacteria
HEVEVIYSGDA

SEQ ID NO: 61737 - protein, 12 aa, unidentified
  source 1..12: note = methanogen bacteria
VNGTAVVTVTVP

SEQ ID NO: 61738 - protein, 14 aa, unidentified
  source 1..14: note = methanogen bacteria
GMNYTAKIDDGKAT

SEQ ID NO: 61739 - protein, 10 aa, unidentified
  source 1..10: note = methanogen bacteria
EYASSMGSSA

SEQ ID NO: 61740 - protein, 10 aa, unidentified
  source 1..10: note = methanogen bacteria
LYAVEVDLVD

SEQ ID NO: 61741 - protein, 11 aa, unidentified
  source 1..11: note = methanogen bacteria
FKSRPLLPFPS

SEQ ID NO: 61742 - protein, 17 aa, unidentified
  source 1..17: note = methanogen bacteria
NLGGIPLFSGYLKSKAA

SEQ ID NO: 61743 - protein, 83 aa, unidentified
  source 1..83: note = methanogen bacteria
RSIEWQHWTLNPLELISYRAAFTLNVLDRITYHQAITGGNLLYSTLTGYFTSTDPRVLVGEAVLLKHHSITSTIFGPVLLDFG

SEQ ID NO: 61744 - protein, 10 aa, unidentified
  source 1..10: note = methanogen bacteria
EYATSMGSTA

SEQ ID NO: 61745 - protein, 10 aa, unidentified
  source 1..10: note = methanogen bacteria
LYAVEVNLTS

SEQ ID NO: 61746 - protein, 18 aa, unidentified
  source 1..18: note = methanogen bacteria
HLGGIPLFSATLKAKAAS

SEQ ID NO: 61747 - protein, 84 aa, unidentified
  source 1..84: note = methanogen bacteria
VQAISWQHWHLNAIELVSYRAAFTLNVLEHAIRNQFSTAGNLFYSTLTGFFTHIDPRVLVGQATLARDHSITSTIFGPALLDFG

SEQ ID NO: 61748 - protein, 12 aa, unidentified
  source 1..12: note = methanogen bacteria
TAISDDFSISES

SEQ ID NO: 61749 - protein, 11 aa, unidentified
  source 1..11: note = methanogen bacteria
PFMLQTAGMSE

SEQ ID NO: 61750 - protein, 12 aa, unidentified
  source 1..12: note = methanogen bacteria
YEADIAEVSFDE

SEQ ID NO: 61751 - protein, 39 aa, unidentified
  source 1..39: note = methanogen bacteria
LGMDPDMGLALGSISLVGGHGTAGSFGPDLVDIYGVENA

SEQ ID NO: 61752 - protein, 12 aa, unidentified
  source 1..12: note = methanogen bacteria
HYADVAEFHFDD

SEQ ID NO: 61753 - protein, 40 aa, unidentified
  source 1..40: note = methanogen bacteria
YMGLDPRIGLCLGSISLTGGHGTAASYGQLLVEEYGLTSA

SEQ ID NO: 61754 - protein, 10 aa, unidentified
  source 1..10: note = methanogen bacteria
EMKLWQLSDL

SEQ ID NO: 61755 - protein, 30 aa, unidentified
  source 1..30: note = methanogen bacteria
FRLSGDYAGFVEALMGLFQNPGEFVNNLLN

SEQ ID NO: 61756 - protein, 21 aa, unidentified
  source 1..21: note = methanogen bacteria
NPAYSIPEFTTQGLYLTDKSI

SEQ ID NO: 61757 - protein, 30 aa, unidentified
  source 1..30: note = methanogen bacteria
FFHGQPQLAAIYGATPSVGVYEMAKTLVGP

SEQ ID NO: 61758 - protein, 12 aa, unidentified
  source 1..12: note = methanogen bacteria
TDIADDFGISES

SEQ ID NO: 61759 - protein, 11 aa, unidentified
  source 1..11: note = methanogen bacteria
PFLLQTAGMSE

SEQ ID NO: 61760 - protein, 15 aa, unidentified
  source 1..15: note = methanogen bacteria
QGGVIVSAVPFSINY

SEQ ID NO: 61761 - protein, 27 aa, unidentified
  source 1..27: note = methanogen bacteria
FPDQIGLEHYWKSIIPTFFTNGQFSRY

SEQ ID NO: 61762 - protein, 10 aa, unidentified
  source 1..10: note = methanogen bacteria
QTQAFNLNDG

SEQ ID NO: 61763 - protein, 20 aa, unidentified
  source 1..20: note = methanogen bacteria
ESLHLIETGFVISSFNCYLS

SEQ ID NO: 61764 - protein, 20 aa, unidentified
  source 1..20: note = methanogen bacteria
MSFAHFFLDKKFAFLAQMDP

SEQ ID NO: 61765 - protein, 10 aa, unidentified
  source 1..10: note = methanogen bacteria
EFATSLGSSA

SEQ ID NO: 61766 - protein, 10 aa, unidentified
  source 1..10: note = methanogen bacteria
LYAVEVNLTT

SEQ ID NO: 61767 - protein, 12 aa, unidentified
  source 1..12: note = methanogen bacteria
SYSITVLGTDAT

SEQ ID NO: 61768 - protein, 10 aa, unidentified
  source 1..10: note = methanogen bacteria
PYGIELGMET

SEQ ID NO: 61769 - protein, 11 aa, unidentified
  source 1..11: note = methanogen bacteria
AEYATSLGSSA

SEQ ID NO: 61770 - protein, 10 aa, unidentified
  source 1..10: note = methanogen bacteria
LYAIEVDLTA

SEQ ID NO: 61771 - protein, 12 aa, unidentified
  source 1..12: note = methanogen bacteria
TYKIKNLVFPSP

SEQ ID NO: 61772 - protein, 17 aa, unidentified
  source 1..17: note = methanogen bacteria
SGGIPLFSGYLKAHAVT

SEQ ID NO: 61773 - protein, 84 aa, unidentified
  source 1..84: note = methanogen bacteria
VKSIEWQQWNLNPLELFFYRAGYTLSVFDELLNFQGQTHGTLLYYSIMGFFESQDPRIIVGTLVLGYKHSATSTIFGPSLLDFG

SEQ ID NO: 61774 - protein, 17 aa, unidentified
  source 1..17: note = methanogen bacteria
AVSGYNLMPVTNSATLT

SEQ ID NO: 61775 - protein, 16 aa, unidentified
  source 1..16: note = methanogen bacteria
CMGTVDISQAILISGL

SEQ ID NO: 61776 - protein, 12 aa, unidentified
  source 1..12: note = methanogen bacteria
YEADIAEVSFDE

SEQ ID NO: 61777 - protein, 39 aa, unidentified
  source 1..39: note = methanogen bacteria
LGMDPEMGLALGSISLVGGHGTAGSFGPDLVDIYGVENA

SEQ ID NO: 61778 - protein, 14 aa, unidentified
  source 1..14: note = methanogen bacteria
CSNVYDINFCRWSC

SEQ ID NO: 61779 - protein, 13 aa, unidentified
  source 1..13: note = methanogen bacteria
LNNQLAQQQNTFL

SEQ ID NO: 61780 - protein, 82 aa, unidentified
  source 1..82: note = methanogen bacteria
GAILSSTVVYVDSDDVDRLLPADSNSILVASDLIHSIKFDKDGDIQVVKAFINLTKSFSEDEVLDAISSIDLKREGLDSILY

SEQ ID NO: 61781 - protein, 10 aa, unidentified
  source 1..10: note = methanogen bacteria
SVVIGDLVPG

SEQ ID NO: 61782 - protein, 17 aa, unidentified
  source 1..17: note = methanogen bacteria
LGFGSNAAGTLTSNSLG

SEQ ID NO: 61783 - protein, 18 aa, unidentified
  source 1..18: note = methanogen bacteria
ANIGANYTIAQAILLANL

SEQ ID NO: 61784 - protein, 29 aa, unidentified
  source 1..29: note = methanogen bacteria
MQLDIVDAIYFTFETIATIGYGDIVPVTN

SEQ ID NO: 61785 - protein, 17 aa, unidentified
  source 1..17: note = methanogen bacteria
AMGGYNLMPVANSETLT

SEQ ID NO: 61786 - protein, 16 aa, unidentified
  source 1..16: note = methanogen bacteria
CMATLDISQAILISGL

SEQ ID NO: 61787 - protein, 10 aa, unidentified
  source 1..10: note = methanogen bacteria
QIGSAAPIDS

SEQ ID NO: 61788 - protein, 17 aa, unidentified
  source 1..17: note = methanogen bacteria
GINGYHLMPVATSETLT

SEQ ID NO: 61789 - protein, 17 aa, unidentified
  source 1..17: note = methanogen bacteria
VSIGTVDISQAILISGL

SEQ ID NO: 61790 - protein, 15 aa, unidentified
  source 1..15: note = methanogen bacteria
PSQVFIPLFIKLFGG

SEQ ID NO: 61791 - protein, 10 aa, unidentified
  source 1..10: note = methanogen bacteria
EYATSMGSSA

SEQ ID NO: 61792 - protein, 10 aa, unidentified
  source 1..10: note = methanogen bacteria
LYAVEVNLVD

SEQ ID NO: 61793 - protein, 15 aa, unidentified
  source 1..15: note = methanogen bacteria
PSKVFIPLFMKIFGM

SEQ ID NO: 61794 - protein, 11 aa, unidentified
  source 1..11: note = methanogen bacteria
TEYATSLGSSA

SEQ ID NO: 61795 - protein, 10 aa, unidentified
  source 1..10: note = methanogen bacteria
LYAAEVDLTA

SEQ ID NO: 61796 - protein, 15 aa, unidentified
  source 1..15: note = methanogen bacteria
PSRVFIPLFMKLFGG

SEQ ID NO: 61797 - protein, 35 aa, unidentified
  source 1..35: note = methanogen bacteria
FPVSVPLTASVDPSSVFSKILTDMISNPVTALIEG

SEQ ID NO: 61798 - protein, 12 aa, unidentified
  source 1..12: note = methanogen bacteria
TCHSMGIAINFP

SEQ ID NO: 61799 - protein, 11 aa, unidentified
  source 1..11: note = methanogen bacteria
CSLFGISQDIS

SEQ ID NO: 61800 - protein, 18 aa, unidentified
  source 1..18: note = methanogen bacteria
PGQSTLFIKINSNCDYNM

SEQ ID NO: 61801 - protein, 14 aa, unidentified
  source 1..14: note = methanogen bacteria
LVVSSSQAEFTHPF

SEQ ID NO: 61802 - protein, 100 aa, unidentified
  source 1..100: note = methanogen bacteria
SRVTGMTIFSPMLRLGRIEQYSTSSVKMVLNNIQLIGHNGNASYWGADGTAFAEGYITLPMQLVLFFGLPFPMFFGILVNQKDTVDYMLPGILGYGFDFG

SEQ ID NO: 61803 - protein, 10 aa, unidentified
  source 1..10: note = methanogen bacteria
QIASASPANS

SEQ ID NO: 61804 - protein, 19 aa, unidentified
  source 1..19: note = methanogen bacteria
LANSPVPTTALSGISKTLS

SEQ ID NO: 61805 - protein, 17 aa, unidentified
  source 1..17: note = methanogen bacteria
VGIGTDNVAHAILLMGL

SEQ ID NO: 61806 - protein, 15 aa, unidentified
  source 1..15: note = methanogen bacteria
PSKVFIPLFIKMFGG

SEQ ID NO: 61807 - protein, 12 aa, unidentified
  source 1..12: note = methanogen bacteria
TSICDDLAVSES

SEQ ID NO: 61808 - protein, 12 aa, unidentified
  source 1..12: note = methanogen bacteria
PFLKQVAGISDG

SEQ ID NO: 61809 - protein, 12 aa, unidentified
  source 1..12: note = methanogen bacteria
SYTMDVLGADST

SEQ ID NO: 61810 - protein, 10 aa, unidentified
  source 1..10: note = methanogen bacteria
PYGEATGLHS

SEQ ID NO: 61811 - protein, 25 aa, unidentified
  source 1..25: note = methanogen bacteria
NPGQSILIYLINENCDLNMILIAQN

SEQ ID NO: 61812 - protein, 19 aa, unidentified
  source 1..19: note = methanogen bacteria
DIALLVVSSSQAEFTHPFG

SEQ ID NO: 61813 - protein, 100 aa, unidentified
  source 1..100: note = methanogen bacteria
ARVSGMTIFSPMLRLGRIEQYSTSSVKMVLNNIQLIGHNGNASYWGAEGTAFAEGYITLPMQLVLFFGLPFPMFFGILVNQKDTVDYMLPGILGYGFDFG

SEQ ID NO: 61814 - protein, 13 aa, unidentified
  source 1..13: note = methanogen bacteria
MTSICSDLNVSES

SEQ ID NO: 61815 - protein, 12 aa, unidentified
  source 1..12: note = methanogen bacteria
PFLKQVAGISDS

SEQ ID NO: 61816 - protein, 11 aa, unidentified
  source 1..11: note = methanogen bacteria
SFSMDVLGADS

SEQ ID NO: 61817 - protein, 10 aa, unidentified
  source 1..10: note = methanogen bacteria
PYGEAIGLHT

SEQ ID NO: 61818 - protein, 12 aa, unidentified
  source 1..12: note = methanogen bacteria
LSFGQHEFTHPF

SEQ ID NO: 61819 - protein, 99 aa, unidentified
  source 1..99: note = methanogen bacteria
SRITGIEIFSPMLRISRLDQNSLASVKLVLDNTWLIGHDPAASYWSASTGFADGYISLPMSFILMFGLPFPLFFGMLVTKKDVIDYMLPGTFGYAYDFG

SEQ ID NO: 61820 - protein, 18 aa, unidentified
  source 1..18: note = methanogen bacteria
GVYSSFMIELDRSSAICQ

SEQ ID NO: 61821 - protein, 32 aa, unidentified
  source 1..32: note = methanogen bacteria
YKSYVNDLGKELESGELNSLNKSFEDISAKFE

SEQ ID NO: 61822 - protein, 10 aa, unidentified
  source 1..10: note = methanogen bacteria
SVVIGDLVPG

SEQ ID NO: 61823 - protein, 10 aa, unidentified
  source 1..10: note = methanogen bacteria
EYATSMGSSA

SEQ ID NO: 61824 - protein, 10 aa, unidentified
  source 1..10: note = methanogen bacteria
LYAVEVDLTG

SEQ ID NO: 61825 - protein, 10 aa, unidentified
  source 1..10: note = methanogen bacteria
QIGSLSAVDS

SEQ ID NO: 61826 - protein, 18 aa, unidentified
  source 1..18: note = methanogen bacteria
FAGNTFATMPAATASKLG

SEQ ID NO: 61827 - protein, 16 aa, unidentified
  source 1..16: note = methanogen bacteria
GLGTTSISQAILISGL

SEQ ID NO: 61828 - protein, 29 aa, unidentified
  source 1..29: note = methanogen bacteria
SIIRPGFGTSSTITLVIKIFSKESLSLRD

SEQ ID NO: 61829 - protein, 15 aa, unidentified
  source 1..15: note = methanogen bacteria
PTNVFIPLAMKVFGL

SEQ ID NO: 61830 - protein, 88 aa, unidentified
  source 1..88: note = methanogen bacteria
DESFYNLIGEEISREYLVDLMINYYQLKKQVGETKVTDFNEGSEIRNILEAIAVAVYALMEEENELTKIGFIDTADGDFLDLHGRNPF

SEQ ID NO: 61831 - protein, 33 aa, unidentified
  source 1..33: note = methanogen bacteria
ERDTGTEAQGSVTFSIAEALTSEMIIPSDTVVV

SEQ ID NO: 61832 - protein, 31 aa, unidentified
  source 1..31: note = methanogen bacteria
TFIDTIIDAEILDSEGNPFTELSVNDDECIK

SEQ ID NO: 61833 - protein, 15 aa, unidentified
  source 1..15: note = methanogen bacteria
PSQVFIPLFMKIFGG

SEQ ID NO: 61834 - protein, 12 aa, unidentified
  source 1..12: note = methanogen bacteria
PQIAQYFNVDIT

SEQ ID NO: 61835 - protein, 12 aa, unidentified
  source 1..12: note = methanogen bacteria
EFLNSLTNIFGT

SEQ ID NO: 61836 - protein, 17 aa, unidentified
  source 1..17: note = methanogen bacteria
PANVFIPLFMKVFSLIC

SEQ ID NO: 61837 - protein, 14 aa, unidentified
  source 1..14: note = methanogen bacteria
FDLDKFHYTFSNPN

SEQ ID NO: 61838 - protein, 23 aa, unidentified
  source 1..23: note = methanogen bacteria
ITPAHMSISDFGQGLLPISHSAY

SEQ ID NO: 61839 - protein, 15 aa, unidentified
  source 1..15: note = methanogen bacteria
MTSYPVQNIFVGNNF

SEQ ID NO: 61840 - protein, 32 aa, unidentified
  source 1..32: note = methanogen bacteria
MMDFNTSTNYWWSLPMFGVMEGSIGFSFSLEN

SEQ ID NO: 61841 - protein, 20 aa, unidentified
  source 1..20: note = methanogen bacteria
FFRQILWGHLGINSFYNSPY

SEQ ID NO: 61842 - protein, 10 aa, unidentified
  source 1..10: note = methanogen bacteria
SSQAEFTHPF

SEQ ID NO: 61843 - protein, 99 aa, unidentified
  source 1..99: note = methanogen bacteria
RVSGMTIFSPLLRLGRIEQYSLSSIKTVLNNIQMIGHSAKASYWGAEGTAFAEGYITLPMQLVLFFGLPFPMFFGILVNQKDTIDYMLPGIFGYGFDFG

SEQ ID NO: 61844 - protein, 10 aa, unidentified
  source 1..10: note = methanogen bacteria
EYATSMGSSA

SEQ ID NO: 61845 - protein, 10 aa, unidentified
  source 1..10: note = methanogen bacteria
LYAVEVNLTG

SEQ ID NO: 61846 - protein, 15 aa, unidentified
  source 1..15: note = methanogen bacteria
PSKVFIPLFMKIFGG

SEQ ID NO: 61847 - protein, 11 aa, unidentified
  source 1..11: note = methanogen bacteria
QISEYFNTTIA

SEQ ID NO: 61848 - protein, 10 aa, unidentified
  source 1..10: note = methanogen bacteria
FLQTVCHIYT

SEQ ID NO: 61849 - protein, 11 aa, unidentified
  source 1..11: note = methanogen bacteria
TEYASSLGTSA

SEQ ID NO: 61850 - protein, 10 aa, unidentified
  source 1..10: note = methanogen bacteria
LYAVETDLTA

SEQ ID NO: 61851 - protein, 15 aa, unidentified
  source 1..15: note = methanogen bacteria
PSKVFIPLFMKIFGG

SEQ ID NO: 61852 - protein, 11 aa, unidentified
  source 1..11: note = methanogen bacteria
SYSITVLGTDA

SEQ ID NO: 61853 - protein, 10 aa, unidentified
  source 1..10: note = methanogen bacteria
PYGIELGMET

SEQ ID NO: 61854 - protein, 15 aa, unidentified
  source 1..15: note = methanogen bacteria
PSKVFIPLFMKIFGG

SEQ ID NO: 61855 - protein, 79 aa, unidentified
  source 1..79: note = methanogen bacteria
SMIYDTNYWALVIRNIDSGNGLYGLDGYFYTPVWGYLLALGEWFNDSFLNLGESAVRVSEIVYFENGDHQTTAMITSVA

SEQ ID NO: 61856 - protein, 28 aa, unidentified
  source 1..28: note = methanogen bacteria
ISDGTVGECFRFITDRMGISFGDSAGSR

SEQ ID NO: 61857 - protein, 15 aa, unidentified
  source 1..15: note = methanogen bacteria
PSKVFIPLFMKIFGG

SEQ ID NO: 61858 - protein, 11 aa, unidentified
  source 1..11: note = methanogen bacteria
TEYATTMGSTA

SEQ ID NO: 61859 - protein, 10 aa, unidentified
  source 1..10: note = methanogen bacteria
LYAVEVNLTG

SEQ ID NO: 61860 - protein, 12 aa, unidentified
  source 1..12: note = methanogen bacteria
PQIAQYFNIGIN

SEQ ID NO: 61861 - protein, 11 aa, unidentified
  source 1..11: note = methanogen bacteria
QFLQTITHIID

SEQ ID NO: 61862 - protein, 13 aa, unidentified
  source 1..13: note = methanogen bacteria
GMFGTDIALTNFN

SEQ ID NO: 61863 - protein, 23 aa, unidentified
  source 1..23: note = methanogen bacteria
LTPSSISVEILGQSLLPISHSGY

SEQ ID NO: 61864 - protein, 18 aa, unidentified
  source 1..18: note = methanogen bacteria
PPMTAYPVQMVYSGNNFQ

SEQ ID NO: 61865 - protein, 32 aa, unidentified
  source 1..32: note = methanogen bacteria
YIDLTSKAYIWWSLPIEGIMKNSLFTGVYAEN

SEQ ID NO: 61866 - protein, 24 aa, unidentified
  source 1..24: note = methanogen bacteria
NTIVSNLLLWKTLDLPSYYNCPYL

SEQ ID NO: 61867 - protein, 17 aa, unidentified
  source 1..17: note = methanogen bacteria
GINGNQLIPVSNSATLT

SEQ ID NO: 61868 - protein, 16 aa, unidentified
  source 1..16: note = methanogen bacteria
CIGTVDISQAILISGL

SEQ ID NO: 61869 - protein, 12 aa, unidentified
  source 1..12: note = methanogen bacteria
TGIADDFGVSES

SEQ ID NO: 61870 - protein, 12 aa, unidentified
  source 1..12: note = methanogen bacteria
PFMLDAVGMSPE

SEQ ID NO: 61871 - protein, 15 aa, unidentified
  source 1..15: note = methanogen bacteria
PSKVFIPLFMKIFGG

SEQ ID NO: 61872 - protein, 11 aa, unidentified
  source 1..11: note = methanogen bacteria
TEYATAMGSTA

SEQ ID NO: 61873 - protein, 10 aa, unidentified
  source 1..10: note = methanogen bacteria
LYAVEVNLTA

SEQ ID NO: 61874 - protein, 15 aa, unidentified
  source 1..15: note = methanogen bacteria
PSKVFIPLFMKIFGG

SEQ ID NO: 61875 - protein, 10 aa, unidentified
  source 1..10: note = methanogen bacteria
QIATAAPLNS

SEQ ID NO: 61876 - protein, 17 aa, unidentified
  source 1..17: note = methanogen bacteria
GLNGYHLIPAKNSASLT

SEQ ID NO: 61877 - protein, 17 aa, unidentified
  source 1..17: note = methanogen bacteria
VSIGTADISQAILLSGL

SEQ ID NO: 61878 - protein, 17 aa, unidentified
  source 1..17: note = methanogen bacteria
GINGNHLIPVANSAALT

SEQ ID NO: 61879 - protein, 16 aa, unidentified
  source 1..16: note = methanogen bacteria
CIGTVDISQAILISGL

SEQ ID NO: 61880 - protein, 10 aa, unidentified
  source 1..10: note = methanogen bacteria
EYATALGSTA

SEQ ID NO: 61881 - protein, 10 aa, unidentified
  source 1..10: note = methanogen bacteria
LYAVEADLVG

SEQ ID NO: 61882 - protein, 10 aa, unidentified
  source 1..10: note = methanogen bacteria
SVVIGDLVPG

SEQ ID NO: 61883 - protein, 15 aa, unidentified
  source 1..15: note = methanogen bacteria
PSKVFIPLFMKIFGM

SEQ ID NO: 61884 - protein, 11 aa, unidentified
  source 1..11: note = methanogen bacteria
TEYATTMGSTA

SEQ ID NO: 61885 - protein, 10 aa, unidentified
  source 1..10: note = methanogen bacteria
LYAVEVNLTA

SEQ ID NO: 61886 - protein, 12 aa, unidentified
  source 1..12: note = methanogen bacteria
SQISEHFATSIA

SEQ ID NO: 61887 - protein, 12 aa, unidentified
  source 1..12: note = methanogen bacteria
YFLQTVSHVYTY

SEQ ID NO: 61888 - protein, 15 aa, unidentified
  source 1..15: note = methanogen bacteria
PSQVFIPLFMRIFGG

SEQ ID NO: 61889 - protein, 11 aa, unidentified
  source 1..11: note = methanogen bacteria
TEYATSMGSTA

SEQ ID NO: 61890 - protein, 10 aa, unidentified
  source 1..10: note = methanogen bacteria
LYAAEVNMSG

SEQ ID NO: 61891 - protein, 15 aa, unidentified
  source 1..15: note = methanogen bacteria
PSKVFIPLFMKIFGG

SEQ ID NO: 61892 - protein, 19 aa, unidentified
  source 1..19: note = methanogen bacteria
FYPSMSATYKLPSWNPAWS

SEQ ID NO: 61893 - protein, 11 aa, unidentified
  source 1..11: note = methanogen bacteria
FFLNSLGIPYS

SEQ ID NO: 61894 - protein, 11 aa, unidentified
  source 1..11: note = methanogen bacteria
NIIENIGGNIS

SEQ ID NO: 61895 - protein, 15 aa, unidentified
  source 1..15: note = methanogen bacteria
PSQVFIPLFMKIFGG

SEQ ID NO: 61896 - protein, 10 aa, unidentified
  source 1..10: note = methanogen bacteria
FFLKNLGISY

SEQ ID NO: 61897 - protein, 11 aa, unidentified
  source 1..11: note = methanogen bacteria
NIMENIGGNIS

SEQ ID NO: 61898 - protein, 15 aa, unidentified
  source 1..15: note = methanogen bacteria
PSQVFIPLFMKIFGG

SEQ ID NO: 61899 - protein, 11 aa, unidentified
  source 1..11: note = methanogen bacteria
SQISEYFNTSI

SEQ ID NO: 61900 - protein, 12 aa, unidentified
  source 1..12: note = methanogen bacteria
LFLQVVSHVYTY

SEQ ID NO: 61901 - protein, 15 aa, unidentified
  source 1..15: note = methanogen bacteria
PSKVFIPLFMKIFGG

SEQ ID NO: 61902 - protein, 15 aa, unidentified
  source 1..15: note = methanogen bacteria
PSKVFIPLFMKIFGG

SEQ ID NO: 61903 - protein, 11 aa, unidentified
  source 1..11: note = methanogen bacteria
YFLKNLGLSYV

SEQ ID NO: 61904 - protein, 11 aa, unidentified
  source 1..11: note = methanogen bacteria
NIIENVGGNIS

SEQ ID NO: 61905 - protein, 10 aa, unidentified
  source 1..10: note = methanogen bacteria
QIASASSLNS

SEQ ID NO: 61906 - protein, 18 aa, unidentified
  source 1..18: note = methanogen bacteria
LLDNTSGVTIFSSSKALS

SEQ ID NO: 61907 - protein, 17 aa, unidentified
  source 1..17: note = methanogen bacteria
VGIGTDNISHSILLMGL

SEQ ID NO: 61908 - protein, 12 aa, unidentified
  source 1..12: note = methanogen bacteria
PKIFNPDVTSYT

SEQ ID NO: 61909 - protein, 52 aa, unidentified
  source 1..52: note = methanogen bacteria
FDWLGFGPAASYYLLADQFLGGNWDYDTYGMNLPPLVIPILMLIKSLSQDYN

SEQ ID NO: 61910 - protein, 27 aa, unidentified
  source 1..27: note = methanogen bacteria
LHLEEVTAVTAYLGGMQAFGFSPYGTY

SEQ ID NO: 61911 - protein, 79 aa, unidentified
  source 1..79: note = methanogen bacteria
GSDVNFTVYVDKTEDYIREFKGISEYFLLSKVFTNGWVIGDGGWDESATNEAIEAIAAEMVYNEHIDEESLKFILDLKK

SEQ ID NO: 61912 - protein, 54 aa, unidentified
  source 1..54: note = methanogen bacteria
CVVTYKGSDIFEMGVLADGDYIVCPNGVDYWRHGHLDNIDDVVKKNVYLASSDP

SEQ ID NO: 61913 - protein, 95 aa, unidentified
  source 1..95: note = methanogen bacteria
HVKLNENGFSDDVYVSNEDGSLVNQTNYIYADCGTYYALNKTIVSKDDILEYGSDYIYTAQFVNRDGDVLANKIVQVIVNGKSYEYVTDNDGFIN

SEQ ID NO: 61914 - protein, 83 aa, unidentified
  source 1..83: note = methanogen bacteria
IVVTNPITGDVVKNTITVLPNSVPSTDSNESEDVGLVNVVDKNQVSTFKFDKQTSPVKNNSVNISVSAIQISSTLWEFIIELL

SEQ ID NO: 61915 - protein, 10 aa, unidentified
  source 1..10: note = methanogen bacteria
PLLAGIWILS

SEQ ID NO: 61916 - protein, 12 aa, unidentified
  source 1..12: note = methanogen bacteria
SQISEYFNTSIA

SEQ ID NO: 61917 - protein, 12 aa, unidentified
  source 1..12: note = methanogen bacteria
YFLQTVSHIYTY

SEQ ID NO: 61918 - protein, 10 aa, unidentified
  source 1..10: note = methanogen bacteria
YYGELPAPNL

SEQ ID NO: 61919 - protein, 17 aa, unidentified
  source 1..17: note = methanogen bacteria
LGGIPLFSATLKAQAAS

SEQ ID NO: 61920 - protein, 84 aa, unidentified
  source 1..84: note = methanogen bacteria
VQVISWQHWHLNPIELVSYRAAFTLNILAAAIEKQFSTMGNLFYATLTGFFTHTDPRVLVGVATINRNHSITSTIFGPALLDFG

SEQ ID NO: 61921 - protein, 63 aa, unidentified
  source 1..63: note = methanogen bacteria
IAVFANMFFSSQNLSLTSGIDLNAAIATLIQALPIELQGLVKPYVGTLTEGIHQALTYVFGYA

SEQ ID NO: 61922 - protein, 10 aa, unidentified
  source 1..10: note = methanogen bacteria
EYATSMGSSA

SEQ ID NO: 61923 - protein, 10 aa, unidentified
  source 1..10: note = methanogen bacteria
LYASEVNLTA

SEQ ID NO: 61924 - protein, 19 aa, unidentified
  source 1..19: note = methanogen bacteria
YYLGFPLKPNAVLNMNKDA

SEQ ID NO: 61925 - protein, 16 aa, unidentified
  source 1..16: note = methanogen bacteria
PSQVFFPLFVQLFGGG

SEQ ID NO: 61926 - protein, 19 aa, unidentified
  source 1..19: note = methanogen bacteria
RKVVLKFNGKTYEKTSNKN

SEQ ID NO: 61927 - protein, 37 aa, unidentified
  source 1..37: note = methanogen bacteria
LRIYLKDSSKKAISHKKMTIKIGSRKYIKRTSSEGII

SEQ ID NO: 61928 - protein, 18 aa, unidentified
  source 1..18: note = methanogen bacteria
KSYKYSEVRDVQNTGYTC

SEQ ID NO: 61929 - protein, 15 aa, unidentified
  source 1..15: note = methanogen bacteria
ERYLAKLSQTDRKGT

SEQ ID NO: 61930 - protein, 10 aa, unidentified
  source 1..10: note = methanogen bacteria
GEVYTERTTQ

SEQ ID NO: 61931 - protein, 10 aa, unidentified
  source 1..10: note = methanogen bacteria
AYVGLYHTGN

SEQ ID NO: 61932 - protein, 12 aa, unidentified
  source 1..12: note = methanogen bacteria
SQISEYFNTSIS

SEQ ID NO: 61933 - protein, 11 aa, unidentified
  source 1..11: note = methanogen bacteria
FLQAVSQIYTY

SEQ ID NO: 61934 - protein, 28 aa, unidentified
  source 1..28: note = methanogen bacteria
SLGTVLKTPSVSILIPGVEVPGSPIFIP

SEQ ID NO: 61935 - protein, 23 aa, unidentified
  source 1..23: note = methanogen bacteria
YHGDLGLSMFGLTALFKTFLLQH

SEQ ID NO: 61936 - protein, 25 aa, unidentified
  source 1..25: note = methanogen bacteria
VFHQGFQRTLFLHHYNFYTRSYMDV

SEQ ID NO: 61937 - protein, 12 aa, unidentified
  source 1..12: note = methanogen bacteria
SQISEYFHTSIS

SEQ ID NO: 61938 - protein, 12 aa, unidentified
  source 1..12: note = methanogen bacteria
YFLQTVSQIYTY

SEQ ID NO: 61939 - protein, 18 aa, unidentified
  source 1..18: note = methanogen bacteria
DMFIRPFFQIILMGSSKG

SEQ ID NO: 61940 - protein, 61 aa, unidentified
  source 1..61: note = methanogen bacteria
IRLVLNLPINSTFIVVNPSMTSTSIMHSHVFKSIFGFIASSIIHNIPHGIHVGNSLEHYIP

SEQ ID NO: 61941 - protein, 75 aa, unidentified
  source 1..75: note = methanogen bacteria
FAVAQTAYYEVDILNSHDSINLEDYGVISVVDENNRSIYYLSSNHNEMILLNSLANRLHSKCDSFSITWNAYSYL

SEQ ID NO: 61942 - protein, 12 aa, unidentified
  source 1..12: note = methanogen bacteria
SQISEYFNTSIA

SEQ ID NO: 61943 - protein, 12 aa, unidentified
  source 1..12: note = methanogen bacteria
YFLQTVSHIYTH

SEQ ID NO: 61944 - protein, 15 aa, unidentified
  source 1..15: note = methanogen bacteria
PSQVFIPLFMQIFGG

SEQ ID NO: 61945 - protein, 15 aa, unidentified
  source 1..15: note = methanogen bacteria
PSQVFFPLFMKIFGG

SEQ ID NO: 61946 - protein, 12 aa, unidentified
  source 1..12: note = methanogen bacteria
SQISTYFNTSIA

SEQ ID NO: 61947 - protein, 12 aa, unidentified
  source 1..12: note = methanogen bacteria
YFLQTVSHIYTY

SEQ ID NO: 61948 - protein, 15 aa, unidentified
  source 1..15: note = methanogen bacteria
IPQPLTPEWGAFFAN

SEQ ID NO: 61949 - protein, 15 aa, unidentified
  source 1..15: note = methanogen bacteria
IPTAVNGDLASLLDL

SEQ ID NO: 61950 - protein, 11 aa, unidentified
  source 1..11: note = methanogen bacteria
SQISEYFNTSI

SEQ ID NO: 61951 - protein, 12 aa, unidentified
  source 1..12: note = methanogen bacteria
LFLQLVSHIYTY

SEQ ID NO: 61952 - protein, 11 aa, unidentified
  source 1..11: note = methanogen bacteria
QIAEYFNTSIA

SEQ ID NO: 61953 - protein, 12 aa, unidentified
  source 1..12: note = methanogen bacteria
LFLQVVSHVYTY

SEQ ID NO: 61954 - protein, 92 aa, unidentified
  source 1..92: note = methanogen bacteria
FHGLEQGVDLKGGSQAELQLLGSVTPSELEDTLDAKLNTNNIKVTNNGNNKVTVELENNINSSTFTSAINGKAKVIGYNEIGPVLSEEAMGQ

SEQ ID NO: 61955 - protein, 10 aa, unidentified
  source 1..10: note = methanogen bacteria
ILMPEATTLS

SEQ ID NO: 61956 - protein, 15 aa, unidentified
  source 1..15: note = methanogen bacteria
PSKVFIPLFLQIFGG

SEQ ID NO: 61957 - protein, 12 aa, unidentified
  source 1..12: note = methanogen bacteria
SQISEYFNTSIA

SEQ ID NO: 61958 - protein, 12 aa, unidentified
  source 1..12: note = methanogen bacteria
YFLQSVSHIYTY

SEQ ID NO: 61959 - protein, 11 aa, unidentified
  source 1..11: note = methanogen bacteria
RIRKSRRNRRS

SEQ ID NO: 61960 - protein, 18 aa, unidentified
  source 1..18: note = methanogen bacteria
KLSQPAAPTMSAVLNLNI

SEQ ID NO: 61961 - protein, 13 aa, unidentified
  source 1..13: note = methanogen bacteria
MAGAGTWEGLFEH

SEQ ID NO: 61962 - protein, 15 aa, unidentified
  source 1..15: note = methanogen bacteria
PSQVFIPLFMKIFGG

SEQ ID NO: 61963 - protein, 12 aa, unidentified
  source 1..12: note = methanogen bacteria
SQISEYFNTSIS

SEQ ID NO: 61964 - protein, 11 aa, unidentified
  source 1..11: note = methanogen bacteria
YFLQTVSQIHT

SEQ ID NO: 61965 - protein, 13 aa, unidentified
  source 1..13: note = methanogen bacteria
PQVAHYFNITIDQ

SEQ ID NO: 61966 - protein, 12 aa, unidentified
  source 1..12: note = methanogen bacteria
SEFLQSVTHIIN

SEQ ID NO: 61967 - protein, 12 aa, unidentified
  source 1..12: note = methanogen bacteria
SQISQYFSTSIA

SEQ ID NO: 61968 - protein, 12 aa, unidentified
  source 1..12: note = methanogen bacteria
YFLQTVSHIYTY

SEQ ID NO: 61969 - protein, 11 aa, unidentified
  source 1..11: note = methanogen bacteria
SGEAIYMIFNV

SEQ ID NO: 61970 - protein, 42 aa, unidentified
  source 1..42: note = methanogen bacteria
VSLLPLHPYSFAMASGVGSASMNAAGLVPLVNLYPNMTTQLE

SEQ ID NO: 61971 - protein, 17 aa, unidentified
  source 1..17: note = methanogen bacteria
PGVPTADFVTHYASQVD

SEQ ID NO: 61972 - protein, 40 aa, unidentified
  source 1..40: note = methanogen bacteria
IGDYKIDFFRCFSVVWDHLTGNVGTSEEARLQDYVIWNLR

SEQ ID NO: 61973 - protein, 24 aa, unidentified
  source 1..24: note = methanogen bacteria
LWGDPNSLSAILEWQVGSIGGISW

SEQ ID NO: 61974 - protein, 12 aa, unidentified
  source 1..12: note = methanogen bacteria
YHLQYIKGFDSQ

SEQ ID NO: 61975 - protein, 19 aa, unidentified
  source 1..19: note = methanogen bacteria
FVMGDVPIVEQYYPLLISS

SEQ ID NO: 61976 - protein, 26 aa, unidentified
  source 1..26: note = methanogen bacteria
KTLLDTPTVSLIVPGVEVPGSPIFIP

SEQ ID NO: 61977 - protein, 14 aa, unidentified
  source 1..14: note = methanogen bacteria
IPQPLTPEWGAFFS

SEQ ID NO: 61978 - protein, 15 aa, unidentified
  source 1..15: note = methanogen bacteria
IPTAVNGDLASLLEL

SEQ ID NO: 61979 - protein, 26 aa, unidentified
  source 1..26: note = methanogen bacteria
KTLMDAPSVSLVVPGVEVPGSPIFIP

SEQ ID NO: 61980 - protein, 10 aa, unidentified
  source 1..10: note = methanogen bacteria
QISDYFNISI

SEQ ID NO: 61981 - protein, 12 aa, unidentified
  source 1..12: note = methanogen bacteria
YFLQTVSHVYTY

SEQ ID NO: 61982 - protein, 26 aa, unidentified
  source 1..26: note = methanogen bacteria
KTLMDAPTVSLVVPGVEVPGSPIFIP

SEQ ID NO: 61983 - protein, 26 aa, unidentified
  source 1..26: note = methanogen bacteria
KTLMDAPTVSLVVPGVEVPGSPIFIP

SEQ ID NO: 61984 - protein, 12 aa, unidentified
  source 1..12: note = methanogen bacteria
PQIAQYFNVGID

SEQ ID NO: 61985 - protein, 12 aa, unidentified
  source 1..12: note = methanogen bacteria
EFLQTVTHIVGL

SEQ ID NO: 61986 - protein, 14 aa, unidentified
  source 1..14: note = methanogen bacteria
SQTLQDAFGVGSAS

SEQ ID NO: 61987 - protein, 13 aa, unidentified
  source 1..13: note = methanogen bacteria
SYYQNCCGFSKSD

SEQ ID NO: 61988 - protein, 23 aa, unidentified
  source 1..23: note = methanogen bacteria
TSCSDSSADGSSFRTHRSRSCIQ

SEQ ID NO: 61989 - protein, 30 aa, unidentified
  source 1..30: note = methanogen bacteria
GPETNGLNRFISGFYWFISRSGLEITLYST

SEQ ID NO: 61990 - protein, 27 aa, unidentified
  source 1..27: note = methanogen bacteria
LEQLFVTPQAALIIPGVDVPGSPIYIP

SEQ ID NO: 61991 - protein, 10 aa, unidentified
  source 1..10: note = methanogen bacteria
SNKNTSFNHD

SEQ ID NO: 61992 - protein, 14 aa, unidentified
  source 1..14: note = methanogen bacteria
IPQPLSPEWGAFFS

SEQ ID NO: 61993 - protein, 15 aa, unidentified
  source 1..15: note = methanogen bacteria
IPIATNGNLESLFEL

SEQ ID NO: 61994 - protein, 16 aa, unidentified
  source 1..16: note = methanogen bacteria
MADGIATLISALGLTP

SEQ ID NO: 61995 - protein, 12 aa, unidentified
  source 1..12: note = methanogen bacteria
SHIVVDLNTDVS

SEQ ID NO: 61996 - protein, 14 aa, unidentified
  source 1..14: note = methanogen bacteria
LIILAIFIFTASIC

SEQ ID NO: 61997 - protein, 17 aa, unidentified
  source 1..17: note = methanogen bacteria
MADEIATLISSVGLTHE

SEQ ID NO: 61998 - protein, 16 aa, unidentified
  source 1..16: note = methanogen bacteria
MADEIATLITQLGLSN

SEQ ID NO: 61999 - protein, 17 aa, unidentified
  source 1..17: note = methanogen bacteria
MADEIATIISSLGLSNE

SEQ ID NO: 62000 - protein, 17 aa, unidentified
  source 1..17: note = methanogen bacteria
MAEDIATLISQLNIDPQ

SEQ ID NO: 62001 - protein, 16 aa, unidentified
  source 1..16: note = methanogen bacteria
MANEIATLISSMGLTQ

SEQ ID NO: 62002 - protein, 16 aa, unidentified
  source 1..16: note = methanogen bacteria
MADGIATLISALGLTQ

SEQ ID NO: 62003 - protein, 16 aa, unidentified
  source 1..16: note = methanogen bacteria
MADEIASLLSSLGLSD

SEQ ID NO: 62004 - protein, 19 aa, unidentified
  source 1..19: note = methanogen bacteria
GVDQFIRPFTQPILMGSSK

SEQ ID NO: 62005 - protein, 61 aa, unidentified
  source 1..61: note = methanogen bacteria
LRNNLGIGWNTILVAMNPTYTSTSILHSHLYKSIFGVILGIFLSHIPAGIHTGSSLSPYTP

SEQ ID NO: 62006 - protein, 77 aa, unidentified
  source 1..77: note = methanogen bacteria
SFYGAAPDCYELTVYNGHDIDLENNYTVIDTIKNGNKTIIYLSNEYNEMELLNGLAIQLNGKCDWYSLSWNIYSYLN

SEQ ID NO: 62007 - protein, 29 aa, unidentified
  source 1..29: note = methanogen bacteria
RDETDPEGFISNLFWFLDTMGLGLDMYSV

SEQ ID NO: 62008 - protein, 16 aa, unidentified
  source 1..16: note = methanogen bacteria
MADEIATLISSLGITP

SEQ ID NO: 62009 - protein, 16 aa, unidentified
  source 1..16: note = methanogen bacteria
MADELASLITSFGFTQ

SEQ ID NO: 62010 - protein, 17 aa, unidentified
  source 1..17: note = methanogen bacteria
MADEIATIISSLGLSNE

SEQ ID NO: 62011 - protein, 14 aa, unidentified
  source 1..14: note = methanogen bacteria
AQPPAPTWDGVLSL

SEQ ID NO: 62012 - protein, 14 aa, unidentified
  source 1..14: note = methanogen bacteria
TMASGGTWQALFDL

SEQ ID NO: 62013 - protein, 11 aa, unidentified
  source 1..11: note = methanogen bacteria
GPQIGIEPLFT

SEQ ID NO: 62014 - protein, 16 aa, unidentified
  source 1..16: note = methanogen bacteria
MADGIATLISSVGLTQ

SEQ ID NO: 62015 - protein, 16 aa, unidentified
  source 1..16: note = methanogen bacteria
MADGIATLISSVGLTQ

SEQ ID NO: 62016 - protein, 16 aa, unidentified
  source 1..16: note = methanogen bacteria
MEESITGLISSFGFSP

SEQ ID NO: 62017 - protein, 16 aa, unidentified
  source 1..16: note = methanogen bacteria
MADGIATLISSVGLTQ

SEQ ID NO: 62018 - protein, 16 aa, unidentified
  source 1..16: note = methanogen bacteria
MADELASLITALGLTQ

SEQ ID NO: 62019 - protein, 43 aa, unidentified
  source 1..43: note = methanogen bacteria
KYTVRVLDETGKAVGAGENVTFNINGVLYTRTTDSNGYAALNI

SEQ ID NO: 62020 - protein, 18 aa, unidentified
  source 1..18: note = methanogen bacteria
GIIRSDPTTLVSLGNLFS

SEQ ID NO: 62021 - protein, 40 aa, unidentified
  source 1..40: note = methanogen bacteria
GFGAGNELMPALPKQAITTTFDLTLFGGFTRGFGELFSNI

SEQ ID NO: 62022 - protein, 16 aa, unidentified
  source 1..16: note = methanogen bacteria
MADELASLITSIGFTQ

SEQ ID NO: 62023 - protein, 12 aa, unidentified
  source 1..12: note = methanogen bacteria
PKIFNPDVTSYN

SEQ ID NO: 62024 - protein, 15 aa, unidentified
  source 1..15: note = methanogen bacteria
ISEPINPTWGGFFSN

SEQ ID NO: 62025 - protein, 14 aa, unidentified
  source 1..14: note = methanogen bacteria
PLAANGNLDALFEI

SEQ ID NO: 62026 - protein, 12 aa, unidentified
  source 1..12: note = methanogen bacteria
PQIAEYFSVDIT

SEQ ID NO: 62027 - protein, 12 aa, unidentified
  source 1..12: note = methanogen bacteria
EFLNSLTNIIGT

SEQ ID NO: 62028 - protein, 92 aa, unidentified
  source 1..92: note = methanogen bacteria
FNGIEQGVELKGGSLAELQLADSISQSDLEQQLTQELHTNNIKVTSNGDNKVTVELENNVNSSTFTSAINGKAKIISYNEIGPVLSEEAMGQ

SEQ ID NO: 62029 - protein, 10 aa, unidentified
  source 1..10: note = methanogen bacteria
IIMPEATTLS

SEQ ID NO: 62030 - protein, 15 aa, unidentified
  source 1..15: note = methanogen bacteria
IPHPANPTWGSFFSN

SEQ ID NO: 62031 - protein, 15 aa, unidentified
  source 1..15: note = methanogen bacteria
IPQAVNGNLASLLEL

SEQ ID NO: 62032 - protein, 12 aa, unidentified
  source 1..12: note = methanogen bacteria
PQIAQYFNVDIT

SEQ ID NO: 62033 - protein, 13 aa, unidentified
  source 1..13: note = methanogen bacteria
SEFLNSITSIFGT

SEQ ID NO: 62034 - protein, 15 aa, unidentified
  source 1..15: note = methanogen bacteria
IPQPLSPTWGAVFAN

SEQ ID NO: 62035 - protein, 15 aa, unidentified
  source 1..15: note = methanogen bacteria
IPLAANGSLGALLDL

SEQ ID NO: 62036 - protein, 14 aa, unidentified
  source 1..14: note = methanogen bacteria
IPQPLSPNWGPFFS

SEQ ID NO: 62037 - protein, 15 aa, unidentified
  source 1..15: note = methanogen bacteria
IPIAANGSLESLLEL

SEQ ID NO: 62038 - protein, 12 aa, unidentified
  source 1..12: note = methanogen bacteria
PQIAEYFSVDIT

SEQ ID NO: 62039 - protein, 12 aa, unidentified
  source 1..12: note = methanogen bacteria
EFLNSITQIFGT

SEQ ID NO: 62040 - protein, 31 aa, unidentified
  source 1..31: note = methanogen bacteria
KSFTFGWGSDTAAYFVQNVGGSDNLSNINNF

SEQ ID NO: 62041 - protein, 23 aa, unidentified
  source 1..23: note = methanogen bacteria
TLPGAIIGINALINPNWNLLFDI

SEQ ID NO: 62042 - protein, 35 aa, unidentified
  source 1..35: note = methanogen bacteria
RGYMSATSGTPLVDLVSEGTGLIFVVFPKIFSLMG

SEQ ID NO: 62043 - protein, 96 aa, unidentified
  source 1..96: note = methanogen bacteria
VPAADLGGIPADYKAEYVDSSGLPYFSEMDSYYNLRLTENYINQGHVGDEVVNDTEWDMHRYAPTGEGISYEMGIVYVTSFLHNLFGNQAVKETAF

SEQ ID NO: 62044 - protein, 11 aa, unidentified
  source 1..11: note = methanogen bacteria
SHTFAGFFDTD

SEQ ID NO: 62045 - protein, 60 aa, unidentified
  source 1..60: note = methanogen bacteria
KGISGVLGIFGSVTGLLSLQSASVVVGGFPNVLISVAEMQMPNLLGGGMTSAFLANTNGV

SEQ ID NO: 62046 - protein, 15 aa, unidentified
  source 1..15: note = methanogen bacteria
IPQPLTPEWGSFFSN

SEQ ID NO: 62047 - protein, 15 aa, unidentified
  source 1..15: note = methanogen bacteria
IPIAANGDLASLLNL

SEQ ID NO: 62048 - protein, 11 aa, unidentified
  source 1..11: note = methanogen bacteria
GPQMGIEPLFT

SEQ ID NO: 62049 - protein, 20 aa, unidentified
  source 1..20: note = methanogen bacteria
DVFNPIIRPITYIFLMGSSK

SEQ ID NO: 62050 - protein, 61 aa, unidentified
  source 1..61: note = methanogen bacteria
RLQMGIKLNTVFCSMSNMMSSTSILHTHLIKSILGAAITQIIGPIIQSDINTGVGLYAYVP

SEQ ID NO: 62051 - protein, 19 aa, unidentified
  source 1..19: note = methanogen bacteria
GIDQFIRPFTQPILMGSSK

SEQ ID NO: 62052 - protein, 60 aa, unidentified
  source 1..60: note = methanogen bacteria
RNSLGIGWNTILVIMNPSLTSTSILHSHLYKAIFGTIIGMFLSHIPTGIHTGSSLSAYTP

SEQ ID NO: 62053 - protein, 76 aa, unidentified
  source 1..76: note = methanogen bacteria
AFYGASPDSYELNICNAHDIDALDQYDTLNLTEDGNKTTIYISNQYNEMELLNNLAISLDGKCDWYSLSWNIYSYF

SEQ ID NO: 62054 - protein, 36 aa, unidentified
  source 1..36: note = methanogen bacteria
ALRAKAAANLYNSSFCNNVADNYGGAVASPELNIWD

SEQ ID NO: 62055 - protein, 38 aa, unidentified
  source 1..38: note = methanogen bacteria
AYVCFYNNTIKKGDHTKIYVTSKWCAYTYNLDVYTEGL

SEQ ID NO: 62056 - protein, 98 aa, unidentified
  source 1..98: note = methanogen bacteria
NRRVLVQIMVDYFNDKYPDSDITDFNDGSQIRNILESFAVDIYHLEKNDTDLLRAAFLSTSYGRYLDLHGEDMNTPRDYGSTSWGVVLFTIPEPIDYN

SEQ ID NO: 62057 - protein, 30 aa, unidentified
  source 1..30: note = methanogen bacteria
ESVNGVIQVTELTSDNESFNRLIPDENTVL

SEQ ID NO: 62058 - protein, 10 aa, unidentified
  source 1..10: note = methanogen bacteria
GEVYTERTTQ

SEQ ID NO: 62059 - protein, 10 aa, unidentified
  source 1..10: note = methanogen bacteria
AYVGLYHTEN

SEQ ID NO: 62060 - protein, 13 aa, unidentified
  source 1..13: note = methanogen bacteria
EQSIECSYDINFN

SEQ ID NO: 62061 - protein, 35 aa, unidentified
  source 1..35: note = methanogen bacteria
SYAISNDFYIDDLLSNNGVSVSSDDWTNPERDISF

SEQ ID NO: 62062 - protein, 12 aa, unidentified
  source 1..12: note = methanogen bacteria
PKIFNPDVTNYT

SEQ ID NO: 62063 - protein, 16 aa, unidentified
  source 1..16: note = methanogen bacteria
SFRYLDYLIRSGNKNI

SEQ ID NO: 62064 - protein, 58 aa, unidentified
  source 1..58: note = methanogen bacteria
EELKYKNGIDVDVEDIVIDGKNHIIDACNKTRIFNITAKNVTIKNFLLREGFSQDGGA

SEQ ID NO: 62065 - protein, 17 aa, unidentified
  source 1..17: note = methanogen bacteria
LGGIPLFSATLKAKAAT

SEQ ID NO: 62066 - protein, 84 aa, unidentified
  source 1..84: note = methanogen bacteria
VQAISWQHWSLNPIELVSYRAAFTLNVLSKAIENQFTTMGNLFYTTLTGFFTHSDARVLVGQATIGRVHSITSTIFGPALLDFG

SEQ ID NO: 62067 - protein, 16 aa, unidentified
  source 1..16: note = methanogen bacteria
LGGIPLFSATLKAKAA

SEQ ID NO: 62068 - protein, 84 aa, unidentified
  source 1..84: note = methanogen bacteria
VQAISWQHWSLNPIELVSYRAAFTLNILSKAIENQFTTMGNLFYTTLTGFFTHSDARVLVGQATIGRVHSITSTIFGPALLDFG

SEQ ID NO: 62069 - protein, 38 aa, unidentified
  source 1..38: note = methanogen bacteria
ISSGGIIPVNEALGAMVSSIAKGGTNLDTTELYIYNSR

SEQ ID NO: 62070 - protein, 12 aa, unidentified
  source 1..12: note = methanogen bacteria
GSAIPFVDSNSI

SEQ ID NO: 62071 - protein, 23 aa, unidentified
  source 1..23: note = methanogen bacteria
TMAKDNLTNVMWWLYGSFADITW

SEQ ID NO: 62072 - protein, 15 aa, unidentified
  source 1..15: note = methanogen bacteria
IRPILQPFLMGSSKG

SEQ ID NO: 62073 - protein, 60 aa, unidentified
  source 1..60: note = methanogen bacteria
IRLSMNLPLDTTLVIVEPKMTSTSILHSHVLKSIFGAIVVMFIPNIPSGIHVGNSLAPYI

SEQ ID NO: 62074 - protein, 76 aa, unidentified
  source 1..76: note = methanogen bacteria
IFAIANTAYYEVNILEPEDSIDLNNYGVISVVHSTDRDIYRLNPDYNEMVLLNSLDRSLNQKCRAYTISWNAYSYL

SEQ ID NO: 62075 - protein, 45 aa, unidentified
  source 1..45: note = methanogen bacteria
NSSEVGTIIVQNLPVNVQDMIQPHIGRINAGISQLFSLLLNYIFE

SEQ ID NO: 62076 - protein, 69 aa, unidentified
  source 1..69: note = methanogen bacteria
MTWLGNYSKGTGPISYMNVFEALENDAIAAVGTYFNDSNINYTVEIYVNDELKLTQEGISPYVGYHTIK

SEQ ID NO: 62077 - protein, 27 aa, unidentified
  source 1..27: note = methanogen bacteria
DIFKAIMTTNNMPFIATNEMRVHYIEN

SEQ ID NO: 62078 - protein, 33 aa, unidentified
  source 1..33: note = methanogen bacteria
IDGKTWNDCYKERKIACLKVYTVALPIYTEDLV

SEQ ID NO: 62079 - protein, 30 aa, unidentified
  source 1..30: note = methanogen bacteria
SKFEANIGEANKTVTFEINGERYTRTSDEN

SEQ ID NO: 62080 - protein, 29 aa, unidentified
  source 1..29: note = methanogen bacteria
NYTIKTTYNNTSVENRITVLPTLIADNLV

SEQ ID NO: 62081 - protein, 18 aa, unidentified
  source 1..18: note = methanogen bacteria
YISLINGEGSPISGINIT

SEQ ID NO: 62082 - protein, 12 aa, unidentified
  source 1..12: note = methanogen bacteria
NGVFYNRLTNEN

SEQ ID NO: 62083 - protein, 21 aa, unidentified
  source 1..21: note = methanogen bacteria
EYILTAIDPLTGLQMSYNITV

SEQ ID NO: 62084 - protein, 21 aa, unidentified
  source 1..21: note = methanogen bacteria
EYIITSEFDEMRISNTITIKD

SEQ ID NO: 62085 - protein, 14 aa, unidentified
  source 1..14: note = methanogen bacteria
MNPLHFFTLGFFQE

SEQ ID NO: 62086 - protein, 14 aa, unidentified
  source 1..14: note = methanogen bacteria
MNPIHFFTLGFLPE

SEQ ID NO: 62087 - protein, 14 aa, unidentified
  source 1..14: note = methanogen bacteria
MNLIHFFTLGFFPE

SEQ ID NO: 62088 - protein, 14 aa, unidentified
  source 1..14: note = methanogen bacteria
MYSIPFFTLGFYPE

SEQ ID NO: 62089 - protein, 15 aa, unidentified
  source 1..15: note = methanogen bacteria
MNPIDFFTLSYFGRY

SEQ ID NO: 62090 - protein, 14 aa, unidentified
  source 1..14: note = methanogen bacteria
MTPIQFYTLGYFEQ

SEQ ID NO: 62091 - protein, 15 aa, unidentified
  source 1..15: note = methanogen bacteria
MNPIHFFTLGYYQEY

SEQ ID NO: 62092 - protein, 14 aa, unidentified
  source 1..14: note = methanogen bacteria
MNPIHFFTLGYLQE

SEQ ID NO: 62093 - protein, 29 aa, unidentified
  source 1..29: note = methanogen bacteria
SSLETVTTTPSVSLVIPGVEMPGSSIYVP

SEQ ID NO: 62094 - protein, 14 aa, unidentified
  source 1..14: note = methanogen bacteria
MNLIQFFSLGYYPE

SEQ ID NO: 62095 - protein, 19 aa, unidentified
  source 1..19: note = methanogen bacteria
GIDQFIRPFTQPLLMGSSK

SEQ ID NO: 62096 - protein, 61 aa, unidentified
  source 1..61: note = methanogen bacteria
LRNSLGIDWNTILVIMNPSETSTSILHSHLYKGIFGMILGMLLTYIPAGIHTGSSLSAYTP

SEQ ID NO: 62097 - protein, 77 aa, unidentified
  source 1..77: note = methanogen bacteria
IAFYGACPDSYELDVGYPHDLDGLNQYDVLNLTDHENKTTVYLSNQYNEMELLNNLAIDLNGKCDWYSLSWNIYSYL

SEQ ID NO: 62098 - protein, 11 aa, unidentified
  source 1..11: note = methanogen bacteria
QVYLISQIKLP

SEQ ID NO: 62099 - protein, 14 aa, unidentified
  source 1..14: note = methanogen bacteria
MNPIHFFTLGYYPK

SEQ ID NO: 62100 - protein, 17 aa, unidentified
  source 1..17: note = methanogen bacteria
GNMQVYLISYINLALTR

SEQ ID NO: 62101 - protein, 20 aa, unidentified
  source 1..20: note = methanogen bacteria
IYEGAHRIYLWGSYFITLEA

SEQ ID NO: 62102 - protein, 19 aa, unidentified
  source 1..19: note = methanogen bacteria
QGYGYINVYPSLDFSFHDL

SEQ ID NO: 62103 - protein, 35 aa, unidentified
  source 1..35: note = methanogen bacteria
VHVGDVLGIADRYSYSIYVPLGLVNAFSIPLRGNA

SEQ ID NO: 62104 - protein, 23 aa, unidentified
  source 1..23: note = methanogen bacteria
SAGADADSSWMDDFRVWDLNALL

SEQ ID NO: 62105 - protein, 17 aa, unidentified
  source 1..17: note = methanogen bacteria
GKNHIIYAGNKTRIFNV

SEQ ID NO: 62106 - protein, 14 aa, unidentified
  source 1..14: note = methanogen bacteria
MNPIQYFTIGYRPE

SEQ ID NO: 62107 - protein, 30 aa, unidentified
  source 1..30: note = methanogen bacteria
FGDGEESVNDFIMIFAEAAGMDGDITWNGV

SEQ ID NO: 62108 - protein, 10 aa, unidentified
  source 1..10: note = methanogen bacteria
PVFLDTIDFT

SEQ ID NO: 62109 - protein, 14 aa, unidentified
  source 1..14: note = methanogen bacteria
MNPIHFFTLGYYPE

SEQ ID NO: 62110 - protein, 14 aa, unidentified
  source 1..14: note = methanogen bacteria
MNPIHFFTLGFLQE

SEQ ID NO: 62111 - protein, 27 aa, unidentified
  source 1..27: note = methanogen bacteria
MAFFKTIYDNLNSIVYILLNDVIMMSY

SEQ ID NO: 62112 - protein, 12 aa, unidentified
  source 1..12: note = methanogen bacteria
GIVTTLGGFELG

SEQ ID NO: 62113 - protein, 14 aa, unidentified
  source 1..14: note = methanogen bacteria
MNPIHFFTLGYFSE

SEQ ID NO: 62114 - protein, 40 aa, unidentified
  source 1..40: note = methanogen bacteria
IGAVDIPLGDTARTFLHAILPTVFDGPSTPWYPDIILNAR

SEQ ID NO: 62115 - protein, 18 aa, unidentified
  source 1..18: note = methanogen bacteria
GSGITGSVLILGHQFFIE

SEQ ID NO: 62116 - protein, 24 aa, unidentified
  source 1..24: note = methanogen bacteria
YFSNDDALREITLWLMGGMWNASW

SEQ ID NO: 62117 - protein, 12 aa, unidentified
  source 1..12: note = methanogen bacteria
ISEPVGGIIPPH

SEQ ID NO: 62118 - protein, 22 aa, unidentified
  source 1..22: note = methanogen bacteria
DSKFYYRNVTRRAVSTTSFLRD

SEQ ID NO: 62119 - protein, 15 aa, unidentified
  source 1..15: note = methanogen bacteria
AFSFFSITGMQTEIY

SEQ ID NO: 62120 - protein, 16 aa, unidentified
  source 1..16: note = methanogen bacteria
LTQPVSPTFGAVLALN

SEQ ID NO: 62121 - protein, 14 aa, unidentified
  source 1..14: note = methanogen bacteria
PMVANGSWDAFFDI

SEQ ID NO: 62122 - protein, 14 aa, unidentified
  source 1..14: note = methanogen bacteria
MNPIHFFTLGYFQE

SEQ ID NO: 62123 - protein, 13 aa, unidentified
  source 1..13: note = methanogen bacteria
ITKANDISIHNLD

SEQ ID NO: 62124 - protein, 33 aa, unidentified
  source 1..33: note = methanogen bacteria
LGIKTNMISDFSIGYLFKSMIGFTPGFQKGRLF

SEQ ID NO: 62125 - protein, 16 aa, unidentified
  source 1..16: note = methanogen bacteria
TGLCAEANKFVSVNYF

SEQ ID NO: 62126 - protein, 12 aa, unidentified
  source 1..12: note = methanogen bacteria
IFHSIDIANHNP

SEQ ID NO: 62127 - protein, 12 aa, unidentified
  source 1..12: note = methanogen bacteria
PKIFHPDVTSYT

SEQ ID NO: 62128 - protein, 16 aa, unidentified
  source 1..16: note = methanogen bacteria
LGGIPLFSATLKAKAA

SEQ ID NO: 62129 - protein, 84 aa, unidentified
  source 1..84: note = methanogen bacteria
VQAISWQHWSLNPIELVSYRAAFTLNILSQAIANQFATMGNLFYSTLTGFFTHTDPRVLVGIATIGRNHSITSTIFGPALLDFG

SEQ ID NO: 62130 - protein, 31 aa, unidentified
  source 1..31: note = methanogen bacteria
NNDDRSASEVARGFLSFSDDTLMGRYVWNID

SEQ ID NO: 62131 - protein, 14 aa, unidentified
  source 1..14: note = methanogen bacteria
YFDAGAAFGGEFMQ

SEQ ID NO: 62132 - protein, 24 aa, unidentified
  source 1..24: note = methanogen bacteria
YMADSAQLSQIVSWSFGTINYATW

SEQ ID NO: 62133 - protein, 14 aa, unidentified
  source 1..14: note = methanogen bacteria
MNPIHFFTLGYYPQ

SEQ ID NO: 62134 - protein, 18 aa, unidentified
  source 1..18: note = methanogen bacteria
NPIIHPITYLFLMGSSKG

SEQ ID NO: 62135 - protein, 63 aa, unidentified
  source 1..63: note = methanogen bacteria
RYQMGIGLNTIFMTIGKSISSTSILHTHLLKSVFGNFITNLIGPFIGKEINTGIGLYQYIPEV

SEQ ID NO: 62136 - protein, 98 aa, unidentified
  source 1..98: note = methanogen bacteria
IIGANTEYYEVNVVNPADNIELNGFPIENISHSNNKTTYIMNSNYNEMELLNDLKMPLNNSCDYYTVSWNIVSYLEPNHPITNILTEIINLYKNFYTY

SEQ ID NO: 62137 - protein, 12 aa, unidentified
  source 1..12: note = methanogen bacteria
KIRRKNRRNKRY

SEQ ID NO: 62138 - protein, 25 aa, unidentified
  source 1..25: note = methanogen bacteria
DLRDISNLITTSEMQTFYDAQLMTS

SEQ ID NO: 62139 - protein, 22 aa, unidentified
  source 1..22: note = methanogen bacteria
NYYYEVQLEDGFLPVFKPTYNI

SEQ ID NO: 62140 - protein, 17 aa, unidentified
  source 1..17: note = methanogen bacteria
MVEIVFKDIEVPEYSFN

SEQ ID NO: 62141 - protein, 42 aa, unidentified
  source 1..42: note = methanogen bacteria
FPVSMHLRNASDVSAPNGLSEVISSMLLKIFSNPLISLSQGD

SEQ ID NO: 62142 - protein, 11 aa, unidentified
  source 1..11: note = methanogen bacteria
VCHTLGISVDL

SEQ ID NO: 62143 - protein, 11 aa, unidentified
  source 1..11: note = methanogen bacteria
CSLFGIPADIS

SEQ ID NO: 62144 - protein, 18 aa, unidentified
  source 1..18: note = methanogen bacteria
ADSFNSSFSPIFFHGIDD

SEQ ID NO: 62145 - protein, 26 aa, unidentified
  source 1..26: note = methanogen bacteria
HFLSGFLLNDWTTFPIYGGLMLFAVD

SEQ ID NO: 62146 - protein, 26 aa, unidentified
  source 1..26: note = methanogen bacteria
MSVFEYNYINLLLGYLIGTDVQFTTF

SEQ ID NO: 62147 - protein, 18 aa, unidentified
  source 1..18: note = methanogen bacteria
ISIPGAFLIDDSHYYFMT

SEQ ID NO: 62148 - protein, 17 aa, unidentified
  source 1..17: note = methanogen bacteria
GALFTIDPDTSVYTRSD

SEQ ID NO: 62149 - protein, 11 aa, unidentified
  source 1..11: note = methanogen bacteria
SVIQVYFDVSI

SEQ ID NO: 62150 - protein, 12 aa, unidentified
  source 1..12: note = methanogen bacteria
TYLSQVTLMNPK

SEQ ID NO: 62151 - protein, 15 aa, unidentified
  source 1..15: note = methanogen bacteria
LVQPASPTLDAVLVL

SEQ ID NO: 62152 - protein, 15 aa, unidentified
  source 1..15: note = methanogen bacteria
IPMVANGSWDAFFDI

SEQ ID NO: 62153 - protein, 29 aa, unidentified
  source 1..29: note = methanogen bacteria
MGLNLIDSIYYSVVTMATVGYGDYIPVTG

SEQ ID NO: 62154 - protein, 11 aa, unidentified
  source 1..11: note = methanogen bacteria
CPMIGLSPLFT

SEQ ID NO: 62155 - protein, 20 aa, unidentified
  source 1..20: note = methanogen bacteria
ILNPIVHPITHQFLMGSSKG

SEQ ID NO: 62156 - protein, 62 aa, unidentified
  source 1..62: note = methanogen bacteria
FRYEMNIDLNTIFMSMENSVSSTSILHTHLLKSILGDVLTNLIGPFIDNEINTGVGLYEYIP

SEQ ID NO: 62157 - protein, 99 aa, unidentified
  source 1..99: note = methanogen bacteria
AFFGANTEHYEVDLANPTENVTLNEFPVESITYEDNRTVYIIDSNYNEMELLNDLKVPFNNTCKYYTITWNTFSYLEDGDSTTEFLLELKEKVDSVLFH

SEQ ID NO: 62158 - protein, 15 aa, unidentified
  source 1..15: note = methanogen bacteria
LSQPADATWGSVLML

SEQ ID NO: 62159 - protein, 13 aa, unidentified
  source 1..13: note = methanogen bacteria
MAFNGSWQALFDL

SEQ ID NO: 62160 - protein, 17 aa, unidentified
  source 1..17: note = methanogen bacteria
IRLIGNANNAFSLAYHP

SEQ ID NO: 62161 - protein, 29 aa, unidentified
  source 1..29: note = methanogen bacteria
LGLGPIDSIYYAVITMTTVGYGDYIPDTG

SEQ ID NO: 62162 - protein, 29 aa, unidentified
  source 1..29: note = methanogen bacteria
LGLNPIDSIYYAVITMTTVGYGDYIPETG

SEQ ID NO: 62163 - protein, 14 aa, unidentified
  source 1..14: note = methanogen bacteria
AQPAAPTWDAVLSL

SEQ ID NO: 62164 - protein, 13 aa, unidentified
  source 1..13: note = methanogen bacteria
MASNGSWQALFDL

SEQ ID NO: 62165 - protein, 30 aa, unidentified
  source 1..30: note = methanogen bacteria
SSLETITTTPSVSLVIPGVEMPGSSIYVPL

SEQ ID NO: 62166 - protein, 12 aa, unidentified
  source 1..12: note = methanogen bacteria
MNPVASDDSITD

SEQ ID NO: 62167 - protein, 10 aa, unidentified
  source 1..10: note = methanogen bacteria
KIDNTDDYSS

SEQ ID NO: 62168 - protein, 44 aa, unidentified
  source 1..44: note = methanogen bacteria
MWYAKWQLIEGGALPYRDFNFSYPPLALALFIIPGLASGTAEGF

SEQ ID NO: 62169 - protein, 59 aa, unidentified
  source 1..59: note = methanogen bacteria
GVPMSGLSEAFLSQTGRSFQAESVPGNITHLLGLLGISDYGVAESAHTYIITQGPLAGL

SEQ ID NO: 62170 - protein, 17 aa, unidentified
  source 1..17: note = methanogen bacteria
IRLIGNANNAFSLAYHP

SEQ ID NO: 62171 - protein, 15 aa, unidentified
  source 1..15: note = methanogen bacteria
LTQPAAPTLDAFLSL

SEQ ID NO: 62172 - protein, 15 aa, unidentified
  source 1..15: note = methanogen bacteria
IPMVANGTWDAFFDI

SEQ ID NO: 62173 - protein, 92 aa, unidentified
  source 1..92: note = methanogen bacteria
VNGLEQGVDLKGGSQAELQLLGSVTPTELEQTLDAKLNTNNIKVTNNGNNKVTVELENNINSSTFTSAINGKAKVISYNEIGPVLSEEAMGQ

SEQ ID NO: 62174 - protein, 10 aa, unidentified
  source 1..10: note = methanogen bacteria
LIMPEATTLS

SEQ ID NO: 62175 - protein, 29 aa, unidentified
  source 1..29: note = methanogen bacteria
SSLETITTTPSVSLVIPGVEMPGSSIYVP

SEQ ID NO: 62176 - protein, 29 aa, unidentified
  source 1..29: note = methanogen bacteria
SSLENVFTTPSVSIVIPGVEMPGSSIYVP

SEQ ID NO: 62177 - protein, 38 aa, unidentified
  source 1..38: note = methanogen bacteria
MGSYKISFARVYEVILIHLTNLGDGLTSLDMKVVWNER

SEQ ID NO: 62178 - protein, 26 aa, unidentified
  source 1..26: note = methanogen bacteria
MLISSDEKTASALGWTVGTLNKASWD

SEQ ID NO: 62179 - protein, 12 aa, unidentified
  source 1..12: note = methanogen bacteria
STMEETLVSISG

SEQ ID NO: 62180 - protein, 14 aa, unidentified
  source 1..14: note = methanogen bacteria
QDEEDSLVQYGVLM

SEQ ID NO: 62181 - protein, 10 aa, unidentified
  source 1..10: note = methanogen bacteria
LVNGGSGIGF

SEQ ID NO: 62182 - protein, 30 aa, unidentified
  source 1..30: note = methanogen bacteria
LNITSIDNIINFIPTVIMVTLSSTQFIDWT

SEQ ID NO: 62183 - protein, 28 aa, unidentified
  source 1..28: note = methanogen bacteria
SLENVFTTPSVSIVIPGVEVPGSPIYVP

SEQ ID NO: 62184 - protein, 11 aa, unidentified
  source 1..11: note = methanogen bacteria
VAGLGSDALAA

SEQ ID NO: 62185 - protein, 16 aa, unidentified
  source 1..16: note = methanogen bacteria
LELMGAATAMQQALDY

SEQ ID NO: 62186 - protein, 11 aa, unidentified
  source 1..11: note = methanogen bacteria
VLVAGTIAVAT

SEQ ID NO: 62187 - protein, 21 aa, unidentified
  source 1..21: note = methanogen bacteria
QISMVFAYSSSASLAPRIAQL

SEQ ID NO: 62188 - protein, 14 aa, unidentified
  source 1..14: note = methanogen bacteria
VLSNIIPLLTPIYT

SEQ ID NO: 62189 - protein, 28 aa, unidentified
  source 1..28: note = methanogen bacteria
SLPSVFETPAVSIVIPGVEMPGSSIYIP

SEQ ID NO: 62190 - protein, 28 aa, unidentified
  source 1..28: note = methanogen bacteria
TLPSVFDSPSVSIVIPGVDIPGSQIYVP

SEQ ID NO: 62191 - protein, 27 aa, unidentified
  source 1..27: note = methanogen bacteria
LQTVFDTPSVSIILPGVEMPGSPIYVP

SEQ ID NO: 62192 - protein, 28 aa, unidentified
  source 1..28: note = methanogen bacteria
TLPSVFDTPAVSIVIPGVEMPGSSIYVP

SEQ ID NO: 62193 - protein, 28 aa, unidentified
  source 1..28: note = methanogen bacteria
SLPSVFDTPAVSIVIPGVEMPGSSIYIP

SEQ ID NO: 62194 - protein, 29 aa, unidentified
  source 1..29: note = methanogen bacteria
MGLNLIDSIYYSVITMATVGYGDYIPSTG

SEQ ID NO: 62195 - protein, 29 aa, unidentified
  source 1..29: note = methanogen bacteria
MNLNIFDSIYYTIITIATVGYGDIIPITP

SEQ ID NO: 62196 - protein, 28 aa, unidentified
  source 1..28: note = methanogen bacteria
TLPSVFETPSVSIVIPGVDIPGSQIYVP

SEQ ID NO: 62197 - protein, 28 aa, unidentified
  source 1..28: note = methanogen bacteria
SLPSVFETPAVSIVIPGVEMPGSSIYIP

SEQ ID NO: 62198 - protein, 29 aa, unidentified
  source 1..29: note = methanogen bacteria
MELDIYDSIYYTIITLATVGYGDIFPITP

SEQ ID NO: 62199 - protein, 92 aa, unidentified
  source 1..92: note = methanogen bacteria
FNGLEQGVDLKGGSQAELQLLGSVTPTELEQTLDSKLNTNNIKVTNNGNKKVTVELENNVNSSTFTNAISGKAKVISYNEIGPVLSEEAMGQ

SEQ ID NO: 62200 - protein, 10 aa, unidentified
  source 1..10: note = methanogen bacteria
IIMPEATTLS

SEQ ID NO: 62201 - protein, 29 aa, unidentified
  source 1..29: note = methanogen bacteria
MKLNIYDSIYYTIITIATVGYGDIIPITP

SEQ ID NO: 62202 - protein, 29 aa, unidentified
  source 1..29: note = methanogen bacteria
SIPSVFDTPAVSIVIPGVEMPGSSIYIPF

SEQ ID NO: 62203 - protein, 28 aa, unidentified
  source 1..28: note = methanogen bacteria
TLPSVFETPTVSIVIPGVDIPGSQIYVP

SEQ ID NO: 62204 - protein, 28 aa, unidentified
  source 1..28: note = methanogen bacteria
TLPTVFDTPAVSIVIPGVEMPGSSIYIP

SEQ ID NO: 62205 - protein, 29 aa, unidentified
  source 1..29: note = methanogen bacteria
MNLNIYDSIYYTIITIATVGYGDIIPITP

SEQ ID NO: 62206 - protein, 41 aa, unidentified
  source 1..41: note = methanogen bacteria
IGDYHVSFADVYGYVWKHISGNVDASDINEVRADYAIWDLR

SEQ ID NO: 62207 - protein, 26 aa, unidentified
  source 1..26: note = methanogen bacteria
KLGADPDTLSAIYNWSVGSIDGISWD

SEQ ID NO: 62208 - protein, 26 aa, unidentified
  source 1..26: note = methanogen bacteria
IPQKLEGAGYGLRNVKANDFAAATLK

SEQ ID NO: 62209 - protein, 38 aa, unidentified
  source 1..38: note = methanogen bacteria
MFEMADALGSFERLHLLGLAYQGLNADNLVYDMVKENA

SEQ ID NO: 62210 - protein, 39 aa, unidentified
  source 1..39: note = methanogen bacteria
SIVQATIARAEADGVIAPQDQLTDFAIYNTDDAAKWNAY

SEQ ID NO: 62211 - protein, 25 aa, unidentified
  source 1..25: note = methanogen bacteria
PSTLLYFNDNLEFATGLPGLDYGRA

SEQ ID NO: 62212 - protein, 12 aa, unidentified
  source 1..12: note = methanogen bacteria
SFFSHSIYGGGG

SEQ ID NO: 62213 - protein, 28 aa, unidentified
  source 1..28: note = methanogen bacteria
TLPSVFETPAVSIIIPGVEMPGSSIYVP

SEQ ID NO: 62214 - protein, 28 aa, unidentified
  source 1..28: note = methanogen bacteria
TLPSVFETPSVSIVIPGVEMPGSSIYIP

SEQ ID NO: 62215 - protein, 22 aa, unidentified
  source 1..22: note = methanogen bacteria
IGDTTLLGLLDMDFGNPENPSY

SEQ ID NO: 62216 - protein, 10 aa, unidentified
  source 1..10: note = methanogen bacteria
TAGTSGGINI

SEQ ID NO: 62217 - protein, 11 aa, unidentified
  source 1..11: note = methanogen bacteria
QVDLGSMSSAT

SEQ ID NO: 62218 - protein, 30 aa, unidentified
  source 1..30: note = methanogen bacteria
VLHGEEDWLDSFRMAWLMVFGGDLELGHVT

SEQ ID NO: 62219 - protein, 13 aa, unidentified
  source 1..13: note = methanogen bacteria
FAYIGIVGDSMGN

SEQ ID NO: 62220 - protein, 27 aa, unidentified
  source 1..27: note = methanogen bacteria
FTMSAWRKGTSVMAERFAVSKIIPDDE

SEQ ID NO: 62221 - protein, 15 aa, unidentified
  source 1..15: note = methanogen bacteria
TLNLMGRNRQVIPVT

SEQ ID NO: 62222 - protein, 28 aa, unidentified
  source 1..28: note = methanogen bacteria
TLPTVFETPSVSIVIPGVDIPGSQIYVP

SEQ ID NO: 62223 - protein, 35 aa, unidentified
  source 1..35: note = methanogen bacteria
GNRFIGSFHKILGSIGDYTSEPFNVNMARTIIRSS

SEQ ID NO: 62224 - protein, 19 aa, unidentified
  source 1..19: note = methanogen bacteria
QWPLIFKMYSYTLPQAIAV

SEQ ID NO: 62225 - protein, 24 aa, unidentified
  source 1..24: note = methanogen bacteria
GDANQPALWDGKFLWFTVHMTDAS

SEQ ID NO: 62226 - protein, 16 aa, unidentified
  source 1..16: note = methanogen bacteria
AGWIDMTAIFAPYMGW

SEQ ID NO: 62227 - protein, 28 aa, unidentified
  source 1..28: note = methanogen bacteria
SLETALETPSVSLVIPGVDMPGLSIYVP

SEQ ID NO: 62228 - protein, 10 aa, unidentified
  source 1..10: note = methanogen bacteria
EELSGGSENA

SEQ ID NO: 62229 - protein, 28 aa, unidentified
  source 1..28: note = methanogen bacteria
TLPTVFETPSVSIVIPGVDIPGSQIYVP

SEQ ID NO: 62230 - protein, 28 aa, unidentified
  source 1..28: note = methanogen bacteria
SLQTVFDTPSVSIVLPGVEIPGSPIYVP

SEQ ID NO: 62231 - protein, 29 aa, unidentified
  source 1..29: note = methanogen bacteria
TLSGDYASFQEAVMGLFSDPQTFLNNLMN

SEQ ID NO: 62232 - protein, 19 aa, unidentified
  source 1..19: note = methanogen bacteria
ILNPIIRPVTHLFLMGSSK

SEQ ID NO: 62233 - protein, 64 aa, unidentified
  source 1..64: note = methanogen bacteria
FRQQMGIKLNTVFCSMSNTMSSTSILHTHLLKSIIGALISQIMGPFVQSNINTGVGLYSYVPSF

SEQ ID NO: 62234 - protein, 97 aa, unidentified
  source 1..97: note = methanogen bacteria
SVGVAGAETDYYTVDVVNPTDNIDLGDINLKVIEQKNYTDSNKTTYYIDHNYNEMELINDLKHPLKNSCEYYTVTWNIFSYLEDYPEINRYSFILQK

SEQ ID NO: 62235 - protein, 10 aa, unidentified
  source 1..10: note = methanogen bacteria
TFLLNTVSPE

SEQ ID NO: 62236 - protein, 10 aa, unidentified
  source 1..10: note = methanogen bacteria
FQTPISSGIT

SEQ ID NO: 62237 - protein, 22 aa, unidentified
  source 1..22: note = methanogen bacteria
IGNPRSGIAVYMSYLIFEMGPN

SEQ ID NO: 62238 - protein, 11 aa, unidentified
  source 1..11: note = methanogen bacteria
SRIQIYFHVSF

SEQ ID NO: 62239 - protein, 12 aa, unidentified
  source 1..12: note = methanogen bacteria
TYLSRVTEINGE

SEQ ID NO: 62240 - protein, 15 aa, unidentified
  source 1..15: note = methanogen bacteria
QGGVIASTVPFSINY

SEQ ID NO: 62241 - protein, 27 aa, unidentified
  source 1..27: note = methanogen bacteria
FPNEIGLEHYWKSIIPTFFTSGQFSRY

SEQ ID NO: 62242 - protein, 20 aa, unidentified
  source 1..20: note = methanogen bacteria
ESIGLIETGFALYSFNCYSS

SEQ ID NO: 62243 - protein, 20 aa, unidentified
  source 1..20: note = methanogen bacteria
MSFSYFYFDGKFGFLSQLDP

SEQ ID NO: 62244 - protein, 11 aa, unidentified
  source 1..11: note = methanogen bacteria
VIQIYFNVSIY

SEQ ID NO: 62245 - protein, 12 aa, unidentified
  source 1..12: note = methanogen bacteria
TYLSEVTQINGE

SEQ ID NO: 62246 - protein, 10 aa, unidentified
  source 1..10: note = methanogen bacteria
IIQIYFNVSI

SEQ ID NO: 62247 - protein, 12 aa, unidentified
  source 1..12: note = methanogen bacteria
TYLSQVTQINGE

SEQ ID NO: 62248 - protein, 10 aa, unidentified
  source 1..10: note = methanogen bacteria
LVKTDIGSFN

SEQ ID NO: 62249 - protein, 34 aa, unidentified
  source 1..34: note = methanogen bacteria
RFGIEANVINTYSLDYLINCLLGLSKGITKGRHF

SEQ ID NO: 62250 - protein, 17 aa, unidentified
  source 1..17: note = methanogen bacteria
ITNLSLISNKLTTFPYF

SEQ ID NO: 62251 - protein, 14 aa, unidentified
  source 1..14: note = methanogen bacteria
DILFGSMNIFNRSP

SEQ ID NO: 62252 - protein, 24 aa, unidentified
  source 1..24: note = methanogen bacteria
YFIQAYKTSVSMGLDMIDLSVVSP

SEQ ID NO: 62253 - protein, 10 aa, unidentified
  source 1..10: note = methanogen bacteria
VIQIYFNVSI

SEQ ID NO: 62254 - protein, 12 aa, unidentified
  source 1..12: note = methanogen bacteria
TYLDQVTHLDAH

SEQ ID NO: 62255 - protein, 26 aa, unidentified
  source 1..26: note = methanogen bacteria
PDFMDIIPGCFLFNLRLPLVSSGFSI

SEQ ID NO: 62256 - protein, 12 aa, unidentified
  source 1..12: note = methanogen bacteria
TGIIIIKLMELI

SEQ ID NO: 62257 - protein, 12 aa, unidentified
  source 1..12: note = methanogen bacteria
LNERTIMGHLIT

SEQ ID NO: 62258 - protein, 12 aa, unidentified
  source 1..12: note = methanogen bacteria
MNPTFFDVEYTA

SEQ ID NO: 62259 - protein, 12 aa, unidentified
  source 1..12: note = methanogen bacteria
LNDRTVLGHVIT

SEQ ID NO: 62260 - protein, 11 aa, unidentified
  source 1..11: note = methanogen bacteria
NPAFLNLEYTA

SEQ ID NO: 62261 - protein, 96 aa, unidentified
  source 1..96: note = methanogen bacteria
VVLSVDKSVDVSYVVVGDLVKYIIIVHNDGLSDATDVKVWDVLPVGVMYVSGADAYDEATHNATWTIAKIEAGKSASVVLVVNETHEGNMINSVFA

SEQ ID NO: 62262 - protein, 56 aa, unidentified
  source 1..56: note = methanogen bacteria
DSAFAYCCENTTVVNGTCGVVIIWNLEYSGLTDANDQFKLSAVDFAFGQSNSISHR

SEQ ID NO: 62263 - protein, 13 aa, unidentified
  source 1..13: note = methanogen bacteria
NNPSNETFNFIVK

SEQ ID NO: 62264 - protein, 12 aa, unidentified
  source 1..12: note = methanogen bacteria
PKIFNPDITSYT

SEQ ID NO: 62265 - protein, 16 aa, unidentified
  source 1..16: note = methanogen bacteria
GHMQVYMISRINLSLT

SEQ ID NO: 62266 - protein, 29 aa, unidentified
  source 1..29: note = methanogen bacteria
MDLDLIDSIYYAVITMAAVGYGDFYPTTA

SEQ ID NO: 62267 - protein, 14 aa, unidentified
  source 1..14: note = methanogen bacteria
SLSWDVGAQVDNTW

SEQ ID NO: 62268 - protein, 11 aa, unidentified
  source 1..11: note = methanogen bacteria
GSLCPIHTELP

SEQ ID NO: 62269 - protein, 12 aa, unidentified
  source 1..12: note = methanogen bacteria
NITGGDMTLTYN

SEQ ID NO: 62270 - protein, 10 aa, unidentified
  source 1..10: note = methanogen bacteria
AELSGGSSDA

SEQ ID NO: 62271 - protein, 31 aa, unidentified
  source 1..31: note = methanogen bacteria
NNDDRSASEVMRGFLSFSDDTLMGRYVWNID

SEQ ID NO: 62272 - protein, 14 aa, unidentified
  source 1..14: note = methanogen bacteria
YFDAGAAFGGEFMQ

SEQ ID NO: 62273 - protein, 25 aa, unidentified
  source 1..25: note = methanogen bacteria
YMADTAQLSQIVSWSFGTINYATWE

SEQ ID NO: 62274 - protein, 12 aa, unidentified
  source 1..12: note = methanogen bacteria
EKIVNPTAANYT

SEQ ID NO: 62275 - protein, 25 aa, unidentified
  source 1..25: note = methanogen bacteria
YYFVQAYKTSVSMGLDMIDLSVVSP

SEQ ID NO: 62276 - protein, 11 aa, unidentified
  source 1..11: note = methanogen bacteria
QISEYFNTSIA

SEQ ID NO: 62277 - protein, 12 aa, unidentified
  source 1..12: note = methanogen bacteria
YFLQTVSHVYTY

SEQ ID NO: 62278 - protein, 12 aa, unidentified
  source 1..12: note = methanogen bacteria
HKIISPTNVSYS

SEQ ID NO: 62279 - protein, 26 aa, unidentified
  source 1..26: note = methanogen bacteria
IWEMPDFLPALGDKIAAEGFGTDANA

SEQ ID NO: 62280 - protein, 10 aa, unidentified
  source 1..10: note = methanogen bacteria
TMMGSESPNM

SEQ ID NO: 62281 - protein, 16 aa, unidentified
  source 1..16: note = methanogen bacteria
AGVPIFSTISTVITEP

SEQ ID NO: 62282 - protein, 13 aa, unidentified
  source 1..13: note = methanogen bacteria
FGIDRAIGGSDMG

SEQ ID NO: 62283 - protein, 11 aa, unidentified
  source 1..11: note = methanogen bacteria
YMIIVKKVDIS

SEQ ID NO: 62284 - protein, 23 aa, unidentified
  source 1..23: note = methanogen bacteria
TMNVNGVPANSRGLIVMISALLG

SEQ ID NO: 62285 - protein, 11 aa, unidentified
  source 1..11: note = methanogen bacteria
TPRPEGLFIAN

SEQ ID NO: 62286 - protein, 11 aa, unidentified
  source 1..11: note = methanogen bacteria
YITVFRQLNFN

SEQ ID NO: 62287 - protein, 11 aa, unidentified
  source 1..11: note = methanogen bacteria
NKSTNGESLWA

SEQ ID NO: 62288 - protein, 23 aa, unidentified
  source 1..23: note = methanogen bacteria
TIDVFGVPANARGLIVMIAALSG

SEQ ID NO: 62289 - protein, 10 aa, unidentified
  source 1..10: note = methanogen bacteria
TPKDGIMIAN

SEQ ID NO: 62290 - protein, 15 aa, unidentified
  source 1..15: note = methanogen bacteria
SQPAAPTMSAVLNLN

SEQ ID NO: 62291 - protein, 13 aa, unidentified
  source 1..13: note = methanogen bacteria
MASAGTWEALFEH

SEQ ID NO: 62292 - protein, 15 aa, unidentified
  source 1..15: note = methanogen bacteria
FIVRLLDDTGSYVGA

SEQ ID NO: 62293 - protein, 56 aa, unidentified
  source 1..56: note = methanogen bacteria
YTITTEYMDCIESNVVSVISILNADNLTKQYGDNSQFVANLVDGQGHPHPNQNVTF

SEQ ID NO: 62294 - protein, 16 aa, unidentified
  source 1..16: note = methanogen bacteria
NGVTYRRTTDNNGQAK

SEQ ID NO: 62295 - protein, 22 aa, unidentified
  source 1..22: note = methanogen bacteria
EYIITSTYNDLSISNKIIILSP

SEQ ID NO: 62296 - protein, 14 aa, unidentified
  source 1..14: note = methanogen bacteria
IGIDQIVYALSAAN

SEQ ID NO: 62297 - protein, 10 aa, unidentified
  source 1..10: note = methanogen bacteria
FASAGIPSGI

SEQ ID NO: 62298 - protein, 15 aa, unidentified
  source 1..15: note = methanogen bacteria
QGGILTAAVPFSMQY

SEQ ID NO: 62299 - protein, 27 aa, unidentified
  source 1..27: note = methanogen bacteria
FPADFSLESVWKGILPTFYTNGQFSRY

SEQ ID NO: 62300 - protein, 20 aa, unidentified
  source 1..20: note = methanogen bacteria
QSWGFIETGFDIYAFNCYLS

SEQ ID NO: 62301 - protein, 20 aa, unidentified
  source 1..20: note = methanogen bacteria
MSVDHYFLSGKFAFLANMDP

SEQ ID NO: 62302 - protein, 19 aa, unidentified
  source 1..19: note = methanogen bacteria
TYNTSGFNFNISKFNYIFK

SEQ ID NO: 62303 - protein, 17 aa, unidentified
  source 1..17: note = methanogen bacteria
IMPLDKFDGDIRIMTVM

SEQ ID NO: 62304 - protein, 12 aa, unidentified
  source 1..12: note = methanogen bacteria
SQISEYFNTSIS

SEQ ID NO: 62305 - protein, 12 aa, unidentified
  source 1..12: note = methanogen bacteria
YFLQTVSHIYTY

SEQ ID NO: 62306 - protein, 12 aa, unidentified
  source 1..12: note = methanogen bacteria
PKILHPDVTSYT

SEQ ID NO: 62307 - protein, 13 aa, unidentified
  source 1..13: note = methanogen bacteria
NPTFMQTGTISSD

SEQ ID NO: 62308 - protein, 13 aa, unidentified
  source 1..13: note = methanogen bacteria
LVSEPVNGAIAPY

SEQ ID NO: 62309 - protein, 37 aa, unidentified
  source 1..37: note = methanogen bacteria
GYGTMKIPFAECYSILWDHITGDIGDTQLDYIVVKER

SEQ ID NO: 62310 - protein, 25 aa, unidentified
  source 1..25: note = methanogen bacteria
KLNADPDSLAKIYAWTVGTVSDAKW

SEQ ID NO: 62311 - protein, 15 aa, unidentified
  source 1..15: note = methanogen bacteria
IIVIIMLLYIKIRKK

SEQ ID NO: 62312 - protein, 13 aa, unidentified
  source 1..13: note = methanogen bacteria
ITRNHGLIMQHKT

SEQ ID NO: 62313 - protein, 25 aa, unidentified
  source 1..25: note = methanogen bacteria
QELEFTPQLVFNIFFGVKGGMGAIL

SEQ ID NO: 62314 - protein, 14 aa, unidentified
  source 1..14: note = methanogen bacteria
TSLANGKFYSANYF

SEQ ID NO: 62315 - protein, 13 aa, unidentified
  source 1..13: note = methanogen bacteria
AKYLYRIKFYNSP

SEQ ID NO: 62316 - protein, 11 aa, unidentified
  source 1..11: note = methanogen bacteria
MMINFIHYDNF

SEQ ID NO: 62317 - protein, 27 aa, unidentified
  source 1..27: note = methanogen bacteria
HLFDNSFLVTNLNLFIFNNIEIRPNII

SEQ ID NO: 62318 - protein, 12 aa, unidentified
  source 1..12: note = methanogen bacteria
INEPVGGIIPPY

SEQ ID NO: 62319 - protein, 44 aa, unidentified
  source 1..44: note = methanogen bacteria
MYGTLDLSAGKVFDLFWDHLSGRTYDRIQENDDWFSDRILWEYR

SEQ ID NO: 62320 - protein, 12 aa, unidentified
  source 1..12: note = methanogen bacteria
LGLSVGGGSTGG

SEQ ID NO: 62321 - protein, 25 aa, unidentified
  source 1..25: note = methanogen bacteria
VTSDSADLQTVYRWQVGYLADIRMD

SEQ ID NO: 62322 - protein, 15 aa, unidentified
  source 1..15: note = methanogen bacteria
VRLIGREGFSLVYTP

SEQ ID NO: 62323 - protein, 35 aa, unidentified
  source 1..35: note = methanogen bacteria
LGSYRMSMTEAYSALWDYIAGSDSESTAVAAIRLR

SEQ ID NO: 62324 - protein, 26 aa, unidentified
  source 1..26: note = methanogen bacteria
MLSADPNSASTVYSWSIGSLGMIEES

SEQ ID NO: 62325 - protein, 12 aa, unidentified
  source 1..12: note = methanogen bacteria
SFNYRFEDPLNP

SEQ ID NO: 62326 - protein, 18 aa, unidentified
  source 1..18: note = methanogen bacteria
IGGIPLFNSVLKSNATTN

SEQ ID NO: 62327 - protein, 80 aa, unidentified
  source 1..80: note = methanogen bacteria
SQSIATQHWTLNPLELVFYRAAFTLEVFEKIIPLGASTHGHVLSLIFSSGSPRTFIGEHVLHYTVCLTSTLFGPVYLDFG

SEQ ID NO: 62328 - protein, 12 aa, unidentified
  source 1..12: note = methanogen bacteria
PKIFHPDVTSYT

SEQ ID NO: 62329 - protein, 39 aa, unidentified
  source 1..39: note = methanogen bacteria
IGPTMVLSPWDAFGDLFSALGKDEGVMTAAESAVFVSRF

SEQ ID NO: 62330 - protein, 14 aa, unidentified
  source 1..14: note = methanogen bacteria
FGFTLFGLLPLHSP

SEQ ID NO: 62331 - protein, 23 aa, unidentified
  source 1..23: note = methanogen bacteria
VFSGDSVSSVLLWLFGSFSDIDM

SEQ ID NO: 62332 - protein, 30 aa, unidentified
  source 1..30: note = methanogen bacteria
FGDGEESVNDFIMIFAEAVGMDGDISWEGV

SEQ ID NO: 62333 - protein, 11 aa, unidentified
  source 1..11: note = methanogen bacteria
NEPIGGIIPPY

SEQ ID NO: 62334 - protein, 16 aa, unidentified
  source 1..16: note = methanogen bacteria
AAAIIIAGVGFMFLRR

SEQ ID NO: 62335 - protein, 18 aa, unidentified
  source 1..18: note = methanogen bacteria
LNPIVHPITHLFLMGSSK

SEQ ID NO: 62336 - protein, 62 aa, unidentified
  source 1..62: note = methanogen bacteria
RYQMGIGLNTIFMTIGKSISSTSILHTHLLKSIFGEVITNLMGPFIESEINTGVGLYAYIPE

SEQ ID NO: 62337 - protein, 90 aa, unidentified
  source 1..90: note = methanogen bacteria
ILGANTDYYEVDVANPADNIELKGFPIENVTHSHNKTTYIMNSNYNEMELLNDLKIPLNNSCDYYTVSWNIFSYLEPDHPITNLYESLKN

SEQ ID NO: 62338 - protein, 24 aa, unidentified
  source 1..24: note = methanogen bacteria
YFIQAYKTSVSMGLDMMDLSVVSP

SEQ ID NO: 62339 - protein, 18 aa, unidentified
  source 1..18: note = methanogen bacteria
LNPIIHPITHLFLMGSSK

SEQ ID NO: 62340 - protein, 63 aa, unidentified
  source 1..63: note = methanogen bacteria
FRWQMGIGLNTIFMVMGKSISSTSILHTHLLKSIFGEVITNLIGPFIGNEINTGVGLYQYLPD

SEQ ID NO: 62341 - protein, 90 aa, unidentified
  source 1..90: note = methanogen bacteria
VIGANTEYYEVDVMNPSDNIELNNFPIENVTHDGNKTTYIINSNYNEMELLNDLKGPLNKKCDYYTVSWNTFSYLEPSHPINELYQKLKN

SEQ ID NO: 62342 - protein, 18 aa, unidentified
  source 1..18: note = methanogen bacteria
LNPIIHPITHLFLMGSSK

SEQ ID NO: 62343 - protein, 61 aa, unidentified
  source 1..61: note = methanogen bacteria
RYQMGIGLNTIFMTMGKSISSTSILHTHLLKSIFGEAITNLIGPFIGSEINTGVGLYQYIP

SEQ ID NO: 62344 - protein, 90 aa, unidentified
  source 1..90: note = methanogen bacteria
VIGANTDYYEVEVVNPADNIELNDFPIKNVTHDGNKTVYIVDSNYNEMELLNDLKKPLNNRCDYYTVSWNTFSYLEPDHPITNLYYSLKN

SEQ ID NO: 62345 - protein, 32 aa, unidentified
  source 1..32: note = methanogen bacteria
IFLSDDEAWVEAVNTATAFIGLMTGQHFPVVE

SEQ ID NO: 62346 - protein, 21 aa, unidentified
  source 1..21: note = methanogen bacteria
LFFTVSVLHASDSLSGITTIV

SEQ ID NO: 62347 - protein, 24 aa, unidentified
  source 1..24: note = methanogen bacteria
LTLPGASIGYTQIFTPDWSALTNL

SEQ ID NO: 62348 - protein, 35 aa, unidentified
  source 1..35: note = methanogen bacteria
FMALTSGIPFNELVTEGTGLAFVVFPKVFNVMGPW

SEQ ID NO: 62349 - protein, 19 aa, unidentified
  source 1..19: note = methanogen bacteria
GIDQFIRPFAQPILMGSSK

SEQ ID NO: 62350 - protein, 61 aa, unidentified
  source 1..61: note = methanogen bacteria
LRSTLGLDWNTILVIMNPSMTSTSILHSHLYKAIFGIILGGILTYIPAGIHTGSSLSAYTP

SEQ ID NO: 62351 - protein, 76 aa, unidentified
  source 1..76: note = methanogen bacteria
AFYGACPDSYEVNIYNTHDIDALNQYDTLNLTEHQNKTTVYLSNEYNEMELLNNLAVSLDGKCDWYSLSWNIYSYL

SEQ ID NO: 62352 - protein, 11 aa, unidentified
  source 1..11: note = methanogen bacteria
YMIIVKKVDIS

SEQ ID NO: 62353 - protein, 10 aa, unidentified
  source 1..10: note = methanogen bacteria
NKSAHGESLW

SEQ ID NO: 62354 - protein, 23 aa, unidentified
  source 1..23: note = methanogen bacteria
TMNVNGVPANSRGLIVMISALLG

SEQ ID NO: 62355 - protein, 11 aa, unidentified
  source 1..11: note = methanogen bacteria
TPRPDGLLIAN

SEQ ID NO: 62356 - protein, 27 aa, unidentified
  source 1..27: note = methanogen bacteria
LSNTYPTFLDAVFGLKEPQTLFGSLFK

SEQ ID NO: 62357 - protein, 14 aa, unidentified
  source 1..14: note = methanogen bacteria
RLIGTDGFSLVYTP

SEQ ID NO: 62358 - protein, 11 aa, unidentified
  source 1..11: note = methanogen bacteria
YMITVEHVNAV

SEQ ID NO: 62359 - protein, 10 aa, unidentified
  source 1..10: note = methanogen bacteria
KSTNGESLLA

SEQ ID NO: 62360 - protein, 23 aa, unidentified
  source 1..23: note = methanogen bacteria
TMDIHGIPANSRGLIVMISAMLG

SEQ ID NO: 62361 - protein, 27 aa, unidentified
  source 1..27: note = methanogen bacteria
PEFLDVLPNYMFFGMSLPLNVLNINIP

SEQ ID NO: 62362 - protein, 13 aa, unidentified
  source 1..13: note = methanogen bacteria
NTVELIRILLELI

SEQ ID NO: 62363 - protein, 11 aa, unidentified
  source 1..11: note = methanogen bacteria
GPQMGIDPLFT

SEQ ID NO: 62364 - protein, 11 aa, unidentified
  source 1..11: note = methanogen bacteria
APKMQITPLFT

SEQ ID NO: 62365 - protein, 11 aa, unidentified
  source 1..11: note = methanogen bacteria
GPQMGIEPLFT

SEQ ID NO: 62366 - protein, 11 aa, unidentified
  source 1..11: note = methanogen bacteria
GPQMGIEPLFT

SEQ ID NO: 62367 - protein, 12 aa, unidentified
  source 1..12: note = methanogen bacteria
LDQLAPNAPSVS

SEQ ID NO: 62368 - protein, 14 aa, unidentified
  source 1..14: note = methanogen bacteria
YSPDAPIVKTFNMY

SEQ ID NO: 62369 - protein, 21 aa, unidentified
  source 1..21: note = methanogen bacteria
TGLSNWMGAGITNLIGSNPSE

SEQ ID NO: 62370 - protein, 11 aa, unidentified
  source 1..11: note = methanogen bacteria
TTAMSLGFSPI

SEQ ID NO: 62371 - protein, 12 aa, unidentified
  source 1..12: note = methanogen bacteria
GPMMNVTPTFTP

SEQ ID NO: 62372 - protein, 11 aa, unidentified
  source 1..11: note = methanogen bacteria
GPQVGISPLFT

SEQ ID NO: 62373 - protein, 11 aa, unidentified
  source 1..11: note = methanogen bacteria
CPMMGLNPLFT

SEQ ID NO: 62374 - protein, 11 aa, unidentified
  source 1..11: note = methanogen bacteria
APQIGIDPLFT

SEQ ID NO: 62375 - protein, 39 aa, unidentified
  source 1..39: note = methanogen bacteria
VGPNGFINPVEAYSSLFSAIGKSGEGMTSTEVTVYSSRA

SEQ ID NO: 62376 - protein, 14 aa, unidentified
  source 1..14: note = methanogen bacteria
YGFTFFGLISAHSP

SEQ ID NO: 62377 - protein, 23 aa, unidentified
  source 1..23: note = methanogen bacteria
IFAGNAVSNAMLWLFGSFAQISR

SEQ ID NO: 62378 - protein, 11 aa, unidentified
  source 1..11: note = methanogen bacteria
GPQIGIEPLFT

SEQ ID NO: 62379 - protein, 11 aa, unidentified
  source 1..11: note = methanogen bacteria
GPQMGIEPLFT

SEQ ID NO: 62380 - protein, 10 aa, unidentified
  source 1..10: note = methanogen bacteria
YVSRDINGPN

SEQ ID NO: 62381 - protein, 25 aa, unidentified
  source 1..25: note = methanogen bacteria
MSHGFNLDSALKIFFGTAGTLGVHF

SEQ ID NO: 62382 - protein, 12 aa, unidentified
  source 1..12: note = methanogen bacteria
VPRSHLVHQFVR

SEQ ID NO: 62383 - protein, 11 aa, unidentified
  source 1..11: note = methanogen bacteria
IKFINFTQGSS

SEQ ID NO: 62384 - protein, 20 aa, unidentified
  source 1..20: note = methanogen bacteria
TKSLIIDCANTWDLSTHAQF

SEQ ID NO: 62385 - protein, 18 aa, unidentified
  source 1..18: note = methanogen bacteria
AWIISEHYDVNYNRRDTI

SEQ ID NO: 62386 - protein, 57 aa, unidentified
  source 1..57: note = methanogen bacteria
MSYKTFFNNNSVTCWDLNWGGDGGAIYAKGNVVAHYCDFNGNSATRNANDIYCSNLY

SEQ ID NO: 62387 - protein, 11 aa, unidentified
  source 1..11: note = methanogen bacteria
GPQMGIEPLFT

SEQ ID NO: 62388 - protein, 11 aa, unidentified
  source 1..11: note = methanogen bacteria
ATQVGFEPLFT

SEQ ID NO: 62389 - protein, 17 aa, unidentified
  source 1..17: note = methanogen bacteria
NLAGIENGLKNAAMGGK

SEQ ID NO: 62390 - protein, 27 aa, unidentified
  source 1..27: note = methanogen bacteria
LDIVENADLIADKIRKILRVNDEDDTV

SEQ ID NO: 62391 - protein, 20 aa, unidentified
  source 1..20: note = methanogen bacteria
LPFERLNVAADYSVSTMQTG

SEQ ID NO: 62392 - protein, 29 aa, unidentified
  source 1..29: note = methanogen bacteria
IQAIIDSFEVNMFDASTIKTSVMGAYPRT

SEQ ID NO: 62393 - protein, 13 aa, unidentified
  source 1..13: note = methanogen bacteria
YGLRNVMANHVVA

SEQ ID NO: 62394 - protein, 48 aa, unidentified
  source 1..48: note = methanogen bacteria
SSIMEQTAMIETGDATGAFERMHLLTLAYQGLNADNLVFDIVKENGKG

SEQ ID NO: 62395 - protein, 23 aa, unidentified
  source 1..23: note = methanogen bacteria
RAIEDNVIRVAKKMPSGYNMYEP

SEQ ID NO: 62396 - protein, 15 aa, unidentified
  source 1..15: note = methanogen bacteria
TVLYYNDMLEYETGL

SEQ ID NO: 62397 - protein, 36 aa, unidentified
  source 1..36: note = methanogen bacteria
IGDLHVGFFNSYGVIFAHLTGDVTDDNADYIIWEWR

SEQ ID NO: 62398 - protein, 25 aa, unidentified
  source 1..25: note = methanogen bacteria
LWVDPDKLEEIYRWSVGTIDGAKWD

SEQ ID NO: 62399 - protein, 11 aa, unidentified
  source 1..11: note = methanogen bacteria
VPMMGLTPVFT

SEQ ID NO: 62400 - protein, 11 aa, unidentified
  source 1..11: note = methanogen bacteria
GPQIGIEPLFT

SEQ ID NO: 62401 - protein, 11 aa, unidentified
  source 1..11: note = methanogen bacteria
GPQMGIEPLFT

SEQ ID NO: 62402 - protein, 11 aa, unidentified
  source 1..11: note = methanogen bacteria
GPQMGIDPLFT

SEQ ID NO: 62403 - protein, 11 aa, unidentified
  source 1..11: note = methanogen bacteria
GPMMNINAVFT

SEQ ID NO: 62404 - protein, 11 aa, unidentified
  source 1..11: note = methanogen bacteria
APMMGLKPVFS

SEQ ID NO: 62405 - protein, 17 aa, unidentified
  source 1..17: note = methanogen bacteria
AVCRSCSYGEYELDPAK

SEQ ID NO: 62406 - protein, 12 aa, unidentified
  source 1..12: note = methanogen bacteria
LYFPKSTGPGDR

SEQ ID NO: 62407 - protein, 11 aa, unidentified
  source 1..11: note = methanogen bacteria
YYHIRELIGVN

SEQ ID NO: 62408 - protein, 16 aa, unidentified
  source 1..16: note = methanogen bacteria
LGGIPLLSGHLKARAA

SEQ ID NO: 62409 - protein, 84 aa, unidentified
  source 1..84: note = methanogen bacteria
VKSIEWQTWTLNPIELLFYRAGYTLQVLGNAVVLQGSTHGQLLYNTLTGFMKSTDPRVIVGSTTLGYAHSTTSMIFGPALLDFG

SEQ ID NO: 62410 - protein, 12 aa, unidentified
  source 1..12: note = methanogen bacteria
HYHLHKLIGVDQ

SEQ ID NO: 62411 - protein, 17 aa, unidentified
  source 1..17: note = methanogen bacteria
LGGIPLFSGYLKARAAT

SEQ ID NO: 62412 - protein, 84 aa, unidentified
  source 1..84: note = methanogen bacteria
VISIEWQTWSSTPIELLFYRAGYTLQVLDHAVFLQGSTHGQLLYNTLMGFFKSSDPRVIVGSTTLGYAHSTTSTIFGPALLDFG

SEQ ID NO: 62413 - protein, 11 aa, unidentified
  source 1..11: note = methanogen bacteria
HYHLNKLIGVN

SEQ ID NO: 62414 - protein, 17 aa, unidentified
  source 1..17: note = methanogen bacteria
LGGIPLFSGYLKARAAT

SEQ ID NO: 62415 - protein, 85 aa, unidentified
  source 1..85: note = methanogen bacteria
AVKSIEWQTWSTTPIELLFYRAGYTLQVLDHAAFMQGSTHGQLLYNTLMGFFKSSDPRVIVGSTILGKAHSTTSTIFGPALLDFG

SEQ ID NO: 62416 - protein, 12 aa, unidentified
  source 1..12: note = methanogen bacteria
IYVSRDINSSSL

SEQ ID NO: 62417 - protein, 26 aa, unidentified
  source 1..26: note = methanogen bacteria
IISPPFNLDNSIKIFLGTGGTLGVHF

SEQ ID NO: 62418 - protein, 14 aa, unidentified
  source 1..14: note = methanogen bacteria
PRTHMAHVFVTLGY

SEQ ID NO: 62419 - protein, 14 aa, unidentified
  source 1..14: note = methanogen bacteria
INLIRYVNFTQGSS

SEQ ID NO: 62420 - protein, 12 aa, unidentified
  source 1..12: note = methanogen bacteria
VVDKETGEESIV

SEQ ID NO: 62421 - protein, 21 aa, unidentified
  source 1..21: note = methanogen bacteria
IKAVCRSCSYGEYDLDPAKAE

SEQ ID NO: 62422 - protein, 19 aa, unidentified
  source 1..19: note = methanogen bacteria
CPCNVLSFPKATGPGDRGT

SEQ ID NO: 62423 - protein, 49 aa, unidentified
  source 1..49: note = methanogen bacteria
GINAYDMTFSEAWNVFIDHLRNGRPERIAGDHESYVTWLTDYVVVYSNA

SEQ ID NO: 62424 - protein, 12 aa, unidentified
  source 1..12: note = methanogen bacteria
YGVCILPFASGD

SEQ ID NO: 62425 - protein, 26 aa, unidentified
  source 1..26: note = methanogen bacteria
RFNASEEDLKTIYDWTVGSVGSVTWD

SEQ ID NO: 62426 - protein, 11 aa, unidentified
  source 1..11: note = methanogen bacteria
FVTRDINSPNL

SEQ ID NO: 62427 - protein, 26 aa, unidentified
  source 1..26: note = methanogen bacteria
HIYHGFNLSNAIAIFFGKSGTIGVHL

SEQ ID NO: 62428 - protein, 16 aa, unidentified
  source 1..16: note = methanogen bacteria
VPRSHLVHKFVALSYF

SEQ ID NO: 62429 - protein, 14 aa, unidentified
  source 1..14: note = methanogen bacteria
MNLIKVINFSNGHP

SEQ ID NO: 62430 - protein, 49 aa, unidentified
  source 1..49: note = methanogen bacteria
GINAYDMTFSDAWSVFIDHLKNGRPERVVGDHDSYVTWLTDYVVVYSNA

SEQ ID NO: 62431 - protein, 13 aa, unidentified
  source 1..13: note = methanogen bacteria
VYDVCILPFASGD

SEQ ID NO: 62432 - protein, 26 aa, unidentified
  source 1..26: note = methanogen bacteria
LVTAPSESLADAYSWRVGDLGRANSG

SEQ ID NO: 62433 - protein, 11 aa, unidentified
  source 1..11: note = methanogen bacteria
ECPKCGAQFDG

SEQ ID NO: 62434 - protein, 41 aa, unidentified
  source 1..41: note = methanogen bacteria
NVVTHKDGTSDVSEETKTCPNCGKSIPANSARCPNCGKKFE

SEQ ID NO: 62435 - protein, 23 aa, unidentified
  source 1..23: note = methanogen bacteria
PKLFYPSMSSTYILPSWNPAWSM

SEQ ID NO: 62436 - protein, 11 aa, unidentified
  source 1..11: note = methanogen bacteria
ECPKCGAQFDG

SEQ ID NO: 62437 - protein, 34 aa, unidentified
  source 1..34: note = methanogen bacteria
GTSDVSEETKTCPNCGKAIPANSTRCPYCGKKFE

SEQ ID NO: 62438 - protein, 42 aa, unidentified
  source 1..42: note = methanogen bacteria
AGVFNFSSSKNSDNTVTIGHLPSDHNAALFVADKQGLFKEKI

SEQ ID NO: 62439 - protein, 13 aa, unidentified
  source 1..13: note = methanogen bacteria
MMLENTVSMPYEV

SEQ ID NO: 62440 - protein, 26 aa, unidentified
  source 1..26: note = methanogen bacteria
HYLSEYLFNLGYLLPIYGGWEIFYVD

SEQ ID NO: 62441 - protein, 26 aa, unidentified
  source 1..26: note = methanogen bacteria
FSDFGSIPLNILFGYFIGTDYAFTAF

SEQ ID NO: 62442 - protein, 14 aa, unidentified
  source 1..14: note = methanogen bacteria
DAHGTFPEGYYFYM

SEQ ID NO: 62443 - protein, 10 aa, unidentified
  source 1..10: note = methanogen bacteria
YADKSFVFND

SEQ ID NO: 62444 - protein, 10 aa, unidentified
  source 1..10: note = methanogen bacteria
SAAASTNEYE

SEQ ID NO: 62445 - protein, 20 aa, unidentified
  source 1..20: note = methanogen bacteria
TSARNGASSWFQIGDILIQP

SEQ ID NO: 62446 - protein, 71 aa, unidentified
  source 1..71: note = methanogen bacteria
TYVLPEHAKARIQTFMNPESDPRGAGYNIAQSKLAIGSGQLLGMGYMKGNQTQLGYLYPKTSDFIFSVIGE

SEQ ID NO: 62447 - protein, 16 aa, unidentified
  source 1..16: note = methanogen bacteria
GLLPITGVPLPFVSYG

SEQ ID NO: 62448 - protein, 13 aa, unidentified
  source 1..13: note = methanogen bacteria
LYFNNSFSTGYKL

SEQ ID NO: 62449 - protein, 26 aa, unidentified
  source 1..26: note = methanogen bacteria
WFYSGILLGNWNTFDIFGGLIIFEVD

SEQ ID NO: 62450 - protein, 26 aa, unidentified
  source 1..26: note = methanogen bacteria
FIEFHNVVLDILFGYFIGTNVAFTAF

SEQ ID NO: 62451 - protein, 18 aa, unidentified
  source 1..18: note = methanogen bacteria
VVFDITTSSNIDGFYYYM

SEQ ID NO: 62452 - protein, 19 aa, unidentified
  source 1..19: note = methanogen bacteria
ILNPIIRPVTQLFLMGSSK

SEQ ID NO: 62453 - protein, 64 aa, unidentified
  source 1..64: note = methanogen bacteria
FRAQMGIKLNTVFCAMSNTMTTTSILHTHLLKSILGAIISQIMGPFVQSNIHTSVGLYQYVPSF

SEQ ID NO: 62454 - protein, 86 aa, unidentified
  source 1..86: note = methanogen bacteria
VGMAGAETDYYTVDVVNPADNIDLGDINSKVIEKKNHHDSHTITYHIDHNYNEMELINDLKIPLDHSCEYYTVTWNIYSYLNNTAS

SEQ ID NO: 62455 - protein, 10 aa, unidentified
  source 1..10: note = methanogen bacteria
VGLGPDALAA

SEQ ID NO: 62456 - protein, 18 aa, unidentified
  source 1..18: note = methanogen bacteria
PILIMMGVGHTIKYAMDY

SEQ ID NO: 62457 - protein, 12 aa, unidentified
  source 1..12: note = methanogen bacteria
FFVSDTNGVAVY

SEQ ID NO: 62458 - protein, 21 aa, unidentified
  source 1..21: note = methanogen bacteria
ISSIFSYTDASSHLAPQISLI

SEQ ID NO: 62459 - protein, 12 aa, unidentified
  source 1..12: note = methanogen bacteria
SYIVNDMGTFNF

SEQ ID NO: 62460 - protein, 26 aa, unidentified
  source 1..26: note = methanogen bacteria
YIQQSIDIDNAIDIFLGHGGTLGVTF

SEQ ID NO: 62461 - protein, 17 aa, unidentified
  source 1..17: note = methanogen bacteria
VVPTSLASNSFRYLSYF

SEQ ID NO: 62462 - protein, 11 aa, unidentified
  source 1..11: note = methanogen bacteria
IQYIDFPHQNS

SEQ ID NO: 62463 - protein, 12 aa, unidentified
  source 1..12: note = methanogen bacteria
VVDKTTGEESIV

SEQ ID NO: 62464 - protein, 23 aa, unidentified
  source 1..23: note = methanogen bacteria
IKAVCRSCSYGEYDLDPAKAAIT

SEQ ID NO: 62465 - protein, 15 aa, unidentified
  source 1..15: note = methanogen bacteria
PCNVLSFPKSSGPGD

SEQ ID NO: 62466 - protein, 12 aa, unidentified
  source 1..12: note = methanogen bacteria
PKIFNPVLADYT

SEQ ID NO: 62467 - protein, 16 aa, unidentified
  source 1..16: note = methanogen bacteria
GIYIISSDSIMYYTTF

SEQ ID NO: 62468 - protein, 22 aa, unidentified
  source 1..22: note = methanogen bacteria
ITVGSAQVNISEAGNLFFSHMW

SEQ ID NO: 62469 - protein, 10 aa, unidentified
  source 1..10: note = methanogen bacteria
MHGIENVNIQ

SEQ ID NO: 62470 - protein, 12 aa, unidentified
  source 1..12: note = methanogen bacteria
FTKGYDFHLWYE

SEQ ID NO: 62471 - protein, 21 aa, unidentified
  source 1..21: note = methanogen bacteria
GADLGLLLLSFGQHEFTHPFG

SEQ ID NO: 62472 - protein, 98 aa, unidentified
  source 1..98: note = methanogen bacteria
KISGMEIFSPVLRISRLAQNSLSSLKLVLENTYLIGHDPASSYWSNSSRFADGYISLPMQFILMFGLPFPLFFGLLVTRKDTIDYMLPGIFGYAYDFG

SEQ ID NO: 62473 - protein, 11 aa, unidentified
  source 1..11: note = methanogen bacteria
HYHLHKLIGVD

SEQ ID NO: 62474 - protein, 16 aa, unidentified
  source 1..16: note = methanogen bacteria
LGGIPLFSGYLKAHAA

SEQ ID NO: 62475 - protein, 84 aa, unidentified
  source 1..84: note = methanogen bacteria
VKSIEWQTWTSTPIELLFYRAGYTLQVLDHAVFLQGSTHGQLLYNTLMGFFKSSDPRVIVGSTTLGYAHSTTSTIFGPALLDFG

SEQ ID NO: 62476 - protein, 12 aa, unidentified
  source 1..12: note = methanogen bacteria
PKIFNPVLADYN

SEQ ID NO: 62477 - protein, 10 aa, unidentified
  source 1..10: note = methanogen bacteria
MVDLISAGDT

SEQ ID NO: 62478 - protein, 35 aa, unidentified
  source 1..35: note = methanogen bacteria
SFAFGDTSLHGLIAAPANFLMMGIGIDDVTGTIPT

SEQ ID NO: 62479 - protein, 15 aa, unidentified
  source 1..15: note = methanogen bacteria
VWGGGWLMQMGALDF

SEQ ID NO: 62480 - protein, 46 aa, unidentified
  source 1..46: note = methanogen bacteria
SYRNIRISCYKRSCRTGFRKSFPGYSTNNKHYCNCGLCCCNHIYFS

SEQ ID NO: 62481 - protein, 16 aa, unidentified
  source 1..16: note = methanogen bacteria
TKQCKHENWKIGQGSN

SEQ ID NO: 62482 - protein, 17 aa, unidentified
  source 1..17: note = methanogen bacteria
PGLFSYDTIDGIKYDRY

SEQ ID NO: 62483 - protein, 11 aa, unidentified
  source 1..11: note = methanogen bacteria
VSFNKYPEVRL

SEQ ID NO: 62484 - protein, 11 aa, unidentified
  source 1..11: note = methanogen bacteria
NILYPVWENTS

SEQ ID NO: 62485 - protein, 24 aa, unidentified
  source 1..24: note = methanogen bacteria
NNNGFILTTATLYQFYLNFMKQHW

SEQ ID NO: 62486 - protein, 23 aa, unidentified
  source 1..23: note = methanogen bacteria
INHYTFTILLHHYNFFTHSYLDV

SEQ ID NO: 62487 - protein, 14 aa, unidentified
  source 1..14: note = methanogen bacteria
EYFNADLSSNYLFV

SEQ ID NO: 62488 - protein, 25 aa, unidentified
  source 1..25: note = methanogen bacteria
YLVLFLALVSLPFEGYAEALLFVVD

SEQ ID NO: 62489 - protein, 24 aa, unidentified
  source 1..24: note = methanogen bacteria
FTDFGDPAVNLVAGNLIGTDFTAF

SEQ ID NO: 62490 - protein, 15 aa, unidentified
  source 1..15: note = methanogen bacteria
WGGVFSEDIVFYYYL

SEQ ID NO: 62491 - protein, 12 aa, unidentified
  source 1..12: note = methanogen bacteria
PVLSHHEFTHPL

SEQ ID NO: 62492 - protein, 100 aa, unidentified
  source 1..100: note = methanogen bacteria
SRILNASVLSPLLRISRLEQYSYSSLKTVLVNTNFWGHVQGSCYWGSNCLGGSDGYITLPITLIQSFGLPYHIFYGVLIVKKDYIDYMLPGIFAFAYDAG

SEQ ID NO: 62493 - protein, 12 aa, unidentified
  source 1..12: note = methanogen bacteria
DGVPISEIEAYP

SEQ ID NO: 62494 - protein, 10 aa, unidentified
  source 1..10: note = methanogen bacteria
IAIDRTLPDR

SEQ ID NO: 62495 - protein, 18 aa, unidentified
  source 1..18: note = methanogen bacteria
IVVDKETGKESIEVDTDK

SEQ ID NO: 62496 - protein, 33 aa, unidentified
  source 1..33: note = methanogen bacteria
KALCRICSYGEYDIDPAKAVVTGNSVIDSDLCV

SEQ ID NO: 62497 - protein, 15 aa, unidentified
  source 1..15: note = methanogen bacteria
AAKVKKPFEGTIEVD

SEQ ID NO: 62498 - protein, 26 aa, unidentified
  source 1..26: note = methanogen bacteria
KCNALAFPVSTGPGSRLDHIVAQTDY

SEQ ID NO: 62499 - protein, 19 aa, unidentified
  source 1..19: note = methanogen bacteria
PNGAITVKRTEVDHTPTNS

SEQ ID NO: 62500 - protein, 12 aa, unidentified
  source 1..12: note = methanogen bacteria
CSFGNVDYGKTT

SEQ ID NO: 62501 - protein, 18 aa, unidentified
  source 1..18: note = methanogen bacteria
YGAGVPLEYSLLSFLAND

SEQ ID NO: 62502 - protein, 28 aa, unidentified
  source 1..28: note = methanogen bacteria
DFTFSNMYLNQLLGNLIETHGQNIVSCF

SEQ ID NO: 62503 - protein, 19 aa, unidentified
  source 1..19: note = methanogen bacteria
MFSVTGGTVPEKLEYLHAS

SEQ ID NO: 62504 - protein, 11 aa, unidentified
  source 1..11: note = methanogen bacteria
SQISEYFNTSI

SEQ ID NO: 62505 - protein, 11 aa, unidentified
  source 1..11: note = methanogen bacteria
YFLQTVSQIYT

SEQ ID NO: 62506 - protein, 49 aa, unidentified; identical to SEQ ID NO: 62430
  source 1..49: note = methanogen bacteria

SEQ ID NO: 62507 - protein, 13 aa, unidentified
  source 1..13: note = methanogen bacteria
VYDVCILPFASGD

SEQ ID NO: 62508 - protein, 26 aa, unidentified
  source 1..26: note = methanogen bacteria
RFNASEEDLKTIYDWTVGSVGSVDWD

SEQ ID NO: 62509 - protein, 13 aa, unidentified
  source 1..13: note = methanogen bacteria
VVDKETGKESIVI

SEQ ID NO: 62510 - protein, 19 aa, unidentified
  source 1..19: note = methanogen bacteria
KAVCRSCSYGEYDLDPANA

SEQ ID NO: 62511 - protein, 18 aa, unidentified
  source 1..18: note = methanogen bacteria
GCNALAFPVSSGPGSRME

SEQ ID NO: 62512 - protein, 13 aa, unidentified
  source 1..13: note = methanogen bacteria
VVDKETGRESIVI

SEQ ID NO: 62513 - protein, 16 aa, unidentified
  source 1..16: note = methanogen bacteria
KAICRACNYGEYDLDP

SEQ ID NO: 62514 - protein, 18 aa, unidentified
  source 1..18: note = methanogen bacteria
GCNALAFPVSSGPGSRME

SEQ ID NO: 62515 - protein, 23 aa, unidentified
  source 1..23: note = methanogen bacteria
LNPSFVGQKAINSAVNSFFCDRW

SEQ ID NO: 62516 - protein, 23 aa, unidentified
  source 1..23: note = methanogen bacteria
IDYLSISYSFRYYMFTEKSHLEN

SEQ ID NO: 62517 - protein, 12 aa, unidentified
  source 1..12: note = methanogen bacteria
HIYNMSYTDMPG

SEQ ID NO: 62518 - protein, 15 aa, unidentified
  source 1..15: note = methanogen bacteria
IVVDQATGAESIVID

SEQ ID NO: 62519 - protein, 17 aa, unidentified
  source 1..17: note = methanogen bacteria
KAICRACNYGEYDLDPS

SEQ ID NO: 62520 - protein, 21 aa, unidentified
  source 1..21: note = methanogen bacteria
GCNALAFPVSSGPGSRMDHVI

SEQ ID NO: 62521 - protein, 15 aa, unidentified
  source 1..15: note = methanogen bacteria
LTIDGVPISEIDAYP

SEQ ID NO: 62522 - protein, 10 aa, unidentified
  source 1..10: note = methanogen bacteria
IVIDRTLPDR

SEQ ID NO: 62523 - protein, 18 aa, unidentified
  source 1..18: note = methanogen bacteria
IVVDKETGKESIEVDTSK

SEQ ID NO: 62524 - protein, 35 aa, unidentified
  source 1..35: note = methanogen bacteria
IKALCRLCSYGEYDIDPSKAAVKGNSVIDSELCVY

SEQ ID NO: 62525 - protein, 21 aa, unidentified
  source 1..21: note = methanogen bacteria
GVCPTDAAKAKKPFEGTIEVD

SEQ ID NO: 62526 - protein, 27 aa, unidentified
  source 1..27: note = methanogen bacteria
CKCNALAFPVSTGPGSRLDYIVAQPDY

SEQ ID NO: 62527 - protein, 21 aa, unidentified
  source 1..21: note = methanogen bacteria
PNGAITVKRTDVDHTPTNSAT

SEQ ID NO: 62528 - protein, 19 aa, unidentified
  source 1..19: note = methanogen bacteria
DLAFLVLSFGQHEFTHPFG

SEQ ID NO: 62529 - protein, 98 aa, unidentified
  source 1..98: note = methanogen bacteria
RILSMEVFSPLLRLSRLAQNSLASLKLVIGNTRLIGHDPASSYWSDSNGFADGYISLPMQFILMFGLPFPLFFGLLVTKKDTIDYMLPGIFGYAYDFG

SEQ ID NO: 62530 - protein, 11 aa, unidentified
  source 1..11: note = methanogen bacteria
FSYTRPVGTLG

SEQ ID NO: 62531 - protein, 19 aa, unidentified
  source 1..19: note = methanogen bacteria
FGSPWTLHEYIDIIATKEY

SEQ ID NO: 62532 - protein, 15 aa, unidentified
  source 1..15: note = methanogen bacteria
KIDFFTVLVSAHSLG

SEQ ID NO: 62533 - protein, 17 aa, unidentified
  source 1..17: note = methanogen bacteria
FIASPKAHTLVYYGYRR

SEQ ID NO: 62534 - protein, 16 aa, unidentified
  source 1..16: note = methanogen bacteria
LSWVNKNVTHVYSLNP

SEQ ID NO: 62535 - protein, 13 aa, unidentified
  source 1..13: note = methanogen bacteria
VVDQATGAESIVI

SEQ ID NO: 62536 - protein, 12 aa, unidentified
  source 1..12: note = methanogen bacteria
CRACNYGEYELD

SEQ ID NO: 62537 - protein, 19 aa, unidentified
  source 1..19: note = methanogen bacteria
GCNALAFPVSSGPGSRMEH

SEQ ID NO: 62538 - protein, 13 aa, unidentified
  source 1..13: note = methanogen bacteria
MLEYFMWGNMINT

SEQ ID NO: 62539 - protein, 12 aa, unidentified
  source 1..12: note = methanogen bacteria
GAITTLGGFELG

SEQ ID NO: 62540 - protein, 27 aa, unidentified
  source 1..27: note = methanogen bacteria
LNGKDYVVKTGNDGKATLPVDLIPGKY

SEQ ID NO: 62541 - protein, 45 aa, unidentified
  source 1..45: note = methanogen bacteria
DSANLIIALIDAKSNALVSKDISVNLNGKAYVVKTGNDGKAALPI

SEQ ID NO: 62542 - protein, 32 aa, unidentified
  source 1..32: note = methanogen bacteria
SVNSNIVVNKVSTSLTFNDINIVYGDLSNLLF

SEQ ID NO: 62543 - protein, 11 aa, unidentified
  source 1..11: note = methanogen bacteria
VASLGEVAISG

SEQ ID NO: 62544 - protein, 20 aa, unidentified
  source 1..20: note = methanogen bacteria
FLISFFFGQIDSDVFDVLSI

SEQ ID NO: 62545 - protein, 10 aa, unidentified
  source 1..10: note = methanogen bacteria
STFGTIAIAA

SEQ ID NO: 62546 - protein, 15 aa, unidentified
  source 1..15: note = methanogen bacteria
ASSIVADISIISRNC

SEQ ID NO: 62547 - protein, 12 aa, unidentified
  source 1..12: note = methanogen bacteria
VVDNETGKESIV

SEQ ID NO: 62548 - protein, 14 aa, unidentified
  source 1..14: note = methanogen bacteria
AICRACNYGEYDLD

SEQ ID NO: 62549 - protein, 15 aa, unidentified
  source 1..15: note = methanogen bacteria
CNALAFPVSSGPGSR

SEQ ID NO: 62550 - protein, 22 aa, unidentified
  source 1..22: note = methanogen bacteria
INPSYTIPEFTTQGLYLTDKSI

SEQ ID NO: 62551 - protein, 30 aa, unidentified
  source 1..30: note = methanogen bacteria
FFNGQPQLAVIYGSTPSVAVNEMATALMGT

SEQ ID NO: 62552 - protein, 13 aa, unidentified
  source 1..13: note = methanogen bacteria
LSFGQHEFTHPFG

SEQ ID NO: 62553 - protein, 98 aa, unidentified
  source 1..98: note = methanogen bacteria
RITGMEVFSPMLRISRLAQNSVSSLKLVVENTWLIGHDPASSYWSNSSGFADGYISLPMQFILMFGLPFPLFFGLLVTKKDTIDYMLPGIFGYAYDFG

SEQ ID NO: 62554 - protein, 13 aa, unidentified
  source 1..13: note = methanogen bacteria
LSFGQHEFTHPFG

SEQ ID NO: 62555 - protein, 98 aa, unidentified
  source 1..98: note = methanogen bacteria
RISGMEVFSPVLRISRLAANSLSSLKLVVGNTWLIGHDPSSSYWSNSSGFADGYISLPMQFILLFGLPFPLFFGLLVTRKDTIDYMLPGIFGYAYDFG

SEQ ID NO: 62556 - protein, 15 aa, unidentified
  source 1..15: note = methanogen bacteria
KMQVYLISQIKLPLT

SEQ ID NO: 62557 - protein, 13 aa, unidentified
  source 1..13: note = methanogen bacteria
VVDKETGKESIVI

SEQ ID NO: 62558 - protein, 15 aa, unidentified
  source 1..15: note = methanogen bacteria
LCRACSYGEYDLDPA

SEQ ID NO: 62559 - protein, 16 aa, unidentified
  source 1..16: note = methanogen bacteria
GCNALAFPVSSGPGSR

SEQ ID NO: 62560 - protein, 11 aa, unidentified
  source 1..11: note = methanogen bacteria
FSYTHPVGTFD

SEQ ID NO: 62561 - protein, 19 aa, unidentified
  source 1..19: note = methanogen bacteria
YGNPWTLTEYVRIIATSEY

SEQ ID NO: 62562 - protein, 15 aa, unidentified
  source 1..15: note = methanogen bacteria
KIDFFTKLVSAHSLG

SEQ ID NO: 62563 - protein, 18 aa, unidentified
  source 1..18: note = methanogen bacteria
TMIQSSHADKLIYYGYRR

SEQ ID NO: 62564 - protein, 14 aa, unidentified
  source 1..14: note = methanogen bacteria
GWVTKNITPIYSLS

SEQ ID NO: 62565 - protein, 12 aa, unidentified
  source 1..12: note = methanogen bacteria
VDKETGKESIEI

SEQ ID NO: 62566 - protein, 14 aa, unidentified
  source 1..14: note = methanogen bacteria
LCRICSYGEYDIDP

SEQ ID NO: 62567 - protein, 16 aa, unidentified
  source 1..16: note = methanogen bacteria
CNALAFPVSTGPGSRL

SEQ ID NO: 62568 - protein, 33 aa, unidentified
  source 1..33: note = methanogen bacteria
LAFGGDIGNIIGNLDFIMLKNVGLSPNEGSTIP

SEQ ID NO: 62569 - protein, 13 aa, unidentified
  source 1..13: note = methanogen bacteria
WGGGWISKIGGID

SEQ ID NO: 62570 - protein, 19 aa, unidentified
  source 1..19: note = methanogen bacteria
ATVLINPDGTNGLLYGSFK

SEQ ID NO: 62571 - protein, 13 aa, unidentified
  source 1..13: note = methanogen bacteria
VVDKETGKESIVI

SEQ ID NO: 62572 - protein, 23 aa, unidentified
  source 1..23: note = methanogen bacteria
IKAICRACNYGEYDLDPSKAVVK

SEQ ID NO: 62573 - protein, 22 aa, unidentified
  source 1..22: note = methanogen bacteria
GCNALAFPVSSGPGSRLDHIIA

SEQ ID NO: 62574 - protein, 11 aa, unidentified
  source 1..11: note = methanogen bacteria
AITVKRTEIDH

SEQ ID NO: 62575 - protein, 18 aa, unidentified
  source 1..18: note = methanogen bacteria
IVVDKETGKESIVIDKDA

SEQ ID NO: 62576 - protein, 23 aa, unidentified
  source 1..23: note = methanogen bacteria
IKAVCRSCSYGEYDLDPAKAVVK

SEQ ID NO: 62577 - protein, 23 aa, unidentified
  source 1..23: note = methanogen bacteria
GCNALAFPVSSGSGSRMEHVIAN

SEQ ID NO: 62578 - protein, 18 aa, unidentified
  source 1..18: note = methanogen bacteria
KAICRACNYGEYDLDPSK

SEQ ID NO: 62579 - protein, 21 aa, unidentified
  source 1..21: note = methanogen bacteria
GCNALAFPVSTGPGSRMDHVI

SEQ ID NO: 62580 - protein, 12 aa, unidentified
  source 1..12: note = methanogen bacteria
LVVNVDIFNTKL

SEQ ID NO: 62581 - protein, 25 aa, unidentified
  source 1..25: note = methanogen bacteria
WHYSNPYQFILQTISFNPTGSAAAF

SEQ ID NO: 62582 - protein, 16 aa, unidentified
  source 1..16: note = methanogen bacteria
AINSISLNNYTPVSPF

SEQ ID NO: 62583 - protein, 10 aa, unidentified
  source 1..10: note = methanogen bacteria
YHLKELVGVN

SEQ ID NO: 62584 - protein, 17 aa, unidentified
  source 1..17: note = methanogen bacteria
LGGIPLLSGYLKAHAAT

SEQ ID NO: 62585 - protein, 85 aa, unidentified
  source 1..85: note = methanogen bacteria
VKSIEWQTWTLSPLELLFYRAGYTLQVLDRAVVLQGSTHGQLLYNTLMGFFHSTDPRVIVGSTTLGYAHSTTSMIFGPALLDFGL

SEQ ID NO: 62586 - protein, 13 aa, unidentified
  source 1..13: note = methanogen bacteria
MWDIIYILNQIDN

SEQ ID NO: 62587 - protein, 10 aa, unidentified
  source 1..10: note = methanogen bacteria
MDYSFYNPTT

SEQ ID NO: 62588 - protein, 25 aa, unidentified
  source 1..25: note = methanogen bacteria
NYQNVPSMFYLIFQDAFDFQSIACG

SEQ ID NO: 62589 - protein, 46 aa, unidentified
  source 1..46: note = methanogen bacteria
STGVARDAAVYRNTIRTKCDFNSIWNGRTDFHNNCNGTLCIHNASG

SEQ ID NO: 62590 - protein, 13 aa, unidentified
  source 1..13: note = methanogen bacteria
ICRSCSYGEYDLD

SEQ ID NO: 62591 - protein, 13 aa, unidentified
  source 1..13: note = methanogen bacteria
NALAFPVSSGPGS

SEQ ID NO: 62592 - protein, 11 aa, unidentified
  source 1..11: note = methanogen bacteria
VIKTEIFGTNL

SEQ ID NO: 62593 - protein, 30 aa, unidentified
  source 1..30: note = methanogen bacteria
GNYNFIMFNLNPFDYFFVALMGLKGVWHYL

SEQ ID NO: 62594 - protein, 17 aa, unidentified
  source 1..17: note = methanogen bacteria
DFNLSILNAKFSHVSYF

SEQ ID NO: 62595 - protein, 14 aa, unidentified
  source 1..14: note = methanogen bacteria
VGVDKVVYAFQYAN

SEQ ID NO: 62596 - protein, 10 aa, unidentified
  source 1..10: note = methanogen bacteria
AFGFTVSPIM

SEQ ID NO: 62597 - protein, 11 aa, unidentified
  source 1..11: note = methanogen bacteria
FASAGIPSNIG

SEQ ID NO: 62598 - protein, 41 aa, unidentified
  source 1..41: note = methanogen bacteria
TVSSSGITASEVYQVFINKIWPGDDPFDIEWRRQEIIWRVY

SEQ ID NO: 62599 - protein, 25 aa, unidentified
  source 1..25: note = methanogen bacteria
YFGDADAVKQAMFWTVGDLDNVVIG

SEQ ID NO: 62600 - protein, 43 aa, unidentified
  source 1..43: note = methanogen bacteria
STYPDITLKETYEIIWHHLTGKTYDINVDAYRWWADRHIWNTA

SEQ ID NO: 62601 - protein, 12 aa, unidentified
  source 1..12: note = methanogen bacteria
GASFSTVAGETG

SEQ ID NO: 62602 - protein, 26 aa, unidentified
  source 1..26: note = methanogen bacteria
MVTTDADTLKDAYLWQIGHLDGMTWD

SEQ ID NO: 62603 - protein, 10 aa, unidentified
  source 1..10: note = methanogen bacteria
SYVVYTNGGG

SEQ ID NO: 62604 - protein, 30 aa, unidentified
  source 1..30: note = methanogen bacteria
SFTFNWGTDLGNYFISNVGGSSNISDIGFL

SEQ ID NO: 62605 - protein, 24 aa, unidentified
  source 1..24: note = methanogen bacteria
TLPGASIGINALLHPKWNMLWDVN

SEQ ID NO: 62606 - protein, 35 aa, unidentified
  source 1..35: note = methanogen bacteria
GYMSYTSGTALTELISEGTGLIFIVFPTIFNIMGP

SEQ ID NO: 62607 - protein, 12 aa, unidentified
  source 1..12: note = methanogen bacteria
MLFDNTISDPYY

SEQ ID NO: 62608 - protein, 23 aa, unidentified
  source 1..23: note = methanogen bacteria
LQSIFNAGNLMPIFGGLILFYVD

SEQ ID NO: 62609 - protein, 25 aa, unidentified
  source 1..25: note = methanogen bacteria
SDFGSIALNIFFGYFIGTFYKFTAF

SEQ ID NO: 62610 - protein, 15 aa, unidentified
  source 1..15: note = methanogen bacteria
YDAFGTFPEGYYFYM

SEQ ID NO: 62611 - protein, 10 aa, unidentified
  source 1..10: note = methanogen bacteria
YVNKSIVFND

SEQ ID NO: 62612 - protein, 37 aa, unidentified
  source 1..37: note = methanogen bacteria
TVGGYHIVFFETYQILVDHIRGDVSDPTKDLIVWDTR

SEQ ID NO: 62613 - protein, 25 aa, unidentified
  source 1..25: note = methanogen bacteria
LLADPEDLAAVYSWQVGSLGRSSWD

SEQ ID NO: 62614 - protein, 64 aa, unidentified
  source 1..64: note = methanogen bacteria
KYTFPISWDVYYHIHMADLYMRNGLVFWDFETVAPYGRLIMYPPLFHLVLAGLSKVTGIGLVSL

SEQ ID NO: 62615 - protein, 22 aa, unidentified
  source 1..22: note = methanogen bacteria
VYLKYTLVFNSKAGNLLSLPNF

SEQ ID NO: 62616 - protein, 11 aa, unidentified
  source 1..11: note = methanogen bacteria
TYLGVQTVSIR

SEQ ID NO: 62617 - protein, 12 aa, unidentified
  source 1..12: note = methanogen bacteria
VYVDSYTPEVMC

SEQ ID NO: 62618 - protein, 16 aa, unidentified
  source 1..16: note = methanogen bacteria
NSSGVVSNIGVTGIKE

SEQ ID NO: 62619 - protein, 31 aa, unidentified
  source 1..31: note = methanogen bacteria
TNYYGDIFAGNGSMIPVPIKYIIFSLIGIGP

SEQ ID NO: 62620 - protein, 22 aa, unidentified
  source 1..22: note = methanogen bacteria
VNYCTGFSILRGYLGNIPLIYN

SEQ ID NO: 62621 - protein, 27 aa, unidentified
  source 1..27: note = methanogen bacteria
YGSVLPIEFTKNNVVARTEILASYMDY

SEQ ID NO: 62622 - protein, 10 aa, unidentified
  source 1..10: note = methanogen bacteria
VSGLELTGTQ

SEQ ID NO: 62623 - protein, 19 aa, unidentified
  source 1..19: note = methanogen bacteria
FYPSMIAVYQLPVWSPSWN

SEQ ID NO: 62624 - protein, 26 aa, unidentified
  source 1..26: note = methanogen bacteria
VWEMPDFLPQVMINMENAGFGGDANY

SEQ ID NO: 62625 - protein, 11 aa, unidentified
  source 1..11: note = methanogen bacteria
TIFGGAESANM

SEQ ID NO: 62626 - protein, 17 aa, unidentified
  source 1..17: note = methanogen bacteria
CGVPIFSTLGSIIADPY

SEQ ID NO: 62627 - protein, 13 aa, unidentified
  source 1..13: note = methanogen bacteria
FGVDNAIGGSDMA

SEQ ID NO: 62628 - protein, 14 aa, unidentified
  source 1..14: note = methanogen bacteria
SIQSSAINFIQLPL

SEQ ID NO: 62629 - protein, 12 aa, unidentified
  source 1..12: note = methanogen bacteria
PKIFTPDVTNYS

SEQ ID NO: 62630 - protein, 23 aa, unidentified
  source 1..23: note = methanogen bacteria
VGDFNHSTSFIYNILFADVLGGP

SEQ ID NO: 62631 - protein, 27 aa, unidentified
  source 1..27: note = methanogen bacteria
PYFTSGSLLGRWDLYHIHGGLIFFFCG

SEQ ID NO: 62632 - protein, 26 aa, unidentified
  source 1..26: note = methanogen bacteria
CVDFGTPVLNIFIGYFIGTNTEYTAF

SEQ ID NO: 62633 - protein, 19 aa, unidentified
  source 1..19: note = methanogen bacteria
TLWGKELFSSRGVLYYYMT

SEQ ID NO: 62634 - protein, 12 aa, unidentified
  source 1..12: note = methanogen bacteria
PKIFNPDVTSYN

SEQ ID NO: 62635 - protein, 11 aa, unidentified
  source 1..11: note = methanogen bacteria
FVSKPNMVNLN

SEQ ID NO: 62636 - protein, 25 aa, unidentified
  source 1..25: note = methanogen bacteria
IRHSIDLNYALDIFLGAPGTLGVAF

SEQ ID NO: 62637 - protein, 15 aa, unidentified
  source 1..15: note = methanogen bacteria
VPHSVNANQFVTLGY

SEQ ID NO: 62638 - protein, 14 aa, unidentified
  source 1..14: note = methanogen bacteria
NNISTFVNYSSQNP

SEQ ID NO: 62639 - protein, 13 aa, unidentified
  source 1..13: note = methanogen bacteria
WPKIFAPDVTSYT

SEQ ID NO: 62640 - protein, 12 aa, unidentified
  source 1..12: note = methanogen bacteria
PKIFNPDVTSYT

SEQ ID NO: 62641 - protein, 11 aa, unidentified
  source 1..11: note = methanogen bacteria
CRACNYGEYDL

SEQ ID NO: 62642 - protein, 13 aa, unidentified
  source 1..13: note = methanogen bacteria
NALAFPVSSGPGS

SEQ ID NO: 62643 - protein, 12 aa, unidentified
  source 1..12: note = methanogen bacteria
GAVTTLGGFELG

SEQ ID NO: 62644 - protein, 12 aa, unidentified
  source 1..12: note = methanogen bacteria
PKIFHPDVTSYT

SEQ ID NO: 62645 - protein, 89 aa, unidentified
  source 1..89: note = methanogen bacteria
MLQPGEYDAFIYYGTDWFDAETSSKIIVKKTLFSDNLIVPRGNASTFDVYCLDENGTVLAENSEIDFYMDGVIRSRYVDDEGICSLNLN

SEQ ID NO: 62646 - protein, 61 aa, unidentified
  source 1..61: note = methanogen bacteria
SYNVRTNEFVTNWIYVAEICTQDLVKIYKNDSKFEAKIGVANETVTFEINGKNYTRISNEN

SEQ ID NO: 62647 - protein, 30 aa, unidentified
  source 1..30: note = methanogen bacteria
DYTIKTSYNNFTVENNITVLPTLIAENLVK

SEQ ID NO: 62648 - protein, 19 aa, unidentified
  source 1..19: note = methanogen bacteria
FYIDLIDSEGNPVADVNIT

SEQ ID NO: 62649 - protein, 30 aa, unidentified
  source 1..30: note = methanogen bacteria
TATDPLTGLQMSYNITVLPTLNAADLEMTY

SEQ ID NO: 62650 - protein, 15 aa, unidentified
  source 1..15: note = methanogen bacteria
VTVLDGQGNPLSNAK

SEQ ID NO: 62651 - protein, 14 aa, unidentified
  source 1..14: note = methanogen bacteria
KISDSNGIAKLNIN

SEQ ID NO: 62652 - protein, 18 aa, unidentified
  source 1..18: note = methanogen bacteria
ITSEYDGLKTANTIIIKG

SEQ ID NO: 62653 - protein, 12 aa, unidentified
  source 1..12: note = methanogen bacteria
PKIFTPDVTNYD

SEQ ID NO: 62654 - protein, 12 aa, unidentified
  source 1..12: note = methanogen bacteria
TYVVSDMGTANF

SEQ ID NO: 62655 - protein, 25 aa, unidentified
  source 1..25: note = methanogen bacteria
LKHSIDIDNAIAIFSGHGGTMGVTF

SEQ ID NO: 62656 - protein, 17 aa, unidentified
  source 1..17: note = methanogen bacteria
VVPTSILNNHFTYLGYF

SEQ ID NO: 62657 - protein, 11 aa, unidentified
  source 1..11: note = methanogen bacteria
MNYIDYASQNS

SEQ ID NO: 62658 - protein, 12 aa, unidentified
  source 1..12: note = methanogen bacteria
PKIFTPDVTNYT

SEQ ID NO: 62659 - protein, 12 aa, unidentified
  source 1..12: note = methanogen bacteria
PKIFHPDVTSYT

SEQ ID NO: 62660 - protein, 22 aa, unidentified
  source 1..22: note = methanogen bacteria
GDFNHSISFIYNILFADVLGGP

SEQ ID NO: 62661 - protein, 26 aa, unidentified
  source 1..26: note = methanogen bacteria
YFTSGSLLGRWDLYHIYGGLIFFFCG

SEQ ID NO: 62662 - protein, 26 aa, unidentified
  source 1..26: note = methanogen bacteria
CADFGTPFLNIFIGYFIGTDTTYTAF

SEQ ID NO: 62663 - protein, 19 aa, unidentified
  source 1..19: note = methanogen bacteria
TLWGKGLFSGRGVLYYYMT

SEQ ID NO: 62664 - protein, 10 aa, unidentified
  source 1..10: note = methanogen bacteria
EDLLRGNMNN

SEQ ID NO: 62665 - protein, 13 aa, unidentified
  source 1..13: note = methanogen bacteria
GAVTTLGGFTLGW

SEQ ID NO: 62666 - protein, 12 aa, unidentified
  source 1..12: note = methanogen bacteria
PKIFTPDITNYT

SEQ ID NO: 62667 - protein, 12 aa, unidentified
  source 1..12: note = methanogen bacteria
PKIFNPDVTSYT

SEQ ID NO: 62668 - protein, 12 aa, unidentified
  source 1..12: note = methanogen bacteria
PKILNPDVTSYS

SEQ ID NO: 62669 - protein, 18 aa, unidentified
  source 1..18: note = methanogen bacteria
IGILFGQIGADVWHNADI

SEQ ID NO: 62670 - protein, 11 aa, unidentified
  source 1..11: note = methanogen bacteria
STFGTMAIAAN

SEQ ID NO: 62671 - protein, 18 aa, unidentified
  source 1..18: note = methanogen bacteria
ILGIYDLSAQTEAMTTQM

SEQ ID NO: 62672 - protein, 12 aa, unidentified
  source 1..12: note = methanogen bacteria
PKIFTPDVTNYT

SEQ ID NO: 62673 - protein, 13 aa, unidentified
  source 1..13: note = methanogen bacteria
VVDKETGKESIVI

SEQ ID NO: 62674 - protein, 23 aa, unidentified
  source 1..23: note = methanogen bacteria
IKAVCRSCSYGEYDLDPAKAAVK

SEQ ID NO: 62675 - protein, 15 aa, unidentified
  source 1..15: note = methanogen bacteria
AAKVKKPFEGSIVVD

SEQ ID NO: 62676 - protein, 17 aa, unidentified
  source 1..17: note = methanogen bacteria
CNALAFPVSSGPGSRME

SEQ ID NO: 62677 - protein, 11 aa, unidentified
  source 1..11: note = methanogen bacteria
ITVTRTAVDHT

SEQ ID NO: 62678 - protein, 12 aa, unidentified
  source 1..12: note = methanogen bacteria
PKIFTPDVTNYT

SEQ ID NO: 62679 - protein, 12 aa, unidentified
  source 1..12: note = methanogen bacteria
PKIFTPDATNYT

SEQ ID NO: 62680 - protein, 15 aa, unidentified
  source 1..15: note = methanogen bacteria
VGIDNVINALKIADS

SEQ ID NO: 62681 - protein, 11 aa, unidentified
  source 1..11: note = methanogen bacteria
RAFGANVSPII

SEQ ID NO: 62682 - protein, 10 aa, unidentified
  source 1..10: note = methanogen bacteria
YSTAGISSSI

SEQ ID NO: 62683 - protein, 12 aa, unidentified
  source 1..12: note = methanogen bacteria
PKIFHPDVTSYT

SEQ ID NO: 62684 - protein, 17 aa, unidentified
  source 1..17: note = methanogen bacteria
SIDGNNAISPMYKFIMD

SEQ ID NO: 62685 - protein, 23 aa, unidentified
  source 1..23: note = methanogen bacteria
SGIILGDWHYTYIYGGLIILFVD

SEQ ID NO: 62686 - protein, 26 aa, unidentified
  source 1..26: note = methanogen bacteria
SINFGPLILNFLFGNFIGTDVNCTAF

SEQ ID NO: 62687 - protein, 14 aa, unidentified
  source 1..14: note = methanogen bacteria
KTILYNDAGYYYLN

SEQ ID NO: 62688 - protein, 13 aa, unidentified
  source 1..13: note = methanogen bacteria
ASLFKSSFNQNFH

SEQ ID NO: 62689 - protein, 26 aa, unidentified
  source 1..26: note = methanogen bacteria
HFVAGALLGKADLFPIAGGLLLFCVD

SEQ ID NO: 62690 - protein, 26 aa, unidentified
  source 1..26: note = methanogen bacteria
GTDFGVPVLNLFFGNFIGTKGGFTSF

SEQ ID NO: 62691 - protein, 17 aa, unidentified
  source 1..17: note = methanogen bacteria
IWGGVASNDVHRYYFLN

SEQ ID NO: 62692 - protein, 17 aa, unidentified
  source 1..17: note = methanogen bacteria
VKAYSPGLSSAYEFVFG

SEQ ID NO: 62693 - protein, 26 aa, unidentified
  source 1..26: note = methanogen bacteria
HFLAEFLGIDPTPFAIDGGLLLFCVD

SEQ ID NO: 62694 - protein, 25 aa, unidentified
  source 1..25: note = methanogen bacteria
FTDFGNPDINLICGHFFGTKFTAFP

SEQ ID NO: 62695 - protein, 17 aa, unidentified
  source 1..17: note = methanogen bacteria
LWGGVFSENVHLYYFLN

SEQ ID NO: 62696 - protein, 30 aa, unidentified
  source 1..30: note = methanogen bacteria
GLLNTNHGLFPHFMLPNWQETIHFPFASAS

SEQ ID NO: 62697 - protein, 42 aa, unidentified
  source 1..42: note = methanogen bacteria
FDTYPGISLRESYEIIWNHIVGNSYPKGSLYWWADRQIWNSA

SEQ ID NO: 62698 - protein, 11 aa, unidentified
  source 1..11: note = methanogen bacteria
MGITMNGVVGE

SEQ ID NO: 62699 - protein, 26 aa, unidentified
  source 1..26: note = methanogen bacteria
MITTDADTLKSAYLWQVGSLDGMTWD

SEQ ID NO: 62700 - protein, 11 aa, unidentified
  source 1..11: note = methanogen bacteria
VINGIDSSILN

SEQ ID NO: 62701 - protein, 15 aa, unidentified
  source 1..15: note = methanogen bacteria
NMAFNHSFSPAYEFT

SEQ ID NO: 62702 - protein, 26 aa, unidentified
  source 1..26: note = methanogen bacteria
NFLSGTLLGNWDAFPIQGGLLLFCVD

SEQ ID NO: 62703 - protein, 26 aa, unidentified
  source 1..26: note = methanogen bacteria
GTDFGVTFLNLFVSDFIGTQGGFTAF

SEQ ID NO: 62704 - protein, 17 aa, unidentified
  source 1..17: note = methanogen bacteria
LWGGILSNDIHMYYFMN

SEQ ID NO: 62705 - protein, 30 aa, unidentified
  source 1..30: note = methanogen bacteria
GLPALTHQPASFNGFLNYLICFKGSDYPHM

SEQ ID NO: 62706 - protein, 18 aa, unidentified
  source 1..18: note = methanogen bacteria
LTVDAEFTVKDFVGQFYL

SEQ ID NO: 62707 - protein, 17 aa, unidentified
  source 1..17: note = methanogen bacteria
YIGVMPSIRAYVCSGAD

SEQ ID NO: 62708 - protein, 11 aa, unidentified
  source 1..11: note = methanogen bacteria
YPYSKFALQIP

SEQ ID NO: 62709 - protein, 61 aa, unidentified
  source 1..61: note = methanogen bacteria
AIFADMFFNSHNLSISSGIDLNLAITTFIQALPVEIQGFIKPYVGALTSGVHDILTYIFNY

SEQ ID NO: 62710 - protein, 11 aa, unidentified
  source 1..11: note = methanogen bacteria
LGFSTASGDAF

SEQ ID NO: 62711 - protein, 15 aa, unidentified
  source 1..15: note = methanogen bacteria
ATWDNMWGLGSETLD

SEQ ID NO: 62712 - protein, 37 aa, unidentified
  source 1..37: note = methanogen bacteria
VGSYSISASEVYGIIWDQITGGTPSDTVKQHIVIDLR

SEQ ID NO: 62713 - protein, 24 aa, unidentified
  source 1..24: note = methanogen bacteria
LLSDPDDLASVYTWLVGSVDGIDY

SEQ ID NO: 62714 - protein, 19 aa, unidentified
  source 1..19: note = methanogen bacteria
IFNPVIRPVTYLFLMGSSK

SEQ ID NO: 62715 - protein, 62 aa, unidentified
  source 1..62: note = methanogen bacteria
RLQMGIGLNTVLCSMTNGMSSTSILHTHMLKSILGEVITQIIGPFIQGDINTGVGLYQYVPG

SEQ ID NO: 62716 - protein, 82 aa, unidentified
  source 1..82: note = methanogen bacteria
IAFAGAEPDYYTVDVANPTGEIDLGNVTDKIIDLKHDNTLNKTTYHIDSDYNEMELINDLKVPLNNSCEYYTVSWNVYSYLN

SEQ ID NO: 62717 - protein, 13 aa, unidentified
  source 1..13: note = methanogen bacteria
LSFGQNEFTHPFG

SEQ ID NO: 62718 - protein, 18 aa, unidentified
  source 1..18: note = methanogen bacteria
LNPIIRPVTYLFLMGSSK

SEQ ID NO: 62719 - protein, 61 aa, unidentified
  source 1..61: note = methanogen bacteria
RMQMGIKLNTVFCSMTNGMSSTSILHTHLIKSILGAVLTQIMGPFIQSGINTGVGLYAYVP

SEQ ID NO: 62720 - protein, 81 aa, unidentified
  source 1..81: note = methanogen bacteria
AFAGAEPDYYTVDIVNPSEDIDLGNISVEVIDNEHDNKTNKTTYHIDPQYNEMKLINDLRAPLDNSCEYYTVSWNIYSYLE

SEQ ID NO: 62721 - protein, 36 aa, unidentified
  source 1..36: note = methanogen bacteria
GRNILVDENKYSTGDSVKLCLENNKIVADYPLAENA

SEQ ID NO: 62722 - protein, 35 aa, unidentified
  source 1..35: note = methanogen bacteria
PAIFQSLITPTINGMKEGVQQGTVQLETISLFTNN

SEQ ID NO: 62723 - protein, 11 aa, unidentified
  source 1..11: note = methanogen bacteria
IPLGKYILSNI

SEQ ID NO: 62724 - protein, 31 aa, unidentified
  source 1..31: note = methanogen bacteria
LHSTYPTFMDALFGLTNPQNVINNILSGTPK

SEQ ID NO: 62725 - protein, 15 aa, unidentified
  source 1..15: note = methanogen bacteria
LIVSSSQAEFTHPFG

SEQ ID NO: 62726 - protein, 100 aa, unidentified
  source 1..100: note = methanogen bacteria
SRVTGMTIFSPILRFSRIEQYSLSSIKTVLHNIQLIGHNAKASYWGAEGTAFAEGYITLPMQFVLFFGLPFPMFFGILVNQKDTIDYMLPGIFGYGFDFG

SEQ ID NO: 62727 - protein, 18 aa, unidentified
  source 1..18: note = methanogen bacteria
DIALLVISSSQAEFTHPF

SEQ ID NO: 62728 - protein, 99 aa, unidentified
  source 1..99: note = methanogen bacteria
RITGMTIFSPLLRLGRIEQYSLTSIKTVLNNIQLIGHNGAASYWGVEGTAFAEGYITLPMQFVLFFGLPFPMFFGILVNQKDTIDYMLPGIFGYGFDFG

SEQ ID NO: 62729 - protein, 21 aa, unidentified
  source 1..21: note = methanogen bacteria
GVYYDPSYLNQIFSLPFSYNW

SEQ ID NO: 62730 - protein, 27 aa, unidentified
  source 1..27: note = methanogen bacteria
GQLHLPYNLFHDYQATKTKIIKSSLDL

SEQ ID NO: 62731 - protein, 19 aa, unidentified
  source 1..19: note = methanogen bacteria
ADIALLVISSSQAEFTHPF

SEQ ID NO: 62732 - protein, 100 aa, unidentified
  source 1..100: note = methanogen bacteria
SRVTGMTIFSPLLRLGRIEQYSLSSIKTVLNNIQLIGHSGKASYWGIEGTAFAEGYITLPMQFVLFFGLPFPMFFGILVNQKDTIDYMLPGIFGYGFDFG

SEQ ID NO: 62733 - protein, 14 aa, unidentified
  source 1..14: note = methanogen bacteria
IISSSQAEFTHPFG

SEQ ID NO: 62734 - protein, 100 aa, unidentified
  source 1..100: note = methanogen bacteria
ARVSGMTVFSPLLRLGRIEQYSLSSIKTVLHNIQLIGHNAKASYWGAEGTAFAEGYITMPMQLVLFFGLPFPMFFGILVNQKDTIDYMLPGIFGYGFDFG

SEQ ID NO: 62735 - protein, 22 aa, unidentified
  source 1..22: note = methanogen bacteria
GVDLFMLFASFGQNEFTHPFGP

SEQ ID NO: 62736 - protein, 14 aa, unidentified
  source 1..14: note = methanogen bacteria
IISSSQAEFTHPFG

SEQ ID NO: 62737 - protein, 100 aa, unidentified
  source 1..100: note = methanogen bacteria
ARVTGMTIFSPVLRLTRIEQYSLSSIKTVLNNIQLIGHNANASYWGAEGTAFAEGYITLPMQFVLFFGLPFPMFFGILVNQKDTIDYMLPGIFGYGFDFG

SEQ ID NO: 62738 - protein, 10 aa, unidentified
  source 1..10: note = methanogen bacteria
SQLNMEATFA

SEQ ID NO: 62739 - protein, 16 aa, unidentified
  source 1..16: note = methanogen bacteria
IYLMQIDENVDIILAY

SEQ ID NO: 62740 - protein, 19 aa, unidentified
  source 1..19: note = methanogen bacteria
IYASFQIINMETPIFYIGC

SEQ ID NO: 62741 - protein, 23 aa, unidentified
  source 1..23: note = methanogen bacteria
NQIPLNYDALVFYINDFFNLGVN

SEQ ID NO: 62742 - protein, 25 aa, unidentified
  source 1..25: note = methanogen bacteria
QPIPYKILYLFMINNTIHLDSFLDI

SEQ ID NO: 62743 - protein, 10 aa, unidentified
  source 1..10: note = methanogen bacteria
FDLLPLSGTQ

SEQ ID NO: 62744 - protein, 18 aa, unidentified
  source 1..18: note = methanogen bacteria
DIALLVVSSSQAEFTHPF

SEQ ID NO: 62745 - protein, 100 aa, unidentified
  source 1..100: note = methanogen bacteria
SRITGMTIFSPMLRLGRIEQYSSSSVKMVLNNIQLIGHNGNASYWGAEGTAFAEGYITLPMQLVLFFGLPFPMFFGILVNQKDTVDYMLPGILGYGFDFG

SEQ ID NO: 62746 - protein, 10 aa, unidentified
  source 1..10: note = methanogen bacteria
CKIRPAGSLG

SEQ ID NO: 62747 - protein, 18 aa, unidentified
  source 1..18: note = methanogen bacteria
IYPKDPSKYLTLFLDGQY

SEQ ID NO: 62748 - protein, 21 aa, unidentified
  source 1..21: note = methanogen bacteria
TLTHIKVGAITEHALKYYLYQ

SEQ ID NO: 62749 - protein, 14 aa, unidentified
  source 1..14: note = methanogen bacteria
RWISKNIVPIYSKS

SEQ ID NO: 62750 - protein, 15 aa, unidentified
  source 1..15: note = methanogen bacteria
LILSSSQAEFTHPFG

SEQ ID NO: 62751 - protein, 100 aa, unidentified
  source 1..100: note = methanogen bacteria
SRVTGMTIFSPMLRFSRIEQYSLSSIKTVLHNIQLIGHNAKASYWGAEGTAFAEGYITLPMQFVLFFGLPFPMFFGILVNQKDTIDYMLPGIFGYGFDFG

SEQ ID NO: 62752 - protein, 20 aa, unidentified
  source 1..20: note = methanogen bacteria
DIFNPIIRPVTYQFLMGSSK

SEQ ID NO: 62753 - protein, 62 aa, unidentified
  source 1..62: note = methanogen bacteria
RMQMGIGLNTVFCSMTNGMSSTSILHTHLLKSILGALLTQIMGPFIQSDINTGVGLYAYIPS

SEQ ID NO: 62754 - protein, 80 aa, unidentified
  source 1..80: note = methanogen bacteria
AFAGAEPDYYTVDIANPTGDIDLGNISVEVIDHETGSNKTTYHIDPSYNEMKLINDLKVPLNNSCEYYTVTWNAYSYLEQ

SEQ ID NO: 62755 - protein, 14 aa, unidentified
  source 1..14: note = methanogen bacteria
MLFENTVSLPYYVT

SEQ ID NO: 62756 - protein, 26 aa, unidentified
  source 1..26: note = methanogen bacteria
HHLSQYLLNSGNILPILGGLKLFYVD

SEQ ID NO: 62757 - protein, 25 aa, unidentified
  source 1..25: note = methanogen bacteria
SDFGSVPLNILFGYFIGTSYEFTAF

SEQ ID NO: 62758 - protein, 16 aa, unidentified
  source 1..16: note = methanogen bacteria
YDSYGTFPEGYYFYMS

SEQ ID NO: 62759 - protein, 11 aa, unidentified
  source 1..11: note = methanogen bacteria
KYANKSIVFND

SEQ ID NO: 62760 - protein, 14 aa, unidentified
  source 1..14: note = methanogen bacteria
VISSSQAEFTHPFG

SEQ ID NO: 62761 - protein, 100 aa, unidentified
  source 1..100: note = methanogen bacteria
ARVSGMTIFSPVLRLTRIEQYSLSSIKTVLNNIQLIGHSADASYWGAEGTAFAEGYITLPMQLVLFFGLPFPMFFGVLVNQKDTIDYMLPGIFGYGFDFG

SEQ ID NO: 62762 - protein, 63 aa, unidentified
  source 1..63: note = methanogen bacteria
ETAVFANMFFASHNLSVSSGIDLNLAINTFVQALPVELQGLVKPYLGLLTSGVHEALTYIFNY

SEQ ID NO: 62763 - protein, 15 aa, unidentified
  source 1..15: note = methanogen bacteria
LVISSSQAEFTHPFG

SEQ ID NO: 62764 - protein, 100 aa, unidentified
  source 1..100: note = methanogen bacteria
SRISGMTIFSPMLRLSRIEQFSSSSVKMVLNNIQLIGHNGNASYWGAEGTAFAEGYITLPMQLVLFFGLPFPMFFGILVNQKDTVDYMLPGILGYGFDFG

SEQ ID NO: 62765 - protein, 12 aa, unidentified
  source 1..12: note = methanogen bacteria
YTKIRPIGSVGW

SEQ ID NO: 62766 - protein, 18 aa, unidentified
  source 1..18: note = methanogen bacteria
TYPTDPSNYLTLFLDSQY

SEQ ID NO: 62767 - protein, 21 aa, unidentified
  source 1..21: note = methanogen bacteria
TLTHGKVGLTGDNNLKYYHYE

SEQ ID NO: 62768 - protein, 15 aa, unidentified
  source 1..15: note = methanogen bacteria
RWIDHNMFPIYSASV

SEQ ID NO: 62769 - protein, 14 aa, unidentified
  source 1..14: note = methanogen bacteria
LVISSSQAEFTHPF

SEQ ID NO: 62770 - protein, 100 aa, unidentified
  source 1..100: note = methanogen bacteria
ARVSGMTIFSPLLRMGRIEQYSLSSIKTVLNNIQLIGHNAKASYWGAEGTAFAEGYITLPMQFVLFFGLPFPMFFGVLVNQKDTIDYMLPGIFGWGFDFG

SEQ ID NO: 62771 - protein, 15 aa, unidentified
  source 1..15: note = methanogen bacteria
LPSIEQGFHLTSRES

SEQ ID NO: 62772 - protein, 13 aa, unidentified
  source 1..13: note = methanogen bacteria
IDSSNFLASLTSL

SEQ ID NO: 62773 - protein, 11 aa, unidentified
  source 1..11: note = methanogen bacteria
LVILSMGMNNQ

SEQ ID NO: 62774 - protein, 15 aa, unidentified
  source 1..15: note = methanogen bacteria
LRLFDVTDFALGYSP

SEQ ID NO: 62775 - protein, 14 aa, unidentified
  source 1..14: note = methanogen bacteria
VLSSSQAEFTHPFG

SEQ ID NO: 62776 - protein, 100 aa, unidentified
  source 1..100: note = methanogen bacteria
ARVSGMTIFSPLLRLGRIEQYSASSIKTVLSNIQLIGHNANASYWGAEGTAFAEGYITLPMQLVLFFGLPFPMFFGILVNQKDTIDYMLPGIFGYGFDFG

SEQ ID NO: 62777 - protein, 25 aa, unidentified
  source 1..25: note = methanogen bacteria
TLSGDYASFQEAVMGLFSDPQTFIN

SEQ ID NO: 62778 - protein, 41 aa, unidentified; identical to SEQ ID NO: 57706
  source 1..41: note = methanogen bacteria

SEQ ID NO: 62779 - protein, 23 aa, unidentified
  source 1..23: note = methanogen bacteria
GTIGSLNITDIVYVLNHNLVDPL

SEQ ID NO: 62780 - protein, 19 aa, unidentified
  source 1..19: note = methanogen bacteria
DIALLVISSSQAEFTHPFG

SEQ ID NO: 62781 - protein, 99 aa, unidentified
  source 1..99: note = methanogen bacteria
RVSGMTIFSPLLRLGRIEQYSLSSIKTVLSNIQLIGHNANASYWGAEGTAFAEGYITLPMQFVLFFGLPFPMFFGILVNQKDTIDYMLPGIFGYGFDFG

SEQ ID NO: 62782 - protein, 13 aa, unidentified
  source 1..13: note = methanogen bacteria
GVLPTNISGFEIG

SEQ ID NO: 62783 - protein, 13 aa, unidentified
  source 1..13: note = methanogen bacteria
MLSHHEFTHPYGP

SEQ ID NO: 62784 - protein, 13 aa, unidentified
  source 1..13: note = methanogen bacteria
VISSSQAEFTHPF

SEQ ID NO: 62785 - protein, 19 aa, unidentified
  source 1..19: note = methanogen bacteria
ADIALLFISSSQAEFTHPF

SEQ ID NO: 62786 - protein, 15 aa, unidentified
  source 1..15: note = methanogen bacteria
LVISSSQAEFTHPFG

SEQ ID NO: 62787 - protein, 100 aa, unidentified
  source 1..100: note = methanogen bacteria
ARVTGMTIFSPMLRFGRIEQYSLSSIKTVLQNIQLIGHNAQASYWGAEGTAFAEGYITLPMQLVLFFGLPFPMFFGILVNQKDTIDYMLPGIFGYGFDFG

SEQ ID NO: 62788 - protein, 19 aa, unidentified
  source 1..19: note = methanogen bacteria
LLNPIIRPITYLFLMGSSK

SEQ ID NO: 62789 - protein, 62 aa, unidentified
  source 1..62: note = methanogen bacteria
RLQMGIGLNTVFCSMTNTMSSTSILHTHLIKSILGEALNQIMGAFIQSDINTGVGLYQYLPG

SEQ ID NO: 62790 - protein, 81 aa, unidentified
  source 1..81: note = methanogen bacteria
IAFAGAEPDYYTVDVANPTGEIDLGSISTDVISTTHDNSTNKTTYHINSSYNEMALINDLKVPLNNSCEYYTVSWNIYSYL

SEQ ID NO: 62791 - protein, 14 aa, unidentified
  source 1..14: note = methanogen bacteria
VVSSSQAEFTHPFG

SEQ ID NO: 62792 - protein, 13 aa, unidentified
  source 1..13: note = methanogen bacteria
GVLSTTVSGFEIG

SEQ ID NO: 62793 - protein, 16 aa, unidentified
  source 1..16: note = methanogen bacteria
LILPMFNHHEFTHPYG

SEQ ID NO: 62794 - protein, 11 aa, unidentified
  source 1..11: note = methanogen bacteria
MEFYLETFPGL

SEQ ID NO: 62795 - protein, 14 aa, unidentified
  source 1..14: note = methanogen bacteria
GSITTLLKSQTLLT

SEQ ID NO: 62796 - protein, 12 aa, unidentified
  source 1..12: note = methanogen bacteria
GVITSLGGFELG

SEQ ID NO: 62797 - protein, 18 aa, unidentified
  source 1..18: note = methanogen bacteria
DIALLVLSSSQAEFTHPF

SEQ ID NO: 62798 - protein, 98 aa, unidentified
  source 1..98: note = methanogen bacteria
LTGMTIFSPLLRLGRIEQYSLSSIKTVLNNIQLIGHSGKASYWGIEGTAFAEGYITLPMQFVLFFGLPFPMFFGILVNQKDTIDYMLPGLFGYGFDFG

SEQ ID NO: 62799 - protein, 12 aa, unidentified
  source 1..12: note = methanogen bacteria
VQIMDGFGLPAA

SEQ ID NO: 62800 - protein, 20 aa, unidentified
  source 1..20: note = methanogen bacteria
DVFNPIIRPVTYQFLMGSSK

SEQ ID NO: 62801 - protein, 64 aa, unidentified
  source 1..64: note = methanogen bacteria
FRMQMGIGINTVFCSMTNGMSSTSILHTHLLKSILGALITQIMGPFIQSNINTGVGLYQYVPSF

SEQ ID NO: 62802 - protein, 80 aa, unidentified
  source 1..80: note = methanogen bacteria
IAFAGAEPDYYTVDIVNPSGDIDLGNITAKVIDNVTTPNKITCHIDPNYNEMELINDLKIPLNNSCEYYTVTWNAYSYLE

SEQ ID NO: 62803 - protein, 20 aa, unidentified
  source 1..20: note = methanogen bacteria
DSLNPIIRPITYLFLMGSSK

SEQ ID NO: 62804 - protein, 62 aa, unidentified
  source 1..62: note = methanogen bacteria
FRLQMGIGLNTVFCSMTNGMSSTSILHTHLLKAILGHVLTQIMGPFIQSGINTGVGLYAYVP

SEQ ID NO: 62805 - protein, 81 aa, unidentified
  source 1..81: note = methanogen bacteria
AFAGAEPDYYTVDIVNPSDDIDLGNMSIEVIDYSKNTDLNKTTYHFDPSYNEMELINDLKVPLNNSCEYYTVSWNIFSYLE

SEQ ID NO: 62806 - protein, 11 aa, unidentified
  source 1..11: note = methanogen bacteria
CSFGSVNYGKI

SEQ ID NO: 62807 - protein, 18 aa, unidentified
  source 1..18: note = methanogen bacteria
YAAGVPLEYSLLSFLAND

SEQ ID NO: 62808 - protein, 29 aa, unidentified
  source 1..29: note = methanogen bacteria
PDFTFSNMYLNQFLGNFIGTQGMKIVSCF

SEQ ID NO: 62809 - protein, 18 aa, unidentified
  source 1..18: note = methanogen bacteria
FSVTGGTVPQKLKYLHAS

SEQ ID NO: 62810 - protein, 20 aa, unidentified
  source 1..20: note = methanogen bacteria
DIFNPIVRPITYQFLMGSSK

SEQ ID NO: 62811 - protein, 64 aa, unidentified
  source 1..64: note = methanogen bacteria
FRLQMGIKLNTIFCCMTNGMSSTSILHTHLLKSILGAAITQIIGPFVQSNINTGVGLYSYVPSF

SEQ ID NO: 62812 - protein, 82 aa, unidentified
  source 1..82: note = methanogen bacteria
MSVGVAGAETDCFTVDVVNPTGDIDLGNISSMIIDNTTGQNKTTYHIDHRYNEMQLINDLKVPLRDSCEYYTVSWNIFSYLD

SEQ ID NO: 62813 - protein, 12 aa, unidentified
  source 1..12: note = methanogen bacteria
GVVTTLGGYELG

SEQ ID NO: 62814 - protein, 19 aa, unidentified
  source 1..19: note = methanogen bacteria
IFNPIIRPVTYLFLMGSSK

SEQ ID NO: 62815 - protein, 63 aa, unidentified
  source 1..63: note = methanogen bacteria
FRLQMGIGLNTVFCSMTNSMSSTSILHTHLLKSILGEVLTQIIGPFIQSAINTGVGLYQYVPD

SEQ ID NO: 62816 - protein, 79 aa, unidentified
  source 1..79: note = methanogen bacteria
AFAGAEPDCYTVDVVNPTGKIDLGNISDSVIDFKYDNALNKTTYHIAPEYNEMQLINDLKVPLNSSCEYYTVTWNIYSY

SEQ ID NO: 62817 - protein, 19 aa, unidentified
  source 1..19: note = methanogen bacteria
VLNPIIRPVTYLFLMGSSK

SEQ ID NO: 62818 - protein, 62 aa, unidentified
  source 1..62: note = methanogen bacteria
RLQMGIGLNTVFCSMTNGMSSTSILHTHLLKSVLGAVLSNIMGPFIQSGINTGVGLYAYLPS

SEQ ID NO: 62819 - protein, 81 aa, unidentified
  source 1..81: note = methanogen bacteria
TIAFAGAEPDYFTVDVANPTHEIDLGNVSTEVISQEHDAGLNKTTYHIDPSYNEMQLINDLKYPLNNSCEYYTVSWNIYSY

SEQ ID NO: 62820 - protein, 12 aa, unidentified
  source 1..12: note = methanogen bacteria
KLPSVTGSSSHP

SEQ ID NO: 62821 - protein, 13 aa, unidentified
  source 1..13: note = methanogen bacteria
CYHSNGWAAAFTD

SEQ ID NO: 62822 - protein, 45 aa, unidentified
  source 1..45: note = methanogen bacteria
GDSQGMDFGGSDDAGSGDIADNNGGSYEPWTSGIWGDYELPGETE

SEQ ID NO: 62823 - protein, 10 aa, unidentified
  source 1..10: note = methanogen bacteria
CSFGSVDYGK

SEQ ID NO: 62824 - protein, 18 aa, unidentified
  source 1..18: note = methanogen bacteria
YAAGVPLEYSLLSFITND

SEQ ID NO: 62825 - protein, 29 aa, unidentified
  source 1..29: note = methanogen bacteria
PDFTFSNMYLNQFLGHFIETSGMKIVSCF

SEQ ID NO: 62826 - protein, 19 aa, unidentified
  source 1..19: note = methanogen bacteria
MFSVTGGTVPEKLNYLHAP

SEQ ID NO: 62827 - protein, 16 aa, unidentified
  source 1..16: note = methanogen bacteria
IPIIPNFLKQFEYAQI

SEQ ID NO: 62828 - protein, 11 aa, unidentified
  source 1..11: note = methanogen bacteria
YQGILSTNMAT

SEQ ID NO: 62829 - protein, 10 aa, unidentified
  source 1..10: note = methanogen bacteria
LGISNISIPY

SEQ ID NO: 62830 - protein, 12 aa, unidentified
  source 1..12: note = methanogen bacteria
GAVTTCGGFNLG

SEQ ID NO: 62831 - protein, 15 aa, unidentified
  source 1..15: note = methanogen bacteria
AKFFNYSFDPIYSRA

SEQ ID NO: 62832 - protein, 27 aa, unidentified
  source 1..27: note = methanogen bacteria
PHFLSGYLLNNWSLFPIYGGLVLFTVD

SEQ ID NO: 62833 - protein, 26 aa, unidentified
  source 1..26: note = methanogen bacteria
MSVFDNNIINLLLGYFIGTNIHFTTF

SEQ ID NO: 62834 - protein, 18 aa, unidentified
  source 1..18: note = methanogen bacteria
LDIDGAFLCDDTHYYYMT

SEQ ID NO: 62835 - protein, 68 aa, unidentified
  source 1..68: note = methanogen bacteria
DLSPIDPVNAYLRQAAVSETQRQILQEYFGTNVPITTKIFHWLMDLLQGNLGTSLIYRAPVIDIIIEK

SEQ ID NO: 62836 - protein, 31 aa, unidentified
  source 1..31: note = methanogen bacteria
AVYLGWFPIGFGVPIGVRSTDATFMEWASRL

SEQ ID NO: 62837 - protein, 24 aa, unidentified
  source 1..24: note = methanogen bacteria
EQVFSYPGVGQTAVAAGLSSDVPL

SEQ ID NO: 62838 - protein, 10 aa, unidentified
  source 1..10: note = methanogen bacteria
VFHTADLIGD

SEQ ID NO: 62839 - protein, 21 aa, unidentified
  source 1..21: note = methanogen bacteria
GVYYDPSYLGKVFNLPFSYNW

SEQ ID NO: 62840 - protein, 27 aa, unidentified
  source 1..27: note = methanogen bacteria
GQLHMPYNLFHDYQATKSKIIKSSLDL

SEQ ID NO: 62841 - protein, 10 aa, unidentified
  source 1..10: note = methanogen bacteria
AGVVLAKPSA

SEQ ID NO: 62842 - protein, 19 aa, unidentified
  source 1..19: note = methanogen bacteria
IFNPIIRPITYLFLMGSSK

SEQ ID NO: 62843 - protein, 62 aa, unidentified
  source 1..62: note = methanogen bacteria
RMQMGIGLNTVFCSMTNGMSSTSILHTHLLKSILGAVLTQIMGPFIQSNINTGVGLYQYVPS

SEQ ID NO: 62844 - protein, 79 aa, unidentified
  source 1..79: note = methanogen bacteria
AFAGAEPDYYTVDIVNASENIDFGNISMDVINHDSNSNKTTYHVDPNYNEMQLINDLKVPLRNSCEYYTITWNAYSYLD

SEQ ID NO: 62845 - protein, 10 aa, unidentified
  source 1..10: note = methanogen bacteria
GRQSAILGVP

SEQ ID NO: 62846 - protein, 23 aa, unidentified
  source 1..23: note = methanogen bacteria
NHLQFNYDSLIFYIDSFFNLGVN

SEQ ID NO: 62847 - protein, 25 aa, unidentified
  source 1..25: note = methanogen bacteria
QPVKSDALFLFMVNDTIHLNSFLDI

SEQ ID NO: 62848 - protein, 10 aa, unidentified
  source 1..10: note = methanogen bacteria
FDLLPLTGTQ

SEQ ID NO: 62849 - protein, 11 aa, unidentified
  source 1..11: note = methanogen bacteria
CSFGSVDYGKI

SEQ ID NO: 62850 - protein, 18 aa, unidentified
  source 1..18: note = methanogen bacteria
YAAGVPIEYSLLSFIAND

SEQ ID NO: 62851 - protein, 29 aa, unidentified
  source 1..29: note = methanogen bacteria
PDLTFSNIYLNQLLGHFIGTYDMNNISCF

SEQ ID NO: 62852 - protein, 18 aa, unidentified
  source 1..18: note = methanogen bacteria
FSVTGGTVPEKLNYLHAS

SEQ ID NO: 62853 - protein, 16 aa, unidentified
  source 1..16: note = methanogen bacteria
GEMQVYLISHIELPIT

SEQ ID NO: 62854 - protein, 15 aa, unidentified
  source 1..15: note = methanogen bacteria
VQGYNAGLSSTYSFI

SEQ ID NO: 62855 - protein, 23 aa, unidentified
  source 1..23: note = methanogen bacteria
AGSLGLDATPFNIYGGLVLFVVD

SEQ ID NO: 62856 - protein, 23 aa, unidentified
  source 1..23: note = methanogen bacteria
TDFGIPVVNLITGHLFGTKFTAF

SEQ ID NO: 62857 - protein, 16 aa, unidentified
  source 1..16: note = methanogen bacteria
WGGVFSKDVHLYYFMN

SEQ ID NO: 62858 - protein, 20 aa, unidentified
  source 1..20: note = methanogen bacteria
NIFNPIVRPITHLFLMGSSK

SEQ ID NO: 62859 - protein, 62 aa, unidentified
  source 1..62: note = methanogen bacteria
RMQLGIGWNTIFASMTHGMSSTSILHTHLLKSILGEVLVNIMGPFIQSDINTGVGLYTYVPD

SEQ ID NO: 62860 - protein, 78 aa, unidentified
  source 1..78: note = methanogen bacteria
FAGAETDHYTVEIADMDDNITFGEIPMEKIGQKNDRTIYHVTSQYNEMELLNDLKVPLNNSCEYYTVSWNIYSYLRLQ

SEQ ID NO: 62861 - protein, 12 aa, unidentified
  source 1..12: note = methanogen bacteria
FYNNAPHSANYM

SEQ ID NO: 62862 - protein, 20 aa, unidentified
  source 1..20: note = methanogen bacteria
LDNQAPSPSNILTMFFDDYW

SEQ ID NO: 62863 - protein, 19 aa, unidentified
  source 1..19: note = methanogen bacteria
HTVSISYMKHRLSYYGYQS

SEQ ID NO: 62864 - protein, 15 aa, unidentified
  source 1..15: note = methanogen bacteria
KWIDKYYFPVFSHNP

SEQ ID NO: 62865 - protein, 27 aa, unidentified
  source 1..27: note = methanogen bacteria
FSYLPSYEPTLQYFIDVFFGFKGVSSI

SEQ ID NO: 62866 - protein, 16 aa, unidentified
  source 1..16: note = methanogen bacteria
YSIDYGSWSINKLDFF

SEQ ID NO: 62867 - protein, 14 aa, unidentified
  source 1..14: note = methanogen bacteria
AYNPFFEQFKVGKA

SEQ ID NO: 62868 - protein, 12 aa, unidentified
  source 1..12: note = methanogen bacteria
SFSNLSISPGFE

SEQ ID NO: 62869 - protein, 23 aa, unidentified
  source 1..23: note = methanogen bacteria
NVLDNMLNIPIPQFTILSLFKVD

SEQ ID NO: 62870 - protein, 27 aa, unidentified
  source 1..27: note = methanogen bacteria
FVDFNNIFLNYFFGYFIGTILHQCTVF

SEQ ID NO: 62871 - protein, 17 aa, unidentified
  source 1..17: note = methanogen bacteria
PVPAGSISDNAHAYFIT

SEQ ID NO: 62872 - protein, 11 aa, unidentified
  source 1..11: note = methanogen bacteria
EYFYKGIVFTE

SEQ ID NO: 62873 - protein, 14 aa, unidentified
  source 1..14: note = methanogen bacteria
ASAFHATYNPTSSF

SEQ ID NO: 62874 - protein, 26 aa, unidentified
  source 1..26: note = methanogen bacteria
HFVAGALLGKGDVFPIAGGLMLFCVD

SEQ ID NO: 62875 - protein, 26 aa, unidentified
  source 1..26: note = methanogen bacteria
DTDFGNPLVNLFFSYFIGTLGGFTAF

SEQ ID NO: 62876 - protein, 16 aa, unidentified
  source 1..16: note = methanogen bacteria
WGGIESSDVHLYYFLD

SEQ ID NO: 62877 - protein, 14 aa, unidentified
  source 1..14: note = methanogen bacteria
IGIDEVIDALKVSN

SEQ ID NO: 62878 - protein, 10 aa, unidentified
  source 1..10: note = methanogen bacteria
AFGARVSPIL

SEQ ID NO: 62879 - protein, 10 aa, unidentified
  source 1..10: note = methanogen bacteria
YSRAGITSSI

SEQ ID NO: 62880 - protein, 10 aa, unidentified
  source 1..10: note = methanogen bacteria
FVLTGVDNPT

SEQ ID NO: 62881 - protein, 25 aa, unidentified
  source 1..25: note = methanogen bacteria
LKHSFDISNALDIFFGKPGTLGVAF

SEQ ID NO: 62882 - protein, 16 aa, unidentified
  source 1..16: note = methanogen bacteria
VPKSIQANHFVYKGYF

SEQ ID NO: 62883 - protein, 11 aa, unidentified
  source 1..11: note = methanogen bacteria
NKSANGESLWA

SEQ ID NO: 62884 - protein, 23 aa, unidentified
  source 1..23: note = methanogen bacteria
TMDINGIPANSRGLIVMIASMLG

SEQ ID NO: 62885 - protein, 12 aa, unidentified
  source 1..12: note = methanogen bacteria
TPRPDGLLIANT

SEQ ID NO: 62886 - protein, 20 aa, unidentified
  source 1..20: note = methanogen bacteria
DIFNPIVRPITYQFLMGSSK

SEQ ID NO: 62887 - protein, 63 aa, unidentified
  source 1..63: note = methanogen bacteria
RLQMGIKLNTVFCCMANGMSSTSILHTHLLKSILGAAITQIIGPFVQNMNTGVGLYSYVPSFG

SEQ ID NO: 62888 - protein, 80 aa, unidentified
  source 1..80: note = methanogen bacteria
VGIAGAETDCYTVDVVNPTDDIDLGNISAMVIDNSTGPNKITYHIDHRYNEMELINDLKVPLIDSCEYYTVSWNIYSYLS

SEQ ID NO: 62889 - protein, 22 aa, unidentified
  source 1..22: note = methanogen bacteria
LNPAYSIPEFTTQGLYLTDKSI

SEQ ID NO: 62890 - protein, 30 aa, unidentified
  source 1..30: note = methanogen bacteria
FFHGQPQLAAIYGASPSVGVYEMAKTLVGP

SEQ ID NO: 62891 - protein, 19 aa, unidentified
  source 1..19: note = methanogen bacteria
LNPIIRPLTHIFLMGSSKG

SEQ ID NO: 62892 - protein, 59 aa, unidentified
  source 1..59: note = methanogen bacteria
RYQLGIGLNTTFMSVKNGISSTSIIHTHLLKSIFGNLIASVLGPVSGDINTGISLYSYV

SEQ ID NO: 62893 - protein, 79 aa, unidentified
  source 1..79: note = methanogen bacteria
ILGAQPEYYTLEVTNPIDNIEMTGIDVENITINNNTTTYIINPHYNEMDLLNRIKVQLNNSCEYYTLSWNMMTYFNKPQ

SEQ ID NO: 62894 - protein, 11 aa, unidentified
  source 1..11: note = methanogen bacteria
SVSMIGPFSLG

SEQ ID NO: 62895 - protein, 27 aa, unidentified
  source 1..27: note = methanogen bacteria
FSNFAGYELSINYFVNVLFGFMGISSI

SEQ ID NO: 62896 - protein, 14 aa, unidentified
  source 1..14: note = methanogen bacteria
LGYGSWQINKLDFF

SEQ ID NO: 62897 - protein, 13 aa, unidentified
  source 1..13: note = methanogen bacteria
YNPFFNQFKVGKA

SEQ ID NO: 62898 - protein, 11 aa, unidentified
  source 1..11: note = methanogen bacteria
SITTLGGFNLG

SEQ ID NO: 62899 - protein, 12 aa, unidentified
  source 1..12: note = methanogen bacteria
GVVTVCGGFTLG

SEQ ID NO: 62900 - protein, 19 aa, unidentified
  source 1..19: note = methanogen bacteria
MFNPIIRPVTYQFLMGSSK

SEQ ID NO: 62901 - protein, 62 aa, unidentified
  source 1..62: note = methanogen bacteria
RLQMGISLNSIFASMTHGMSSTSILHTHLIKSILGEILANVMGPFIQSEINTGVGLYSYVPD

SEQ ID NO: 62902 - protein, 78 aa, unidentified
  source 1..78: note = methanogen bacteria
VAFAGAEPDYYTVEITNMDKNVDFGDIPLEKISQTNNTITYHVTPEYNEMELLNDLKIPLTDSCEYYTVSWNIYSYLD

SEQ ID NO: 62903 - protein, 11 aa, unidentified
  source 1..11: note = methanogen bacteria
VVTTLGGFTLG

SEQ ID NO: 62904 - protein, 11 aa, unidentified
  source 1..11: note = methanogen bacteria
FNIESGNLLIG

SEQ ID NO: 62905 - protein, 14 aa, unidentified
  source 1..14: note = methanogen bacteria
YFHSIDGIVIKMEV

SEQ ID NO: 62906 - protein, 12 aa, unidentified
  source 1..12: note = methanogen bacteria
DGKVNKEMIFGP

SEQ ID NO: 62907 - protein, 24 aa, unidentified
  source 1..24: note = methanogen bacteria
FHIYIDGAPANVRCMVVLVSGLFG

SEQ ID NO: 62908 - protein, 18 aa, unidentified
  source 1..18: note = methanogen bacteria
FYKNPSPFWPLNAGIASP

SEQ ID NO: 62909 - protein, 30 aa, unidentified
  source 1..30: note = methanogen bacteria
FDIPTLGRPLHTDFVSGFLAMCMGVFTDHL

SEQ ID NO: 62910 - protein, 14 aa, unidentified
  source 1..14: note = methanogen bacteria
KFFGTNGFSLVYTP

SEQ ID NO: 62911 - protein, 12 aa, unidentified
  source 1..12: note = methanogen bacteria
GVVTTLGGFTLG

SEQ ID NO: 62912 - protein, 12 aa, unidentified
  source 1..12: note = methanogen bacteria
GVITTLGGFELG

SEQ ID NO: 62913 - protein, 14 aa, unidentified
  source 1..14: note = methanogen bacteria
TSVLSASHNNTVFS

SEQ ID NO: 62914 - protein, 48 aa, unidentified
  source 1..48: note = methanogen bacteria
QSINPYFLLILHKRIADFSFTDYFWIFWDISKITGMPDDQSACIVGAF

SEQ ID NO: 62915 - protein, 11 aa, unidentified
  source 1..11: note = methanogen bacteria
STTTVPYISND

SEQ ID NO: 62916 - protein, 27 aa, unidentified
  source 1..27: note = methanogen bacteria
KIRFNRKQRKRMKQYRSLYGDDRYRYR

SEQ ID NO: 62917 - protein, 97 aa, unidentified
  source 1..97: note = methanogen bacteria
DENHTVSYGIGWVFVKKAGSAINVPDNFNITYGDVKTINIALENVTADNINATYVISNGKIVVCNITRIGTNITIRGLGVGDYAIIVESRETTNYNA

SEQ ID NO: 62918 - protein, 13 aa, unidentified
  source 1..13: note = methanogen bacteria
ASFSNISISPGFE

SEQ ID NO: 62919 - protein, 23 aa, unidentified
  source 1..23: note = methanogen bacteria
NVLDNMLNMSNTPITILSLFKVD

SEQ ID NO: 62920 - protein, 27 aa, unidentified
  source 1..27: note = methanogen bacteria
FVDFNNIFLNYFFGYFIGTILHQCTAF

SEQ ID NO: 62921 - protein, 17 aa, unidentified
  source 1..17: note = methanogen bacteria
PSPAGSISDNAHAYFIT

SEQ ID NO: 62922 - protein, 10 aa, unidentified
  source 1..10: note = methanogen bacteria
YFYKGFVFTD

SEQ ID NO: 62923 - protein, 10 aa, unidentified
  source 1..10: note = methanogen bacteria
YMVIIKEFDI

SEQ ID NO: 62924 - protein, 10 aa, unidentified
  source 1..10: note = methanogen bacteria
NKSTNGESLW

SEQ ID NO: 62925 - protein, 23 aa, unidentified
  source 1..23: note = methanogen bacteria
TMNVNGAPANARGLVVMIASLLG

SEQ ID NO: 62926 - protein, 11 aa, unidentified
  source 1..11: note = methanogen bacteria
TPKPDGIIIAN

SEQ ID NO: 62927 - protein, 21 aa, unidentified
  source 1..21: note = methanogen bacteria
AGGYSFPTMTLNNLHPTGMEY

SEQ ID NO: 62928 - protein, 32 aa, unidentified
  source 1..32: note = methanogen bacteria
AFYGDTAALTADLNSGGASGVVYNMSLALAGP

SEQ ID NO: 62929 - protein, 11 aa, unidentified
  source 1..11: note = methanogen bacteria
NVPYINWLYFT

SEQ ID NO: 62930 - protein, 10 aa, unidentified
  source 1..10: note = methanogen bacteria
IMFKYNMGLF

SEQ ID NO: 62931 - protein, 17 aa, unidentified
  source 1..17: note = methanogen bacteria
FYKNPSPSWPLTAGIVL

SEQ ID NO: 62932 - protein, 31 aa, unidentified
  source 1..31: note = methanogen bacteria
FFDIPTLGRPLHTDFVSGFLAMCMGVFTDHL

SEQ ID NO: 62933 - protein, 12 aa, unidentified
  source 1..12: note = methanogen bacteria
GAVTTLGGFTLG

SEQ ID NO: 62934 - protein, 12 aa, unidentified
  source 1..12: note = methanogen bacteria
GIVTTLGGFELG

SEQ ID NO: 62935 - protein, 11 aa, unidentified
  source 1..11: note = methanogen bacteria
LGFSTTSGGPF

SEQ ID NO: 62936 - protein, 15 aa, unidentified
  source 1..15: note = methanogen bacteria
ATWDNMWNLGSQTLD

SEQ ID NO: 62937 - protein, 12 aa, unidentified
  source 1..12: note = methanogen bacteria
GAVTTLGGFELG

SEQ ID NO: 62938 - protein, 12 aa, unidentified
  source 1..12: note = methanogen bacteria
GAVTTLGGFTLG

SEQ ID NO: 62939 - protein, 12 aa, unidentified
  source 1..12: note = methanogen bacteria
GAITTLGGFQLG

SEQ ID NO: 62940 - protein, 12 aa, unidentified
  source 1..12: note = methanogen bacteria
GTITCLGGFELG

SEQ ID NO: 62941 - protein, 12 aa, unidentified
  source 1..12: note = methanogen bacteria
GAVTTLGGFNLG

SEQ ID NO: 62942 - protein, 30 aa, unidentified
  source 1..30: note = methanogen bacteria
QIVKKLRRGRRGRQPQSLYRQNQNNRRFRR

SEQ ID NO: 62943 - protein, 13 aa, unidentified
  source 1..13: note = methanogen bacteria
DKLLNPNLITTPD

SEQ ID NO: 62944 - protein, 19 aa, unidentified
  source 1..19: note = methanogen bacteria
WGVEPLSVLYNFEDPDAGY

SEQ ID NO: 62945 - protein, 16 aa, unidentified
  source 1..16: note = methanogen bacteria
SEMIENITHPASEGNV

SEQ ID NO: 62946 - protein, 18 aa, unidentified
  source 1..18: note = methanogen bacteria
IVGPDKFIDCMAQTFGSA

SEQ ID NO: 62947 - protein, 17 aa, unidentified
  source 1..17: note = methanogen bacteria
GEMQVYLISQIKLSLTS

SEQ ID NO: 62948 - protein, 11 aa, unidentified
  source 1..11: note = methanogen bacteria
AITTLGGFTLG

SEQ ID NO: 62949 - protein, 68 aa, unidentified
  source 1..68: note = methanogen bacteria
DLSPIDPVSAYLKGAAVSEAQRQILEQYFGTNVPLTTKIYHWLLDLIQGNLGTSLIYRAPVMDVIFEK

SEQ ID NO: 62950 - protein, 30 aa, unidentified
  source 1..30: note = methanogen bacteria
SVYLGWFPIGFGVPIGVKSTDATFMEWVTR

SEQ ID NO: 62951 - protein, 24 aa, unidentified
  source 1..24: note = methanogen bacteria
EQVFSYPGIGQTAVAAGLQSDVPL

SEQ ID NO: 62952 - protein, 12 aa, unidentified
  source 1..12: note = methanogen bacteria
GVITTIGGFELG

SEQ ID NO: 62953 - protein, 15 aa, unidentified
  source 1..15: note = methanogen bacteria
SEHVLREYLNVINGN

SEQ ID NO: 62954 - protein, 17 aa, unidentified
  source 1..17: note = methanogen bacteria
FGQSTALTFPIHNIPLE

SEQ ID NO: 62955 - protein, 21 aa, unidentified
  source 1..21: note = methanogen bacteria
PEISDGGHFMMDILDIAMPSL

SEQ ID NO: 62956 - protein, 15 aa, unidentified
  source 1..15: note = methanogen bacteria
LNSTYPTFVDALFAL

SEQ ID NO: 62957 - protein, 29 aa, unidentified
  source 1..29: note = methanogen bacteria
FVKKMRRGRRRRGQQSLYRQNQNNRRFKR

SEQ ID NO: 62958 - protein, 10 aa, unidentified
  source 1..10: note = methanogen bacteria
FAKSEPVHSL

SEQ ID NO: 62959 - protein, 21 aa, unidentified
  source 1..21: note = methanogen bacteria
YLNYPATIEGLIDIIFFKGFV

SEQ ID NO: 62960 - protein, 11 aa, unidentified
  source 1..11: note = methanogen bacteria
YLQLLDEVYYL

SEQ ID NO: 62961 - protein, 13 aa, unidentified
  source 1..13: note = methanogen bacteria
ITNYQTHILLRNP

SEQ ID NO: 62962 - protein, 12 aa, unidentified
  source 1..12: note = methanogen bacteria
GVVTTLGGFTLG

SEQ ID NO: 62963 - protein, 10 aa, unidentified
  source 1..10: note = methanogen bacteria
YSSDVLGVGS

SEQ ID NO: 62964 - protein, 12 aa, unidentified
  source 1..12: note = methanogen bacteria
GVVTTLGGFELG

SEQ ID NO: 62965 - protein, 14 aa, unidentified
  source 1..14: note = methanogen bacteria
KLIGTKGFSLVYTP

SEQ ID NO: 62966 - protein, 12 aa, unidentified
  source 1..12: note = methanogen bacteria
GAVTTLGGFELG

SEQ ID NO: 62967 - protein, 38 aa, unidentified
  source 1..38: note = methanogen bacteria
TIGSANYSAWDVYRDIWYHFVDPGQNNPKMDHVIFDIR

SEQ ID NO: 62968 - protein, 11 aa, unidentified
  source 1..11: note = methanogen bacteria
MGITVTGIGGT

SEQ ID NO: 62969 - protein, 26 aa, unidentified
  source 1..26: note = methanogen bacteria
KLSVSEQTLSAVFQWSIGDLSTVTWT

SEQ ID NO: 62970 - protein, 13 aa, unidentified
  source 1..13: note = methanogen bacteria
GGVTTLAGFPLGW

SEQ ID NO: 62971 - protein, 14 aa, unidentified
  source 1..14: note = methanogen bacteria
PQPETATWAAILSL

SEQ ID NO: 62972 - protein, 14 aa, unidentified
  source 1..14: note = methanogen bacteria
GMASLGTWDALFDL

SEQ ID NO: 62973 - protein, 12 aa, unidentified
  source 1..12: note = methanogen bacteria
GYVTTLGGFQLG

SEQ ID NO: 62974 - protein, 12 aa, unidentified
  source 1..12: note = methanogen bacteria
GAVTTLGGFQLG

SEQ ID NO: 62975 - protein, 68 aa, unidentified
  source 1..68: note = methanogen bacteria
DMSPINPVNAYISNMVVSPEKIAQLEAYWGVNQPITEKMLNWLGNILTGDFGTSLIYRAPVLHVISEK

SEQ ID NO: 62976 - protein, 30 aa, unidentified
  source 1..30: note = methanogen bacteria
SVYLGLFPVSGGVPIGALSQDVSFWDWLRH

SEQ ID NO: 62977 - protein, 24 aa, unidentified
  source 1..24: note = methanogen bacteria
EQVFMYPGIGQAAVSAGLRSDVPL

SEQ ID NO: 62978 - protein, 14 aa, unidentified
  source 1..14: note = methanogen bacteria
VGIDQVIDALKMAN

SEQ ID NO: 62979 - protein, 11 aa, unidentified
  source 1..11: note = methanogen bacteria
YSAAGISSSVS

SEQ ID NO: 62980 - protein, 38 aa, unidentified
  source 1..38: note = methanogen bacteria
TIGSSNLSAIDVYRNIYYHFFDTGKVNDDIDWVIFTLR

SEQ ID NO: 62981 - protein, 10 aa, unidentified
  source 1..10: note = methanogen bacteria
GFMLPGLGGS

SEQ ID NO: 62982 - protein, 26 aa, unidentified
  source 1..26: note = methanogen bacteria
KLRLSDASLSAVFQWSVGDLSTSTWE

SEQ ID NO: 62983 - protein, 23 aa, unidentified
  source 1..23: note = methanogen bacteria
INNYALDNLLPVVYSSFFNFGIL

SEQ ID NO: 62984 - protein, 30 aa, unidentified
  source 1..30: note = methanogen bacteria
LSADYTIFYALNNHTFVEGGNIFFETYLDL

SEQ ID NO: 62985 - protein, 10 aa, unidentified
  source 1..10: note = methanogen bacteria
LGNIHLTGTK

SEQ ID NO: 62986 - protein, 16 aa, unidentified
  source 1..16: note = methanogen bacteria
VNLLSSNMNSFNDAGV

SEQ ID NO: 62987 - protein, 10 aa, unidentified
  source 1..10: note = methanogen bacteria
YTADVSLLPR

SEQ ID NO: 62988 - protein, 19 aa, unidentified
  source 1..19: note = methanogen bacteria
LNITGFEHTIGLIEAAMSS

SEQ ID NO: 62989 - protein, 14 aa, unidentified
  source 1..14: note = methanogen bacteria
IGIDEVVEALKLAN

SEQ ID NO: 62990 - protein, 10 aa, unidentified
  source 1..10: note = methanogen bacteria
YSAAGISTSV

SEQ ID NO: 62991 - protein, 10 aa, unidentified
  source 1..10: note = methanogen bacteria
MIIVEHVKVE

SEQ ID NO: 62992 - protein, 11 aa, unidentified
  source 1..11: note = methanogen bacteria
NKSANGESLWA

SEQ ID NO: 62993 - protein, 23 aa, unidentified
  source 1..23: note = methanogen bacteria
TMDINGIPANSRGLIVMISSMLG

SEQ ID NO: 62994 - protein, 12 aa, unidentified
  source 1..12: note = methanogen bacteria
TPRPDGVIIANS

SEQ ID NO: 62995 - protein, 11 aa, unidentified
  source 1..11: note = methanogen bacteria
AITTLGGFNLG

SEQ ID NO: 62996 - protein, 15 aa, unidentified
  source 1..15: note = methanogen bacteria
VGIDKVIEALKIAKW

SEQ ID NO: 62997 - protein, 10 aa, unidentified
  source 1..10: note = methanogen bacteria
YSAAGVTASI

SEQ ID NO: 62998 - protein, 14 aa, unidentified
  source 1..14: note = methanogen bacteria
IGIDQVIDALKIAK

SEQ ID NO: 62999 - protein, 10 aa, unidentified
  source 1..10: note = methanogen bacteria
YSAAGITASI

SEQ ID NO: 63000 - protein, 14 aa, unidentified
  source 1..14: note = methanogen bacteria
VGIDQVIDALKMAN

SEQ ID NO: 63001 - protein, 11 aa, unidentified
  source 1..11: note = methanogen bacteria
YSAAGISSSVS

SEQ ID NO: 63002 - protein, 12 aa, unidentified
  source 1..12: note = methanogen bacteria
QRFYDCYPSLEW

SEQ ID NO: 63003 - protein, 23 aa, unidentified
  source 1..23: note = methanogen bacteria
TGLGEKGIIGLFERMIQGPFHFW

SEQ ID NO: 63004 - protein, 12 aa, unidentified
  source 1..12: note = methanogen bacteria
YISDVARDFSEK

SEQ ID NO: 63005 - protein, 16 aa, unidentified
  source 1..16: note = methanogen bacteria
ASNRAGAPHLLLYGNI

SEQ ID NO: 63006 - protein, 11 aa, unidentified
  source 1..11: note = methanogen bacteria
CNIDSAYLNPI

SEQ ID NO: 63007 - protein, 15 aa, unidentified
  source 1..15: note = methanogen bacteria
VGIDKVIDALKVAKT

SEQ ID NO: 63008 - protein, 10 aa, unidentified
  source 1..10: note = methanogen bacteria
YSAAGITASI

SEQ ID NO: 63009 - protein, 24 aa, unidentified
  source 1..24: note = methanogen bacteria
WQYQPTITYFIDTAFGVQDYSRPF

SEQ ID NO: 63010 - protein, 16 aa, unidentified
  source 1..16: note = methanogen bacteria
YLKGLGSIALAPIDFF

SEQ ID NO: 63011 - protein, 14 aa, unidentified
  source 1..14: note = methanogen bacteria
TTRSFLAPIIKTNA

SEQ ID NO: 63012 - protein, 16 aa, unidentified
  source 1..16: note = methanogen bacteria
TVYVGGKKFALKTSSE

SEQ ID NO: 63013 - protein, 19 aa, unidentified
  source 1..19: note = methanogen bacteria
ERYLAKLSKTDRYGTSCDA

SEQ ID NO: 63014 - protein, 10 aa, unidentified
  source 1..10: note = methanogen bacteria
KALNEVKKGG

SEQ ID NO: 63015 - protein, 24 aa, unidentified
  source 1..24: note = methanogen bacteria
WHYQPTITYFIDTAFGVQDYSRPF

SEQ ID NO: 63016 - protein, 16 aa, unidentified
  source 1..16: note = methanogen bacteria
YLKGLGGTALMPIDFF

SEQ ID NO: 63017 - protein, 14 aa, unidentified
  source 1..14: note = methanogen bacteria
TTRGFLAPKVKTNA

SEQ ID NO: 63018 - protein, 14 aa, unidentified
  source 1..14: note = methanogen bacteria
VGIEQVIAALKIAN

SEQ ID NO: 63019 - protein, 24 aa, unidentified
  source 1..24: note = methanogen bacteria
WHCKPTLEYFFAIIFGAHDLSSLF

SEQ ID NO: 63020 - protein, 16 aa, unidentified
  source 1..16: note = methanogen bacteria
YYKGLGGWGLVPVDFF

SEQ ID NO: 63021 - protein, 14 aa, unidentified
  source 1..14: note = methanogen bacteria
IDCGFMHEWVNENL

SEQ ID NO: 63022 - protein, 23 aa, unidentified
  source 1..23: note = methanogen bacteria
WHCKPTSEYFFAVIFGSHDLSSL

SEQ ID NO: 63023 - protein, 16 aa, unidentified
  source 1..16: note = methanogen bacteria
YYNGLGGLGLVPVDFF

SEQ ID NO: 63024 - protein, 14 aa, unidentified
  source 1..14: note = methanogen bacteria
FDFGFMHEWAYENL

SEQ ID NO: 63025 - protein, 14 aa, unidentified
  source 1..14: note = methanogen bacteria
IGIDSVIDALQMAN

SEQ ID NO: 63026 - protein, 10 aa, unidentified
  source 1..10: note = methanogen bacteria
YAVAGISTSI

SEQ ID NO: 63027 - protein, 17 aa, unidentified
  source 1..17: note = methanogen bacteria
ILSRKEEEKAAESDTTD

SEQ ID NO: 63028 - protein, 14 aa, unidentified
  source 1..14: note = methanogen bacteria
VGIDQVIGALKMAN

SEQ ID NO: 63029 - protein, 10 aa, unidentified
  source 1..10: note = methanogen bacteria
YSAAGISSSI

SEQ ID NO: 63030 - protein, 13 aa, unidentified
  source 1..13: note = methanogen bacteria
IKAVCSGCMYSDT

SEQ ID NO: 63031 - protein, 12 aa, unidentified
  source 1..12: note = methanogen bacteria
AKVTKPFEGSLT

SEQ ID NO: 63032 - protein, 24 aa, unidentified
  source 1..24: note = methanogen bacteria
WQYHPTITYFIDTAFGVQDYSRPF

SEQ ID NO: 63033 - protein, 16 aa, unidentified
  source 1..16: note = methanogen bacteria
YLKGLGGIALAPIDFF

SEQ ID NO: 63034 - protein, 14 aa, unidentified
  source 1..14: note = methanogen bacteria
MFDGFLSPIIKTNA

SEQ ID NO: 63035 - protein, 14 aa, unidentified
  source 1..14: note = methanogen bacteria
VGIDQVISALKMAN

SEQ ID NO: 63036 - protein, 10 aa, unidentified
  source 1..10: note = methanogen bacteria
YSAAGISASV

SEQ ID NO: 63037 - protein, 12 aa, unidentified
  source 1..12: note = methanogen bacteria
SFNYRFEDPLKP

SEQ ID NO: 63038 - protein, 18 aa, unidentified
  source 1..18: note = methanogen bacteria
LGGIPLFNSVLKSNATTN

SEQ ID NO: 63039 - protein, 80 aa, unidentified
  source 1..80: note = methanogen bacteria
SQSIANQHWTLNPLELVFYRAAFTLEVFEKIIPLGGSTHGHILSMIFSSGSPRTFIGQYVLHYDVCLTSTLFGPVYLDFG

SEQ ID NO: 63040 - protein, 11 aa, unidentified
  source 1..11: note = methanogen bacteria
SFNYRFEDPLK

SEQ ID NO: 63041 - protein, 18 aa, unidentified
  source 1..18: note = methanogen bacteria
LGGIPLFNSVLKSNATTN

SEQ ID NO: 63042 - protein, 80 aa, unidentified
  source 1..80: note = methanogen bacteria
SQSIANQHWTLNPLELLFYRAAFTLEVFEKIIPLGGTTHGHILSMIFSSGSPRTFIGQYVLHYDVCLTSTMFGPVYLDFG

SEQ ID NO: 63043 - protein, 15 aa, unidentified
  source 1..15: note = methanogen bacteria
IGVDKIIEALKTADM

SEQ ID NO: 63044 - protein, 12 aa, unidentified
  source 1..12: note = methanogen bacteria
LGFGAEASYGLI

SEQ ID NO: 63045 - protein, 12 aa, unidentified
  source 1..12: note = methanogen bacteria
LYSTSGITTAIT

SEQ ID NO: 63046 - protein, 11 aa, unidentified
  source 1..11: note = methanogen bacteria
SFNYRFEDPLD

SEQ ID NO: 63047 - protein, 18 aa, unidentified
  source 1..18: note = methanogen bacteria
MGGIPLFNSVLKSNATTN

SEQ ID NO: 63048 - protein, 80 aa, unidentified
  source 1..80: note = methanogen bacteria
SQSIANQHWTLNPLELIFYRAGFTLEVFERILRLGGTTHGHILSMIFSSGSPRTFVGQYVLTDNVCLTSTLFGPVYLDFG

SEQ ID NO: 63049 - protein, 14 aa, unidentified
  source 1..14: note = methanogen bacteria
VGIDNVINALKIAN

SEQ ID NO: 63050 - protein, 10 aa, unidentified
  source 1..10: note = methanogen bacteria
YSAAGITASI

SEQ ID NO: 63051 - protein, 25 aa, unidentified
  source 1..25: note = methanogen bacteria
DLRDISNLITTSEMQTFYDAQLMTS

SEQ ID NO: 63052 - protein, 22 aa, unidentified
  source 1..22: note = methanogen bacteria
NYYYEVQLEDGFLPVFKPTYNI

SEQ ID NO: 63053 - protein, 16 aa, unidentified
  source 1..16: note = methanogen bacteria
VEIVFKDIEVPEYSFN

SEQ ID NO: 63054 - protein, 23 aa, unidentified
  source 1..23: note = methanogen bacteria
RIRYARKRKRQSHSLYPENRRYR

SEQ ID NO: 63055 - protein, 11 aa, unidentified
  source 1..11: note = methanogen bacteria
SFNYRFEDPIN

SEQ ID NO: 63056 - protein, 18 aa, unidentified
  source 1..18: note = methanogen bacteria
IGGIPLLSSTLKANATTN

SEQ ID NO: 63057 - protein, 80 aa, unidentified
  source 1..80: note = methanogen bacteria
SKSIATQSWTLNPLELIFYRAAFTLELFEKIIPLAGTTHGHILSMIFSSGSPRTFVGEYVMKYTFCATSTMFGPVMLDFG

SEQ ID NO: 63058 - protein, 14 aa, unidentified
  source 1..14: note = methanogen bacteria
VGIDQVIDALKMAN

SEQ ID NO: 63059 - protein, 10 aa, unidentified
  source 1..10: note = methanogen bacteria
YSAAGIPASV

SEQ ID NO: 63060 - protein, 10 aa, unidentified
  source 1..10: note = methanogen bacteria
FNYRFDDPLD

SEQ ID NO: 63061 - protein, 18 aa, unidentified
  source 1..18: note = methanogen bacteria
MGGIPLFNSVLKSNATTN

SEQ ID NO: 63062 - protein, 80 aa, unidentified
  source 1..80: note = methanogen bacteria
SQSIANQHWTLNPLELIFYRAAFTLEVFEKILPLGGTTHGHILSMIFSSGSPRTFIGQYVLSYDVCLTSTLFGPVYLDFG

SEQ ID NO: 63063 - protein, 18 aa, unidentified
  source 1..18: note = methanogen bacteria
LNPIIRPITYLFLMGSSK

SEQ ID NO: 63064 - protein, 63 aa, unidentified
  source 1..63: note = methanogen bacteria
RLQMGIKLNTVFCAMSNTMSSTSILHTHLLKSILGALLSQIIGPFIQSDINTGVGLYSYIPSA

SEQ ID NO: 63065 - protein, 73 aa, unidentified
  source 1..73: note = methanogen bacteria
ALAGAEPDYYTVEIANITDDVDFADIPIEKISNGTYHVDSSYNEMELLNDLRVPLNNSCDYYTVSWNAYSYLK

SEQ ID NO: 63066 - protein, 27 aa, unidentified
  source 1..27: note = methanogen bacteria
KIRFNRKQRKRKNQYRSLYSDDRYRYR

SEQ ID NO: 63067 - protein, 11 aa, unidentified
  source 1..11: note = methanogen bacteria
SFNYRFEDPLN

SEQ ID NO: 63068 - protein, 18 aa, unidentified
  source 1..18: note = methanogen bacteria
IGGIPLFNSTLKANATTN

SEQ ID NO: 63069 - protein, 80 aa, unidentified
  source 1..80: note = methanogen bacteria
SKSIATQTWTLNPLELIFYRAAFTLELFEKIIPLAGTTHGHILSMIFSSGSPRTFVGEYVMKYTFCATSTLFGPVMLDFG

SEQ ID NO: 63070 - protein, 14 aa, unidentified
  source 1..14: note = methanogen bacteria
VGIEQVLEALRIAN

SEQ ID NO: 63071 - protein, 10 aa, unidentified
  source 1..10: note = methanogen bacteria
YSSAGISSSV

SEQ ID NO: 63072 - protein, 14 aa, unidentified
  source 1..14: note = methanogen bacteria
VGIDNVIDALKIAK

SEQ ID NO: 63073 - protein, 10 aa, unidentified
  source 1..10: note = methanogen bacteria
YSAAGVTASI

SEQ ID NO: 63074 - protein, 18 aa, unidentified
  source 1..18: note = methanogen bacteria
MYTKRTNSEGIIVFKPKL

SEQ ID NO: 63075 - protein, 30 aa, unidentified
  source 1..30: note = methanogen bacteria
EPKLSHIIKREKWNVIERAINTKIVKKNKN

SEQ ID NO: 63076 - protein, 11 aa, unidentified
  source 1..11: note = methanogen bacteria
EVRDVQNTGYT

SEQ ID NO: 63077 - protein, 18 aa, unidentified
  source 1..18: note = methanogen bacteria
EKYLAQNGDATPSEGSST

SEQ ID NO: 63078 - protein, 15 aa, unidentified
  source 1..15: note = methanogen bacteria
SFNKALKQLKKGGSA

SEQ ID NO: 63079 - protein, 10 aa, unidentified
  source 1..10: note = methanogen bacteria
KKNVNNFYYS

SEQ ID NO: 63080 - protein, 12 aa, unidentified
  source 1..12: note = methanogen bacteria
SFNYRFEDPLKP

SEQ ID NO: 63081 - protein, 18 aa, unidentified
  source 1..18: note = methanogen bacteria
LGGIPLFNSVLKSNATTN

SEQ ID NO: 63082 - protein, 81 aa, unidentified
  source 1..81: note = methanogen bacteria
ASQSIANQHWTLNPVELVFYRAAFTLEVFEKIIPLGGTTHGHILSMIFSSGSPRTFIGNYVLHYDVCLTSTLFGPVYLDFG

SEQ ID NO: 63083 - protein, 57 aa, unidentified
  source 1..57: note = methanogen bacteria
TMSGCILDPDIAIYLLSALKYAGLDFYGVAYPQDLFYTPTISFLTSLIFRMGYVDKN

SEQ ID NO: 63084 - protein, 50 aa, unidentified
  source 1..50: note = methanogen bacteria
ILDFGGSLSFFDQSVNTFNGHGISKTSIDYVSDKSYYLDRLTDMLFGSRD

SEQ ID NO: 63085 - protein, 14 aa, unidentified
  source 1..14: note = methanogen bacteria
VGIDQVIDALKIAN

SEQ ID NO: 63086 - protein, 10 aa, unidentified
  source 1..10: note = methanogen bacteria
YSAAGVPASI

SEQ ID NO: 63087 - protein, 17 aa, unidentified
  source 1..17: note = methanogen bacteria
QYIRPITSIFLMGSSKG

SEQ ID NO: 63088 - protein, 61 aa, unidentified
  source 1..61: note = methanogen bacteria
LRLKYNVPINTTFISMDGTNINTSSIIHSHLFKSVIGELITKIIDIPSGIHIGTSLLTYTP

SEQ ID NO: 63089 - protein, 90 aa, unidentified
  source 1..90: note = methanogen bacteria
LSFGTNTYYDIYLLNPDSNINITDSIDNLEEISNESDYLVLRINSSLDYNEMDLTDSLTKKLNGKCDGFFITVNTISYLKKERILDKIFN

SEQ ID NO: 63090 - protein, 16 aa, unidentified
  source 1..16: note = methanogen bacteria
IGQKGSILFINPGYSL

SEQ ID NO: 63091 - protein, 15 aa, unidentified
  source 1..15: note = methanogen bacteria
SRNIIEFKIFTTFDS

SEQ ID NO: 63092 - protein, 11 aa, unidentified
  source 1..11: note = methanogen bacteria
SFNYRFEDPLN

SEQ ID NO: 63093 - protein, 18 aa, unidentified
  source 1..18: note = methanogen bacteria
IGGIPLFNSVLKSNATTN

SEQ ID NO: 63094 - protein, 80 aa, unidentified
  source 1..80: note = methanogen bacteria
SQSIANQHWTLNPIELVFYRAAFTLEVFEKIIPLGGSTHGHILSMIFSSGSPRTFIGQYVLHYDVCLTSTLFGPAYLDFG

SEQ ID NO: 63095 - protein, 41 aa, unidentified
  source 1..41: note = methanogen bacteria
CISQYAVSFSEALDVIAKNLSGGTFDTYHDRLVNHIVWEGY

SEQ ID NO: 63096 - protein, 11 aa, unidentified
  source 1..11: note = methanogen bacteria
LDFQIAGPSMD

SEQ ID NO: 63097 - protein, 26 aa, unidentified
  source 1..26: note = methanogen bacteria
RYTASEEDIASIYSWTVGTLAGIGWN

SEQ ID NO: 63098 - protein, 11 aa, unidentified
  source 1..11: note = methanogen bacteria
SFNYRFEDPLD

SEQ ID NO: 63099 - protein, 18 aa, unidentified
  source 1..18: note = methanogen bacteria
LGGIPLFNSTLKANATTN

SEQ ID NO: 63100 - protein, 80 aa, unidentified
  source 1..80: note = methanogen bacteria
SQSISNQHWTLNPLELIFYRAAFTLEVFERILPLAGTTGGKILAMIFSSGSPRTFIGEYVLHYNVCLTSTLFGPVMLDFG

SEQ ID NO: 63101 - protein, 24 aa, unidentified
  source 1..24: note = methanogen bacteria
MPGVTHNQTFAQFIHLKDYFYYLG

SEQ ID NO: 63102 - protein, 11 aa, unidentified
  source 1..11: note = methanogen bacteria
WRNGAQVFGFD

SEQ ID NO: 63103 - protein, 14 aa, unidentified
  source 1..14: note = methanogen bacteria
ALSNPVSYNIFSHY

SEQ ID NO: 63104 - protein, 26 aa, unidentified
  source 1..26: note = methanogen bacteria
GGVIPYDFVFDFNATQSKILGSWLDV

SEQ ID NO: 63105 - protein, 12 aa, unidentified
  source 1..12: note = methanogen bacteria
PFFVGIPHSGTG

SEQ ID NO: 63106 - protein, 16 aa, unidentified
  source 1..16: note = methanogen bacteria
IYHIMDPHNVYSLSIT

SEQ ID NO: 63107 - protein, 25 aa, unidentified
  source 1..25: note = methanogen bacteria
MKNDFNLISVIADILLLRPIEISHF

SEQ ID NO: 63108 - protein, 10 aa, unidentified
  source 1..10: note = methanogen bacteria
FGIKGLSAQI

SEQ ID NO: 63109 - protein, 12 aa, unidentified
  source 1..12: note = methanogen bacteria
FNHKYTYILWYD

SEQ ID NO: 63110 - protein, 12 aa, unidentified
  source 1..12: note = methanogen bacteria
SFNYRFEDPLDG

SEQ ID NO: 63111 - protein, 18 aa, unidentified
  source 1..18: note = methanogen bacteria
LGGIPLFNSTLKANATTN

SEQ ID NO: 63112 - protein, 80 aa, unidentified
  source 1..80: note = methanogen bacteria
SQSIAGQTWTLNPLELIFYRAAFTLEVFERILPLAGTTGGKILAMIFSSGSPRTFIGEYVLHYNVCLTSTLFGPVMLDFG

SEQ ID NO: 63113 - protein, 68 aa, unidentified
  source 1..68: note = methanogen bacteria
QLSPIDPVKAYLGQRIVSQEQLAIMGEYWGTNLTLGERVLGWLQTLASGSMGFSLIYRAPVTEVIAQK

SEQ ID NO: 63114 - protein, 29 aa, unidentified
  source 1..29: note = methanogen bacteria
VYLGWFPIGLSVPIGQLSDTVTFWQWLYR

SEQ ID NO: 63115 - protein, 24 aa, unidentified
  source 1..24: note = methanogen bacteria
EQVFAYPGIGQATVAAGLRSDVPL

SEQ ID NO: 63116 - protein, 18 aa, unidentified
  source 1..18: note = methanogen bacteria
FKTTLFGPIGGTLPLWNY

SEQ ID NO: 63117 - protein, 36 aa, unidentified
  source 1..36: note = methanogen bacteria
FGTYNISVGDAIGCFIDHLSGNVKDPTGDHYIWDVR

SEQ ID NO: 63118 - protein, 11 aa, unidentified
  source 1..11: note = methanogen bacteria
GISIVPFLTNQ

SEQ ID NO: 63119 - protein, 26 aa, unidentified
  source 1..26: note = methanogen bacteria
MVTSPSESMAEAYAWRVGDLGTVGWA

SEQ ID NO: 63120 - protein, 22 aa, unidentified
  source 1..22: note = methanogen bacteria
LGHENLSLSGFWYYLSLGVFEG

SEQ ID NO: 63121 - protein, 10 aa, unidentified
  source 1..10: note = methanogen bacteria
LFGRGWCGYA

SEQ ID NO: 63122 - protein, 18 aa, unidentified
  source 1..18: note = methanogen bacteria
LIWKIKFFQSSYDLLNKN

SEQ ID NO: 63123 - protein, 20 aa, unidentified
  source 1..20: note = methanogen bacteria
DTLNPIIRPITYLFLMGSSK

SEQ ID NO: 63124 - protein, 62 aa, unidentified
  source 1..62: note = methanogen bacteria
RLQMGIKLNTVFCSMTNTMSSTSILHTHLLKSILGQILSFIMGPFIQSDINTGVGLYQYLPP

SEQ ID NO: 63125 - protein, 72 aa, unidentified
  source 1..72: note = methanogen bacteria
AFAGAEPDYYTVTIEDIDEHVDFGNIPIEKINNTTYHVDSKYNEMLLINDLKVPLNNSCKYYTVTWNIYSYL

SEQ ID NO: 63126 - protein, 11 aa, unidentified
  source 1..11: note = methanogen bacteria
SFNYRFEDPLD

SEQ ID NO: 63127 - protein, 19 aa, unidentified
  source 1..19: note = methanogen bacteria
LLGGIPLFNSVLKSNATTN

SEQ ID NO: 63128 - protein, 80 aa, unidentified
  source 1..80: note = methanogen bacteria
SQSIANQTWTLNPLELIFYRAAFTLEVFERILPLAGTTHGHILSMIFSSGSPRTFIGEYVLHYNVCLTSTLFGPVMLDFG

SEQ ID NO: 63129 - protein, 28 aa, unidentified
  source 1..28: note = methanogen bacteria
IYEGAHRIYLWGAHRIYLWGSYFITLEA

SEQ ID NO: 63130 - protein, 19 aa, unidentified
  source 1..19: note = methanogen bacteria
QGYGYINVYPSLDFSFHDL

SEQ ID NO: 63131 - protein, 29 aa, unidentified
  source 1..29: note = methanogen bacteria
AFGSSGGIIGNLDFVFMNGLDEGQSDYSV

SEQ ID NO: 63132 - protein, 14 aa, unidentified
  source 1..14: note = methanogen bacteria
WSGGFESIGLTVLD

SEQ ID NO: 63133 - protein, 18 aa, unidentified
  source 1..18: note = methanogen bacteria
AESKYTGGTVGLLFGSTD

SEQ ID NO: 63134 - protein, 11 aa, unidentified
  source 1..11: note = methanogen bacteria
SFNYRFENPLN

SEQ ID NO: 63135 - protein, 18 aa, unidentified
  source 1..18: note = methanogen bacteria
LGGIPLFDSVLKSQATTN

SEQ ID NO: 63136 - protein, 82 aa, unidentified
  source 1..82: note = methanogen bacteria
ASKSIANQNWTLNPVELIFFRAAFTLEVLEKIIPLNSTTQGHILSMIFSSGSPRTFIGNYVMHYEVCLTSTIFGPVLLDFGY

SEQ ID NO: 63137 - protein, 11 aa, unidentified
  source 1..11: note = methanogen bacteria
SFNYRFEDPLD

SEQ ID NO: 63138 - protein, 18 aa, unidentified
  source 1..18: note = methanogen bacteria
LGGIPLFNSTLKANATTN

SEQ ID NO: 63139 - protein, 80 aa, unidentified
  source 1..80: note = methanogen bacteria
SQSIAGQHWTLNPMELIFYRAAFTLEVFERIIPLAGTTHGKILAMIFSSGSPRTFIGEYVLHYNVCLTSTLFGPVMLDFG

SEQ ID NO: 63140 - protein, 68 aa, unidentified
  source 1..68: note = methanogen bacteria
QLSPIDPVKAYLGQRIVSQEQLAIIGNYWGTNLSLGERVLGWLQTLASGSMGFSLIYRVPVTEVIIQK

SEQ ID NO: 63141 - protein, 29 aa, unidentified
  source 1..29: note = methanogen bacteria
VYLGWFPIGLSVPIGQLSDTVTFWQWLYR

SEQ ID NO: 63142 - protein, 24 aa, unidentified
  source 1..24: note = methanogen bacteria
EQVFAYPGIGQATVAAGLRSDVPL

SEQ ID NO: 63143 - protein, 14 aa, unidentified
  source 1..14: note = methanogen bacteria
IGIENIIDALKTAN

SEQ ID NO: 63144 - protein, 11 aa, unidentified
  source 1..11: note = methanogen bacteria
AFGASLNVIVI

SEQ ID NO: 63145 - protein, 11 aa, unidentified
  source 1..11: note = methanogen bacteria
YSKAGISLSLA

SEQ ID NO: 63146 - protein, 10 aa, unidentified
  source 1..10: note = methanogen bacteria
FNYRFEDPLN

SEQ ID NO: 63147 - protein, 18 aa, unidentified
  source 1..18: note = methanogen bacteria
LGGIPLFNSVLKSNATTN

SEQ ID NO: 63148 - protein, 80 aa, unidentified
  source 1..80: note = methanogen bacteria
SQSIATQHWTLNPIELIFYRAAFTQEVFEKIIPLAGTTHGHILSMIFSSGSPRSFIGNYVLHYDVCLTSTMFGPVMLDFG

SEQ ID NO: 63149 - protein, 10 aa, unidentified
  source 1..10: note = methanogen bacteria
FNYRFENPLN

SEQ ID NO: 63150 - protein, 18 aa, unidentified
  source 1..18: note = methanogen bacteria
LGGIPLFNSVLKANATTN

SEQ ID NO: 63151 - protein, 81 aa, unidentified
  source 1..81: note = methanogen bacteria
ASQSIATQTWTLNPVELVFYRAAFTQEVFEKIIPLAGTTHGHILSMIFSSGSPRSFIGNYVLHYDVCLTSTLFGPVMLDFG

SEQ ID NO: 63152 - protein, 32 aa, unidentified
  source 1..32: note = methanogen bacteria
GAIYATYNSTVNAANTKFYHNNADCGGAIFAF

SEQ ID NO: 63153 - protein, 57 aa, unidentified
  source 1..57: note = methanogen bacteria
TDLNINHCDFFENIANYYGGSIYSDSVINISYSNFYSNKAKLKGGAIHSSNSPYFCN

SEQ ID NO: 63154 - protein, 14 aa, unidentified
  source 1..14: note = methanogen bacteria
IGIENIIDALKTAN

SEQ ID NO: 63155 - protein, 10 aa, unidentified
  source 1..10: note = methanogen bacteria
AFGASLNVIV

SEQ ID NO: 63156 - protein, 12 aa, unidentified
  source 1..12: note = methanogen bacteria
LYSKAGASTSLV

SEQ ID NO: 63157 - protein, 68 aa, unidentified
  source 1..68: note = methanogen bacteria
QLSPIDPVRAYLGQRIVSEEQLAIMGQYWGTNLSLGERVMGWLQTLASGSMGFSLIFRVPVTEVIVQK

SEQ ID NO: 63158 - protein, 30 aa, unidentified
  source 1..30: note = methanogen bacteria
SVYLGWFPIGLSVPIGQLSDTVTFWQWLYR

SEQ ID NO: 63159 - protein, 24 aa, unidentified
  source 1..24: note = methanogen bacteria
EQVFAYPGIGQATVAAGLRSDVPL

SEQ ID NO: 63160 - protein, 14 aa, unidentified
  source 1..14: note = methanogen bacteria
VGFQRGSSGIGTIA

SEQ ID NO: 63161 - protein, 10 aa, unidentified
  source 1..10: note = methanogen bacteria
FNYRFQDPLN

SEQ ID NO: 63162 - protein, 18 aa, unidentified
  source 1..18: note = methanogen bacteria
LGGIPLFNSVLKSNATTN

SEQ ID NO: 63163 - protein, 80 aa, unidentified
  source 1..80: note = methanogen bacteria
SQSIANQTWTLNPIELVFYRLAFTLEVFEKIIPLAGTTHGHILSMIFSSGSPRSFIGNYVLHYDVCLTSTLFGPVMLDFG

SEQ ID NO: 63164 - protein, 12 aa, unidentified
  source 1..12: note = methanogen bacteria
KLPSVTGSSSHP

SEQ ID NO: 63165 - protein, 13 aa, unidentified
  source 1..13: note = methanogen bacteria
CYHSSGWGEAFAD

SEQ ID NO: 63166 - protein, 44 aa, unidentified
  source 1..44: note = methanogen bacteria
GDSQGMDFGGSDDAGSGDIADNNGGSYEPWTSGIWGDYELPGET

SEQ ID NO: 63167 - protein, 34 aa, unidentified
  source 1..34: note = methanogen bacteria
PSVFQQLVMPALQGMNEGVNNGTVQLSTVPLFTN

SEQ ID NO: 63168 - protein, 10 aa, unidentified
  source 1..10: note = methanogen bacteria
TGSTLPIVYY

SEQ ID NO: 63169 - protein, 11 aa, unidentified
  source 1..11: note = methanogen bacteria
IPLGTTILGLI

SEQ ID NO: 63170 - protein, 11 aa, unidentified
  source 1..11: note = methanogen bacteria
FNYRFENPLNT

SEQ ID NO: 63171 - protein, 18 aa, unidentified
  source 1..18: note = methanogen bacteria
LGGIPLFDSVLKANATTN

SEQ ID NO: 63172 - protein, 81 aa, unidentified
  source 1..81: note = methanogen bacteria
ASQSISNQHWTLNPLELIFYRAAFTLEVFQKIIPLAGTTHGHILSMIFSSGSPRTFIGEYVLHYNVCLTSTIFGPVMLDFG

SEQ ID NO: 63173 - protein, 10 aa, unidentified
  source 1..10: note = methanogen bacteria
FNYRFKDPLN

SEQ ID NO: 63174 - protein, 18 aa, unidentified
  source 1..18: note = methanogen bacteria
LGGIPLFNSVLKANATTN

SEQ ID NO: 63175 - protein, 80 aa, unidentified
  source 1..80: note = methanogen bacteria
SQSIATQTWTLNPVELIFYRAAFTQEVFEKIIPLAGTTHGHILSMIFSSGSPRSFIGNYVLHYDVCLTSTMFGPVMLDFG

SEQ ID NO: 63176 - protein, 14 aa, unidentified
  source 1..14: note = methanogen bacteria
IGIENVLDALKTAN

SEQ ID NO: 63177 - protein, 11 aa, unidentified
  source 1..11: note = methanogen bacteria
AFGASLNVIVI

SEQ ID NO: 63178 - protein, 11 aa, unidentified
  source 1..11: note = methanogen bacteria
YSKAGISLSLA

SEQ ID NO: 63179 - protein, 36 aa, unidentified
  source 1..36: note = methanogen bacteria
CIVNFGGIADDISNLRISVYIPYGIDDLVLTRVGGS

SEQ ID NO: 63180 - protein, 23 aa, unidentified
  source 1..23: note = methanogen bacteria
ATNNTPSTDWMSDFTRFEMVFLL

SEQ ID NO: 63181 - protein, 68 aa, unidentified
  source 1..68: note = methanogen bacteria
QLSPIDPVKAYLGQRIVSQEQLAIMGEYWGTNLSLGERVFGWLSTLASGSMGFSLIYRVPVTEVIVQK

SEQ ID NO: 63182 - protein, 29 aa, unidentified
  source 1..29: note = methanogen bacteria
VYLGWFPIGLSVPIGQLSDTVTFWQWLYR

SEQ ID NO: 63183 - protein, 24 aa, unidentified
  source 1..24: note = methanogen bacteria
EQVFAYPGIGQATVAAGLRSDVPL

SEQ ID NO: 63184 - protein, 14 aa, unidentified
  source 1..14: note = methanogen bacteria
IGIENVLDALKTAN

SEQ ID NO: 63185 - protein, 11 aa, unidentified
  source 1..11: note = methanogen bacteria
AFGASLNVIVI

SEQ ID NO: 63186 - protein, 11 aa, unidentified
  source 1..11: note = methanogen bacteria
YSKAGVSLSLA

SEQ ID NO: 63187 - protein, 54 aa, unidentified
  source 1..54: note = methanogen bacteria
VMGGISTAVDTYAPNYSGDEQFHQEVYDYFQKLDTIDGQDSIVVNTADIIIQNA

SEQ ID NO: 63188 - protein, 14 aa, unidentified
  source 1..14: note = methanogen bacteria
IGIENIISALKTAN

SEQ ID NO: 63189 - protein, 10 aa, unidentified
  source 1..10: note = methanogen bacteria
AFGASLNVIV

SEQ ID NO: 63190 - protein, 11 aa, unidentified
  source 1..11: note = methanogen bacteria
YSKAGVSLSLA

SEQ ID NO: 63191 - protein, 14 aa, unidentified
  source 1..14: note = methanogen bacteria
IGIDKLIDAIEDAN

SEQ ID NO: 63192 - protein, 10 aa, unidentified
  source 1..10: note = methanogen bacteria
AFGATLNVIV

SEQ ID NO: 63193 - protein, 11 aa, unidentified
  source 1..11: note = methanogen bacteria
YSRAGCPQGLA

SEQ ID NO: 63194 - protein, 14 aa, unidentified
  source 1..14: note = methanogen bacteria
VGIDDVINALKIAN

SEQ ID NO: 63195 - protein, 11 aa, unidentified
  source 1..11: note = methanogen bacteria
YAAAGINASIS

SEQ ID NO: 63196 - protein, 14 aa, unidentified
  source 1..14: note = methanogen bacteria
VGIDDVINALKIAN

SEQ ID NO: 63197 - protein, 10 aa, unidentified
  source 1..10: note = methanogen bacteria
TAAGITASIS

SEQ ID NO: 63198 - protein, 11 aa, unidentified
  source 1..11: note = methanogen bacteria
QVYLISQIKLP

SEQ ID NO: 63199 - protein, 14 aa, unidentified
  source 1..14: note = methanogen bacteria
VGIDKVIAALKIAK

SEQ ID NO: 63200 - protein, 10 aa, unidentified
  source 1..10: note = methanogen bacteria
AFGASVSPVV

SEQ ID NO: 63201 - protein, 10 aa, unidentified
  source 1..10: note = methanogen bacteria
YSAAGITASI

SEQ ID NO: 63202 - protein, 14 aa, unidentified
  source 1..14: note = methanogen bacteria
KMQVYLISQIQLPL

SEQ ID NO: 63203 - protein, 13 aa, unidentified
  source 1..13: note = methanogen bacteria
YRKRRRKRNRRYR

SEQ ID NO: 63204 - protein, 27 aa, unidentified
  source 1..27: note = methanogen bacteria
DDSFFIDSFSLLSGEAVYMDPNRKNCS

SEQ ID NO: 63205 - protein, 81 aa, unidentified
  source 1..81: note = methanogen bacteria
TDVIDGHMINFDPEYMYYRHFINLADKKIDIVLLLYSAIMNRVERNLCNGVEYSGEFRINEYVLTLSRSFDDGVTFEKAYH

SEQ ID NO: 63206 - protein, 15 aa, unidentified
  source 1..15: note = methanogen bacteria
NDIFYKLKNNDYKYD

SEQ ID NO: 63207 - protein, 13 aa, unidentified
  source 1..13: note = methanogen bacteria
YELYPTLKNITDD

SEQ ID NO: 63208 - protein, 14 aa, unidentified
  source 1..14: note = methanogen bacteria
VGIDKVIGALKLAK

SEQ ID NO: 63209 - protein, 11 aa, unidentified
  source 1..11: note = methanogen bacteria
LAFGASVNPVI

SEQ ID NO: 63210 - protein, 11 aa, unidentified
  source 1..11: note = methanogen bacteria
YSAAGITASVS

SEQ ID NO: 63211 - protein, 11 aa, unidentified
  source 1..11: note = methanogen bacteria
QTAVQSSKILD

SEQ ID NO: 63212 - protein, 12 aa, unidentified
  source 1..12: note = methanogen bacteria
TPLTFSNVFPLN

SEQ ID NO: 63213 - protein, 28 aa, unidentified
  source 1..28: note = methanogen bacteria
WFGSNSAYGFLSTPNRFDGATHNVVRGT

SEQ ID NO: 63214 - protein, 15 aa, unidentified
  source 1..15: note = methanogen bacteria
VHTFIPNVEDKYHNY

SEQ ID NO: 63215 - protein, 19 aa, unidentified
  source 1..19: note = methanogen bacteria
NVSQPGNSVNGLAFNKLGA

SEQ ID NO: 63216 - protein, 14 aa, unidentified
  source 1..14: note = methanogen bacteria
VGIDEVLNALKDAN

SEQ ID NO: 63217 - protein, 10 aa, unidentified
  source 1..10: note = methanogen bacteria
AFGASVSPVV

SEQ ID NO: 63218 - protein, 10 aa, unidentified
  source 1..10: note = methanogen bacteria
YSAAGISASI

SEQ ID NO: 63219 - protein, 14 aa, unidentified
  source 1..14: note = methanogen bacteria
VGIDKIIETLKNAN

SEQ ID NO: 63220 - protein, 10 aa, unidentified
  source 1..10: note = methanogen bacteria
AFGATLNVVV

SEQ ID NO: 63221 - protein, 12 aa, unidentified
  source 1..12: note = methanogen bacteria
FYSKAGVSMSLA

SEQ ID NO: 63222 - protein, 14 aa, unidentified
  source 1..14: note = methanogen bacteria
VGIDKVIEALKVAK

SEQ ID NO: 63223 - protein, 10 aa, unidentified
  source 1..10: note = methanogen bacteria
AFGASVNPVV

SEQ ID NO: 63224 - protein, 10 aa, unidentified
  source 1..10: note = methanogen bacteria
SVAGVTASVS

SEQ ID NO: 63225 - protein, 11 aa, unidentified
  source 1..11: note = methanogen bacteria
SFNYRFEDPLK

SEQ ID NO: 63226 - protein, 18 aa, unidentified
  source 1..18: note = methanogen bacteria
LGGIPLFDSTLKVNATTN

SEQ ID NO: 63227 - protein, 80 aa, unidentified
  source 1..80: note = methanogen bacteria
SQSIATQHWTLNPLELIFYRAAFTLEVLEKIIPLAGTTNGKILSMIFSSGSPRTFIGNYVLHYDVCLTSTLFGPVMLDFG

SEQ ID NO: 63228 - protein, 14 aa, unidentified
  source 1..14: note = methanogen bacteria
VGINDVINALKVAD

SEQ ID NO: 63229 - protein, 10 aa, unidentified
  source 1..10: note = methanogen bacteria
YTAAGITASI

SEQ ID NO: 63230 - protein, 14 aa, unidentified
  source 1..14: note = methanogen bacteria
VGIDQVISALKVAK

SEQ ID NO: 63231 - protein, 11 aa, unidentified
  source 1..11: note = methanogen bacteria
LAFGASVNPVV

SEQ ID NO: 63232 - protein, 10 aa, unidentified
  source 1..10: note = methanogen bacteria
YSAAGITASI

SEQ ID NO: 63233 - protein, 28 aa, unidentified
  source 1..28: note = methanogen bacteria
LHSTYPTFMDALYGLKNPQNVINSALSK

SEQ ID NO: 63234 - protein, 15 aa, unidentified
  source 1..15: note = methanogen bacteria
VKKLNITGTVSIVLM

SEQ ID NO: 63235 - protein, 10 aa, unidentified
  source 1..10: note = methanogen bacteria
SGQVFESLSF

SEQ ID NO: 63236 - protein, 40 aa, unidentified
  source 1..40: note = methanogen bacteria
TALPLHPYALAMASGIGSASMNAAAITPLLNIFPSMSHEI

SEQ ID NO: 63237 - protein, 17 aa, unidentified
  source 1..17: note = methanogen bacteria
RRTMANNTYWNAYIVSH

SEQ ID NO: 63238 - protein, 15 aa, unidentified
  source 1..15: note = methanogen bacteria
PIKIPLSESVEVSIM

SEQ ID NO: 63239 - protein, 10 aa, unidentified
  source 1..10: note = methanogen bacteria
GQSIHLIFEM

SEQ ID NO: 63240 - protein, 41 aa, unidentified
  source 1..41: note = methanogen bacteria
SLLPLHPYAFAMASGVGSASMNAAALGPTLAAFPALETNIE

SEQ ID NO: 63241 - protein, 11 aa, unidentified
  source 1..11: note = methanogen bacteria
ALDVNPLFSAN

SEQ ID NO: 63242 - protein, 30 aa, unidentified
  source 1..30: note = methanogen bacteria
RQGLGSNWQILDLFKYFITGFLDPTLISVQ

SEQ ID NO: 63243 - protein, 16 aa, unidentified
  source 1..16: note = methanogen bacteria
ITNQQSLFFIRLGDIT

SEQ ID NO: 63244 - protein, 10 aa, unidentified
  source 1..10: note = methanogen bacteria
VHIINLTGFA

SEQ ID NO: 63245 - protein, 11 aa, unidentified
  source 1..11: note = methanogen bacteria
IRFSSACPSKF

SEQ ID NO: 63246 - protein, 23 aa, unidentified
  source 1..23: note = methanogen bacteria
MKIPVEGNILLFLYNDCIEGSIM

SEQ ID NO: 63247 - protein, 18 aa, unidentified
  source 1..18: note = methanogen bacteria
SVYDTTHQSTYLFKSYSY

SEQ ID NO: 63248 - protein, 11 aa, unidentified
  source 1..11: note = methanogen bacteria
TLDVNPLFSAN

SEQ ID NO: 63249 - protein, 30 aa, unidentified
  source 1..30: note = methanogen bacteria
RQALGPNWQILDLFKYIFTGFLDPTLISVQ

SEQ ID NO: 63250 - protein, 16 aa, unidentified
  source 1..16: note = methanogen bacteria
ITNQQFLFFIRLGDIT

SEQ ID NO: 63251 - protein, 11 aa, unidentified
  source 1..11: note = methanogen bacteria
KVHIINLTGFT

SEQ ID NO: 63252 - protein, 14 aa, unidentified
  source 1..14: note = methanogen bacteria
NVIMSISTNNISQT

SEQ ID NO: 63253 - protein, 11 aa, unidentified
  source 1..11: note = methanogen bacteria
YITHYTLNSSL

SEQ ID NO: 63254 - protein, 28 aa, unidentified
  source 1..28: note = methanogen bacteria
KYSLTYIISNIFNLLIISILDPTILTVE

SEQ ID NO: 63255 - protein, 17 aa, unidentified
  source 1..17: note = methanogen bacteria
NFIGELELTFMPLGDLT

SEQ ID NO: 63256 - protein, 11 aa, unidentified
  source 1..11: note = methanogen bacteria
KIGIYDISISP

SEQ ID NO: 63257 - protein, 15 aa, unidentified
  source 1..15: note = methanogen bacteria
LNSTHNQVTNIFAFR

SEQ ID NO: 63258 - protein, 23 aa, unidentified
  source 1..23: note = methanogen bacteria
GWIPLIDDFAANTSPILSSWLDV

SEQ ID NO: 63259 - protein, 10 aa, unidentified
  source 1..10: note = methanogen bacteria
LQPFKFTGTQ

SEQ ID NO: 63260 - protein, 14 aa, unidentified
  source 1..14: note = methanogen bacteria
VGIDNLIETLKDAD

SEQ ID NO: 63261 - protein, 11 aa, unidentified
  source 1..11: note = methanogen bacteria
AFGATLNVIVI

SEQ ID NO: 63262 - protein, 11 aa, unidentified
  source 1..11: note = methanogen bacteria
YSKAGVAYSLA

SEQ ID NO: 63263 - protein, 14 aa, unidentified
  source 1..14: note = methanogen bacteria
AQPPAPTWDGVLSL

SEQ ID NO: 63264 - protein, 14 aa, unidentified
  source 1..14: note = methanogen bacteria
SLHPQSVPAQTMFG

SEQ ID NO: 63265 - protein, 14 aa, unidentified
  source 1..14: note = methanogen bacteria
TMASGGTWQDLFDL

SEQ ID NO: 63266 - protein, 15 aa, unidentified
  source 1..15: note = methanogen bacteria
MHKTHDQMQIFAFRW

SEQ ID NO: 63267 - protein, 25 aa, unidentified
  source 1..25: note = methanogen bacteria
ELHLIPLVDNFIANQSKMLHSWVDV

SEQ ID NO: 63268 - protein, 11 aa, unidentified
  source 1..11: note = methanogen bacteria
SFNYRFENPLS

SEQ ID NO: 63269 - protein, 18 aa, unidentified
  source 1..18: note = methanogen bacteria
LGGIPLFNSTLKANATTN

SEQ ID NO: 63270 - protein, 80 aa, unidentified
  source 1..80: note = methanogen bacteria
SQSIATQHWTLNPLELIFYRAGFTLEVFEKIIPLAGTTNGHILSMIFSSGSPRTFIGEYVLKYTVCLTSTLFGPVMLDFG

SEQ ID NO: 63271 - protein, 11 aa, unidentified
  source 1..11: note = methanogen bacteria
LLSEDILFSLN

SEQ ID NO: 63272 - protein, 29 aa, unidentified
  source 1..29: note = methanogen bacteria
GELGDSWNLFDLIEYIFMGFLNPTNISIQ

SEQ ID NO: 63273 - protein, 17 aa, unidentified
  source 1..17: note = methanogen bacteria
YMLADQSLFFIQLGDIT

SEQ ID NO: 63274 - protein, 10 aa, unidentified
  source 1..10: note = methanogen bacteria
YGIINFNGFA

SEQ ID NO: 63275 - protein, 20 aa, unidentified
  source 1..20: note = methanogen bacteria
NRTGAHKIYLMQNFFVTYEA

SEQ ID NO: 63276 - protein, 19 aa, unidentified
  source 1..19: note = methanogen bacteria
QGYGIINIYPSIDFSFSDL

SEQ ID NO: 63277 - protein, 48 aa, unidentified
  source 1..48: note = methanogen bacteria
CGSEAVYETGGHYKCAECGNSIYNPDDLELAYDDGYIDLLSPIFLFIS

SEQ ID NO: 63278 - protein, 21 aa, unidentified
  source 1..21: note = methanogen bacteria
YYFVQAYRTSVSMGLDMIDWS

SEQ ID NO: 63279 - protein, 10 aa, unidentified
  source 1..10: note = methanogen bacteria
VNDNVGAVVN

SEQ ID NO: 63280 - protein, 11 aa, unidentified
  source 1..11: note = methanogen bacteria
THHSVLNEIDI

SEQ ID NO: 63281 - protein, 11 aa, unidentified
  source 1..11: note = methanogen bacteria
NKSTNGESIWG

SEQ ID NO: 63282 - protein, 23 aa, unidentified
  source 1..23: note = methanogen bacteria
TLDVNGAPANARGPLVVISAFFA

SEQ ID NO: 63283 - protein, 14 aa, unidentified
  source 1..14: note = methanogen bacteria
LLNMSKPKILVCDN

SEQ ID NO: 63284 - protein, 23 aa, unidentified
  source 1..23: note = methanogen bacteria
LKTGSMNIADVIAYQSANGPLIM

SEQ ID NO: 63285 - protein, 31 aa, unidentified
  source 1..31: note = methanogen bacteria
LGSVRIALADVWGSLFSGDDWGNRVIVRDIR

SEQ ID NO: 63286 - protein, 24 aa, unidentified
  source 1..24: note = methanogen bacteria
FFSDEDTVTSIVFWMLGSFDGCGW

SEQ ID NO: 63287 - protein, 15 aa, unidentified
  source 1..15: note = methanogen bacteria
LIYLILMITELYSNS

SEQ ID NO: 63288 - protein, 18 aa, unidentified
  source 1..18: note = methanogen bacteria
KLNATYPTFIDAMLGLRH

SEQ ID NO: 63289 - protein, 17 aa, unidentified
  source 1..17: note = methanogen bacteria
GIYIITSDMIVNYTLPS

SEQ ID NO: 63290 - protein, 23 aa, unidentified
  source 1..23: note = methanogen bacteria
FVTVFYDVVNVSEAGTLFFSHMW

SEQ ID NO: 63291 - protein, 10 aa, unidentified
  source 1..10: note = methanogen bacteria
FGIQDVNIQY

SEQ ID NO: 63292 - protein, 11 aa, unidentified
  source 1..11: note = methanogen bacteria
LRGYDFFLWYE

SEQ ID NO: 63293 - protein, 10 aa, unidentified
  source 1..10: note = methanogen bacteria
PFVVYLPFSE

SEQ ID NO: 63294 - protein, 10 aa, unidentified
  source 1..10: note = methanogen bacteria
CFWQFSTGRY

SEQ ID NO: 63295 - protein, 27 aa, unidentified
  source 1..27: note = methanogen bacteria
IQTIALNDVSLTYIVNGLLAGNLVQIY

SEQ ID NO: 63296 - protein, 16 aa, unidentified
  source 1..16: note = methanogen bacteria
LSMAAGEIIKTYKGFF

SEQ ID NO: 63297 - protein, 15 aa, unidentified
  source 1..15: note = methanogen bacteria
GIYIISSDAIMNYTI

SEQ ID NO: 63298 - protein, 23 aa, unidentified
  source 1..23: note = methanogen bacteria
FITIGSSQINVSEAGNLFFSHMW

SEQ ID NO: 63299 - protein, 10 aa, unidentified
  source 1..10: note = methanogen bacteria
MHGIQNVNIQ

SEQ ID NO: 63300 - protein, 12 aa, unidentified
  source 1..12: note = methanogen bacteria
FTKGYEFFLWYE

SEQ ID NO: 63301 - protein, 10 aa, unidentified
  source 1..10: note = methanogen bacteria
PIVVELPFTE

SEQ ID NO: 63302 - protein, 11 aa, unidentified
  source 1..11: note = methanogen bacteria
RWSAELQSWME

SEQ ID NO: 63303 - protein, 12 aa, unidentified
  source 1..12: note = methanogen bacteria
YHLQYIKGLDSQ

SEQ ID NO: 63304 - protein, 18 aa, unidentified
  source 1..18: note = methanogen bacteria
VMGNVPIIEKYYPLLISS

SEQ ID NO: 63305 - protein, 15 aa, unidentified
  source 1..15: note = methanogen bacteria
GIYIISSNTILNYTI

SEQ ID NO: 63306 - protein, 21 aa, unidentified
  source 1..21: note = methanogen bacteria
TVNSHQISLNESGTLFFSHMW

SEQ ID NO: 63307 - protein, 10 aa, unidentified
  source 1..10: note = methanogen bacteria
MNGIKNVNIQ

SEQ ID NO: 63308 - protein, 11 aa, unidentified
  source 1..11: note = methanogen bacteria
IKGYDFYLWYE

SEQ ID NO: 63309 - protein, 10 aa, unidentified
  source 1..10: note = methanogen bacteria
PLIVDLPFSE

SEQ ID NO: 63310 - protein, 58 aa, unidentified
  source 1..58: note = methanogen bacteria
VDIISSFLINTGGISSFNLNSLNNIIFSHLPSQYNGLSQTISNIILNSSNTLLKGVLN

SEQ ID NO: 63311 - protein, 23 aa, unidentified
  source 1..23: note = methanogen bacteria
LHSSYPTFMDALYGLTNPQNVIN

SEQ ID NO: 63312 - protein, 15 aa, unidentified
  source 1..15: note = methanogen bacteria
IFIISSDAILNFTFT

SEQ ID NO: 63313 - protein, 21 aa, unidentified
  source 1..21: note = methanogen bacteria
ITVFYDVVNPGEAGNLFYSHM

SEQ ID NO: 63314 - protein, 10 aa, unidentified
  source 1..10: note = methanogen bacteria
MNGIQNVNIQ

SEQ ID NO: 63315 - protein, 11 aa, unidentified
  source 1..11: note = methanogen bacteria
LKGYNFFLWYE

SEQ ID NO: 63316 - protein, 16 aa, unidentified
  source 1..16: note = methanogen bacteria
KLNATYPTFIDAILGI

SEQ ID NO: 63317 - protein, 15 aa, unidentified
  source 1..15: note = methanogen bacteria
GIYIISSDAILNYTL

SEQ ID NO: 63318 - protein, 22 aa, unidentified
  source 1..22: note = methanogen bacteria
ITVSSPAVNPIEAGTLFFSHMW

SEQ ID NO: 63319 - protein, 11 aa, unidentified
  source 1..11: note = methanogen bacteria
IRGHDFFLWYE

SEQ ID NO: 63320 - protein, 16 aa, unidentified
  source 1..16: note = methanogen bacteria
GIYIISSDAILNYTIY

SEQ ID NO: 63321 - protein, 23 aa, unidentified
  source 1..23: note = methanogen bacteria
FVTVSTPRINYAEAGTLFFSHMW

SEQ ID NO: 63322 - protein, 11 aa, unidentified
  source 1..11: note = methanogen bacteria
EMHGINGIALQ

SEQ ID NO: 63323 - protein, 12 aa, unidentified
  source 1..12: note = methanogen bacteria
YTLHYDFALWYE

SEQ ID NO: 63324 - protein, 38 aa, unidentified
  source 1..38: note = methanogen bacteria
TVGSSGISMGEVYRDIWYHIFDPDKCDEMTDWAVFTIR

SEQ ID NO: 63325 - protein, 10 aa, unidentified
  source 1..10: note = methanogen bacteria
GFTFAGIGGS

SEQ ID NO: 63326 - protein, 26 aa, unidentified
  source 1..26: note = methanogen bacteria
KLSISEQSLSAVYQWSIGDLSGATWT

SEQ ID NO: 63327 - protein, 12 aa, unidentified
  source 1..12: note = methanogen bacteria
VSGLNADALTAI

SEQ ID NO: 63328 - protein, 19 aa, unidentified
  source 1..19: note = methanogen bacteria
DTLIVWVGGESVLPLCRAY

SEQ ID NO: 63329 - protein, 11 aa, unidentified
  source 1..11: note = methanogen bacteria
FTAGIGEIASY

SEQ ID NO: 63330 - protein, 21 aa, unidentified
  source 1..21: note = methanogen bacteria
HQFCGIFSLTLSDTNVIDRAA

SEQ ID NO: 63331 - protein, 10 aa, unidentified
  source 1..10: note = methanogen bacteria
FSSGNSMNYI

SEQ ID NO: 63332 - protein, 10 aa, unidentified
  source 1..10: note = methanogen bacteria
EGNLLFKNLN

SEQ ID NO: 63333 - protein, 17 aa, unidentified
  source 1..17: note = methanogen bacteria
LGTTYPTFMDAVFALKN

SEQ ID NO: 63334 - protein, 16 aa, unidentified
  source 1..16: note = methanogen bacteria
GIYIISSDAILNYTIY

SEQ ID NO: 63335 - protein, 23 aa, unidentified
  source 1..23: note = methanogen bacteria
YISFGYEQVNFSEAGNLFFSHMW

SEQ ID NO: 63336 - protein, 10 aa, unidentified
  source 1..10: note = methanogen bacteria
MHGIKNVNIQ

SEQ ID NO: 63337 - protein, 11 aa, unidentified
  source 1..11: note = methanogen bacteria
IKGYDFFLWYE

SEQ ID NO: 63338 - protein, 10 aa, unidentified
  source 1..10: note = methanogen bacteria
PVIVDLPFTE

SEQ ID NO: 63339 - protein, 14 aa, unidentified
  source 1..14: note = methanogen bacteria
IFIISSDAIMNYTI

SEQ ID NO: 63340 - protein, 22 aa, unidentified
  source 1..22: note = methanogen bacteria
VTVKSGQVNFSEAGNLFFSHMW

SEQ ID NO: 63341 - protein, 10 aa, unidentified
  source 1..10: note = methanogen bacteria
MQGIENVNIQ

SEQ ID NO: 63342 - protein, 11 aa, unidentified
  source 1..11: note = methanogen bacteria
VRGYNFFLWYE

SEQ ID NO: 63343 - protein, 11 aa, unidentified
  source 1..11: note = methanogen bacteria
SFNYRFEDPLD

SEQ ID NO: 63344 - protein, 18 aa, unidentified
  source 1..18: note = methanogen bacteria
LGGIPLFDSALKASATTN

SEQ ID NO: 63345 - protein, 80 aa, unidentified
  source 1..80: note = methanogen bacteria
SQSIANQHWTLNPLELIFYRAAFTLEVFERILPLAGTTSGKILAMIFSSGSPRTFIGNYVLTDNVCLTSTLFGPVLLDFG

SEQ ID NO: 63346 - protein, 16 aa, unidentified
  source 1..16: note = methanogen bacteria
GIYIISSDAILNYTLY

SEQ ID NO: 63347 - protein, 22 aa, unidentified
  source 1..22: note = methanogen bacteria
VTLNSGQVNFTEAGNLFFSHMW

SEQ ID NO: 63348 - protein, 11 aa, unidentified
  source 1..11: note = methanogen bacteria
MNGIKNVTIQY

SEQ ID NO: 63349 - protein, 11 aa, unidentified
  source 1..11: note = methanogen bacteria
IMGYDFFLWYE

SEQ ID NO: 63350 - protein, 10 aa, unidentified
  source 1..10: note = methanogen bacteria
PVVVQLPVSE

SEQ ID NO: 63351 - protein, 16 aa, unidentified
  source 1..16: note = methanogen bacteria
GIYIISSDAIMNYTLF

SEQ ID NO: 63352 - protein, 23 aa, unidentified
  source 1..23: note = methanogen bacteria
FVTVGSSHVNFSEAGNLFFSHMW

SEQ ID NO: 63353 - protein, 12 aa, unidentified
  source 1..12: note = methanogen bacteria
DMNGISGVTLQY

SEQ ID NO: 63354 - protein, 11 aa, unidentified
  source 1..11: note = methanogen bacteria
IRGYNFFLWYE

SEQ ID NO: 63355 - protein, 10 aa, unidentified
  source 1..10: note = methanogen bacteria
PVVVQLPFTE

SEQ ID NO: 63356 - protein, 16 aa, unidentified
  source 1..16: note = methanogen bacteria
GIYIISSDAIMNYTLY

SEQ ID NO: 63357 - protein, 22 aa, unidentified
  source 1..22: note = methanogen bacteria
VTVKSGQVNFAEAGSLFFSHMW

SEQ ID NO: 63358 - protein, 10 aa, unidentified
  source 1..10: note = methanogen bacteria
MHGIHNVTIQ

SEQ ID NO: 63359 - protein, 11 aa, unidentified
  source 1..11: note = methanogen bacteria
IRGYDFFLWYE

SEQ ID NO: 63360 - protein, 38 aa, unidentified
  source 1..38: note = methanogen bacteria
TVGSSHISMADVYRDIWYHVFDPDRCDEMTDWAVFTIR

SEQ ID NO: 63361 - protein, 10 aa, unidentified
  source 1..10: note = methanogen bacteria
GITVAGFGGS

SEQ ID NO: 63362 - protein, 26 aa, unidentified
  source 1..26: note = methanogen bacteria
KLSISEQSLSAVYQWSIGDLSGSTWT

SEQ ID NO: 63363 - protein, 16 aa, unidentified
  source 1..16: note = methanogen bacteria
GIYIISSDMIIDYTWG

SEQ ID NO: 63364 - protein, 22 aa, unidentified
  source 1..22: note = methanogen bacteria
VFTNSSEINPVEAGNLFFSHMW

SEQ ID NO: 63365 - protein, 11 aa, unidentified
  source 1..11: note = methanogen bacteria
IQGIKNVTIQY

SEQ ID NO: 63366 - protein, 12 aa, unidentified
  source 1..12: note = methanogen bacteria
FSVAYNFALWYE

SEQ ID NO: 63367 - protein, 10 aa, unidentified
  source 1..10: note = methanogen bacteria
PFVVMIPVTE

SEQ ID NO: 63368 - protein, 16 aa, unidentified
  source 1..16: note = methanogen bacteria
GIYIISSDAILNYTIY

SEQ ID NO: 63369 - protein, 22 aa, unidentified
  source 1..22: note = methanogen bacteria
VTLSSNQVNLTEAGNLFFSHMW

SEQ ID NO: 63370 - protein, 11 aa, unidentified
  source 1..11: note = methanogen bacteria
INGIENVTIQY

SEQ ID NO: 63371 - protein, 11 aa, unidentified
  source 1..11: note = methanogen bacteria
IKGYNFFLWYE

SEQ ID NO: 63372 - protein, 10 aa, unidentified
  source 1..10: note = methanogen bacteria
PVVVQLPVPE

SEQ ID NO: 63373 - protein, 20 aa, unidentified
  source 1..20: note = methanogen bacteria
YLDSFVTSLLWPILEGSSEG

SEQ ID NO: 63374 - protein, 56 aa, unidentified
  source 1..56: note = methanogen bacteria
EALIRNRFGVSFFTILTAMDPNTSTTSPIHSHAYKSILGYLAYNFVPAHVNTASSI

SEQ ID NO: 63375 - protein, 87 aa, unidentified
  source 1..87: note = methanogen bacteria
EVGGSDMSDHTLTVVNQTEPVDMTQYNVTDVQVHGDLTIYTLNTTTPDKQLIRDVFQTFEGKADVTFMSWNFYTYLDNPTMEARLHA

SEQ ID NO: 63376 - protein, 16 aa, unidentified
  source 1..16: note = methanogen bacteria
GIYIISSDSILNYTLF

SEQ ID NO: 63377 - protein, 22 aa, unidentified
  source 1..22: note = methanogen bacteria
ITVNATQVNIGEAGNLFFSHMW

SEQ ID NO: 63378 - protein, 11 aa, unidentified
  source 1..11: note = methanogen bacteria
MHGIKNINIQY

SEQ ID NO: 63379 - protein, 11 aa, unidentified
  source 1..11: note = methanogen bacteria
IIGYDFFLWYE

SEQ ID NO: 63380 - protein, 17 aa, unidentified
  source 1..17: note = methanogen bacteria
GIYIIFSEAFLDYPFVS

SEQ ID NO: 63381 - protein, 21 aa, unidentified
  source 1..21: note = methanogen bacteria
TFNSPDIDTVDMGNLFFSHMW

SEQ ID NO: 63382 - protein, 12 aa, unidentified
  source 1..12: note = methanogen bacteria
DINGIQNVSIQY

SEQ ID NO: 63383 - protein, 12 aa, unidentified
  source 1..12: note = methanogen bacteria
FSKGYPFVLWYE

SEQ ID NO: 63384 - protein, 16 aa, unidentified
  source 1..16: note = methanogen bacteria
GEMQVYLISYIKISLT

SEQ ID NO: 63385 - protein, 11 aa, unidentified
  source 1..11: note = methanogen bacteria
NALSFPKVDAP

SEQ ID NO: 63386 - protein, 15 aa, unidentified
  source 1..15: note = methanogen bacteria
GIYIISSDAILNYTL

SEQ ID NO: 63387 - protein, 22 aa, unidentified
  source 1..22: note = methanogen bacteria
VTVKSGQVNFGEAGTLFFSHMW

SEQ ID NO: 63388 - protein, 12 aa, unidentified
  source 1..12: note = methanogen bacteria
FTKGYNFQLWYE

SEQ ID NO: 63389 - protein, 15 aa, unidentified
  source 1..15: note = methanogen bacteria
GIYIISSDSMMHFGV

SEQ ID NO: 63390 - protein, 21 aa, unidentified
  source 1..21: note = methanogen bacteria
VVTGSSQVNFTEGGNLFFSHM

SEQ ID NO: 63391 - protein, 10 aa, unidentified
  source 1..10: note = methanogen bacteria
MQGIKNVSIQ

SEQ ID NO: 63392 - protein, 11 aa, unidentified
  source 1..11: note = methanogen bacteria
TRGYDFFLWYE

SEQ ID NO: 63393 - protein, 10 aa, unidentified
  source 1..10: note = methanogen bacteria
PVIVQLPLTE

SEQ ID NO: 63394 - protein, 16 aa, unidentified
  source 1..16: note = methanogen bacteria
GIYIISSDAILNHTLA

SEQ ID NO: 63395 - protein, 21 aa, unidentified
  source 1..21: note = methanogen bacteria
VTVGSSAVNTVEAGNLFFSHM

SEQ ID NO: 63396 - protein, 12 aa, unidentified
  source 1..12: note = methanogen bacteria
DMQGIKNVTIQY

SEQ ID NO: 63397 - protein, 12 aa, unidentified
  source 1..12: note = methanogen bacteria
FTKDYNFFLWYE

SEQ ID NO: 63398 - protein, 16 aa, unidentified
  source 1..16: note = methanogen bacteria
GIYIISSDAIMNYTTF

SEQ ID NO: 63399 - protein, 21 aa, unidentified
  source 1..21: note = methanogen bacteria
ISFGSSQVNFSESGNLFFSHM

SEQ ID NO: 63400 - protein, 10 aa, unidentified
  source 1..10: note = methanogen bacteria
MNGIENVSIQ

SEQ ID NO: 63401 - protein, 12 aa, unidentified
  source 1..12: note = methanogen bacteria
FTKGYDFQLWYE

SEQ ID NO: 63402 - protein, 10 aa, unidentified
  source 1..10: note = methanogen bacteria
PVVVQLPFTE

SEQ ID NO: 63403 - protein, 16 aa, unidentified
  source 1..16: note = methanogen bacteria
QMQVYLISRINLSLTS

SEQ ID NO: 63404 - protein, 15 aa, unidentified
  source 1..15: note = methanogen bacteria
PAIPEFLNKFEYAQI

SEQ ID NO: 63405 - protein, 12 aa, unidentified
  source 1..12: note = methanogen bacteria
YQGIMTPELSTQ

SEQ ID NO: 63406 - protein, 10 aa, unidentified
  source 1..10: note = methanogen bacteria
LGISNISIPY

SEQ ID NO: 63407 - protein, 11 aa, unidentified
  source 1..11: note = methanogen bacteria
YLSKTALFSGI

SEQ ID NO: 63408 - protein, 31 aa, unidentified
  source 1..31: note = methanogen bacteria
IDKTIAVTSAYEFLVQFVNCILNPSIISEEF

SEQ ID NO: 63409 - protein, 18 aa, unidentified
  source 1..18: note = methanogen bacteria
TLMSNQLNLNYIGIENLA

SEQ ID NO: 63410 - protein, 13 aa, unidentified
  source 1..13: note = methanogen bacteria
PIRMIYNVNISPF

SEQ ID NO: 63411 - protein, 16 aa, unidentified
  source 1..16: note = methanogen bacteria
GIYIISSDAITYYTAF

SEQ ID NO: 63412 - protein, 21 aa, unidentified
  source 1..21: note = methanogen bacteria
IAVGSAQVNFSEAGNLFFSHM

SEQ ID NO: 63413 - protein, 12 aa, unidentified
  source 1..12: note = methanogen bacteria
FTKGYDFHLWYE

SEQ ID NO: 63414 - protein, 16 aa, unidentified
  source 1..16: note = methanogen bacteria
GIYIITSSEIVHYTIY

SEQ ID NO: 63415 - protein, 22 aa, unidentified
  source 1..22: note = methanogen bacteria
YITVWYDVVNVNEAGNLFFSHM

SEQ ID NO: 63416 - protein, 10 aa, unidentified
  source 1..10: note = methanogen bacteria
MHGIQNVNIQ

SEQ ID NO: 63417 - protein, 12 aa, unidentified
  source 1..12: note = methanogen bacteria
FTKGYDFFLWYD

SEQ ID NO: 63418 - protein, 11 aa, unidentified
  source 1..11: note = methanogen bacteria
LPTIVMLPYSE

SEQ ID NO: 63419 - protein, 21 aa, unidentified
  source 1..21: note = methanogen bacteria
MIEYNKFINDIVFSNGGNINS

SEQ ID NO: 63420 - protein, 27 aa, unidentified
  source 1..27: note = methanogen bacteria
MNLSSILFENVSSISDLLILINANNLS

SEQ ID NO: 63421 - protein, 37 aa, unidentified
  source 1..37: note = methanogen bacteria
SKDFILNHFANSHMLDCYGASYIVNNLTIFHQFTLYP

SEQ ID NO: 63422 - protein, 10 aa, unidentified
  source 1..10: note = methanogen bacteria
DLISLISSLV

SEQ ID NO: 63423 - protein, 11 aa, unidentified
  source 1..11: note = methanogen bacteria
INTHIIIMHHN

SEQ ID NO: 63424 - protein, 11 aa, unidentified
  source 1..11: note = methanogen bacteria
GLFTNFLTFYW

SEQ ID NO: 63425 - protein, 19 aa, unidentified
  source 1..19: note = methanogen bacteria
VGLLNSIYPHYHLFSGIDL

SEQ ID NO: 63426 - protein, 13 aa, unidentified
  source 1..13: note = methanogen bacteria
YPVWGLMGFKGIS

SEQ ID NO: 63427 - protein, 17 aa, unidentified
  source 1..17: note = methanogen bacteria
RGLEGVMEFSIFGIEGD

SEQ ID NO: 63428 - protein, 19 aa, unidentified
  source 1..19: note = methanogen bacteria
GVHVQVFAEDFILDLLGVF

SEQ ID NO: 63429 - protein, 15 aa, unidentified
  source 1..15: note = methanogen bacteria
MGDAYPFDVLGVDLS

SEQ ID NO: 63430 - protein, 17 aa, unidentified
  source 1..17: note = methanogen bacteria
HVQIIFEDFIYRIIGVL

SEQ ID NO: 63431 - protein, 27 aa, unidentified
  source 1..27: note = methanogen bacteria
MNLSSILFENVSSISDLLILINANDFS

SEQ ID NO: 63432 - protein, 37 aa, unidentified
  source 1..37: note = methanogen bacteria
SKDFILNHFANSHMLACYGSSYIVNNLTIFSQFTLYP

SEQ ID NO: 63433 - protein, 10 aa, unidentified
  source 1..10: note = methanogen bacteria
DLISLISSLV

SEQ ID NO: 63434 - protein, 10 aa, unidentified
  source 1..10: note = methanogen bacteria
CFWQFSTARY

SEQ ID NO: 63435 - protein, 27 aa, unidentified
  source 1..27: note = methanogen bacteria
MHTIKISSIDLTYIINGLLNGSLVQVY

SEQ ID NO: 63436 - protein, 15 aa, unidentified
  source 1..15: note = methanogen bacteria
STSAGEVIKTYKGFT

SEQ ID NO: 63437 - protein, 10 aa, unidentified
  source 1..10: note = methanogen bacteria
RTFNINNTSI

SEQ ID NO: 63438 - protein, 10 aa, unidentified
  source 1..10: note = methanogen bacteria
CFWDFSTSRY

SEQ ID NO: 63439 - protein, 27 aa, unidentified
  source 1..27: note = methanogen bacteria
IKSVNLSSVNITYIINGLINGNLVQVY

SEQ ID NO: 63440 - protein, 16 aa, unidentified
  source 1..16: note = methanogen bacteria
SIQAGEIIKTFKGFTS

SEQ ID NO: 63441 - protein, 10 aa, unidentified
  source 1..10: note = methanogen bacteria
MTFNINNTSI

SEQ ID NO: 63442 - protein, 12 aa, unidentified
  source 1..12: note = methanogen bacteria
EYHATIGINIDL

SEQ ID NO: 63443 - protein, 13 aa, unidentified
  source 1..13: note = methanogen bacteria
FDAKIDVAMHFGP

SEQ ID NO: 63444 - protein, 23 aa, unidentified
  source 1..23: note = methanogen bacteria
CVMINGTPANIRSLIVMISGLFG

SEQ ID NO: 63445 - protein, 10 aa, unidentified
  source 1..10: note = methanogen bacteria
TPSDISFPFI

SEQ ID NO: 63446 - protein, 17 aa, unidentified
  source 1..17: note = methanogen bacteria
RGLEGVMEFDVLGVEGD

SEQ ID NO: 63447 - protein, 19 aa, unidentified
  source 1..19: note = methanogen bacteria
GVHVQVLAEDFILGLLGVF

SEQ ID NO: 63448 - protein, 27 aa, unidentified
  source 1..27: note = methanogen bacteria
MNLSSILFENLFSISDLLILINVNDLS

SEQ ID NO: 63449 - protein, 35 aa, unidentified
  source 1..35: note = methanogen bacteria
DFILNHFANSNMLDCYGSSYIVNNLVIFNQFTLYP

SEQ ID NO: 63450 - protein, 10 aa, unidentified
  source 1..10: note = methanogen bacteria
DLVSLISSLV

SEQ ID NO: 63451 - protein, 17 aa, unidentified
  source 1..17: note = methanogen bacteria
FNYGMFNFYLGKNNVFN

SEQ ID NO: 63452 - protein, 19 aa, unidentified
  source 1..19: note = methanogen bacteria
MMHINELIKCDIRIMVVMV

SEQ ID NO: 63453 - protein, 14 aa, unidentified
  source 1..14: note = methanogen bacteria
GSMQVYLISYIKVS

SEQ ID NO: 63454 - protein, 12 aa, unidentified
  source 1..12: note = methanogen bacteria
FLSDEFLFSSTW

SEQ ID NO: 63455 - protein, 27 aa, unidentified
  source 1..27: note = methanogen bacteria
GASGSNVSDSFVYIANGFLNPTIVSIQ

SEQ ID NO: 63456 - protein, 14 aa, unidentified
  source 1..14: note = methanogen bacteria
SGTQSLFFIKLGEI

SEQ ID NO: 63457 - protein, 10 aa, unidentified
  source 1..10: note = methanogen bacteria
IHLVNGSGFT

SEQ ID NO: 63458 - protein, 15 aa, unidentified
  source 1..15: note = methanogen bacteria
LGGQVPFDIAGIHVT

SEQ ID NO: 63459 - protein, 16 aa, unidentified
  source 1..16: note = methanogen bacteria
VQIICEDSVMGLIRGF

SEQ ID NO: 63460 - protein, 69 aa, unidentified
  source 1..69: note = methanogen bacteria
TMNLNEYNEFRIHIGRVVYVKEILKNGIFPPFISHKNMLTFGYALNIFYGVLTTYIPILISLITGSSIM

SEQ ID NO: 63461 - protein, 59 aa, unidentified
  source 1..59: note = methanogen bacteria
IEHKTYGDYTIFNQNMMNSSSIDVYNETNKITDWFVYNETNKITDWFSLETKTGLNYSF

SEQ ID NO: 63462 - protein, 18 aa, unidentified
  source 1..18: note = methanogen bacteria
KLFPWLIMPSFLTIIQFA

SEQ ID NO: 63463 - protein, 11 aa, unidentified
  source 1..11: note = methanogen bacteria
VKPNANYFNYI

SEQ ID NO: 63464 - protein, 17 aa, unidentified
  source 1..17: note = methanogen bacteria
NISFLNSLFRHWIVGNE

SEQ ID NO: 63465 - protein, 17 aa, unidentified
  source 1..17: note = methanogen bacteria
HFLGDQIPFDIAGVHIT

SEQ ID NO: 63466 - protein, 18 aa, unidentified
  source 1..18: note = methanogen bacteria
IHIQVIFEDALIRLFGVF

SEQ ID NO: 63467 - protein, 30 aa, unidentified
  source 1..30: note = methanogen bacteria
SSLETVTTTPSVSLVIPGVEMPGSSIYVPL

SEQ ID NO: 63468 - protein, 92 aa, unidentified
  source 1..92: note = methanogen bacteria
INGLDQGVELKGGSQAVLQLNDNISSIDLQNQLSHDLGTSDVKVTNNGDNQVTVDLESSVNSTAFANAIKGEGKVISFNSIGPVLSEEAMGQ

SEQ ID NO: 63469 - protein, 10 aa, unidentified
  source 1..10: note = methanogen bacteria
IIMPEATTLS

SEQ ID NO: 63470 - protein, 22 aa, unidentified
  source 1..22: note = methanogen bacteria
MIDFNNLINDIITTKISCITSL

SEQ ID NO: 63471 - protein, 24 aa, unidentified
  source 1..24: note = methanogen bacteria
LHSSYPTFMDAVFGLSNPQNVINN

SEQ ID NO: 63472 - protein, 22 aa, unidentified
  source 1..22: note = methanogen bacteria
MIEYNKLINDIVFSNGGNINSL

SEQ ID NO: 63473 - protein, 10 aa, unidentified
  source 1..10: note = methanogen bacteria
FSSGNSMDYT

SEQ ID NO: 63474 - protein, 10 aa, unidentified
  source 1..10: note = methanogen bacteria
GELLFENLDS

SEQ ID NO: 63475 - protein, 19 aa, unidentified
  source 1..19: note = methanogen bacteria
MLQSTYPTFMDAVFALKNP

SEQ ID NO: 63476 - protein, 18 aa, unidentified
  source 1..18: note = methanogen bacteria
GVRAGWTLWDGGWDAYEV

SEQ ID NO: 63477 - protein, 19 aa, unidentified
  source 1..19: note = methanogen bacteria
KLQTFSLSIFIEPANMPLW

SEQ ID NO: 63478 - protein, 12 aa, unidentified
  source 1..12: note = methanogen bacteria
FFSLFGTSTASL

SEQ ID NO: 63479 - protein, 11 aa, unidentified
  source 1..11: note = methanogen bacteria
IDAHGHLNFFQ

SEQ ID NO: 63480 - protein, 42 aa, unidentified
  source 1..42: note = methanogen bacteria
MGKPMIIMGKSIADYDLVDFLRAFIDRGSWDSGNGVPMLCPY

SEQ ID NO: 63481 - protein, 10 aa, unidentified
  source 1..10: note = methanogen bacteria
AKYLIEAPDW

SEQ ID NO: 63482 - protein, 21 aa, unidentified
  source 1..21: note = methanogen bacteria
MIEYNTLLNDIIHTKINSITS

SEQ ID NO: 63483 - protein, 15 aa, unidentified
  source 1..15: note = methanogen bacteria
LSATYPTFIDALFGL

SEQ ID NO: 63484 - protein, 22 aa, unidentified
  source 1..22: note = methanogen bacteria
MIEYNELINKLMFTNVNDIVSL

SEQ ID NO: 63485 - protein, 22 aa, unidentified
  source 1..22: note = methanogen bacteria
IEYNYLLNDIILVKTSNIVSLN

SEQ ID NO: 63486 - protein, 11 aa, unidentified
  source 1..11: note = methanogen bacteria
SFNYRFEDPLS

SEQ ID NO: 63487 - protein, 18 aa, unidentified
  source 1..18: note = methanogen bacteria
LGGIPLFNSTLKANATTN

SEQ ID NO: 63488 - protein, 80 aa, unidentified
  source 1..80: note = methanogen bacteria
SQSIANQHWTLNPLELIFYRAGFTLEVFEKIIPLAGTTHGHILGMIFSSGSPRTFIGEYVLKYTVCLTSTLFGPVMLDFG

SEQ ID NO: 63489 - protein, 19 aa, unidentified
  source 1..19: note = methanogen bacteria
IPYFQLSYYPIFIYPEYGL

SEQ ID NO: 63490 - protein, 18 aa, unidentified
  source 1..18: note = methanogen bacteria
YQLEFIKFNKAYSFNGID

SEQ ID NO: 63491 - protein, 11 aa, unidentified
  source 1..11: note = methanogen bacteria
SFNYRFEDPLD

SEQ ID NO: 63492 - protein, 18 aa, unidentified
  source 1..18: note = methanogen bacteria
LGGIPLFDSALKASATTN

SEQ ID NO: 63493 - protein, 80 aa, unidentified
  source 1..80: note = methanogen bacteria
SQSIAGQHWTLNPLELIFYRAAFTLEVFERILSLAGTTNGKILAMIFSSGSPRTFIGNYVLTDNVCLTSTLFGPVMLDFG

SEQ ID NO: 63494 - protein, 17 aa, unidentified
  source 1..17: note = methanogen bacteria
MGTINSTIEYFKNITTE

SEQ ID NO: 63495 - protein, 22 aa, unidentified
  source 1..22: note = methanogen bacteria
MIEYNYLINDVLTKNVNALDSF

SEQ ID NO: 63496 - protein, 29 aa, unidentified
  source 1..29: note = methanogen bacteria
LNATYPTFMDAVYALSNPQNVINSMLNPP

SEQ ID NO: 63497 - protein, 12 aa, unidentified
  source 1..12: note = methanogen bacteria
YLRYLYFRKGRR

SEQ ID NO: 63498 - protein, 22 aa, unidentified
  source 1..22: note = methanogen bacteria
MIEYNNLINDIITTKISTITSL

SEQ ID NO: 63499 - protein, 32 aa, unidentified
  source 1..32: note = methanogen bacteria
LHAAYPTFMDAIYGLSNPQNVINNVLSPPPTI

SEQ ID NO: 63500 - protein, 23 aa, unidentified
  source 1..23: note = methanogen bacteria
MIEYNNLINGIITTKISNIISLN

SEQ ID NO: 63501 - protein, 22 aa, unidentified
  source 1..22: note = methanogen bacteria
MIEYNNLINDIIFTQTGNINSL

SEQ ID NO: 63502 - protein, 14 aa, unidentified
  source 1..14: note = methanogen bacteria
ELTRTSMNLTNINS

SEQ ID NO: 63503 - protein, 14 aa, unidentified
  source 1..14: note = methanogen bacteria
QVYLISHIQLPLTR

SEQ ID NO: 63504 - protein, 21 aa, unidentified
  source 1..21: note = methanogen bacteria
NEIYGANSVFNSDNFGNDALN

SEQ ID NO: 63505 - protein, 22 aa, unidentified
  source 1..22: note = methanogen bacteria
MIEYNNIINNIISIDTTNIVSL

SEQ ID NO: 63506 - protein, 17 aa, unidentified
  source 1..17: note = methanogen bacteria
MADEIATLISSVGLTSE

SEQ ID NO: 63507 - protein, 10 aa, unidentified
  source 1..10: note = methanogen bacteria
LGNMSQVKGI

SEQ ID NO: 63508 - protein, 23 aa, unidentified
  source 1..23: note = methanogen bacteria
SLINHRAIHISTIYTNFFMFPLT

SEQ ID NO: 63509 - protein, 23 aa, unidentified
  source 1..23: note = methanogen bacteria
GQSPEVTLIFANIPLGQASFIDV

SEQ ID NO: 63510 - protein, 11 aa, unidentified
  source 1..11: note = methanogen bacteria
YTPVQGSGTHV

SEQ ID NO: 63511 - protein, 15 aa, unidentified
  source 1..15: note = methanogen bacteria
MNVINLIMTILPQLP

SEQ ID NO: 63512 - protein, 22 aa, unidentified
  source 1..22: note = methanogen bacteria
PGVIENKTLMNFLHIKEMFYHV

SEQ ID NO: 63513 - protein, 29 aa, unidentified
  source 1..29: note = methanogen bacteria
LHASYPTFMDAIYGLSNPQNVINNILSPQ

SEQ ID NO: 63514 - protein, 11 aa, unidentified
  source 1..11: note = methanogen bacteria
SFNYRFEDPLK

SEQ ID NO: 63515 - protein, 18 aa, unidentified
  source 1..18: note = methanogen bacteria
LGGIPLFNSTLKANATTN

SEQ ID NO: 63516 - protein, 80 aa, unidentified
  source 1..80: note = methanogen bacteria
SQSIASQHWTLNPLELVFYRAAFTLEVFEKIIPLAGTTHGKILSMIFSSGSPRTFIGEYVLHYNVCLTSTIFGPVMLDFG

SEQ ID NO: 63517 - protein, 13 aa, unidentified
  source 1..13: note = methanogen bacteria
FFKYAVTHDVFHI

SEQ ID NO: 63518 - protein, 19 aa, unidentified
  source 1..19: note = methanogen bacteria
YTIPVKNSFANVRNLIILI

SEQ ID NO: 63519 - protein, 10 aa, unidentified
  source 1..10: note = methanogen bacteria
TPPNISITYI

SEQ ID NO: 63520 - protein, 46 aa, unidentified
  source 1..46: note = methanogen bacteria
TNLFANAIAVIQEVIYQTFNVYFMGSSTYLAATAITYAFEKFVGSL

SEQ ID NO: 63521 - protein, 33 aa, unidentified
  source 1..33: note = methanogen bacteria
GLPIFDAVNLTFTSISTGGMSIKNANIGFYQNN

SEQ ID NO: 63522 - protein, 34 aa, unidentified
  source 1..34: note = methanogen bacteria
NNIVPIEGIFTVVSAVTTTGANIVPPQELAVWNG

SEQ ID NO: 63523 - protein, 32 aa, unidentified
  source 1..32: note = methanogen bacteria
YGFDPFTALFDVISVTSNNGLSTGIVYGGLPL

SEQ ID NO: 63524 - protein, 15 aa, unidentified
  source 1..15: note = methanogen bacteria
IGYHLENHTFAISFP

SEQ ID NO: 63525 - protein, 11 aa, unidentified
  source 1..11: note = methanogen bacteria
NASTKTGEFIA

SEQ ID NO: 63526 - protein, 19 aa, unidentified
  source 1..19: note = methanogen bacteria
YTIPVDNSYANVRNLIILI

SEQ ID NO: 63527 - protein, 12 aa, unidentified
  source 1..12: note = methanogen bacteria
TPPNISIPYIND

SEQ ID NO: 63528 - protein, 13 aa, unidentified
  source 1..13: note = methanogen bacteria
WQAGVSVHLETYD

SEQ ID NO: 63529 - protein, 11 aa, unidentified
  source 1..11: note = methanogen bacteria
GKSNTAVIFGP

SEQ ID NO: 63530 - protein, 20 aa, unidentified
  source 1..20: note = methanogen bacteria
RFHIRVNGAPANVRCMVVML

SEQ ID NO: 63531 - protein, 11 aa, unidentified
  source 1..11: note = methanogen bacteria
ATPSDISFQYV

SEQ ID NO: 63532 - protein, 24 aa, unidentified
  source 1..24: note = methanogen bacteria
MIIENFVNNLPITESGAVASSSLS

SEQ ID NO: 63533 - protein, 10 aa, unidentified
  source 1..10: note = methanogen bacteria
AGPTLEFSQI

SEQ ID NO: 63534 - protein, 27 aa, unidentified
  source 1..27: note = methanogen bacteria
LHATYPTFMDAIYAMSNPQNVINNVLT

SEQ ID NO: 63535 - protein, 10 aa, unidentified
  source 1..10: note = methanogen bacteria
FYGPLNTPLQ

SEQ ID NO: 63536 - protein, 18 aa, unidentified
  source 1..18: note = methanogen bacteria
FHEYSMIIPVIIGDFSVT

SEQ ID NO: 63537 - protein, 13 aa, unidentified
  source 1..13: note = methanogen bacteria
DYANLGLIQLIYQ

SEQ ID NO: 63538 - protein, 12 aa, unidentified
  source 1..12: note = methanogen bacteria
RILRNDYTLRSL

SEQ ID NO: 63539 - protein, 13 aa, unidentified
  source 1..13: note = methanogen bacteria
TDKGFSYNIFSHS

SEQ ID NO: 63540 - protein, 27 aa, unidentified
  source 1..27: note = methanogen bacteria
TGAIMPKSFALNYEATQSQVLNSWVDV

SEQ ID NO: 63541 - protein, 10 aa, unidentified
  source 1..10: note = methanogen bacteria
PFFTSLPRNG

SEQ ID NO: 63542 - protein, 10 aa, unidentified
  source 1..10: note = methanogen bacteria
VMGDFEIRSL

SEQ ID NO: 63543 - protein, 11 aa, unidentified
  source 1..11: note = methanogen bacteria
VKPNPLYLDYI

SEQ ID NO: 63544 - protein, 17 aa, unidentified
  source 1..17: note = methanogen bacteria
NILFFSMLFKKWISGNE

SEQ ID NO: 63545 - protein, 14 aa, unidentified
  source 1..14: note = methanogen bacteria
MDLMITMMILPQLP

SEQ ID NO: 63546 - protein, 23 aa, unidentified
  source 1..23: note = methanogen bacteria
MPGVIGNQTLMNFLQIKEMFYHI

SEQ ID NO: 63547 - protein, 10 aa, unidentified
  source 1..10: note = methanogen bacteria
THYFAHHELK

SEQ ID NO: 63548 - protein, 10 aa, unidentified
  source 1..10: note = methanogen bacteria
QSTHTTGFFT

SEQ ID NO: 63549 - protein, 24 aa, unidentified
  source 1..24: note = methanogen bacteria
YTIPVNNSFANVRNLIIMIAGLVG

SEQ ID NO: 63550 - protein, 11 aa, unidentified
  source 1..11: note = methanogen bacteria
TPPNISITYIN

SEQ ID NO: 63551 - protein, 14 aa, unidentified
  source 1..14: note = methanogen bacteria
MDADSYGAVVTFTG

SEQ ID NO: 63552 - protein, 66 aa, unidentified
  source 1..66: note = methanogen bacteria
KNYNSASKNTDFIVSKNDVKMDLSVFNSTYGEKTIVNALLSDLKGNLINEKIKLEIAGNLYEITSN

SEQ ID NO: 63553 - protein, 20 aa, unidentified
  source 1..20: note = methanogen bacteria
FTVPVILNASKYDVKASFEG

SEQ ID NO: 63554 - protein, 58 aa, unidentified
  source 1..58: note = methanogen bacteria
NYNKNNAVKSFTISKAKLDLSLTMDNATYGSYLVLNNKLKHDLILNINNKNYSVKAFS

SEQ ID NO: 63555 - protein, 10 aa, unidentified
  source 1..10: note = methanogen bacteria
GGYEAKIIFN

SEQ ID NO: 63556 - protein, 57 aa, unidentified
  source 1..57: note = methanogen bacteria
NSQIIKVSVNRATPELIVNIPDISYGSYINADVKLIGIKLDENLVLTINNKDYTFKA

SEQ ID NO: 63557 - protein, 39 aa, unidentified
  source 1..39: note = methanogen bacteria
NSISKDVNVNVGKIDPKLVIDISDSKYGENPIADVKLTG

SEQ ID NO: 63558 - protein, 18 aa, unidentified
  source 1..18: note = methanogen bacteria
LNENVVLTVNNKKYTFKA

SEQ ID NO: 63559 - protein, 36 aa, unidentified
  source 1..36: note = methanogen bacteria
GRYPVAPVDVIKTILSPFIPSLAVSPQVTSIVFNIR

SEQ ID NO: 63560 - protein, 24 aa, unidentified
  source 1..24: note = methanogen bacteria
MADPYDKLPQIVYWLMGSLSSVNF

SEQ ID NO: 63561 - protein, 18 aa, unidentified
  source 1..18: note = methanogen bacteria
SVGGIPILKPSIRYLLKP

SEQ ID NO: 63562 - protein, 87 aa, unidentified
  source 1..87: note = methanogen bacteria
RSVKEFSITTATNPLSTLQNRADFTLHVLNLLDFLGGDFGLTHGKLLASAIPGSELGPRMTVGKLIAWRSEVTITPTLIGQMVIDFG

SEQ ID NO: 63563 - protein, 10 aa, unidentified
  source 1..10: note = methanogen bacteria
LSGDYTLRSL

SEQ ID NO: 63564 - protein, 32 aa, unidentified
  source 1..32: note = methanogen bacteria
NFASICGEFGGIYARLSFGLWDFDLWTYRGIW

SEQ ID NO: 63565 - protein, 23 aa, unidentified
  source 1..23: note = methanogen bacteria
LVDQVPSTDWLDNYSTYELAFLF

SEQ ID NO: 63566 - protein, 16 aa, unidentified
  source 1..16: note = methanogen bacteria
YAGFMESFGHVTELVS

SEQ ID NO: 63567 - protein, 22 aa, unidentified
  source 1..22: note = methanogen bacteria
ASMLTGGFWNLYPEQENIIKKI

SEQ ID NO: 63568 - protein, 11 aa, unidentified
  source 1..11: note = methanogen bacteria
VSGLGADALAG

SEQ ID NO: 63569 - protein, 19 aa, unidentified
  source 1..19: note = methanogen bacteria
EPILNAMGAAQTISYATDY

SEQ ID NO: 63570 - protein, 12 aa, unidentified
  source 1..12: note = methanogen bacteria
AFLGSTDSVAVY

SEQ ID NO: 63571 - protein, 11 aa, unidentified
  source 1..11: note = methanogen bacteria
FPVNMNYLTSP

SEQ ID NO: 63572 - protein, 21 aa, unidentified
  source 1..21: note = methanogen bacteria
AYVNSFNFDLMYLWIYDAPFP

SEQ ID NO: 63573 - protein, 11 aa, unidentified
  source 1..11: note = methanogen bacteria
ALNFAAIVYIE

SEQ ID NO: 63574 - protein, 11 aa, unidentified
  source 1..11: note = methanogen bacteria
LQYYPISTFDL

SEQ ID NO: 63575 - protein, 56 aa, unidentified
  source 1..56: note = methanogen bacteria
IELSGLISGILASNTYTDISSALNAVTAYLPFDFDINSISSSINSSLHEVGRYVLN

SEQ ID NO: 63576 - protein, 13 aa, unidentified
  source 1..13: note = methanogen bacteria
LVMSLNLNSINQT

SEQ ID NO: 63577 - protein, 57 aa, unidentified
  source 1..57: note = methanogen bacteria
IELTGLISGILASNTYTDINSSLNAVTSYLPFNFDVNSVSSSINSSLHEVGSYILNY

SEQ ID NO: 63578 - protein, 15 aa, unidentified
  source 1..15: note = methanogen bacteria
LIKFYYVNHVFKVSW

SEQ ID NO: 63579 - protein, 10 aa, unidentified
  source 1..10: note = methanogen bacteria
NKSTNTEAFF

SEQ ID NO: 63580 - protein, 20 aa, unidentified
  source 1..20: note = methanogen bacteria
KYTIPVNSSYANVRNLIILI

SEQ ID NO: 63581 - protein, 11 aa, unidentified
  source 1..11: note = methanogen bacteria
TPPNISVPYIN

SEQ ID NO: 63582 - protein, 16 aa, unidentified
  source 1..16: note = methanogen bacteria
PRNISISDKNEFYATG

SEQ ID NO: 63583 - protein, 13 aa, unidentified
  source 1..13: note = methanogen bacteria
NNLYHDSNFNIPF

SEQ ID NO: 63584 - protein, 12 aa, unidentified
  source 1..12: note = methanogen bacteria
NKTSNTEMFIAP

SEQ ID NO: 63585 - protein, 24 aa, unidentified
  source 1..24: note = methanogen bacteria
YHVYVNNTPANVRTLIIMIGGLFG

SEQ ID NO: 63586 - protein, 11 aa, unidentified
  source 1..11: note = methanogen bacteria
TPNNISFHFVE

SEQ ID NO: 63587 - protein, 11 aa, unidentified
  source 1..11: note = methanogen bacteria
YRPFIYNNLKL

SEQ ID NO: 63588 - protein, 20 aa, unidentified
  source 1..20: note = methanogen bacteria
VLGSNTKQLIKIFFGDERYT

SEQ ID NO: 63589 - protein, 11 aa, unidentified
  source 1..11: note = methanogen bacteria
KYNMIANSSYL

SEQ ID NO: 63590 - protein, 14 aa, unidentified
  source 1..14: note = methanogen bacteria
NNFYSDKNFQIPFG

SEQ ID NO: 63591 - protein, 12 aa, unidentified
  source 1..12: note = methanogen bacteria
NKSSNTEAIIAP

SEQ ID NO: 63592 - protein, 24 aa, unidentified
  source 1..24: note = methanogen bacteria
YHVYVGETPANVRTLIIMIGGLFG

SEQ ID NO: 63593 - protein, 12 aa, unidentified
  source 1..12: note = methanogen bacteria
TPNEISFQYVED

SEQ ID NO: 63594 - protein, 39 aa, unidentified
  source 1..39: note = methanogen bacteria
TKFYLTNQHMPNMTEALKPIVGVFLLQTETSISCGLNSV

SEQ ID NO: 63595 - protein, 10 aa, unidentified
  source 1..10: note = methanogen bacteria
HANETNFSLH

SEQ ID NO: 63596 - protein, 15 aa, unidentified
  source 1..15: note = methanogen bacteria
LKPIFHVPADYVYSS

SEQ ID NO: 63597 - protein, 10 aa, unidentified
  source 1..10: note = methanogen bacteria
MSSLISIPTL

SEQ ID NO: 63598 - protein, 23 aa, unidentified
  source 1..23: note = methanogen bacteria
PGVTHNQTFAQFIHLKDIFYYLG

SEQ ID NO: 63599 - protein, 36 aa, unidentified
  source 1..36: note = methanogen bacteria
GRYPVAPIDVIKTILSPIFPSLAVSPELNSIVFTIR

SEQ ID NO: 63600 - protein, 24 aa, unidentified
  source 1..24: note = methanogen bacteria
MADPYDKLPQITYWLMGSLSAVNF

SEQ ID NO: 63601 - protein, 15 aa, unidentified
  source 1..15: note = methanogen bacteria
MLLFGATPEVLEYAM

SEQ ID NO: 63602 - protein, 16 aa, unidentified
  source 1..16: note = methanogen bacteria
NIYGAASIYGNNIPIA

SEQ ID NO: 63603 - protein, 20 aa, unidentified
  source 1..20: note = methanogen bacteria
SQIISLFGSGNELYMEFAVK

SEQ ID NO: 63604 - protein, 10 aa, unidentified
  source 1..10: note = methanogen bacteria
MSSLISIPTM

SEQ ID NO: 63605 - protein, 23 aa, unidentified
  source 1..23: note = methanogen bacteria
PSVTHNQTFAQFIHLKDYFYYLG

SEQ ID NO: 63606 - protein, 10 aa, unidentified
  source 1..10: note = methanogen bacteria
MSSLISIPTL

SEQ ID NO: 63607 - protein, 23 aa, unidentified
  source 1..23: note = methanogen bacteria
PGVTHDQTFAQFIHLKDYFYYLG

SEQ ID NO: 63608 - protein, 26 aa, unidentified
  source 1..26: note = methanogen bacteria
PGMLENKTLVNFLQIKEMFYHIGLIQ

SEQ ID NO: 63609 - protein, 19 aa, unidentified
  source 1..19: note = methanogen bacteria
MININDIIFFNFNTINSFN

SEQ ID NO: 63610 - protein, 10 aa, unidentified
  source 1..10: note = methanogen bacteria
FSAANSMDYS

SEQ ID NO: 63611 - protein, 10 aa, unidentified
  source 1..10: note = methanogen bacteria
GNLLFENITS

SEQ ID NO: 63612 - protein, 14 aa, unidentified
  source 1..14: note = methanogen bacteria
VGPEEIINALKNAD

SEQ ID NO: 63613 - protein, 10 aa, unidentified
  source 1..10: note = methanogen bacteria
YSAAGITSSI

SEQ ID NO: 63614 - protein, 17 aa, unidentified
  source 1..17: note = methanogen bacteria
SQWVGSFITNPTASSLV

SEQ ID NO: 63615 - protein, 36 aa, unidentified
  source 1..36: note = methanogen bacteria
GRYQVAPIDVIKTILSPIFPSLSVSPEINSIVFTIR

SEQ ID NO: 63616 - protein, 24 aa, unidentified
  source 1..24: note = methanogen bacteria
MADPYDKLPQITYWLMGSLSAVNF

SEQ ID NO: 63617 - protein, 18 aa, unidentified
  source 1..18: note = methanogen bacteria
MIDYNTIISLNTNDIVSL

SEQ ID NO: 63618 - protein, 53 aa, unidentified
  source 1..53: note = methanogen bacteria
IAILSGASSSATYADINGVLSSLSSYLPWSFDVNSISSSLNSSVQEIGKFLLN

SEQ ID NO: 63619 - protein, 58 aa, unidentified
  source 1..58: note = methanogen bacteria
LSTFVTWILANNPDANVNSAMYQISAYLPAGVDINSINSYLDSVINNVGSYILNYSVK

SEQ ID NO: 63620 - protein, 11 aa, unidentified
  source 1..11: note = methanogen bacteria
LGFSTVSGDPF

SEQ ID NO: 63621 - protein, 14 aa, unidentified
  source 1..14: note = methanogen bacteria
ATWDNMWGLGSQTL

SEQ ID NO: 63622 - protein, 59 aa, unidentified
  source 1..59: note = methanogen bacteria
ELSIFVSWILANNPNTDVNSVMSQISSYLPSYVDVNSLNSYIDSVISNVGSYLLNYSVK

SEQ ID NO: 63623 - protein, 11 aa, unidentified
  source 1..11: note = methanogen bacteria
GPQMGIDPLFT

SEQ ID NO: 63624 - protein, 59 aa, unidentified
  source 1..59: note = methanogen bacteria
EVSTFVTWILANNPDTDINSAMYQISGYLPPGVDVNSINSYLDSAINDIGSYILNYSVK

SEQ ID NO: 63625 - protein, 23 aa, unidentified
  source 1..23: note = methanogen bacteria
MTDIFNPIVRPITHIFLMGSSKG

SEQ ID NO: 63626 - protein, 61 aa, unidentified
  source 1..61: note = methanogen bacteria
RLQMGIKLNTIFCSMTGTMSSTSILHTHLLKSILGAVITPIMGPFVQSGINTGVGLYAYVP

SEQ ID NO: 63627 - protein, 83 aa, unidentified
  source 1..83: note = methanogen bacteria
TVAFAGAEADCYTVDVVNPTDNIDLGNISTHVLDVQNSTNKITYYIEPNYNEMQLLNDLKVPLNNSCEYYTVSWNIYSYLQDD

SEQ ID NO: 63628 - protein, 54 aa, unidentified
  source 1..54: note = methanogen bacteria
MAIFSGASSSSTYVDINAALSSISTYLPWRFDVNSISTSINSSLQEIGRYVLNY

SEQ ID NO: 63629 - protein, 16 aa, unidentified
  source 1..16: note = methanogen bacteria
TGQIDITPDYTVRFGQ

SEQ ID NO: 63630 - protein, 16 aa, unidentified
  source 1..16: note = methanogen bacteria
NMIWARSLRLGLSLKS

SEQ ID NO: 63631 - protein, 34 aa, unidentified
  source 1..34: note = methanogen bacteria
DFLLEHKYHWKDFSLNYLFPARILEKVGMDASGK

SEQ ID NO: 63632 - protein, 12 aa, unidentified
  source 1..12: note = methanogen bacteria
NKLSKKVQITVK

SEQ ID NO: 63633 - protein, 61 aa, unidentified
  source 1..61: note = methanogen bacteria
YEMSSLITSMLASSSYMEFNASLSQFITYLPVEGDPTSVSTYLNNSFESISGFLLNYSATA

SEQ ID NO: 63634 - protein, 16 aa, unidentified
  source 1..16: note = methanogen bacteria
GHMQVYMISQIKLPLT

SEQ ID NO: 63635 - protein, 14 aa, unidentified
  source 1..14: note = methanogen bacteria
IKFYYVNNVFKISW

SEQ ID NO: 63636 - protein, 11 aa, unidentified
  source 1..11: note = methanogen bacteria
NKSTNTEAFFT

SEQ ID NO: 63637 - protein, 20 aa, unidentified
  source 1..20: note = methanogen bacteria
KYTIPVNSSYANVRDLIILI

SEQ ID NO: 63638 - protein, 11 aa, unidentified
  source 1..11: note = methanogen bacteria
TPPNISVPYIN

SEQ ID NO: 63639 - protein, 57 aa, unidentified
  source 1..57: note = methanogen bacteria
FELSGMLSGFLATNSATDINATLSSVSAYLPWSIDINSISSQINSSMHEIGRYLLNY

SEQ ID NO: 63640 - protein, 57 aa, unidentified
  source 1..57: note = methanogen bacteria
MEVTGILTGFLATNSDAGVNAAISSLSQYIPGGLDINSISASIYSSAREIGTYVLNY

SEQ ID NO: 63641 - protein, 11 aa, unidentified
  source 1..11: note = methanogen bacteria
VTPNIIYLDYI

SEQ ID NO: 63642 - protein, 19 aa, unidentified
  source 1..19: note = methanogen bacteria
IGAPHNIVMYTVSKIPFES

SEQ ID NO: 63643 - protein, 17 aa, unidentified
  source 1..17: note = methanogen bacteria
NIDFFTRIFERWIIGNE

SEQ ID NO: 63644 - protein, 15 aa, unidentified
  source 1..15: note = methanogen bacteria
KLSATYPTFIDAIFG

SEQ ID NO: 63645 - protein, 55 aa, unidentified
  source 1..55: note = methanogen bacteria
ELSGMISGFLASNSYRDINNSLTMVSTYLPWKFDINSISASMNSSLQQVGSYVLN

SEQ ID NO: 63646 - protein, 35 aa, unidentified
  source 1..35: note = methanogen bacteria
VTGNYNVLAKLIEMFSVSNCYKYLIFNVSPTYAHL

SEQ ID NO: 63647 - protein, 11 aa, unidentified
  source 1..11: note = methanogen bacteria
GFKFSYYFYRN

SEQ ID NO: 63648 - protein, 12 aa, unidentified
  source 1..12: note = methanogen bacteria
NITFIHLHGDLG

SEQ ID NO: 63649 - protein, 56 aa, unidentified
  source 1..56: note = methanogen bacteria
EIMTILSGTLSSSMYVDINSLLSSLSTYLPWNFDINSISASITSSLQDIGKYVLDY

SEQ ID NO: 63650 - protein, 16 aa, unidentified
  source 1..16: note = methanogen bacteria
SYTKVTTSIFLIPLFG

SEQ ID NO: 63651 - protein, 15 aa, unidentified
  source 1..15: note = methanogen bacteria
LSFTSIMMRSYYKNH

SEQ ID NO: 63652 - protein, 12 aa, unidentified
  source 1..12: note = methanogen bacteria
RFVKVFINSNGG

SEQ ID NO: 63653 - protein, 53 aa, unidentified
  source 1..53: note = methanogen bacteria
IAILSGASSSSTYADINALFSSISAYLPWSFDVNSISTSVNSSIQEIGRYVLN

SEQ ID NO: 63654 - protein, 15 aa, unidentified
  source 1..15: note = methanogen bacteria
IKHYLYDSDILISVT

SEQ ID NO: 63655 - protein, 11 aa, unidentified
  source 1..11: note = methanogen bacteria
NRSANTEAIIN

SEQ ID NO: 63656 - protein, 24 aa, unidentified
  source 1..24: note = methanogen bacteria
YHVYVNGAPANVRCLIIMIGGLIG

SEQ ID NO: 63657 - protein, 11 aa, unidentified
  source 1..11: note = methanogen bacteria
TPKAISFPFAQ

SEQ ID NO: 63658 - protein, 59 aa, unidentified
  source 1..59: note = methanogen bacteria
EISIFASWVLANNYNTDVTSAISQISAYLPSGVDVNSLNSFIDSTIKNVGSYVLNYSVK

SEQ ID NO: 63659 - protein, 28 aa, unidentified
  source 1..28: note = methanogen bacteria
MELNLVDSIYYSVITMATVGYGDYIPHT

SEQ ID NO: 63660 - protein, 11 aa, unidentified
  source 1..11: note = methanogen bacteria
YYFTNYDFDIS

SEQ ID NO: 63661 - protein, 12 aa, unidentified
  source 1..12: note = methanogen bacteria
NKSTNTETFFAP

SEQ ID NO: 63662 - protein, 19 aa, unidentified
  source 1..19: note = methanogen bacteria
KYHVYVGDTPANVRCLIIM

SEQ ID NO: 63663 - protein, 10 aa, unidentified
  source 1..10: note = methanogen bacteria
TPDYISFPFI

SEQ ID NO: 63664 - protein, 23 aa, unidentified
  source 1..23: note = methanogen bacteria
PIITGNASIERILMLKDHLYYNI

SEQ ID NO: 63665 - protein, 11 aa, unidentified
  source 1..11: note = methanogen bacteria
VKPGINYLSYI

SEQ ID NO: 63666 - protein, 17 aa, unidentified
  source 1..17: note = methanogen bacteria
NISFFNLLFRKWIVGNE

SEQ ID NO: 63667 - protein, 16 aa, unidentified
  source 1..16: note = methanogen bacteria
GQMQVYMISQVKLPLT

SEQ ID NO: 63668 - protein, 13 aa, unidentified
  source 1..13: note = methanogen bacteria
RVLSVDNFALGYS

SEQ ID NO: 63669 - protein, 22 aa, unidentified
  source 1..22: note = methanogen bacteria
LNPSYSIPEFTTQGMYFTDKSI

SEQ ID NO: 63670 - protein, 30 aa, unidentified; identical to SEQ ID NO: 59237
  source 1..30: note = methanogen bacteria

SEQ ID NO: 63671 - protein, 28 aa, unidentified
  source 1..28: note = methanogen bacteria
ITNSGGAYPYNYKTVLSSFLLLNGIGYV

SEQ ID NO: 63672 - protein, 15 aa, unidentified
  source 1..15: note = methanogen bacteria
FNGFQPTQIMKYPPT

SEQ ID NO: 63673 - protein, 10 aa, unidentified
  source 1..10: note = methanogen bacteria
FYPYVTTSLK

SEQ ID NO: 63674 - protein, 20 aa, unidentified
  source 1..20: note = methanogen bacteria
VLKTNPVGVLDWALGKGVTW

SEQ ID NO: 63675 - protein, 13 aa, unidentified
  source 1..13: note = methanogen bacteria
NTFYTTSSFSYHS

SEQ ID NO: 63676 - protein, 26 aa, unidentified
  source 1..26: note = methanogen bacteria
ITKGNYPYSFSTILRSFLLLDGIGYV

SEQ ID NO: 63677 - protein, 15 aa, unidentified
  source 1..15: note = methanogen bacteria
YNQIQATQIMKYPPT

SEQ ID NO: 63678 - protein, 11 aa, unidentified
  source 1..11: note = methanogen bacteria
YINVGFGIDIN

SEQ ID NO: 63679 - protein, 11 aa, unidentified
  source 1..11: note = methanogen bacteria
HKLNMPTLLDP

SEQ ID NO: 63680 - protein, 24 aa, unidentified
  source 1..24: note = methanogen bacteria
VHMNVNNAPANIRCLVVMISGLFG

SEQ ID NO: 63681 - protein, 10 aa, unidentified
  source 1..10: note = methanogen bacteria
NIVFGIDFKP

SEQ ID NO: 63682 - protein, 12 aa, unidentified
  source 1..12: note = methanogen bacteria
SHKLNMPTLLDP

SEQ ID NO: 63683 - protein, 24 aa, unidentified
  source 1..24: note = methanogen bacteria
VHMNVNNAPANIRCLVVMISGLFG

SEQ ID NO: 63684 - protein, 10 aa, unidentified
  source 1..10: note = methanogen bacteria
TPPDISFPFV

SEQ ID NO: 63685 - protein, 31 aa, unidentified
  source 1..31: note = methanogen bacteria
YAPDPIPFHRVWDVICGRGTWADGLIVPMNA

SEQ ID NO: 63686 - protein, 23 aa, unidentified
  source 1..23: note = methanogen bacteria
ISGDKMEDIVFWTMGSLSRADFG

SEQ ID NO: 63687 - protein, 29 aa, unidentified
  source 1..29: note = methanogen bacteria
LSTFYPTFIDAIYGLSNPQNVINNILAPK

SEQ ID NO: 63688 - protein, 14 aa, unidentified
  source 1..14: note = methanogen bacteria
IGPGEVLNALQTAD

SEQ ID NO: 63689 - protein, 11 aa, unidentified
  source 1..11: note = methanogen bacteria
YSMAGVPSSIS

SEQ ID NO: 63690 - protein, 55 aa, unidentified
  source 1..55: note = methanogen bacteria
ETSTLVSWVLANNSYSDVNQIISDISKYLPGINVTEVNSYIDSAIQNIASYILNY

SEQ ID NO: 63691 - protein, 14 aa, unidentified
  source 1..14: note = methanogen bacteria
RYYYIEGIFKISFD

SEQ ID NO: 63692 - protein, 11 aa, unidentified
  source 1..11: note = methanogen bacteria
NKSTNSDAFIS

SEQ ID NO: 63693 - protein, 24 aa, unidentified
  source 1..24: note = methanogen bacteria
YILFINDSYVNVRSMVVMTAGLFG

SEQ ID NO: 63694 - protein, 10 aa, unidentified
  source 1..10: note = methanogen bacteria
SPQNISIPYV

SEQ ID NO: 63695 - protein, 33 aa, unidentified
  source 1..33: note = methanogen bacteria
WIDAGHSYSFSQVIDTLLGGGTWGSRIIILDTN

SEQ ID NO: 63696 - protein, 10 aa, unidentified
  source 1..10: note = methanogen bacteria
LFTIPFIPGT

SEQ ID NO: 63697 - protein, 22 aa, unidentified
  source 1..22: note = methanogen bacteria
IAGDRMEGIVFWTVGNLGNANW

SEQ ID NO: 63698 - protein, 11 aa, unidentified
  source 1..11: note = methanogen bacteria
LKKNIEIFHFN

SEQ ID NO: 63699 - protein, 10 aa, unidentified
  source 1..10: note = methanogen bacteria
NIYRHPLTSF

SEQ ID NO: 63700 - protein, 18 aa, unidentified
  source 1..18: note = methanogen bacteria
GNFFDIYPKMNLSSTLDL

SEQ ID NO: 63701 - protein, 13 aa, unidentified
  source 1..13: note = methanogen bacteria
PFFKTLNFNSTNM

SEQ ID NO: 63702 - protein, 10 aa, unidentified
  source 1..10: note = methanogen bacteria
STVLGDVFPS

SEQ ID NO: 63703 - protein, 14 aa, unidentified
  source 1..14: note = methanogen bacteria
YGAVRSVRHRGRRR

SEQ ID NO: 63704 - protein, 31 aa, unidentified
  source 1..31: note = methanogen bacteria
IPSGEITSYTLSYSLNNLQHWGIMVGLTPTD

SEQ ID NO: 63705 - protein, 23 aa, unidentified
  source 1..23: note = methanogen bacteria
PGMLENQTLMNFLQIKEMLYHVG

SEQ ID NO: 63706 - protein, 10 aa, unidentified
  source 1..10: note = methanogen bacteria
KFIKFRKRRR

SEQ ID NO: 63707 - protein, 11 aa, unidentified
  source 1..11: note = methanogen bacteria
LKPSFDYFNYI

SEQ ID NO: 63708 - protein, 18 aa, unidentified
  source 1..18: note = methanogen bacteria
IGAPHNIVMYTVSNVSFE

SEQ ID NO: 63709 - protein, 17 aa, unidentified
  source 1..17: note = methanogen bacteria
NISFFTSLFERYIAGNE

SEQ ID NO: 63710 - protein, 23 aa, unidentified
  source 1..23: note = methanogen bacteria
PGMLENQTLMNFLQIKEMFYHMG

SEQ ID NO: 63711 - protein, 12 aa, unidentified
  source 1..12: note = methanogen bacteria
LKENILIINFNI

SEQ ID NO: 63712 - protein, 10 aa, unidentified
  source 1..10: note = methanogen bacteria
NIYARPLVAF

SEQ ID NO: 63713 - protein, 19 aa, unidentified
  source 1..19: note = methanogen bacteria
FGNFFDIYPKMNLSSTLDL

SEQ ID NO: 63714 - protein, 13 aa, unidentified
  source 1..13: note = methanogen bacteria
PFFKTLTLSSTNM

SEQ ID NO: 63715 - protein, 11 aa, unidentified
  source 1..11: note = methanogen bacteria
VKPSINYLNYI

SEQ ID NO: 63716 - protein, 17 aa, unidentified
  source 1..17: note = methanogen bacteria
NIGFFRELFTRYIIGNE

SEQ ID NO: 63717 - protein, 19 aa, unidentified
  source 1..19: note = methanogen bacteria
YFFDMEEAIRIITANERFT

SEQ ID NO: 63718 - protein, 12 aa, unidentified
  source 1..12: note = methanogen bacteria
RFAKFHINCGYE

SEQ ID NO: 63719 - protein, 11 aa, unidentified
  source 1..11: note = methanogen bacteria
VLPNRDYLNYI

SEQ ID NO: 63720 - protein, 18 aa, unidentified
  source 1..18: note = methanogen bacteria
IGAPHNIVMYTVSHIPFQ

SEQ ID NO: 63721 - protein, 17 aa, unidentified
  source 1..17: note = methanogen bacteria
SIPFFNSLFKQWIIGNE

SEQ ID NO: 63722 - protein, 11 aa, unidentified
  source 1..11: note = methanogen bacteria
IKPSIAYLDYI

SEQ ID NO: 63723 - protein, 17 aa, unidentified
  source 1..17: note = methanogen bacteria
NIPFFNLLFKKWIIGNE

SEQ ID NO: 63724 - protein, 11 aa, unidentified
  source 1..11: note = methanogen bacteria
IKYIRYRRHRK

SEQ ID NO: 63725 - protein, 11 aa, unidentified
  source 1..11: note = methanogen bacteria
VKPSLDYLNYI

SEQ ID NO: 63726 - protein, 17 aa, unidentified
  source 1..17: note = methanogen bacteria
NIPFFNELFKTWIVGNE

SEQ ID NO: 63727 - protein, 30 aa, unidentified
  source 1..30: note = methanogen bacteria
TPGEIHYNLLAPVLKTLNDWGIMLSYSQTE

SEQ ID NO: 63728 - protein, 10 aa, unidentified
  source 1..10: note = methanogen bacteria
FQTPISSGVS

SEQ ID NO: 63729 - protein, 21 aa, unidentified
  source 1..21: note = methanogen bacteria
IGNPRSGIAVYMSYLISEMSI

SEQ ID NO: 63730 - protein, 22 aa, unidentified
  source 1..22: note = methanogen bacteria
PIMTGNESLEHILILKDHLYYI

SEQ ID NO: 63731 - protein, 13 aa, unidentified
  source 1..13: note = methanogen bacteria
GIFIGGSQLAPIN

SEQ ID NO: 63732 - protein, 20 aa, unidentified
  source 1..20: note = methanogen bacteria
DNILQLLNIPSNIFYQAKSY

SEQ ID NO: 63733 - protein, 15 aa, unidentified
  source 1..15: note = methanogen bacteria
VGPQQIIGALQTADI

SEQ ID NO: 63734 - protein, 11 aa, unidentified
  source 1..11: note = methanogen bacteria
YSMAGITASVS

SEQ ID NO: 63735 - protein, 11 aa, unidentified
  source 1..11: note = methanogen bacteria
VRSVRTRRRRR

SEQ ID NO: 63736 - protein, 11 aa, unidentified
  source 1..11: note = methanogen bacteria
VKPSMDYIDYI

SEQ ID NO: 63737 - protein, 19 aa, unidentified
  source 1..19: note = methanogen bacteria
IGAPHNIVLYTASNIPFDS

SEQ ID NO: 63738 - protein, 17 aa, unidentified
  source 1..17: note = methanogen bacteria
CIPFFNTFFKSHIMGNE

SEQ ID NO: 63739 - protein, 36 aa, unidentified
  source 1..36: note = methanogen bacteria
GRYPISPIDVVNTILCPIFPQLEVNPTITTIVFEIR

SEQ ID NO: 63740 - protein, 24 aa, unidentified
  source 1..24: note = methanogen bacteria
IADPDDKLPEIVYWLMGSLASINA

SEQ ID NO: 63741 - protein, 11 aa, unidentified
  source 1..11: note = methanogen bacteria
VKPTLNYSTYI

SEQ ID NO: 63742 - protein, 18 aa, unidentified
  source 1..18: note = methanogen bacteria
IGAPHNIVMYTVSRIPFE

SEQ ID NO: 63743 - protein, 17 aa, unidentified
  source 1..17: note = methanogen bacteria
NIPFFNALFTKWITGNE

SEQ ID NO: 63744 - protein, 23 aa, unidentified
  source 1..23: note = methanogen bacteria
MPGVIENQTLMNFLHIKEMFYHI

SEQ ID NO: 63745 - protein, 22 aa, unidentified
  source 1..22: note = methanogen bacteria
PGMLESKTLMNFLQIKEMFYHI

SEQ ID NO: 63746 - protein, 36 aa, unidentified
  source 1..36: note = methanogen bacteria
GRYPISPIDVVNTILCPIFPQLEVNSTITTIVYEIR

SEQ ID NO: 63747 - protein, 24 aa, unidentified
  source 1..24: note = methanogen bacteria
IADPDDKLPEIVYWLMGSLASINA

SEQ ID NO: 63748 - protein, 31 aa, unidentified
  source 1..31: note = methanogen bacteria
HSYYPTFMEAIYGLSNPQNVINNMVSPPPSV

SEQ ID NO: 63749 - protein, 11 aa, unidentified
  source 1..11: note = methanogen bacteria
VAGLGQTAIAG

SEQ ID NO: 63750 - protein, 19 aa, unidentified
  source 1..19: note = methanogen bacteria
EPLLRTYGASGQALAEAMK

SEQ ID NO: 63751 - protein, 12 aa, unidentified
  source 1..12: note = methanogen bacteria
SSIGGEYGIAAF

SEQ ID NO: 63752 - protein, 36 aa, unidentified
  source 1..36: note = methanogen bacteria
GRYPISPVDVVKTILSPIFPQLKVSQTITTIVFEIR

SEQ ID NO: 63753 - protein, 24 aa, unidentified
  source 1..24: note = methanogen bacteria
VADPQDKLPEIIYWLMGSLSSVTI

SEQ ID NO: 63754 - protein, 36 aa, unidentified
  source 1..36: note = methanogen bacteria
GRYPVSPVDVVKTLLCPIFPQMEVSSTITTIVYEIR

SEQ ID NO: 63755 - protein, 24 aa, unidentified
  source 1..24: note = methanogen bacteria
IADPDDKLPEIVYWLMGSLASINM

SEQ ID NO: 63756 - protein, 15 aa, unidentified
  source 1..15: note = methanogen bacteria
MINYYNIINNINSME

SEQ ID NO: 63757 - protein, 22 aa, unidentified
  source 1..22: note = methanogen bacteria
PDVIGNQTLANFLQIKEMFYHI

SEQ ID NO: 63758 - protein, 57 aa, unidentified
  source 1..57: note = methanogen bacteria
FIISGFLVGFFSSNPNLDIDSVISQLSTYIPQNPFLDKNSIVPAIQSAGKSVLTYLV

SEQ ID NO: 63759 - protein, 36 aa, unidentified
  source 1..36: note = methanogen bacteria
GRYPVSPVDVVKTILSPIFPQLTVSSTINTIVWQIR

SEQ ID NO: 63760 - protein, 24 aa, unidentified
  source 1..24: note = methanogen bacteria
VADPEDKLPEIVYWLMGSLASITM

SEQ ID NO: 63761 - protein, 23 aa, unidentified
  source 1..23: note = methanogen bacteria
MPGVIGNQTLANFLQIKEMFYHI

SEQ ID NO: 63762 - protein, 56 aa, unidentified
  source 1..56: note = methanogen bacteria
ISGFLSTFYVSNQNFDVNTVLSQISYYIPDNPFLNENNFVQTIESAGKYVLNYLVS

SEQ ID NO: 63763 - protein, 31 aa, unidentified
  source 1..31: note = methanogen bacteria
IPSGEITSDMLSSFLKSLQDWGIMVGFTPTD

SEQ ID NO: 63764 - protein, 11 aa, unidentified
  source 1..11: note = methanogen bacteria
VQPTINYLNYI

SEQ ID NO: 63765 - protein, 18 aa, unidentified
  source 1..18: note = methanogen bacteria
IGAPHNIVMFTVSHIPFE

SEQ ID NO: 63766 - protein, 17 aa, unidentified
  source 1..17: note = methanogen bacteria
NIPFFNSLFRQFITGNE

SEQ ID NO: 63767 - protein, 36 aa, unidentified
  source 1..36: note = methanogen bacteria
GRYPISPIDVINTLLCPIFPQCEVNSTITTVVFEIR

SEQ ID NO: 63768 - protein, 25 aa, unidentified
  source 1..25: note = methanogen bacteria
IADPDDKLPEIVYWLMGSLASINDD

SEQ ID NO: 63769 - protein, 11 aa, unidentified
  source 1..11: note = methanogen bacteria
VRPSINYLNYI

SEQ ID NO: 63770 - protein, 18 aa, unidentified
  source 1..18: note = methanogen bacteria
IGAPHNIVMYTVSKIPFE

SEQ ID NO: 63771 - protein, 17 aa, unidentified
  source 1..17: note = methanogen bacteria
NIPFFNALFTKWITGNE

SEQ ID NO: 63772 - protein, 18 aa, unidentified
  source 1..18: note = methanogen bacteria
DFITGLFPDFLAGKDNAG

SEQ ID NO: 63773 - protein, 36 aa, unidentified
  source 1..36: note = methanogen bacteria
GRYPISPVDVIKTILSPIFPQLTVSSTVNTIVWQIR

SEQ ID NO: 63774 - protein, 24 aa, unidentified
  source 1..24: note = methanogen bacteria
IADPDDKLPEIVYWLMGSLASVTM

SEQ ID NO: 63775 - protein, 22 aa, unidentified
  source 1..22: note = methanogen bacteria
PGMLESKTLMNFLQIKEMFYHV

SEQ ID NO: 63776 - protein, 11 aa, unidentified
  source 1..11: note = methanogen bacteria
VKPSFNYLNYI

SEQ ID NO: 63777 - protein, 18 aa, unidentified
  source 1..18: note = methanogen bacteria
IGAPHNIVLYTSSNIPFE

SEQ ID NO: 63778 - protein, 17 aa, unidentified
  source 1..17: note = methanogen bacteria
NIAFFNLFFKQWITGNE

SEQ ID NO: 63779 - protein, 22 aa, unidentified
  source 1..22: note = methanogen bacteria
PGVLENQTLANFLHIKEMFYHI

SEQ ID NO: 63780 - protein, 36 aa, unidentified
  source 1..36: note = methanogen bacteria
GRYPISPIDVINTILCPIFPQLEVSPTITTIVFEIR

SEQ ID NO: 63781 - protein, 24 aa, unidentified
  source 1..24: note = methanogen bacteria
VADPDDKLPEIVYWLMGSLASVTA

SEQ ID NO: 63782 - protein, 18 aa, unidentified
  source 1..18: note = methanogen bacteria
LQATYPTFMDAVFALKNP

SEQ ID NO: 63783 - protein, 29 aa, unidentified
  source 1..29: note = methanogen bacteria
LTTFYPTFMDAIYGLSNPQNVINNILTPK

SEQ ID NO: 63784 - protein, 22 aa, unidentified
  source 1..22: note = methanogen bacteria
PGMLENQTLMNFLHIKEMFYHI

SEQ ID NO: 63785 - protein, 22 aa, unidentified
  source 1..22: note = methanogen bacteria
PGMLENQTLMNFLQIKEMFYHI

SEQ ID NO: 63786 - protein, 57 aa, unidentified
  source 1..57: note = methanogen bacteria
VISGVLTDFFAANPNLDINSTMSQLSAYVPQNPFFDANNLVPTIQSAGKYVLSYLVG

SEQ ID NO: 63787 - protein, 22 aa, unidentified
  source 1..22: note = methanogen bacteria
PGVLENKVLGNFLHFKETFYHI

SEQ ID NO: 63788 - protein, 36 aa, unidentified
  source 1..36: note = methanogen bacteria
GRYPISPIDVISTILSPIFPQLEVSSTVTTIVFEIR

SEQ ID NO: 63789 - protein, 24 aa, unidentified
  source 1..24: note = methanogen bacteria
IADPDDKLPEIVYWLMGSLASINA

SEQ ID NO: 63790 - protein, 68 aa, unidentified
  source 1..68: note = methanogen bacteria
DLSPIDPVSVYLKGAAVSEAQRTILEQYFGVNVPLHTKIFHWLVDLFQGNLGTSLIFRAPVLDVIIQK

SEQ ID NO: 63791 - protein, 31 aa, unidentified
  source 1..31: note = methanogen bacteria
AVYLGWFPIGFGVPIGVSSNDATFAQWASRL

SEQ ID NO: 63792 - protein, 24 aa, unidentified
  source 1..24: note = methanogen bacteria
EQVFSYPGIGQTAVAAGLQSDVPL

SEQ ID NO: 63793 - protein, 36 aa, unidentified
  source 1..36: note = methanogen bacteria
GRYPISPVDVVSTLLSPIFPQMEVSSTITTIVFEIR

SEQ ID NO: 63794 - protein, 24 aa, unidentified
  source 1..24: note = methanogen bacteria
IADPDDKLPEIVYWLMGSLASINA

SEQ ID NO: 63795 - protein, 11 aa, unidentified
  source 1..11: note = methanogen bacteria
VQPNVNYLNYI

SEQ ID NO: 63796 - protein, 19 aa, unidentified
  source 1..19: note = methanogen bacteria
IGAPHNIVMYTVSKIPFDT

SEQ ID NO: 63797 - protein, 17 aa, unidentified
  source 1..17: note = methanogen bacteria
NISFFNSLFTRWIAGNE

SEQ ID NO: 63798 - protein, 22 aa, unidentified
  source 1..22: note = methanogen bacteria
PGMIENQTLMNFLKIKEMFYHI

SEQ ID NO: 63799 - protein, 55 aa, unidentified
  source 1..55: note = methanogen bacteria
SGMLNDFFMSNPNLDINYAISQISMYIPQNPFFDGNNIVPAIGDGAKYVLNYLVS

SEQ ID NO: 63800 - protein, 23 aa, unidentified
  source 1..23: note = methanogen bacteria
MPGVIGNQTLANFLQIKEMFYHV

SEQ ID NO: 63801 - protein, 11 aa, unidentified
  source 1..11: note = methanogen bacteria
VRPSINYLNYI

SEQ ID NO: 63802 - protein, 17 aa, unidentified
  source 1..17: note = methanogen bacteria
NIPFFNALFTKWIGGNE

SEQ ID NO: 63803 - protein, 23 aa, unidentified
  source 1..23: note = methanogen bacteria
MPGTLENKTLMNFLQIKEMFYHI

SEQ ID NO: 63804 - protein, 11 aa, unidentified
  source 1..11: note = methanogen bacteria
VRPSLDYLNYI

SEQ ID NO: 63805 - protein, 18 aa, unidentified
  source 1..18: note = methanogen bacteria
IGAPHNIVMYTVSKIPFE

SEQ ID NO: 63806 - protein, 17 aa, unidentified
  source 1..17: note = methanogen bacteria
NIPFFNALFTRWIVGNE

SEQ ID NO: 63807 - protein, 36 aa, unidentified
  source 1..36: note = methanogen bacteria
GRYPISPVDVIKTILSPIFPQLEINPTITTIVFEIR

SEQ ID NO: 63808 - protein, 24 aa, unidentified
  source 1..24: note = methanogen bacteria
IADPDDKLPEIVYWLMGSLASINA

SEQ ID NO: 63809 - protein, 11 aa, unidentified
  source 1..11: note = methanogen bacteria
VPVNMDYFNYI

SEQ ID NO: 63810 - protein, 18 aa, unidentified
  source 1..18: note = methanogen bacteria
IGAPHNIVLYTAADIPFE

SEQ ID NO: 63811 - protein, 17 aa, unidentified
  source 1..17: note = methanogen bacteria
NIAFFSSLFGKWIVGNE

SEQ ID NO: 63812 - protein, 31 aa, unidentified
  source 1..31: note = methanogen bacteria
NASGEINIDIFGAVLNVFQSVGAMVGYDQVD

SEQ ID NO: 63813 - protein, 36 aa, unidentified
  source 1..36: note = methanogen bacteria
GRYPVSPVDVVKTILSPIFPQLSVSSTVNTIVWQIR

SEQ ID NO: 63814 - protein, 24 aa, unidentified
  source 1..24: note = methanogen bacteria
IADPEDKLPEIVYWLMGSLASVTM

SEQ ID NO: 63815 - protein, 30 aa, unidentified
  source 1..30: note = methanogen bacteria
NASGQINIDILGLILKTFQDWGIMVGYNQV

SEQ ID NO: 63816 - protein, 12 aa, unidentified
  source 1..12: note = methanogen bacteria
IWSNTEILNYKI

SEQ ID NO: 63817 - protein, 11 aa, unidentified
  source 1..11: note = methanogen bacteria
VYSPSQPLSKF

SEQ ID NO: 63818 - protein, 19 aa, unidentified
  source 1..19: note = methanogen bacteria
NYETFYLYDNLMLTSKLSL

SEQ ID NO: 63819 - protein, 10 aa, unidentified
  source 1..10: note = methanogen bacteria
YFKGVHYSGT

SEQ ID NO: 63820 - protein, 12 aa, unidentified
  source 1..12: note = methanogen bacteria
SSKNVFQFSISD

SEQ ID NO: 63821 - protein, 12 aa, unidentified
  source 1..12: note = methanogen bacteria
NSIANDFLSLEP

SEQ ID NO: 63822 - protein, 23 aa, unidentified
  source 1..23: note = methanogen bacteria
SLDYGSYSSNVRTMTVMMAGMFG

SEQ ID NO: 63823 - protein, 32 aa, unidentified
  source 1..32: note = methanogen bacteria
RYHSFYDSIYSITLGQIFNALIFNAYTYGPHL

SEQ ID NO: 63824 - protein, 14 aa, unidentified
  source 1..14: note = methanogen bacteria
FIGFKHIPITYYRN

SEQ ID NO: 63825 - protein, 12 aa, unidentified
  source 1..12: note = methanogen bacteria
LFVQGVCNQTAT

SEQ ID NO: 63826 - protein, 17 aa, unidentified
  source 1..17: note = methanogen bacteria
VFTGGYVAHDKITVSAF

SEQ ID NO: 63827 - protein, 11 aa, unidentified
  source 1..11: note = methanogen bacteria
VKPSINYLGYI

SEQ ID NO: 63828 - protein, 19 aa, unidentified
  source 1..19: note = methanogen bacteria
IGAPHNIVMYTVSNIPFES

SEQ ID NO: 63829 - protein, 17 aa, unidentified
  source 1..17: note = methanogen bacteria
NIPFFNSLFTKWIVGNE

SEQ ID NO: 63830 - protein, 17 aa, unidentified
  source 1..17: note = methanogen bacteria
IMWESSGDSFYILPSVS

SEQ ID NO: 63831 - protein, 52 aa, unidentified
  source 1..52: note = methanogen bacteria
VASVLSDFLLNQNIDFNLILTQINSYIPQNSFIDSTSINGIIKSAGSYVLNY

SEQ ID NO: 63832 - protein, 16 aa, unidentified
  source 1..16: note = methanogen bacteria
KMQVYLISRIKLSLTS

SEQ ID NO: 63833 - protein, 11 aa, unidentified
  source 1..11: note = methanogen bacteria
VIPSWDYLGYI

SEQ ID NO: 63834 - protein, 18 aa, unidentified
  source 1..18: note = methanogen bacteria
IGAPHNIVMYTVSNIPFQ

SEQ ID NO: 63835 - protein, 17 aa, unidentified
  source 1..17: note = methanogen bacteria
NIPYLSLLLKKWIIGNE

SEQ ID NO: 63836 - protein, 53 aa, unidentified
  source 1..53: note = methanogen bacteria
MYNFVTWILANDVSINNALDQVSMYLPANASSINSYIEGSLNDVGNYILNYSV

SEQ ID NO: 63837 - protein, 30 aa, unidentified
  source 1..30: note = methanogen bacteria
SASGEINIDILGLILKTFQDWGIMVGYEQV

SEQ ID NO: 63838 - protein, 14 aa, unidentified
  source 1..14: note = methanogen bacteria
LDFTFEKVLRFNIN

SEQ ID NO: 63839 - protein, 10 aa, unidentified
  source 1..10: note = methanogen bacteria
GVVNDNFVLE

SEQ ID NO: 63840 - protein, 23 aa, unidentified
  source 1..23: note = methanogen bacteria
TKNLGHSSANVRTMTVMIAGMFG

SEQ ID NO: 63841 - protein, 17 aa, unidentified
  source 1..17: note = methanogen bacteria
SISVFRAFFKQCTVGNE

SEQ ID NO: 63842 - protein, 18 aa, unidentified
  source 1..18: note = methanogen bacteria
VYSTFMIELGKGGAICEV

SEQ ID NO: 63843 - protein, 17 aa, unidentified
  source 1..17: note = methanogen bacteria
NISVFKALFKQCIVGNE

SEQ ID NO: 63844 - protein, 31 aa, unidentified
  source 1..31: note = methanogen bacteria
NYGLHYFGGYEPMLDNVTNVMFHPAITYSFT

SEQ ID NO: 63845 - protein, 26 aa, unidentified
  source 1..26: note = methanogen bacteria
AMTGSVNITDIAAAVHNGLVDVTSPV

SEQ ID NO: 63846 - protein, 33 aa, unidentified
  source 1..33: note = methanogen bacteria
DWIFSCWRIRFHWSGYWSWYSIFNNCRSFPGFE

SEQ ID NO: 63847 - protein, 15 aa, unidentified
  source 1..15: note = methanogen bacteria
FVTGVYPDFLAKDSG

SEQ ID NO: 63848 - protein, 11 aa, unidentified
  source 1..11: note = methanogen bacteria
VKPSVNYLNYI

SEQ ID NO: 63849 - protein, 18 aa, unidentified
  source 1..18: note = methanogen bacteria
IGAPHNIVMYTVSKIPFE

SEQ ID NO: 63850 - protein, 17 aa, unidentified
  source 1..17: note = methanogen bacteria
NIPFFTSLFERWIVGNE

SEQ ID NO: 63851 - protein, 24 aa, unidentified
  source 1..24: note = methanogen bacteria
VSAKSLYLSDIIKYQMANGPLLFT

SEQ ID NO: 63852 - protein, 13 aa, unidentified
  source 1..13: note = methanogen bacteria
MIEYNSILFTNIN

SEQ ID NO: 63853 - protein, 11 aa, unidentified
  source 1..11: note = methanogen bacteria
VKPTINYLDYI

SEQ ID NO: 63854 - protein, 17 aa, unidentified
  source 1..17: note = methanogen bacteria
NISYFNELFKTWISGNE

SEQ ID NO: 63855 - protein, 11 aa, unidentified
  source 1..11: note = methanogen bacteria
VKPSSNYLNYI

SEQ ID NO: 63856 - protein, 18 aa, unidentified
  source 1..18: note = methanogen bacteria
IGAPHNIVMYTVSKIPFG

SEQ ID NO: 63857 - protein, 17 aa, unidentified
  source 1..17: note = methanogen bacteria
NIPFFTSLFERWVAGNE

SEQ ID NO: 63858 - protein, 54 aa, unidentified
  source 1..54: note = methanogen bacteria
YEVYSVAASFMASNYYVNLDQFISQLPIDMGSVNNTVNSSINEIAKYLLSYSVS

SEQ ID NO: 63859 - protein, 13 aa, unidentified
  source 1..13: note = methanogen bacteria
TDKGFSFNIFSQY

SEQ ID NO: 63860 - protein, 25 aa, unidentified
  source 1..25: note = methanogen bacteria
AIMPKNFALDYSATQSAVLASWVDV

SEQ ID NO: 63861 - protein, 11 aa, unidentified
  source 1..11: note = methanogen bacteria
NPFFTSLPRNG

SEQ ID NO: 63862 - protein, 13 aa, unidentified
  source 1..13: note = methanogen bacteria
TDKGFSYNIFSQY

SEQ ID NO: 63863 - protein, 27 aa, unidentified
  source 1..27: note = methanogen bacteria
TGAIMPKNFALDYEATQSVVLDSWVDI

SEQ ID NO: 63864 - protein, 10 aa, unidentified
  source 1..10: note = methanogen bacteria
PFFTSLPRNA

SEQ ID NO: 63865 - protein, 52 aa, unidentified
  source 1..52: note = methanogen bacteria
EISSVITSFLASNYYLDLNQFISQLPVDINSINSSINSSASEIGKYLLQYTV

SEQ ID NO: 63866 - protein, 11 aa, unidentified
  source 1..11: note = methanogen bacteria
LGTYSDPVNST

SEQ ID NO: 63867 - protein, 10 aa, unidentified
  source 1..10: note = methanogen bacteria
IFHDLAAAEE

SEQ ID NO: 63868 - protein, 28 aa, unidentified
  source 1..28: note = methanogen bacteria
LAAAYPTFMDAIYALSNPQNVINNILTP

SEQ ID NO: 63869 - protein, 11 aa, unidentified
  source 1..11: note = methanogen bacteria
VRPSLDYLNYI

SEQ ID NO: 63870 - protein, 17 aa, unidentified
  source 1..17: note = methanogen bacteria
IGAPHNIVMYTVSKIPF

SEQ ID NO: 63871 - protein, 17 aa, unidentified
  source 1..17: note = methanogen bacteria
NIPFFNVLFTKSIAGNE

SEQ ID NO: 63872 - protein, 16 aa, unidentified
  source 1..16: note = methanogen bacteria
LSIFNIANPYHVKVVT

SEQ ID NO: 63873 - protein, 10 aa, unidentified
  source 1..10: note = methanogen bacteria
WQHGEQVNGV

SEQ ID NO: 63874 - protein, 13 aa, unidentified
  source 1..13: note = methanogen bacteria
TDIGFSFNIFSQY

SEQ ID NO: 63875 - protein, 27 aa, unidentified
  source 1..27: note = methanogen bacteria
TGAIMPKSFALDFEATQSVVLDSWVDI

SEQ ID NO: 63876 - protein, 12 aa, unidentified
  source 1..12: note = methanogen bacteria
DPFFIGWRRTGI

SEQ ID NO: 63877 - protein, 54 aa, unidentified
  source 1..54: note = methanogen bacteria
YELSSVITSMMANNYYADIDKFISQLPIDMGSINSSINSSLNEIGKYVLQYAVT

SEQ ID NO: 63878 - protein, 20 aa, unidentified
  source 1..20: note = methanogen bacteria
NRTGAHKIFLWNNFFITFEA

SEQ ID NO: 63879 - protein, 20 aa, unidentified
  source 1..20: note = methanogen bacteria
KGVGMINICPSIDFSFSNLP

SEQ ID NO: 63880 - protein, 53 aa, unidentified
  source 1..53: note = methanogen bacteria
YEISSVITTFLASNYYFDLSHFISQLPIDTNSINSSINSSATEIGKYLLQYTV

SEQ ID NO: 63881 - protein, 11 aa, unidentified
  source 1..11: note = methanogen bacteria
AGSVLDYAMDY

SEQ ID NO: 63882 - protein, 10 aa, unidentified
  source 1..10: note = methanogen bacteria
MMTAGTMEVA

SEQ ID NO: 63883 - protein, 21 aa, unidentified
  source 1..21: note = methanogen bacteria
PISHAFNFISGNPEMIARTAE

SEQ ID NO: 63884 - protein, 11 aa, unidentified
  source 1..11: note = methanogen bacteria
VKPSFDYFSYI

SEQ ID NO: 63885 - protein, 17 aa, unidentified
  source 1..17: note = methanogen bacteria
NIPFFNELFTKWIVGNE

SEQ ID NO: 63886 - protein, 40 aa, unidentified
  source 1..40: note = methanogen bacteria
VGAYSVGFVESYEALIDHLLGNVPADELGKGVDMIVWDKR

SEQ ID NO: 63887 - protein, 12 aa, unidentified
  source 1..12: note = methanogen bacteria
SGFSIVSGTYGE

SEQ ID NO: 63888 - protein, 26 aa, unidentified
  source 1..26: note = methanogen bacteria
KLTASEESLAEIYMWNIGTLGKSSWD

SEQ ID NO: 63889 - protein, 17 aa, unidentified
  source 1..17: note = methanogen bacteria
CIPFFNIFFKSHIMGNE

SEQ ID NO: 63890 - protein, 18 aa, unidentified
  source 1..18: note = methanogen bacteria
IGAPHNIVMYTISKIPFQ

SEQ ID NO: 63891 - protein, 17 aa, unidentified
  source 1..17: note = methanogen bacteria
SIPFFNALFTKWISGNE

SEQ ID NO: 63892 - protein, 20 aa, unidentified
  source 1..20: note = methanogen bacteria
NRTGAHKIYLWSNFFVTYEA

SEQ ID NO: 63893 - protein, 20 aa, unidentified
  source 1..20: note = methanogen bacteria
HGVGMINIYPSIDFRFSNLP

SEQ ID NO: 63894 - protein, 12 aa, unidentified
  source 1..12: note = methanogen bacteria
PKIFNPDVTNYT

SEQ ID NO: 63895 - protein, 23 aa, unidentified
  source 1..23: note = methanogen bacteria
TCNWTCDNSSDVLSVNADQLQYA

SEQ ID NO: 63896 - protein, 10 aa, unidentified
  source 1..10: note = methanogen bacteria
FFGSLNTPLQ

SEQ ID NO: 63897 - protein, 20 aa, unidentified
  source 1..20: note = methanogen bacteria
TMKSYTFAWNTFIGTPSITW

SEQ ID NO: 63898 - protein, 15 aa, unidentified
  source 1..15: note = methanogen bacteria
FDYNKINLIKLIYLN

SEQ ID NO: 63899 - protein, 48 aa, unidentified
  source 1..48: note = methanogen bacteria
FATVDGGAIYSENNSDVVDSLFKFNSAYVDGGAIYSKKNVAVKKSIFD

SEQ ID NO: 63900 - protein, 16 aa, unidentified
  source 1..16: note = methanogen bacteria
TCDKFSGIYLIGSLKW

SEQ ID NO: 63901 - protein, 17 aa, unidentified
  source 1..17: note = methanogen bacteria
TFFASQIAEKHSWITYL

SEQ ID NO: 63902 - protein, 14 aa, unidentified
  source 1..14: note = methanogen bacteria
LGLAIIKELYILNP

SEQ ID NO: 63903 - protein, 24 aa, unidentified
  source 1..24: note = methanogen bacteria
VQSGSIYLGDIVAYQQAHGPVIFT

SEQ ID NO: 63904 - protein, 11 aa, unidentified
  source 1..11: note = methanogen bacteria
YFGPVALPTEE

SEQ ID NO: 63905 - protein, 19 aa, unidentified
  source 1..19: note = methanogen bacteria
FHKPYSYMWNVFIGNPSIM

SEQ ID NO: 63906 - protein, 14 aa, unidentified
  source 1..14: note = methanogen bacteria
DRTYGFSTLTLMYQ

SEQ ID NO: 63907 - protein, 23 aa, unidentified
  source 1..23: note = methanogen bacteria
VGDFNHSISFIYNILFADVLGGP

SEQ ID NO: 63908 - protein, 27 aa, unidentified
  source 1..27: note = methanogen bacteria
PFFTSGSLLGRWDLYHIYGGLIFFFCG

SEQ ID NO: 63909 - protein, 26 aa, unidentified
  source 1..26: note = methanogen bacteria
GADFGTPVLNIFIGYFIGTNTSYTAF

SEQ ID NO: 63910 - protein, 11 aa, unidentified
  source 1..11: note = methanogen bacteria
LWGKGLFSGRG

SEQ ID NO: 63911 - protein, 24 aa, unidentified
  source 1..24: note = methanogen bacteria
VTARSIFLQDIVAYQQVHGPFLFT

SEQ ID NO: 63912 - protein, 10 aa, unidentified
  source 1..10: note = methanogen bacteria
RPSIGYLNYI

SEQ ID NO: 63913 - protein, 17 aa, unidentified
  source 1..17: note = methanogen bacteria
NIPFFTLIFKKWIVGNE

SEQ ID NO: 63914 - protein, 14 aa, unidentified
  source 1..14: note = methanogen bacteria
HYGFEMIFGFLESA

SEQ ID NO: 63915 - protein, 14 aa, unidentified
  source 1..14: note = methanogen bacteria
VTDITSKIFYMIFA

SEQ ID NO: 63916 - protein, 44 aa, unidentified
  source 1..44: note = methanogen bacteria
EYYKSNSTYLDALAEGGFSPSILQISAFANKKDASGYESAYNVE

SEQ ID NO: 63917 - protein, 15 aa, unidentified
  source 1..15: note = methanogen bacteria
RDASSRFAKENRWGS

SEQ ID NO: 63918 - protein, 44 aa, unidentified
  source 1..44: note = methanogen bacteria
QQGNDNIGNWAYTDLYTLSQVSDTEMSASFARLGNKNITWETTT

SEQ ID NO: 63919 - protein, 32 aa, unidentified
  source 1..32: note = methanogen bacteria
TKKTTDLLFWLRVPESQGTRGYYSNVGDLRNT

SEQ ID NO: 63920 - protein, 98 aa, unidentified
  source 1..98: note = methanogen bacteria
NKTEILKLDSTSKNQFGGFSQASDMSYTMYWYKEGGPLYNGFLPKYAGVNEKGEALYWVDEDISDSERTGRPAPRQEDRCREARVHDRPEEEDHHLQG

SEQ ID NO: 63921 - protein, 12 aa, unidentified
  source 1..12: note = methanogen bacteria
SQLILDLNTSLS

SEQ ID NO: 63922 - protein, 19 aa, unidentified
  source 1..19: note = methanogen bacteria
LRTACRKAFQDIQSQDSDV

SEQ ID NO: 63923 - protein, 26 aa, unidentified
  source 1..26: note = methanogen bacteria
NDQIYGADSVFYQNNFGNSALNTAVS

SEQ ID NO: 63924 - protein, 25 aa, unidentified
  source 1..25: note = methanogen bacteria
VVKSSSLLLSDIIIYQQINGPILFS

SEQ ID NO: 63925 - protein, 23 aa, unidentified
  source 1..23: note = methanogen bacteria
MAGSIDLAEIVKYQVASGPILFT

SEQ ID NO: 63926 - protein, 32 aa, unidentified
  source 1..32: note = methanogen bacteria
LHATYPTFMEAIYALSNPQNVINNILSPPPSV

SEQ ID NO: 63927 - protein, 19 aa, unidentified
  source 1..19: note = methanogen bacteria
DLHYSFAKAFNLLEMATDN

SEQ ID NO: 63928 - protein, 19 aa, unidentified
  source 1..19: note = methanogen bacteria
GDMTSIFYILYDRIISVLD

SEQ ID NO: 63929 - protein, 24 aa, unidentified
  source 1..24: note = methanogen bacteria
TAARSIFLSDIAAYQHANGSFLFT

SEQ ID NO: 63930 - protein, 19 aa, unidentified
  source 1..19: note = methanogen bacteria
DLHYSFAKAFNLLEMATDN

SEQ ID NO: 63931 - protein, 19 aa, unidentified
  source 1..19: note = methanogen bacteria
GDMTSIFYILYDRIISVLD

SEQ ID NO: 63932 - protein, 24 aa, unidentified
  source 1..24: note = methanogen bacteria
TAAGSIFLSDIVAYQQANGPFLFT

SEQ ID NO: 63933 - protein, 24 aa, unidentified
  source 1..24: note = methanogen bacteria
TAARSIFLSDIVSYQQIHGPFLFT

SEQ ID NO: 63934 - protein, 24 aa, unidentified
  source 1..24: note = methanogen bacteria
LGTVYPTFIDAIFALKNPQNVINH

SEQ ID NO: 63935 - protein, 24 aa, unidentified
  source 1..24: note = methanogen bacteria
TASRSIFLPDIVAYQHAHGPFLFT

SEQ ID NO: 63936 - protein, 24 aa, unidentified
  source 1..24: note = methanogen bacteria
TAAKSIFLQDIVAYQQANGPFLFT

SEQ ID NO: 63937 - protein, 10 aa, unidentified
  source 1..10: note = methanogen bacteria
GVPATLFSPT

SEQ ID NO: 63938 - protein, 24 aa, unidentified
  source 1..24: note = methanogen bacteria
TAARSIFLNDIVSYQQAHGPFLFT

SEQ ID NO: 63939 - protein, 10 aa, unidentified
  source 1..10: note = methanogen bacteria
PQAFAIPALS

SEQ ID NO: 63940 - protein, 25 aa, unidentified
  source 1..25: note = methanogen bacteria
ITQARSIFLPDIVAYQQAHGPILFT

SEQ ID NO: 63941 - protein, 10 aa, unidentified
  source 1..10: note = methanogen bacteria
PYNYQFMAFS

SEQ ID NO: 63942 - protein, 22 aa, unidentified
  source 1..22: note = methanogen bacteria
LSKSIYLSDIVAYQQAHGPFLF

SEQ ID NO: 63943 - protein, 10 aa, unidentified
  source 1..10: note = methanogen bacteria
PEAYKIPALS

SEQ ID NO: 63944 - protein, 25 aa, unidentified
  source 1..25: note = methanogen bacteria
TAARSIFLQDIVAYQQMNGPFLFTV

SEQ ID NO: 63945 - protein, 24 aa, unidentified
  source 1..24: note = methanogen bacteria
TAARSIFLPDIVAYQHAHGPFLFT

SEQ ID NO: 63946 - protein, 10 aa, unidentified
  source 1..10: note = methanogen bacteria
FGPLNTTSGI

SEQ ID NO: 63947 - protein, 19 aa, unidentified
  source 1..19: note = methanogen bacteria
FHKPYSYMWNVFIGNPSIA

SEQ ID NO: 63948 - protein, 14 aa, unidentified
  source 1..14: note = methanogen bacteria
PIGDNFNTVELMYQ

SEQ ID NO: 63949 - protein, 22 aa, unidentified
  source 1..22: note = methanogen bacteria
LSKSIFLADIVAYQQANGPFLF

SEQ ID NO: 63950 - protein, 22 aa, unidentified
  source 1..22: note = methanogen bacteria
VEGSKAEMSGCVFENNSAEDDG

SEQ ID NO: 63951 - protein, 22 aa, unidentified
  source 1..22: note = methanogen bacteria
LSKSIYLSEIVAYQHAHGPVLF

SEQ ID NO: 63952 - protein, 68 aa, unidentified
  source 1..68: note = methanogen bacteria
MSPINPVKTYIANLGVVSPEKIAILESYWGVNEPITTKMFNWLANIIHLDFGTSLIYRAPVLDVIKEK

SEQ ID NO: 63953 - protein, 29 aa, unidentified
  source 1..29: note = methanogen bacteria
VYLGWFPTGLGVPVGTLSENVSFWDWLHR

SEQ ID NO: 63954 - protein, 24 aa, unidentified
  source 1..24: note = methanogen bacteria
EQIFTYPGIGQAAVSAGLRSDVPL

SEQ ID NO: 63955 - protein, 10 aa, unidentified
  source 1..10: note = methanogen bacteria
PQAYKIPALS

SEQ ID NO: 63956 - protein, 24 aa, unidentified
  source 1..24: note = methanogen bacteria
TAARSIFLQDIVAYQQANGPFLFT

SEQ ID NO: 63957 - protein, 24 aa, unidentified
  source 1..24: note = methanogen bacteria
TAARSIFLGDIVAYQQTHGPFLFT

SEQ ID NO: 63958 - protein, 10 aa, unidentified
  source 1..10: note = methanogen bacteria
IGVPPTIFSW

SEQ ID NO: 63959 - protein, 41 aa, unidentified
  source 1..41: note = methanogen bacteria
MKKYINEVIYIFTTAFLLFLQGLREASGGILDNFFACITNF

SEQ ID NO: 63960 - protein, 36 aa, unidentified
  source 1..36: note = methanogen bacteria
LTACIYRPWVADSNIKPYEGVLDDATGYSFPSGHAT

SEQ ID NO: 63961 - protein, 22 aa, unidentified
  source 1..22: note = methanogen bacteria
FKSYPMDYDTAGKLIVDPVKMA

SEQ ID NO: 63962 - protein, 24 aa, unidentified
  source 1..24: note = methanogen bacteria
TAARSIFLQDIVAFQQTHGPFLFT

SEQ ID NO: 63963 - protein, 20 aa, unidentified
  source 1..20: note = methanogen bacteria
NRTGAHKIYLWSNFFITYEA

SEQ ID NO: 63964 - protein, 20 aa, unidentified
  source 1..20: note = methanogen bacteria
KGVGMINIYPSIDFSFSNLP

SEQ ID NO: 63965 - protein, 80 aa, unidentified
  source 1..80: note = methanogen bacteria
GSRKRKGYLAKACDILLAYRDPGTICGIVRNIGREGEEAMVLSLEQLRSTEPDMFTTVFIGNSTTLEIAGRMVTPRGYQL

SEQ ID NO: 63966 - protein, 24 aa, unidentified
  source 1..24: note = methanogen bacteria
TAARSIFLQDIVLYQQANGPFLFT

SEQ ID NO: 63967 - protein, 11 aa, unidentified
  source 1..11: note = methanogen bacteria
IGVPATIMSPS

SEQ ID NO: 63968 - protein, 24 aa, unidentified
  source 1..24: note = methanogen bacteria
TAARSIFLQDIVTYQQIHGPFLFT

SEQ ID NO: 63969 - protein, 10 aa, unidentified
  source 1..10: note = methanogen bacteria
FFGPLTTPAQ

SEQ ID NO: 63970 - protein, 20 aa, unidentified
  source 1..20: note = methanogen bacteria
LHGYNSRFIWSVFIGEPSIT

SEQ ID NO: 63971 - protein, 14 aa, unidentified
  source 1..14: note = methanogen bacteria
GYSKLDFLSPRYLN

SEQ ID NO: 63972 - protein, 35 aa, unidentified
  source 1..35: note = methanogen bacteria
MVWDFIQNQLLGMKWLSVLIQKLVTACGLDATSRL

SEQ ID NO: 63973 - protein, 14 aa, unidentified
  source 1..14: note = methanogen bacteria
PEQWIETALGNKNP

SEQ ID NO: 63974 - protein, 10 aa, unidentified
  source 1..10: note = methanogen bacteria
SEALLAKGAL

SEQ ID NO: 63975 - protein, 33 aa, unidentified
  source 1..33: note = methanogen bacteria
IRWYSVEKIISLFYIDNIFEYIIFNVSPTGGHL

SEQ ID NO: 63976 - protein, 14 aa, unidentified
  source 1..14: note = methanogen bacteria
LTANPYPYYFNRSF

SEQ ID NO: 63977 - protein, 24 aa, unidentified
  source 1..24: note = methanogen bacteria
TAARSIFLQDIVQYQHVHGPFLFT

SEQ ID NO: 63978 - protein, 11 aa, unidentified
  source 1..11: note = methanogen bacteria
FFGPLTSQTQV

SEQ ID NO: 63979 - protein, 20 aa, unidentified
  source 1..20: note = methanogen bacteria
LYQYNSTHLWKVFIGEPSIT

SEQ ID NO: 63980 - protein, 13 aa, unidentified
  source 1..13: note = methanogen bacteria
NYIGSDWISLIYQ

SEQ ID NO: 63981 - protein, 24 aa, unidentified
  source 1..24: note = methanogen bacteria
TAAGSIFLKDIVAYQQAHGPFLFT

SEQ ID NO: 63982 - protein, 25 aa, unidentified
  source 1..25: note = methanogen bacteria
VTQARSIFLEEIVAYQQVHGPFLFT

SEQ ID NO: 63983 - protein, 24 aa, unidentified
  source 1..24: note = methanogen bacteria
TAARSIFLYDIVAYQQAHGPFLFT

SEQ ID NO: 63984 - protein, 10 aa, unidentified
  source 1..10: note = methanogen bacteria
GVPATIFSPT

SEQ ID NO: 63985 - protein, 24 aa, unidentified
  source 1..24: note = methanogen bacteria
TAAGSIFLQDIVAYQQANGPFLFT

SEQ ID NO: 63986 - protein, 24 aa, unidentified
  source 1..24: note = methanogen bacteria
TAAGSIFLSDIVAYQQANGPFLFT

SEQ ID NO: 63987 - protein, 67 aa, unidentified
  source 1..67: note = methanogen bacteria
LSPIDPVKAYLGQRIVSQEQLAIMGEYWGTNLSLGDRVFGWLSTLASGSMGFSLIYRVPVTEVIMQK

SEQ ID NO: 63988 - protein, 29 aa, unidentified
  source 1..29: note = methanogen bacteria
VYLGWFPIGLSVPIGQLSDTVTFWQWLYR

SEQ ID NO: 63989 - protein, 24 aa, unidentified
  source 1..24: note = methanogen bacteria
EQVFAYPGIGQATVAAGLRSDVPL

SEQ ID NO: 63990 - protein, 11 aa, unidentified
  source 1..11: note = methanogen bacteria
FIQGVANHSAI

SEQ ID NO: 63991 - protein, 68 aa, unidentified
  source 1..68: note = methanogen bacteria
QLSPIDPVRAYLGQRIVSEEQLAIIGHYWGTELSLGERVLGWLQTLATGSMGFSLIYRVPVTEVIISK

SEQ ID NO: 63992 - protein, 30 aa, unidentified
  source 1..30: note = methanogen bacteria
VYLGWFPIGLSVPIGQLSDTVTIWEWLDRL

SEQ ID NO: 63993 - protein, 24 aa, unidentified
  source 1..24: note = methanogen bacteria
EQVFAYPGIGQATVAAGLRSDVPL

SEQ ID NO: 63994 - protein, 36 aa, unidentified
  source 1..36: note = methanogen bacteria
FGVYDISISDAIGVFFGHLAGDEVDPDDDFYIWDTR

SEQ ID NO: 63995 - protein, 12 aa, unidentified
  source 1..12: note = methanogen bacteria
SGISVIPGLTGS

SEQ ID NO: 63996 - protein, 26 aa, unidentified
  source 1..26: note = methanogen bacteria
LVTAPSESLADAYSWRVGDLGRANSG

SEQ ID NO: 63997 - protein, 10 aa, unidentified
  source 1..10: note = methanogen bacteria
IPKFEYNLPQ

SEQ ID NO: 63998 - protein, 51 aa, unidentified
  source 1..51: note = methanogen bacteria
YAIIYNGFSINGYLSLNPSPFDYLINGIFYNIFTPIGDMLVKLQINGWNTS

SEQ ID NO: 63999 - protein, 13 aa, unidentified
  source 1..13: note = methanogen bacteria
IPRPVNPPETELD

SEQ ID NO: 64000 - protein, 12 aa, unidentified
  source 1..12: note = methanogen bacteria
GYYKFYNPNMNV

SEQ ID NO: 64001 - protein, 68 aa, unidentified
  source 1..68: note = methanogen bacteria
QLSPIDPVKAYLGQRIVSQEQLAIIGEYWGTNLSLGERVLGWLQTLASGSMGFSLIYRAPVTEVIMQK

SEQ ID NO: 64002 - protein, 30 aa, unidentified
  source 1..30: note = methanogen bacteria
SVHLGWFPIGLSVPIGQLSDTVTFWQWLYR

SEQ ID NO: 64003 - protein, 24 aa, unidentified
  source 1..24: note = methanogen bacteria
EQVFAYPGIGQATVAAGLRSDVPL

SEQ ID NO: 64004 - protein, 15 aa, unidentified
  source 1..15: note = methanogen bacteria
TRSDRVIDNVISGES

SEQ ID NO: 64005 - protein, 68 aa, unidentified
  source 1..68: note = methanogen bacteria
QLSPIDPVKAYLGQRIVSQEQLAIIGEYWGTNLSLAERVVGWLQTLASGSMGFSLIYRVPVTEVIAQK

SEQ ID NO: 64006 - protein, 29 aa, unidentified
  source 1..29: note = methanogen bacteria
VYLGWFPIGLSVPIGQLSDTVTFWQWLYR

SEQ ID NO: 64007 - protein, 24 aa, unidentified
  source 1..24: note = methanogen bacteria
EQVFAYPGIGQATVAAGLRSDVPL

SEQ ID NO: 64008 - protein, 68 aa, unidentified
  source 1..68: note = methanogen bacteria
QLSPIDPVKAYLGQRIVSQEQIAIVGEYWGTNLSLGERVIGWLQTLASGSMGFSLIYRVPVTEVIVQK

SEQ ID NO: 64009 - protein, 29 aa, unidentified
  source 1..29: note = methanogen bacteria
VYLGWFPIGLSVPIGQLSDTVTFWQWLYR

SEQ ID NO: 64010 - protein, 24 aa, unidentified
  source 1..24: note = methanogen bacteria
EQVFAYPGIGQATVAAGLRSDVPL

SEQ ID NO: 64011 - protein, 68 aa, unidentified
  source 1..68: note = methanogen bacteria
QMSPIDPVKAYLGQRIVSQEQMAIIGNYWGTNLTLGERVLGWLQTLATGSMGFSLIYRVPVTEVIMQK

SEQ ID NO: 64012 - protein, 29 aa, unidentified
  source 1..29: note = methanogen bacteria
VYLGWFPIGLSVPIGQLSDTVTFWQWLYR

SEQ ID NO: 64013 - protein, 24 aa, unidentified
  source 1..24: note = methanogen bacteria
EQVFAYPGIGQATVAAGLRSDVPL

SEQ ID NO: 64014 - protein, 10 aa, unidentified
  source 1..10: note = methanogen bacteria
LTFGVDNADF

SEQ ID NO: 64015 - protein, 24 aa, unidentified
  source 1..24: note = methanogen bacteria
SHNYTFSNICNIIFGHSGGLGVTF

SEQ ID NO: 64016 - protein, 16 aa, unidentified
  source 1..16: note = methanogen bacteria
VPRSQLSGRLICLGYF

SEQ ID NO: 64017 - protein, 12 aa, unidentified
  source 1..12: note = methanogen bacteria
VNFLAYIHHYNS

SEQ ID NO: 64018 - protein, 12 aa, unidentified
  source 1..12: note = methanogen bacteria
ERLYYGTYSVPD

SEQ ID NO: 64019 - protein, 68 aa, unidentified
  source 1..68: note = methanogen bacteria
QLSPIDPVKAYLGQRIVSQQQLSIIGEYWGTNLSLGERVLGWLQTLASGSMGFSLIYRVPVTEVIVQK

SEQ ID NO: 64020 - protein, 29 aa, unidentified
  source 1..29: note = methanogen bacteria
VYLGWFPIGLSVPIGQLSDTVTFWQWLYR

SEQ ID NO: 64021 - protein, 24 aa, unidentified
  source 1..24: note = methanogen bacteria
EQVFAYPGIGQATVAAGLRSDVPL

SEQ ID NO: 64022 - protein, 68 aa, unidentified
  source 1..68: note = methanogen bacteria
QLSPIDPVKAYLGQRIVSQEQLAIVGEYWGTNLSLGERVMGWLTTLASGSMGFSLIFRVPVTEVIVQK

SEQ ID NO: 64023 - protein, 29 aa, unidentified
  source 1..29: note = methanogen bacteria
VYLGWFPIGLSVPIGQLSDTVTFWQWLYR

SEQ ID NO: 64024 - protein, 24 aa, unidentified
  source 1..24: note = methanogen bacteria
EQVFAYPGIGQATVAAGLRSDVPL

SEQ ID NO: 64025 - protein, 11 aa, unidentified
  source 1..11: note = methanogen bacteria
LDLPVPLKDDC

SEQ ID NO: 64026 - protein, 12 aa, unidentified
  source 1..12: note = methanogen bacteria
LYDGRMEFMDHL

SEQ ID NO: 64027 - protein, 11 aa, unidentified
  source 1..11: note = methanogen bacteria
FFGPLNTPIKI

SEQ ID NO: 64028 - protein, 20 aa, unidentified
  source 1..20: note = methanogen bacteria
YLNGSYSKVWNTFIGNPSIT

SEQ ID NO: 64029 - protein, 14 aa, unidentified
  source 1..14: note = methanogen bacteria
DYNNINYISKIYQN

SEQ ID NO: 64030 - protein, 12 aa, unidentified
  source 1..12: note = methanogen bacteria
LTNMVGSYATGI

SEQ ID NO: 64031 - protein, 17 aa, unidentified
  source 1..17: note = methanogen bacteria
TDIIHLIYGHQYDASSS

SEQ ID NO: 64032 - protein, 11 aa, unidentified
  source 1..11: note = methanogen bacteria
FFGPLTTQTQV

SEQ ID NO: 64033 - protein, 20 aa, unidentified
  source 1..20: note = methanogen bacteria
YMHGNYTQVWNTFIGNPSIT

SEQ ID NO: 64034 - protein, 13 aa, unidentified
  source 1..13: note = methanogen bacteria
DYNNINFISEIYQ

SEQ ID NO: 64035 - protein, 67 aa, unidentified
  source 1..67: note = methanogen bacteria
MSPINPVKTYISNVIISQEQIATLEAYWGVNEPITTKMINWLGNIIHGDFGTSLIFRIPVIDVIKER

SEQ ID NO: 64036 - protein, 29 aa, unidentified
  source 1..29: note = methanogen bacteria
IYLGWFPSGLGVPIGSLSENVTFWEWLNR

SEQ ID NO: 64037 - protein, 24 aa, unidentified
  source 1..24: note = methanogen bacteria
EQIFTYPGIGQAAVSAGLRSDVPL

SEQ ID NO: 64038 - protein, 68 aa, unidentified
  source 1..68: note = methanogen bacteria
DLSPIDPVNAYLQNVPVSSAQRAALESYWGVGQPMYVKVWNWLINLLQGNLGTSLIYRIPVIDVILEK

SEQ ID NO: 64039 - protein, 30 aa, unidentified
  source 1..30: note = methanogen bacteria
GVELGWFPIGLGTPIGTLSNDVSIWDWISS

SEQ ID NO: 64040 - protein, 24 aa, unidentified
  source 1..24: note = methanogen bacteria
EQVFSYPGIGQTAVAAGLQSDVPL

SEQ ID NO: 64041 - protein, 11 aa, unidentified
  source 1..11: note = methanogen bacteria
INMYDYGIYRI

SEQ ID NO: 64042 - protein, 16 aa, unidentified
  source 1..16: note = methanogen bacteria
NSRSEKIVDNVISGES

SEQ ID NO: 64043 - protein, 67 aa, unidentified
  source 1..67: note = methanogen bacteria
LSPINPVKTYISNVVISQAQIANLEAYWGVNEPITSKMANWLGNVLQGNLGTSLIFRVPVMDVILER

SEQ ID NO: 64044 - protein, 29 aa, unidentified
  source 1..29: note = methanogen bacteria
IYLGWFPTGLGVPIGTLSENVSFWDWLNR

SEQ ID NO: 64045 - protein, 24 aa, unidentified
  source 1..24: note = methanogen bacteria
EQIFTYPGIGQAAVSAGLRSDVPL

SEQ ID NO: 64046 - protein, 17 aa, unidentified
  source 1..17: note = methanogen bacteria
SIPVFKLLFKKLIVGNE

SEQ ID NO: 64047 - protein, 11 aa, unidentified
  source 1..11: note = methanogen bacteria
YTGGAEVLNFK

SEQ ID NO: 64048 - protein, 11 aa, unidentified
  source 1..11: note = methanogen bacteria
GISNHILYYYW

SEQ ID NO: 64049 - protein, 16 aa, unidentified
  source 1..16: note = methanogen bacteria
IGVFAYSHEFQTYLDL

SEQ ID NO: 64050 - protein, 12 aa, unidentified
  source 1..12: note = methanogen bacteria
PHFIKPMKLSGT

SEQ ID NO: 64051 - protein, 11 aa, unidentified
  source 1..11: note = methanogen bacteria
FFGPLTTPTQV

SEQ ID NO: 64052 - protein, 20 aa, unidentified
  source 1..20: note = methanogen bacteria
YHGYNSKFIWNVFIGEPSIT

SEQ ID NO: 64053 - protein, 12 aa, unidentified
  source 1..12: note = methanogen bacteria
GYAKIDLIRYEN

SEQ ID NO: 64054 - protein, 11 aa, unidentified
  source 1..11: note = methanogen bacteria
FFGPLTTPTQI

SEQ ID NO: 64055 - protein, 20 aa, unidentified
  source 1..20: note = methanogen bacteria
LHGYNSKFIWNVFIGEPSIT

SEQ ID NO: 64056 - protein, 12 aa, unidentified
  source 1..12: note = methanogen bacteria
GYTKVSLIRYEN

SEQ ID NO: 64057 - protein, 68 aa, unidentified
  source 1..68: note = methanogen bacteria
DMSPINPVNAYISNMVVGPEKIAKLEAYWGVNQPITVKLMNWLGNILTGDFGTSLIYRTPVLQVISEK

SEQ ID NO: 64058 - protein, 29 aa, unidentified
  source 1..29: note = methanogen bacteria
IWLGWFPVSGGVPIGALSNTVSFWDWLRH

SEQ ID NO: 64059 - protein, 24 aa, unidentified
  source 1..24: note = methanogen bacteria
EQVFMYPGIGQAAVSAGLRSDVPL

SEQ ID NO: 64060 - protein, 22 aa, unidentified
  source 1..22: note = methanogen bacteria
LRNIEIFGNKMEYIVDCDYGAG

SEQ ID NO: 64061 - protein, 43 aa, unidentified
  source 1..43: note = methanogen bacteria
TGVVYCMNCTFHDNKAKYGGAIYNQGLLVVTNSSFYSNNGYGK

SEQ ID NO: 64062 - protein, 19 aa, unidentified
  source 1..19: note = methanogen bacteria
GGKNIVYLEGLSSAWQTGI

SEQ ID NO: 64063 - protein, 16 aa, unidentified
  source 1..16: note = methanogen bacteria
SNVYDINFCRWSCALT

SEQ ID NO: 64064 - protein, 19 aa, unidentified
  source 1..19: note = methanogen bacteria
PDDLKKVLSSDSNTIIVSS

SEQ ID NO: 64065 - protein, 20 aa, unidentified
  source 1..20: note = methanogen bacteria
IHSIKLDKDNGIQVVNAFIN

SEQ ID NO: 64066 - protein, 27 aa, unidentified
  source 1..27: note = methanogen bacteria
SSFSEDEVLDVISTIDSKKEGLDSILY

SEQ ID NO: 64067 - protein, 10 aa, unidentified
  source 1..10: note = methanogen bacteria
LNWDSYAFTD

SEQ ID NO: 64068 - protein, 19 aa, unidentified
  source 1..19: note = methanogen bacteria
SGSNYHMIWDVIVGNFSVT

SEQ ID NO: 64069 - protein, 13 aa, unidentified
  source 1..13: note = methanogen bacteria
DYNKLNLINLIYQ

SEQ ID NO: 64070 - protein, 15 aa, unidentified
  source 1..15: note = methanogen bacteria
GDMQVYLISHIKLPL

SEQ ID NO: 64071 - protein, 68 aa, unidentified
  source 1..68: note = methanogen bacteria
DLSPIDPVNAYLQQTAVSAAQRASLEQYWGVGEPLTTKIGKWLLMLLQGNLGTSLIYRIPVVDVIAQK

SEQ ID NO: 64072 - protein, 29 aa, unidentified
  source 1..29: note = methanogen bacteria
VYLGWFPIGLGVPIGTVESDVTIWQWIAR

SEQ ID NO: 64073 - protein, 24 aa, unidentified
  source 1..24: note = methanogen bacteria
EQVFQYPGIGQTAVAAGLQSDVPL

SEQ ID NO: 64074 - protein, 10 aa, unidentified
  source 1..10: note = methanogen bacteria
MIEYINLMSL

SEQ ID NO: 64075 - protein, 67 aa, unidentified
  source 1..67: note = methanogen bacteria
MSPINPVKTYISNMVVSPEQVAALESYWGVNEPITSKMANWFGNIIHGDFGNSLIFRMPVIDVIKER

SEQ ID NO: 64076 - protein, 29 aa, unidentified
  source 1..29: note = methanogen bacteria
VYLGWFPTGLGVPIGTLSENVSFWDWLNR

SEQ ID NO: 64077 - protein, 24 aa, unidentified
  source 1..24: note = methanogen bacteria
EQIFTYPGIGQAAVSAGLRSDVPL

SEQ ID NO: 64078 - protein, 13 aa, unidentified
  source 1..13: note = methanogen bacteria
NLQVYLISHINLP

SEQ ID NO: 64079 - protein, 67 aa, unidentified
  source 1..67: note = methanogen bacteria
LSPINPVKTYISNVIISADQIAKLEAYWGVNEPITSKMVNWLGNVVKGDLGTSLIFRIPVIDVIKER

SEQ ID NO: 64080 - protein, 29 aa, unidentified
  source 1..29: note = methanogen bacteria
IYLGWFPSGLGVPIGSLSENVTFWEWLNR

SEQ ID NO: 64081 - protein, 24 aa, unidentified
  source 1..24: note = methanogen bacteria
EQIFTYPGIGQAAVSAGLRSDVPL

SEQ ID NO: 64082 - protein, 67 aa, unidentified
  source 1..67: note = methanogen bacteria
LSPINPVKTYVSNMIVSQEQIAALEAYWGVNQPITTKLVNWLGNIIHGDLGTSLIFRMPVVDVIKER

SEQ ID NO: 64083 - protein, 29 aa, unidentified
  source 1..29: note = methanogen bacteria
VYLGWFPTGLGVPIGTLSEDVSFLDWLKR

SEQ ID NO: 64084 - protein, 24 aa, unidentified
  source 1..24: note = methanogen bacteria
EQVFTYPGIGQAAVSAGLRSDVPL

SEQ ID NO: 64085 - protein, 17 aa, unidentified
  source 1..17: note = methanogen bacteria
FKDQNMNELLEIIKSSN

SEQ ID NO: 64086 - protein, 67 aa, unidentified
  source 1..67: note = methanogen bacteria
LSPIDPVNAYLKQAVISPEQRLILEQYWGVNQPLTTKIWGWLSNLLQGNLGNSLIYRVPVIDVIYER

SEQ ID NO: 64087 - protein, 30 aa, unidentified
  source 1..30: note = methanogen bacteria
SVELGWFPIGMSVAIGTLSSDATIWQWLAR

SEQ ID NO: 64088 - protein, 24 aa, unidentified
  source 1..24: note = methanogen bacteria
EQVFSYPGIGQTAVAAGLQSDVTL

SEQ ID NO: 64089 - protein, 19 aa, unidentified
  source 1..19: note = methanogen bacteria
IGAPHNIVMYTVSHIPFES

SEQ ID NO: 64090 - protein, 17 aa, unidentified
  source 1..17: note = methanogen bacteria
SIPVFNLLFKKLIVGNE

SEQ ID NO: 64091 - protein, 15 aa, unidentified
  source 1..15: note = methanogen bacteria
SRSDRIVDNVISGEN

SEQ ID NO: 64092 - protein, 68 aa, unidentified
  source 1..68: note = methanogen bacteria
DLSPIDPVNAYLHGAAVSEAQRAILEQYFGTNTPMTEKIFHWLMDLIRGDLGTSLIFRRPVIDVIIEK

SEQ ID NO: 64093 - protein, 29 aa, unidentified
  source 1..29: note = methanogen bacteria
VYLGWFPIGFGVPIGVRSTDATFMEWAVR

SEQ ID NO: 64094 - protein, 24 aa, unidentified
  source 1..24: note = methanogen bacteria
EQVFSYPGIGQTAVAAGLQNDVPL

SEQ ID NO: 64095 - protein, 68 aa, unidentified
  source 1..68: note = methanogen bacteria
DLSPIDPVNAYLKGAAVSEAQRQILHQYFGTNVPLTTKIYHWLIDLAQGNLGTSLIYRMPVMDVIIDK

SEQ ID NO: 64096 - protein, 30 aa, unidentified
  source 1..30: note = methanogen bacteria
AVYLGLFPIGFGVPIGVKSTDATFMEWASR

SEQ ID NO: 64097 - protein, 24 aa, unidentified
  source 1..24: note = methanogen bacteria
EQVFSYPGIGQTAVAAGLQNDVPL

SEQ ID NO: 64098 - protein, 68 aa, unidentified
  source 1..68: note = methanogen bacteria
DLSPIDPVSAYLKGAAVSESQRAILESYFGVNVPLTTKIYHWLVQLIQGNLGTSLIYRAPVTDIILEK

SEQ ID NO: 64099 - protein, 29 aa, unidentified
  source 1..29: note = methanogen bacteria
IYLGWFPIGFGVPIGVKSTDVTFIDWASR

SEQ ID NO: 64100 - protein, 24 aa, unidentified
  source 1..24: note = methanogen bacteria
EQVFSYPGIGQTAVAAGLQNDVPL

SEQ ID NO: 64101 - protein, 15 aa, unidentified
  source 1..15: note = methanogen bacteria
SRSEKIVDNVISGET

SEQ ID NO: 64102 - protein, 68 aa, unidentified
  source 1..68: note = methanogen bacteria
DLSPINPVSVYLKGAAVSESQRAILNEYFGVGVPLQTKIYHWLLNLIQGNLGTSLIYRAPVLDVIIDK

SEQ ID NO: 64103 - protein, 31 aa, unidentified
  source 1..31: note = methanogen bacteria
AVYLKLFPIGFGVPIGVRSTDASFIDWASRL

SEQ ID NO: 64104 - protein, 24 aa, unidentified
  source 1..24: note = methanogen bacteria
EQVFSYPGIGQTAVTAGLQSDVPL

SEQ ID NO: 64105 - protein, 68 aa, unidentified
  source 1..68: note = methanogen bacteria
DLSPINPVSVYLKGAAVSEAQRQILNQYFGVGVPLPTKIYHWLLDLIQGNLGTSLIYRAPVIDVIVDK

SEQ ID NO: 64106 - protein, 31 aa, unidentified
  source 1..31: note = methanogen bacteria
AVYLKLFPIGFGVPIGVKSTDATFIEWASRL

SEQ ID NO: 64107 - protein, 24 aa, unidentified
  source 1..24: note = methanogen bacteria
EQVFSYPGIGQTAVAAGLQSDVPL

SEQ ID NO: 64108 - protein, 68 aa, unidentified
  source 1..68: note = methanogen bacteria
DLSPIDPVSAYLKGAAVSEAQRQILQQYFGTNVPLPTKIYHWLLDLIQGNLGTSLIYRAPVIDVIFEK

SEQ ID NO: 64109 - protein, 29 aa, unidentified
  source 1..29: note = methanogen bacteria
VYLGWFPIGFGVPIGVRSTDATFMEWATR

SEQ ID NO: 64110 - protein, 24 aa, unidentified
  source 1..24: note = methanogen bacteria
EQVFSYPGIGQTAVAAGLQNDVPL

SEQ ID NO: 64111 - protein, 15 aa, unidentified
  source 1..15: note = methanogen bacteria
NYGGLFPGDVLTSDR

SEQ ID NO: 64112 - protein, 22 aa, unidentified
  source 1..22: note = methanogen bacteria
DGTEAYGRYAEGLVFIAAAPFA

SEQ ID NO: 64113 - protein, 10 aa, unidentified
  source 1..10: note = methanogen bacteria
SVMEGPAIGD

SEQ ID NO: 64114 - protein, 10 aa, unidentified
  source 1..10: note = methanogen bacteria
IYMGSVGLVS

SEQ ID NO: 64115 - protein, 16 aa, unidentified
  source 1..16: note = methanogen bacteria
LVLYNLHTSPHVETFR

SEQ ID NO: 64116 - protein, 68 aa, unidentified
  source 1..68: note = methanogen bacteria
DLSPIDPVNAYLNGAAVSEAQRQILQQYFGTNVPMQTKIYHWLLDLLQGNLGTSLIYRAPVIDVILDK

SEQ ID NO: 64117 - protein, 30 aa, unidentified
  source 1..30: note = methanogen bacteria
AVYLGWFPVGFGVPIGVKSTDATFMEWASR

SEQ ID NO: 64118 - protein, 24 aa, unidentified
  source 1..24: note = methanogen bacteria
EQVFTYPGIGQTAVAAGLQSDVPL

SEQ ID NO: 64119 - protein, 68 aa, unidentified
  source 1..68: note = methanogen bacteria
DLSPIDPVNAYLHGAAVSEAQRQILQQYFGTNVPLPEKIFHWLMDLIQGNLGTSLIYRRPVMDVIIDK

SEQ ID NO: 64120 - protein, 30 aa, unidentified
  source 1..30: note = methanogen bacteria
SVYLGLFPIGFGVPIGVRSTDATFLEWATR

SEQ ID NO: 64121 - protein, 24 aa, unidentified
  source 1..24: note = methanogen bacteria
EQVFSYPGIGQTAVAAGLQNDVPL

SEQ ID NO: 64122 - protein, 68 aa, unidentified
  source 1..68: note = methanogen bacteria
DLSPIDPVNAYLRQAAVSEAQRQILENYFGTNVPLTTKIFHWLMDLIHLDLGTSLIYRAPVIDIIIDK

SEQ ID NO: 64123 - protein, 30 aa, unidentified
  source 1..30: note = methanogen bacteria
AVYLGWFPIGFGVPIGVKSTDATFMEWASR

SEQ ID NO: 64124 - protein, 24 aa, unidentified
  source 1..24: note = methanogen bacteria
EQVFSYPGVGQTAVAAGLNSDVPL

SEQ ID NO: 64125 - protein, 15 aa, unidentified
  source 1..15: note = methanogen bacteria
SRSDKIVDNVISGES

SEQ ID NO: 64126 - protein, 68 aa, unidentified
  source 1..68: note = methanogen bacteria
DLSPIDPVNAYLRQAAVSEAQRQILENYFGTNVPLTTKIFHWLLDLVHLDLGTSLIYRAPVIDIIWDK

SEQ ID NO: 64127 - protein, 31 aa, unidentified
  source 1..31: note = methanogen bacteria
AVYLGWFPIGFGVPIGVKSTDATFMEWASRL

SEQ ID NO: 64128 - protein, 24 aa, unidentified
  source 1..24: note = methanogen bacteria
EQVFSYPGIGQTAVAAGLNSDVPL

SEQ ID NO: 64129 - protein, 68 aa, unidentified
  source 1..68: note = methanogen bacteria
DLSPINPVTAYLKGAAVSESQRAILESYFGVNVPLPTKIYHWLLDLAQGNLGTSLIYRAPVMDVIIDK

SEQ ID NO: 64130 - protein, 30 aa, unidentified; identical to SEQ ID NO: 64123
  source 1..30: note = methanogen bacteria

SEQ ID NO: 64131 - protein, 24 aa, unidentified
  source 1..24: note = methanogen bacteria
EQVFSYPGIGQTAVAAGLQNDVPL

SEQ ID NO: 64132 - protein, 68 aa, unidentified
  source 1..68: note = methanogen bacteria
DLSPIDPVNAYLHGAAVSETQRQILQQYFGTNVPMTEKIFHWLMDLIQGNLGTSLIYRRPVIDVIIDK

SEQ ID NO: 64133 - protein, 29 aa, unidentified
  source 1..29: note = methanogen bacteria
VYLGWFPIGFGVPIGVRSTDATFIEWATR

SEQ ID NO: 64134 - protein, 24 aa, unidentified
  source 1..24: note = methanogen bacteria
EQVFSYPGIGQTAVAAGLQNDVPL

SEQ ID NO: 64135 - protein, 18 aa, unidentified
  source 1..18: note = methanogen bacteria
INNNLIVNIYKSDVMFPI

SEQ ID NO: 64136 - protein, 11 aa, unidentified
  source 1..11: note = methanogen bacteria
YIGVEPDLAIL

SEQ ID NO: 64137 - protein, 14 aa, unidentified
  source 1..14: note = methanogen bacteria
GWGVSTFPYSIGYV

SEQ ID NO: 64138 - protein, 68 aa, unidentified
  source 1..68: note = methanogen bacteria
DLSPIDPVNAYLRQAAVSEAQRQILENYFGTNVPLTTKIYHWLLDLIQLNLGTSLIYRAPVIDIIWEK

SEQ ID NO: 64139 - protein, 30 aa, unidentified
  source 1..30: note = methanogen bacteria
AVYLGWFPIGFGVPIGVRSTDATFLEWASR

SEQ ID NO: 64140 - protein, 24 aa, unidentified
  source 1..24: note = methanogen bacteria
EQVFSYPGIGQTAVAAGLSSDVPL

SEQ ID NO: 64141 - protein, 24 aa, unidentified
  source 1..24: note = methanogen bacteria
TAARSIFLSDIVTYQQTHGPFLFT

SEQ ID NO: 64142 - protein, 11 aa, unidentified
  source 1..11: note = methanogen bacteria
LRVSPFMEIPA

SEQ ID NO: 64143 - protein, 68 aa, unidentified
  source 1..68: note = methanogen bacteria
DLSPINPVTVYLKGAAVSPAQRAILEQYFGVGVPLPTKIYHWLCDLAQGNLGTSLIYRVPVIDVIWDK

SEQ ID NO: 64144 - protein, 30 aa, unidentified; identical to SEQ ID NO: 64123
  source 1..30: note = methanogen bacteria

SEQ ID NO: 64145 - protein, 24 aa, unidentified
  source 1..24: note = methanogen bacteria
EQVFSYPGIGQTAVAAGLQSDVPL

SEQ ID NO: 64146 - protein, 68 aa, unidentified
  source 1..68: note = methanogen bacteria
DLSPIDPVNAYLRQAAVSEAQRQILQNYFGTNVPLTTKIFHWLMDLFQGNLGTSLIYRAPVIDIILDK

SEQ ID NO: 64147 - protein, 31 aa, unidentified
  source 1..31: note = methanogen bacteria
AVYLGWFPIGFGVPIGVKSTDATFFEWASRL

SEQ ID NO: 64148 - protein, 24 aa, unidentified
  source 1..24: note = methanogen bacteria
EQVFSYPGVGQTAVAAGLNSDVPL

SEQ ID NO: 64149 - protein, 29 aa, unidentified
  source 1..29: note = methanogen bacteria
NAYYPTFMDAIYGLTNPQNVINNILTPQQ

SEQ ID NO: 64150 - protein, 15 aa, unidentified
  source 1..15: note = methanogen bacteria
SRSDRVIDNVVAGES

SEQ ID NO: 64151 - protein, 16 aa, unidentified
  source 1..16: note = methanogen bacteria
FDGSNSFIPKLFKTNW

SEQ ID NO: 64152 - protein, 24 aa, unidentified
  source 1..24: note = methanogen bacteria
TSATTSWTAFFINIYGTTFHISVD

SEQ ID NO: 64153 - protein, 25 aa, unidentified
  source 1..25: note = methanogen bacteria
MRRCPQCGSAGDDIYGFCIKCGYEF

SEQ ID NO: 64154 - protein, 19 aa, unidentified
  source 1..19: note = methanogen bacteria
FTNPDEADYCVKCGSPLIF

SEQ ID NO: 64155 - protein, 31 aa, unidentified
  source 1..31: note = methanogen bacteria
IAVLYMTGSIPPEVLTDYKSLLIGNFTPFHR

SEQ ID NO: 64156 - protein, 15 aa, unidentified
  source 1..15: note = methanogen bacteria
SRSDRVIDNVVAGET

SEQ ID NO: 64157 - protein, 13 aa, unidentified
  source 1..13: note = methanogen bacteria
VSNLKLTNDSLYD

SEQ ID NO: 64158 - protein, 10 aa, unidentified
  source 1..10: note = methanogen bacteria
SVINTFMSLG

SEQ ID NO: 64159 - protein, 23 aa, unidentified
  source 1..23: note = methanogen bacteria
SIFIDKSPANVRTMTILIGSMLG

SEQ ID NO: 64160 - protein, 10 aa, unidentified
  source 1..10: note = methanogen bacteria
VPSSMDVQLV

SEQ ID NO: 64161 - protein, 10 aa, unidentified
  source 1..10: note = methanogen bacteria
WMDGQQILHF

SEQ ID NO: 64162 - protein, 13 aa, unidentified
  source 1..13: note = methanogen bacteria
LRDGDFNVLGYNW

SEQ ID NO: 64163 - protein, 27 aa, unidentified
  source 1..27: note = methanogen bacteria
VLNYIPHEFISNFVCYNNNLHSSWIRV

SEQ ID NO: 64164 - protein, 14 aa, unidentified
  source 1..14: note = methanogen bacteria
DWYIHGLPLTGKEM

SEQ ID NO: 64165 - protein, 23 aa, unidentified
  source 1..23: note = methanogen bacteria
MARSINLLDIVVYQQVAGPILFT

SEQ ID NO: 64166 - protein, 12 aa, unidentified
  source 1..12: note = methanogen bacteria
NIVNEYGVLPSP

SEQ ID NO: 64167 - protein, 31 aa, unidentified
  source 1..31: note = methanogen bacteria
FHIGWIKTFDIMSILDYIYNAYLCHSKGFYQ

SEQ ID NO: 64168 - protein, 12 aa, unidentified
  source 1..12: note = methanogen bacteria
STPKDIYTFNRY

SEQ ID NO: 64169 - protein, 16 aa, unidentified
  source 1..16: note = methanogen bacteria
FGQSTILNFPVLNIPL

SEQ ID NO: 64170 - protein, 20 aa, unidentified
  source 1..20: note = methanogen bacteria
PEISDGGHFMMDMLGVAIPS

SEQ ID NO: 64171 - protein, 15 aa, unidentified
  source 1..15: note = methanogen bacteria
ESRSERIVDNVTSGE

SEQ ID NO: 64172 - protein, 46 aa, unidentified
  source 1..46: note = methanogen bacteria
IGFISDYMLVTNFDFNQISTAVPNSLPMDFDFNSVIKDVSKVVLNF

SEQ ID NO: 64173 - protein, 15 aa, unidentified
  source 1..15: note = methanogen bacteria
PIEIHLTNSIEISIM

SEQ ID NO: 64174 - protein, 10 aa, unidentified
  source 1..10: note = methanogen bacteria
GQSIHLIFEM

SEQ ID NO: 64175 - protein, 41 aa, unidentified
  source 1..41: note = methanogen bacteria
STLPLHPFAFAMASGVGSASMNAASLGPTLAEFPALETSIE

SEQ ID NO: 64176 - protein, 17 aa, unidentified
  source 1..17: note = methanogen bacteria
YDRSARVVDSVASGESS

SEQ ID NO: 64177 - protein, 91 aa, unidentified
  source 1..91: note = methanogen bacteria
LKLTQNGSVTFSGFHTIKLENEIPIKKGDNFTVIMTKNSAPLLNFSQIYFKENVSFYNNGNGWIDASLKNQTAILKVYTKDLAIYTEDLVK

SEQ ID NO: 64178 - protein, 73 aa, unidentified
  source 1..73: note = methanogen bacteria
SKFEAEIGIANETVIFEINGETYNRTSDENGTARLAINLNPGNYTIKTTFNGTTVENMITVLPTLIADNLVKY

SEQ ID NO: 64179 - protein, 19 aa, unidentified
  source 1..19: note = methanogen bacteria
FFISLIDGEGKAISGINIT

SEQ ID NO: 64180 - protein, 22 aa, unidentified
  source 1..22: note = methanogen bacteria
NGVFYNRLTNENGTAKLNINLE

SEQ ID NO: 64181 - protein, 22 aa, unidentified
  source 1..22: note = methanogen bacteria
GEYILTATDPLTGLQMSYNITV

SEQ ID NO: 64182 - protein, 11 aa, unidentified
  source 1..11: note = methanogen bacteria
PVLFADNLEMK

SEQ ID NO: 64183 - protein, 17 aa, unidentified
  source 1..17: note = methanogen bacteria
NALVLNGEGKPLANAKV

SEQ ID NO: 64184 - protein, 44 aa, unidentified
  source 1..44: note = methanogen bacteria
GVFYTKYSNSSGIAKLNINLMAGEYIITSEYDGMRISNTITIKD

SEQ ID NO: 64185 - protein, 17 aa, unidentified
  source 1..17: note = methanogen bacteria
KAVKFGPGDTSYTNNDT

SEQ ID NO: 64186 - protein, 16 aa, unidentified
  source 1..16: note = methanogen bacteria
GDMQVYLISRFNLSLT

SEQ ID NO: 64187 - protein, 15 aa, unidentified
  source 1..15: note = methanogen bacteria
LHSQLVSNFHISIDN

SEQ ID NO: 64188 - protein, 10 aa, unidentified
  source 1..10: note = methanogen bacteria
CGSGADFDAA

SEQ ID NO: 64189 - protein, 10 aa, unidentified
  source 1..10: note = methanogen bacteria
SHSTVTDNLG

SEQ ID NO: 64190 - protein, 20 aa, unidentified
  source 1..20: note = methanogen bacteria
QKRGVHRIYLMKNFFITYEA

SEQ ID NO: 64191 - protein, 19 aa, unidentified
  source 1..19: note = methanogen bacteria
GYGLTNIYPSLDFALTDLP

SEQ ID NO: 64192 - protein, 14 aa, unidentified
  source 1..14: note = methanogen bacteria
EDIIKIIANLSKYN

SEQ ID NO: 64193 - protein, 20 aa, unidentified
  source 1..20: note = methanogen bacteria
NSVDLSSLDNINIFNREYFT

SEQ ID NO: 64194 - protein, 11 aa, unidentified
  source 1..11: note = methanogen bacteria
QVYLVSHINLA

SEQ ID NO: 64195 - protein, 32 aa, unidentified
  source 1..32: note = methanogen bacteria
LHSTYPTFIDAIYALGNPQNVINNILTPQPEI

SEQ ID NO: 64196 - protein, 35 aa, unidentified
  source 1..35: note = methanogen bacteria
MIKIFTTMFLLFLQGIRESVGGSLNTFFMNCTDFG

SEQ ID NO: 64197 - protein, 36 aa, unidentified
  source 1..36: note = methanogen bacteria
LTACVYRPWVADPNVHPYEKALETATGYSFPSGHIT

SEQ ID NO: 64198 - protein, 21 aa, unidentified
  source 1..21: note = methanogen bacteria
KSYPMDYDSAGKLIVDPAKMA

SEQ ID NO: 64199 - protein, 10 aa, unidentified
  source 1..10: note = methanogen bacteria
FSSGNTIDYT

SEQ ID NO: 64200 - protein, 74 aa, unidentified
  source 1..74: note = methanogen bacteria
GLGGAICIVGAAENSMFTGDYVLNSALAGGAIFVYGIEIPKLKMTRPFNNNAIYSRFVYNGAYEGGAILINATS

SEQ ID NO: 64201 - protein, 15 aa, unidentified
  source 1..15: note = methanogen bacteria
SRSDRVIDNVVSGES

SEQ ID NO: 64202 - protein, 17 aa, unidentified
  source 1..17: note = methanogen bacteria
VAGWTGGVLFLKPGRAL

SEQ ID NO: 64203 - protein, 16 aa, unidentified
  source 1..16: note = methanogen bacteria
IPSRVILLQHPYHKHF

SEQ ID NO: 64204 - protein, 18 aa, unidentified
  source 1..18: note = methanogen bacteria
GEDVKELQTILQNKGYYV

SEQ ID NO: 64205 - protein, 43 aa, unidentified
  source 1..43: note = methanogen bacteria
QTSGASKTVTKTSTNSNNCAGQKFSKTELYKAGQTLKKHIGNN

SEQ ID NO: 64206 - protein, 39 aa, unidentified
  source 1..39: note = methanogen bacteria
DHQNNAYNCGPTSLSMCMQMMGEYIPENQLAREAGTTRD

SEQ ID NO: 64207 - protein, 15 aa, unidentified
  source 1..15: note = methanogen bacteria
SGTDRIVDNVVSGEN

SEQ ID NO: 64208 - protein, 16 aa, unidentified
  source 1..16: note = methanogen bacteria
AGTDRLVDHVVSGENN

SEQ ID NO: 64209 - protein, 10 aa, unidentified
  source 1..10: note = methanogen bacteria
VASLGEAAIS

SEQ ID NO: 64210 - protein, 19 aa, unidentified
  source 1..19: note = methanogen bacteria
LIGILFGQIEADVWHNADV

SEQ ID NO: 64211 - protein, 10 aa, unidentified
  source 1..10: note = methanogen bacteria
STFGTMAIAA

SEQ ID NO: 64212 - protein, 15 aa, unidentified
  source 1..15: note = methanogen bacteria
SRSDRVIDNVVSGET

SEQ ID NO: 64213 - protein, 12 aa, unidentified
  source 1..12: note = methanogen bacteria
MLIATTGEIRPI

SEQ ID NO: 64214 - protein, 15 aa, unidentified
  source 1..15: note = methanogen bacteria
AFSLFSINGMGTEVF

SEQ ID NO: 64215 - protein, 20 aa, unidentified
  source 1..20: note = methanogen bacteria
YPLISQFIGNAFFSGFSYIR

SEQ ID NO: 64216 - protein, 22 aa, unidentified
  source 1..22: note = methanogen bacteria
LRILYLKITMLLKMVEQYRQEH

SEQ ID NO: 64217 - protein, 14 aa, unidentified
  source 1..14: note = methanogen bacteria
KMQVYLISQIKLPL

SEQ ID NO: 64218 - protein, 14 aa, unidentified
  source 1..14: note = methanogen bacteria
RTDRIIDNVVAGET

SEQ ID NO: 64219 - protein, 13 aa, unidentified
  source 1..13: note = methanogen bacteria
AALAKTVTATAFY

SEQ ID NO: 64220 - protein, 15 aa, unidentified
  source 1..15: note = methanogen bacteria
AALTKVIAPASMFYP

SEQ ID NO: 64221 - protein, 10 aa, unidentified
  source 1..10: note = methanogen bacteria
ALNYKPNTIE

SEQ ID NO: 64222 - protein, 30 aa, unidentified; identical to SEQ ID NO: 62705
  source 1..30: note = methanogen bacteria

SEQ ID NO: 64223 - protein, 18 aa, unidentified
  source 1..18: note = methanogen bacteria
LTIDAEFTVKDFVAQFYL

SEQ ID NO: 64224 - protein, 17 aa, unidentified
  source 1..17: note = methanogen bacteria
YIGVIPSIRAYVCSGAD

SEQ ID NO: 64225 - protein, 15 aa, unidentified
  source 1..15: note = methanogen bacteria
AQPKNYPSIYDLFLI

SEQ ID NO: 64226 - protein, 13 aa, unidentified
  source 1..13: note = methanogen bacteria
LMANVFLKKPETL

SEQ ID NO: 64227 - protein, 11 aa, unidentified
  source 1..11: note = methanogen bacteria
KFLTLESVGFF

SEQ ID NO: 64228 - protein, 36 aa, unidentified
  source 1..36: note = methanogen bacteria
MEKMFTTAFLLFLQGIRESAGGPLNSFFMSCTDFGN

SEQ ID NO: 64229 - protein, 36 aa, unidentified
  source 1..36: note = methanogen bacteria
LTACVYRPWVADSNIHPYEKALEAATGYSFPSGHVA

SEQ ID NO: 64230 - protein, 21 aa, unidentified
  source 1..21: note = methanogen bacteria
KSYPMDYDSAGKLLVNPAKMA

SEQ ID NO: 64231 - protein, 15 aa, unidentified
  source 1..15: note = methanogen bacteria
SGTDRLIDNVVSGEN

SEQ ID NO: 64232 - protein, 11 aa, unidentified
  source 1..11: note = methanogen bacteria
TRLFIAESPDA

SEQ ID NO: 64233 - protein, 58 aa, unidentified
  source 1..58: note = methanogen bacteria
GTVMNNTSSDLQGTSQVSSSSGDSAQVSSSVNNSSEKVTGSSNAKSGTVYWASVKTNS

SEQ ID NO: 64234 - protein, 38 aa, unidentified
  source 1..38: note = methanogen bacteria
HKPNCEWAQKISDDNKIVFHSRQDALNSGRQPCEVCNP

SEQ ID NO: 64235 - protein, 14 aa, unidentified
  source 1..14: note = methanogen bacteria
SSTDRIVDNVVSGE

SEQ ID NO: 64236 - protein, 15 aa, unidentified
  source 1..15: note = methanogen bacteria
SRSDRVIDNVISGEN

SEQ ID NO: 64237 - protein, 21 aa, unidentified
  source 1..21: note = methanogen bacteria
EFGILPSTFLNAYLSLQDFAN

SEQ ID NO: 64238 - protein, 18 aa, unidentified
  source 1..18: note = methanogen bacteria
DMGNQITDLYHPIFAVFD

SEQ ID NO: 64239 - protein, 21 aa, unidentified
  source 1..21: note = methanogen bacteria
EFGILPSTFLNAYLSLQDFAN

SEQ ID NO: 64240 - protein, 17 aa, unidentified
  source 1..17: note = methanogen bacteria
DMGNQITDLYHPIFAVF

SEQ ID NO: 64241 - protein, 11 aa, unidentified
  source 1..11: note = methanogen bacteria
IYNAWVGPTLS

SEQ ID NO: 64242 - protein, 32 aa, unidentified
  source 1..32: note = methanogen bacteria
GISHVVKGFDLVSLGNFVVGAFMGEVYGFNAN

SEQ ID NO: 64243 - protein, 14 aa, unidentified
  source 1..14: note = methanogen bacteria
RSSPTNISCFQRYS

SEQ ID NO: 64244 - protein, 68 aa, unidentified
  source 1..68: note = methanogen bacteria
QLSPIDPVRAYLGQRIVSQEQLAIVGQYWGTDLTLGERVLGWLQTLASGSMGFSLIYRVPVTEVIVQK

SEQ ID NO: 64245 - protein, 29 aa, unidentified
  source 1..29: note = methanogen bacteria
VYLGWFPIGLSVPIGQLSDTVTFWQWLYR

SEQ ID NO: 64246 - protein, 24 aa, unidentified
  source 1..24: note = methanogen bacteria
EQVFAYPGIGQATVAAGLRSDVPL

SEQ ID NO: 64247 - protein, 21 aa, unidentified
  source 1..21: note = methanogen bacteria
EFGILPGTFIHAYLSLQDFAN

SEQ ID NO: 64248 - protein, 17 aa, unidentified
  source 1..17: note = methanogen bacteria
DMGTQITNLYHPIFAIF

SEQ ID NO: 64249 - protein, 14 aa, unidentified
  source 1..14: note = methanogen bacteria
GLTSFDGTETGLDG

SEQ ID NO: 64250 - protein, 19 aa, unidentified
  source 1..19: note = methanogen bacteria
LLVFAPSEYHTLDEGEDAV

SEQ ID NO: 64251 - protein, 22 aa, unidentified
  source 1..22: note = methanogen bacteria
IGEEISEDFTDKMSNYEIMASM

SEQ ID NO: 64252 - protein, 22 aa, unidentified
  source 1..22: note = methanogen bacteria
EGNLILENSTLKDNSADDCSGA

SEQ ID NO: 64253 - protein, 34 aa, unidentified
  source 1..34: note = methanogen bacteria
VEGSKAEIYGCTFENNHAKDDEGALWAKDNLIAK

SEQ ID NO: 64254 - protein, 30 aa, unidentified
  source 1..30: note = methanogen bacteria
KAEIYGCTFENNHAKDDGGALWAKGNANIQ

SEQ ID NO: 64255 - protein, 14 aa, unidentified
  source 1..14: note = methanogen bacteria
RSDRVIDNVVSGET

SEQ ID NO: 64256 - protein, 10 aa, unidentified
  source 1..10: note = methanogen bacteria
FSSGNTMDYV

SEQ ID NO: 64257 - protein, 14 aa, unidentified
  source 1..14: note = methanogen bacteria
GEMQVYLISHIKLS

SEQ ID NO: 64258 - protein, 21 aa, unidentified
  source 1..21: note = methanogen bacteria
SDGLTLEEGVRLSAFLANDKF

SEQ ID NO: 64259 - protein, 10 aa, unidentified
  source 1..10: note = methanogen bacteria
VTGITERSIE

SEQ ID NO: 64260 - protein, 10 aa, unidentified
  source 1..10: note = methanogen bacteria
FSSNNSMSYI

SEQ ID NO: 64261 - protein, 15 aa, unidentified
  source 1..15: note = methanogen bacteria
SGTERIVDNVVSGEN

SEQ ID NO: 64262 - protein, 10 aa, unidentified
  source 1..10: note = methanogen bacteria
TVFHPHNYDR

SEQ ID NO: 64263 - protein, 12 aa, unidentified
  source 1..12: note = methanogen bacteria
GQYEIISINLSS

SEQ ID NO: 64264 - protein, 32 aa, unidentified
  source 1..32: note = methanogen bacteria
MGFNVSGQEEITSLINFNQVHYSILGGNNFGP

SEQ ID NO: 64265 - protein, 11 aa, unidentified
  source 1..11: note = methanogen bacteria
FSGGSRDDNGA

SEQ ID NO: 64266 - protein, 10 aa, unidentified
  source 1..10: note = methanogen bacteria
FSNGISLDYP

SEQ ID NO: 64267 - protein, 22 aa, unidentified
  source 1..22: note = methanogen bacteria
EWGILPGTFLNVYLSLQDFADN

SEQ ID NO: 64268 - protein, 18 aa, unidentified
  source 1..18: note = methanogen bacteria
VDFGNPVTNLYHPIFEVF

SEQ ID NO: 64269 - protein, 10 aa, unidentified
  source 1..10: note = methanogen bacteria
GNQLFGHLNS

SEQ ID NO: 64270 - protein, 12 aa, unidentified
  source 1..12: note = methanogen bacteria
FSGGGGDNDNGG

SEQ ID NO: 64271 - protein, 10 aa, unidentified
  source 1..10: note = methanogen bacteria
FSSGNAMDYT

SEQ ID NO: 64272 - protein, 34 aa, unidentified
  source 1..34: note = methanogen bacteria
TSFFENEAYSYYDDEDEINIAGFGGAIMHFGEFD

SEQ ID NO: 64273 - protein, 91 aa, unidentified
  source 1..91: note = methanogen bacteria
VSFLGNKVSGYGHGGAIAVVGTTRPKSLIENAFFSQNICEGAGGGAIYTVHDLVVANCIFIRNYAVGKKEVQFGPDKDIDLAGGTIYCRDE

SEQ ID NO: 64274 - protein, 10 aa, unidentified
  source 1..10: note = methanogen bacteria
YHPYDISTAN

SEQ ID NO: 64275 - protein, 10 aa, unidentified
  source 1..10: note = methanogen bacteria
FSSANTIDYA

SEQ ID NO: 64276 - protein, 10 aa, unidentified
  source 1..10: note = methanogen bacteria
FSNGNAMDYA

SEQ ID NO: 64277 - protein, 15 aa, unidentified
  source 1..15: note = methanogen bacteria
SRTDRIIDNVVAGET

SEQ ID NO: 64278 - protein, 10 aa, unidentified
  source 1..10: note = methanogen bacteria
IHNTEVIFPE

SEQ ID NO: 64279 - protein, 21 aa, unidentified
  source 1..21: note = methanogen bacteria
WGIMPASFLNFYLSIQNIADN

SEQ ID NO: 64280 - protein, 18 aa, unidentified
  source 1..18: note = methanogen bacteria
DLHIPVTDMYGPIFATFD

SEQ ID NO: 64281 - protein, 10 aa, unidentified
  source 1..10: note = methanogen bacteria
ESQVLFDNLV

SEQ ID NO: 64282 - protein, 20 aa, unidentified
  source 1..20: note = methanogen bacteria
MDPSFSGRPLFEEGRSVNEM

SEQ ID NO: 64283 - protein, 12 aa, unidentified
  source 1..12: note = methanogen bacteria
FTNSGAVYAHGI

SEQ ID NO: 64284 - protein, 61 aa, unidentified
  source 1..61: note = methanogen bacteria
NEADAPNLIQYVGYMPCFAPDMALNSLGNNISLEHFGTNFVPSAWMTLGGLLPYPVRLGSD

SEQ ID NO: 64285 - protein, 14 aa, unidentified
  source 1..14: note = methanogen bacteria
PNSFKWVLSEYNGI

SEQ ID NO: 64286 - protein, 10 aa, unidentified
  source 1..10: note = methanogen bacteria
ESQVLFDNLV

SEQ ID NO: 64287 - protein, 10 aa, unidentified
  source 1..10: note = methanogen bacteria
GGQLFANLDS

SEQ ID NO: 64288 - protein, 15 aa, unidentified
  source 1..15: note = methanogen bacteria
PIKIPLAKGVEVSIM

SEQ ID NO: 64289 - protein, 10 aa, unidentified
  source 1..10: note = methanogen bacteria
GQSMHLIFEM

SEQ ID NO: 64290 - protein, 41 aa, unidentified
  source 1..41: note = methanogen bacteria
SLLPLHPYAFAMASGVGSASMNAAALGPTLAAFPTLETNIE

SEQ ID NO: 64291 - protein, 10 aa, unidentified
  source 1..10: note = methanogen bacteria
FSSGNTMDYT

SEQ ID NO: 64292 - protein, 10 aa, unidentified
  source 1..10: note = methanogen bacteria
GELLFANLDS

SEQ ID NO: 64293 - protein, 15 aa, unidentified
  source 1..15: note = methanogen bacteria
SRSDRVIDNVVSGES

SEQ ID NO: 64294 - protein, 11 aa, unidentified
  source 1..11: note = methanogen bacteria
FSGGGDNDNGG

SEQ ID NO: 64295 - protein, 11 aa, unidentified
  source 1..11: note = methanogen bacteria
FSGGGDNDNGG

SEQ ID NO: 64296 - protein, 15 aa, unidentified
  source 1..15: note = methanogen bacteria
KGLQEQINDARAGST

SEQ ID NO: 64297 - protein, 53 aa, unidentified
  source 1..53: note = methanogen bacteria
KISKDMVIDGHGHTIDLAGSSGHDHYFKVTDGSVTFKNIRFINGYNKDDDTDG

SEQ ID NO: 64298 - protein, 30 aa, unidentified
  source 1..30: note = methanogen bacteria
ICTIINCTFENCWAESKAGAIFSIGELRIF

SEQ ID NO: 64299 - protein, 12 aa, unidentified
  source 1..12: note = methanogen bacteria
STFLNNRVGDDG

SEQ ID NO: 64300 - protein, 34 aa, unidentified
  source 1..34: note = methanogen bacteria
PFAFGDVSIGGLIAQPAHFLMSGIGIDDLTGSIP

SEQ ID NO: 64301 - protein, 16 aa, unidentified
  source 1..16: note = methanogen bacteria
VWGGGWLMQMGALDFA

SEQ ID NO: 64302 - protein, 10 aa, unidentified
  source 1..10: note = methanogen bacteria
GGSALAANGL

SEQ ID NO: 64303 - protein, 17 aa, unidentified
  source 1..17: note = methanogen bacteria
ASPLINEASGLLFGNPG

SEQ ID NO: 64304 - protein, 15 aa, unidentified
  source 1..15: note = methanogen bacteria
GIYIISSDAIMNYTL

SEQ ID NO: 64305 - protein, 22 aa, unidentified
  source 1..22: note = methanogen bacteria
FVSFSSIQVNTIEAGTLFFSHM

SEQ ID NO: 64306 - protein, 10 aa, unidentified
  source 1..10: note = methanogen bacteria
MQGLQNVNIQ

SEQ ID NO: 64307 - protein, 12 aa, unidentified
  source 1..12: note = methanogen bacteria
FTIGYEFNLWYE

SEQ ID NO: 64308 - protein, 14 aa, unidentified
  source 1..14: note = methanogen bacteria
RSDRVIDNVVAGET

SEQ ID NO: 64309 - protein, 10 aa, unidentified
  source 1..10: note = methanogen bacteria
IGTLPIDELP

SEQ ID NO: 64310 - protein, 11 aa, unidentified
  source 1..11: note = methanogen bacteria
LGSPIFEGLPA

SEQ ID NO: 64311 - protein, 14 aa, unidentified
  source 1..14: note = methanogen bacteria
PKLFNWVLSEVNGI

SEQ ID NO: 64312 - protein, 12 aa, unidentified
  source 1..12: note = methanogen bacteria
EFLNAITNIFGS

SEQ ID NO: 64313 - protein, 11 aa, unidentified
  source 1..11: note = methanogen bacteria
AGTAPVHELPA

SEQ ID NO: 64314 - protein, 43 aa, unidentified
  source 1..43: note = methanogen bacteria
TDGTPLILLDTIFDHTSNVAGSNGLVNIGDWTDLIFGTFVSES

SEQ ID NO: 64315 - protein, 15 aa, unidentified
  source 1..15: note = methanogen bacteria
SGTERIVDNVVSGEN

SEQ ID NO: 64316 - protein, 11 aa, unidentified
  source 1..11: note = methanogen bacteria
IGTAPIDELPA

SEQ ID NO: 64317 - protein, 11 aa, unidentified
  source 1..11: note = methanogen bacteria
IGSPTVNELPA

SEQ ID NO: 64318 - protein, 11 aa, unidentified
  source 1..11: note = methanogen bacteria
IPQINLIQYTG

SEQ ID NO: 64319 - protein, 12 aa, unidentified
  source 1..12: note = methanogen bacteria
YTLGGSLSGIFN

SEQ ID NO: 64320 - protein, 30 aa, unidentified
  source 1..30: note = methanogen bacteria
DESPNLFDSLYFVIITLTTVGYGDMGFTSP

SEQ ID NO: 64321 - protein, 21 aa, unidentified
  source 1..21: note = methanogen bacteria
MPTVDTFLPDIIQTTFFSGYT

SEQ ID NO: 64322 - protein, 15 aa, unidentified
  source 1..15: note = methanogen bacteria
VDNGILPKTVFLITP

SEQ ID NO: 64323 - protein, 24 aa, unidentified
  source 1..24: note = methanogen bacteria
AVEYFNYVEQHVLPNAINQLFDTY

SEQ ID NO: 64324 - protein, 24 aa, unidentified
  source 1..24: note = methanogen bacteria
GTVWLKFYENLKNFSSSFEKYFFS

SEQ ID NO: 64325 - protein, 19 aa, unidentified
  source 1..19: note = methanogen bacteria
GNILDLLTNHSFSGSHLLI

SEQ ID NO: 64326 - protein, 24 aa, unidentified
  source 1..24: note = methanogen bacteria
LNRFNINYFTSPNIAILNQLTFYP

SEQ ID NO: 64327 - protein, 15 aa, unidentified
  source 1..15: note = methanogen bacteria
DFIAIISSLINNVLV

SEQ ID NO: 64328 - protein, 12 aa, unidentified
  source 1..12: note = methanogen bacteria
AGTTPISELPPT

SEQ ID NO: 64329 - protein, 13 aa, unidentified
  source 1..13: note = methanogen bacteria
ITSIVTAIPDNPN

SEQ ID NO: 64330 - protein, 18 aa, unidentified
  source 1..18: note = methanogen bacteria
KISDILSFDAINVLDPYI

SEQ ID NO: 64331 - protein, 12 aa, unidentified
  source 1..12: note = methanogen bacteria
GYFNKELLSNIN

SEQ ID NO: 64332 - protein, 22 aa, unidentified
  source 1..22: note = methanogen bacteria
LGSFMQHNISNPIQTLLTSSDM

SEQ ID NO: 64333 - protein, 18 aa, unidentified
  source 1..18: note = methanogen bacteria
FAANSMQLVESGTGSIGD

SEQ ID NO: 64334 - protein, 10 aa, unidentified
  source 1..10: note = methanogen bacteria
FSSGNTMDYS

SEQ ID NO: 64335 - protein, 10 aa, unidentified
  source 1..10: note = methanogen bacteria
PGELLFDNLN

SEQ ID NO: 64336 - protein, 11 aa, unidentified
  source 1..11: note = methanogen bacteria
AGSHPVAELPA

SEQ ID NO: 64337 - protein, 17 aa, unidentified
  source 1..17: note = methanogen bacteria
MTFSGFHTIKLENEIPI

SEQ ID NO: 64338 - protein, 67 aa, unidentified
  source 1..67: note = methanogen bacteria
KGDNFTVIMTKNSAPLLNFSQIYFKENVSFYNNGNGWIDASLTNQTAILKVYTKDLAIYTEDLVKIY

SEQ ID NO: 64339 - protein, 75 aa, unidentified
  source 1..75: note = methanogen bacteria
NASKFEAEIGIANKTVTFEINGGKYNRTSDENGTARMTINLEPGNYTIKTTFNGTTVENTVTVLPTLIADNLVKY

SEQ ID NO: 64340 - protein, 19 aa, unidentified
  source 1..19: note = methanogen bacteria
FFISLIDGEGNPVAGVNIT

SEQ ID NO: 64341 - protein, 58 aa, unidentified
  source 1..58: note = methanogen bacteria
NGVFYNRLTNENGTAKLNINLEPGEYILTATDPLTGLQMSYNITVLPVLFADNLEMKY

SEQ ID NO: 64342 - protein, 19 aa, unidentified
  source 1..19: note = methanogen bacteria
FNALVLNGEGKPLANAKVT

SEQ ID NO: 64343 - protein, 45 aa, unidentified
  source 1..45: note = methanogen bacteria
NGVFYTRYANSSGIAKLNINLMAGEYIITSEYDGMRISNTITIKD

SEQ ID NO: 64344 - protein, 37 aa, unidentified
  source 1..37: note = methanogen bacteria
SIGEYSISFTETYVRIWEHITGSITHPIDDAVVWNMR

SEQ ID NO: 64345 - protein, 10 aa, unidentified
  source 1..10: note = methanogen bacteria
AGVTVIGGDY

SEQ ID NO: 64346 - protein, 26 aa, unidentified
  source 1..26: note = methanogen bacteria
KLWATDEALANVYAWSVGSLTGLSWD

SEQ ID NO: 64347 - protein, 11 aa, unidentified
  source 1..11: note = methanogen bacteria
LGVGPVNEIPA

SEQ ID NO: 64348 - protein, 11 aa, unidentified
  source 1..11: note = methanogen bacteria
TELAHMIGISD

SEQ ID NO: 64349 - protein, 11 aa, unidentified
  source 1..11: note = methanogen bacteria
IGVAPITQIPA

SEQ ID NO: 64350 - protein, 19 aa, unidentified
  source 1..19: note = methanogen bacteria
GIITGNAKLESLLTPAYTL

SEQ ID NO: 64351 - protein, 18 aa, unidentified
  source 1..18: note = methanogen bacteria
QDKSLYPILTGSLHYSHP

SEQ ID NO: 64352 - protein, 11 aa, unidentified
  source 1..11: note = methanogen bacteria
FSHQHIINIDT

SEQ ID NO: 64353 - protein, 15 aa, unidentified
  source 1..15: note = methanogen bacteria
SSGTPFTSSFSFNWS

SEQ ID NO: 64354 - protein, 12 aa, unidentified
  source 1..12: note = methanogen bacteria
LNLPVSNLVPLG

SEQ ID NO: 64355 - protein, 11 aa, unidentified
  source 1..11: note = methanogen bacteria
IGVQPVAQIPA

SEQ ID NO: 64356 - protein, 11 aa, unidentified
  source 1..11: note = methanogen bacteria
IGAAPVAQIPA

SEQ ID NO: 64357 - protein, 12 aa, unidentified
  source 1..12: note = methanogen bacteria
SLINHSFNSSHL

SEQ ID NO: 64358 - protein, 25 aa, unidentified
  source 1..25: note = methanogen bacteria
DLNHFNINYFHNLDLAILNQFIFYP

SEQ ID NO: 64359 - protein, 14 aa, unidentified
  source 1..14: note = methanogen bacteria
DFISIISGFIKIML

SEQ ID NO: 64360 - protein, 34 aa, unidentified
  source 1..34: note = methanogen bacteria
LAFKKYNVKSGIFGSPWNGFINFGFLLKNKTLPI

SEQ ID NO: 64361 - protein, 30 aa, unidentified
  source 1..30: note = methanogen bacteria
FLDPEAGLINHIIQYFGGKKIMWYDTPKYW

SEQ ID NO: 64362 - protein, 38 aa, unidentified
  source 1..38: note = methanogen bacteria
DFGLFYQVPQNSGLIQNVTQTIDTFVYRSLLVQNNIGL

SEQ ID NO: 64363 - protein, 20 aa, unidentified
  source 1..20: note = methanogen bacteria
IKLPDVPLRTVADFTVFLQQ

SEQ ID NO: 64364 - protein, 12 aa, unidentified
  source 1..12: note = methanogen bacteria
VELAHMIGISDL

SEQ ID NO: 64365 - protein, 15 aa, unidentified
  source 1..15: note = methanogen bacteria
SRSDRVVDNVVAGET

SEQ ID NO: 64366 - protein, 11 aa, unidentified
  source 1..11: note = methanogen bacteria
ELAHMIGISDL

SEQ ID NO: 64367 - protein, 12 aa, unidentified
  source 1..12: note = methanogen bacteria
GAITTLGGFQLG

SEQ ID NO: 64368 - protein, 11 aa, unidentified
  source 1..11: note = methanogen bacteria
LRIDPFMEIPA

SEQ ID NO: 64369 - protein, 15 aa, unidentified
  source 1..15: note = methanogen bacteria
SRSDRVIDNVVAGES

SEQ ID NO: 64370 - protein, 27 aa, unidentified
  source 1..27: note = methanogen bacteria
FPTEFGFEDVWKNIIPTFYTKGQFSRY

SEQ ID NO: 64371 - protein, 19 aa, unidentified
  source 1..19: note = methanogen bacteria
SLGLIETGFGLYSFNCYLS

SEQ ID NO: 64372 - protein, 20 aa, unidentified
  source 1..20: note = methanogen bacteria
MIVDKYVLAKKFAFLANMDP

SEQ ID NO: 64373 - protein, 15 aa, unidentified
  source 1..15: note = methanogen bacteria
SRSDRVIDNVVAGES

SEQ ID NO: 64374 - protein, 34 aa, unidentified
  source 1..34: note = methanogen bacteria
MNIFIDPLLFIQFLRQSIGGIFDSFFISCSFYGE

SEQ ID NO: 64375 - protein, 35 aa, unidentified
  source 1..35: note = methanogen bacteria
TLCIYRPWILDSRVKPVTEALATATGYSFPSGHTS

SEQ ID NO: 64376 - protein, 22 aa, unidentified
  source 1..22: note = methanogen bacteria
AKGYPMDYDSAGKLIVDPAIMT

SEQ ID NO: 64377 - protein, 10 aa, unidentified
  source 1..10: note = methanogen bacteria
FSTANSMDYS

SEQ ID NO: 64378 - protein, 10 aa, unidentified
  source 1..10: note = methanogen bacteria
GVLLFENFNS

SEQ ID NO: 64379 - protein, 12 aa, unidentified
  source 1..12: note = methanogen bacteria
VFSGGDRDNRNS

SEQ ID NO: 64380 - protein, 15 aa, unidentified
  source 1..15: note = methanogen bacteria
SRSDRVIDNVVAGEN

SEQ ID NO: 64381 - protein, 34 aa, unidentified
  source 1..34: note = methanogen bacteria
MNIFIDPILFIQFLRQSIGGIFDSFFISCSFYGE

SEQ ID NO: 64382 - protein, 35 aa, unidentified
  source 1..35: note = methanogen bacteria
ALCIYRPWILDSRVKPVTEALATATGYSFPSGHAS

SEQ ID NO: 64383 - protein, 22 aa, unidentified
  source 1..22: note = methanogen bacteria
AKGYPMDYDSAGKLIVDPVIMN

SEQ ID NO: 64384 - protein, 10 aa, unidentified
  source 1..10: note = methanogen bacteria
FSTANSLDYS

SEQ ID NO: 64385 - protein, 14 aa, unidentified
  source 1..14: note = methanogen bacteria
HYRFDMLFDILESA

SEQ ID NO: 64386 - protein, 18 aa, unidentified
  source 1..18: note = methanogen bacteria
VDITSITAKIFYALFYRF

SEQ ID NO: 64387 - protein, 17 aa, unidentified
  source 1..17: note = methanogen bacteria
NYILSNLYLHIRSLLVV

SEQ ID NO: 64388 - protein, 31 aa, unidentified
  source 1..31: note = methanogen bacteria
DLNHLNLENIYFNEALDSLNLAISNQMVFYP

SEQ ID NO: 64389 - protein, 12 aa, unidentified
  source 1..12: note = methanogen bacteria
IAIVSSYIKILF

SEQ ID NO: 64390 - protein, 16 aa, unidentified
  source 1..16: note = methanogen bacteria
KTLKSSDISWKILQST

SEQ ID NO: 64391 - protein, 12 aa, unidentified
  source 1..12: note = methanogen bacteria
ALWDVTLIRNTN

SEQ ID NO: 64392 - protein, 22 aa, unidentified
  source 1..22: note = methanogen bacteria
IGNTLTNDVINPIEQIIQNSSI

SEQ ID NO: 64393 - protein, 19 aa, unidentified
  source 1..19: note = methanogen bacteria
FSTSLSNITQNINSANIGD

SEQ ID NO: 64394 - protein, 17 aa, unidentified
  source 1..17: note = methanogen bacteria
VYSSFMMNLGRASTTCQ

SEQ ID NO: 64395 - protein, 19 aa, unidentified
  source 1..19: note = methanogen bacteria
ELPETNFTSGYSLYAFMHS

SEQ ID NO: 64396 - protein, 34 aa, unidentified
  source 1..34: note = methanogen bacteria
MNILIDPLLFLQHLREMSGGLFDTFFTSCSFYAE

SEQ ID NO: 64397 - protein, 35 aa, unidentified
  source 1..35: note = methanogen bacteria
LTCIYRPWILDSRIKPVKDAIPGATGYSFPSGHSA

SEQ ID NO: 64398 - protein, 22 aa, unidentified
  source 1..22: note = methanogen bacteria
TKSYPMDYNAAGKLIVNPETMI

SEQ ID NO: 64399 - protein, 14 aa, unidentified
  source 1..14: note = methanogen bacteria
PNTFNWVLEKFMGI

SEQ ID NO: 64400 - protein, 27 aa, unidentified
  source 1..27: note = methanogen bacteria
MLFLQGLREASGGFFDQFFMRCTEFGN

SEQ ID NO: 64401 - protein, 35 aa, unidentified
  source 1..35: note = methanogen bacteria
TACVYRPWIEDPKIHPYEGALKDATGYSLPSGHST

SEQ ID NO: 64402 - protein, 22 aa, unidentified
  source 1..22: note = methanogen bacteria
FKSYPMDYNAAGKLIVEPAKMA

SEQ ID NO: 64403 - protein, 14 aa, unidentified
  source 1..14: note = methanogen bacteria
ALWDVNFIKNINNQ

SEQ ID NO: 64404 - protein, 20 aa, unidentified
  source 1..20: note = methanogen bacteria
GNAITNEIVNPIEELIQNSS

SEQ ID NO: 64405 - protein, 19 aa, unidentified
  source 1..19: note = methanogen bacteria
FFNLAKENIVHGITMANIG

SEQ ID NO: 64406 - protein, 10 aa, unidentified
  source 1..10: note = methanogen bacteria
HVPIDFVDAH

SEQ ID NO: 64407 - protein, 14 aa, unidentified
  source 1..14: note = methanogen bacteria
CDGTPFTSGFSFNW

SEQ ID NO: 64408 - protein, 13 aa, unidentified
  source 1..13: note = methanogen bacteria
LNKPVYNLVPLGE

SEQ ID NO: 64409 - protein, 11 aa, unidentified
  source 1..11: note = methanogen bacteria
GENFSWFRAIQ

SEQ ID NO: 64410 - protein, 15 aa, unidentified
  source 1..15: note = methanogen bacteria
SSGTPFTSSFNFNWS

SEQ ID NO: 64411 - protein, 13 aa, unidentified
  source 1..13: note = methanogen bacteria
LNLPVYNLVPLNE

SEQ ID NO: 64412 - protein, 10 aa, unidentified
  source 1..10: note = methanogen bacteria
GENFSWFRAI

SEQ ID NO: 64413 - protein, 12 aa, unidentified
  source 1..12: note = methanogen bacteria
SLINPQYLGDMN

SEQ ID NO: 64414 - protein, 22 aa, unidentified
  source 1..22: note = methanogen bacteria
LSGAIQTDIANPVQQLINSTDI

SEQ ID NO: 64415 - protein, 15 aa, unidentified
  source 1..15: note = methanogen bacteria
LADSIMNFQLNLNPV

SEQ ID NO: 64416 - protein, 12 aa, unidentified
  source 1..12: note = methanogen bacteria
SAIGLRAGLSAA

SEQ ID NO: 64417 - protein, 14 aa, unidentified
  source 1..14: note = methanogen bacteria
PRSFNWVLEEFMGI

SEQ ID NO: 64418 - protein, 14 aa, unidentified
  source 1..14: note = methanogen bacteria
PNSFNWVMEEFMGI

SEQ ID NO: 64419 - protein, 16 aa, unidentified
  source 1..16: note = methanogen bacteria
NSNSVAVIIGAMLISP

SEQ ID NO: 64420 - protein, 19 aa, unidentified
  source 1..19: note = methanogen bacteria
SLITTTIPTEQLLARTEPT

SEQ ID NO: 64421 - protein, 65 aa, unidentified
  source 1..65: note = methanogen bacteria
VYMEHVEEGNANTMYSANDSSSIKMDTGNGIQKSIDEKSHIKVLNYFSNSFISYEYNNLISASLV

SEQ ID NO: 64422 - protein, 19 aa, unidentified
  source 1..19: note = methanogen bacteria
IDNTALWYGWVMLAAVPAG

SEQ ID NO: 64423 - protein, 27 aa, unidentified
  source 1..27: note = methanogen bacteria
MLFLQGLRGASGGFFDQFFMSCTEFGN

SEQ ID NO: 64424 - protein, 35 aa, unidentified
  source 1..35: note = methanogen bacteria
TACVYRPWIEDPKIHPFEGALKDATGYSLPSGHAT

SEQ ID NO: 64425 - protein, 21 aa, unidentified
  source 1..21: note = methanogen bacteria
KSYPMDYNSAGKLVVEPAKMA

SEQ ID NO: 64426 - protein, 14 aa, unidentified
  source 1..14: note = methanogen bacteria
PNSFNWVMEEFMGV

SEQ ID NO: 64427 - protein, 13 aa, unidentified
  source 1..13: note = methanogen bacteria
RSINPHLLDDALT

SEQ ID NO: 64428 - protein, 24 aa, unidentified
  source 1..24: note = methanogen bacteria
SLIGGVLQSEIINPVGELINNGGI

SEQ ID NO: 64429 - protein, 20 aa, unidentified
  source 1..20: note = methanogen bacteria
MFTESANKVMQGVSGAAPTD

SEQ ID NO: 64430 - protein, 11 aa, unidentified
  source 1..11: note = methanogen bacteria
FFSSSNTIELV

SEQ ID NO: 64431 - protein, 11 aa, unidentified
  source 1..11: note = methanogen bacteria
ESHSLLNNLDS

SEQ ID NO: 64432 - protein, 68 aa, unidentified; identical to SEQ ID NO: 64102
  source 1..68: note = methanogen bacteria

SEQ ID NO: 64433 - protein, 40 aa, unidentified
  source 1..40: note = methanogen bacteria
AVYLKLFPIGFGVPIGVRSTDASFIIGVRSTDASFIDWAS

SEQ ID NO: 64434 - protein, 37 aa, unidentified
  source 1..37: note = methanogen bacteria
EQVFSYPGIGQTAVTAGLQSDVPLWNRSNCCYCRSSK

SEQ ID NO: 64435 - protein, 10 aa, unidentified
  source 1..10: note = methanogen bacteria
YAPFDVETAH

SEQ ID NO: 64436 - protein, 12 aa, unidentified
  source 1..12: note = methanogen bacteria
SVINPEYLHDIN

SEQ ID NO: 64437 - protein, 22 aa, unidentified
  source 1..22: note = methanogen bacteria
LSGAMQSDIANPVQQLINSADI

SEQ ID NO: 64438 - protein, 16 aa, unidentified
  source 1..16: note = methanogen bacteria
ILANSVSNIQINPNPV

SEQ ID NO: 64439 - protein, 24 aa, unidentified
  source 1..24: note = methanogen bacteria
TLPGAYIGINALLTPEWDLLFDVN

SEQ ID NO: 64440 - protein, 35 aa, unidentified
  source 1..35: note = methanogen bacteria
GYMTYTSGTPLTPLVSEGTGLVFVVLPRIFEAMGP

SEQ ID NO: 64441 - protein, 11 aa, unidentified
  source 1..11: note = methanogen bacteria
HSSPFDPVTAN

SEQ ID NO: 64442 - protein, 11 aa, unidentified
  source 1..11: note = methanogen bacteria
QYFINLGTKIY

SEQ ID NO: 64443 - protein, 10 aa, unidentified
  source 1..10: note = methanogen bacteria
SSPFDPMTAN

SEQ ID NO: 64444 - protein, 16 aa, unidentified
  source 1..16: note = methanogen bacteria
YGFALFSVTGAETSIF

SEQ ID NO: 64445 - protein, 11 aa, unidentified
  source 1..11: note = methanogen bacteria
YIALAFGMSET

SEQ ID NO: 64446 - protein, 11 aa, unidentified
  source 1..11: note = methanogen bacteria
VAGLGQTAIAG

SEQ ID NO: 64447 - protein, 20 aa, unidentified
  source 1..20: note = methanogen bacteria
RPLLESYGASGQTLNEAIAY

SEQ ID NO: 64448 - protein, 11 aa, unidentified
  source 1..11: note = methanogen bacteria
SMVGGDYGVAT

SEQ ID NO: 64449 - protein, 12 aa, unidentified
  source 1..12: note = methanogen bacteria
SYIAMAFGMSET

SEQ ID NO: 64450 - protein, 11 aa, unidentified
  source 1..11: note = methanogen bacteria
ITEVYVERESQ

SEQ ID NO: 64451 - protein, 11 aa, unidentified
  source 1..11: note = methanogen bacteria
MDYVGLYSSQP

SEQ ID NO: 64452 - protein, 13 aa, unidentified
  source 1..13: note = methanogen bacteria
MNMTNPEYLSDMN

SEQ ID NO: 64453 - protein, 22 aa, unidentified
  source 1..22: note = methanogen bacteria
LGGAMQTNIDNPVQQLINNTDL

SEQ ID NO: 64454 - protein, 16 aa, unidentified
  source 1..16: note = methanogen bacteria
LANSVMNIQASMNTVD

SEQ ID NO: 64455 - protein, 10 aa, unidentified
  source 1..10: note = methanogen bacteria
FSTANSMDYS

SEQ ID NO: 64456 - protein, 10 aa, unidentified
  source 1..10: note = methanogen bacteria
GELLFENLNS

SEQ ID NO: 64457 - protein, 12 aa, unidentified
  source 1..12: note = methanogen bacteria
SYIAIAFGMSET

SEQ ID NO: 64458 - protein, 12 aa, unidentified
  source 1..12: note = methanogen bacteria
SLINPQYLSDMN

SEQ ID NO: 64459 - protein, 22 aa, unidentified
  source 1..22: note = methanogen bacteria
LSGVMQTDIANPVQQLINNTDI

SEQ ID NO: 64460 - protein, 16 aa, unidentified
  source 1..16: note = methanogen bacteria
LADSIMNFQMNLNPVD

SEQ ID NO: 64461 - protein, 12 aa, unidentified
  source 1..12: note = methanogen bacteria
SYIAITFGMSET

SEQ ID NO: 64462 - protein, 10 aa, unidentified
  source 1..10: note = methanogen bacteria
FNNNLGDTDT

SEQ ID NO: 64463 - protein, 35 aa, unidentified
  source 1..35: note = methanogen bacteria
AGDSFQTAVISDLGSISAGWPGFNLPSVLTDTSAL

SEQ ID NO: 64464 - protein, 20 aa, unidentified
  source 1..20: note = methanogen bacteria
IWENFGPVVQEAWEKIKGIV

SEQ ID NO: 64465 - protein, 17 aa, unidentified
  source 1..17: note = methanogen bacteria
KNVISTVWTAIKGVIEP

SEQ ID NO: 64466 - protein, 16 aa, unidentified
  source 1..16: note = methanogen bacteria
KNTLTTIWNGIKSTIT

SEQ ID NO: 64467 - protein, 77 aa, unidentified
  source 1..77: note = methanogen bacteria
KGTATSVWNGIKSAIVRPVEAARDAVRNAIDRMRSFFHFSWSLPRLKLPHLSISGHFSLDPPSVPHFSISWYKKAME

SEQ ID NO: 64468 - protein, 16 aa, unidentified
  source 1..16: note = methanogen bacteria
NGATIFGAKGNQLLAG

SEQ ID NO: 64469 - protein, 15 aa, unidentified
  source 1..15: note = methanogen bacteria
NSYPTFMDAVYGLKN

SEQ ID NO: 64470 - protein, 11 aa, unidentified
  source 1..11: note = methanogen bacteria
YIAIAFGMSET

SEQ ID NO: 64471 - protein, 18 aa, unidentified
  source 1..18: note = methanogen bacteria
SSNKTTFNIFIKSILEVS

SEQ ID NO: 64472 - protein, 11 aa, unidentified
  source 1..11: note = methanogen bacteria
GRLFVAQAPDA

SEQ ID NO: 64473 - protein, 12 aa, unidentified
  source 1..12: note = methanogen bacteria
SIINPEYLHNIN

SEQ ID NO: 64474 - protein, 22 aa, unidentified
  source 1..22: note = methanogen bacteria
LSGAMQNDIANPVHQLINSSDI

SEQ ID NO: 64475 - protein, 15 aa, unidentified
  source 1..15: note = methanogen bacteria
LANSVTNIQITPNPV

SEQ ID NO: 64476 - protein, 12 aa, unidentified
  source 1..12: note = methanogen bacteria
SAIAIAFGMSET

SEQ ID NO: 64477 - protein, 12 aa, unidentified
  source 1..12: note = methanogen bacteria
SDIAIAFGMSET

SEQ ID NO: 64478 - protein, 12 aa, unidentified
  source 1..12: note = methanogen bacteria
SYIASLFGLSQA

SEQ ID NO: 64479 - protein, 14 aa, unidentified
  source 1..14: note = methanogen bacteria
PNSFNWVLSKYNGI

SEQ ID NO: 64480 - protein, 11 aa, unidentified
  source 1..11: note = methanogen bacteria
YTNYSGNLDCE

SEQ ID NO: 64481 - protein, 11 aa, unidentified
  source 1..11: note = methanogen bacteria
SIAMALGMSET

SEQ ID NO: 64482 - protein, 12 aa, unidentified
  source 1..12: note = methanogen bacteria
ALIDVNLIKNIN

SEQ ID NO: 64483 - protein, 21 aa, unidentified
  source 1..21: note = methanogen bacteria
GNTVTDNIVNPIEKLIENSSI

SEQ ID NO: 64484 - protein, 19 aa, unidentified
  source 1..19: note = methanogen bacteria
FFNSAIHNINNQISMANAG

SEQ ID NO: 64485 - protein, 12 aa, unidentified
  source 1..12: note = methanogen bacteria
SAIAIAFGMSET

SEQ ID NO: 64486 - protein, 20 aa, unidentified
  source 1..20: note = methanogen bacteria
IPSYKDLWYGWVMLASVPAG

SEQ ID NO: 64487 - protein, 11 aa, unidentified
  source 1..11: note = methanogen bacteria
AIAIAFGMSET

SEQ ID NO: 64488 - protein, 29 aa, unidentified
  source 1..29: note = methanogen bacteria
SSIPSVFDTPAVSIIIPGVEMPGSSIYIP

SEQ ID NO: 64489 - protein, 25 aa, unidentified
  source 1..25: note = methanogen bacteria
MYIQFLREASGGLFNDFFMTITYFG

SEQ ID NO: 64490 - protein, 35 aa, unidentified
  source 1..35: note = methanogen bacteria
VACVYRPWVVDPNIPPLEDALPDATGYSFPSGHAT

SEQ ID NO: 64491 - protein, 21 aa, unidentified
  source 1..21: note = methanogen bacteria
YKAYPMDYDAAGKLIVDPAKM

SEQ ID NO: 64492 - protein, 11 aa, unidentified
  source 1..11: note = methanogen bacteria
AIAIALGMSET

SEQ ID NO: 64493 - protein, 11 aa, unidentified
  source 1..11: note = methanogen bacteria
NIAMALGMSET

SEQ ID NO: 64494 - protein, 12 aa, unidentified
  source 1..12: note = methanogen bacteria
SSIAMALGMSET

SEQ ID NO: 64495 - protein, 10 aa, unidentified
  source 1..10: note = methanogen bacteria
TQNPGNVDVN

SEQ ID NO: 64496 - protein, 68 aa, unidentified
  source 1..68: note = methanogen bacteria
QLSPIDPVRAYLGQRIVSQEQLAIMGEYWGTNLSLGERVMGWISTLASGSMGFSLIYRVPVTEVIVQK

SEQ ID NO: 64497 - protein, 29 aa, unidentified
  source 1..29: note = methanogen bacteria
VYLGWFPIGLSVPIGQLADTVTFWQWLHR

SEQ ID NO: 64498 - protein, 24 aa, unidentified
  source 1..24: note = methanogen bacteria
EQVFAYPGIGQATVAAGLRSDVPL

SEQ ID NO: 64499 - protein, 68 aa, unidentified
  source 1..68: note = methanogen bacteria
QMSPIDPVRAYLGQRIVSQEQLAIMGEYWGTNLSLGERVVGWLSTLATGSMGFSLIYRVPVTEVIVQK

SEQ ID NO: 64500 - protein, 30 aa, unidentified; identical to SEQ ID NO: 63158
  source 1..30: note = methanogen bacteria

SEQ ID NO: 64501 - protein, 24 aa, unidentified
  source 1..24: note = methanogen bacteria
EQVFAYPGIGQATVAAGLRSDVPL

SEQ ID NO: 64502 - protein, 10 aa, unidentified
  source 1..10: note = methanogen bacteria
FSNSNTLNIL

SEQ ID NO: 64503 - protein, 11 aa, unidentified
  source 1..11: note = methanogen bacteria
EASNLFDNINI

SEQ ID NO: 64504 - protein, 12 aa, unidentified
  source 1..12: note = methanogen bacteria
SSIAITLGMSET

SEQ ID NO: 64505 - protein, 12 aa, unidentified
  source 1..12: note = methanogen bacteria
SAIAIALGMSET

SEQ ID NO: 64506 - protein, 12 aa, unidentified
  source 1..12: note = methanogen bacteria
LFGGGRRDENNG

SEQ ID NO: 64507 - protein, 11 aa, unidentified
  source 1..11: note = methanogen bacteria
AIAIALGMSET

SEQ ID NO: 64508 - protein, 10 aa, unidentified
  source 1..10: note = methanogen bacteria
TQTPGNLNIN

SEQ ID NO: 64509 - protein, 12 aa, unidentified
  source 1..12: note = methanogen bacteria
SAIAIALGMSET

SEQ ID NO: 64510 - protein, 16 aa, unidentified
  source 1..16: note = methanogen bacteria
SNFIISMGQNNPILSS

SEQ ID NO: 64511 - protein, 29 aa, unidentified
  source 1..29: note = methanogen bacteria
STLPSVFESPSVSIVIPGVDIPGSQIYVP

SEQ ID NO: 64512 - protein, 12 aa, unidentified
  source 1..12: note = methanogen bacteria
SAIAIAFGMSET

SEQ ID NO: 64513 - protein, 12 aa, unidentified
  source 1..12: note = methanogen bacteria
LFGGGRRDENNG

SEQ ID NO: 64514 - protein, 11 aa, unidentified
  source 1..11: note = methanogen bacteria
YNSSSIDFDTN

SEQ ID NO: 64515 - protein, 38 aa, unidentified
  source 1..38: note = methanogen bacteria
GEGNPVSGAIISMNINGIIYNRTTNENGTAKLNINLPQ

SEQ ID NO: 64516 - protein, 88 aa, unidentified
  source 1..88: note = methanogen bacteria
ITVLPTLNATDLEMKYKDGSTFNVTVLDNQGNPLADAVVTFNINGEFYNRTSDSSGIARLNINLMAGEYIITSEYDGLRISNTVTIKD

SEQ ID NO: 64517 - protein, 69 aa, unidentified
  source 1..69: note = methanogen bacteria
STFNVTVLDGQGNPLKEAAVTFNINGVFYTRYSDSNGIAKLNINLMAGEYIITSEYDGMRIANTITIKD

SEQ ID NO: 64518 - protein, 12 aa, unidentified
  source 1..12: note = methanogen bacteria
SAIAIAFGMSET

SEQ ID NO: 64519 - protein, 12 aa, unidentified
  source 1..12: note = methanogen bacteria
SDIAIAFGMSET

SEQ ID NO: 64520 - protein, 13 aa, unidentified
  source 1..13: note = methanogen bacteria
ALLDIRIINNVNS

SEQ ID NO: 64521 - protein, 21 aa, unidentified
  source 1..21: note = methanogen bacteria
GHTMTTKVINPIEQLINSTNI

SEQ ID NO: 64522 - protein, 19 aa, unidentified
  source 1..19: note = methanogen bacteria
VTSSVHNLTNGITMANMGD

SEQ ID NO: 64523 - protein, 14 aa, unidentified
  source 1..14: note = methanogen bacteria
PNSFKWVLSEYNGI

SEQ ID NO: 64524 - protein, 14 aa, unidentified
  source 1..14: note = methanogen bacteria
PNSFKWVLNTYNGI

SEQ ID NO: 64525 - protein, 14 aa, unidentified
  source 1..14: note = methanogen bacteria
PKSFQWVLSNYNGI

SEQ ID NO: 64526 - protein, 14 aa, unidentified
  source 1..14: note = methanogen bacteria
PVTFNWVLGEISGF

SEQ ID NO: 64527 - protein, 11 aa, unidentified
  source 1..11: note = methanogen bacteria
FIASAFGLSDA

SEQ ID NO: 64528 - protein, 12 aa, unidentified
  source 1..12: note = methanogen bacteria
DGNLIAENTIFE

SEQ ID NO: 64529 - protein, 44 aa, unidentified
  source 1..44: note = methanogen bacteria
KVQNTTFENNNAPNAGTIYTGGDLTLVKSNVQYSTREDNKAIVC

SEQ ID NO: 64530 - protein, 18 aa, unidentified
  source 1..18: note = methanogen bacteria
GIIVADPSTFVSLGAMTS

SEQ ID NO: 64531 - protein, 39 aa, unidentified
  source 1..39: note = methanogen bacteria
GFGAGDPLMPSIPSQVISFNFDTSLVGGFLAGFGELFKN

SEQ ID NO: 64532 - protein, 11 aa, unidentified
  source 1..11: note = methanogen bacteria
FIASAFGLSDV

SEQ ID NO: 64533 - protein, 13 aa, unidentified
  source 1..13: note = methanogen bacteria
PVAFNWVLSEVNG

SEQ ID NO: 64534 - protein, 10 aa, unidentified
  source 1..10: note = methanogen bacteria
YVARTSLFAS

SEQ ID NO: 64535 - protein, 18 aa, unidentified
  source 1..18: note = methanogen bacteria
RLNDSSLACPVEIVNGKG

SEQ ID NO: 64536 - protein, 31 aa, unidentified
  source 1..31: note = methanogen bacteria
TATVCYEGDDTFTPSNKSTTFTVKERINPNL

SEQ ID NO: 64537 - protein, 21 aa, unidentified
  source 1..21: note = methanogen bacteria
MEVKLNESSATYPVEIVNGKG

SEQ ID NO: 64538 - protein, 13 aa, unidentified
  source 1..13: note = methanogen bacteria
PNSFKWVLSNFKG

SEQ ID NO: 64539 - protein, 13 aa, unidentified
  source 1..13: note = methanogen bacteria
EKLLHPTLITQPT

SEQ ID NO: 64540 - protein, 10 aa, unidentified
  source 1..10: note = methanogen bacteria
VDLGAMSDTA

SEQ ID NO: 64541 - protein, 13 aa, unidentified
  source 1..13: note = methanogen bacteria
HLIVDGEPALSAE

SEQ ID NO: 64542 - protein, 13 aa, unidentified
  source 1..13: note = methanogen bacteria
NSFQWVLSNYGGV

SEQ ID NO: 64543 - protein, 14 aa, unidentified
  source 1..14: note = methanogen bacteria
PKSFQWVLSNYNGI

SEQ ID NO: 64544 - protein, 13 aa, unidentified
  source 1..13: note = methanogen bacteria
NAFLWVLGNFNGI

SEQ ID NO: 64545 - protein, 11 aa, unidentified
  source 1..11: note = methanogen bacteria
LNTGPISEIPA

SEQ ID NO: 64546 - protein, 14 aa, unidentified
  source 1..14: note = methanogen bacteria
PKSFEWVLSNYNGI

SEQ ID NO: 64547 - protein, 14 aa, unidentified
  source 1..14: note = methanogen bacteria
PNSFQWVLSNYNGI

SEQ ID NO: 64548 - protein, 36 aa, unidentified; identical to SEQ ID NO: 63752
  source 1..36: note = methanogen bacteria

SEQ ID NO: 64549 - protein, 23 aa, unidentified
  source 1..23: note = methanogen bacteria
VADPQDKLPEIIYWLMGSLSSVT

SEQ ID NO: 64550 - protein, 13 aa, unidentified
  source 1..13: note = methanogen bacteria
SLFNWVLSEYNGI

SEQ ID NO: 64551 - protein, 14 aa, unidentified
  source 1..14: note = methanogen bacteria
PNSFQWVLSNYNGI

SEQ ID NO: 64552 - protein, 14 aa, unidentified
  source 1..14: note = methanogen bacteria
PDSFKWVLSQYSGI

SEQ ID NO: 64553 - protein, 14 aa, unidentified
  source 1..14: note = methanogen bacteria
PNAFQWVLSNFYGI

SEQ ID NO: 64554 - protein, 14 aa, unidentified
  source 1..14: note = methanogen bacteria
PNSFAWVLSEYSGI

SEQ ID NO: 64555 - protein, 14 aa, unidentified
  source 1..14: note = methanogen bacteria
PNSFKWVLSNYNGI

SEQ ID NO: 64556 - protein, 13 aa, unidentified
  source 1..13: note = methanogen bacteria
PKSFQWVLSNNNG

SEQ ID NO: 64557 - protein, 14 aa, unidentified
  source 1..14: note = methanogen bacteria
VDLGHTVSVVATLD

SEQ ID NO: 64558 - protein, 15 aa, unidentified
  source 1..15: note = methanogen bacteria
LHYRFDMIFDILESA

SEQ ID NO: 64559 - protein, 18 aa, unidentified
  source 1..18: note = methanogen bacteria
DISSITSKIFYAVFAPFD

SEQ ID NO: 64560 - protein, 14 aa, unidentified
  source 1..14: note = methanogen bacteria
PNSFKWVLGKYNGI

SEQ ID NO: 64561 - protein, 14 aa, unidentified
  source 1..14: note = methanogen bacteria
PNSFQWVLSQYNGI

SEQ ID NO: 64562 - protein, 14 aa, unidentified
  source 1..14: note = methanogen bacteria
PNSFKWVLSKYGDI

SEQ ID NO: 64563 - protein, 10 aa, unidentified
  source 1..10: note = methanogen bacteria
LNWDSYALTD

SEQ ID NO: 64564 - protein, 11 aa, unidentified
  source 1..11: note = methanogen bacteria
SMFADRRENNG

SEQ ID NO: 64565 - protein, 15 aa, unidentified
  source 1..15: note = methanogen bacteria
SRSDRVVDNVVAGES

SEQ ID NO: 64566 - protein, 13 aa, unidentified
  source 1..13: note = methanogen bacteria
NPTLGFNVITAGS

SEQ ID NO: 64567 - protein, 12 aa, unidentified
  source 1..12: note = methanogen bacteria
LTNIIGDYATGI

SEQ ID NO: 64568 - protein, 16 aa, unidentified
  source 1..16: note = methanogen bacteria
DEIIFLIYGHEYDAAS

SEQ ID NO: 64569 - protein, 11 aa, unidentified
  source 1..11: note = methanogen bacteria
MDPSLSHFNES

SEQ ID NO: 64570 - protein, 49 aa, unidentified
  source 1..49: note = methanogen bacteria
IFINFTLIGGNNIANAIYNTASTKDIYFYNVSYVSSKGPKFTGEDEIHP

SEQ ID NO: 64571 - protein, 10 aa, unidentified
  source 1..10: note = methanogen bacteria
MEFYLETFPG

SEQ ID NO: 64572 - protein, 21 aa, unidentified
  source 1..21: note = methanogen bacteria
GSNCLPWYLFSQVKVEDWSAF

SEQ ID NO: 64573 - protein, 29 aa, unidentified
  source 1..29: note = methanogen bacteria
LSGDYASFQEAVMGLFSDPQTFLNNLMNF

SEQ ID NO: 64574 - protein, 11 aa, unidentified
  source 1..11: note = methanogen bacteria
LGASPALHVFP

SEQ ID NO: 64575 - protein, 15 aa, unidentified
  source 1..15: note = methanogen bacteria
TIKIPITKDVAITIM

SEQ ID NO: 64576 - protein, 10 aa, unidentified
  source 1..10: note = methanogen bacteria
GQSISLIFDM

SEQ ID NO: 64577 - protein, 41 aa, unidentified
  source 1..41: note = methanogen bacteria
SFLPLHPYAFAMASGVGSASMNAAAIGPTLAAFPGMETQIE

SEQ ID NO: 64578 - protein, 11 aa, unidentified
  source 1..11: note = methanogen bacteria
LGFSLTTSIGM

SEQ ID NO: 64579 - protein, 26 aa, unidentified
  source 1..26: note = methanogen bacteria
LVGTSAEKLQDAYLWQIGTLENVTWD

SEQ ID NO: 64580 - protein, 12 aa, unidentified
  source 1..12: note = methanogen bacteria
ATVASTDAVAVY

SEQ ID NO: 64581 - protein, 21 aa, unidentified
  source 1..21: note = methanogen bacteria
QIAGIFTYSGTSARLTPSLVA

SEQ ID NO: 64582 - protein, 13 aa, unidentified
  source 1..13: note = methanogen bacteria
KDIALSLGMSETL

SEQ ID NO: 64583 - protein, 14 aa, unidentified
  source 1..14: note = methanogen bacteria
SRADRLIDNVSSGE

SEQ ID NO: 64584 - protein, 11 aa, unidentified
  source 1..11: note = methanogen bacteria
ALALAVGMSET

SEQ ID NO: 64585 - protein, 19 aa, unidentified
  source 1..19: note = methanogen bacteria
QGFLALYNFNRTDIADFVI

SEQ ID NO: 64586 - protein, 33 aa, unidentified
  source 1..33: note = methanogen bacteria
MAVGNYHVSLPNVFWAIIGKGDSGAVSVIQDTR

SEQ ID NO: 64587 - protein, 10 aa, unidentified
  source 1..10: note = methanogen bacteria
FGVGEALFGN

SEQ ID NO: 64588 - protein, 25 aa, unidentified
  source 1..25: note = methanogen bacteria
YVADDDTLGSIVYWTMGSFNKVTWT

SEQ ID NO: 64589 - protein, 10 aa, unidentified
  source 1..10: note = methanogen bacteria
YYSTGLVLKI

SEQ ID NO: 64590 - protein, 10 aa, unidentified
  source 1..10: note = methanogen bacteria
FNVGMVNEVA

SEQ ID NO: 64591 - protein, 12 aa, unidentified
  source 1..12: note = methanogen bacteria
GMTNRSLLNNFN

SEQ ID NO: 64592 - protein, 25 aa, unidentified
  source 1..25: note = methanogen bacteria
TTAIGGIFHTDISNPVQNLINSSDI

SEQ ID NO: 64593 - protein, 17 aa, unidentified
  source 1..17: note = methanogen bacteria
FVAESAQALLSNTFTAT

SEQ ID NO: 64594 - protein, 19 aa, unidentified
  source 1..19: note = methanogen bacteria
GVYSSFMIELGKGGAICEV

SEQ ID NO: 64595 - protein, 22 aa, unidentified
  source 1..22: note = methanogen bacteria
ITVNSAAVNTVEAGNLFFSHMW

SEQ ID NO: 64596 - protein, 11 aa, unidentified
  source 1..11: note = methanogen bacteria
DIEGIKNVSIQ

SEQ ID NO: 64597 - protein, 12 aa, unidentified
  source 1..12: note = methanogen bacteria
FTKGYNFFLWYE

SEQ ID NO: 64598 - protein, 12 aa, unidentified
  source 1..12: note = methanogen bacteria
GFTNHNILNNFN

SEQ ID NO: 64599 - protein, 24 aa, unidentified
  source 1..24: note = methanogen bacteria
SAIGSLFHTEITNPVQTLIGSTDI

SEQ ID NO: 64600 - protein, 17 aa, unidentified
  source 1..17: note = methanogen bacteria
VVQSVQAFTSNTYATMD

SEQ ID NO: 64601 - protein, 11 aa, unidentified
  source 1..11: note = methanogen bacteria
NSTVGEPVLSV

SEQ ID NO: 64602 - protein, 10 aa, unidentified
  source 1..10: note = methanogen bacteria
EIGLDQAVVP

SEQ ID NO: 64603 - protein, 30 aa, unidentified; identical to SEQ ID NO: 60682
  source 1..30: note = methanogen bacteria

SEQ ID NO: 64604 - protein, 10 aa, unidentified
  source 1..10: note = methanogen bacteria
YFSSGYVLKI

SEQ ID NO: 64605 - protein, 17 aa, unidentified
  source 1..17: note = methanogen bacteria
GTCPTSAIDVTPNAIIH

SEQ ID NO: 64606 - protein, 14 aa, unidentified
  source 1..14: note = methanogen bacteria
ISANSASLTVAIPS

SEQ ID NO: 64607 - protein, 10 aa, unidentified
  source 1..10: note = methanogen bacteria
FFSTGVVVQI

SEQ ID NO: 64608 - protein, 10 aa, unidentified
  source 1..10: note = methanogen bacteria
FFSTGYVLKI

SEQ ID NO: 64609 - protein, 14 aa, unidentified
  source 1..14: note = methanogen bacteria
ITIPIAKNVAITIM

SEQ ID NO: 64610 - protein, 10 aa, unidentified
  source 1..10: note = methanogen bacteria
GQSINLIFDM

SEQ ID NO: 64611 - protein, 41 aa, unidentified
  source 1..41: note = methanogen bacteria
SFLPLHPYAFAMASGVGSASMNAAAIGPTLAAFPGLETSIE

SEQ ID NO: 64612 - protein, 19 aa, unidentified
  source 1..19: note = methanogen bacteria
SLPDITITSSADFTLFIQE

SEQ ID NO: 64613 - protein, 17 aa, unidentified
  source 1..17: note = methanogen bacteria
VYSDFVASLGKSNSLIM

SEQ ID NO: 64614 - protein, 68 aa, unidentified
  source 1..68: note = methanogen bacteria
DLSPIDPVSTYLKGAAVSEAQRTILEGYFGTNVPLPTKIFNWLMDLVQGNLGTSLIYRAPVLDVIIDK

SEQ ID NO: 64615 - protein, 30 aa, unidentified
  source 1..30: note = methanogen bacteria
VYLKWFPIGFGVPIGVSSTDATFAEWASRL

SEQ ID NO: 64616 - protein, 24 aa, unidentified
  source 1..24: note = methanogen bacteria
EQVFSYPGIGQTAVAAGLQSDVPL

SEQ ID NO: 64617 - protein, 15 aa, unidentified
  source 1..15: note = methanogen bacteria
TIKIPLTKDVAITIM

SEQ ID NO: 64618 - protein, 10 aa, unidentified
  source 1..10: note = methanogen bacteria
GQSIGLIFDM

SEQ ID NO: 64619 - protein, 41 aa, unidentified; identical to SEQ ID NO: 64577
  source 1..41: note = methanogen bacteria

SEQ ID NO: 64620 - protein, 12 aa, unidentified
  source 1..12: note = methanogen bacteria
NVINPIYLNDFN

SEQ ID NO: 64621 - protein, 24 aa, unidentified
  source 1..24: note = methanogen bacteria
TAILSGAIQSEITNPVHQLINNNN

SEQ ID NO: 64622 - protein, 16 aa, unidentified
  source 1..16: note = methanogen bacteria
IQSSISNLKTAINPMD

SEQ ID NO: 64623 - protein, 68 aa, unidentified
  source 1..68: note = methanogen bacteria
DLSPINSVNTYLRGAAVSEAQRAILESYFGMNVPLPTKIFHWLMDLVQGNLGTSLIYRAPVIDVIIDK

SEQ ID NO: 64624 - protein, 31 aa, unidentified
  source 1..31: note = methanogen bacteria
AVYLGWFPIGFGVPIGVSSTDATFTEWASRL

SEQ ID NO: 64625 - protein, 24 aa, unidentified
  source 1..24: note = methanogen bacteria
EQVFSYPGIGQTAVAAGLQSDVPL

SEQ ID NO: 64626 - protein, 10 aa, unidentified
  source 1..10: note = methanogen bacteria
FFSTGYVLQI

SEQ ID NO: 64627 - protein, 10 aa, unidentified
  source 1..10: note = methanogen bacteria
YFSTGYVLKI

SEQ ID NO: 64628 - protein, 10 aa, unidentified
  source 1..10: note = methanogen bacteria
FFSTGYVFKI

SEQ ID NO: 64629 - protein, 10 aa, unidentified
  source 1..10: note = methanogen bacteria
YFSTGYVLKI

SEQ ID NO: 64630 - protein, 38 aa, unidentified
  source 1..38: note = methanogen bacteria
MFETVFYFPWEVSLIVFLQSSLPGFVLGFFGVISEVVS

SEQ ID NO: 64631 - protein, 43 aa, unidentified
  source 1..43: note = methanogen bacteria
VTVARLRPYAVVDKIKCIHANVADQNPLDFKIQGYSFPSGHTM

SEQ ID NO: 64632 - protein, 19 aa, unidentified
  source 1..19: note = methanogen bacteria
GVYSSFMIELGKGGAICEV

SEQ ID NO: 64633 - protein, 36 aa, unidentified
  source 1..36: note = methanogen bacteria
NCTFIANTANFGGAMYGCTVKNSVFINNNAKYDGGA

SEQ ID NO: 64634 - protein, 18 aa, unidentified
  source 1..18: note = methanogen bacteria
NTAYIGGAMYGCTVKNSV

SEQ ID NO: 64635 - protein, 41 aa, unidentified
  source 1..41: note = methanogen bacteria
ITFSGNKADYGGAMAECTAYNCIFSGNTANINGGALYKCIA

SEQ ID NO: 64636 - protein, 10 aa, unidentified
  source 1..10: note = methanogen bacteria
NSFHSGWCFI

SEQ ID NO: 64637 - protein, 10 aa, unidentified
  source 1..10: note = methanogen bacteria
FFSTGFVLKI

SEQ ID NO: 64638 - protein, 10 aa, unidentified
  source 1..10: note = methanogen bacteria
PNVLYANGGG

SEQ ID NO: 64639 - protein, 24 aa, unidentified
  source 1..24: note = methanogen bacteria
SFTKGWGANPDVFFSSNVLQASDS

SEQ ID NO: 64640 - protein, 25 aa, unidentified
  source 1..25: note = methanogen bacteria
LTLPGASIGYTQIYTPDWSALLNFN

SEQ ID NO: 64641 - protein, 16 aa, unidentified
  source 1..16: note = methanogen bacteria
MTFTTGIPFNDLVTEG

SEQ ID NO: 64642 - protein, 15 aa, unidentified
  source 1..15: note = methanogen bacteria
SEFLEQIGRNNPLTT

SEQ ID NO: 64643 - protein, 12 aa, unidentified
  source 1..12: note = methanogen bacteria
GFYDEKLLGNVN

SEQ ID NO: 64644 - protein, 23 aa, unidentified
  source 1..23: note = methanogen bacteria
SLLSAATHSDISNPVVELINSSN

SEQ ID NO: 64645 - protein, 17 aa, unidentified
  source 1..17: note = methanogen bacteria
FVGEAGQAIAQNSFNMF

SEQ ID NO: 64646 - protein, 13 aa, unidentified
  source 1..13: note = methanogen bacteria
INLTNPQYLTDIN

SEQ ID NO: 64647 - protein, 24 aa, unidentified
  source 1..24: note = methanogen bacteria
TSLLSSTMQSDITNPVQELINNAG

SEQ ID NO: 64648 - protein, 15 aa, unidentified
  source 1..15: note = methanogen bacteria
VANSVNNLMSGFNSL

SEQ ID NO: 64649 - protein, 47 aa, unidentified
  source 1..47: note = methanogen bacteria
GMGHVNAALETDHLHVDAIMVNENIAYTDIDNAELRENLDYGSRIGG

SEQ ID NO: 64650 - protein, 43 aa, unidentified
  source 1..43: note = methanogen bacteria
YRLAVHKDVSECIVVHHHGGVLVFNLGSNAATEAFLTDLQSRL

SEQ ID NO: 64651 - protein, 10 aa, unidentified
  source 1..10: note = methanogen bacteria
FFSTGQVLKI

SEQ ID NO: 64652 - protein, 12 aa, unidentified
  source 1..12: note = methanogen bacteria
HLTNPTVLQDIN

SEQ ID NO: 64653 - protein, 25 aa, unidentified
  source 1..25: note = methanogen bacteria
TDLLSGAIHNNIANPVQNLINNTNI

SEQ ID NO: 64654 - protein, 16 aa, unidentified
  source 1..16: note = methanogen bacteria
VGQSAMHLQTGGTLLD

SEQ ID NO: 64655 - protein, 13 aa, unidentified
  source 1..13: note = methanogen bacteria
FYKDIINGITNFG

SEQ ID NO: 64656 - protein, 14 aa, unidentified
  source 1..14: note = methanogen bacteria
YYVNVDGTPSDVRN

SEQ ID NO: 64657 - protein, 67 aa, unidentified
  source 1..67: note = methanogen bacteria
LSPINPVTVYLKGAAVSEAQRTILNQYFGVGVPLHIKIYHWLLNLMQGDLGTSLIYRAPVIDVITQK

SEQ ID NO: 64658 - protein, 31 aa, unidentified
  source 1..31: note = methanogen bacteria
AVYLGLFPIGFGVPIGVSSTDASFMDWASRL

SEQ ID NO: 64659 - protein, 24 aa, unidentified
  source 1..24: note = methanogen bacteria
EQVFSYPGIGQTAVAAGLQSDVPL

SEQ ID NO: 64660 - protein, 10 aa, unidentified
  source 1..10: note = methanogen bacteria
YRYYGYVLKI

SEQ ID NO: 64661 - protein, 19 aa, unidentified
  source 1..19: note = methanogen bacteria
GIYNGFMESAGSVNPMAES

SEQ ID NO: 64662 - protein, 21 aa, unidentified
  source 1..21: note = methanogen bacteria
LLSASLSDRSYGALLNPIRTG

SEQ ID NO: 64663 - protein, 19 aa, unidentified
  source 1..19: note = methanogen bacteria
WGILPDLFLDAYLSVQDLA

SEQ ID NO: 64664 - protein, 17 aa, unidentified
  source 1..17: note = methanogen bacteria
DIGGVFSLFYDQVLHYF

SEQ ID NO: 64665 - protein, 22 aa, unidentified
  source 1..22: note = methanogen bacteria
EWGILPPSFMNAFLSLQNLASN

SEQ ID NO: 64666 - protein, 19 aa, unidentified
  source 1..19: note = methanogen bacteria
VDLHNPVTDIYDVVFAVFD

SEQ ID NO: 64667 - protein, 12 aa, unidentified
  source 1..12: note = methanogen bacteria
GTFNAKLLSDIN

SEQ ID NO: 64668 - protein, 20 aa, unidentified
  source 1..20: note = methanogen bacteria
GGTINKEIANPVSELIGSSN

SEQ ID NO: 64669 - protein, 16 aa, unidentified
  source 1..16: note = methanogen bacteria
GRAVQSLIHNSFNFAD

SEQ ID NO: 64670 - protein, 28 aa, unidentified
  source 1..28: note = methanogen bacteria
KLSATYPTFMDAIFGLKNPGQFINALTH

SEQ ID NO: 64671 - protein, 14 aa, unidentified
  source 1..14: note = methanogen bacteria
SSSFNPSFSVDWGK

SEQ ID NO: 64672 - protein, 13 aa, unidentified
  source 1..13: note = methanogen bacteria
FNLPVVEIYTPIE

SEQ ID NO: 64673 - protein, 18 aa, unidentified
  source 1..18: note = methanogen bacteria
VYSGFMQNYGMESEIVLT

SEQ ID NO: 64674 - protein, 16 aa, unidentified
  source 1..16: note = methanogen bacteria
YSSFMQGYGMESEIIL

SEQ ID NO: 64675 - protein, 16 aa, unidentified
  source 1..16: note = methanogen bacteria
YSQFMQNYGMESEIIL

SEQ ID NO: 64676 - protein, 15 aa, unidentified
  source 1..15: note = methanogen bacteria
PIKIPLSESVQVSIM

SEQ ID NO: 64677 - protein, 10 aa, unidentified
  source 1..10: note = methanogen bacteria
GQSMHLIFEM

SEQ ID NO: 64678 - protein, 41 aa, unidentified; identical to SEQ ID NO: 63240
  source 1..41: note = methanogen bacteria

SEQ ID NO: 64679 - protein, 10 aa, unidentified
  source 1..10: note = methanogen bacteria
YFSTGYVLRI

SEQ ID NO: 64680 - protein, 18 aa, unidentified
  source 1..18: note = methanogen bacteria
VYSGFMQNYGMESEIVLT

SEQ ID NO: 64681 - protein, 17 aa, unidentified
  source 1..17: note = methanogen bacteria
YSGFMQNYGMDSEIILT

SEQ ID NO: 64682 - protein, 10 aa, unidentified
  source 1..10: note = methanogen bacteria
YFSTGYVLKI

SEQ ID NO: 64683 - protein, 26 aa, unidentified
  source 1..26: note = methanogen bacteria
MFLQYLREISGGIFNTFFTSCSFYGE

SEQ ID NO: 64684 - protein, 35 aa, unidentified
  source 1..35: note = methanogen bacteria
LFSIYRPWVLDSKVKPVKEALPHAGGYSFPSGHSA

SEQ ID NO: 64685 - protein, 21 aa, unidentified
  source 1..21: note = methanogen bacteria
TKSYPIDYDSAGKIIVEPIKN

SEQ ID NO: 64686 - protein, 18 aa, unidentified
  source 1..18: note = methanogen bacteria
VYSGFMQRYGMESEIVLT

SEQ ID NO: 64687 - protein, 28 aa, unidentified
  source 1..28: note = methanogen bacteria
ISDGTVGECFRFITDRMGISFGDSAGSR

SEQ ID NO: 64688 - protein, 33 aa, unidentified
  source 1..33: note = methanogen bacteria
MPIAVWTDLLDVSSLAHWYDVWNAGPGVLSIWN

SEQ ID NO: 64689 - protein, 18 aa, unidentified
  source 1..18: note = methanogen bacteria
VYSEFMQNYGMESEIIMT

SEQ ID NO: 64690 - protein, 12 aa, unidentified
  source 1..12: note = methanogen bacteria
SSFNPSFSFDWG

SEQ ID NO: 64691 - protein, 14 aa, unidentified
  source 1..14: note = methanogen bacteria
FNLPVIAIHPPIES

SEQ ID NO: 64692 - protein, 17 aa, unidentified
  source 1..17: note = methanogen bacteria
YSGFMQSYGMESEIIIT

SEQ ID NO: 64693 - protein, 10 aa, unidentified
  source 1..10: note = methanogen bacteria
YFSTGTVLKI

SEQ ID NO: 64694 - protein, 18 aa, unidentified
  source 1..18: note = methanogen bacteria
VYSGFMQSYGMESEIVLT

SEQ ID NO: 64695 - protein, 17 aa, unidentified
  source 1..17: note = methanogen bacteria
YSGFMQDYGMESEIILT

SEQ ID NO: 64696 - protein, 17 aa, unidentified
  source 1..17: note = methanogen bacteria
YSSFMQGFGMESEIIMT

SEQ ID NO: 64697 - protein, 17 aa, unidentified
  source 1..17: note = methanogen bacteria
YSSFMQSYGIESEIIMT

SEQ ID NO: 64698 - protein, 17 aa, unidentified
  source 1..17: note = methanogen bacteria
YAGFMESFGQVSDLVAT

SEQ ID NO: 64699 - protein, 12 aa, unidentified
  source 1..12: note = methanogen bacteria
AVYDIKILNNYN

SEQ ID NO: 64700 - protein, 21 aa, unidentified
  source 1..21: note = methanogen bacteria
SQLISSEIINPIKQIINHQSI

SEQ ID NO: 64701 - protein, 16 aa, unidentified
  source 1..16: note = methanogen bacteria
FINSINHLISSTGTPL

SEQ ID NO: 64702 - protein, 16 aa, unidentified
  source 1..16: note = methanogen bacteria
YSGFMQGYGMESQIIL

SEQ ID NO: 64703 - protein, 17 aa, unidentified
  source 1..17: note = methanogen bacteria
VYSGFMESFGQVTDLVA

SEQ ID NO: 64704 - protein, 16 aa, unidentified
  source 1..16: note = methanogen bacteria
YGNFIQEFSHNSELIA

SEQ ID NO: 64705 - protein, 16 aa, unidentified
  source 1..16: note = methanogen bacteria
YAQFMESFGQVTDLVA

SEQ ID NO: 64706 - protein, 16 aa, unidentified
  source 1..16: note = methanogen bacteria
YAQFMESFGHVTDLVA

SEQ ID NO: 64707 - protein, 16 aa, unidentified
  source 1..16: note = methanogen bacteria
YSSFMQGYGMESEIIL

SEQ ID NO: 64708 - protein, 17 aa, unidentified
  source 1..17: note = methanogen bacteria
VYSGFMQNYGMESEIIL

SEQ ID NO: 64709 - protein, 14 aa, unidentified
  source 1..14: note = methanogen bacteria
TNFSQITSFISINP

SEQ ID NO: 64710 - protein, 12 aa, unidentified
  source 1..12: note = methanogen bacteria
TYLNQITHLDAN

SEQ ID NO: 64711 - protein, 13 aa, unidentified
  source 1..13: note = methanogen bacteria
NLPSIPGKIVGWK

SEQ ID NO: 64712 - protein, 20 aa, unidentified
  source 1..20: note = methanogen bacteria
NPTLGFNVITAGSIVIIIQA

SEQ ID NO: 64713 - protein, 17 aa, unidentified
  source 1..17: note = methanogen bacteria
KNPTLGFNLITIGSIAV

SEQ ID NO: 64714 - protein, 14 aa, unidentified
  source 1..14: note = methanogen bacteria
SSFGQISSFISTNP

SEQ ID NO: 64715 - protein, 82 aa, unidentified
  source 1..82: note = methanogen bacteria
GTTHLKFSSKSLTVNHNSKKTLNIKATNYFTKHVMKNIKLALKVYTGKKYKTVVLKTDKNGIAKYDASKLSIGAHKIIIRHG

SEQ ID NO: 64716 - protein, 16 aa, unidentified
  source 1..16: note = methanogen bacteria
NYLNSDSKKVTVKVTR

SEQ ID NO: 64717 - protein, 15 aa, unidentified
  source 1..15: note = methanogen bacteria
PIKIPITNGVEVSIM

SEQ ID NO: 64718 - protein, 10 aa, unidentified
  source 1..10: note = methanogen bacteria
GQSMHLIFEM

SEQ ID NO: 64719 - protein, 41 aa, unidentified
  source 1..41: note = methanogen bacteria
TLLPLHPYAFAMASGVGSASMNAAALGPTLAAFPALETNIE

SEQ ID NO: 64720 - protein, 16 aa, unidentified
  source 1..16: note = methanogen bacteria
FAPSITNPLQSFDQSN

SEQ ID NO: 64721 - protein, 12 aa, unidentified
  source 1..12: note = methanogen bacteria
KLFFTHNMVSPS

SEQ ID NO: 64722 - protein, 20 aa, unidentified
  source 1..20: note = methanogen bacteria
KGAYPGMWYGWVMLAAVPSG

SEQ ID NO: 64723 - protein, 15 aa, unidentified
  source 1..15: note = methanogen bacteria
GVNFLGQHAFKSHST

SEQ ID NO: 64724 - protein, 94 aa, unidentified
  source 1..94: note = methanogen bacteria
GNNSSIIGDAGDRDEYSWAYLEDNCILAADNLNITKFNHAIYNDGGSCILNNVIFYHNRMDYRIERDWGAAILNAGICMCTNCTFMENYCSNGG

SEQ ID NO: 64725 - protein, 16 aa, unidentified
  source 1..16: note = methanogen bacteria
MWESSGDSFYILPSIS

SEQ ID NO: 64726 - protein, 17 aa, unidentified
  source 1..17: note = methanogen bacteria
VYSDFMQNFGKSGDLIL

SEQ ID NO: 64727 - protein, 11 aa, unidentified
  source 1..11: note = methanogen bacteria
GSTVMGDVISG

SEQ ID NO: 64728 - protein, 13 aa, unidentified
  source 1..13: note = methanogen bacteria
DVLSIPGKVVSNQ

SEQ ID NO: 64729 - protein, 15 aa, unidentified
  source 1..15: note = methanogen bacteria
SRSDRVVDNVVAGES

SEQ ID NO: 64730 - protein, 14 aa, unidentified
  source 1..14: note = methanogen bacteria
DVFSIPGKVVSDHV

SEQ ID NO: 64731 - protein, 17 aa, unidentified
  source 1..17: note = methanogen bacteria
YSEFIGQIGRENPLATA

SEQ ID NO: 64732 - protein, 58 aa, unidentified
  source 1..58: note = methanogen bacteria
KDDEHYWRLSSKDGFEWVVTFDDRSRVINGEVINNSGKCGYTYLKSDSLVKKSIMASA

SEQ ID NO: 64733 - protein, 20 aa, unidentified
  source 1..20: note = methanogen bacteria
WYVGEHNYDPDYQAWKTYAI

SEQ ID NO: 64734 - protein, 20 aa, unidentified
  source 1..20: note = methanogen bacteria
TASVASYNPYPVEDFIFTTF

SEQ ID NO: 64735 - protein, 10 aa, unidentified
  source 1..10: note = methanogen bacteria
PQMGIDPLFT

SEQ ID NO: 64736 - protein, 19 aa, unidentified
  source 1..19: note = methanogen bacteria
NIAVSMTNYNAGMGSMYSR

SEQ ID NO: 64737 - protein, 11 aa, unidentified
  source 1..11: note = methanogen bacteria
KNGDLDGYAFL

SEQ ID NO: 64738 - protein, 44 aa, unidentified
  source 1..44: note = methanogen bacteria
LSFPTMVMAGAGTDWCDYFYCFSLTGFVDIDSLTSIGTSSPDYG

SEQ ID NO: 64739 - protein, 25 aa, unidentified
  source 1..25: note = methanogen bacteria
AVEGNSNVLILTECNFINNSATIHG

SEQ ID NO: 64740 - protein, 23 aa, unidentified
  source 1..23: note = methanogen bacteria
LQGNNTYTVIDKSKFDSNYAPYG

SEQ ID NO: 64741 - protein, 24 aa, unidentified
  source 1..24: note = methanogen bacteria
ALGNTDYLVISESSFTNHIGAEDD

SEQ ID NO: 64742 - protein, 24 aa, unidentified
  source 1..24: note = methanogen bacteria
IYVIGNLTNANIVDSLFENNSARA

SEQ ID NO: 64743 - protein, 15 aa, unidentified
  source 1..15: note = methanogen bacteria
TIEIPIAKDVAITIM

SEQ ID NO: 64744 - protein, 10 aa, unidentified
  source 1..10: note = methanogen bacteria
GQSINLIFQM

SEQ ID NO: 64745 - protein, 41 aa, unidentified; identical to SEQ ID NO: 64577
  source 1..41: note = methanogen bacteria

SEQ ID NO: 64746 - protein, 15 aa, unidentified
  source 1..15: note = methanogen bacteria
TDFGEISGFVSIDPA

SEQ ID NO: 64747 - protein, 11 aa, unidentified
  source 1..11: note = methanogen bacteria
GSTVMGDVISS

SEQ ID NO: 64748 - protein, 18 aa, unidentified
  source 1..18: note = methanogen bacteria
DLHYSFAKAFNLLEMATD

SEQ ID NO: 64749 - protein, 14 aa, unidentified
  source 1..14: note = methanogen bacteria
DMTSIFYILYDRII

SEQ ID NO: 64750 - protein, 12 aa, unidentified
  source 1..12: note = methanogen bacteria
MNFKYMPELNMP

SEQ ID NO: 64751 - protein, 17 aa, unidentified
  source 1..17: note = methanogen bacteria
LSSTYTTFLDAVRALAN

SEQ ID NO: 64752 - protein, 25 aa, unidentified
  source 1..25: note = methanogen bacteria
IGFSGFDVQQLGQVLSGTSTDGAIT

SEQ ID NO: 64753 - protein, 10 aa, unidentified
  source 1..10: note = methanogen bacteria
MKEPIHNSFT

SEQ ID NO: 64754 - protein, 10 aa, unidentified
  source 1..10: note = methanogen bacteria
GLTTVTHDVS

SEQ ID NO: 64755 - protein, 17 aa, unidentified
  source 1..17: note = methanogen bacteria
IGNPDNNVLFLTPTYAL

SEQ ID NO: 64756 - protein, 16 aa, unidentified
  source 1..16: note = methanogen bacteria
KFPFKVINFTINYGNN

SEQ ID NO: 64757 - protein, 67 aa, unidentified
  source 1..67: note = methanogen bacteria
LSPIDPVKSYAAEMGASVQQIAALRSYWQVDVPTYQKLIDWLLDLLQLNLGVSLIYRIPVIKVIADK

SEQ ID NO: 64758 - protein, 29 aa, unidentified
  source 1..29: note = methanogen bacteria
VYLKWFPIGLAVPVGTLASDVTFFDWLYR

SEQ ID NO: 64759 - protein, 24 aa, unidentified
  source 1..24: note = methanogen bacteria
EQIFSYPGIGQATVAAGLRSDVPL

SEQ ID NO: 64760 - protein, 12 aa, unidentified
  source 1..12: note = methanogen bacteria
MNFNYMPELNYQ

SEQ ID NO: 64761 - protein, 13 aa, unidentified
  source 1..13: note = methanogen bacteria
DKLFFAQAVTAPS

SEQ ID NO: 64762 - protein, 12 aa, unidentified
  source 1..12: note = methanogen bacteria
MNFKYMPELEYA

SEQ ID NO: 64763 - protein, 45 aa, unidentified
  source 1..45: note = methanogen bacteria
MLNRFNNMFGTVFYFPWEVSLILFLQSSLPDFVFGVFGVIADVVS

SEQ ID NO: 64764 - protein, 43 aa, unidentified
  source 1..43: note = methanogen bacteria
VSVARLRPYAVMDNIKCIYAPTADQNLFDFKIQGYSFPSGHAM

SEQ ID NO: 64765 - protein, 11 aa, unidentified
  source 1..11: note = methanogen bacteria
SFENGEFNMSK

SEQ ID NO: 64766 - protein, 12 aa, unidentified
  source 1..12: note = methanogen bacteria
LKLPLGEIISLE

SEQ ID NO: 64767 - protein, 11 aa, unidentified
  source 1..11: note = methanogen bacteria
GSTVMGDIIPS

SEQ ID NO: 64768 - protein, 45 aa, unidentified
  source 1..45: note = methanogen bacteria
MSNIFNSMFETVFYFPWEVFLIIFLQSTLPGLVLGFFEVIAEVVS

SEQ ID NO: 64769 - protein, 43 aa, unidentified
  source 1..43: note = methanogen bacteria
VTVARLRPYAAVDTIKCIRADVADQNPFDFKIQGYSFPSGHTM

SEQ ID NO: 64770 - protein, 15 aa, unidentified
  source 1..15: note = methanogen bacteria
PIEIPIAKGVEVIIM

SEQ ID NO: 64771 - protein, 10 aa, unidentified
  source 1..10: note = methanogen bacteria
GQSIHLIFEM

SEQ ID NO: 64772 - protein, 41 aa, unidentified
  source 1..41: note = methanogen bacteria
SIIPLHPFAFAMASGVGSASMNAASLGPTLAAFPNLETSIE

SEQ ID NO: 64773 - protein, 16 aa, unidentified
  source 1..16: note = methanogen bacteria
GPIEINLTKGVTVSIM

SEQ ID NO: 64774 - protein, 10 aa, unidentified
  source 1..10: note = methanogen bacteria
GQSIHLIFEM

SEQ ID NO: 64775 - protein, 41 aa, unidentified
  source 1..41: note = methanogen bacteria
SVLPLHPYAFAMASGVGSASMNAASLGPTLAAFPSLETSIE

SEQ ID NO: 64776 - protein, 67 aa, unidentified
  source 1..67: note = methanogen bacteria
SKFINNSASRDGGAVYSIANLLLNNSDLKYNNAYCGGAVYSVNTQLILLNSNFTNNYATSYGGAIIS

SEQ ID NO: 64777 - protein, 46 aa, unidentified
  source 1..46: note = methanogen bacteria
PYFYIMGARFVNDISNSSAGAIYSMYSKNHFYDSVFVNCSSLIGGA

SEQ ID NO: 64778 - protein, 50 aa, unidentified
  source 1..50: note = methanogen bacteria
DLHSSSIYSNLNFTNNMAIKGGAVYKMYNTTSISGSTFNSNHAIEGGGLY

SEQ ID NO: 64779 - protein, 29 aa, unidentified
  source 1..29: note = methanogen bacteria
DQISSAILTNLTFNKNIAEYGGDIYCLGD

SEQ ID NO: 64780 - protein, 92 aa, unidentified
  source 1..92: note = methanogen bacteria
GSHDAFNLAFLNLNQKAGDYKIFEIDDVAPVFDSMYDMRDYYNLTEVKNQLERGNCWAFAAMAALESCILKANGTAYDFSEENLKNMVARFF

SEQ ID NO: 64781 - protein, 11 aa, unidentified
  source 1..11: note = methanogen bacteria
SSTVMGDLISS

SEQ ID NO: 64782 - protein, 12 aa, unidentified
  source 1..12: note = methanogen bacteria
RLFVKKSLAVPD

SEQ ID NO: 64783 - protein, 10 aa, unidentified
  source 1..10: note = methanogen bacteria
NLIGGVDFTN

SEQ ID NO: 64784 - protein, 17 aa, unidentified
  source 1..17: note = methanogen bacteria
VDIYDANFVKAAVLGRY

SEQ ID NO: 64785 - protein, 34 aa, unidentified
  source 1..34: note = methanogen bacteria
QGLNADNMVYDLVKENGAEGTVGSVVQGTIARAE

SEQ ID NO: 64786 - protein, 16 aa, unidentified
  source 1..16: note = methanogen bacteria
TDFAIYNTDDAAKWNA

SEQ ID NO: 64787 - protein, 15 aa, unidentified
  source 1..15: note = methanogen bacteria
IQDTLLTSFQMNFTN

SEQ ID NO: 64788 - protein, 19 aa, unidentified
  source 1..19: note = methanogen bacteria
LGEEVSFENYIDLFFLKQY

SEQ ID NO: 64789 - protein, 15 aa, unidentified
  source 1..15: note = methanogen bacteria
NGGFLGTFEEVHPYG

SEQ ID NO: 64790 - protein, 19 aa, unidentified
  source 1..19: note = methanogen bacteria
HTITDTHTSSTLVYYGYRR

SEQ ID NO: 64791 - protein, 16 aa, unidentified
  source 1..16: note = methanogen bacteria
INYLESIGINVYVLNP

SEQ ID NO: 64792 - protein, 17 aa, unidentified
  source 1..17: note = methanogen bacteria
NINGMVFNIAILEAGMS

SEQ ID NO: 64793 - protein, 15 aa, unidentified
  source 1..15: note = methanogen bacteria
SRADRLVDNVVSGET

SEQ ID NO: 64794 - protein, 16 aa, unidentified
  source 1..16: note = methanogen bacteria
MWDSSGDSFYILPSIS

SEQ ID NO: 64795 - protein, 13 aa, unidentified
  source 1..13: note = methanogen bacteria
DKLFFGGAITIPS

SEQ ID NO: 64796 - protein, 12 aa, unidentified
  source 1..12: note = methanogen bacteria
KIFFGAPITTPS

SEQ ID NO: 64797 - protein, 16 aa, unidentified
  source 1..16: note = methanogen bacteria
TDFGKFGYFINADPIM

SEQ ID NO: 64798 - protein, 17 aa, unidentified
  source 1..17: note = methanogen bacteria
FSVSGETVFSNLEDATH

SEQ ID NO: 64799 - protein, 18 aa, unidentified
  source 1..18: note = methanogen bacteria
DEFKFSFGNMVDTFVSMY

SEQ ID NO: 64800 - protein, 15 aa, unidentified
  source 1..15: note = methanogen bacteria
TINIPITKDVVITIM

SEQ ID NO: 64801 - protein, 10 aa, unidentified
  source 1..10: note = methanogen bacteria
GQSIHLIFEM

SEQ ID NO: 64802 - protein, 41 aa, unidentified
  source 1..41: note = methanogen bacteria
SFIPLHPYAYAMASGVGSASMNAAAIGPTLAAFPTMETNIE

SEQ ID NO: 64803 - protein, 21 aa, unidentified
  source 1..21: note = methanogen bacteria
GIYGWDIIISILNGGYEVLNT

SEQ ID NO: 64804 - protein, 11 aa, unidentified
  source 1..11: note = methanogen bacteria
IKGPEGTAHFS

SEQ ID NO: 64805 - protein, 10 aa, unidentified
  source 1..10: note = methanogen bacteria
GIQSSTSSPT

SEQ ID NO: 64806 - protein, 10 aa, unidentified
  source 1..10: note = methanogen bacteria
SENKPSENKP

SEQ ID NO: 64807 - protein, 11 aa, unidentified
  source 1..11: note = methanogen bacteria
FFGASLSFDIV

SEQ ID NO: 64808 - protein, 10 aa, unidentified
  source 1..10: note = methanogen bacteria
GGDDRTAHTG

SEQ ID NO: 64809 - protein, 18 aa, unidentified
  source 1..18: note = methanogen bacteria
GIIVDDLSTLVSMGHLLS

SEQ ID NO: 64810 - protein, 39 aa, unidentified; identical to SEQ ID NO: 60537
  source 1..39: note = methanogen bacteria

SEQ ID NO: 64811 - protein, 13 aa, unidentified
  source 1..13: note = methanogen bacteria
TSPPNHLFGKFRR

SEQ ID NO: 64812 - protein, 18 aa, unidentified
  source 1..18: note = methanogen bacteria
LCSHCIIIIYSFSDSCCL

SEQ ID NO: 64813 - protein, 19 aa, unidentified
  source 1..19: note = methanogen bacteria
ANIVDICIKNADMPYIYDA

SEQ ID NO: 64814 - protein, 12 aa, unidentified
  source 1..12: note = methanogen bacteria
FEVQNGTLLTGV

SEQ ID NO: 64815 - protein, 11 aa, unidentified
  source 1..11: note = methanogen bacteria
GSTVIGDVVSS

SEQ ID NO: 64816 - protein, 11 aa, unidentified
  source 1..11: note = methanogen bacteria
GSTVMGDIISS

SEQ ID NO: 64817 - protein, 12 aa, unidentified
  source 1..12: note = methanogen bacteria
YEYMLTALHELH

SEQ ID NO: 64818 - protein, 12 aa, unidentified
  source 1..12: note = methanogen bacteria
RLLNPSLITTPD

SEQ ID NO: 64819 - protein, 13 aa, unidentified
  source 1..13: note = methanogen bacteria
ERLVNPSLITMPS

SEQ ID NO: 64820 - protein, 12 aa, unidentified
  source 1..12: note = methanogen bacteria
QIFFSQSLTVPD

SEQ ID NO: 64821 - protein, 12 aa, unidentified
  source 1..12: note = methanogen bacteria
RLLNPSLITTPD

SEQ ID NO: 64822 - protein, 14 aa, unidentified
  source 1..14: note = methanogen bacteria
TVNIPITKNVAITI

SEQ ID NO: 64823 - protein, 10 aa, unidentified
  source 1..10: note = methanogen bacteria
GQSIHLIFEM

SEQ ID NO: 64824 - protein, 41 aa, unidentified
  source 1..41: note = methanogen bacteria
SFLPLHPYAFAMASGVGSASMNAAAIGPTLAAFPGLESSIE

SEQ ID NO: 64825 - protein, 30 aa, unidentified
  source 1..30: note = methanogen bacteria
TEHVNPLDSLVMVSNAFTSNGYTVLGNSIV

SEQ ID NO: 64826 - protein, 13 aa, unidentified
  source 1..13: note = methanogen bacteria
ERLFFGGTPAIPE

SEQ ID NO: 64827 - protein, 13 aa, unidentified
  source 1..13: note = methanogen bacteria
EKILNPTLITTPD

SEQ ID NO: 64828 - protein, 12 aa, unidentified
  source 1..12: note = methanogen bacteria
RLLNPSLITTPD

SEQ ID NO: 64829 - protein, 23 aa, unidentified
  source 1..23: note = methanogen bacteria
NPTLGFNVITAGSIVIILQAAFP

SEQ ID NO: 64830 - protein, 11 aa, unidentified
  source 1..11: note = methanogen bacteria
GSTVMGDIISS

SEQ ID NO: 64831 - protein, 14 aa, unidentified
  source 1..14: note = methanogen bacteria
TIEIPITKDVAITI

SEQ ID NO: 64832 - protein, 10 aa, unidentified
  source 1..10: note = methanogen bacteria
GQSIGLIFEM

SEQ ID NO: 64833 - protein, 41 aa, unidentified
  source 1..41: note = methanogen bacteria
SFLPLHPYAFAMASGVGSASMNAAAIGPTLAAFPGLETQIE

SEQ ID NO: 64834 - protein, 15 aa, unidentified
  source 1..15: note = methanogen bacteria
TNFSQITGFISINPL

SEQ ID NO: 64835 - protein, 12 aa, unidentified
  source 1..12: note = methanogen bacteria
KFLNPSTITVPD

SEQ ID NO: 64836 - protein, 13 aa, unidentified
  source 1..13: note = methanogen bacteria
DKLLDPSLITTPD

SEQ ID NO: 64837 - protein, 18 aa, unidentified
  source 1..18: note = methanogen bacteria
PLMGIVHSINHSTGLNIS

SEQ ID NO: 64838 - protein, 10 aa, unidentified
  source 1..10: note = methanogen bacteria
NLDLSTLSTL

SEQ ID NO: 64839 - protein, 17 aa, unidentified
  source 1..17: note = methanogen bacteria
FAFEGLDRIVLIVDSAL

SEQ ID NO: 64840 - protein, 12 aa, unidentified
  source 1..12: note = methanogen bacteria
KLINPSTITVPE

SEQ ID NO: 64841 - protein, 11 aa, unidentified
  source 1..11: note = methanogen bacteria
YSSDLSLIPKL

SEQ ID NO: 64842 - protein, 17 aa, unidentified
  source 1..17: note = methanogen bacteria
GLSDLQYTVAIVEAAMP

SEQ ID NO: 64843 - protein, 10 aa, unidentified
  source 1..10: note = methanogen bacteria
YVARTSLFAS

SEQ ID NO: 64844 - protein, 17 aa, unidentified
  source 1..17: note = methanogen bacteria
GITGLNHTIGLIEAAMS

SEQ ID NO: 64845 - protein, 11 aa, unidentified
  source 1..11: note = methanogen bacteria
YSADLSLISQL

SEQ ID NO: 64846 - protein, 18 aa, unidentified
  source 1..18: note = methanogen bacteria
LGLIDLQFKISIVEAAMP

SEQ ID NO: 64847 - protein, 13 aa, unidentified
  source 1..13: note = methanogen bacteria
DKIIHPELITVPD

SEQ ID NO: 64848 - protein, 10 aa, unidentified
  source 1..10: note = methanogen bacteria
PYVLYSNGGG

SEQ ID NO: 64849 - protein, 32 aa, unidentified
  source 1..32: note = methanogen bacteria
LSFTKGWGANPDTFFATTLLQSSESMSGLTHF

SEQ ID NO: 64850 - protein, 26 aa, unidentified
  source 1..26: note = methanogen bacteria
LTLPGASIGLAELFNPDWSLLTHFEI

SEQ ID NO: 64851 - protein, 28 aa, unidentified
  source 1..28: note = methanogen bacteria
HVTSVRNSGCRPCNSGNRPCICSVSYRI

SEQ ID NO: 64852 - protein, 16 aa, unidentified
  source 1..16: note = methanogen bacteria
GPIEIKLTDSVEIAVM

SEQ ID NO: 64853 - protein, 10 aa, unidentified
  source 1..10: note = methanogen bacteria
GQSMHLLFEM

SEQ ID NO: 64854 - protein, 41 aa, unidentified
  source 1..41: note = methanogen bacteria
SILPLHPYAFAMASGVGSASMNAASLGPTLAAFPALETNIE

SEQ ID NO: 64855 - protein, 11 aa, unidentified
  source 1..11: note = methanogen bacteria
YSADLSLLSKL

SEQ ID NO: 64856 - protein, 17 aa, unidentified
  source 1..17: note = methanogen bacteria
GLVDLQYKVSIVEAAMP

SEQ ID NO: 64857 - protein, 11 aa, unidentified
  source 1..11: note = methanogen bacteria
YSSDLSLIPKL

SEQ ID NO: 64858 - protein, 17 aa, unidentified
  source 1..17: note = methanogen bacteria
LGLSDLQYTVAVVEAAM

SEQ ID NO: 64859 - protein, 13 aa, unidentified
  source 1..13: note = methanogen bacteria
INILNPGQITVPN

SEQ ID NO: 64860 - protein, 11 aa, unidentified
  source 1..11: note = methanogen bacteria
YTADLNSISNM

SEQ ID NO: 64861 - protein, 17 aa, unidentified
  source 1..17: note = methanogen bacteria
GLVNLEHTVSVIEAAMP

SEQ ID NO: 64862 - protein, 11 aa, unidentified
  source 1..11: note = methanogen bacteria
YSADLSSISKL

SEQ ID NO: 64863 - protein, 17 aa, unidentified
  source 1..17: note = methanogen bacteria
GLVDLQYNVSIVEAAMP

SEQ ID NO: 64864 - protein, 10 aa, unidentified
  source 1..10: note = methanogen bacteria
SSDLTLIPKL

SEQ ID NO: 64865 - protein, 17 aa, unidentified
  source 1..17: note = methanogen bacteria
GLLNLEFTVSIVEAAMP

SEQ ID NO: 64866 - protein, 25 aa, unidentified
  source 1..25: note = methanogen bacteria
SAIYGSAVIDRIVNGGYETLNTSDS

SEQ ID NO: 64867 - protein, 12 aa, unidentified
  source 1..12: note = methanogen bacteria
TGKESGSSTQVS

SEQ ID NO: 64868 - protein, 11 aa, unidentified
  source 1..11: note = methanogen bacteria
LGLGSLSSTVS

SEQ ID NO: 64869 - protein, 10 aa, unidentified
  source 1..10: note = methanogen bacteria
TADISLIPKL

SEQ ID NO: 64870 - protein, 17 aa, unidentified
  source 1..17: note = methanogen bacteria
GLVDLQYQVSIVEAAMP

SEQ ID NO: 64871 - protein, 13 aa, unidentified
  source 1..13: note = methanogen bacteria
EKILNPSLIIIPE

SEQ ID NO: 64872 - protein, 15 aa, unidentified
  source 1..15: note = methanogen bacteria
SFNQITTFVNADILG

SEQ ID NO: 64873 - protein, 11 aa, unidentified
  source 1..11: note = methanogen bacteria
YSADLSLLSKL

SEQ ID NO: 64874 - protein, 18 aa, unidentified
  source 1..18: note = methanogen bacteria
IGLVDLQFKISVVEAAMP

SEQ ID NO: 64875 - protein, 13 aa, unidentified
  source 1..13: note = methanogen bacteria
YRITHPNMITSPD

SEQ ID NO: 64876 - protein, 11 aa, unidentified
  source 1..11: note = methanogen bacteria
YSADLSLISKL

SEQ ID NO: 64877 - protein, 17 aa, unidentified
  source 1..17: note = methanogen bacteria
GLVDLQFKISIVEAAMP

SEQ ID NO: 64878 - protein, 11 aa, unidentified
  source 1..11: note = methanogen bacteria
YTADLSLMPQL

SEQ ID NO: 64879 - protein, 17 aa, unidentified
  source 1..17: note = methanogen bacteria
GLVDLQYSVSIVEAAMP

SEQ ID NO: 64880 - protein, 12 aa, unidentified
  source 1..12: note = methanogen bacteria
KILYPSTITVPD

SEQ ID NO: 64881 - protein, 11 aa, unidentified
  source 1..11: note = methanogen bacteria
YNADLSLIPKL

SEQ ID NO: 64882 - protein, 17 aa, unidentified
  source 1..17: note = methanogen bacteria
GLINLEYSVSIVEAAMP

SEQ ID NO: 64883 - protein, 14 aa, unidentified
  source 1..14: note = methanogen bacteria
HHKLEHPNSIAVPD

SEQ ID NO: 64884 - protein, 33 aa, unidentified
  source 1..33: note = methanogen bacteria
APSFIHVIKAFTFENIINYIVGAWRAQSIFTSY

SEQ ID NO: 64885 - protein, 14 aa, unidentified
  source 1..14: note = methanogen bacteria
CFSSTQSIHYFDRY

SEQ ID NO: 64886 - protein, 19 aa, unidentified
  source 1..19: note = methanogen bacteria
FKINGMAFNIGILEAAMST

SEQ ID NO: 64887 - protein, 10 aa, unidentified
  source 1..10: note = methanogen bacteria
IIEENIEPVS

SEQ ID NO: 64888 - protein, 13 aa, unidentified
  source 1..13: note = methanogen bacteria
NFGQITHFVNINI

SEQ ID NO: 64889 - protein, 11 aa, unidentified
  source 1..11: note = methanogen bacteria
YSADLSLLPKL

SEQ ID NO: 64890 - protein, 17 aa, unidentified
  source 1..17: note = methanogen bacteria
GLVDLQYNVSIIEAAMP

SEQ ID NO: 64891 - protein, 12 aa, unidentified
  source 1..12: note = methanogen bacteria
KIFFGAPITTPS

SEQ ID NO: 64892 - protein, 13 aa, unidentified
  source 1..13: note = methanogen bacteria
EKLLNPSLITVPE

SEQ ID NO: 64893 - protein, 10 aa, unidentified
  source 1..10: note = methanogen bacteria
TADISLIPKL

SEQ ID NO: 64894 - protein, 17 aa, unidentified
  source 1..17: note = methanogen bacteria
GLVNLEYQISVVEAAMP

SEQ ID NO: 64895 - protein, 11 aa, unidentified
  source 1..11: note = methanogen bacteria
YSADLSLLSKL

SEQ ID NO: 64896 - protein, 18 aa, unidentified
  source 1..18: note = methanogen bacteria
MGLSDLQFTISVVEAAMP

SEQ ID NO: 64897 - protein, 13 aa, unidentified
  source 1..13: note = methanogen bacteria
DKILNPKLITVPD

SEQ ID NO: 64898 - protein, 11 aa, unidentified
  source 1..11: note = methanogen bacteria
YAADLSQIPKL

SEQ ID NO: 64899 - protein, 17 aa, unidentified
  source 1..17: note = methanogen bacteria
GLVNLEHSVSIVEAAMP

SEQ ID NO: 64900 - protein, 13 aa, unidentified
  source 1..13: note = methanogen bacteria
DKILHPSLITIPD

SEQ ID NO: 64901 - protein, 16 aa, unidentified
  source 1..16: note = methanogen bacteria
GPIKIPITSGVEVSIM

SEQ ID NO: 64902 - protein, 10 aa, unidentified
  source 1..10: note = methanogen bacteria
GQSMHLLFEM

SEQ ID NO: 64903 - protein, 41 aa, unidentified
  source 1..41: note = methanogen bacteria
SLIPFHPYAFAMASGVGSASMNAASLGPTLAAFPGLETQIE

SEQ ID NO: 64904 - protein, 14 aa, unidentified
  source 1..14: note = methanogen bacteria
NFTQITNFVYLNTI

SEQ ID NO: 64905 - protein, 11 aa, unidentified
  source 1..11: note = methanogen bacteria
YNADVSLLPRL

SEQ ID NO: 64906 - protein, 19 aa, unidentified
  source 1..19: note = methanogen bacteria
LHITGFNHTIGFIEATMSS

SEQ ID NO: 64907 - protein, 11 aa, unidentified
  source 1..11: note = methanogen bacteria
YSADLSLINQL

SEQ ID NO: 64908 - protein, 17 aa, unidentified
  source 1..17: note = methanogen bacteria
GLVDLQYNVSIIEAAMP

SEQ ID NO: 64909 - protein, 13 aa, unidentified
  source 1..13: note = methanogen bacteria
DKIFHPNLITIPD

SEQ ID NO: 64910 - protein, 13 aa, unidentified
  source 1..13: note = methanogen bacteria
DKILNPELITVPD

SEQ ID NO: 64911 - protein, 33 aa, unidentified
  source 1..33: note = methanogen bacteria
IDPAFTSIFDSFWYNIVTLTGVGYGDITPISYP

SEQ ID NO: 64912 - protein, 19 aa, unidentified
  source 1..19: note = methanogen bacteria
AIGIIPYDIFYGLESITNW

SEQ ID NO: 64913 - protein, 14 aa, unidentified
  source 1..14: note = methanogen bacteria
DTSTQASLLFSLFA

SEQ ID NO: 64914 - protein, 11 aa, unidentified
  source 1..11: note = methanogen bacteria
YSADLSLIPVL

SEQ ID NO: 64915 - protein, 18 aa, unidentified
  source 1..18: note = methanogen bacteria
FGLVDLQYSVSIVEAAMP

SEQ ID NO: 64916 - protein, 10 aa, unidentified
  source 1..10: note = methanogen bacteria
SADLSLISKL

SEQ ID NO: 64917 - protein, 18 aa, unidentified
  source 1..18: note = methanogen bacteria
IGFTNLEFNVSIIEAAMP

SEQ ID NO: 64918 - protein, 11 aa, unidentified
  source 1..11: note = methanogen bacteria
YSADLSMLSKL

SEQ ID NO: 64919 - protein, 18 aa, unidentified
  source 1..18: note = methanogen bacteria
IGLVDLQYTISIVEAAMP

SEQ ID NO: 64920 - protein, 20 aa, unidentified
  source 1..20: note = methanogen bacteria
FIALAPSEAHTLNEGTDPVG

SEQ ID NO: 64921 - protein, 21 aa, unidentified
  source 1..21: note = methanogen bacteria
VGEPISESFLSKYSTYAVMAL

SEQ ID NO: 64922 - protein, 10 aa, unidentified
  source 1..10: note = methanogen bacteria
TADLSYLSKL

SEQ ID NO: 64923 - protein, 17 aa, unidentified
  source 1..17: note = methanogen bacteria
GLVDLQFKISIIEAAMP

SEQ ID NO: 64924 - protein, 13 aa, unidentified
  source 1..13: note = methanogen bacteria
EKILHPELIVIPS

SEQ ID NO: 64925 - protein, 10 aa, unidentified
  source 1..10: note = methanogen bacteria
YAAKTSLFAS

SEQ ID NO: 64926 - protein, 17 aa, unidentified
  source 1..17: note = methanogen bacteria
GITGLNHTIGLIEAAMS

SEQ ID NO: 64927 - protein, 11 aa, unidentified
  source 1..11: note = methanogen bacteria
YSADLSMLSKL

SEQ ID NO: 64928 - protein, 17 aa, unidentified
  source 1..17: note = methanogen bacteria
GLVDLQFKISVVEAAMP

SEQ ID NO: 64929 - protein, 18 aa, unidentified
  source 1..18: note = methanogen bacteria
VEAPSQFHTLYEGSEPPG

SEQ ID NO: 64930 - protein, 18 aa, unidentified
  source 1..18: note = methanogen bacteria
IGEEITQSFLDEYSTYAM

SEQ ID NO: 64931 - protein, 11 aa, unidentified
  source 1..11: note = methanogen bacteria
YSADLSLLPSL

SEQ ID NO: 64932 - protein, 17 aa, unidentified
  source 1..17: note = methanogen bacteria
GLVNLEFNVTVIEAAMP

SEQ ID NO: 64933 - protein, 11 aa, unidentified
  source 1..11: note = methanogen bacteria
YSADLSLISKL

SEQ ID NO: 64934 - protein, 18 aa, unidentified
  source 1..18: note = methanogen bacteria
LGLIDLQFKISIVEAAMP

SEQ ID NO: 64935 - protein, 13 aa, unidentified
  source 1..13: note = methanogen bacteria
DKLIHPGLIRVPD

SEQ ID NO: 64936 - protein, 14 aa, unidentified
  source 1..14: note = methanogen bacteria
QKIPLTGDVAITIM

SEQ ID NO: 64937 - protein, 10 aa, unidentified
  source 1..10: note = methanogen bacteria
GQSISLIFDM

SEQ ID NO: 64938 - protein, 41 aa, unidentified
  source 1..41: note = methanogen bacteria
SFLPLHPYAFAMASGVGSASMNAAAIGPTLAAFPGLESQIE

SEQ ID NO: 64939 - protein, 11 aa, unidentified
  source 1..11: note = methanogen bacteria
YSSDLSLIPKL

SEQ ID NO: 64940 - protein, 17 aa, unidentified
  source 1..17: note = methanogen bacteria
GLVDLQYTVTVIEAAMP

SEQ ID NO: 64941 - protein, 18 aa, unidentified
  source 1..18: note = methanogen bacteria
FKISGMAFNIAILEAGMS

SEQ ID NO: 64942 - protein, 11 aa, unidentified
  source 1..11: note = methanogen bacteria
YSENMSLLPVL

SEQ ID NO: 64943 - protein, 17 aa, unidentified
  source 1..17: note = methanogen bacteria
GLTGFNSTIALVESAMP

SEQ ID NO: 64944 - protein, 11 aa, unidentified
  source 1..11: note = methanogen bacteria
YNADLSLIPKI

SEQ ID NO: 64945 - protein, 18 aa, unidentified
  source 1..18: note = methanogen bacteria
INLGTLEETIAICEAAMP

SEQ ID NO: 64946 - protein, 13 aa, unidentified
  source 1..13: note = methanogen bacteria
DKLLNPNLITTPD

SEQ ID NO: 64947 - protein, 14 aa, unidentified
  source 1..14: note = methanogen bacteria
HHKLKHPHSIVVPD

SEQ ID NO: 64948 - protein, 18 aa, unidentified
  source 1..18: note = methanogen bacteria
LNIGGTALNIAVLEAGMS

SEQ ID NO: 64949 - protein, 11 aa, unidentified
  source 1..11: note = methanogen bacteria
GSTVMGDVISS

SEQ ID NO: 64950 - protein, 12 aa, unidentified
  source 1..12: note = methanogen bacteria
SAIAIAFGMSET

SEQ ID NO: 64951 - protein, 18 aa, unidentified
  source 1..18: note = methanogen bacteria
FKISGMAFNIAILEAGMS

SEQ ID NO: 64952 - protein, 63 aa, unidentified
  source 1..63: note = methanogen bacteria
GNGAIIKTSSDDRDENTWVKMENDGITFSANNLTVTGFNTGLENMAGTCIFNRVTFKDNQKDY

SEQ ID NO: 64953 - protein, 86 aa, unidentified
  source 1..86: note = methanogen bacteria
GITMCYNCHFENNEAKHGGAIFNQGYLHLDNCSFVNNDAENGEGDDICIGDNGELIYDGQNIPSNISNNELHVTVAKSMSLAETTL

SEQ ID NO: 64954 - protein, 26 aa, unidentified
  source 1..26: note = methanogen bacteria
YYLYGYLFNDWSLFTIADGLLLFCVD

SEQ ID NO: 64955 - protein, 26 aa, unidentified
  source 1..26: note = methanogen bacteria
YTDFGVPVLNLFFGYFIGTKGGFTAF

SEQ ID NO: 64956 - protein, 16 aa, unidentified
  source 1..16: note = methanogen bacteria
IENGFLTDIHQYYFMT

SEQ ID NO: 64957 - protein, 12 aa, unidentified
  source 1..12: note = methanogen bacteria
IGNNSEIVGNIN

SEQ ID NO: 64958 - protein, 24 aa, unidentified
  source 1..24: note = methanogen bacteria
ALIGTAIQSDIANPIQNLINSSDI

SEQ ID NO: 64959 - protein, 18 aa, unidentified
  source 1..18: note = methanogen bacteria
FVIESADALTQGAYTSFD

SEQ ID NO: 64960 - protein, 19 aa, unidentified
  source 1..19: note = methanogen bacteria
ALMWTSSSKRFYQVATLSP

SEQ ID NO: 64961 - protein, 14 aa, unidentified
  source 1..14: note = methanogen bacteria
KDKLLDPSLIHVPT

SEQ ID NO: 64962 - protein, 18 aa, unidentified
  source 1..18: note = methanogen bacteria
LNVTGLIFKVAVLESGMS

SEQ ID NO: 64963 - protein, 13 aa, unidentified
  source 1..13: note = methanogen bacteria
EKLMNPALITSPD

SEQ ID NO: 64964 - protein, 11 aa, unidentified
  source 1..11: note = methanogen bacteria
GSTVLGDVISS

SEQ ID NO: 64965 - protein, 11 aa, unidentified
  source 1..11: note = methanogen bacteria
FLNPDLITVPS

SEQ ID NO: 64966 - protein, 18 aa, unidentified
  source 1..18: note = methanogen bacteria
IGFGGLSFKVAVLEAGMT

SEQ ID NO: 64967 - protein, 17 aa, unidentified
  source 1..17: note = methanogen bacteria
IGCGGLLLQVSVLESAM

SEQ ID NO: 64968 - protein, 10 aa, unidentified
  source 1..10: note = methanogen bacteria
STVMGDVISS

SEQ ID NO: 64969 - protein, 22 aa, unidentified
  source 1..22: note = methanogen bacteria
ESGLLPYGFVNFYMIIQNLVNN

SEQ ID NO: 64970 - protein, 17 aa, unidentified
  source 1..17: note = methanogen bacteria
VDAGNVITNLYDVVFRY

SEQ ID NO: 64971 - protein, 12 aa, unidentified
  source 1..12: note = methanogen bacteria
KIINPNLITVPD

SEQ ID NO: 64972 - protein, 15 aa, unidentified
  source 1..15: note = methanogen bacteria
TIRIPITKDVAITIM

SEQ ID NO: 64973 - protein, 10 aa, unidentified
  source 1..10: note = methanogen bacteria
GQSISLIFEM

SEQ ID NO: 64974 - protein, 41 aa, unidentified
  source 1..41: note = methanogen bacteria
SFIPLHPYAYAMASGVGSASMNAAAIGPTLAAFPGLETQIE

SEQ ID NO: 64975 - protein, 19 aa, unidentified
  source 1..19: note = methanogen bacteria
ALPETAIANHIDFTNFIIS

SEQ ID NO: 64976 - protein, 13 aa, unidentified
  source 1..13: note = methanogen bacteria
DRLFFGGTLAVPG

SEQ ID NO: 64977 - protein, 10 aa, unidentified
  source 1..10: note = methanogen bacteria
YLDGGSTVFS

SEQ ID NO: 64978 - protein, 15 aa, unidentified
  source 1..15: note = methanogen bacteria
DWGIFAEYLTTNSSF

SEQ ID NO: 64979 - protein, 14 aa, unidentified
  source 1..14: note = methanogen bacteria
ITIPIAKDVEITIM

SEQ ID NO: 64980 - protein, 10 aa, unidentified
  source 1..10: note = methanogen bacteria
GQSISLIFDM

SEQ ID NO: 64981 - protein, 41 aa, unidentified; identical to SEQ ID NO: 64577
  source 1..41: note = methanogen bacteria

SEQ ID NO: 64982 - protein, 18 aa, unidentified
  source 1..18: note = methanogen bacteria
GIYSSFMMNLGRASTTCQ

SEQ ID NO: 64983 - protein, 10 aa, unidentified
  source 1..10: note = methanogen bacteria
YVARTSLFAS

SEQ ID NO: 64984 - protein, 17 aa, unidentified
  source 1..17: note = methanogen bacteria
GITGLNHTIGLIEAAMS

SEQ ID NO: 64985 - protein, 10 aa, unidentified
  source 1..10: note = methanogen bacteria
LGGAEIEFHT

SEQ ID NO: 64986 - protein, 41 aa, unidentified
  source 1..41: note = methanogen bacteria
MKKYINLINDYFDINYMRKNMVVEYISPIFDGIMDIFTQGG

SEQ ID NO: 64987 - protein, 16 aa, unidentified
  source 1..16: note = methanogen bacteria
FKSLGVNPNSAAMAEG

SEQ ID NO: 64988 - protein, 20 aa, unidentified
  source 1..20: note = methanogen bacteria
THNQTFAQFIHLKDIFYYLG

SEQ ID NO: 64989 - protein, 12 aa, unidentified
  source 1..12: note = methanogen bacteria
DRFNGVGIPSVT

SEQ ID NO: 64990 - protein, 12 aa, unidentified
  source 1..12: note = methanogen bacteria
YEYMLTALHEMH

SEQ ID NO: 64991 - protein, 11 aa, unidentified
  source 1..11: note = methanogen bacteria
HIASSISFNFS

SEQ ID NO: 64992 - protein, 12 aa, unidentified
  source 1..12: note = methanogen bacteria
GQYKYNGFDLSS

SEQ ID NO: 64993 - protein, 31 aa, unidentified
  source 1..31: note = methanogen bacteria
FGFNVSGTVTPSLLKFSQTSSNLIGGGEFGP

SEQ ID NO: 64994 - protein, 23 aa, unidentified
  source 1..23: note = methanogen bacteria
FNGSFTLNNFLSILFVKPLSTSH

SEQ ID NO: 64995 - protein, 17 aa, unidentified
  source 1..17: note = methanogen bacteria
TTSNHGFGFPPAKFLLN

SEQ ID NO: 64996 - protein, 14 aa, unidentified
  source 1..14: note = methanogen bacteria
EKGHLFYQFTVGKA

SEQ ID NO: 64997 - protein, 11 aa, unidentified
  source 1..11: note = methanogen bacteria
GSTVMGDIISS

SEQ ID NO: 64998 - protein, 15 aa, unidentified
  source 1..15: note = methanogen bacteria
TIKIPITKDVAITIM

SEQ ID NO: 64999 - protein, 10 aa, unidentified
  source 1..10: note = methanogen bacteria
GQSIGLIFKM

SEQ ID NO: 65000 - protein, 41 aa, unidentified; identical to SEQ ID NO: 64833
  source 1..41: note = methanogen bacteria

SEQ ID NO: 65001 - protein, 21 aa, unidentified
  source 1..21: note = methanogen bacteria
LYNYFGGKLFTDLIKLVKPEP

SEQ ID NO: 65002 - protein, 15 aa, unidentified
  source 1..15: note = methanogen bacteria
PIEIELTKGMTVSIM

SEQ ID NO: 65003 - protein, 10 aa, unidentified
  source 1..10: note = methanogen bacteria
GQSMHLLFEM

SEQ ID NO: 65004 - protein, 41 aa, unidentified
  source 1..41: note = methanogen bacteria
SVLPLHPFAFAMASGVGSASMNAASIGPTLAAFPALETQIE

SEQ ID NO: 65005 - protein, 12 aa, unidentified
  source 1..12: note = methanogen bacteria
QIFFNQTLTVPD

SEQ ID NO: 65006 - protein, 10 aa, unidentified
  source 1..10: note = methanogen bacteria
LETSLSSIPT

SEQ ID NO: 65007 - protein, 15 aa, unidentified
  source 1..15: note = methanogen bacteria
TSFNQVSTFVAINPT

SEQ ID NO: 65008 - protein, 12 aa, unidentified
  source 1..12: note = methanogen bacteria
GQYKFNGFGSSS

SEQ ID NO: 65009 - protein, 32 aa, unidentified
  source 1..32: note = methanogen bacteria
FGFAVSGKTAYPTILSFSQKNFSILGGGSFGP

SEQ ID NO: 65010 - protein, 38 aa, unidentified
  source 1..38: note = methanogen bacteria
MYNLLFSYSWEVSFIVFLQTFMKGFVLSFFKFLSDFAT

SEQ ID NO: 65011 - protein, 44 aa, unidentified
  source 1..44: note = methanogen bacteria
GFVGRMRPYATHTQIKCLHPPAPDVSINDPTARGFSFPSGDASA

SEQ ID NO: 65012 - protein, 12 aa, unidentified
  source 1..12: note = methanogen bacteria
SAGFAFSYQMFS

SEQ ID NO: 65013 - protein, 24 aa, unidentified
  source 1..24: note = methanogen bacteria
NSNKYDVNFNRLKMALTCIVGSVV

SEQ ID NO: 65014 - protein, 35 aa, unidentified
  source 1..35: note = methanogen bacteria
DMAWEMANSPTIPIDNIIDRPSDYCHYELLSFTHD

SEQ ID NO: 65015 - protein, 15 aa, unidentified
  source 1..15: note = methanogen bacteria
TIKIPLTKDVAITIM

SEQ ID NO: 65016 - protein, 10 aa, unidentified
  source 1..10: note = methanogen bacteria
GQSISLIFTM

SEQ ID NO: 65017 - protein, 41 aa, unidentified; identical to SEQ ID NO: 64833
  source 1..41: note = methanogen bacteria

SEQ ID NO: 65018 - protein, 14 aa, unidentified
  source 1..14: note = methanogen bacteria
SSFSQISSFITISP

SEQ ID NO: 65019 - protein, 11 aa, unidentified
  source 1..11: note = methanogen bacteria
GSTVMGDVISS

SEQ ID NO: 65020 - protein, 14 aa, unidentified
  source 1..14: note = methanogen bacteria
ITIPVTKDVAITIM

SEQ ID NO: 65021 - protein, 10 aa, unidentified
  source 1..10: note = methanogen bacteria
GQSISLIFEM

SEQ ID NO: 65022 - protein, 41 aa, unidentified
  source 1..41: note = methanogen bacteria
SFLPLHPYAYAMASGVGSASMNAAAIGPTLAAFPGLETQIE

SEQ ID NO: 65023 - protein, 14 aa, unidentified
  source 1..14: note = methanogen bacteria
TDFNQIGNFVGIDP

SEQ ID NO: 65024 - protein, 15 aa, unidentified
  source 1..15: note = methanogen bacteria
PIEIEIAKGVTVSIM

SEQ ID NO: 65025 - protein, 10 aa, unidentified
  source 1..10: note = methanogen bacteria
GQSMHLLFEM

SEQ ID NO: 65026 - protein, 41 aa, unidentified
  source 1..41: note = methanogen bacteria
SILPLHPYAFAMASGVGSASMNAAAIGPTLAAFPGFETQIE

SEQ ID NO: 65027 - protein, 11 aa, unidentified
  source 1..11: note = methanogen bacteria
VSGLGADALAG

SEQ ID NO: 65028 - protein, 18 aa, unidentified
  source 1..18: note = methanogen bacteria
KDILLGMGAGSTIDYAMD

SEQ ID NO: 65029 - protein, 18 aa, unidentified
  source 1..18: note = methanogen bacteria
VVVASTDAVAVYSHCNSY

SEQ ID NO: 65030 - protein, 70 aa, unidentified
  source 1..70: note = methanogen bacteria
MIQLSPIDPVRAYLGQRIVSQEQLAIIGRYWGTDLSLTERVFGWLQTLASGSMGFSLIYRVPVTEVIVQK

SEQ ID NO: 65031 - protein, 30 aa, unidentified
  source 1..30: note = methanogen bacteria
SVYLGWFPIGLSVPIGQLSDTVTFWQWLHR

SEQ ID NO: 65032 - protein, 24 aa, unidentified
  source 1..24: note = methanogen bacteria
EQVFAYPGIGQATVAAGLRSDVPL

SEQ ID NO: 65033 - protein, 10 aa, unidentified
  source 1..10: note = methanogen bacteria
STVMGDVISS

SEQ ID NO: 65034 - protein, 15 aa, unidentified
  source 1..15: note = methanogen bacteria
PIDIKLSKDVTVSIM

SEQ ID NO: 65035 - protein, 10 aa, unidentified
  source 1..10: note = methanogen bacteria
GQSMDLLFKM

SEQ ID NO: 65036 - protein, 41 aa, unidentified
  source 1..41: note = methanogen bacteria
SILPLHPFAFAMASGVGSASMNAAALGPTLAAFPGLETQVE

SEQ ID NO: 65037 - protein, 50 aa, unidentified
  source 1..50: note = methanogen bacteria
GNPLYGTADSVRKETAMNIGKMIRDGYPATTILSEAMGQVANESGEKYGG

SEQ ID NO: 65038 - protein, 21 aa, unidentified
  source 1..21: note = methanogen bacteria
NLVSGISTEDMFTPQEMNQTG

SEQ ID NO: 65039 - protein, 11 aa, unidentified
  source 1..11: note = methanogen bacteria
ELKTIYAYHLK

SEQ ID NO: 65040 - protein, 38 aa, unidentified
  source 1..38: note = methanogen bacteria
MFETVFYFPWEVSLIIFLQSTLPGFVLGFFEVIAEVVS

SEQ ID NO: 65041 - protein, 43 aa, unidentified
  source 1..43: note = methanogen bacteria
VTVARLRPYAAVDTIKCIRADVADQNPLDFKIQGYSFPSGHTM

SEQ ID NO: 65042 - protein, 38 aa, unidentified
  source 1..38: note = methanogen bacteria
MIETVFYFPWEVQLILFLQSSLPSFVLGFFEIIANVVS

SEQ ID NO: 65043 - protein, 43 aa, unidentified
  source 1..43: note = methanogen bacteria
MTVARLRPYAVVDKVKCIYANVPDQNPLDFKIQGYSFPSGHSM

SEQ ID NO: 65044 - protein, 20 aa, unidentified
  source 1..20: note = methanogen bacteria
FPELFSNSLLYDPNSSPGLE

SEQ ID NO: 65045 - protein, 10 aa, unidentified
  source 1..10: note = methanogen bacteria
FGVEFDNKFT

SEQ ID NO: 65046 - protein, 13 aa, unidentified
  source 1..13: note = methanogen bacteria
GLTATELSNNITI

SEQ ID NO: 65047 - protein, 38 aa, unidentified
  source 1..38: note = methanogen bacteria
MIGTVFYFPWEVSLILFLQSSLPDFAFGFFKVIAEVVS

SEQ ID NO: 65048 - protein, 43 aa, unidentified
  source 1..43: note = methanogen bacteria
VSVARLRPYAVVDKIKCLYPNSPGQNPMDFKIQGYSLPSGHSM

SEQ ID NO: 65049 - protein, 12 aa, unidentified
  source 1..12: note = methanogen bacteria
LGTSGPLHVFPL

SEQ ID NO: 65050 - protein, 10 aa, unidentified
  source 1..10: note = methanogen bacteria
NKATNGGAVY

SEQ ID NO: 65051 - protein, 96 aa, unidentified
  source 1..96: note = methanogen bacteria
EDGSKVTNCSFTGNKAVIGSAIYFYKFLPTDTLTISNSIFLNNRANAKDLQVTRNEKIITITFTGQNNLLNAIYSRDDAEVTFTNVTYWGANGISN

SEQ ID NO: 65052 - protein, 38 aa, unidentified
  source 1..38: note = methanogen bacteria
MLETVFYFPWEVNLILFMQSSFPGFVFRFFEIIASVVS

SEQ ID NO: 65053 - protein, 43 aa, unidentified
  source 1..43: note = methanogen bacteria
VTVARLRPYAVVDKIKCIHPNVPGENPLNFKIQGYSLPSGHSM

SEQ ID NO: 65054 - protein, 21 aa, unidentified
  source 1..21: note = methanogen bacteria
FPELFSSSLLYNPNSSPGLET

SEQ ID NO: 65055 - protein, 10 aa, unidentified
  source 1..10: note = methanogen bacteria
FGVEFDNKFT

SEQ ID NO: 65056 - protein, 14 aa, unidentified
  source 1..14: note = methanogen bacteria
GLTATELSNNITFE

SEQ ID NO: 65057 - protein, 25 aa, unidentified
  source 1..25: note = methanogen bacteria
QAVYGTNVIDGIMKGGYETLNSSDV

SEQ ID NO: 65058 - protein, 11 aa, unidentified
  source 1..11: note = methanogen bacteria
FNEYGGVSQVS

SEQ ID NO: 65059 - protein, 11 aa, unidentified
  source 1..11: note = methanogen bacteria
LNLSSISSTVT

SEQ ID NO: 65060 - protein, 28 aa, unidentified
  source 1..28: note = methanogen bacteria
IYDSLMVIESRAPLETYQALMGAIPPSN

SEQ ID NO: 65061 - protein, 10 aa, unidentified
  source 1..10: note = methanogen bacteria
INQAVGPSVN

SEQ ID NO: 65062 - protein, 38 aa, unidentified
  source 1..38: note = methanogen bacteria
MIETVFYFPWEVNLILFMQSILPGFIFSFFEIIANVVS

SEQ ID NO: 65063 - protein, 43 aa, unidentified
  source 1..43: note = methanogen bacteria
VTVARLRPYAVVDKIKCIYPNVPGQNPLDFKIQGYSLPSGHSM

SEQ ID NO: 65064 - protein, 11 aa, unidentified
  source 1..11: note = methanogen bacteria
SEYVTEEIDNA

SEQ ID NO: 65065 - protein, 12 aa, unidentified
  source 1..12: note = methanogen bacteria
TSGTDISVQSDD

SEQ ID NO: 65066 - protein, 10 aa, unidentified
  source 1..10: note = methanogen bacteria
HFQYVRGWDA

SEQ ID NO: 65067 - protein, 17 aa, unidentified
  source 1..17: note = methanogen bacteria
VMGYLELAPKYALMIVQ

SEQ ID NO: 65068 - protein, 38 aa, unidentified
  source 1..38: note = methanogen bacteria
MLETVFYFPWEVSLILFIQSTFPDLVMGLFKVIADVIN

SEQ ID NO: 65069 - protein, 43 aa, unidentified
  source 1..43: note = methanogen bacteria
VTVARLRPYAVVDKIKCIHANVPDQNPLNLKIQGYSLPSGHSM

SEQ ID NO: 65070 - protein, 15 aa, unidentified
  source 1..15: note = methanogen bacteria
PKQIPIANGVEVSIM

SEQ ID NO: 65071 - protein, 10 aa, unidentified
  source 1..10: note = methanogen bacteria
GQSIHLIFEM

SEQ ID NO: 65072 - protein, 41 aa, unidentified
  source 1..41: note = methanogen bacteria
SLIPLHPFAFAMASGVGSASMNAASLGPTLAAFPALETSIE

SEQ ID NO: 65073 - protein, 38 aa, unidentified
  source 1..38: note = methanogen bacteria
MFETVFYFQWEVWLILFMQSSFPDWVFGFFKLVANVVS

SEQ ID NO: 65074 - protein, 43 aa, unidentified
  source 1..43: note = methanogen bacteria
VTVARLRPYAAVDKIKCIYPNEPGQDPLNFKIQGYSFPSGHSM

SEQ ID NO: 65075 - protein, 12 aa, unidentified
  source 1..12: note = methanogen bacteria
TSGATISVQSDD

SEQ ID NO: 65076 - protein, 13 aa, unidentified
  source 1..13: note = methanogen bacteria
QLSLAFPFEFFPS

SEQ ID NO: 65077 - protein, 38 aa, unidentified
  source 1..38: note = methanogen bacteria
MIETVFYFPWEVNLILFMQSSLPDFIFGFFKIIANLIS

SEQ ID NO: 65078 - protein, 42 aa, unidentified
  source 1..42: note = methanogen bacteria
FVARLRPYAVVNKIKCIYPNKPGQNPFDFKIQEYSFPSGHSM

SEQ ID NO: 65079 - protein, 38 aa, unidentified
  source 1..38: note = methanogen bacteria
MFETVFYFPWESSLIIFLQNSLPGFVLEFFGIVAEVVS

SEQ ID NO: 65080 - protein, 43 aa, unidentified
  source 1..43: note = methanogen bacteria
VTVARLRPYAAVDNIRCIHANVAGQNPFDFKIQGYSFPSGHSM

SEQ ID NO: 65081 - protein, 13 aa, unidentified
  source 1..13: note = methanogen bacteria
PTLGFNIITAGSI

SEQ ID NO: 65082 - protein, 10 aa, unidentified
  source 1..10: note = methanogen bacteria
EDASSLDCGY

SEQ ID NO: 65083 - protein, 56 aa, unidentified
  source 1..56: note = methanogen bacteria
MGGISHAVDTYAPEHSGDEQFHQDVYDYFQKMGNMDDIKSQGSTVVTIVDGIFQDA

SEQ ID NO: 65084 - protein, 14 aa, unidentified
  source 1..14: note = methanogen bacteria
SDFGQISNFVSINP

SEQ ID NO: 65085 - protein, 20 aa, unidentified
  source 1..20: note = methanogen bacteria
MGFLPHGFVNFYMSIQNLAD

SEQ ID NO: 65086 - protein, 16 aa, unidentified
  source 1..16: note = methanogen bacteria
DSGLSITELYNPIFSY

SEQ ID NO: 65087 - protein, 11 aa, unidentified
  source 1..11: note = methanogen bacteria
VAGLGADPLAA

SEQ ID NO: 65088 - protein, 16 aa, unidentified
  source 1..16: note = methanogen bacteria
IIAMGGKDVLTHAVDY

SEQ ID NO: 65089 - protein, 16 aa, unidentified
  source 1..16: note = methanogen bacteria
ACSSGWNNSGSSLYCR

SEQ ID NO: 65090 - protein, 15 aa, unidentified
  source 1..15: note = methanogen bacteria
TDFSQINGFISINPS

SEQ ID NO: 65091 - protein, 34 aa, unidentified
  source 1..34: note = methanogen bacteria
ITDENTLLINGYSIFPKKINFQAYRYIWSSKSTV

SEQ ID NO: 65092 - protein, 19 aa, unidentified
  source 1..19: note = methanogen bacteria
GGLVPTYMIYTNVLHIKNT

SEQ ID NO: 65093 - protein, 43 aa, unidentified
  source 1..43: note = methanogen bacteria
LYYISDQSKYSIQQMLNVMVKNIQYLTQYGHSSGNGEALPSIS

SEQ ID NO: 65094 - protein, 23 aa, unidentified
  source 1..23: note = methanogen bacteria
TLPGAGVGIQALLQPDWTKLTDI

SEQ ID NO: 65095 - protein, 35 aa, unidentified
  source 1..35: note = methanogen bacteria
GFMSSTTGIPMVQLVSEGTGLIFIVFPTIFNVMGS

SEQ ID NO: 65096 - protein, 14 aa, unidentified
  source 1..14: note = methanogen bacteria
TNFNQINNFVSIDP

SEQ ID NO: 65097 - protein, 14 aa, unidentified
  source 1..14: note = methanogen bacteria
SDFGEISNFISINP

SEQ ID NO: 65098 - protein, 10 aa, unidentified
  source 1..10: note = methanogen bacteria
STVMGDVISG

SEQ ID NO: 65099 - protein, 11 aa, unidentified
  source 1..11: note = methanogen bacteria
RFFNHVIPEIS

SEQ ID NO: 65100 - protein, 10 aa, unidentified
  source 1..10: note = methanogen bacteria
TMATISNVYS

SEQ ID NO: 65101 - protein, 10 aa, unidentified
  source 1..10: note = methanogen bacteria
VLEINFENIP

SEQ ID NO: 65102 - protein, 14 aa, unidentified
  source 1..14: note = methanogen bacteria
SDFSEISNFISINP

SEQ ID NO: 65103 - protein, 14 aa, unidentified
  source 1..14: note = methanogen bacteria
YERMVNPGHVMVPD

SEQ ID NO: 65104 - protein, 20 aa, unidentified
  source 1..20: note = methanogen bacteria
FPQALASLYVPGSNSSPGLE

SEQ ID NO: 65105 - protein, 10 aa, unidentified
  source 1..10: note = methanogen bacteria
FGAKIDIKFT

SEQ ID NO: 65106 - protein, 12 aa, unidentified
  source 1..12: note = methanogen bacteria
GITTTQISNNVG

SEQ ID NO: 65107 - protein, 13 aa, unidentified
  source 1..13: note = methanogen bacteria
PVYAAGGSAEQLR

SEQ ID NO: 65108 - protein, 24 aa, unidentified
  source 1..24: note = methanogen bacteria
SGIYGMDKVNLILSGGYDVIDTSD

SEQ ID NO: 65109 - protein, 11 aa, unidentified
  source 1..11: note = methanogen bacteria
NNGKAHTTKIT

SEQ ID NO: 65110 - protein, 12 aa, unidentified
  source 1..12: note = methanogen bacteria
LGYDILQNNITN

SEQ ID NO: 65111 - protein, 11 aa, unidentified
  source 1..11: note = methanogen bacteria
GQYKYNGFDLS

SEQ ID NO: 65112 - protein, 32 aa, unidentified
  source 1..32: note = methanogen bacteria
FGFAVSGQTGTPSLLKCSQVGQNIISGGQFGP

SEQ ID NO: 65113 - protein, 25 aa, unidentified
  source 1..25: note = methanogen bacteria
SQSSKYVIKEVQKAYINNKGILPIN

SEQ ID NO: 65114 - protein, 15 aa, unidentified
  source 1..15: note = methanogen bacteria
TDFAQISNFISINPS

SEQ ID NO: 65115 - protein, 14 aa, unidentified
  source 1..14: note = methanogen bacteria
NFNQITTFINRNTG

SEQ ID NO: 65116 - protein, 14 aa, unidentified
  source 1..14: note = methanogen bacteria
TNFTQIANFVNLSP

SEQ ID NO: 65117 - protein, 16 aa, unidentified
  source 1..16: note = methanogen bacteria
LTLFNIVDPYYSEVIC

SEQ ID NO: 65118 - protein, 14 aa, unidentified
  source 1..14: note = methanogen bacteria
TDFGQINNFISINP

SEQ ID NO: 65119 - protein, 14 aa, unidentified
  source 1..14: note = methanogen bacteria
TDFGQISSFVSINP

SEQ ID NO: 65120 - protein, 16 aa, unidentified
  source 1..16: note = methanogen bacteria
LNIDFLNIFPQMSIYP

SEQ ID NO: 65121 - protein, 13 aa, unidentified
  source 1..13: note = methanogen bacteria
IMMLFTKNLVLVI

SEQ ID NO: 65122 - protein, 25 aa, unidentified
  source 1..25: note = methanogen bacteria
GAAYGDNIIDSVANGGYETLNTTDV

SEQ ID NO: 65123 - protein, 11 aa, unidentified
  source 1..11: note = methanogen bacteria
GMETGGSSHVS

SEQ ID NO: 65124 - protein, 11 aa, unidentified
  source 1..11: note = methanogen bacteria
LGFGSISSTLS

SEQ ID NO: 65125 - protein, 13 aa, unidentified
  source 1..13: note = methanogen bacteria
SVEDGVYTVTEYD

SEQ ID NO: 65126 - protein, 10 aa, unidentified
  source 1..10: note = methanogen bacteria
STVMGDILPS

SEQ ID NO: 65127 - protein, 36 aa, unidentified
  source 1..36: note = methanogen bacteria
MVLSNLTMHERAEYFVEVHHSDTYEKGQAQMYWRDF

SEQ ID NO: 65128 - protein, 15 aa, unidentified
  source 1..15: note = methanogen bacteria
NFNQITTFININTGT

SEQ ID NO: 65129 - protein, 15 aa, unidentified
  source 1..15: note = methanogen bacteria
TNFNQITAFVSINPT

SEQ ID NO: 65130 - protein, 10 aa, unidentified
  source 1..10: note = methanogen bacteria
STVMGDIIPS

SEQ ID NO: 65131 - protein, 13 aa, unidentified
  source 1..13: note = methanogen bacteria
NPTLGYNLITAGS

SEQ ID NO: 65132 - protein, 18 aa, unidentified
  source 1..18: note = methanogen bacteria
FFSSDFSVLFSRLEGVTS

SEQ ID NO: 65133 - protein, 16 aa, unidentified
  source 1..16: note = methanogen bacteria
VDLNNPVSNVLGDVLQ

SEQ ID NO: 65134 - protein, 23 aa, unidentified
  source 1..23: note = methanogen bacteria
NPTLGFNGISIGVSIIILQSAFP

SEQ ID NO: 65135 - protein, 56 aa, unidentified
  source 1..56: note = methanogen bacteria
RIIVIINAIIDSFLIYIGAMIGEMFDELIYFLIGANTTNTGNLPPMIYVPDALIAD

SEQ ID NO: 65136 - protein, 12 aa, unidentified
  source 1..12: note = methanogen bacteria
LGFWGEPLHVFP

SEQ ID NO: 65137 - protein, 57 aa, unidentified
  source 1..57: note = methanogen bacteria
RIIVIINAIIDSFLIYIGAMIGEMFDELIYFLIGANTTSAETLPPMFYVPDALIADL

SEQ ID NO: 65138 - protein, 12 aa, unidentified
  source 1..12: note = methanogen bacteria
GFTNHNILNNFN

SEQ ID NO: 65139 - protein, 24 aa, unidentified
  source 1..24: note = methanogen bacteria
SAIGSLFQTEITNPVQKLIDSTDI

SEQ ID NO: 65140 - protein, 17 aa, unidentified
  source 1..17: note = methanogen bacteria
VVQSVQAFISNTGTTMD

SEQ ID NO: 65141 - protein, 22 aa, unidentified
  source 1..22: note = methanogen bacteria
EIGILPHTFLNAYMSLQSLTDN

SEQ ID NO: 65142 - protein, 18 aa, unidentified
  source 1..18: note = methanogen bacteria
VDMGNVVTDIYDTIFIHF

SEQ ID NO: 65143 - protein, 10 aa, unidentified
  source 1..10: note = methanogen bacteria
NWISIFANVF

SEQ ID NO: 65144 - protein, 22 aa, unidentified
  source 1..22: note = methanogen bacteria
EIGILPHTFLSAYMSLQGIADN

SEQ ID NO: 65145 - protein, 17 aa, unidentified
  source 1..17: note = methanogen bacteria
DLGNVVTDIYDDIFIHF

SEQ ID NO: 65146 - protein, 53 aa, unidentified
  source 1..53: note = methanogen bacteria
GLYSNTYNLINAYDANYSTLVANGTSNVDAFISVISGNSTVIPSNIVSSFMSS

SEQ ID NO: 65147 - protein, 22 aa, unidentified
  source 1..22: note = methanogen bacteria
SGLFGEAFINNLINGGYEVLNN

SEQ ID NO: 65148 - protein, 11 aa, unidentified
  source 1..11: note = methanogen bacteria
ITGPEGTFKLS

SEQ ID NO: 65149 - protein, 10 aa, unidentified
  source 1..10: note = methanogen bacteria
GIITPTSSPQ

SEQ ID NO: 65150 - protein, 41 aa, unidentified
  source 1..41: note = methanogen bacteria
PGNSIRFAHEAAFWYPEFVNFTIIEKSYLGLVTTFGTLIEQ

SEQ ID NO: 65151 - protein, 80 aa, unidentified
  source 1..80: note = methanogen bacteria
FIDISILDSSVKSLGSITIFNAFIDISILDSSVKSLGSFSNVIKSSPLIVIPKMFKHVVGATPYLTETLKLFTYEGVPAL

SEQ ID NO: 65152 - protein, 11 aa, unidentified
  source 1..11: note = methanogen bacteria
SPVVFPSGARV

SEQ ID NO: 65153 - protein, 14 aa, unidentified
  source 1..14: note = methanogen bacteria
HHKLDNPAAIPVPD

SEQ ID NO: 65154 - protein, 18 aa, unidentified
  source 1..18: note = methanogen bacteria
GVYSSFMMNLGRASTTCQ

SEQ ID NO: 65155 - protein, 12 aa, unidentified
  source 1..12: note = methanogen bacteria
YEHMLNALHNLV

SEQ ID NO: 65156 - protein, 10 aa, unidentified
  source 1..10: note = methanogen bacteria
VVSNVTFDIQ

SEQ ID NO: 65157 - protein, 21 aa, unidentified
  source 1..21: note = methanogen bacteria
AIYGENIMAQLLRGGYEVMNS

SEQ ID NO: 65158 - protein, 10 aa, unidentified
  source 1..10: note = methanogen bacteria
LGNVGNYHFT

SEQ ID NO: 65159 - protein, 10 aa, unidentified
  source 1..10: note = methanogen bacteria
GIQSTTSTIV

SEQ ID NO: 65160 - protein, 24 aa, unidentified
  source 1..24: note = methanogen bacteria
GLPAVNWTFLTSDPIDSGRSGGIF

SEQ ID NO: 65161 - protein, 35 aa, unidentified
  source 1..35: note = methanogen bacteria
VGSAVTTPISIMDPGRPLPLHLYVLATEGVSLQNA

SEQ ID NO: 65162 - protein, 22 aa, unidentified
  source 1..22: note = methanogen bacteria
EAGILPHTFLQAFLSLQHFADN

SEQ ID NO: 65163 - protein, 18 aa, unidentified
  source 1..18: note = methanogen bacteria
VDEGNMITSIYDAVFIYF

SEQ ID NO: 65164 - protein, 24 aa, unidentified
  source 1..24: note = methanogen bacteria
SGVYGNNTVERILSGGYDVIDTSD

SEQ ID NO: 65165 - protein, 11 aa, unidentified
  source 1..11: note = methanogen bacteria
SNGKIQNTTIT

SEQ ID NO: 65166 - protein, 12 aa, unidentified
  source 1..12: note = methanogen bacteria
LGFDILQSNITN

SEQ ID NO: 65167 - protein, 92 aa, unidentified
  source 1..92: note = methanogen bacteria
IFGIEPGVDLKGGTMAEITLNHDMNSNEIASLLQKSLHIEEVKIISNNNRHVTVEFSDSVDIGEFRKATESIGTVSSFNTVGPVLSEEAMGQ

SEQ ID NO: 65168 - protein, 10 aa, unidentified
  source 1..10: note = methanogen bacteria
LTMPQARTLS

SEQ ID NO: 65169 - protein, 10 aa, unidentified
  source 1..10: note = methanogen bacteria
STVMGDIISS

SEQ ID NO: 65170 - protein, 63 aa, unidentified
  source 1..63: note = methanogen bacteria
SLLDGQGRSYANQNIKFNINGVFYDKTTDINGEAKLNINLLPGQYIITSSYNGYNAANKVTIS

SEQ ID NO: 65171 - protein, 24 aa, unidentified
  source 1..24: note = methanogen bacteria
SAIYGADTVNGILNGGYETLNTSD

SEQ ID NO: 65172 - protein, 12 aa, unidentified
  source 1..12: note = methanogen bacteria
LGNESGGSSQVS

SEQ ID NO: 65173 - protein, 11 aa, unidentified
  source 1..11: note = methanogen bacteria
LGISSISSNVS

SEQ ID NO: 65174 - protein, 13 aa, unidentified
  source 1..13: note = methanogen bacteria
IGNGRDTELGHSA

SEQ ID NO: 65175 - protein, 12 aa, unidentified
  source 1..12: note = methanogen bacteria
FTAFTDSISNMD

SEQ ID NO: 65176 - protein, 21 aa, unidentified
  source 1..21: note = methanogen bacteria
AICGENIMVQLLHGRYEVMNS

SEQ ID NO: 65177 - protein, 10 aa, unidentified
  source 1..10: note = methanogen bacteria
LGNGGNYHFT

SEQ ID NO: 65178 - protein, 10 aa, unidentified
  source 1..10: note = methanogen bacteria
GIQSTTSTIV

SEQ ID NO: 65179 - protein, 22 aa, unidentified
  source 1..22: note = methanogen bacteria
AIYGEHITGQLLRGGYEVMNSE

SEQ ID NO: 65180 - protein, 11 aa, unidentified
  source 1..11: note = methanogen bacteria
ILGNAGDYHFT

SEQ ID NO: 65181 - protein, 10 aa, unidentified
  source 1..10: note = methanogen bacteria
GIQSTTSTIQ

SEQ ID NO: 65182 - protein, 38 aa, unidentified
  source 1..38: note = methanogen bacteria
FIKDIPTSFVNANQMPSLEHLFGTDWMGRDMFQRTIAG

SEQ ID NO: 65183 - protein, 30 aa, unidentified
  source 1..30: note = methanogen bacteria
TFLGFGLPPHEPAIGVILAESMNYLSSGYW

SEQ ID NO: 65184 - protein, 17 aa, unidentified
  source 1..17: note = methanogen bacteria
KNPTLGFNIITIGSIAV

SEQ ID NO: 65185 - protein, 21 aa, unidentified
  source 1..21: note = methanogen bacteria
MPTVDSFLPDIIQTTFFSGYT

SEQ ID NO: 65186 - protein, 18 aa, unidentified
  source 1..18: note = methanogen bacteria
TRALVDNGILPKTVFLIT

SEQ ID NO: 65187 - protein, 24 aa, unidentified
  source 1..24: note = methanogen bacteria
AVEYFNYAEQHVLPNALNQLFNTY

SEQ ID NO: 65188 - protein, 27 aa, unidentified
  source 1..27: note = methanogen bacteria
IYNPDELELGYGEGYMELLAPISSILP

SEQ ID NO: 65189 - protein, 10 aa, unidentified
  source 1..10: note = methanogen bacteria
RLFISQSPDA

SEQ ID NO: 65190 - protein, 12 aa, unidentified
  source 1..12: note = methanogen bacteria
PINGSALHIFPL

SEQ ID NO: 65191 - protein, 14 aa, unidentified
  source 1..14: note = methanogen bacteria
LNREFSYTIFTYNW

SEQ ID NO: 65192 - protein, 27 aa, unidentified
  source 1..27: note = methanogen bacteria
TGAVLPKNSILNYVATQTAIVGSWVDM

SEQ ID NO: 65193 - protein, 10 aa, unidentified
  source 1..10: note = methanogen bacteria
IFTPIPSNGI

SEQ ID NO: 65194 - protein, 21 aa, unidentified
  source 1..21: note = methanogen bacteria
AICGENIMVQLLQGGYEVMNS

SEQ ID NO: 65195 - protein, 10 aa, unidentified
  source 1..10: note = methanogen bacteria
LGNGGNYHFT

SEQ ID NO: 65196 - protein, 10 aa, unidentified
  source 1..10: note = methanogen bacteria
GIQSSTSTIQ

SEQ ID NO: 65197 - protein, 20 aa, unidentified
  source 1..20: note = methanogen bacteria
WGILPQTFLNAFLSLQNLAN

SEQ ID NO: 65198 - protein, 18 aa, unidentified
  source 1..18: note = methanogen bacteria
VDAGNVITNIYDGVFARF

SEQ ID NO: 65199 - protein, 22 aa, unidentified
  source 1..22: note = methanogen bacteria
LNPGYTIPEFTTKGLYLTDKSI

SEQ ID NO: 65200 - protein, 14 aa, unidentified
  source 1..14: note = methanogen bacteria
QSPWHFSMASHSLQ

SEQ ID NO: 65201 - protein, 13 aa, unidentified
  source 1..13: note = methanogen bacteria
PTGTQGPLHVFPL

SEQ ID NO: 65202 - protein, 17 aa, unidentified
  source 1..17: note = methanogen bacteria
PQIDFTLADTLLEVIEM

SEQ ID NO: 65203 - protein, 12 aa, unidentified
  source 1..12: note = methanogen bacteria
YEYMLTALHELH

SEQ ID NO: 65204 - protein, 10 aa, unidentified
  source 1..10: note = methanogen bacteria
IINSAGLNFS

SEQ ID NO: 65205 - protein, 21 aa, unidentified
  source 1..21: note = methanogen bacteria
WGFLPKIFLNIYLSIQGVASN

SEQ ID NO: 65206 - protein, 16 aa, unidentified
  source 1..16: note = methanogen bacteria
DMGNSVSQVFRLVYSY

SEQ ID NO: 65207 - protein, 21 aa, unidentified
  source 1..21: note = methanogen bacteria
AIYGESAMDIITGGGYEVLNT

SEQ ID NO: 65208 - protein, 11 aa, unidentified
  source 1..11: note = methanogen bacteria
INGADGTYHFS

SEQ ID NO: 65209 - protein, 12 aa, unidentified
  source 1..12: note = methanogen bacteria
FGLRSATSAPQF

SEQ ID NO: 65210 - protein, 11 aa, unidentified
  source 1..11: note = methanogen bacteria
GSTVMGDVISG

SEQ ID NO: 65211 - protein, 27 aa, unidentified
  source 1..27: note = methanogen bacteria
WPAFADYGFFKFLFGLKWDPTKNVFGV

SEQ ID NO: 65212 - protein, 12 aa, unidentified
  source 1..12: note = methanogen bacteria
FRSWFGGTGFSI

SEQ ID NO: 65213 - protein, 35 aa, unidentified
  source 1..35: note = methanogen bacteria
AGNVSQIPNSIFSPVRTLTSNIALEMGYATGLHYN

SEQ ID NO: 65214 - protein, 23 aa, unidentified
  source 1..23: note = methanogen bacteria
GIFSPEAAKTFFISPGTNIPGFD

SEQ ID NO: 65215 - protein, 11 aa, unidentified
  source 1..11: note = methanogen bacteria
VRGIQLDIKLT

SEQ ID NO: 65216 - protein, 12 aa, unidentified
  source 1..12: note = methanogen bacteria
GISTVNISTNAS

SEQ ID NO: 65217 - protein, 10 aa, unidentified
  source 1..10: note = methanogen bacteria
PNNLYTGGIL

SEQ ID NO: 65218 - protein, 10 aa, unidentified
  source 1..10: note = methanogen bacteria
IDIFNIKNNF

SEQ ID NO: 65219 - protein, 20 aa, unidentified
  source 1..20: note = methanogen bacteria
IWGWDFVDLIVTGGYEVLNN

SEQ ID NO: 65220 - protein, 11 aa, unidentified
  source 1..11: note = methanogen bacteria
INGGEGTYHFT

SEQ ID NO: 65221 - protein, 11 aa, unidentified
  source 1..11: note = methanogen bacteria
FGLQSTSSTVQ

SEQ ID NO: 65222 - protein, 15 aa, unidentified
  source 1..15: note = methanogen bacteria
LPSIEQSFNLTSRES

SEQ ID NO: 65223 - protein, 13 aa, unidentified
  source 1..13: note = methanogen bacteria
IDSSSFISSLTSL

SEQ ID NO: 65224 - protein, 12 aa, unidentified
  source 1..12: note = methanogen bacteria
SLVILSMGLSDQ

SEQ ID NO: 65225 - protein, 11 aa, unidentified
  source 1..11: note = methanogen bacteria
AHEAEIIFPEI

SEQ ID NO: 65226 - protein, 44 aa, unidentified
  source 1..44: note = methanogen bacteria
TGLFSSFTEIVYISIDAIANETTNASMIIAAIPKSTMNTFTNAL

SEQ ID NO: 65227 - protein, 20 aa, unidentified
  source 1..20: note = methanogen bacteria
IAGPDFLMSVFKGGYEVLNT

SEQ ID NO: 65228 - protein, 11 aa, unidentified
  source 1..11: note = methanogen bacteria
IEGPDGTSHLS

SEQ ID NO: 65229 - protein, 11 aa, unidentified
  source 1..11: note = methanogen bacteria
LGLKTSTSSPK

SEQ ID NO: 65230 - protein, 22 aa, unidentified
  source 1..22: note = methanogen bacteria
MIEYNKFINDIVFSNGGNINSL

SEQ ID NO: 65231 - protein, 22 aa, unidentified
  source 1..22: note = methanogen bacteria
VTFGTELITSIANGGYEALNSE

SEQ ID NO: 65232 - protein, 12 aa, unidentified
  source 1..12: note = methanogen bacteria
IDGPENGTFHFT

SEQ ID NO: 65233 - protein, 11 aa, unidentified
  source 1..11: note = methanogen bacteria
GIQLTSSSPEQ

SEQ ID NO: 65234 - protein, 12 aa, unidentified
  source 1..12: note = methanogen bacteria
YEYMLDALHGLH

SEQ ID NO: 65235 - protein, 38 aa, unidentified
  source 1..38: note = methanogen bacteria
TGIMSADPFKAGAVTVATTKALGGAKFMAAGKATASLT

SEQ ID NO: 65236 - protein, 11 aa, unidentified
  source 1..11: note = methanogen bacteria
IFCGAKITWAD

SEQ ID NO: 65237 - protein, 10 aa, unidentified
  source 1..10: note = methanogen bacteria
DYIIGVSVNI

SEQ ID NO: 65238 - protein, 13 aa, unidentified
  source 1..13: note = methanogen bacteria
TIPINGTPLHVFP

SEQ ID NO: 65239 - protein, 10 aa, unidentified
  source 1..10: note = methanogen bacteria
LRNKPRIQAY

SEQ ID NO: 65240 - protein, 14 aa, unidentified
  source 1..14: note = methanogen bacteria
QKIPITEDVAITIM

SEQ ID NO: 65241 - protein, 10 aa, unidentified
  source 1..10: note = methanogen bacteria
GQSIHLIFTM

SEQ ID NO: 65242 - protein, 41 aa, unidentified
  source 1..41: note = methanogen bacteria
SFLPLHPYAFAMASGVGSASMNAAAIGPTLAAFPGMESQIE

SEQ ID NO: 65243 - protein, 14 aa, unidentified
  source 1..14: note = methanogen bacteria
TDFGQINAFVSINP

SEQ ID NO: 65244 - protein, 11 aa, unidentified
  source 1..11: note = methanogen bacteria
GSTVMGDVISG

SEQ ID NO: 65245 - protein, 28 aa, unidentified
  source 1..28: note = methanogen bacteria
FPAIHEYGVVKFLFGNVWAPNDGEFGVF

SEQ ID NO: 65246 - protein, 11 aa, unidentified
  source 1..11: note = methanogen bacteria
VRLHFGGTGFS

SEQ ID NO: 65247 - protein, 34 aa, unidentified
  source 1..34: note = methanogen bacteria
GNVAKVPDSIFAPARTLTSNIALEMSYATGIHYN

SEQ ID NO: 65248 - protein, 11 aa, unidentified
  source 1..11: note = methanogen bacteria
GSTVMGDIISS

SEQ ID NO: 65249 - protein, 15 aa, unidentified
  source 1..15: note = methanogen bacteria
TNFNQISGFISVNPT

SEQ ID NO: 65250 - protein, 10 aa, unidentified
  source 1..10: note = methanogen bacteria
FENGEFNMSK

SEQ ID NO: 65251 - protein, 11 aa, unidentified
  source 1..11: note = methanogen bacteria
KLQLGEIISLE

SEQ ID NO: 65252 - protein, 13 aa, unidentified
  source 1..13: note = methanogen bacteria
QVYLISQIKLPIT

SEQ ID NO: 65253 - protein, 23 aa, unidentified
  source 1..23: note = methanogen bacteria
SAIYGESLVASIVNGGYEVLNNN

SEQ ID NO: 65254 - protein, 11 aa, unidentified
  source 1..11: note = methanogen bacteria
IGGTDGTYHFS

SEQ ID NO: 65255 - protein, 11 aa, unidentified
  source 1..11: note = methanogen bacteria
FGLQSTSSTIG

SEQ ID NO: 65256 - protein, 28 aa, unidentified
  source 1..28: note = methanogen bacteria
FPAIQEYGIAQFLFGNIWAPNEGQFGVF

SEQ ID NO: 65257 - protein, 11 aa, unidentified
  source 1..11: note = methanogen bacteria
IRSQFGGTGFG

SEQ ID NO: 65258 - protein, 34 aa, unidentified
  source 1..34: note = methanogen bacteria
GNVAKIPASILSPARTLTSNIALEMNYAIGIHYN

SEQ ID NO: 65259 - protein, 10 aa, unidentified
  source 1..10: note = methanogen bacteria
FYDMNAQVQT

SEQ ID NO: 65260 - protein, 11 aa, unidentified
  source 1..11: note = methanogen bacteria
GQFKYSGMDLS

SEQ ID NO: 65261 - protein, 31 aa, unidentified
  source 1..31: note = methanogen bacteria
FGLNVSGSATHSLLKFTTASPSILNGGTFGP

SEQ ID NO: 65262 - protein, 11 aa, unidentified
  source 1..11: note = methanogen bacteria
VAGLGPAPLAA

SEQ ID NO: 65263 - protein, 15 aa, unidentified
  source 1..15: note = methanogen bacteria
LKIMGASDVLKYAMD

SEQ ID NO: 65264 - protein, 13 aa, unidentified
  source 1..13: note = methanogen bacteria
LVSGSLLWFQVQL

SEQ ID NO: 65265 - protein, 20 aa, unidentified
  source 1..20: note = methanogen bacteria
AFGKDFFMSLASGGYEVLNT

SEQ ID NO: 65266 - protein, 11 aa, unidentified
  source 1..11: note = methanogen bacteria
ISGPKGTNHFS

SEQ ID NO: 65267 - protein, 11 aa, unidentified
  source 1..11: note = methanogen bacteria
GIQSTTSSIQL

SEQ ID NO: 65268 - protein, 29 aa, unidentified
  source 1..29: note = methanogen bacteria
GMPAIEQIGFFNFIFGMKWAPKDEVYGVF

SEQ ID NO: 65269 - protein, 11 aa, unidentified
  source 1..11: note = methanogen bacteria
IRDHFGGTGFS

SEQ ID NO: 65270 - protein, 35 aa, unidentified
  source 1..35: note = methanogen bacteria
AGNVAQIPGSIFEPVRVLTSNIALEMGYAIDLHYN

SEQ ID NO: 65271 - protein, 20 aa, unidentified
  source 1..20: note = methanogen bacteria
DGLLIFFKLHQVPNDGLVEN

SEQ ID NO: 65272 - protein, 21 aa, unidentified
  source 1..21: note = methanogen bacteria
AGEFDRDSIKIFASFKMDEKL

SEQ ID NO: 65273 - protein, 13 aa, unidentified
  source 1..13: note = methanogen bacteria
TKVDYFSKDLNSC

SEQ ID NO: 65274 - protein, 15 aa, unidentified
  source 1..15: note = methanogen bacteria
THLNQITNFIAPNPP

SEQ ID NO: 65275 - protein, 10 aa, unidentified
  source 1..10: note = methanogen bacteria
HLQLVMGVDS

SEQ ID NO: 65276 - protein, 17 aa, unidentified
  source 1..17: note = methanogen bacteria
YVGNMEVHNNISGLVQS

SEQ ID NO: 65277 - protein, 17 aa, unidentified
  source 1..17: note = methanogen bacteria
GLNIDFLNVFPLLSVYP

SEQ ID NO: 65278 - protein, 13 aa, unidentified
  source 1..13: note = methanogen bacteria
MIFTKNLFLGMIL

SEQ ID NO: 65279 - protein, 13 aa, unidentified
  source 1..13: note = methanogen bacteria
NNPTLGYNIITFG

SEQ ID NO: 65280 - protein, 15 aa, unidentified
  source 1..15: note = methanogen bacteria
KNPTLGTNLITAGSI

SEQ ID NO: 65281 - protein, 13 aa, unidentified
  source 1..13: note = methanogen bacteria
GQYRFAGFDFSCS

SEQ ID NO: 65282 - protein, 30 aa, unidentified
  source 1..30: note = methanogen bacteria
GFNVSGIETSSIIKFTQTSSSLIAGGSFGP

SEQ ID NO: 65283 - protein, 10 aa, unidentified
  source 1..10: note = methanogen bacteria
IFANNDNGMM

SEQ ID NO: 65284 - protein, 21 aa, unidentified
  source 1..21: note = methanogen bacteria
SAIYGGNALSLVSGGYEALNS

SEQ ID NO: 65285 - protein, 11 aa, unidentified
  source 1..11: note = methanogen bacteria
IKGPEGTYHFS

SEQ ID NO: 65286 - protein, 10 aa, unidentified
  source 1..10: note = methanogen bacteria
GLKSTTSTPL

SEQ ID NO: 65287 - protein, 14 aa, unidentified
  source 1..14: note = methanogen bacteria
MAHDVYICYDERDL

SEQ ID NO: 65288 - protein, 19 aa, unidentified
  source 1..19: note = methanogen bacteria
NRDTGAKRMVDEIMDAIKK

SEQ ID NO: 65289 - protein, 23 aa, unidentified
  source 1..23: note = methanogen bacteria
LLFSKNSKDSNFVNNEVDIAFAQ

SEQ ID NO: 65290 - protein, 28 aa, unidentified
  source 1..28: note = methanogen bacteria
KLDGGLEFFLRNKPRIEAFPNPEDEFDR

SEQ ID NO: 65291 - protein, 12 aa, unidentified
  source 1..12: note = methanogen bacteria
IQQIGLDLTFVP

SEQ ID NO: 65292 - protein, 29 aa, unidentified
  source 1..29: note = methanogen bacteria
GIVDFAPLWSAHLIEVPKFNLPIINYDLN

SEQ ID NO: 65293 - protein, 14 aa, unidentified
  source 1..14: note = methanogen bacteria
SLSIVYGDLSISIS

SEQ ID NO: 65294 - protein, 10 aa, unidentified
  source 1..10: note = methanogen bacteria
LDGLGHPFPL

SEQ ID NO: 65295 - protein, 22 aa, unidentified
  source 1..22: note = methanogen bacteria
VTGTMNIGEIITYQSVHGPLIY

SEQ ID NO: 65296 - protein, 15 aa, unidentified
  source 1..15: note = methanogen bacteria
TQKIPITGDVAITIM

SEQ ID NO: 65297 - protein, 10 aa, unidentified
  source 1..10: note = methanogen bacteria
GQSIHLIFEM

SEQ ID NO: 65298 - protein, 41 aa, unidentified; identical to SEQ ID NO: 64938
  source 1..41: note = methanogen bacteria

SEQ ID NO: 65299 - protein, 92 aa, unidentified
  source 1..92: note = methanogen bacteria
TIGIDEGVDLKGGTMAEVTLNHQMSNDQITSQLQSALHVNEVKIISNSNNKATIELSDKVDVGQFKQALNGMGTVTSYNTVGPVLSQEAMNQ

SEQ ID NO: 65300 - protein, 11 aa, unidentified
  source 1..11: note = methanogen bacteria
DIFMPQAKTLS

SEQ ID NO: 65301 - protein, 17 aa, unidentified
  source 1..17: note = methanogen bacteria
GLNVDFLHIFPELSVYP

SEQ ID NO: 65302 - protein, 11 aa, unidentified
  source 1..11: note = methanogen bacteria
MLVTKNIFLVV

SEQ ID NO: 65303 - protein, 21 aa, unidentified
  source 1..21: note = methanogen bacteria
VTGTMNIGEIITYQSVNGPLI

SEQ ID NO: 65304 - protein, 11 aa, unidentified
  source 1..11: note = methanogen bacteria
PRLFKPEGVDS

SEQ ID NO: 65305 - protein, 21 aa, unidentified
  source 1..21: note = methanogen bacteria
VTGTMNIGEIITYQSVHGPLI

SEQ ID NO: 65306 - protein, 11 aa, unidentified
  source 1..11: note = methanogen bacteria
PRIFSPEGVDS

SEQ ID NO: 65307 - protein, 22 aa, unidentified
  source 1..22: note = methanogen bacteria
GGIYGWDVIDSIDTGGYEALNT

SEQ ID NO: 65308 - protein, 11 aa, unidentified
  source 1..11: note = methanogen bacteria
MGEAEGTNHFT

SEQ ID NO: 65309 - protein, 11 aa, unidentified
  source 1..11: note = methanogen bacteria
FGLGVTSSTTT

SEQ ID NO: 65310 - protein, 22 aa, unidentified
  source 1..22: note = methanogen bacteria
VTGSMNIGEIIAYQSAHGPLVF

SEQ ID NO: 65311 - protein, 11 aa, unidentified
  source 1..11: note = methanogen bacteria
NIIENIGGNIS

SEQ ID NO: 65312 - protein, 10 aa, unidentified
  source 1..10: note = methanogen bacteria
LSGLGHPFPL

SEQ ID NO: 65313 - protein, 21 aa, unidentified
  source 1..21: note = methanogen bacteria
MGFLPYTFLSVFLSIQNFADN

SEQ ID NO: 65314 - protein, 17 aa, unidentified
  source 1..17: note = methanogen bacteria
VDVENRITDLYDAVFAY

SEQ ID NO: 65315 - protein, 22 aa, unidentified
  source 1..22: note = methanogen bacteria
IVGSMNIGEIIAYQSIHGALIF

SEQ ID NO: 65316 - protein, 21 aa, unidentified
  source 1..21: note = methanogen bacteria
ITGTMNIGEIITYQSVHGPLI

SEQ ID NO: 65317 - protein, 20 aa, unidentified
  source 1..20: note = methanogen bacteria
FGILPHGFLSAYLSLQHLAE

SEQ ID NO: 65318 - protein, 17 aa, unidentified
  source 1..17: note = methanogen bacteria
VDAGNVITNMYDIIFAY

SEQ ID NO: 65319 - protein, 10 aa, unidentified
  source 1..10: note = methanogen bacteria
AQAYGMDLGI

SEQ ID NO: 65320 - protein, 13 aa, unidentified
  source 1..13: note = methanogen bacteria
NIPLINLNNFDLS

SEQ ID NO: 65321 - protein, 22 aa, unidentified
  source 1..22: note = methanogen bacteria
LPVISWEFLTTAPVDFGASGGI

SEQ ID NO: 65322 - protein, 34 aa, unidentified
  source 1..34: note = methanogen bacteria
VGSSIAVPVTIFDPARPLPLHLYILATEGISIEN

SEQ ID NO: 65323 - protein, 18 aa, unidentified
  source 1..18: note = methanogen bacteria
FGNMTYEDFVAVLKENGI

SEQ ID NO: 65324 - protein, 15 aa, unidentified
  source 1..15: note = methanogen bacteria
SLFIEINNNQTLTVG

SEQ ID NO: 65325 - protein, 21 aa, unidentified
  source 1..21: note = methanogen bacteria
EAGILPHTFLSVFLSLQNLAN

SEQ ID NO: 65326 - protein, 16 aa, unidentified
  source 1..16: note = methanogen bacteria
VDLENRITNLYDVVFT

SEQ ID NO: 65327 - protein, 13 aa, unidentified
  source 1..13: note = methanogen bacteria
IGEVGEANVEHNA

SEQ ID NO: 65328 - protein, 11 aa, unidentified
  source 1..11: note = methanogen bacteria
STFTAAISDLD

SEQ ID NO: 65329 - protein, 21 aa, unidentified
  source 1..21: note = methanogen bacteria
VTGSMNIDAIINYQAVHGPLI

SEQ ID NO: 65330 - protein, 12 aa, unidentified
  source 1..12: note = methanogen bacteria
GQTGNVTIEHNA

SEQ ID NO: 65331 - protein, 11 aa, unidentified
  source 1..11: note = methanogen bacteria
SSFTAAISDLD

SEQ ID NO: 65332 - protein, 11 aa, unidentified
  source 1..11: note = methanogen bacteria
SYLLGDYATGL

SEQ ID NO: 65333 - protein, 15 aa, unidentified
  source 1..15: note = methanogen bacteria
SLISLIYSNQYSLAS

SEQ ID NO: 65334 - protein, 21 aa, unidentified
  source 1..21: note = methanogen bacteria
VTGTMNIGEIIVYQSVHGPLI

SEQ ID NO: 65335 - protein, 18 aa, unidentified
  source 1..18: note = methanogen bacteria
EKMNYENQILEIILNFFD

SEQ ID NO: 65336 - protein, 23 aa, unidentified
  source 1..23: note = methanogen bacteria
NVAYDTNTITQLMTGGYEALNSE

SEQ ID NO: 65337 - protein, 11 aa, unidentified
  source 1..11: note = methanogen bacteria
FGQKSANTLTP

SEQ ID NO: 65338 - protein, 11 aa, unidentified
  source 1..11: note = methanogen bacteria
LGFEVSSSLIT

SEQ ID NO: 65339 - protein, 23 aa, unidentified
  source 1..23: note = methanogen bacteria
GMAYGWNTIFQLMTQGYEALNSE

SEQ ID NO: 65340 - protein, 11 aa, unidentified
  source 1..11: note = methanogen bacteria
IHGPVGPNTLT

SEQ ID NO: 65341 - protein, 11 aa, unidentified
  source 1..11: note = methanogen bacteria
IGFEVTSSIIG

SEQ ID NO: 65342 - protein, 12 aa, unidentified
  source 1..12: note = methanogen bacteria
YEYMLTALHELH

SEQ ID NO: 65343 - protein, 12 aa, unidentified
  source 1..12: note = methanogen bacteria
MIDPSTKVLINP

SEQ ID NO: 65344 - protein, 29 aa, unidentified
  source 1..29: note = methanogen bacteria
EGVDLLDALVMVSNAFTSNGYAVLGTSSL

SEQ ID NO: 65345 - protein, 12 aa, unidentified
  source 1..12: note = methanogen bacteria
YEYMLTALHEFH

SEQ ID NO: 65346 - protein, 10 aa, unidentified
  source 1..10: note = methanogen bacteria
IIDSAGLNFA

SEQ ID NO: 65347 - protein, 22 aa, unidentified
  source 1..22: note = methanogen bacteria
VAYGWNTIFQLMTQGYGALNTE

SEQ ID NO: 65348 - protein, 10 aa, unidentified
  source 1..10: note = methanogen bacteria
HGQTGPNTLT

SEQ ID NO: 65349 - protein, 11 aa, unidentified
  source 1..11: note = methanogen bacteria
LGFGAVSSFIT

SEQ ID NO: 65350 - protein, 23 aa, unidentified
  source 1..23: note = methanogen bacteria
GMAYGWNTIFQLMTQGYEALNSE

SEQ ID NO: 65351 - protein, 11 aa, unidentified
  source 1..11: note = methanogen bacteria
ITGRVGPNTLT

SEQ ID NO: 65352 - protein, 11 aa, unidentified
  source 1..11: note = methanogen bacteria
LGFGATSSLIT

SEQ ID NO: 65353 - protein, 10 aa, unidentified
  source 1..10: note = methanogen bacteria
SMGCGPKTSL

SEQ ID NO: 65354 - protein, 14 aa, unidentified
  source 1..14: note = methanogen bacteria
WGVQGLPDFSLGYV

SEQ ID NO: 65355 - protein, 15 aa, unidentified
  source 1..15: note = methanogen bacteria
DVWMIDPTTKVLINP

SEQ ID NO: 65356 - protein, 29 aa, unidentified
  source 1..29: note = methanogen bacteria
EGVDLLDALVMVSNAFTSNGYAVLGTSTL

SEQ ID NO: 65357 - protein, 16 aa, unidentified
  source 1..16: note = methanogen bacteria
INSSFFNISPVLSFYP

SEQ ID NO: 65358 - protein, 11 aa, unidentified
  source 1..11: note = methanogen bacteria
MIILKNLIFVI

SEQ ID NO: 65359 - protein, 12 aa, unidentified
  source 1..12: note = methanogen bacteria
YKYMLNALHQLH

SEQ ID NO: 65360 - protein, 10 aa, unidentified
  source 1..10: note = methanogen bacteria
EIVKATVLNI

SEQ ID NO: 65361 - protein, 21 aa, unidentified
  source 1..21: note = methanogen bacteria
GLYGWDFVLSLSRRSYEAMNT

SEQ ID NO: 65362 - protein, 11 aa, unidentified
  source 1..11: note = methanogen bacteria
IKNPNGINHFT

SEQ ID NO: 65363 - protein, 10 aa, unidentified
  source 1..10: note = methanogen bacteria
GLEMTTSSPT

SEQ ID NO: 65364 - protein, 23 aa, unidentified
  source 1..23: note = methanogen bacteria
SQIVGLDFFDSIVNGGYEAMNTE

SEQ ID NO: 65365 - protein, 11 aa, unidentified
  source 1..11: note = methanogen bacteria
MGGFQGTYHFS

SEQ ID NO: 65366 - protein, 10 aa, unidentified
  source 1..10: note = methanogen bacteria
GLQSSATNIT

SEQ ID NO: 65367 - protein, 16 aa, unidentified
  source 1..16: note = methanogen bacteria
INISFLNNSPLLSFYP

SEQ ID NO: 65368 - protein, 11 aa, unidentified
  source 1..11: note = methanogen bacteria
MLILKNIIFVI

SEQ ID NO: 65369 - protein, 33 aa, unidentified; identical to SEQ ID NO: 58441
  source 1..33: note = methanogen bacteria

SEQ ID NO: 65370 - protein, 33 aa, unidentified; identical to SEQ ID NO: 60403
  source 1..33: note = methanogen bacteria

SEQ ID NO: 65371 - protein, 32 aa, unidentified
  source 1..32: note = methanogen bacteria
YGHDPIEGLFFTMSLQGNVGLEIGHVTSALQP

SEQ ID NO: 65372 - protein, 25 aa, unidentified
  source 1..25: note = methanogen bacteria
MQSFFKYYGLIFKYTVKWRVKYMDI

SEQ ID NO: 65373 - protein, 32 aa, unidentified
  source 1..32: note = methanogen bacteria
FDPSINSLFDSLWFVLSTITTVGYGDILPQSG

SEQ ID NO: 65374 - protein, 12 aa, unidentified
  source 1..12: note = methanogen bacteria
YKYMLNALHELH

SEQ ID NO: 65375 - protein, 20 aa, unidentified
  source 1..20: note = methanogen bacteria
SHNGTTEIVLFSNFTITLES

SEQ ID NO: 65376 - protein, 20 aa, unidentified
  source 1..20: note = methanogen bacteria
NGYGLISIYPTISKDFIQMN

SEQ ID NO: 65377 - protein, 35 aa, unidentified
  source 1..35: note = methanogen bacteria
IACIYRPWVLDPKVHPLKEIMVGATGYSFPSGHVT

SEQ ID NO: 65378 - protein, 22 aa, unidentified
  source 1..22: note = methanogen bacteria
TKSYPMDYDAAGKLLVDPAILT

SEQ ID NO: 65379 - protein, 16 aa, unidentified
  source 1..16: note = methanogen bacteria
LNINFLNIFPQLSIYP

SEQ ID NO: 65380 - protein, 13 aa, unidentified
  source 1..13: note = methanogen bacteria
VMMMFIKNFYLVI

SEQ ID NO: 65381 - protein, 17 aa, unidentified
  source 1..17: note = methanogen bacteria
GLNIDFLNIFPVLSIYP

SEQ ID NO: 65382 - protein, 13 aa, unidentified
  source 1..13: note = methanogen bacteria
IMMLVTKNLALVI

SEQ ID NO: 65383 - protein, 10 aa, unidentified
  source 1..10: note = methanogen bacteria
DNNIVMSNSP

SEQ ID NO: 65384 - protein, 30 aa, unidentified
  source 1..30: note = methanogen bacteria
ENKDPLNAVVLVSNAFTSNGYVIMGESIGG

SEQ ID NO: 65385 - protein, 17 aa, unidentified
  source 1..17: note = methanogen bacteria
GIDNQFFNISPLLSFYP

SEQ ID NO: 65386 - protein, 11 aa, unidentified
  source 1..11: note = methanogen bacteria
MIILKNIIFVI

SEQ ID NO: 65387 - protein, 11 aa, unidentified
  source 1..11: note = methanogen bacteria
VFFATDDDAGS

SEQ ID NO: 65388 - protein, 16 aa, unidentified
  source 1..16: note = methanogen bacteria
INISFLNISPTLSFYP

SEQ ID NO: 65389 - protein, 10 aa, unidentified
  source 1..10: note = methanogen bacteria
LILKNIIFVI

SEQ ID NO: 65390 - protein, 16 aa, unidentified
  source 1..16: note = methanogen bacteria
LNIGFLNIFPELSIYP

SEQ ID NO: 65391 - protein, 13 aa, unidentified
  source 1..13: note = methanogen bacteria
IMMIFAKNLFLVI

SEQ ID NO: 65392 - protein, 19 aa, unidentified
  source 1..19: note = methanogen bacteria
EGFLALYNFNEIDIADFVI

SEQ ID NO: 65393 - protein, 12 aa, unidentified
  source 1..12: note = methanogen bacteria
YEYMLNALHQLH

SEQ ID NO: 65394 - protein, 10 aa, unidentified
  source 1..10: note = methanogen bacteria
ISNAVSMNFS

SEQ ID NO: 65395 - protein, 23 aa, unidentified
  source 1..23: note = methanogen bacteria
GQAYGFDNIFTLATQGYESLNSE

SEQ ID NO: 65396 - protein, 10 aa, unidentified
  source 1..10: note = methanogen bacteria
YGQKGPNTLT

SEQ ID NO: 65397 - protein, 11 aa, unidentified
  source 1..11: note = methanogen bacteria
LGFEVSSSVIT

SEQ ID NO: 65398 - protein, 22 aa, unidentified
  source 1..22: note = methanogen bacteria
ESGFLPSTFLNAYLSLQGLANN

SEQ ID NO: 65399 - protein, 16 aa, unidentified
  source 1..16: note = methanogen bacteria
DVGNAITSIYKDVFVV

SEQ ID NO: 65400 - protein, 12 aa, unidentified
  source 1..12: note = methanogen bacteria
YEYMLNALHQLH

SEQ ID NO: 65401 - protein, 10 aa, unidentified
  source 1..10: note = methanogen bacteria
IANSVSVNFS

SEQ ID NO: 65402 - protein, 24 aa, unidentified
  source 1..24: note = methanogen bacteria
GQAYGFDNIFALVTQGYESLNSEV

SEQ ID NO: 65403 - protein, 11 aa, unidentified
  source 1..11: note = methanogen bacteria
HGQRGPNTLTP

SEQ ID NO: 65404 - protein, 12 aa, unidentified
  source 1..12: note = methanogen bacteria
LGFEVSSSVITP

SEQ ID NO: 65405 - protein, 16 aa, unidentified
  source 1..16: note = methanogen bacteria
LKNPTLGMNLITAGSI

SEQ ID NO: 65406 - protein, 17 aa, unidentified
  source 1..17: note = methanogen bacteria
GINVDFLNIFPELSIYP

SEQ ID NO: 65407 - protein, 12 aa, unidentified
  source 1..12: note = methanogen bacteria
IMLFTKNIFLVV

SEQ ID NO: 65408 - protein, 16 aa, unidentified
  source 1..16: note = methanogen bacteria
LNIDFLNVFPQLSIYP

SEQ ID NO: 65409 - protein, 12 aa, unidentified
  source 1..12: note = methanogen bacteria
IMLFAKNLVLVV

SEQ ID NO: 65410 - protein, 22 aa, unidentified
  source 1..22: note = methanogen bacteria
KNDTLGMNLITAGSILVILQAA

SEQ ID NO: 65411 - protein, 22 aa, unidentified
  source 1..22: note = methanogen bacteria
ESGILPSTFLNAYLSLQSLANN

SEQ ID NO: 65412 - protein, 17 aa, unidentified
  source 1..17: note = methanogen bacteria
VDMGNAITALYDDLFVA

SEQ ID NO: 65413 - protein, 31 aa, unidentified
  source 1..31: note = methanogen bacteria
IINATIQTLMFGGQQLMAYSLYQFLLILSQP

SEQ ID NO: 65414 - protein, 10 aa, unidentified
  source 1..10: note = methanogen bacteria
RLFSVVTPDA

SEQ ID NO: 65415 - protein, 12 aa, unidentified
  source 1..12: note = methanogen bacteria
GQFTFRGFDFSQ

SEQ ID NO: 65416 - protein, 31 aa, unidentified
  source 1..31: note = methanogen bacteria
FGFSVSGNPTPSLLKFEQVGQNIVTGGTFGP

SEQ ID NO: 65417 - protein, 11 aa, unidentified
  source 1..11: note = methanogen bacteria
GSTVMGDVISG

SEQ ID NO: 65418 - protein, 16 aa, unidentified
  source 1..16: note = methanogen bacteria
LNIDFLNIFPQLSLYP

SEQ ID NO: 65419 - protein, 12 aa, unidentified
  source 1..12: note = methanogen bacteria
IFLFTKNFALVI

SEQ ID NO: 65420 - protein, 37 aa, unidentified
  source 1..37: note = methanogen bacteria
KNAVTIYRPFIMNPNIHPLEEAMEEATGYSFPSGHTT

SEQ ID NO: 65421 - protein, 23 aa, unidentified
  source 1..23: note = methanogen bacteria
FKGYPMDYDSAGKLIVDPSKMAL

SEQ ID NO: 65422 - protein, 32 aa, unidentified
  source 1..32: note = methanogen bacteria
LVINATIQTLMLGGQQLMAYSLYQFLLVLSQP

SEQ ID NO: 65423 - protein, 12 aa, unidentified
  source 1..12: note = methanogen bacteria
YEYMLTALHEFH

SEQ ID NO: 65424 - protein, 16 aa, unidentified
  source 1..16: note = methanogen bacteria
LNGEFFNVFPLLSIYP

SEQ ID NO: 65425 - protein, 10 aa, unidentified
  source 1..10: note = methanogen bacteria
LITKHFVLVI

SEQ ID NO: 65426 - protein, 16 aa, unidentified
  source 1..16: note = methanogen bacteria
ASIDFLNIFPVLSIYP

SEQ ID NO: 65427 - protein, 11 aa, unidentified
  source 1..11: note = methanogen bacteria
MLITKNLVLVI

SEQ ID NO: 65428 - protein, 11 aa, unidentified
  source 1..11: note = methanogen bacteria
GSWDGIGDISA

SEQ ID NO: 65429 - protein, 16 aa, unidentified
  source 1..16: note = methanogen bacteria
LNIGFLNIFPELSIYP

SEQ ID NO: 65430 - protein, 12 aa, unidentified
  source 1..12: note = methanogen bacteria
IMLLTKNLVLVV

SEQ ID NO: 65431 - protein, 21 aa, unidentified
  source 1..21: note = methanogen bacteria
KNPTLGMNLITAGSIIVILQS

SEQ ID NO: 65432 - protein, 12 aa, unidentified
  source 1..12: note = methanogen bacteria
GQFTFDGYDLSS

SEQ ID NO: 65433 - protein, 31 aa, unidentified
  source 1..31: note = methanogen bacteria
YGFNVSGISTPTLLKCSHTGQNLINGGVFGP

SEQ ID NO: 65434 - protein, 22 aa, unidentified
  source 1..22: note = methanogen bacteria
GMTYGLDAVIQLTQGYESLNSE

SEQ ID NO: 65435 - protein, 11 aa, unidentified
  source 1..11: note = methanogen bacteria
IRGPVGPNTLT

SEQ ID NO: 65436 - protein, 11 aa, unidentified
  source 1..11: note = methanogen bacteria
IGFEISSSVIS

SEQ ID NO: 65437 - protein, 16 aa, unidentified
  source 1..16: note = methanogen bacteria
LNGDIFNIFPLLSIYP

SEQ ID NO: 65438 - protein, 11 aa, unidentified
  source 1..11: note = methanogen bacteria
MLITKNFVLVM

SEQ ID NO: 65439 - protein, 22 aa, unidentified
  source 1..22: note = methanogen bacteria
EFGYLPSSFLNAYLSLQSIANN

SEQ ID NO: 65440 - protein, 15 aa, unidentified
  source 1..15: note = methanogen bacteria
GNAITDIYEDVFILF

SEQ ID NO: 65441 - protein, 11 aa, unidentified
  source 1..11: note = methanogen bacteria
PRLFSPEGVDA

SEQ ID NO: 65442 - protein, 22 aa, unidentified
  source 1..22: note = methanogen bacteria
EFGYLPSSFLNAYLSLQSIANN

SEQ ID NO: 65443 - protein, 15 aa, unidentified
  source 1..15: note = methanogen bacteria
DLGNAITNIYDDVFI

SEQ ID NO: 65444 - protein, 16 aa, unidentified
  source 1..16: note = methanogen bacteria
LNIDFLNIFPQLSIYP

SEQ ID NO: 65445 - protein, 12 aa, unidentified
  source 1..12: note = methanogen bacteria
MMLFTKNLVLVI

SEQ ID NO: 65446 - protein, 19 aa, unidentified
  source 1..19: note = methanogen bacteria
FGEPFIYSLTGNYESLNTI

SEQ ID NO: 65447 - protein, 12 aa, unidentified
  source 1..12: note = methanogen bacteria
VNPNIKFNNQFT

SEQ ID NO: 65448 - protein, 11 aa, unidentified
  source 1..11: note = methanogen bacteria
FGLSQLSSNVS

SEQ ID NO: 65449 - protein, 11 aa, unidentified
  source 1..11: note = methanogen bacteria
SFLDTGTVLKI

SEQ ID NO: 65450 - protein, 16 aa, unidentified
  source 1..16: note = methanogen bacteria
LNIDFLHIFPVLSVYP

SEQ ID NO: 65451 - protein, 12 aa, unidentified
  source 1..12: note = methanogen bacteria
MMIFAKNIMLVI

SEQ ID NO: 65452 - protein, 11 aa, unidentified
  source 1..11: note = methanogen bacteria
SSTVMGDIVSG

SEQ ID NO: 65453 - protein, 17 aa, unidentified
  source 1..17: note = methanogen bacteria
GFNLEYLNIFPELSIYP

SEQ ID NO: 65454 - protein, 12 aa, unidentified
  source 1..12: note = methanogen bacteria
MMIFTKNVILVI

SEQ ID NO: 65455 - protein, 16 aa, unidentified
  source 1..16: note = methanogen bacteria
LNIDFLNIFPQLSIYP

SEQ ID NO: 65456 - protein, 11 aa, unidentified
  source 1..11: note = methanogen bacteria
ILFTKNLVLVV

SEQ ID NO: 65457 - protein, 17 aa, unidentified
  source 1..17: note = methanogen bacteria
GINIPFFNISPTLSFYP

SEQ ID NO: 65458 - protein, 11 aa, unidentified
  source 1..11: note = methanogen bacteria
VLILKNLVFVM

SEQ ID NO: 65459 - protein, 16 aa, unidentified
  source 1..16: note = methanogen bacteria
LNIDFLNVFPQMSIYP

SEQ ID NO: 65460 - protein, 12 aa, unidentified
  source 1..12: note = methanogen bacteria
IMLFAKNLVLVV

SEQ ID NO: 65461 - protein, 22 aa, unidentified
  source 1..22: note = methanogen bacteria
YNMLSEALEQPVSSATFSTNFE

SEQ ID NO: 65462 - protein, 22 aa, unidentified
  source 1..22: note = methanogen bacteria
ESGILPATFLKAYLSLQNLANN

SEQ ID NO: 65463 - protein, 17 aa, unidentified
  source 1..17: note = methanogen bacteria
VDMGNAITDLYDDVFVV

SEQ ID NO: 65464 - protein, 10 aa, unidentified
  source 1..10: note = methanogen bacteria
VYANELELES

SEQ ID NO: 65465 - protein, 12 aa, unidentified
  source 1..12: note = methanogen bacteria
GQFTFSGFDFSQ

SEQ ID NO: 65466 - protein, 31 aa, unidentified
  source 1..31: note = methanogen bacteria
FGFSVSGAPTPSLLKFSQAGQNMIAGGIFGP

SEQ ID NO: 65467 - protein, 22 aa, unidentified
  source 1..22: note = methanogen bacteria
VTGTMNIGQIIAYQSVHGPLIF

SEQ ID NO: 65468 - protein, 12 aa, unidentified
  source 1..12: note = methanogen bacteria
YQYMLNCLSNLK

SEQ ID NO: 65469 - protein, 22 aa, unidentified
  source 1..22: note = methanogen bacteria
ETHTMNIGQIISYQSAHGPLIF

SEQ ID NO: 65470 - protein, 11 aa, unidentified
  source 1..11: note = methanogen bacteria
EESVLKDRKID

SEQ ID NO: 65471 - protein, 10 aa, unidentified
  source 1..10: note = methanogen bacteria
VISPVNLGVS

SEQ ID NO: 65472 - protein, 32 aa, unidentified
  source 1..32: note = methanogen bacteria
LVINATIQTLVFGGQQEVAYTFYQLLLILSQP

SEQ ID NO: 65473 - protein, 40 aa, unidentified
  source 1..40: note = methanogen bacteria
FINSADITTNFQAMNKPPSFEHLFGTDWMGRDMFTRTLKG

SEQ ID NO: 65474 - protein, 30 aa, unidentified
  source 1..30: note = methanogen bacteria
TFLGFGLSPHEPAIGIILSESMKYLATGNW

SEQ ID NO: 65475 - protein, 27 aa, unidentified
  source 1..27: note = methanogen bacteria
VFDNMRILANVAPVDTVQAAISAMPPS

SEQ ID NO: 65476 - protein, 10 aa, unidentified
  source 1..10: note = methanogen bacteria
VNESVGASVN

SEQ ID NO: 65477 - protein, 39 aa, unidentified
  source 1..39: note = methanogen bacteria
INSADITTNFNAMNQPPSFEHLFGTDWMGRDMFTRTMKG

SEQ ID NO: 65478 - protein, 30 aa, unidentified
  source 1..30: note = methanogen bacteria
TFLGFGLSPHEPAIGVILSESMKYLATGNW

SEQ ID NO: 65479 - protein, 17 aa, unidentified
  source 1..17: note = methanogen bacteria
GTCPTSAIEVTPNSIIH

SEQ ID NO: 65480 - protein, 12 aa, unidentified
  source 1..12: note = methanogen bacteria
AITLEEVGSPVT

SEQ ID NO: 65481 - protein, 14 aa, unidentified
  source 1..14: note = methanogen bacteria
GDFISANSASLTVA

SEQ ID NO: 65482 - protein, 14 aa, unidentified
  source 1..14: note = methanogen bacteria
MYTLNLGGIRIVLM

SEQ ID NO: 65483 - protein, 10 aa, unidentified
  source 1..10: note = methanogen bacteria
GQNIEIIFNA

SEQ ID NO: 65484 - protein, 40 aa, unidentified
  source 1..40: note = methanogen bacteria
LLPLHPYAYGMACGIGSASMNAAAVASLSAIFPSMSTQLQ

SEQ ID NO: 65485 - protein, 12 aa, unidentified
  source 1..12: note = methanogen bacteria
FNLNITNIIPIF

SEQ ID NO: 65486 - protein, 21 aa, unidentified
  source 1..21: note = methanogen bacteria
VTGTMNIGEIIAYQSVHGPLI

SEQ ID NO: 65487 - protein, 13 aa, unidentified
  source 1..13: note = methanogen bacteria
QYEFMLSALNELK

SEQ ID NO: 65488 - protein, 40 aa, unidentified
  source 1..40: note = methanogen bacteria
FIDHTAVLTSNFYNVNQPPSFEHWFGTDWMGRDMFMRTLL

SEQ ID NO: 65489 - protein, 30 aa, unidentified
  source 1..30: note = methanogen bacteria
SFLGFGLPAHEPAIGIILSESMKYLSMGYW

SEQ ID NO: 65490 - protein, 14 aa, unidentified
  source 1..14: note = methanogen bacteria
VIALDIMGVNIVLM

SEQ ID NO: 65491 - protein, 10 aa, unidentified
  source 1..10: note = methanogen bacteria
GQNLAIVFDV

SEQ ID NO: 65492 - protein, 41 aa, unidentified
  source 1..41: note = methanogen bacteria
YVVPLHPFAYGMACGIGSASMNAAAVASLSAVYPQYAVQLE

SEQ ID NO: 65493 - protein, 13 aa, unidentified
  source 1..13: note = methanogen bacteria
QYQYMLNTLNALN

SEQ ID NO: 65494 - protein, 39 aa, unidentified
  source 1..39: note = methanogen bacteria
TIDPKSITTNWSMMNQPPSFEHIFGTDWLGRDMFIRTLK

SEQ ID NO: 65495 - protein, 30 aa, unidentified; identical to SEQ ID NO: 65474
  source 1..30: note = methanogen bacteria

SEQ ID NO: 65496 - protein, 40 aa, unidentified
  source 1..40: note = methanogen bacteria
FINSGDITTNFQAMNKPPSFEHFFGTDWMGRDMFTRTLKG

SEQ ID NO: 65497 - protein, 30 aa, unidentified; identical to SEQ ID NO: 65474
  source 1..30: note = methanogen bacteria

SEQ ID NO: 65498 - protein, 22 aa, unidentified
  source 1..22: note = methanogen bacteria
LKNPSLGFNIITAGSTIIILQA

SEQ ID NO: 65499 - protein, 31 aa, unidentified
  source 1..31: note = methanogen bacteria
LFTSVIQTLMFTGQATLAYGIYQLLAILSQP

SEQ ID NO: 65500 - protein, 13 aa, unidentified
  source 1..13: note = methanogen bacteria
QYEYMITVLHKLQ

SEQ ID NO: 65501 - protein, 38 aa, unidentified
  source 1..38: note = methanogen bacteria
FIRDIPTSFVNANQMPSLEHLFGTDWMGRDMFQRTVAG

SEQ ID NO: 65502 - protein, 32 aa, unidentified
  source 1..32: note = methanogen bacteria
ITFLGFGLPPHEPAIGVILAESMHYLSSGYWW

SEQ ID NO: 65503 - protein, 23 aa, unidentified
  source 1..23: note = methanogen bacteria
LKTGSMNIGNIISYQVNNGPLAF

SEQ ID NO: 65504 - protein, 21 aa, unidentified
  source 1..21: note = methanogen bacteria
EMGILPHIFVNFFLSLQHLTD

SEQ ID NO: 65505 - protein, 17 aa, unidentified
  source 1..17: note = methanogen bacteria
ADLGNAITNMYDAVFVY

SEQ ID NO: 65506 - protein, 13 aa, unidentified
  source 1..13: note = methanogen bacteria
KTNTKLITKDLSK

SEQ ID NO: 65507 - protein, 41 aa, unidentified
  source 1..41: note = methanogen bacteria
LEVSLTDKHNTPLTGKNVTIEINGVPYSRKTDDNGIAGLNI

SEQ ID NO: 65508 - protein, 70 aa, unidentified
  source 1..70: note = methanogen bacteria
TAHCMVYVNAKVAVDDLNMNYHDGSRFTATLTDAEDKALPNTNVTFNINSVDYIRTTNNDGVAGLNINLN

SEQ ID NO: 65509 - protein, 84 aa, unidentified
  source 1..84: note = methanogen bacteria
GDYKISTKVADVNIVKNIHINKAATRMEGTDIVKTASQSSVYQCAVYDSSNNRVKGDVDITVNGKTYSRNIGDDGLARLNINLG

SEQ ID NO: 65510 - protein, 17 aa, unidentified
  source 1..17: note = methanogen bacteria
PSNVVNRITVNDDPAPV

SEQ ID NO: 65511 - protein, 23 aa, unidentified
  source 1..23: note = methanogen bacteria
LKTGSMNIGDIISYQATNGPLIF

SEQ ID NO: 65512 - protein, 38 aa, unidentified
  source 1..38: note = methanogen bacteria
IDPSSITTDWSVMNKPPSLEHLFGTDWMGRDMFTRTLK

SEQ ID NO: 65513 - protein, 30 aa, unidentified; identical to SEQ ID NO: 65474
  source 1..30: note = methanogen bacteria

SEQ ID NO: 65514 - protein, 11 aa, unidentified
  source 1..11: note = methanogen bacteria
FNLNVPNIYPF

SEQ ID NO: 65515 - protein, 12 aa, unidentified
  source 1..12: note = methanogen bacteria
VQGSDVTVSHDA

SEQ ID NO: 65516 - protein, 11 aa, unidentified
  source 1..11: note = methanogen bacteria
TAFLDAISDVD

SEQ ID NO: 65517 - protein, 21 aa, unidentified
  source 1..21: note = methanogen bacteria
LTGTMDISGIIAYQAANGPLV

SEQ ID NO: 65518 - protein, 12 aa, unidentified
  source 1..12: note = methanogen bacteria
YQYMLNSLNTLN

SEQ ID NO: 65519 - protein, 21 aa, unidentified
  source 1..21: note = methanogen bacteria
LTGTMDISGIIAYQAANGPLV

SEQ ID NO: 65520 - protein, 19 aa, unidentified
  source 1..19: note = methanogen bacteria
NEIFVLMKIRESLDLVVLY

SEQ ID NO: 65521 - protein, 10 aa, unidentified
  source 1..10: note = methanogen bacteria
IEELGTKGIV

SEQ ID NO: 65522 - protein, 17 aa, unidentified
  source 1..17: note = methanogen bacteria
IYNAFSILDMEPSVFVI

SEQ ID NO: 65523 - protein, 14 aa, unidentified
  source 1..14: note = methanogen bacteria
RVFLSDVNLDLSFE

SEQ ID NO: 65524 - protein, 17 aa, unidentified
  source 1..17: note = methanogen bacteria
GQSLDQFSLTENFSFTG

SEQ ID NO: 65525 - protein, 11 aa, unidentified
  source 1..11: note = methanogen bacteria
SGTYQAGLMVN

SEQ ID NO: 65526 - protein, 22 aa, unidentified
  source 1..22: note = methanogen bacteria
INLYGLSFVDNLVNGGYEVLNN

SEQ ID NO: 65527 - protein, 11 aa, unidentified
  source 1..11: note = methanogen bacteria
ITGPEGTFQLS

SEQ ID NO: 65528 - protein, 10 aa, unidentified
  source 1..10: note = methanogen bacteria
GIITPTSSPQ

SEQ ID NO: 65529 - protein, 12 aa, unidentified
  source 1..12: note = methanogen bacteria
YQYMLNALNSRN

SEQ ID NO: 65530 - protein, 23 aa, unidentified
  source 1..23: note = methanogen bacteria
LKTGSMNIGNIIGYQSTNGPLVF

SEQ ID NO: 65531 - protein, 16 aa, unidentified
  source 1..16: note = methanogen bacteria
TGGNNLSGIIIDLSFE

SEQ ID NO: 65532 - protein, 31 aa, unidentified
  source 1..31: note = methanogen bacteria
LLSTAMQTLLYSGQQVIAYEIYQLLVFISQP

SEQ ID NO: 65533 - protein, 13 aa, unidentified
  source 1..13: note = methanogen bacteria
QYEYMINALHTLA

SEQ ID NO: 65534 - protein, 23 aa, unidentified
  source 1..23: note = methanogen bacteria
LKTNTMNIGGIISYQSVNGSLAV

SEQ ID NO: 65535 - protein, 12 aa, unidentified
  source 1..12: note = methanogen bacteria
TILSGTVAVAAY

SEQ ID NO: 65536 - protein, 21 aa, unidentified
  source 1..21: note = methanogen bacteria
SLSYIFSYSADSVILGPKIVE

SEQ ID NO: 65537 - protein, 17 aa, unidentified
  source 1..17: note = methanogen bacteria
QFTRQENIILKHKFGVV

SEQ ID NO: 65538 - protein, 22 aa, unidentified
  source 1..22: note = methanogen bacteria
VTGSMNIGEIIAYQSVHGSLVY

SEQ ID NO: 65539 - protein, 21 aa, unidentified
  source 1..21: note = methanogen bacteria
LPEYLMEPNGNVPDILMKVFS

SEQ ID NO: 65540 - protein, 23 aa, unidentified
  source 1..23: note = methanogen bacteria
LKTGSMNIGEIISYQAVNGPLAF

SEQ ID NO: 65541 - protein, 11 aa, unidentified
  source 1..11: note = methanogen bacteria
FNLNVGNIYPF

SEQ ID NO: 65542 - protein, 20 aa, unidentified
  source 1..20: note = methanogen bacteria
AFGEHFTTSLMDGGYEVMNG

SEQ ID NO: 65543 - protein, 11 aa, unidentified
  source 1..11: note = methanogen bacteria
FNGAEGTSHFS

SEQ ID NO: 65544 - protein, 11 aa, unidentified
  source 1..11: note = methanogen bacteria
FGLTVTSSTVG

SEQ ID NO: 65545 - protein, 21 aa, unidentified
  source 1..21: note = methanogen bacteria
LPEFLMNPNGNVPDILTKVFS

SEQ ID NO: 65546 - protein, 21 aa, unidentified
  source 1..21: note = methanogen bacteria
QTHTMIISDIITYQSINGPLI

SEQ ID NO: 65547 - protein, 11 aa, unidentified
  source 1..11: note = methanogen bacteria
FAVAVPGSVGI

SEQ ID NO: 65548 - protein, 30 aa, unidentified
  source 1..30: note = methanogen bacteria
ILNSMLTVLMYSAQNEAALALYQIMMILNS

SEQ ID NO: 65549 - protein, 11 aa, unidentified
  source 1..11: note = methanogen bacteria
LFNLNVGNIYP

SEQ ID NO: 65550 - protein, 22 aa, unidentified
  source 1..22: note = methanogen bacteria
LKTGSMNISSIIAYQSVNGPLI

SEQ ID NO: 65551 - protein, 13 aa, unidentified
  source 1..13: note = methanogen bacteria
QYEYMINVLHTFS

SEQ ID NO: 65552 - protein, 38 aa, unidentified
  source 1..38: note = methanogen bacteria
FMRDIPTSFISANQMPSLEHIFGTDWMGRDMFQRTIAG

SEQ ID NO: 65553 - protein, 31 aa, unidentified
  source 1..31: note = methanogen bacteria
TFLGFGLPPHEPAIGVILAESMHYLSSGYWW

SEQ ID NO: 65554 - protein, 38 aa, unidentified
  source 1..38: note = methanogen bacteria
FIKDLPTHFINANQMPSFEHPFGTDWMGRDMFQRTIAG

SEQ ID NO: 65555 - protein, 31 aa, unidentified
  source 1..31: note = methanogen bacteria
TFLGFGLPPHEPAIGVILSESMNYLASGSWW

SEQ ID NO: 65556 - protein, 22 aa, unidentified
  source 1..22: note = methanogen bacteria
QLAFGDISAGLSDSYESLNTLG

SEQ ID NO: 65557 - protein, 12 aa, unidentified
  source 1..12: note = methanogen bacteria
TDGSAINIQQIS

SEQ ID NO: 65558 - protein, 11 aa, unidentified
  source 1..11: note = methanogen bacteria
FGLARTSTNVD

SEQ ID NO: 65559 - protein, 13 aa, unidentified
  source 1..13: note = methanogen bacteria
IEIYHNETLTIQS

SEQ ID NO: 65560 - protein, 37 aa, unidentified
  source 1..37: note = methanogen bacteria
IGEIPTSFTSANQMPSLQHLFGTDWMGRDMFLRTISG

SEQ ID NO: 65561 - protein, 32 aa, unidentified
  source 1..32: note = methanogen bacteria
ITFLGFGLPPHEPAIGVILSESMHYLSSGYWW

SEQ ID NO: 65562 - protein, 38 aa, unidentified
  source 1..38: note = methanogen bacteria
FIRDIPSNFASANQMPSLEHLFGTDWMGRDMFQRTIAG

SEQ ID NO: 65563 - protein, 31 aa, unidentified
  source 1..31: note = methanogen bacteria
TFLGFGLPPHEPAIGVILSESMHYLSSGYWW

SEQ ID NO: 65564 - protein, 12 aa, unidentified
  source 1..12: note = methanogen bacteria
YKYMLNALHELH

SEQ ID NO: 65565 - protein, 12 aa, unidentified
  source 1..12: note = methanogen bacteria
LSAGFAFSYQMF

SEQ ID NO: 65566 - protein, 22 aa, unidentified
  source 1..22: note = methanogen bacteria
EFGILPSTFLTAYLSLQNLANN

SEQ ID NO: 65567 - protein, 17 aa, unidentified
  source 1..17: note = methanogen bacteria
DLGNTITDIYDDVFIAF

SEQ ID NO: 65568 - protein, 14 aa, unidentified
  source 1..14: note = methanogen bacteria
PNSFKWVLSEYNGI

SEQ ID NO: 65569 - protein, 38 aa, unidentified
  source 1..38: note = methanogen bacteria
FIRDIPTSFKSANQMPSLEHLFGTDWMGRDMFQRTIAG

SEQ ID NO: 65570 - protein, 31 aa, unidentified; identical to SEQ ID NO: 65553
  source 1..31: note = methanogen bacteria

SEQ ID NO: 65571 - protein, 32 aa, unidentified
  source 1..32: note = methanogen bacteria
LLINAVIQTLMLSGQQILAYGLYQFMLVLSQP

SEQ ID NO: 65572 - protein, 37 aa, unidentified
  source 1..37: note = methanogen bacteria
IGDIPTSFASANQMPSFQHLFGTDWMGRDMFLRTIAG

SEQ ID NO: 65573 - protein, 32 aa, unidentified
  source 1..32: note = methanogen bacteria
ITFLGFGLPPHEPAIGVILSESMQYLSSGYWW

SEQ ID NO: 65574 - protein, 37 aa, unidentified
  source 1..37: note = methanogen bacteria
IRDIPTSFISANQMPSFEHIFGTDWMGRDMFQRTVAG

SEQ ID NO: 65575 - protein, 30 aa, unidentified
  source 1..30: note = methanogen bacteria
TFLGFGLPPHEPAIGVILSESMHYLSSGYW

SEQ ID NO: 65576 - protein, 14 aa, unidentified
  source 1..14: note = methanogen bacteria
MRCIKLENWFMSST

SEQ ID NO: 65577 - protein, 30 aa, unidentified
  source 1..30: note = methanogen bacteria
EAKTPLDAIVMVSNAFTSNGYVVLGNTDVG

SEQ ID NO: 65578 - protein, 37 aa, unidentified
  source 1..37: note = methanogen bacteria
MRDISTSFASANQMPSLEHIFGTDWMGRDMFQRTIAG

SEQ ID NO: 65579 - protein, 31 aa, unidentified
  source 1..31: note = methanogen bacteria
ITFLGFGLPPHEPAIGVILSESMHYLSSGFW

SEQ ID NO: 65580 - protein, 19 aa, unidentified
  source 1..19: note = methanogen bacteria
ISELQIVNYSDFLVFISTL

SEQ ID NO: 65581 - protein, 48 aa, unidentified
  source 1..48: note = methanogen bacteria
GDTVTIGYLPSDHDAALFVADSQGKFQENGINAKLVMFNNGGDLMTAM

SEQ ID NO: 65582 - protein, 42 aa, unidentified
  source 1..42: note = methanogen bacteria
AKGVPVKVISAAQTEGSGIVVASDSGIDDIKDLAGKKIATPG

SEQ ID NO: 65583 - protein, 14 aa, unidentified
  source 1..14: note = methanogen bacteria
PNSFQWVLSNYGGV

SEQ ID NO: 65584 - protein, 13 aa, unidentified
  source 1..13: note = methanogen bacteria
THTYLGDGCEVII

SEQ ID NO: 65585 - protein, 15 aa, unidentified
  source 1..15: note = methanogen bacteria
NNPTLGYNIITVGSI

SEQ ID NO: 65586 - protein, 14 aa, unidentified
  source 1..14: note = methanogen bacteria
GGNFINEINFNLSF

SEQ ID NO: 65587 - protein, 40 aa, unidentified
  source 1..40: note = methanogen bacteria
LINSTDITTNFQAMNQAPSLEHLFGTDWMGRDMFTRTLKG

SEQ ID NO: 65588 - protein, 30 aa, unidentified; identical to SEQ ID NO: 65474
  source 1..30: note = methanogen bacteria

SEQ ID NO: 65589 - protein, 31 aa, unidentified
  source 1..31: note = methanogen bacteria
LLTSVIQTLMFTGQSTLAYGIYQLLGILSQP

SEQ ID NO: 65590 - protein, 12 aa, unidentified
  source 1..12: note = methanogen bacteria
GSQSGISGISSN

SEQ ID NO: 65591 - protein, 10 aa, unidentified
  source 1..10: note = methanogen bacteria
AVSVPNSFGV

SEQ ID NO: 65592 - protein, 32 aa, unidentified
  source 1..32: note = methanogen bacteria
LILSSFMTLLMYSAQTGIATVMYQTMMLISNP

SEQ ID NO: 65593 - protein, 38 aa, unidentified
  source 1..38: note = methanogen bacteria
FIGEIPTSFTSANQMPSFAHLFGTDWMGRDMFQRTVAG

SEQ ID NO: 65594 - protein, 32 aa, unidentified; identical to SEQ ID NO: 65561
  source 1..32: note = methanogen bacteria

SEQ ID NO: 65595 - protein, 13 aa, unidentified
  source 1..13: note = methanogen bacteria
DKIIHPELIRVPD

SEQ ID NO: 65596 - protein, 39 aa, unidentified
  source 1..39: note = methanogen bacteria
IDSKEITTNFLIINQPPSFEHLFGTDWLGRDMFTRTIKG

SEQ ID NO: 65597 - protein, 30 aa, unidentified
  source 1..30: note = methanogen bacteria
TFLGFGLSPHEPAIGIILAESMKYLATGNW

SEQ ID NO: 65598 - protein, 11 aa, unidentified
  source 1..11: note = methanogen bacteria
AQAYGIDLGAS

SEQ ID NO: 65599 - protein, 38 aa, unidentified
  source 1..38: note = methanogen bacteria
FIKDIPTSFIDANQMPSFEHLFGTDWMGRDMFQRTIAG

SEQ ID NO: 65600 - protein, 31 aa, unidentified
  source 1..31: note = methanogen bacteria
TFLGFGLPPHEPAIGVILAESMQYLSSGYWW

SEQ ID NO: 65601 - protein, 38 aa, unidentified
  source 1..38: note = methanogen bacteria
MIDANLPTDFSIKMRPPSFDHIFGTDWMGRDMFIRTLK

SEQ ID NO: 65602 - protein, 30 aa, unidentified
  source 1..30: note = methanogen bacteria
TFLGFGLSPHEPAIGIILSESMTYLAMGAW

SEQ ID NO: 65603 - protein, 39 aa, unidentified
  source 1..39: note = methanogen bacteria
INAGDITTNFQAMNKPPSFEHLFGTDWMGRDMFTRTLKG

SEQ ID NO: 65604 - protein, 30 aa, unidentified; identical to SEQ ID NO: 65474
  source 1..30: note = methanogen bacteria

SEQ ID NO: 65605 - protein, 38 aa, unidentified
  source 1..38: note = methanogen bacteria
FIRDIPTNFVNANQMPSLEHLFGTDWMGRDMFQRTISG

SEQ ID NO: 65606 - protein, 32 aa, unidentified
  source 1..32: note = methanogen bacteria
ITFLGFGLPPHEPAIGVILAESMNYLSSGYWW

SEQ ID NO: 65607 - protein, 10 aa, unidentified
  source 1..10: note = methanogen bacteria
IIGAETHTTL

SEQ ID NO: 65608 - protein, 38 aa, unidentified
  source 1..38: note = methanogen bacteria
FIRDIPTNFANAMQMPSLEHLFGTDWMGRDMFQRTIAG

SEQ ID NO: 65609 - protein, 30 aa, unidentified
  source 1..30: note = methanogen bacteria
TFLGFGLPPHEPAIGVILAESMHYLSSGCW

SEQ ID NO: 65610 - protein, 38 aa, unidentified
  source 1..38: note = methanogen bacteria
FIPDIPTSFVNANQMPSLEHIFGTDWMGRDMFQRTIAG

SEQ ID NO: 65611 - protein, 32 aa, unidentified; identical to SEQ ID NO: 65561
  source 1..32: note = methanogen bacteria

SEQ ID NO: 65612 - protein, 16 aa, unidentified
  source 1..16: note = methanogen bacteria
KNPTLGWNLITFGSII

SEQ ID NO: 65613 - protein, 24 aa, unidentified
  source 1..24: note = methanogen bacteria
DNNTLGYNIITFGSIIIIIQAAVP

SEQ ID NO: 65614 - protein, 38 aa, unidentified
  source 1..38: note = methanogen bacteria
FIKDIPSNFASANQMPSLQHLFGTDWMGRDMFQRTIAG

SEQ ID NO: 65615 - protein, 32 aa, unidentified; identical to SEQ ID NO: 65561
  source 1..32: note = methanogen bacteria

SEQ ID NO: 65616 - protein, 37 aa, unidentified
  source 1..37: note = methanogen bacteria
IRDIPTNFANASQMPSLEHLFGTDWMGRDMFQRTIAG

SEQ ID NO: 65617 - protein, 30 aa, unidentified
  source 1..30: note = methanogen bacteria
TFLGFGLPPHEPAIGVILAESMHYLSSGYW

SEQ ID NO: 65618 - protein, 12 aa, unidentified
  source 1..12: note = methanogen bacteria
NFFNGINIDLSI

SEQ ID NO: 65619 - protein, 38 aa, unidentified
  source 1..38: note = methanogen bacteria
FVRDIPTSFISANQMPSLEHIFGTDWMGRDMFQRTIAG

SEQ ID NO: 65620 - protein, 32 aa, unidentified
  source 1..32: note = methanogen bacteria
ITFLGFGLPPHEPAIGVILSESMNYLSSGYWW

SEQ ID NO: 65621 - protein, 30 aa, unidentified
  source 1..30: note = methanogen bacteria
MAHDVYICYDEKDVETAKDVCEVLENDGLE

SEQ ID NO: 65622 - protein, 19 aa, unidentified
  source 1..19: note = methanogen bacteria
NRDAGVKDIVTEIMDAIKR

SEQ ID NO: 65623 - protein, 67 aa, unidentified
  source 1..67: note = methanogen bacteria
VMVLLYSKNSKNSNYVNNEVNRAFSQKKPILVFQIDDSKLEGSLEFFLRNKPWIKAYPNPEDKFDEL

SEQ ID NO: 65624 - protein, 32 aa, unidentified
  source 1..32: note = methanogen bacteria
DPSINSLFDSLWFVLSTITTVGYGDVLPQSGP

SEQ ID NO: 65625 - protein, 11 aa, unidentified
  source 1..11: note = methanogen bacteria
PRLFAPEGVDA

SEQ ID NO: 65626 - protein, 32 aa, unidentified; identical to SEQ ID NO: 65373
  source 1..32: note = methanogen bacteria

SEQ ID NO: 65627 - protein, 10 aa, unidentified
  source 1..10: note = methanogen bacteria
TTVMGSIIKP

SEQ ID NO: 65628 - protein, 22 aa, unidentified
  source 1..22: note = methanogen bacteria
LTDFFFNGASYYAIGMDSGFGI

SEQ ID NO: 65629 - protein, 12 aa, unidentified
  source 1..12: note = methanogen bacteria
ETGIPDLLFSFQ

SEQ ID NO: 65630 - protein, 38 aa, unidentified
  source 1..38: note = methanogen bacteria
FIKEIPTSFVNANQLPSLEHLFGTDWMGRDMFQRTIAG

SEQ ID NO: 65631 - protein, 31 aa, unidentified
  source 1..31: note = methanogen bacteria
ITFLGFGLPPHEPAIGVILAESMNYLSSGYW

SEQ ID NO: 65632 - protein, 38 aa, unidentified
  source 1..38: note = methanogen bacteria
FVGSIETNFVNANQLPSFEHLFGTDWMGRDMFSRTVAG

SEQ ID NO: 65633 - protein, 32 aa, unidentified
  source 1..32: note = methanogen bacteria
ITFLGFGLPPHDPAIGVILSESMNYLSSGYWW

SEQ ID NO: 65634 - protein, 10 aa, unidentified
  source 1..10: note = methanogen bacteria
TTVMGSIIEP

SEQ ID NO: 65635 - protein, 20 aa, unidentified
  source 1..20: note = methanogen bacteria
PAQPLSFNIFTVGGFLLMLQ

SEQ ID NO: 65636 - protein, 10 aa, unidentified
  source 1..10: note = methanogen bacteria
GTPMIMGWND

SEQ ID NO: 65637 - protein, 16 aa, unidentified
  source 1..16: note = methanogen bacteria
LKNPTLGFNFITAGAI

SEQ ID NO: 65638 - protein, 10 aa, unidentified
  source 1..10: note = methanogen bacteria
AASVPNSISV

SEQ ID NO: 65639 - protein, 32 aa, unidentified
  source 1..32: note = methanogen bacteria
PLLISSLMTILMYASQNQVATVVYQLMIIISN

SEQ ID NO: 65640 - protein, 13 aa, unidentified
  source 1..13: note = methanogen bacteria
GISVSAISSQLSN

SEQ ID NO: 65641 - protein, 26 aa, unidentified
  source 1..26: note = methanogen bacteria
MMSTDSETLATVYRWQVGSVAEITWP

SEQ ID NO: 65642 - protein, 16 aa, unidentified
  source 1..16: note = methanogen bacteria
TGSSSVNLNNLDVSYE

SEQ ID NO: 65643 - protein, 13 aa, unidentified
  source 1..13: note = methanogen bacteria
YVVNFNNIDLSFE

SEQ ID NO: 65644 - protein, 37 aa, unidentified
  source 1..37: note = methanogen bacteria
INANLPTDFSIKMQGPSFEHIFGTDWMGRDMFIRTLK

SEQ ID NO: 65645 - protein, 30 aa, unidentified
  source 1..30: note = methanogen bacteria
TFLGFGLSPHEPAIGIILSESMSYLAMGAW

SEQ ID NO: 65646 - protein, 19 aa, unidentified
  source 1..19: note = methanogen bacteria
AVPEVAFSSYGDYISFFSA

SEQ ID NO: 65647 - protein, 22 aa, unidentified
  source 1..22: note = methanogen bacteria
WKNPTLGFNVITVGSIGVILQA

SEQ ID NO: 65648 - protein, 23 aa, unidentified
  source 1..23: note = methanogen bacteria
AGIYGDAFITNMSATYEAMNMAD

SEQ ID NO: 65649 - protein, 11 aa, unidentified
  source 1..11: note = methanogen bacteria
QGQSHGVNRLT

SEQ ID NO: 65650 - protein, 13 aa, unidentified
  source 1..13: note = methanogen bacteria
FSGIQQIATNATP

SEQ ID NO: 65651 - protein, 17 aa, unidentified
  source 1..17: note = methanogen bacteria
LGKFDFSLIFFKTDFAL

SEQ ID NO: 65652 - protein, 15 aa, unidentified
  source 1..15: note = methanogen bacteria
FDFRIFTFRKGYSGN

SEQ ID NO: 65653 - protein, 11 aa, unidentified
  source 1..11: note = methanogen bacteria
KYIPHSIAMNK

SEQ ID NO: 65654 - protein, 10 aa, unidentified
  source 1..10: note = methanogen bacteria
GVSSPQAMGG

SEQ ID NO: 65655 - protein, 32 aa, unidentified
  source 1..32: note = methanogen bacteria
LLLNSLIQTLMYSGQQLMAYSVYQFMMLLSQP

SEQ ID NO: 65656 - protein, 21 aa, unidentified
  source 1..21: note = methanogen bacteria
LTGTMDINGIISYQAAHGPLV

SEQ ID NO: 65657 - protein, 13 aa, unidentified
  source 1..13: note = methanogen bacteria
QYEYMLNSLNSLN

SEQ ID NO: 65658 - protein, 21 aa, unidentified
  source 1..21: note = methanogen bacteria
GISLIQFDSHLFGDFSALDFD

SEQ ID NO: 65659 - protein, 38 aa, unidentified
  source 1..38: note = methanogen bacteria
INSNLPTDFTIKMQPPSFAHIFGTDWMGRDMFERTIKG

SEQ ID NO: 65660 - protein, 30 aa, unidentified
  source 1..30: note = methanogen bacteria
TFLGFGLSPHEPAIGIILSESMKYLAMGAW

SEQ ID NO: 65661 - protein, 18 aa, unidentified
  source 1..18: note = methanogen bacteria
LSPPPTFFHQFGAFKGGY

SEQ ID NO: 65662 - protein, 25 aa, unidentified
  source 1..25: note = methanogen bacteria
INYHRLQLSIGNVQCSTFNVQCSMF

SEQ ID NO: 65663 - protein, 16 aa, unidentified
  source 1..16: note = methanogen bacteria
LPHANRLLATIPFWLL

SEQ ID NO: 65664 - protein, 17 aa, unidentified
  source 1..17: note = methanogen bacteria
TGSSLVNLNNLDLSSES

SEQ ID NO: 65665 - protein, 38 aa, unidentified
  source 1..38: note = methanogen bacteria
IDANLPTDFTIKMQPPSFQHPFGTDWMGRDMFIRTIKG

SEQ ID NO: 65666 - protein, 30 aa, unidentified; identical to SEQ ID NO: 65602
  source 1..30: note = methanogen bacteria

SEQ ID NO: 65667 - protein, 37 aa, unidentified
  source 1..37: note = methanogen bacteria
IDANLPTDFTIKIQPPSFEHIFGTDWMGRDMFIRTLK

SEQ ID NO: 65668 - protein, 30 aa, unidentified; identical to SEQ ID NO: 65660
  source 1..30: note = methanogen bacteria

SEQ ID NO: 65669 - protein, 38 aa, unidentified
  source 1..38: note = methanogen bacteria
MIDANLPTDFAIKMKPPSFEHPFGTDWMGRDMFIRTLK

SEQ ID NO: 65670 - protein, 30 aa, unidentified; identical to SEQ ID NO: 65602
  source 1..30: note = methanogen bacteria

SEQ ID NO: 65671 - protein, 12 aa, unidentified
  source 1..12: note = methanogen bacteria
MLTPNWSALWDV

SEQ ID NO: 65672 - protein, 34 aa, unidentified
  source 1..34: note = methanogen bacteria
YMSVTSSIPITELISEGTSLIFVVLPEIFDVMGP

SEQ ID NO: 65673 - protein, 37 aa, unidentified
  source 1..37: note = methanogen bacteria
IDANLPTDFAIKMKPPSFEHPFGTDWMGRDMFIRTLK

SEQ ID NO: 65674 - protein, 30 aa, unidentified; identical to SEQ ID NO: 65602
  source 1..30: note = methanogen bacteria

SEQ ID NO: 65675 - protein, 38 aa, unidentified
  source 1..38: note = methanogen bacteria
INANLPTDFSIKMQAPSLAHPFGTDWMGRDMFIRTIKG

SEQ ID NO: 65676 - protein, 30 aa, unidentified; identical to SEQ ID NO: 65645
  source 1..30: note = methanogen bacteria

SEQ ID NO: 65677 - protein, 11 aa, unidentified
  source 1..11: note = methanogen bacteria
SMFSKGGMDPS

SEQ ID NO: 65678 - protein, 18 aa, unidentified
  source 1..18: note = methanogen bacteria
RLIVSDPFTLVSIGNLLT

SEQ ID NO: 65679 - protein, 39 aa, unidentified
  source 1..39: note = methanogen bacteria
GLGDGHYFMPSIPSQVISANLDWSIFGGLLRGFGQLFSN

SEQ ID NO: 65680 - protein, 33 aa, unidentified
  source 1..33: note = methanogen bacteria
LLLNSLIQTLMYSGQQLMAFSIYQFMMLLSQPV

SEQ ID NO: 65681 - protein, 24 aa, unidentified
  source 1..24: note = methanogen bacteria
VNPTLGLNLITIGSIAVILQAAFP

SEQ ID NO: 65682 - protein, 38 aa, unidentified
  source 1..38: note = methanogen bacteria
INANLPTDFTIKMQPPSFEHPFGTDWMGRDMLIRTIKG

SEQ ID NO: 65683 - protein, 30 aa, unidentified; identical to SEQ ID NO: 65602
  source 1..30: note = methanogen bacteria

SEQ ID NO: 65684 - protein, 14 aa, unidentified
  source 1..14: note = methanogen bacteria
KNPTLGFNIITAGS

SEQ ID NO: 65685 - protein, 38 aa, unidentified
  source 1..38: note = methanogen bacteria
IDANLPTDFTARMKPPSFEHIFGTDWMGRDMFIRTIKG

SEQ ID NO: 65686 - protein, 30 aa, unidentified; identical to SEQ ID NO: 65645
  source 1..30: note = methanogen bacteria

SEQ ID NO: 65687 - protein, 23 aa, unidentified
  source 1..23: note = methanogen bacteria
LPVINLEFIFGQVENQGASGGIF

SEQ ID NO: 65688 - protein, 34 aa, unidentified
  source 1..34: note = methanogen bacteria
VGSSITMPISILDPGRPLPLHLYILATEGISLPN

SEQ ID NO: 65689 - protein, 39 aa, unidentified
  source 1..39: note = methanogen bacteria
MIDANLPTDFTMKMQAPSFSHPFGTDWMGRDMFIRTIKG

SEQ ID NO: 65690 - protein, 30 aa, unidentified; identical to SEQ ID NO: 65645
  source 1..30: note = methanogen bacteria

SEQ ID NO: 65691 - protein, 28 aa, unidentified
  source 1..28: note = methanogen bacteria
VFDNMRTLANAAPIDTVQAAISALPPSS

SEQ ID NO: 65692 - protein, 12 aa, unidentified
  source 1..12: note = methanogen bacteria
TVNEAVSSSVNT

SEQ ID NO: 65693 - protein, 16 aa, unidentified
  source 1..16: note = methanogen bacteria
GIAALLNPDWSMLWNV

SEQ ID NO: 65694 - protein, 35 aa, unidentified
  source 1..35: note = methanogen bacteria
GYMSFTSGTPMVELVSEGTGLVFVVFPRIFNIMGP

SEQ ID NO: 65695 - protein, 39 aa, unidentified
  source 1..39: note = methanogen bacteria
MTNANLPTDFSIKMQAPSLVHPFGTDWMGRDMFTRTIKG

SEQ ID NO: 65696 - protein, 30 aa, unidentified; identical to SEQ ID NO: 65645
  source 1..30: note = methanogen bacteria

SEQ ID NO: 65697 - protein, 10 aa, unidentified
  source 1..10: note = methanogen bacteria
FSDPAAVTRN

SEQ ID NO: 65698 - protein, 37 aa, unidentified
  source 1..37: note = methanogen bacteria
GGTDLAHVIFGAGGPLESSRGFDSASMSGSLSDNIGP

SEQ ID NO: 65699 - protein, 10 aa, unidentified
  source 1..10: note = methanogen bacteria
MRSYAGGSRP

SEQ ID NO: 65700 - protein, 10 aa, unidentified
  source 1..10: note = methanogen bacteria
KYFASAGVSL

SEQ ID NO: 65701 - protein, 38 aa, unidentified
  source 1..38: note = methanogen bacteria
IDANLPTDFSIKMQPPSFAHIFGTDWMGRDMFVRTIKG

SEQ ID NO: 65702 - protein, 30 aa, unidentified; identical to SEQ ID NO: 65602
  source 1..30: note = methanogen bacteria

SEQ ID NO: 65703 - protein, 35 aa, unidentified
  source 1..35: note = methanogen bacteria
ANSYTIPNPADTWDALVDFYSNGDTMSGGKSMWSY

SEQ ID NO: 65704 - protein, 23 aa, unidentified
  source 1..23: note = methanogen bacteria
YASPLGGIGFYLSEQATAGFWPS

SEQ ID NO: 65705 - protein, 91 aa, unidentified
  source 1..91: note = methanogen bacteria
AFGLNEGVDLKGGTMVTVELKQSMTESQITDLVQSNLGVSDVETSLSGNTATITISGDVDQAEFDQKFSNQFNILSFRSVGALLSQAAMDQ

SEQ ID NO: 65706 - protein, 10 aa, unidentified
  source 1..10: note = methanogen bacteria
VFIPSAQVLE

SEQ ID NO: 65707 - protein, 32 aa, unidentified
  source 1..32: note = methanogen bacteria
FDSSINNVFDALWFNIVTISTVGYGDVVPLHL

SEQ ID NO: 65708 - protein, 40 aa, unidentified
  source 1..40: note = methanogen bacteria
FINSNDITTNFSAINQPPSFEHLFGTDWMGRDMFTRTLKG

SEQ ID NO: 65709 - protein, 30 aa, unidentified; identical to SEQ ID NO: 65474
  source 1..30: note = methanogen bacteria

SEQ ID NO: 65710 - protein, 18 aa, unidentified
  source 1..18: note = methanogen bacteria
FGQPLSQFSFTESFSFTG

SEQ ID NO: 65711 - protein, 11 aa, unidentified
  source 1..11: note = methanogen bacteria
SGTYQAGLMVN

SEQ ID NO: 65712 - protein, 38 aa, unidentified
  source 1..38: note = methanogen bacteria
IDANLSTDFTKTMKPPSFEHIFGTDWMGRDMFLRTVKG

SEQ ID NO: 65713 - protein, 30 aa, unidentified; identical to SEQ ID NO: 65645
  source 1..30: note = methanogen bacteria

SEQ ID NO: 65714 - protein, 38 aa, unidentified
  source 1..38: note = methanogen bacteria
IDANLPTDFTTRMKPPSFEHLFGTDWMGRDMFLRTVKG

SEQ ID NO: 65715 - protein, 30 aa, unidentified; identical to SEQ ID NO: 65645
  source 1..30: note = methanogen bacteria

SEQ ID NO: 65716 - protein, 16 aa, unidentified
  source 1..16: note = methanogen bacteria
LKNPTLGLNLITAGSI

SEQ ID NO: 65717 - protein, 39 aa, unidentified
  source 1..39: note = methanogen bacteria
INSSDITTNFKIMNQPPSFEHLFGTDWMGRDMFTRTLKG

SEQ ID NO: 65718 - protein, 30 aa, unidentified
  source 1..30: note = methanogen bacteria
TFLGFGLSPHEPAIGIILSESMKYLATGDW

SEQ ID NO: 65719 - protein, 20 aa, unidentified
  source 1..20: note = methanogen bacteria
SIYGWNFILSMTHGYEVMNT

SEQ ID NO: 65720 - protein, 11 aa, unidentified
  source 1..11: note = methanogen bacteria
VNGAKGTNHFS

SEQ ID NO: 65721 - protein, 10 aa, unidentified
  source 1..10: note = methanogen bacteria
GLEMTSSTAK

SEQ ID NO: 65722 - protein, 31 aa, unidentified
  source 1..31: note = methanogen bacteria
MDKFRTGWAQDVPLSYKRKAKEQGKVEQIEY

SEQ ID NO: 65723 - protein, 16 aa, unidentified
  source 1..16: note = methanogen bacteria
GDFFEYSNILNILDNM

SEQ ID NO: 65724 - protein, 37 aa, unidentified
  source 1..37: note = methanogen bacteria
DIDPLIVVAATFDAENKGQGWSRSVEELEPFHLDFEN

SEQ ID NO: 65725 - protein, 38 aa, unidentified
  source 1..38: note = methanogen bacteria
TNANLPTDFSIKMQAPSFQHPFGTDWMGRDMFARTLKG

SEQ ID NO: 65726 - protein, 30 aa, unidentified; identical to SEQ ID NO: 65645
  source 1..30: note = methanogen bacteria

SEQ ID NO: 65727 - protein, 91 aa, unidentified
  source 1..91: note = methanogen bacteria
VFGLNEGVDLKGGTLVTLELKEPMSETQVSNIITQGLGASEVDTSISGNTATVTISGDVDQADFESKFNNQFGILSFKSVGALLSEAAMGQ

SEQ ID NO: 65728 - protein, 10 aa, unidentified
  source 1..10: note = methanogen bacteria
FFIPSAQVLA

SEQ ID NO: 65729 - protein, 32 aa, unidentified
  source 1..32: note = methanogen bacteria
LDDSVTNLGEALWFIIVTASTVGYGDITPISP

SEQ ID NO: 65730 - protein, 38 aa, unidentified
  source 1..38: note = methanogen bacteria
INANLPTDFSIKMQPPSFEHIFGTDWMGRDMFIRTIKG

SEQ ID NO: 65731 - protein, 30 aa, unidentified; identical to SEQ ID NO: 65602
  source 1..30: note = methanogen bacteria

SEQ ID NO: 65732 - protein, 53 aa, unidentified
  source 1..53: note = methanogen bacteria
QQLTGDTKALMETNEGLDARLGKAFSSAGKKIGNEFLPQIKDVKQGFLDLNDA

SEQ ID NO: 65733 - protein, 25 aa, unidentified
  source 1..25: note = methanogen bacteria
GGIITSDPAIQAGAIKVATGKVGMS

SEQ ID NO: 65734 - protein, 11 aa, unidentified
  source 1..11: note = methanogen bacteria
FLGAKGVTWST

SEQ ID NO: 65735 - protein, 13 aa, unidentified
  source 1..13: note = methanogen bacteria
QYNYILNSLSSLN

SEQ ID NO: 65736 - protein, 15 aa, unidentified
  source 1..15: note = methanogen bacteria
SYGINFNNIYFSFES

SEQ ID NO: 65737 - protein, 11 aa, unidentified
  source 1..11: note = methanogen bacteria
PRLFSPEGVDA

SEQ ID NO: 65738 - protein, 33 aa, unidentified
  source 1..33: note = methanogen bacteria
PGFASSVLQTLMASGQMNLALIVYNFLVLMLSP

SEQ ID NO: 65739 - protein, 11 aa, unidentified
  source 1..11: note = methanogen bacteria
PRLFSPEGVDA

SEQ ID NO: 65740 - protein, 32 aa, unidentified
  source 1..32: note = methanogen bacteria
PFMASALLQILMLTGQMGVALLVYNIISLLYS

SEQ ID NO: 65741 - protein, 11 aa, unidentified
  source 1..11: note = methanogen bacteria
PRLFSPEGVDA

SEQ ID NO: 65742 - protein, 10 aa, unidentified
  source 1..10: note = methanogen bacteria
GISNPNGAGV

SEQ ID NO: 65743 - protein, 32 aa, unidentified
  source 1..32: note = methanogen bacteria
LLINAVMQTLIYAGQQVLAYSLYQFMILISQP

SEQ ID NO: 65744 - protein, 11 aa, unidentified
  source 1..11: note = methanogen bacteria
PRLFAPEGVDA

SEQ ID NO: 65745 - protein, 10 aa, unidentified
  source 1..10: note = methanogen bacteria
PRLFLPEEVD

SEQ ID NO: 65746 - protein, 36 aa, unidentified
  source 1..36: note = methanogen bacteria
INNIPTNFDTKMQAPSFVHIFGTDWMGRDMFFRTIK

SEQ ID NO: 65747 - protein, 30 aa, unidentified; identical to SEQ ID NO: 65645
  source 1..30: note = methanogen bacteria

SEQ ID NO: 65748 - protein, 10 aa, unidentified
  source 1..10: note = methanogen bacteria
RLFSPEGVDA

SEQ ID NO: 65749 - protein, 24 aa, unidentified
  source 1..24: note = methanogen bacteria
MIKMVFEYISPLLDGIVDIFTQGG

SEQ ID NO: 65750 - protein, 15 aa, unidentified
  source 1..15: note = methanogen bacteria
KSLGVHPDSAAMAEG

SEQ ID NO: 65751 - protein, 11 aa, unidentified
  source 1..11: note = methanogen bacteria
PRLFAPEGVDA

SEQ ID NO: 65752 - protein, 11 aa, unidentified
  source 1..11: note = methanogen bacteria
PRLFHPEGVDA

SEQ ID NO: 65753 - protein, 11 aa, unidentified
  source 1..11: note = methanogen bacteria
PRLFSPEEVDA

SEQ ID NO: 65754 - protein, 21 aa, unidentified
  source 1..21: note = methanogen bacteria
VSLFSVNVNTMEAGNLFFSHM

SEQ ID NO: 65755 - protein, 11 aa, unidentified
  source 1..11: note = methanogen bacteria
IRGYPFLLWYE

SEQ ID NO: 65756 - protein, 13 aa, unidentified
  source 1..13: note = methanogen bacteria
GLGFTKHFELFGS

SEQ ID NO: 65757 - protein, 32 aa, unidentified
  source 1..32: note = methanogen bacteria
SAEMHHDPLRSQWFVIVTLTTVGYGDITITNF

SEQ ID NO: 65758 - protein, 11 aa, unidentified
  source 1..11: note = methanogen bacteria
PRLFAPESVDA

SEQ ID NO: 65759 - protein, 11 aa, unidentified
  source 1..11: note = methanogen bacteria
MDRIFSFLGPY

SEQ ID NO: 65760 - protein, 28 aa, unidentified
  source 1..28: note = methanogen bacteria
EGKDLLDSLVMVSNAFTSNGYAVLGDSV

SEQ ID NO: 65761 - protein, 10 aa, unidentified
  source 1..10: note = methanogen bacteria
NGLHLIDYAG

SEQ ID NO: 65762 - protein, 12 aa, unidentified
  source 1..12: note = methanogen bacteria
IALLGSSSKFLN

SEQ ID NO: 65763 - protein, 30 aa, unidentified
  source 1..30: note = methanogen bacteria
GETKNVSDSLYFVLITLTTVGYGNDGFNDP

SEQ ID NO: 65764 - protein, 19 aa, unidentified
  source 1..19: note = methanogen bacteria
ALPEMELLTAGDFNAFIQS

SEQ ID NO: 65765 - protein, 10 aa, unidentified
  source 1..10: note = methanogen bacteria
RLFSPEGVDA

SEQ ID NO: 65766 - protein, 10 aa, unidentified
  source 1..10: note = methanogen bacteria
SVMIPNSFSI

SEQ ID NO: 65767 - protein, 33 aa, unidentified
  source 1..33: note = methanogen bacteria
PLLLSTIIQILMMSGQMAVASILYQGLILINNP

SEQ ID NO: 65768 - protein, 16 aa, unidentified
  source 1..16: note = methanogen bacteria
EKPVNDVNISHDFEWD

SEQ ID NO: 65769 - protein, 20 aa, unidentified
  source 1..20: note = methanogen bacteria
GLLPRIFLNIYLSIQGVADN

SEQ ID NO: 65770 - protein, 18 aa, unidentified
  source 1..18: note = methanogen bacteria
SDIGTTITSTYGLVFHYF

SEQ ID NO: 65771 - protein, 39 aa, unidentified
  source 1..39: note = methanogen bacteria
GFGTGDVLMPAIPGHFISFNFDMSLVGAFIRGFGQLFSN

SEQ ID NO: 65772 - protein, 13 aa, unidentified
  source 1..13: note = methanogen bacteria
KNPTLGFNIITAG

SEQ ID NO: 65773 - protein, 11 aa, unidentified
  source 1..11: note = methanogen bacteria
PRLFAPEGIDA

SEQ ID NO: 65774 - protein, 11 aa, unidentified
  source 1..11: note = methanogen bacteria
PRLFAPEGVDA

SEQ ID NO: 65775 - protein, 30 aa, unidentified; identical to SEQ ID NO: 61989
  source 1..30: note = methanogen bacteria

SEQ ID NO: 65776 - protein, 10 aa, unidentified
  source 1..10: note = methanogen bacteria
NPVFLQTIDY

SEQ ID NO: 65777 - protein, 11 aa, unidentified
  source 1..11: note = methanogen bacteria
PRLFAPEGVDA

SEQ ID NO: 65778 - protein, 11 aa, unidentified
  source 1..11: note = methanogen bacteria
PRLFSPEAVDA

SEQ ID NO: 65779 - protein, 11 aa, unidentified
  source 1..11: note = methanogen bacteria
PRLFAPEGVDA

SEQ ID NO: 65780 - protein, 11 aa, unidentified
  source 1..11: note = methanogen bacteria
STFGTMAIAAN

SEQ ID NO: 65781 - protein, 17 aa, unidentified
  source 1..17: note = methanogen bacteria
LNIYNLSAQTAAMTSEM

SEQ ID NO: 65782 - protein, 41 aa, unidentified
  source 1..41: note = methanogen bacteria
YSIDTTNMVTNFALRNQAPSFEHLFGTDWLGRDMFSRTIKG

SEQ ID NO: 65783 - protein, 30 aa, unidentified
  source 1..30: note = methanogen bacteria
TFLGFGLSPHEPAIGIILSESMKYLTMGDW

SEQ ID NO: 65784 - protein, 11 aa, unidentified
  source 1..11: note = methanogen bacteria
GTAPIDELPAT

SEQ ID NO: 65785 - protein, 11 aa, unidentified
  source 1..11: note = methanogen bacteria
PRLFAPEGVDA

SEQ ID NO: 65786 - protein, 34 aa, unidentified
  source 1..34: note = methanogen bacteria
PMIMNAAIQTLMFSGQQIMAYSLYQMMMVMTQPM

SEQ ID NO: 65787 - protein, 41 aa, unidentified
  source 1..41: note = methanogen bacteria
NVFGNAMIVIQGIYLQVANAYMGSSSAIAVDAISQAFINLV

SEQ ID NO: 65788 - protein, 10 aa, unidentified
  source 1..10: note = methanogen bacteria
LNSNIIDNFN

SEQ ID NO: 65789 - protein, 24 aa, unidentified
  source 1..24: note = methanogen bacteria
AAINSFTPFDVINPVQTLINSTDI

SEQ ID NO: 65790 - protein, 16 aa, unidentified
  source 1..16: note = methanogen bacteria
VGKSAQNLISGAIQPL

SEQ ID NO: 65791 - protein, 41 aa, unidentified
  source 1..41: note = methanogen bacteria
DIVGNFVIVCEEIYLQASGVYMGASSDIAVNAVSQALTNLA

SEQ ID NO: 65792 - protein, 29 aa, unidentified
  source 1..29: note = methanogen bacteria
MQHPQFRMWVIEVYIVILKVNELDYLLIS

SEQ ID NO: 65793 - protein, 31 aa, unidentified
  source 1..31: note = methanogen bacteria
LESGNPLDSLVMVSNAFTSNGYAVLGSTIPG

SEQ ID NO: 65794 - protein, 10 aa, unidentified
  source 1..10: note = methanogen bacteria
NNFVKMDINL

SEQ ID NO: 65795 - protein, 11 aa, unidentified
  source 1..11: note = methanogen bacteria
EGGDQFKNTFT

SEQ ID NO: 65796 - protein, 11 aa, unidentified
  source 1..11: note = methanogen bacteria
FTLTTVPYEIP

SEQ ID NO: 65797 - protein, 40 aa, unidentified
  source 1..40: note = methanogen bacteria
DIFGNFMILCQEIYLQSQHIYTGASSTILVDAISQAFVNL

SEQ ID NO: 65798 - protein, 16 aa, unidentified
  source 1..16: note = methanogen bacteria
MNVASLANIDIFSNYN

SEQ ID NO: 65799 - protein, 22 aa, unidentified
  source 1..22: note = methanogen bacteria
LGGLTQTSISNPVQDMINSTNI

SEQ ID NO: 65800 - protein, 17 aa, unidentified
  source 1..17: note = methanogen bacteria
FVTTSVETITSGTVYPA

SEQ ID NO: 65801 - protein, 19 aa, unidentified
  source 1..19: note = methanogen bacteria
ALPNFNILTDTDLSYAIES

SEQ ID NO: 65802 - protein, 16 aa, unidentified
  source 1..16: note = methanogen bacteria
NPTLGYNVITFGSIII

SEQ ID NO: 65803 - protein, 27 aa, unidentified
  source 1..27: note = methanogen bacteria
ILGDKSQPALMEGKLLWFDMYMTEDSF

SEQ ID NO: 65804 - protein, 19 aa, unidentified
  source 1..19: note = methanogen bacteria
AVDWNGMAELFSPLFGWGL

SEQ ID NO: 65805 - protein, 11 aa, unidentified
  source 1..11: note = methanogen bacteria
YFLQTVSHIYT

SEQ ID NO: 65806 - protein, 10 aa, unidentified
  source 1..10: note = methanogen bacteria
RLFSPEGVDA

SEQ ID NO: 65807 - protein, 18 aa, unidentified
  source 1..18: note = methanogen bacteria
FGQPLSQFSFTESFSFTG

SEQ ID NO: 65808 - protein, 12 aa, unidentified
  source 1..12: note = methanogen bacteria
ISGTYQAGLMVN

SEQ ID NO: 65809 - protein, 10 aa, unidentified
  source 1..10: note = methanogen bacteria
ALTPETKCLE

SEQ ID NO: 65810 - protein, 44 aa, unidentified
  source 1..44: note = methanogen bacteria
AAKRVDQTTQDEIAGQADGDDDTFDLNITSNLGSTRLESTLQIL

SEQ ID NO: 65811 - protein, 80 aa, unidentified
  source 1..80: note = methanogen bacteria
MTPVFTQVYDDGVKPYTQGQVTEKDALDAGLAPLRKFMLGQTRDKDLKLFMEINKTSSDEIKDYDDLSITTIIPAFIISE

SEQ ID NO: 65812 - protein, 12 aa, unidentified
  source 1..12: note = methanogen bacteria
NLIVDQLVRSFQ

SEQ ID NO: 65813 - protein, 11 aa, unidentified
  source 1..11: note = methanogen bacteria
IINPDIVKNFN

SEQ ID NO: 65814 - protein, 24 aa, unidentified
  source 1..24: note = methanogen bacteria
SALGSLFGIDINNPVHTLLNSTDI

SEQ ID NO: 65815 - protein, 18 aa, unidentified
  source 1..18: note = methanogen bacteria
AIKSLQALISNSYGAIDL

SEQ ID NO: 65816 - protein, 18 aa, unidentified
  source 1..18: note = methanogen bacteria
NTSIEISSGFKYSYELFS

SEQ ID NO: 65817 - protein, 43 aa, unidentified
  source 1..43: note = methanogen bacteria
NIYDNLFIVSREIYLQTHYAYMGSSSAVAFNTISQALANLVVS

SEQ ID NO: 65818 - protein, 18 aa, unidentified
  source 1..18: note = methanogen bacteria
LPASQLVTEGDFVTFLQS

SEQ ID NO: 65819 - protein, 22 aa, unidentified
  source 1..22: note = methanogen bacteria
MDIIGPIIGGFEMIMEMLQSGG

SEQ ID NO: 65820 - protein, 15 aa, unidentified
  source 1..15: note = methanogen bacteria
KNLGIDPSATAMAEG

SEQ ID NO: 65821 - protein, 43 aa, unidentified
  source 1..43: note = methanogen bacteria
DIYGKIWIVFEGLLAQILSVITTGDFSVLVFGAMADAIVGLII

SEQ ID NO: 65822 - protein, 22 aa, unidentified
  source 1..22: note = methanogen bacteria
EMGVLPHAFVRFYLAIQGLADN

SEQ ID NO: 65823 - protein, 19 aa, unidentified
  source 1..19: note = methanogen bacteria
VDMGNIITKIYDTIFIHFD

SEQ ID NO: 65824 - protein, 11 aa, unidentified
  source 1..11: note = methanogen bacteria
IPEIHLLDYTG

SEQ ID NO: 65825 - protein, 13 aa, unidentified
  source 1..13: note = methanogen bacteria
FDLLPIHSLFNLT

SEQ ID NO: 65826 - protein, 29 aa, unidentified
  source 1..29: note = methanogen bacteria
GIKNLTDSFYFVIITLTTVGYNDNAINTP

SEQ ID NO: 65827 - protein, 49 aa, unidentified
  source 1..49: note = methanogen bacteria
GAPGALMKIFNFFAENEALLNQTLNSTGAVNTQIFQMIPQEYVAGLING

SEQ ID NO: 65828 - protein, 16 aa, unidentified
  source 1..16: note = methanogen bacteria
SHENMMIEGFWYYLFL

SEQ ID NO: 65829 - protein, 10 aa, unidentified
  source 1..10: note = methanogen bacteria
LFGRGWCGYA

SEQ ID NO: 65830 - protein, 12 aa, unidentified
  source 1..12: note = methanogen bacteria
DNRAFCKYICPT

SEQ ID NO: 65831 - protein, 11 aa, unidentified
  source 1..11: note = methanogen bacteria
MVNFVLFELTP

SEQ ID NO: 65832 - protein, 30 aa, unidentified
  source 1..30: note = methanogen bacteria
ENKNPLDAIVMVSNTFATNGYTVYGTSDIG

SEQ ID NO: 65833 - protein, 21 aa, unidentified
  source 1..21: note = methanogen bacteria
VYPELGFGVFSGNGVLESLMV

SEQ ID NO: 65834 - protein, 17 aa, unidentified
  source 1..17: note = methanogen bacteria
GQPLNQFSFTESFSFTG

SEQ ID NO: 65835 - protein, 12 aa, unidentified
  source 1..12: note = methanogen bacteria
IHGTYQAGLMVN

SEQ ID NO: 65836 - protein, 22 aa, unidentified
  source 1..22: note = methanogen bacteria
EMGILPHAFVRFYLAIQGLADN

SEQ ID NO: 65837 - protein, 19 aa, unidentified
  source 1..19: note = methanogen bacteria
VDMRNIITNVYDTIFIHFD

SEQ ID NO: 65838 - protein, 10 aa, unidentified
  source 1..10: note = methanogen bacteria
GMLKAGAPVG

SEQ ID NO: 65839 - protein, 26 aa, unidentified
  source 1..26: note = methanogen bacteria
GGLFPADSAFATKATSVATAKVGLAW

SEQ ID NO: 65840 - protein, 11 aa, unidentified
  source 1..11: note = methanogen bacteria
FLGAKGVTWST

SEQ ID NO: 65841 - protein, 21 aa, unidentified
  source 1..21: note = methanogen bacteria
LGHENLSLSGFWYYLSLGVFE

SEQ ID NO: 65842 - protein, 11 aa, unidentified
  source 1..11: note = methanogen bacteria
NRAFCKYVCPI

SEQ ID NO: 65843 - protein, 10 aa, unidentified
  source 1..10: note = methanogen bacteria
MDDITIFFRG

SEQ ID NO: 65844 - protein, 29 aa, unidentified
  source 1..29: note = methanogen bacteria
EDVYPLDSLVMVSNAFTSNGYAVLGTTIA

SEQ ID NO: 65845 - protein, 12 aa, unidentified
  source 1..12: note = methanogen bacteria
NISGLSSIKDSS

SEQ ID NO: 65846 - protein, 10 aa, unidentified
  source 1..10: note = methanogen bacteria
KGGTINNNLN

SEQ ID NO: 65847 - protein, 11 aa, unidentified
  source 1..11: note = methanogen bacteria
LGLGSASGILP

SEQ ID NO: 65848 - protein, 17 aa, unidentified
  source 1..17: note = methanogen bacteria
ISHENMMIEGFWYYLFL

SEQ ID NO: 65849 - protein, 10 aa, unidentified
  source 1..10: note = methanogen bacteria
LFGRGWCGYA

SEQ ID NO: 65850 - protein, 13 aa, unidentified
  source 1..13: note = methanogen bacteria
KDNRAFCKYICPT

SEQ ID NO: 65851 - protein, 22 aa, unidentified
  source 1..22: note = methanogen bacteria
MDIIGIIGSTLNDVISMFQSGG

SEQ ID NO: 65852 - protein, 14 aa, unidentified
  source 1..14: note = methanogen bacteria
KQLGINSDITLMAN

SEQ ID NO: 65853 - protein, 27 aa, unidentified
  source 1..27: note = methanogen bacteria
FPAFQHIGISNILFGINWAPDNGFYGI

SEQ ID NO: 65854 - protein, 12 aa, unidentified
  source 1..12: note = methanogen bacteria
ISRDFFGGSGFT

SEQ ID NO: 65855 - protein, 35 aa, unidentified
  source 1..35: note = methanogen bacteria
AGNVAEIPTSILSPVRTLTSNIALEMGYAIDIHYN

SEQ ID NO: 65856 - protein, 16 aa, unidentified
  source 1..16: note = methanogen bacteria
GPIYIPLSDSVTVSVM

SEQ ID NO: 65857 - protein, 10 aa, unidentified
  source 1..10: note = methanogen bacteria
GQSMHILFEM

SEQ ID NO: 65858 - protein, 41 aa, unidentified
  source 1..41: note = methanogen bacteria
SILPLHPYAFAMASGVGSASMNAASLGPTLAAFPALETQIE

SEQ ID NO: 65859 - protein, 12 aa, unidentified
  source 1..12: note = methanogen bacteria
YEYMLNALHQLH

SEQ ID NO: 65860 - protein, 10 aa, unidentified
  source 1..10: note = methanogen bacteria
EIINSTGLSF

SEQ ID NO: 65861 - protein, 18 aa, unidentified
  source 1..18: note = methanogen bacteria
FGQSLNQFSLTESFSFTG

SEQ ID NO: 65862 - protein, 12 aa, unidentified
  source 1..12: note = methanogen bacteria
IPGTYQAGLMVN

SEQ ID NO: 65863 - protein, 22 aa, unidentified
  source 1..22: note = methanogen bacteria
MDIIATLFSTGNDLITMFQSGG

SEQ ID NO: 65864 - protein, 14 aa, unidentified
  source 1..14: note = methanogen bacteria
KELGTSSDITLMAN

SEQ ID NO: 65865 - protein, 95 aa, unidentified
  source 1..95: note = methanogen bacteria
MFVDDAQGLFKDKNMSVDLIKHNNGADMMAAMAKGEIDVGYVGIAPVSSSINDAVGVKIISSAQNEGSGIVVAKDSDITSAKKLKGKNVATLGEG

SEQ ID NO: 65866 - protein, 12 aa, unidentified
  source 1..12: note = methanogen bacteria
GTFIGKHAVAAI

SEQ ID NO: 65867 - protein, 19 aa, unidentified
  source 1..19: note = methanogen bacteria
ELATALGSTAATKSLVIQY

SEQ ID NO: 65868 - protein, 21 aa, unidentified
  source 1..21: note = methanogen bacteria
MIIEYIMPFVDGIVDIFTQGG

SEQ ID NO: 65869 - protein, 15 aa, unidentified
  source 1..15: note = methanogen bacteria
KSLGVHPDSAAMAEG

SEQ ID NO: 65870 - protein, 21 aa, unidentified
  source 1..21: note = methanogen bacteria
MIIEYVSPFFDGMMDIFTQGG

SEQ ID NO: 65871 - protein, 15 aa, unidentified
  source 1..15: note = methanogen bacteria
KSLGVHPDSAAMAEG

SEQ ID NO: 65872 - protein, 21 aa, unidentified
  source 1..21: note = methanogen bacteria
MIIEAITGLISGFVDFFQQGG

SEQ ID NO: 65873 - protein, 14 aa, unidentified
  source 1..14: note = methanogen bacteria
GSLGVNPDPTAMAR

SEQ ID NO: 65874 - protein, 16 aa, unidentified
  source 1..16: note = methanogen bacteria
YFYYNELFTNKYLFIP

SEQ ID NO: 65875 - protein, 23 aa, unidentified
  source 1..23: note = methanogen bacteria
IILNFSNLQNPVITINTILSLIS

SEQ ID NO: 65876 - protein, 21 aa, unidentified
  source 1..21: note = methanogen bacteria
MIFEIFNGFLSGIADFFRNGG

SEQ ID NO: 65877 - protein, 15 aa, unidentified
  source 1..15: note = methanogen bacteria
KSLGVDPSPSAMAEG

SEQ ID NO: 65878 - protein, 21 aa, unidentified
  source 1..21: note = methanogen bacteria
MIIEFIGPFIDSIVDIFSQGG

SEQ ID NO: 65879 - protein, 15 aa, unidentified
  source 1..15: note = methanogen bacteria
KSLGVHPDSAAMAEG

SEQ ID NO: 65880 - protein, 31 aa, unidentified
  source 1..31: note = methanogen bacteria
LFLSSLMTILMYGSQTNLAAALYQIMFLISN

SEQ ID NO: 65881 - protein, 21 aa, unidentified
  source 1..21: note = methanogen bacteria
MIIEYISPIFTGIMDIFSQGG

SEQ ID NO: 65882 - protein, 16 aa, unidentified
  source 1..16: note = methanogen bacteria
FKSLGVNPNSSAMAEG

SEQ ID NO: 65883 - protein, 35 aa, unidentified
  source 1..35: note = methanogen bacteria
TACIYRPWILDSRIHPVKEAIAGATGYSFPSGHTT

SEQ ID NO: 65884 - protein, 22 aa, unidentified
  source 1..22: note = methanogen bacteria
TKSYPLDYDTAGRLIVNPAIMA

SEQ ID NO: 65885 - protein, 11 aa, unidentified
  source 1..11: note = methanogen bacteria
TSQVKITNNLP

SEQ ID NO: 65886 - protein, 10 aa, unidentified
  source 1..10: note = methanogen bacteria
GLQKEVANSS

SEQ ID NO: 65887 - protein, 32 aa, unidentified
  source 1..32: note = methanogen bacteria
PVILSTMISILMYASQAIIATQLYQIMLIISN

SEQ ID NO: 65888 - protein, 30 aa, unidentified
  source 1..30: note = methanogen bacteria
AEGKNLLDSLVMVSNAFTSNGYAVLGDTPI

SEQ ID NO: 65889 - protein, 45 aa, unidentified
  source 1..45: note = methanogen bacteria
ININDKLMAVAQEISSLYPNIFLTSSPDIAFEALSQAIIELIVPL

SEQ ID NO: 65890 - protein, 19 aa, unidentified
  source 1..19: note = methanogen bacteria
ALPELQIANYSDFIFFITT

SEQ ID NO: 65891 - protein, 10 aa, unidentified
  source 1..10: note = methanogen bacteria
DEDEASRYLD

SEQ ID NO: 65892 - protein, 16 aa, unidentified
  source 1..16: note = methanogen bacteria
TIRNVSLKGGLSKGNG

SEQ ID NO: 65893 - protein, 21 aa, unidentified
  source 1..21: note = methanogen bacteria
MIIESLINGFDMIMEMLQSGG

SEQ ID NO: 65894 - protein, 15 aa, unidentified
  source 1..15: note = methanogen bacteria
KNLGVNPDAAAMAEG

SEQ ID NO: 65895 - protein, 33 aa, unidentified
  source 1..33: note = methanogen bacteria
KSLDIFRAAVHIAEKTNGTVSHIPISQLPVGDM

SEQ ID NO: 65896 - protein, 21 aa, unidentified
  source 1..21: note = methanogen bacteria
MIVEYIVPFIDGIMDIFTQGG

SEQ ID NO: 65897 - protein, 15 aa, unidentified
  source 1..15: note = methanogen bacteria
KSLGVHPDTAAMAEG

SEQ ID NO: 65898 - protein, 21 aa, unidentified
  source 1..21: note = methanogen bacteria
MIIEYITPIFNGIMDIFTQGG

SEQ ID NO: 65899 - protein, 15 aa, unidentified
  source 1..15: note = methanogen bacteria
KSLGVHPDTAAMAEG

SEQ ID NO: 65900 - protein, 21 aa, unidentified
  source 1..21: note = methanogen bacteria
MIVEYIMPFIDGIVDIFSQGG

SEQ ID NO: 65901 - protein, 15 aa, unidentified
  source 1..15: note = methanogen bacteria
KSLGVHPDSAAMAEG

SEQ ID NO: 65902 - protein, 21 aa, unidentified
  source 1..21: note = methanogen bacteria
MFIESITPFFEGIIDIFSQGG

SEQ ID NO: 65903 - protein, 15 aa, unidentified
  source 1..15: note = methanogen bacteria
KSLGVNPNTAAMAEG

SEQ ID NO: 65904 - protein, 21 aa, unidentified
  source 1..21: note = methanogen bacteria
MFIDSITSILNGIVDIFSQGG

SEQ ID NO: 65905 - protein, 15 aa, unidentified
  source 1..15: note = methanogen bacteria
KSLGVNPDSAAMAEG

SEQ ID NO: 65906 - protein, 21 aa, unidentified
  source 1..21: note = methanogen bacteria
MIIEFLTNGFGTILEMFQKGG

SEQ ID NO: 65907 - protein, 15 aa, unidentified
  source 1..15: note = methanogen bacteria
KVMGIQGNITGMAEG

SEQ ID NO: 65908 - protein, 21 aa, unidentified
  source 1..21: note = methanogen bacteria
MIVEYFTQIFEGMMDIFSQGG

SEQ ID NO: 65909 - protein, 15 aa, unidentified
  source 1..15: note = methanogen bacteria
KSLGVNPNSAAMAEG

SEQ ID NO: 65910 - protein, 35 aa, unidentified
  source 1..35: note = methanogen bacteria
SEIDPSFASVFDAFWFNMVTISSVGYGDLTPLTDS

SEQ ID NO: 65911 - protein, 15 aa, unidentified
  source 1..15: note = methanogen bacteria
LPSIEQSFNLTSRES

SEQ ID NO: 65912 - protein, 13 aa, unidentified
  source 1..13: note = methanogen bacteria
IDSSNFISSLLSS

SEQ ID NO: 65913 - protein, 32 aa, unidentified
  source 1..32: note = methanogen bacteria
KTVDVTKMIIGTLEKTNATGFNLNFSQLPNGD

SEQ ID NO: 65914 - protein, 29 aa, unidentified
  source 1..29: note = methanogen bacteria
EQVNPLNALVMVSNAFTSNGYAVLGTTAI

SEQ ID NO: 65915 - protein, 31 aa, unidentified
  source 1..31: note = methanogen bacteria
SLDLYRATLRILEKRNGGVLSLKFSQLPSGE

SEQ ID NO: 65916 - protein, 11 aa, unidentified
  source 1..11: note = methanogen bacteria
PRLFSPEGVDA

SEQ ID NO: 65917 - protein, 33 aa, unidentified
  source 1..33: note = methanogen bacteria
NTFDMYRVVIHVLENTTVPLSSLNMSIIPSANI

SEQ ID NO: 65918 - protein, 20 aa, unidentified
  source 1..20: note = methanogen bacteria
ILGHENLSMSGFWYYLFLGV

SEQ ID NO: 65919 - protein, 30 aa, unidentified
  source 1..30: note = methanogen bacteria
SLDLYRATLRILEKRNGGELSLKFSQLPSG

SEQ ID NO: 65920 - protein, 11 aa, unidentified
  source 1..11: note = methanogen bacteria
SSGVNPDLAMM

SEQ ID NO: 65921 - protein, 14 aa, unidentified
  source 1..14: note = methanogen bacteria
GYGVNPIPYSLGYV

SEQ ID NO: 65922 - protein, 12 aa, unidentified
  source 1..12: note = methanogen bacteria
FDPIMFLVGLMI

SEQ ID NO: 65923 - protein, 32 aa, unidentified
  source 1..32: note = methanogen bacteria
KTVDVTKMIIGTLEKTNATAFNLNFSQLPNGD

SEQ ID NO: 65924 - protein, 10 aa, unidentified
  source 1..10: note = methanogen bacteria
PLISPDAIPV

SEQ ID NO: 65925 - protein, 31 aa, unidentified
  source 1..31: note = methanogen bacteria
SPSYNGFDDFYFVIVTLTTVGYGDVTPTTYN

SEQ ID NO: 65926 - protein, 14 aa, unidentified
  source 1..14: note = methanogen bacteria
PNSFNWVLEEFMGI

SEQ ID NO: 65927 - protein, 32 aa, unidentified
  source 1..32: note = methanogen bacteria
KTVDVTRMIIHTLEKTNVTSSTLGYSHLPHWD

SEQ ID NO: 65928 - protein, 22 aa, unidentified
  source 1..22: note = methanogen bacteria
PELFYPSMSSTYILPSWKPAWS

SEQ ID NO: 65929 - protein, 31 aa, unidentified
  source 1..31: note = methanogen bacteria
GSSNSLFESFYFVIVTLTTVGYGDIVPKTFN

SEQ ID NO: 65930 - protein, 33 aa, unidentified
  source 1..33: note = methanogen bacteria
LKTVDVTKGIINTLEKTNVTASTLGYSHLPHGD

SEQ ID NO: 65931 - protein, 48 aa, unidentified
  source 1..48: note = methanogen bacteria
TNIPGQIMDIVQKTAVSHANATAMAGSSSTVVTGVSDAAIASLTGSIT

SEQ ID NO: 65932 - protein, 32 aa, unidentified
  source 1..32: note = methanogen bacteria
KSFDIFRMSIHLVENTNSTVSQIPFSQLPAGD

SEQ ID NO: 65933 - protein, 92 aa, unidentified
  source 1..92: note = methanogen bacteria
VNGLDKSVDLKGGSIAVLELDKNITSNEITTLINEKLGISDAKVISFVDNKVTVEFGDTVDVTNLTNSLKGTASLISFSSVGPVLSEAALNQ

SEQ ID NO: 65934 - protein, 10 aa, unidentified
  source 1..10: note = methanogen bacteria
IFIPEADVLS

SEQ ID NO: 65935 - protein, 21 aa, unidentified
  source 1..21: note = methanogen bacteria
SNPTLGYNIITVGSIIIIVQS

SEQ ID NO: 65936 - protein, 33 aa, unidentified
  source 1..33: note = methanogen bacteria
LKTVDVTRMIVDTLEKTNATASTLSYSQLPNGD

SEQ ID NO: 65937 - protein, 11 aa, unidentified
  source 1..11: note = methanogen bacteria
PLLFSPEDVDA

SEQ ID NO: 65938 - protein, 33 aa, unidentified
  source 1..33: note = methanogen bacteria
IKSFDIFRMSVHTVENANTTLSHLPLSQLPAGD

SEQ ID NO: 65939 - protein, 12 aa, unidentified
  source 1..12: note = methanogen bacteria
GIVTTLGGFELG

SEQ ID NO: 65940 - protein, 10 aa, unidentified
  source 1..10: note = methanogen bacteria
SHVDALFAGE

SEQ ID NO: 65941 - protein, 10 aa, unidentified
  source 1..10: note = methanogen bacteria
SQVDALFAGA

SEQ ID NO: 65942 - protein, 19 aa, unidentified
  source 1..19: note = methanogen bacteria
GDILKLFIGAKQVPYVYIY

SEQ ID NO: 65943 - protein, 17 aa, unidentified
  source 1..17: note = methanogen bacteria
STKKFCPRVCYCCICYN

SEQ ID NO: 65944 - protein, 10 aa, unidentified
  source 1..10: note = methanogen bacteria
NAFGLFDNEN

SEQ ID NO: 65945 - protein, 49 aa, unidentified
  source 1..49: note = methanogen bacteria
YDTKLFDNITGVVVEFISQIVNVYILGGSTDLAVNALSHAMTELVGSLA

SEQ ID NO: 65946 - protein, 32 aa, unidentified
  source 1..32: note = methanogen bacteria
KSFDIFRTSVHIAEKTNTTASHIPFSQLPAGD

SEQ ID NO: 65947 - protein, 32 aa, unidentified
  source 1..32: note = methanogen bacteria
FDPSINNLFDSLWFVLSTITTVGYGDILPQSG

SEQ ID NO: 65948 - protein, 79 aa, unidentified
  source 1..79: note = methanogen bacteria
IKLSLTGMDSPINHGTVSITLNDTPYTANVSGGIATIEIPDLDPGIYEGTVTYEGGKGYDSPSIDVKFKVMGLTDIQII

SEQ ID NO: 65949 - protein, 27 aa, unidentified
  source 1..27: note = methanogen bacteria
NITVAVTSNGKPVNNGIIIIRRENRTS

SEQ ID NO: 65950 - protein, 20 aa, unidentified
  source 1..20: note = methanogen bacteria
GIIQIPELDVGLYEETIIYT

SEQ ID NO: 65951 - protein, 19 aa, unidentified
  source 1..19: note = methanogen bacteria
GKKYIANVTNGIATIEIPD

SEQ ID NO: 65952 - protein, 29 aa, unidentified
  source 1..29: note = methanogen bacteria
SAGTYEGTIRYDGGSKYSNPSKDITFYVK

SEQ ID NO: 65953 - protein, 11 aa, unidentified
  source 1..11: note = methanogen bacteria
YPWGFFNVDNY

SEQ ID NO: 65954 - protein, 42 aa, unidentified
  source 1..42: note = methanogen bacteria
NVFGNAIATVQQIRLQISNVFFMVNSADIAVDAISNAVFNFI

SEQ ID NO: 65955 - protein, 50 aa, unidentified
  source 1..50: note = methanogen bacteria
YDTNLFSNAVAIVEEVFTQIFNMLIMGSSADTAVNALSHTVSNFMGSLTI

SEQ ID NO: 65956 - protein, 19 aa, unidentified
  source 1..19: note = methanogen bacteria
KNPTLGINLITAGSILVIL

SEQ ID NO: 65957 - protein, 18 aa, unidentified
  source 1..18: note = methanogen bacteria
KNPTLGINLITAGSILVI

SEQ ID NO: 65958 - protein, 49 aa, unidentified
  source 1..49: note = methanogen bacteria
YDTNLFSNAMAIIQDVFTQAFNVFIMGGSENTAVNALSHTVSNFMGSLT

SEQ ID NO: 65959 - protein, 10 aa, unidentified
  source 1..10: note = methanogen bacteria
SHVDALFAGA

SEQ ID NO: 65960 - protein, 23 aa, unidentified
  source 1..23: note = methanogen bacteria
GIPVISFEFLFANTLNSGREGGI

SEQ ID NO: 65961 - protein, 33 aa, unidentified
  source 1..33: note = methanogen bacteria
GSTFQIPLSIFDTGRPLPLHLYILASEGISFEN

SEQ ID NO: 65962 - protein, 16 aa, unidentified
  source 1..16: note = methanogen bacteria
MGRIVGQSQFEQPLFM

SEQ ID NO: 65963 - protein, 13 aa, unidentified
  source 1..13: note = methanogen bacteria
IPINFGEPLHVFP

SEQ ID NO: 65964 - protein, 18 aa, unidentified
  source 1..18: note = methanogen bacteria
LSSENMMLEGFWYYLFLG

SEQ ID NO: 65965 - protein, 11 aa, unidentified
  source 1..11: note = methanogen bacteria
QYVGSIASYLG

SEQ ID NO: 65966 - protein, 33 aa, unidentified
  source 1..33: note = methanogen bacteria
TKNLDIYRVIVRQAKQTNASMFSLKFTQLPTND

SEQ ID NO: 65967 - protein, 10 aa, unidentified
  source 1..10: note = methanogen bacteria
SQVDALFAGA

SEQ ID NO: 65968 - protein, 50 aa, unidentified
  source 1..50: note = methanogen bacteria
DTNLFSNATALVEEVIMQAYNVYVMGGSLNLATNAISQSLSVLMGSLTIT

SEQ ID NO: 65969 - protein, 10 aa, unidentified
  source 1..10: note = methanogen bacteria
SHIDSLFAGE

SEQ ID NO: 65970 - protein, 11 aa, unidentified
  source 1..11: note = methanogen bacteria
WSDPSVFTTPL

SEQ ID NO: 65971 - protein, 32 aa, unidentified
  source 1..32: note = methanogen bacteria
QSFEVSTITMNFVENANGTVSQMASSQLPTGN

SEQ ID NO: 65972 - protein, 43 aa, unidentified
  source 1..43: note = methanogen bacteria
NLFGMASIMFTRMMYASMAAPANATVTIADVVPQSMIISFGNS

SEQ ID NO: 65973 - protein, 44 aa, unidentified
  source 1..44: note = methanogen bacteria
TNLFGISAEVFNKMMIASMNAPANTTVVVGNVVPQSTLTDLGTA

SEQ ID NO: 65974 - protein, 11 aa, unidentified
  source 1..11: note = methanogen bacteria
HVGIDPSLAMM

SEQ ID NO: 65975 - protein, 14 aa, unidentified
  source 1..14: note = methanogen bacteria
GLGVNPMPYSIGYI

SEQ ID NO: 65976 - protein, 44 aa, unidentified
  source 1..44: note = methanogen bacteria
TNLFGLAYDMFYKMAMASMAAPANTTVVINDVVPQSQIIQLGTA

SEQ ID NO: 65977 - protein, 11 aa, unidentified
  source 1..11: note = methanogen bacteria
SVGVDPSLAMM

SEQ ID NO: 65978 - protein, 14 aa, unidentified
  source 1..14: note = methanogen bacteria
GWSVNPMPYSLGYV

SEQ ID NO: 65979 - protein, 11 aa, unidentified
  source 1..11: note = methanogen bacteria
SEGIDPSLAMM

SEQ ID NO: 65980 - protein, 14 aa, unidentified
  source 1..14: note = methanogen bacteria
GFGVNPMPYSLGYV

SEQ ID NO: 65981 - protein, 45 aa, unidentified
  source 1..45: note = methanogen bacteria
TNLFGLAAEVISKTVNASVQAQANSTVVASNVVPQATMTSFLTAF

SEQ ID NO: 65982 - protein, 44 aa, unidentified
  source 1..44: note = methanogen bacteria
TNLFGMSYDMMTKMMIASMNAPANTTVLITDLFPQSAFIQLGNA

SEQ ID NO: 65983 - protein, 22 aa, unidentified
  source 1..22: note = methanogen bacteria
LGHENLSLSGFWYYLGLGVFEG

SEQ ID NO: 65984 - protein, 11 aa, unidentified
  source 1..11: note = methanogen bacteria
NRAFCKYVCPV

SEQ ID NO: 65985 - protein, 44 aa, unidentified
  source 1..44: note = methanogen bacteria
NVVGNFMNVAREIFTQVMDVYVMGTSTNVAMGAISQAMAGLILS

SEQ ID NO: 65986 - protein, 11 aa, unidentified
  source 1..11: note = methanogen bacteria
SVGVDPSLAMM

SEQ ID NO: 65987 - protein, 14 aa, unidentified
  source 1..14: note = methanogen bacteria
GLGVNPMPYSLGYV

SEQ ID NO: 65988 - protein, 21 aa, unidentified
  source 1..21: note = methanogen bacteria
MATVDTFLPDIIQTTFFSGYT

SEQ ID NO: 65989 - protein, 15 aa, unidentified
  source 1..15: note = methanogen bacteria
VDNGFYPKTVFLITP

SEQ ID NO: 65990 - protein, 24 aa, unidentified
  source 1..24: note = methanogen bacteria
AVEYFNYSEQHVLPNALNQLFDTY

SEQ ID NO: 65991 - protein, 44 aa, unidentified
  source 1..44: note = methanogen bacteria
TNLFGMSYDMMTKMIIASMNAPANTTVLITDLFPQSAFIQLGNA

SEQ ID NO: 65992 - protein, 25 aa, unidentified
  source 1..25: note = methanogen bacteria
DPCPVNAITLEEVGSPITVNDDCIR

SEQ ID NO: 65993 - protein, 24 aa, unidentified
  source 1..24: note = methanogen bacteria
PWNAIYISEKVPIKRSKEIESFTF

SEQ ID NO: 65994 - protein, 28 aa, unidentified
  source 1..28: note = methanogen bacteria
TCVEACPGDFIAANGASLTVAIPSVCAA

SEQ ID NO: 65995 - protein, 23 aa, unidentified
  source 1..23: note = methanogen bacteria
KLCPVDALDISVEWGEGAPVDAE

SEQ ID NO: 65996 - protein, 20 aa, unidentified
  source 1..20: note = methanogen bacteria
NKCPTEAIRVVTKTGMLCPA

SEQ ID NO: 65997 - protein, 25 aa, unidentified
  source 1..25: note = methanogen bacteria
VCGNDALSVGSIELTIDGEAVTRDR

SEQ ID NO: 65998 - protein, 23 aa, unidentified
  source 1..23: note = methanogen bacteria
DACGDCIATCPYDMLHKTDNPKL

SEQ ID NO: 65999 - protein, 46 aa, unidentified
  source 1..46: note = methanogen bacteria
TNVPGNVVNVMGYVNQTVANSNGTVVANTVLEMVPKDVMGNLVGSL

SEQ ID NO: 66000 - protein, 19 aa, unidentified
  source 1..19: note = methanogen bacteria
ALPEIVISSSADFASFLQS

SEQ ID NO: 66001 - protein, 38 aa, unidentified
  source 1..38: note = methanogen bacteria
FIRDIPTSFVNANQMPSLQHIFGTDWMGRDMFQRTIAG

SEQ ID NO: 66002 - protein, 30 aa, unidentified; identical to SEQ ID NO: 65617
  source 1..30: note = methanogen bacteria

SEQ ID NO: 66003 - protein, 42 aa, unidentified
  source 1..42: note = methanogen bacteria
NVFGNLWLVYQEIFLQAQNLYTGAASTFVVSDALSHAMVNLA

SEQ ID NO: 66004 - protein, 43 aa, unidentified
  source 1..43: note = methanogen bacteria
NLFGMAYTIVSRMMLASMAAPANATIVITDVVPQSLIINFGTA

SEQ ID NO: 66005 - protein, 31 aa, unidentified
  source 1..31: note = methanogen bacteria
LKTLDITRIVMGTLDKTNATTMGFSQMPSGD

SEQ ID NO: 66006 - protein, 45 aa, unidentified
  source 1..45: note = methanogen bacteria
EIIANIKNPNNNPVNSGYVTFNLGDKTYTVNVTNGIAKITHLFTT

SEQ ID NO: 66007 - protein, 22 aa, unidentified
  source 1..22: note = methanogen bacteria
LGHENLSLSGFWYYLGLGVFEG

SEQ ID NO: 66008 - protein, 10 aa, unidentified
  source 1..10: note = methanogen bacteria
LFGRGWCGYA

SEQ ID NO: 66009 - protein, 11 aa, unidentified
  source 1..11: note = methanogen bacteria
SIGCDPKTSLT

SEQ ID NO: 66010 - protein, 14 aa, unidentified
  source 1..14: note = methanogen bacteria
WGVQGLPDFSLGYV

SEQ ID NO: 66011 - protein, 42 aa, unidentified
  source 1..42: note = methanogen bacteria
NIFGNVMVVYHGIVSQAHNAYVGNSTVLVSDALSQAIVNLAV

SEQ ID NO: 66012 - protein, 42 aa, unidentified
  source 1..42: note = methanogen bacteria
NVYGNAMIVAQEIYLQAAYSYMGSSSAIAFDAIYQALVNLLF

SEQ ID NO: 66013 - protein, 11 aa, unidentified
  source 1..11: note = methanogen bacteria
GSRGVSHLAEV

SEQ ID NO: 66014 - protein, 10 aa, unidentified
  source 1..10: note = methanogen bacteria
FIQGVAYNSA

SEQ ID NO: 66015 - protein, 15 aa, unidentified
  source 1..15: note = methanogen bacteria
AGGAIEHNTASVVAF

SEQ ID NO: 66016 - protein, 35 aa, unidentified
  source 1..35: note = methanogen bacteria
GYMSLHSGAPVSEIVSQGTTLIFVAYPQVFNILGT

SEQ ID NO: 66017 - protein, 21 aa, unidentified
  source 1..21: note = methanogen bacteria
MATIDSFLPDFIQSYFFSGYT

SEQ ID NO: 66018 - protein, 13 aa, unidentified
  source 1..13: note = methanogen bacteria
DNGIFPKTVFLIT

SEQ ID NO: 66019 - protein, 24 aa, unidentified
  source 1..24: note = methanogen bacteria
AVEHFNYYEQHVLPNVLNQLFDTY

SEQ ID NO: 66020 - protein, 31 aa, unidentified
  source 1..31: note = methanogen bacteria
VETKTPLDAIVMVSNAFTSNGYAVLGHSEVG

SEQ ID NO: 66021 - protein, 24 aa, unidentified
  source 1..24: note = methanogen bacteria
DNPTLGYNLITLASIIIILQAAAP

SEQ ID NO: 66022 - protein, 14 aa, unidentified
  source 1..14: note = methanogen bacteria
PNAFLWVLGNFNGI

SEQ ID NO: 66023 - protein, 17 aa, unidentified
  source 1..17: note = methanogen bacteria
WQNLAGSILAYVFRRYL

SEQ ID NO: 66024 - protein, 11 aa, unidentified
  source 1..11: note = methanogen bacteria
SQMNAESFFAI

SEQ ID NO: 66025 - protein, 18 aa, unidentified
  source 1..18: note = methanogen bacteria
DILTYMGATSSMELSMQY

SEQ ID NO: 66026 - protein, 25 aa, unidentified
  source 1..25: note = methanogen bacteria
PNWCTALFNCIKNRILDHFPSKGLW

SEQ ID NO: 66027 - protein, 47 aa, unidentified
  source 1..47: note = methanogen bacteria
TNITGNIMAVAAEISSQAVNVYTGASASIATDALSQAFAGLAVSLAT

SEQ ID NO: 66028 - protein, 29 aa, unidentified
  source 1..29: note = methanogen bacteria
ENVNPLNALVMVSNAFTSNGYAVLGSSVI

SEQ ID NO: 66029 - protein, 13 aa, unidentified
  source 1..13: note = methanogen bacteria
SYIGIQSQYGLLT

SEQ ID NO: 66030 - protein, 14 aa, unidentified
  source 1..14: note = methanogen bacteria
GWGSNPIPYTIGFV

SEQ ID NO: 66031 - protein, 68 aa, unidentified; identical to SEQ ID NO: 63113
  source 1..68: note = methanogen bacteria

SEQ ID NO: 66032 - protein, 24 aa, unidentified
  source 1..24: note = methanogen bacteria
EQVFAYPGIGQATVAAGLRSDVPL

SEQ ID NO: 66033 - protein, 98 aa, unidentified
  source 1..98: note = methanogen bacteria
NDANSIKTETSDDLEESIDDMIEERLKDTSGVVMANDNYSCGPASLATVLNRYGLNLSLNEVSKQTNTSVNGTTMQSLIDAAQYYGFSAYGVEIDTQN

SEQ ID NO: 66034 - protein, 27 aa, unidentified
  source 1..27: note = methanogen bacteria
KYKVKEPIYKYYYVSDDSLTSAKLKRK

SEQ ID NO: 66035 - protein, 30 aa, unidentified
  source 1..30: note = methanogen bacteria
LGLFSSYILPGPIDVINSAWVVIQNGKLLT

SEQ ID NO: 66036 - protein, 20 aa, unidentified
  source 1..20: note = methanogen bacteria
GSSSGLGYMILTATNLFDTG

SEQ ID NO: 66037 - protein, 12 aa, unidentified
  source 1..12: note = methanogen bacteria
EVANGFSFSYEM

SEQ ID NO: 66038 - protein, 13 aa, unidentified
  source 1..13: note = methanogen bacteria
ISTSFKYSFEIFS

SEQ ID NO: 66039 - protein, 39 aa, unidentified
  source 1..39: note = methanogen bacteria
VKNQLDFNNSPLASPQDSFAALADLINNGDPMEHRSLWS

SEQ ID NO: 66040 - protein, 23 aa, unidentified
  source 1..23: note = methanogen bacteria
YNTTLSGIGYYVKFMIDNSSYDY

SEQ ID NO: 66041 - protein, 26 aa, unidentified
  source 1..26: note = methanogen bacteria
IMGDTDDPALWEGQLLWFNVHMTDAS

SEQ ID NO: 66042 - protein, 15 aa, unidentified
  source 1..15: note = methanogen bacteria
DWIDMTALFAPVLGW

SEQ ID NO: 66043 - protein, 39 aa, unidentified
  source 1..39: note = methanogen bacteria
VFGGIMTLVEEILLLAPNALIQNSGSFSDAVYNAALPLF

SEQ ID NO: 66044 - protein, 41 aa, unidentified
  source 1..41: note = methanogen bacteria
NIYGNFMTVFQQIVLIASDTYTGSSAVVYDGLAQAIVNLAV

SEQ ID NO: 66045 - protein, 10 aa, unidentified
  source 1..10: note = methanogen bacteria
LLDLTNVHNE

SEQ ID NO: 66046 - protein, 10 aa, unidentified
  source 1..10: note = methanogen bacteria
TGAIAGGVPV

SEQ ID NO: 66047 - protein, 38 aa, unidentified
  source 1..38: note = methanogen bacteria
TGIMVPEAFAGGAMTIAQTKALGGATFMAAGKSTASLT

SEQ ID NO: 66048 - protein, 10 aa, unidentified
  source 1..10: note = methanogen bacteria
FLGAPVSWAQ

SEQ ID NO: 66049 - protein, 12 aa, unidentified
  source 1..12: note = methanogen bacteria
PTGTTGPLHVFP

SEQ ID NO: 66050 - protein, 15 aa, unidentified
  source 1..15: note = methanogen bacteria
IFHIHLIKGVSLVIL

SEQ ID NO: 66051 - protein, 10 aa, unidentified
  source 1..10: note = methanogen bacteria
GQNITLLINT

SEQ ID NO: 66052 - protein, 41 aa, unidentified
  source 1..41: note = methanogen bacteria
TLIPLHPYAYALACGVGSTSMNVAAVSSLATIYPAISQQLY

SEQ ID NO: 66053 - protein, 26 aa, unidentified
  source 1..26: note = methanogen bacteria
IMGDANQPALWDGKFLWFTVHMTDAS

SEQ ID NO: 66054 - protein, 16 aa, unidentified
  source 1..16: note = methanogen bacteria
AGWIDMTAIFAPYMGW

SEQ ID NO: 66055 - protein, 40 aa, unidentified
  source 1..40: note = methanogen bacteria
HIFENLAIIAHEISSQAWLTYLGSTIVITDALSHALVNLL

SEQ ID NO: 66056 - protein, 11 aa, unidentified
  source 1..11: note = methanogen bacteria
AIGLDSSLALR

SEQ ID NO: 66057 - protein, 15 aa, unidentified
  source 1..15: note = methanogen bacteria
LSLQNLPEYSLGYIN

SEQ ID NO: 66058 - protein, 13 aa, unidentified
  source 1..13: note = methanogen bacteria
AYSFSGLSAELIT

SEQ ID NO: 66059 - protein, 17 aa, unidentified
  source 1..17: note = methanogen bacteria
LGRENLLLSGFWYYLFL

SEQ ID NO: 66060 - protein, 18 aa, unidentified
  source 1..18: note = methanogen bacteria
FGGENLLLSGFWYYLFLG

SEQ ID NO: 66061 - protein, 10 aa, unidentified
  source 1..10: note = methanogen bacteria
IFGRGWCGYA

SEQ ID NO: 66062 - protein, 13 aa, unidentified
  source 1..13: note = methanogen bacteria
HDNRAFCKYVCPI

SEQ ID NO: 66063 - protein, 11 aa, unidentified
  source 1..11: note = methanogen bacteria
SQMNAESFFAI

SEQ ID NO: 66064 - protein, 18 aa, unidentified
  source 1..18: note = methanogen bacteria
DILTYIGATSSMELSIQY

SEQ ID NO: 66065 - protein, 17 aa, unidentified
  source 1..17: note = methanogen bacteria
NSIKNRNPNDISTKGIW

SEQ ID NO: 66066 - protein, 19 aa, unidentified
  source 1..19: note = methanogen bacteria
ILGRENLLLSGFWYCLFLG

SEQ ID NO: 66067 - protein, 14 aa, unidentified
  source 1..14: note = methanogen bacteria
IAAFSDNTSASFVS

SEQ ID NO: 66068 - protein, 11 aa, unidentified
  source 1..11: note = methanogen bacteria
AICGGVAGNHW

SEQ ID NO: 66069 - protein, 41 aa, unidentified
  source 1..41: note = methanogen bacteria
FEIGGIEDPWYLLEYCSDDIVFAIDGTFDMMGTQYVRDVDL

SEQ ID NO: 66070 - protein, 34 aa, unidentified
  source 1..34: note = methanogen bacteria
ADKPAIPTPYDTFVALIDLFKYGDPIHDVAISVY

SEQ ID NO: 66071 - protein, 11 aa, unidentified
  source 1..11: note = methanogen bacteria
LFTGADGDTTW

SEQ ID NO: 66072 - protein, 22 aa, unidentified
  source 1..22: note = methanogen bacteria
YDGFNPGLGSYLSLMISNSSYE

SEQ ID NO: 66073 - protein, 10 aa, unidentified
  source 1..10: note = methanogen bacteria
ILITAVPGSG

SEQ ID NO: 66074 - protein, 31 aa, unidentified
  source 1..31: note = methanogen bacteria
GPTYNLFDDFYFVIVTLTTVGYGDVVPQTYN

SEQ ID NO: 66075 - protein, 22 aa, unidentified
  source 1..22: note = methanogen bacteria
LGHENLSLSGFWYYLSLGVFEG

SEQ ID NO: 66076 - protein, 10 aa, unidentified
  source 1..10: note = methanogen bacteria
LFGRGWCGYA

SEQ ID NO: 66077 - protein, 11 aa, unidentified
  source 1..11: note = methanogen bacteria
NRAFCKYVCPI

SEQ ID NO: 66078 - protein, 21 aa, unidentified
  source 1..21: note = methanogen bacteria
IGHENLSLSGFWYYLSLGVFE

SEQ ID NO: 66079 - protein, 11 aa, unidentified
  source 1..11: note = methanogen bacteria
NRAFCKYICPI

SEQ ID NO: 66080 - protein, 10 aa, unidentified
  source 1..10: note = methanogen bacteria
TGAVAGGVPI

SEQ ID NO: 66081 - protein, 38 aa, unidentified
  source 1..38: note = methanogen bacteria
TGIMVPEAFAGGAITIANTKALGGATFMAAGKSTASLT

SEQ ID NO: 66082 - protein, 10 aa, unidentified
  source 1..10: note = methanogen bacteria
FLGAEVTWAQ

SEQ ID NO: 66083 - protein, 43 aa, unidentified
  source 1..43: note = methanogen bacteria
SGTFSSLMKIVRLVGRDVVNTTVNATAMAHSVPHEYYVALFNG

SEQ ID NO: 66084 - protein, 38 aa, unidentified
  source 1..38: note = methanogen bacteria
IFGNIMKFAQELYLQAPHILMGTASVRDAIYHAAFPLL

SEQ ID NO: 66085 - protein, 29 aa, unidentified
  source 1..29: note = methanogen bacteria
ENQNPINALGMVSNAFTSNGYAVLGKTAG

SEQ ID NO: 66086 - protein, 29 aa, unidentified
  source 1..29: note = methanogen bacteria
KNINIVRIFSSANGNTLALKSSQIPPIDV

SEQ ID NO: 66087 - protein, 16 aa, unidentified
  source 1..16: note = methanogen bacteria
SISLPLLDVVTGTNDP

SEQ ID NO: 66088 - protein, 14 aa, unidentified
  source 1..14: note = methanogen bacteria
YTPLQYLILGGEFS

SEQ ID NO: 66089 - protein, 13 aa, unidentified
  source 1..13: note = methanogen bacteria
SFNQITTFVNADI

SEQ ID NO: 66090 - protein, 10 aa, unidentified
  source 1..10: note = methanogen bacteria
STVMGDIVPS

SEQ ID NO: 66091 - protein, 14 aa, unidentified
  source 1..14: note = methanogen bacteria
TIPINGTPLHVFPI

SEQ ID NO: 66092 - protein, 19 aa, unidentified
  source 1..19: note = methanogen bacteria
IGHENMLISGFWYYLFLGV

SEQ ID NO: 66093 - protein, 10 aa, unidentified
  source 1..10: note = methanogen bacteria
LFGRGWCGYA

SEQ ID NO: 66094 - protein, 10 aa, unidentified
  source 1..10: note = methanogen bacteria
FKIPNLEIIM

SEQ ID NO: 66095 - protein, 23 aa, unidentified
  source 1..23: note = methanogen bacteria
ILGHENLSLSGFWYYLSLGVFEG

SEQ ID NO: 66096 - protein, 15 aa, unidentified
  source 1..15: note = methanogen bacteria
GSTSRQMLFEFKILE

SEQ ID NO: 66097 - protein, 17 aa, unidentified
  source 1..17: note = methanogen bacteria
LGHENLLISGFWYYLFL

SEQ ID NO: 66098 - protein, 10 aa, unidentified
  source 1..10: note = methanogen bacteria
AMGSDIADEA

SEQ ID NO: 66099 - protein, 11 aa, unidentified
  source 1..11: note = methanogen bacteria
YIGVEPDLAIL

SEQ ID NO: 66100 - protein, 14 aa, unidentified
  source 1..14: note = methanogen bacteria
GWGVSTFPYSIGYV

SEQ ID NO: 66101 - protein, 10 aa, unidentified
  source 1..10: note = methanogen bacteria
IGVEPDLAML

SEQ ID NO: 66102 - protein, 14 aa, unidentified
  source 1..14: note = methanogen bacteria
GWGVNTFPYSIGYV

SEQ ID NO: 66103 - protein, 12 aa, unidentified
  source 1..12: note = methanogen bacteria
YEYMLNALHQLH

SEQ ID NO: 66104 - protein, 10 aa, unidentified
  source 1..10: note = methanogen bacteria
IVHSVSVNFS

SEQ ID NO: 66105 - protein, 29 aa, unidentified
  source 1..29: note = methanogen bacteria
EHVDPLNSLVMVSNAFTSNGYAVLGSSVI

SEQ ID NO: 66106 - protein, 12 aa, unidentified
  source 1..12: note = methanogen bacteria
YKYMLTALHEFH

SEQ ID NO: 66107 - protein, 11 aa, unidentified
  source 1..11: note = methanogen bacteria
EIVSSASVDVF

SEQ ID NO: 66108 - protein, 12 aa, unidentified
  source 1..12: note = methanogen bacteria
YEYMLNALHQFH

SEQ ID NO: 66109 - protein, 29 aa, unidentified
  source 1..29: note = methanogen bacteria
EDVSPLDSIVMVSNAFTSNGYAVLGSSGI

SEQ ID NO: 66110 - protein, 13 aa, unidentified
  source 1..13: note = methanogen bacteria
KPVKNYGKPKARR

SEQ ID NO: 66111 - protein, 12 aa, unidentified
  source 1..12: note = methanogen bacteria
LNNNIGVMVEEF

SEQ ID NO: 66112 - protein, 31 aa, unidentified
  source 1..31: note = methanogen bacteria
SEHVNPLDALVMVSNSFTSNGYAVLGSSVPG

SEQ ID NO: 66113 - protein, 12 aa, unidentified
  source 1..12: note = methanogen bacteria
YKYMLNALHQLH

SEQ ID NO: 66114 - protein, 11 aa, unidentified
  source 1..11: note = methanogen bacteria
EIISSVSVNMS

SEQ ID NO: 66115 - protein, 11 aa, unidentified
  source 1..11: note = methanogen bacteria
YIGVEPDLAIL

SEQ ID NO: 66116 - protein, 14 aa, unidentified
  source 1..14: note = methanogen bacteria
GWGVSTFPYSIGYV

SEQ ID NO: 66117 - protein, 11 aa, unidentified
  source 1..11: note = methanogen bacteria
AYMLDAIHELR

SEQ ID NO: 66118 - protein, 10 aa, unidentified
  source 1..10: note = methanogen bacteria
EIMSSVSLNF

SEQ ID NO: 66119 - protein, 33 aa, unidentified
  source 1..33: note = methanogen bacteria
LSTRFHLPEFHLRFALSHLIETLKLYYWHNPVS

SEQ ID NO: 66120 - protein, 11 aa, unidentified
  source 1..11: note = methanogen bacteria
TEYATSMGSTA

SEQ ID NO: 66121 - protein, 16 aa, unidentified
  source 1..16: note = methanogen bacteria
LYAVEVNLVSDFHCSF

SEQ ID NO: 66122 - protein, 12 aa, unidentified
  source 1..12: note = methanogen bacteria
YKYMLNALHQLH

SEQ ID NO: 66123 - protein, 10 aa, unidentified
  source 1..10: note = methanogen bacteria
IINSAGLSFA

SEQ ID NO: 66124 - protein, 12 aa, unidentified
  source 1..12: note = methanogen bacteria
YKYMLDVLHELH

SEQ ID NO: 66125 - protein, 10 aa, unidentified
  source 1..10: note = methanogen bacteria
IANSVGLNFA

SEQ ID NO: 66126 - protein, 12 aa, unidentified
  source 1..12: note = methanogen bacteria
YKYMLNALHNLQ

SEQ ID NO: 66127 - protein, 12 aa, unidentified
  source 1..12: note = methanogen bacteria
YEYMLTALHEFH

SEQ ID NO: 66128 - protein, 10 aa, unidentified
  source 1..10: note = methanogen bacteria
DNDIIMHNSP

SEQ ID NO: 66129 - protein, 28 aa, unidentified
  source 1..28: note = methanogen bacteria
ENEDPLNALVMVSNAFTSNGYSITGESV

SEQ ID NO: 66130 - protein, 29 aa, unidentified
  source 1..29: note = methanogen bacteria
ENVNPLNALVMVSNAFTSNGYAVLGSSII

SEQ ID NO: 66131 - protein, 12 aa, unidentified
  source 1..12: note = methanogen bacteria
YQYMLTALHELH

SEQ ID NO: 66132 - protein, 30 aa, unidentified
  source 1..30: note = methanogen bacteria
ENVDPLNALVMVSNAFTSNGYAVLGKSTIG

SEQ ID NO: 66133 - protein, 15 aa, unidentified
  source 1..15: note = methanogen bacteria
EFTYGAFVAGFYEGF

SEQ ID NO: 66134 - protein, 57 aa, unidentified
  source 1..57: note = methanogen bacteria
SSSNILGHNYRDAYLYLIQAYHFAGTPIGGYDYVNYYSPLIPFLTSLLFRLGFVSEA

SEQ ID NO: 66135 - protein, 41 aa, unidentified
  source 1..41: note = methanogen bacteria
SIRQGRFQLKLFPQTQPQLPLMICSSIFPVFQGSYTALKRS

SEQ ID NO: 66136 - protein, 12 aa, unidentified
  source 1..12: note = methanogen bacteria
YEYMLNALHQLH

SEQ ID NO: 66137 - protein, 10 aa, unidentified
  source 1..10: note = methanogen bacteria
IANSVSVNIG

SEQ ID NO: 66138 - protein, 11 aa, unidentified
  source 1..11: note = methanogen bacteria
LILPAIFSSAR

SEQ ID NO: 66139 - protein, 31 aa, unidentified
  source 1..31: note = methanogen bacteria
GPSYGLFDDFYFVVVTLTTVGYGDITPVTFN

SEQ ID NO: 66140 - protein, 12 aa, unidentified
  source 1..12: note = methanogen bacteria
YSYMLDALHQLN

SEQ ID NO: 66141 - protein, 10 aa, unidentified
  source 1..10: note = methanogen bacteria
IMNSVSINIS

SEQ ID NO: 66142 - protein, 18 aa, unidentified
  source 1..18: note = methanogen bacteria
FHEHSMIIPVIIGDFSVT

SEQ ID NO: 66143 - protein, 14 aa, unidentified
  source 1..14: note = methanogen bacteria
IDYAKLGLIELIYQ

SEQ ID NO: 66144 - protein, 17 aa, unidentified
  source 1..17: note = methanogen bacteria
AALDPFSDEDDKKRLTE

SEQ ID NO: 66145 - protein, 30 aa, unidentified
  source 1..30: note = methanogen bacteria
ETGAGSGTAFWMIDRASNGIVNCLSDSYDD

SEQ ID NO: 66146 - protein, 36 aa, unidentified
  source 1..36: note = methanogen bacteria
TGIMTGEAFAKGAITIANTKALGGAAFGAEATKSLT

SEQ ID NO: 66147 - protein, 10 aa, unidentified
  source 1..10: note = methanogen bacteria
FLGAEVTWAQ

SEQ ID NO: 66148 - protein, 40 aa, unidentified
  source 1..40: note = methanogen bacteria
VFGNFMIVAQGIMLQAEGSYLGYSTSFMSGAISQALINLA

SEQ ID NO: 66149 - protein, 10 aa, unidentified
  source 1..10: note = methanogen bacteria
IAGSYDMASI

SEQ ID NO: 66150 - protein, 10 aa, unidentified
  source 1..10: note = methanogen bacteria
IAGTFDMTAI

SEQ ID NO: 66151 - protein, 44 aa, unidentified
  source 1..44: note = methanogen bacteria
TGLFSSFTKIIYASVDAMANNASNLTMIMAAIPQSTMNTFTNAL

SEQ ID NO: 66152 - protein, 39 aa, unidentified
  source 1..39: note = methanogen bacteria
VVGNILNVFDAIALEASTLFMGTYENAVSIASFQLFASL

SEQ ID NO: 66153 - protein, 13 aa, unidentified
  source 1..13: note = methanogen bacteria
FDFILIETVSGFT

SEQ ID NO: 66154 - protein, 31 aa, unidentified
  source 1..31: note = methanogen bacteria
GPSYNLFDDFYFVVVTLTTVGYGDVTPQTYN

SEQ ID NO: 66155 - protein, 14 aa, unidentified
  source 1..14: note = methanogen bacteria
FWLGIYAAAAYEWL

SEQ ID NO: 66156 - protein, 28 aa, unidentified
  source 1..28: note = methanogen bacteria
EGVEPLNSAVMVSNAFTSNGYAILGNSG

SEQ ID NO: 66157 - protein, 11 aa, unidentified
  source 1..11: note = methanogen bacteria
MQFNFSYNFNL

SEQ ID NO: 66158 - protein, 30 aa, unidentified
  source 1..30: note = methanogen bacteria
VESKNLLDSLVMVSNAFTSNGYAILGSTTL

SEQ ID NO: 66159 - protein, 27 aa, unidentified
  source 1..27: note = methanogen bacteria
SSVNAFHMPLANAFHVPLANASMGGGL

SEQ ID NO: 66160 - protein, 12 aa, unidentified
  source 1..12: note = methanogen bacteria
YTPIFSIFQMEP

SEQ ID NO: 66161 - protein, 16 aa, unidentified
  source 1..16: note = methanogen bacteria
VEFTYGAFVAGFYEGF

SEQ ID NO: 66162 - protein, 21 aa, unidentified
  source 1..21: note = methanogen bacteria
GLSIISFDSPLFGDFSSLSAE

SEQ ID NO: 66163 - protein, 28 aa, unidentified
  source 1..28: note = methanogen bacteria
ILYGSVYPDMEPLLDFTPNALDPLSLDP

SEQ ID NO: 66164 - protein, 12 aa, unidentified
  source 1..12: note = methanogen bacteria
VNADAFLFQMPV

SEQ ID NO: 66165 - protein, 25 aa, unidentified
  source 1..25: note = methanogen bacteria
TASDRVVDNVLSGETIIHFFKKVFK

SEQ ID NO: 66166 - protein, 10 aa, unidentified
  source 1..10: note = methanogen bacteria
IAGSYDMVSI

SEQ ID NO: 66167 - protein, 11 aa, unidentified
  source 1..11: note = methanogen bacteria
HIGVNSDLAML

SEQ ID NO: 66168 - protein, 14 aa, unidentified
  source 1..14: note = methanogen bacteria
GWGVSTFPYSIGYV

SEQ ID NO: 66169 - protein, 19 aa, unidentified
  source 1..19: note = methanogen bacteria
ALPEMELLSSGDFYNFIVS

SEQ ID NO: 66170 - protein, 16 aa, unidentified
  source 1..16: note = methanogen bacteria
NDVVRVSDHVMYGEHE

SEQ ID NO: 66171 - protein, 18 aa, unidentified
  source 1..18: note = methanogen bacteria
FGTNVDFLDIFPQLSIYP

SEQ ID NO: 66172 - protein, 12 aa, unidentified
  source 1..12: note = methanogen bacteria
IMLFTKNIFLVV

SEQ ID NO: 66173 - protein, 11 aa, unidentified
  source 1..11: note = methanogen bacteria
VKFLGGLSAEF

SEQ ID NO: 66174 - protein, 10 aa, unidentified
  source 1..10: note = methanogen bacteria
IAGSFDMLAI

SEQ ID NO: 66175 - protein, 11 aa, unidentified
  source 1..11: note = methanogen bacteria
YIGVEPNLAML

SEQ ID NO: 66176 - protein, 14 aa, unidentified
  source 1..14: note = methanogen bacteria
GWGVSTFPYSIGYV

SEQ ID NO: 66177 - protein, 10 aa, unidentified
  source 1..10: note = methanogen bacteria
AMGSDIADNT

SEQ ID NO: 66178 - protein, 10 aa, unidentified
  source 1..10: note = methanogen bacteria
IGVAPDLAIL

SEQ ID NO: 66179 - protein, 14 aa, unidentified
  source 1..14: note = methanogen bacteria
GWGVSTFPYSIGYV

SEQ ID NO: 66180 - protein, 11 aa, unidentified
  source 1..11: note = methanogen bacteria
TLVSGPVAVAV

SEQ ID NO: 66181 - protein, 21 aa, unidentified
  source 1..21: note = methanogen bacteria
QIAFVFSYSESSAQLEPLIAS

SEQ ID NO: 66182 - protein, 25 aa, unidentified
  source 1..25: note = methanogen bacteria
SKSTQIIIYANRQGEVLALNLPTGD

SEQ ID NO: 66183 - protein, 41 aa, unidentified
  source 1..41: note = methanogen bacteria
GTYSAVFKIVEFMGQEVTNTTVNATTMVNTVPQEYWSALFA

SEQ ID NO: 66184 - protein, 10 aa, unidentified
  source 1..10: note = methanogen bacteria
AMGSDIADNT

SEQ ID NO: 66185 - protein, 25 aa, unidentified
  source 1..25: note = methanogen bacteria
SKSTEIILYANRQGEVLALNLPAGD

SEQ ID NO: 66186 - protein, 32 aa, unidentified
  source 1..32: note = methanogen bacteria
IDDSFSSIFDSFWYGLVTITGVGYGDFTPVSD

SEQ ID NO: 66187 - protein, 16 aa, unidentified
  source 1..16: note = methanogen bacteria
YSSFMQRYGMESEIIL

SEQ ID NO: 66188 - protein, 19 aa, unidentified
  source 1..19: note = methanogen bacteria
GIGISGSGLDFQISYALSS

SEQ ID NO: 66189 - protein, 31 aa, unidentified
  source 1..31: note = methanogen bacteria
DESFKSVFDSFWYNLVTITGVGYGDFTPQTS

SEQ ID NO: 66190 - protein, 21 aa, unidentified
  source 1..21: note = methanogen bacteria
GRTGILNFDSYLFGNLGALNM

SEQ ID NO: 66191 - protein, 13 aa, unidentified
  source 1..13: note = methanogen bacteria
LFGSLVAGIYQGF

SEQ ID NO: 66192 - protein, 32 aa, unidentified
  source 1..32: note = methanogen bacteria
SSPFGFPPFDLEDLLMDVPETVHLLLSHSFVD

SEQ ID NO: 66193 - protein, 23 aa, unidentified
  source 1..23: note = methanogen bacteria
FGMGDPTWVSIMDIDSVNLTPGA

SEQ ID NO: 66194 - protein, 10 aa, unidentified
  source 1..10: note = methanogen bacteria
ITPFDSIVTT

SEQ ID NO: 66195 - protein, 13 aa, unidentified
  source 1..13: note = methanogen bacteria
FMFIPIDFPVGIL

SEQ ID NO: 66196 - protein, 32 aa, unidentified
  source 1..32: note = methanogen bacteria
VGTSYNTFDYLYFVIVTLTTVGYGDITPVTYN

SEQ ID NO: 66197 - protein, 11 aa, unidentified
  source 1..11: note = methanogen bacteria
YIGVEPDLAML

SEQ ID NO: 66198 - protein, 14 aa, unidentified
  source 1..14: note = methanogen bacteria
GWGVNTFPYSIGYV

SEQ ID NO: 66199 - protein, 33 aa, unidentified
  source 1..33: note = methanogen bacteria
IDDSFTSIFNSFWYGLVTITGVGYGDITPISNQ

SEQ ID NO: 66200 - protein, 10 aa, unidentified
  source 1..10: note = methanogen bacteria
LTIDGTPIKE

SEQ ID NO: 66201 - protein, 17 aa, unidentified
  source 1..17: note = methanogen bacteria
AYPHYNAFSEIDDDECI

SEQ ID NO: 66202 - protein, 25 aa, unidentified
  source 1..25: note = methanogen bacteria
PRDAIVIERILPARADLVTGEIDVD

SEQ ID NO: 66203 - protein, 25 aa, unidentified
  source 1..25: note = methanogen bacteria
LCPAEAIVVDKETGKESIVIDKDAC

SEQ ID NO: 66204 - protein, 21 aa, unidentified
  source 1..21: note = methanogen bacteria
TNAIKAICRACNYGEYDLDPS

SEQ ID NO: 66205 - protein, 13 aa, unidentified
  source 1..13: note = methanogen bacteria
SVIDSELCVYCGW

SEQ ID NO: 66206 - protein, 27 aa, unidentified
  source 1..27: note = methanogen bacteria
EGVCPTDAAKHKKPFEGSIEVDQDKCQ

SEQ ID NO: 66207 - protein, 31 aa, unidentified
  source 1..31: note = methanogen bacteria
ICSCNALAFPVSSGPGSRMEHVIANNDYCVK

SEQ ID NO: 66208 - protein, 22 aa, unidentified
  source 1..22: note = methanogen bacteria
ANACPNGAITVKRTEVDHTPTN

SEQ ID NO: 66209 - protein, 11 aa, unidentified
  source 1..11: note = methanogen bacteria
YIGVNPDLAML

SEQ ID NO: 66210 - protein, 14 aa, unidentified
  source 1..14: note = methanogen bacteria
GWGVSTFPYSIGYV

SEQ ID NO: 66211 - protein, 20 aa, unidentified
  source 1..20: note = methanogen bacteria
TSVDPSSSVTLDFSTVDVGP

SEQ ID NO: 66212 - protein, 11 aa, unidentified
  source 1..11: note = methanogen bacteria
FGSIVAGFYQG

SEQ ID NO: 66213 - protein, 23 aa, unidentified
  source 1..23: note = methanogen bacteria
GVPVMNLEFIFGQVENQGRSGGI

SEQ ID NO: 66214 - protein, 34 aa, unidentified
  source 1..34: note = methanogen bacteria
VGSSIAIPISMFDPGRPLPLHLYVLATEGISLPN

SEQ ID NO: 66215 - protein, 11 aa, unidentified
  source 1..11: note = methanogen bacteria
YIGVEPDLALL

SEQ ID NO: 66216 - protein, 13 aa, unidentified
  source 1..13: note = methanogen bacteria
WGVNTFPFSIGYV

SEQ ID NO: 66217 - protein, 10 aa, unidentified
  source 1..10: note = methanogen bacteria
YIGVEPGLAM

SEQ ID NO: 66218 - protein, 14 aa, unidentified
  source 1..14: note = methanogen bacteria
GWGVNTFPYSLGYV

SEQ ID NO: 66219 - protein, 11 aa, unidentified
  source 1..11: note = methanogen bacteria
YIGVEPDLAIL

SEQ ID NO: 66220 - protein, 14 aa, unidentified
  source 1..14: note = methanogen bacteria
GWGVSTFPYSIGYV

SEQ ID NO: 66221 - protein, 11 aa, unidentified
  source 1..11: note = methanogen bacteria
MLFPVNFPISI

SEQ ID NO: 66222 - protein, 32 aa, unidentified
  source 1..32: note = methanogen bacteria
VGTSYNTFDYFYFVIVTLTTVGYGDITPVTYN

SEQ ID NO: 66223 - protein, 10 aa, unidentified
  source 1..10: note = methanogen bacteria
MLPFVLNYTR

SEQ ID NO: 66224 - protein, 31 aa, unidentified
  source 1..31: note = methanogen bacteria
DPSINNLFNSLWFVIATITTVGYGDVVPNTT

SEQ ID NO: 66225 - protein, 30 aa, unidentified
  source 1..30: note = methanogen bacteria
GMFELPDFELEEVFLHIGHIIGYFYEHDPV

SEQ ID NO: 66226 - protein, 22 aa, unidentified
  source 1..22: note = methanogen bacteria
FSNPIAEPISEMVEASSGYMGT

SEQ ID NO: 66227 - protein, 10 aa, unidentified
  source 1..10: note = methanogen bacteria
FTTLPDILME

SEQ ID NO: 66228 - protein, 16 aa, unidentified
  source 1..16: note = methanogen bacteria
QFCWGKLAARFYEWFF

SEQ ID NO: 66229 - protein, 15 aa, unidentified
  source 1..15: note = methanogen bacteria
PIVSNSSYGSKDNLL

SEQ ID NO: 66230 - protein, 11 aa, unidentified
  source 1..11: note = methanogen bacteria
FTEPGSFSTGA

SEQ ID NO: 66231 - protein, 45 aa, unidentified
  source 1..45: note = methanogen bacteria
TFAHIDTWWSINDAPGYLGYVFTGIRPEVIDVSPYVVDVAITTAD

SEQ ID NO: 66232 - protein, 11 aa, unidentified
  source 1..11: note = methanogen bacteria
MGVSKVETVEL

SEQ ID NO: 66233 - protein, 30 aa, unidentified
  source 1..30: note = methanogen bacteria
ESVNPLDSLVMVTNQFTSNGYSISGHTISS

SEQ ID NO: 66234 - protein, 11 aa, unidentified
  source 1..11: note = methanogen bacteria
YIGVEPDLAIL

SEQ ID NO: 66235 - protein, 14 aa, unidentified
  source 1..14: note = methanogen bacteria
GWGVSTFPYSIGYV

SEQ ID NO: 66236 - protein, 10 aa, unidentified
  source 1..10: note = methanogen bacteria
FFDPNAQIQT

SEQ ID NO: 66237 - protein, 12 aa, unidentified
  source 1..12: note = methanogen bacteria
GQFKYNGIDFSS

SEQ ID NO: 66238 - protein, 31 aa, unidentified
  source 1..31: note = methanogen bacteria
FGLNVSGSTTYSLLKFSAISPNILNGRTFGP

SEQ ID NO: 66239 - protein, 14 aa, unidentified
  source 1..14: note = methanogen bacteria
ELSAGFAFSYQMFF

SEQ ID NO: 66240 - protein, 14 aa, unidentified
  source 1..14: note = methanogen bacteria
FGKLVAVVYDWLFG

SEQ ID NO: 66241 - protein, 11 aa, unidentified
  source 1..11: note = methanogen bacteria
YIGVEPDLAIL

SEQ ID NO: 66242 - protein, 14 aa, unidentified
  source 1..14: note = methanogen bacteria
GWGVSTFPYSIGYV

SEQ ID NO: 66243 - protein, 23 aa, unidentified
  source 1..23: note = methanogen bacteria
SGLNDPNWISMLDVDTVDMDSSI

SEQ ID NO: 66244 - protein, 11 aa, unidentified
  source 1..11: note = methanogen bacteria
YIGVDSNLAML

SEQ ID NO: 66245 - protein, 14 aa, unidentified
  source 1..14: note = methanogen bacteria
GWGVSTFPYSIGYV

SEQ ID NO: 66246 - protein, 42 aa, unidentified
  source 1..42: note = methanogen bacteria
SGTYSAFAEILAFIGNTVSDTVDPSMAISAVPQDLWAPLFTG

SEQ ID NO: 66247 - protein, 19 aa, unidentified
  source 1..19: note = methanogen bacteria
VLPDKEILNYTGFINFLGS

SEQ ID NO: 66248 - protein, 11 aa, unidentified
  source 1..11: note = methanogen bacteria
YIGVEPDLAIL

SEQ ID NO: 66249 - protein, 14 aa, unidentified
  source 1..14: note = methanogen bacteria
GWGVSTFPYSVGYV

SEQ ID NO: 66250 - protein, 10 aa, unidentified
  source 1..10: note = methanogen bacteria
YIGVSPDLAM

SEQ ID NO: 66251 - protein, 14 aa, unidentified
  source 1..14: note = methanogen bacteria
GWGVNTFPYSLGYV

SEQ ID NO: 66252 - protein, 11 aa, unidentified
  source 1..11: note = methanogen bacteria
YIGVNPDLAML

SEQ ID NO: 66253 - protein, 14 aa, unidentified
  source 1..14: note = methanogen bacteria
GWGVCTFPYSIGYV

SEQ ID NO: 66254 - protein, 11 aa, unidentified
  source 1..11: note = methanogen bacteria
YIGVEPDLAIL

SEQ ID NO: 66255 - protein, 14 aa, unidentified
  source 1..14: note = methanogen bacteria
GWGVSTFPYSIGYV

SEQ ID NO: 66256 - protein, 10 aa, unidentified
  source 1..10: note = methanogen bacteria
YIGVSPDLAM

SEQ ID NO: 66257 - protein, 13 aa, unidentified
  source 1..13: note = methanogen bacteria
WGVNTFPFSLGYV

SEQ ID NO: 66258 - protein, 11 aa, unidentified
  source 1..11: note = methanogen bacteria
YIGVEPDLAIL

SEQ ID NO: 66259 - protein, 14 aa, unidentified
  source 1..14: note = methanogen bacteria
GWGVSTFPYSIGYV

SEQ ID NO: 66260 - protein, 16 aa, unidentified
  source 1..16: note = methanogen bacteria
PIVFNSPYDSKGDVLS

SEQ ID NO: 66261 - protein, 12 aa, unidentified
  source 1..12: note = methanogen bacteria
LTAPGAFDSVAF

SEQ ID NO: 66262 - protein, 46 aa, unidentified
  source 1..46: note = methanogen bacteria
NSFAHIETWWSIDDASGYISYVFKGTRPIVLDAAPYVDYIALTGAD

SEQ ID NO: 66263 - protein, 41 aa, unidentified
  source 1..41: note = methanogen bacteria
FGPISTIFSSRNMDKFAQLNAGSTTADMYSIVPQEVWNSLL

SEQ ID NO: 66264 - protein, 12 aa, unidentified
  source 1..12: note = methanogen bacteria
LFGSFVAGLYQG

SEQ ID NO: 66265 - protein, 11 aa, unidentified
  source 1..11: note = methanogen bacteria
YIGVEPDLAIL

SEQ ID NO: 66266 - protein, 14 aa, unidentified
  source 1..14: note = methanogen bacteria
GWGVSTFPYSIGYV

SEQ ID NO: 66267 - protein, 43 aa, unidentified
  source 1..43: note = methanogen bacteria
GAGPLVTIFSKQTMDSLTNANTSSQVTQAFSSVPQEAWTGLIT

SEQ ID NO: 66268 - protein, 10 aa, unidentified
  source 1..10: note = methanogen bacteria
YIGVAPDLAM

SEQ ID NO: 66269 - protein, 13 aa, unidentified
  source 1..13: note = methanogen bacteria
WGVNTFPFSLGYV

SEQ ID NO: 66270 - protein, 10 aa, unidentified
  source 1..10: note = methanogen bacteria
GMLKAGAPLG

SEQ ID NO: 66271 - protein, 30 aa, unidentified
  source 1..30: note = methanogen bacteria
GGITPTDASAPAYAISAKAISVAEGKVTMP

SEQ ID NO: 66272 - protein, 11 aa, unidentified
  source 1..11: note = methanogen bacteria
FLGAKGVTWST

SEQ ID NO: 66273 - protein, 24 aa, unidentified
  source 1..24: note = methanogen bacteria
RIVNLDNNYLGLFFSSMTLNSEIL

SEQ ID NO: 66274 - protein, 11 aa, unidentified
  source 1..11: note = methanogen bacteria
HLDSSQILFKN

SEQ ID NO: 66275 - protein, 31 aa, unidentified
  source 1..31: note = methanogen bacteria
GSSDDLFDSFYFVIVTLTTVGYGDIVPQTFN

SEQ ID NO: 66276 - protein, 10 aa, unidentified
  source 1..10: note = methanogen bacteria
GMLKAGAPVG

SEQ ID NO: 66277 - protein, 30 aa, unidentified
  source 1..30: note = methanogen bacteria
GGITPTDATAPAYAISAKAIAVAEGKVTMP

SEQ ID NO: 66278 - protein, 11 aa, unidentified
  source 1..11: note = methanogen bacteria
FLGAKGVTWST

SEQ ID NO: 66279 - protein, 44 aa, unidentified
  source 1..44: note = methanogen bacteria
TGLISSFTKIVYISIDAIANDANNLTAIIGTVPKPIMNTFTNSL

SEQ ID NO: 66280 - protein, 32 aa, unidentified
  source 1..32: note = methanogen bacteria
SSPLDFPEFDLEDMLMNMPETIHMLYSHNPVH

SEQ ID NO: 66281 - protein, 10 aa, unidentified
  source 1..10: note = methanogen bacteria
GMLKAGAPLG

SEQ ID NO: 66282 - protein, 30 aa, unidentified
  source 1..30: note = methanogen bacteria
GGITPTDTAAPAYAISAKAIAVAEGKVTMP

SEQ ID NO: 66283 - protein, 11 aa, unidentified
  source 1..11: note = methanogen bacteria
FLGAEGVTWST

SEQ ID NO: 66284 - protein, 29 aa, unidentified
  source 1..29: note = methanogen bacteria
EGKTPIDSLVMVSNAFTSNGYAVLGKTGL

SEQ ID NO: 66285 - protein, 44 aa, unidentified
  source 1..44: note = methanogen bacteria
TGLFSSFTKIVYASIDAVANDANNLTMIMAAIPKSTMNTFTNAL

SEQ ID NO: 66286 - protein, 42 aa, unidentified
  source 1..42: note = methanogen bacteria
TGVFSNIFKIVTFMSENPDVMQNATSFTQAVPQELLSGLAGG

SEQ ID NO: 66287 - protein, 11 aa, unidentified
  source 1..11: note = methanogen bacteria
LLSGKPFNYDT

SEQ ID NO: 66288 - protein, 25 aa, unidentified
  source 1..25: note = methanogen bacteria
KSDMSKIDLAISVLKSLDFSNLNQN

SEQ ID NO: 66289 - protein, 10 aa, unidentified
  source 1..10: note = methanogen bacteria
ILITAIPGSG

SEQ ID NO: 66290 - protein, 31 aa, unidentified
  source 1..31: note = methanogen bacteria
GNSFGQFDDLYFVIVTLTTVGYGDVTPKTYN

SEQ ID NO: 66291 - protein, 11 aa, unidentified
  source 1..11: note = methanogen bacteria
SMGVDASTALP

SEQ ID NO: 66292 - protein, 14 aa, unidentified
  source 1..14: note = methanogen bacteria
WNVPGLPAYSLGYV

SEQ ID NO: 66293 - protein, 24 aa, unidentified
  source 1..24: note = methanogen bacteria
DSLLNMVNSISLPLLDVVTGTNDP

SEQ ID NO: 66294 - protein, 13 aa, unidentified
  source 1..13: note = methanogen bacteria
TPLQYLILGGEFS

SEQ ID NO: 66295 - protein, 19 aa, unidentified
  source 1..19: note = methanogen bacteria
ALPEMQIANYSDFISFITS

SEQ ID NO: 66296 - protein, 44 aa, unidentified
  source 1..44: note = methanogen bacteria
TGLFSSFTEIVNVGINSLANETTNVTTIIAAVPKSTMNTFTNAL

SEQ ID NO: 66297 - protein, 13 aa, unidentified
  source 1..13: note = methanogen bacteria
MSAGFSFSYQMFS

SEQ ID NO: 66298 - protein, 11 aa, unidentified
  source 1..11: note = methanogen bacteria
YIGVSQDVAML

SEQ ID NO: 66299 - protein, 14 aa, unidentified
  source 1..14: note = methanogen bacteria
GWNVNPFPYSIGYI

SEQ ID NO: 66300 - protein, 12 aa, unidentified
  source 1..12: note = methanogen bacteria
EACGVEPGVALT

SEQ ID NO: 66301 - protein, 15 aa, unidentified
  source 1..15: note = methanogen bacteria
GWNVVGLPAYSVGYV

SEQ ID NO: 66302 - protein, 14 aa, unidentified
  source 1..14: note = methanogen bacteria
INIHIVGSFNLILL

SEQ ID NO: 66303 - protein, 10 aa, unidentified
  source 1..10: note = methanogen bacteria
GENIDILFNV

SEQ ID NO: 66304 - protein, 40 aa, unidentified
  source 1..40: note = methanogen bacteria
YVVPLHPYSYALATGIGSTSMNVVALSSLTAMYPDLSSKL

SEQ ID NO: 66305 - protein, 11 aa, unidentified
  source 1..11: note = methanogen bacteria
MNDVMFWFVML

SEQ ID NO: 66306 - protein, 31 aa, unidentified
  source 1..31: note = methanogen bacteria
VENVSPIDSWAMVSNAFTSNGYSVLGKSLPG

SEQ ID NO: 66307 - protein, 23 aa, unidentified
  source 1..23: note = methanogen bacteria
LTVFDPTWIPSLDLSPVYYGDSI

SEQ ID NO: 66308 - protein, 10 aa, unidentified
  source 1..10: note = methanogen bacteria
FNMESFLFGT

SEQ ID NO: 66309 - protein, 44 aa, unidentified
  source 1..44: note = methanogen bacteria
TGLFSSFTKIVYISIDAMANNTSNMTKIMAAIPQSTMNTFTNSL

SEQ ID NO: 66310 - protein, 30 aa, unidentified
  source 1..30: note = methanogen bacteria
GSTYGLFDDFYFVIVTLTTVGYGDVVPQTY

SEQ ID NO: 66311 - protein, 44 aa, unidentified
  source 1..44: note = methanogen bacteria
TGLFTSFTKIVYISIDAMSKNANNLTTIMAAVPKTTMNTFTNAL

SEQ ID NO: 66312 - protein, 23 aa, unidentified
  source 1..23: note = methanogen bacteria
IGMNDPTWISGVDIDSVSLTPSA

SEQ ID NO: 66313 - protein, 10 aa, unidentified
  source 1..10: note = methanogen bacteria
VTAFDAIITS

SEQ ID NO: 66314 - protein, 30 aa, unidentified
  source 1..30: note = methanogen bacteria
GTTYGLFDDFYFVIVTLTTVGYGDVVPQTY

SEQ ID NO: 66315 - protein, 44 aa, unidentified
  source 1..44: note = methanogen bacteria
TGLFSSLTKIVYISIDAISKDANNMTTIMAAIPKSTMNTFTNAL

SEQ ID NO: 66316 - protein, 44 aa, unidentified
  source 1..44: note = methanogen bacteria
SGLFSSFTKIAHTSINAIVNGANNLTAITAAIPQSTINTFTNAL

SEQ ID NO: 66317 - protein, 23 aa, unidentified
  source 1..23: note = methanogen bacteria
IGMSDPTWINGIDIDSVSLTPSA

SEQ ID NO: 66318 - protein, 44 aa, unidentified
  source 1..44: note = methanogen bacteria
SGLFTSFTKIVYISIDAISKDANNLTTVMAAIPKSTMNTFTNAL

SEQ ID NO: 66319 - protein, 12 aa, unidentified
  source 1..12: note = methanogen bacteria
DLFVPINFPGSV

SEQ ID NO: 66320 - protein, 31 aa, unidentified
  source 1..31: note = methanogen bacteria
GTTYEPFDYFYFVIVTLTTVGYGDITPQTYN

SEQ ID NO: 66321 - protein, 44 aa, unidentified
  source 1..44: note = methanogen bacteria
TGLFTSFTKIVYASIDAMANGAENATMIMSAIPKATMSSFTNAL

SEQ ID NO: 66322 - protein, 44 aa, unidentified
  source 1..44: note = methanogen bacteria
TKLFSSLTEIVNVGINSLANETTNMTTIIAAVPKSTMNTFTNAL

SEQ ID NO: 66323 - protein, 44 aa, unidentified
  source 1..44: note = methanogen bacteria
SGLFSSFTEIVYISMDAIANETTNMTMILAAVPKSTMNTFTNAL

SEQ ID NO: 66324 - protein, 45 aa, unidentified
  source 1..45: note = methanogen bacteria
ASGLFTSFTKIVNSSIGAIDNGANNLTMIMAAIPKSTISTFSNSL

SEQ ID NO: 66325 - protein, 20 aa, unidentified
  source 1..20: note = methanogen bacteria
ALPELQIASYSDYISFISSL

SEQ ID NO: 66326 - protein, 21 aa, unidentified
  source 1..21: note = methanogen bacteria
SNLSIISFNSPLFGDFRALGI

SEQ ID NO: 66327 - protein, 30 aa, unidentified
  source 1..30: note = methanogen bacteria
EGVAPLDSIAMVSNAFTSNGYAILGKSGLG

SEQ ID NO: 66328 - protein, 16 aa, unidentified
  source 1..16: note = methanogen bacteria
IYHIIDPNVVTTLSIS

SEQ ID NO: 66329 - protein, 25 aa, unidentified
  source 1..25: note = methanogen bacteria
LHQDFNLVSVISEILLLKPLNISHF

SEQ ID NO: 66330 - protein, 11 aa, unidentified
  source 1..11: note = methanogen bacteria
YGIDGLSEQIS

SEQ ID NO: 66331 - protein, 12 aa, unidentified
  source 1..12: note = methanogen bacteria
FNHDYAYYLWYE

SEQ ID NO: 66332 - protein, 18 aa, unidentified
  source 1..18: note = methanogen bacteria
DFLFKTILGISEYGLIKK

SEQ ID NO: 66333 - protein, 22 aa, unidentified
  source 1..22: note = methanogen bacteria
NPMPSEWIYDKIIFLNGGSGWI

SEQ ID NO: 66334 - protein, 44 aa, unidentified
  source 1..44: note = methanogen bacteria
SGLFSSFTQIVYGSIDAMAGGANNMTMIMAAIPKSALNTFTNAL

SEQ ID NO: 66335 - protein, 44 aa, unidentified
  source 1..44: note = methanogen bacteria
TGLFSSFTEIVYASIKAVSNNATNFTMIMAKVPPSAMNTFTNAL

SEQ ID NO: 66336 - protein, 17 aa, unidentified
  source 1..17: note = methanogen bacteria
SPVKEPTVELLARTSPS

SEQ ID NO: 66337 - protein, 20 aa, unidentified
  source 1..20: note = methanogen bacteria
LTIASPSFLMAAGTGFEDPL

SEQ ID NO: 66338 - protein, 12 aa, unidentified
  source 1..12: note = methanogen bacteria
DYTPLLLILRYD

SEQ ID NO: 66339 - protein, 20 aa, unidentified
  source 1..20: note = methanogen bacteria
YLSIIGFNSPLFGDFRTLSL

SEQ ID NO: 66340 - protein, 45 aa, unidentified
  source 1..45: note = methanogen bacteria
ASGLFSSFTQIVYGSIDAMADGANNLTMIMAAIPKSALNTFTNSL

SEQ ID NO: 66341 - protein, 44 aa, unidentified
  source 1..44: note = methanogen bacteria
SGLFSSFTEIVYKCIEAIANGAENYTAIMGAVPTSTMNTFTNAL

SEQ ID NO: 66342 - protein, 31 aa, unidentified
  source 1..31: note = methanogen bacteria
TENVNLLDSLVMVSNAFTSNGYSILGHSELG

SEQ ID NO: 66343 - protein, 28 aa, unidentified
  source 1..28: note = methanogen bacteria
EGVEPLDAIVMVSNAFTSNGYAVLGSTG

SEQ ID NO: 66344 - protein, 45 aa, unidentified
  source 1..45: note = methanogen bacteria
ASGLFSSLTTMVNAGVKAMEKGAENATAIMAAIPKDSIATFNNAL

SEQ ID NO: 66345 - protein, 31 aa, unidentified
  source 1..31: note = methanogen bacteria
VEDVSPLDALVMASNAFTSNGYAVLGNSSVG

SEQ ID NO: 66346 - protein, 34 aa, unidentified
  source 1..34: note = methanogen bacteria
VSSPMNFPEFDLEEMLLDFPETIHTLISHNPVDA

SEQ ID NO: 66347 - protein, 43 aa, unidentified
  source 1..43: note = methanogen bacteria
TMGPALSRIFTPANISQMATNSSSTSVILNSIPSSVWAGLFSG

SEQ ID NO: 66348 - protein, 11 aa, unidentified
  source 1..11: note = methanogen bacteria
QLTTFLTVLEN

SEQ ID NO: 66349 - protein, 13 aa, unidentified
  source 1..13: note = methanogen bacteria
MLFELYGHYILAT

SEQ ID NO: 66350 - protein, 45 aa, unidentified
  source 1..45: note = methanogen bacteria
SGLFTSFTKIVYISIDAMANNTSNLTTIMAAVPQSTMNTFNNALT

SEQ ID NO: 66351 - protein, 28 aa, unidentified
  source 1..28: note = methanogen bacteria
ENVSPMDSMTMVSNAFTSNSFDASGKNI

SEQ ID NO: 66352 - protein, 30 aa, unidentified
  source 1..30: note = methanogen bacteria
EDVSPLDSLNMVSNAFTSNGYTVLGKTGLG

SEQ ID NO: 66353 - protein, 29 aa, unidentified
  source 1..29: note = methanogen bacteria
ENVSPMDSLTMVSNAFTSNSFDASGNNII

SEQ ID NO: 66354 - protein, 28 aa, unidentified
  source 1..28: note = methanogen bacteria
ESVDPLSSLVMVSNAFTSNGYAILGNTG

SEQ ID NO: 66355 - protein, 44 aa, unidentified
  source 1..44: note = methanogen bacteria
ISLGSAISTLPKSSIAAISNATTTNAVLNAIPPQTWTALGSGFS

SEQ ID NO: 66356 - protein, 29 aa, unidentified
  source 1..29: note = methanogen bacteria
VENVSPMDSLTMVSNAFTSNSFDASGKNI

SEQ ID NO: 66357 - protein, 29 aa, unidentified
  source 1..29: note = methanogen bacteria
ERTTPLNALVMVSNAFTSNGYSVLGHSTF

SEQ ID NO: 66358 - protein, 28 aa, unidentified
  source 1..28: note = methanogen bacteria
EGVSPMDSMTMVSNAFTSNSFDASGQNI

SEQ ID NO: 66359 - protein, 23 aa, unidentified
  source 1..23: note = methanogen bacteria
PYYPEIGPFPLMPPDPRIEEFIP

SEQ ID NO: 66360 - protein, 28 aa, unidentified
  source 1..28: note = methanogen bacteria
EDVSPMDSLTMVSNAFTSNSFDASGQNI

SEQ ID NO: 66361 - protein, 28 aa, unidentified
  source 1..28: note = methanogen bacteria
ENVSPMDSITMVSNAFTSNSFDASGKNI

SEQ ID NO: 66362 - protein, 29 aa, unidentified
  source 1..29: note = methanogen bacteria
ENTMPLDSLAMVSNAFTSNGYSVLGNSTF

SEQ ID NO: 66363 - protein, 23 aa, unidentified
  source 1..23: note = methanogen bacteria
INFVYPENMPMPDLLPEVMEPSS

SEQ ID NO: 66364 - protein, 10 aa, unidentified
  source 1..10: note = methanogen bacteria
SGLEQHLFQL

SEQ ID NO: 66365 - protein, 10 aa, unidentified
  source 1..10: note = methanogen bacteria
MDWVSLNIFG

SEQ ID NO: 66366 - protein, 30 aa, unidentified
  source 1..30: note = methanogen bacteria
EGVNPLDSLVMVSNAFTSNGYAVLGTSMPG

SEQ ID NO: 66367 - protein, 28 aa, unidentified
  source 1..28: note = methanogen bacteria
EKVSPMDSITMVSNAFTSNSFDASGKNI

SEQ ID NO: 66368 - protein, 23 aa, unidentified
  source 1..23: note = methanogen bacteria
ILYGSVYPDMEPLLDFTPNALDP

SEQ ID NO: 66369 - protein, 12 aa, unidentified
  source 1..12: note = methanogen bacteria
VNADAFLFQMPV

SEQ ID NO: 66370 - protein, 20 aa, unidentified
  source 1..20: note = methanogen bacteria
LVSQSIDPANVGIGILGGLG

SEQ ID NO: 66371 - protein, 21 aa, unidentified
  source 1..21: note = methanogen bacteria
LGAPAVTVGGLGATAPGLGVS

SEQ ID NO: 66372 - protein, 30 aa, unidentified
  source 1..30: note = methanogen bacteria
EDVSPMDSLTMVSNAFTSNSFDASGKIMIG

SEQ ID NO: 66373 - protein, 29 aa, unidentified
  source 1..29: note = methanogen bacteria
EGVSPLESITMVSNAFTSNSYEASGNSVV

SEQ ID NO: 66374 - protein, 28 aa, unidentified
  source 1..28: note = methanogen bacteria
ENVSPMDSLTMVSNAFTSNSFDASGKNV

SEQ ID NO: 66375 - protein, 30 aa, unidentified
  source 1..30: note = methanogen bacteria
EGVSPIDSLNMVSNAFTSNGYAVLGTTGLG

SEQ ID NO: 66376 - protein, 30 aa, unidentified
  source 1..30: note = methanogen bacteria
EDVSPLDSLNMVSNAFTSNGYTVLGTTGIG

SEQ ID NO: 66377 - protein, 28 aa, unidentified
  source 1..28: note = methanogen bacteria
ENVSPMDSLTMVSNAFTSNSFDASGKNI

SEQ ID NO: 66378 - protein, 28 aa, unidentified
  source 1..28: note = methanogen bacteria
ENVSPMDSITMVSNAFTSNSFDASGKNI

SEQ ID NO: 66379 - protein, 30 aa, unidentified
  source 1..30: note = methanogen bacteria
ENVSPLNSLVMVSNAFTSNGYSILGSSGWG

SEQ ID NO: 66380 - protein, 21 aa, unidentified
  source 1..21: note = methanogen bacteria
LSSSSRDLIFNYRIIEFFLNL

SEQ ID NO: 66381 - protein, 30 aa, unidentified
  source 1..30: note = methanogen bacteria
EQVSPLNSLVMVSNAFTSNGYSILGASGWG

SEQ ID NO: 66382 - protein, 28 aa, unidentified
  source 1..28: note = methanogen bacteria
EGVEPLNSAVMVSNAFTSNGYAVLGNSG

SEQ ID NO: 66383 - protein, 42 aa, unidentified
  source 1..42: note = methanogen bacteria
SLSSFFAAIGEKGWKTISSATSPDVAISAIPAHAWSSLATGL

SEQ ID NO: 66384 - protein, 16 aa, unidentified
  source 1..16: note = methanogen bacteria
GPASRNLLNNFKIIEF

SEQ ID NO: 66385 - protein, 29 aa, unidentified
  source 1..29: note = methanogen bacteria
SDLLNFPQFDLIALIMHFSDTLRMLFTHN

SEQ ID NO: 66386 - protein, 23 aa, unidentified
  source 1..23: note = methanogen bacteria
ILGHENLSLSGFWYYLSLGVFEG

SEQ ID NO: 66387 - protein, 10 aa, unidentified
  source 1..10: note = methanogen bacteria
LFGRGWCGYA

SEQ ID NO: 66388 - protein, 30 aa, unidentified
  source 1..30: note = methanogen bacteria
EGVSPMDSMTMVTNAFTSNSYEASGKIMVG

SEQ ID NO: 66389 - protein, 10 aa, unidentified
  source 1..10: note = methanogen bacteria
GMLKAGAPIG

SEQ ID NO: 66390 - protein, 27 aa, unidentified
  source 1..27: note = methanogen bacteria
GGIVPADPTNAIAAKAIAVSEGKVKLD

SEQ ID NO: 66391 - protein, 12 aa, unidentified
  source 1..12: note = methanogen bacteria
LFLGAKGVTWST

SEQ ID NO: 66392 - protein, 29 aa, unidentified
  source 1..29: note = methanogen bacteria
ESVAPLDALVMVSNAFTSNGYAILGSTGI

SEQ ID NO: 66393 - protein, 28 aa, unidentified
  source 1..28: note = methanogen bacteria
NPKAKPTTTFTQLEEEKKAGKDSKAPAE

SEQ ID NO: 66394 - protein, 61 aa, unidentified
  source 1..61: note = methanogen bacteria
ASTERRRYDASSESKEAAPAEEPKEKEASSFSELADEKKAKKSSGKDGEGKKLKYVSSRRK

SEQ ID NO: 66395 - protein, 15 aa, unidentified
  source 1..15: note = methanogen bacteria
PTIRNLIYNFRIIEF

SEQ ID NO: 66396 - protein, 56 aa, unidentified
  source 1..56: note = methanogen bacteria
IFQIEDLIKFTDIGKIMVHDIKALSVLYANLMRGEYIINSHYNEGNVSNNLTMVLD

SEQ ID NO: 66397 - protein, 10 aa, unidentified
  source 1..10: note = methanogen bacteria
GMLKAGAPMG

SEQ ID NO: 66398 - protein, 27 aa, unidentified
  source 1..27: note = methanogen bacteria
GGIVPADPSNAIAAKAIAVSEAKVKLS

SEQ ID NO: 66399 - protein, 11 aa, unidentified
  source 1..11: note = methanogen bacteria
FLGAEGVNWSS

SEQ ID NO: 66400 - protein, 35 aa, unidentified
  source 1..35: note = methanogen bacteria
GLLHTVQSDMPNIVTSMTNSGAVPAFNYMVRNSGA

SEQ ID NO: 66401 - protein, 39 aa, unidentified
  source 1..39: note = methanogen bacteria
NSENILFSTLKHIQGDLMLFFFFFVFFFFFDYLKHIQGD

SEQ ID NO: 66402 - protein, 17 aa, unidentified
  source 1..17: note = methanogen bacteria
FGQIPIFPFTSLNLPLN

SEQ ID NO: 66403 - protein, 24 aa, unidentified
  source 1..24: note = methanogen bacteria
FYGSLYPDYVPIMGMTPNSYDPYT

SEQ ID NO: 66404 - protein, 11 aa, unidentified
  source 1..11: note = methanogen bacteria
SNLDLYLFQMP

SEQ ID NO: 66405 - protein, 41 aa, unidentified
  source 1..41: note = methanogen bacteria
VLGGITEANTALTNMAHLYPPDALAEGGTGWTSFPKLGTPF

SEQ ID NO: 66406 - protein, 34 aa, unidentified
  source 1..34: note = methanogen bacteria
NVYFYQNFGQIAIDYVGGNMNSIIPTFISTALPE

SEQ ID NO: 66407 - protein, 10 aa, unidentified
  source 1..10: note = methanogen bacteria
GMIKAGAPIG

SEQ ID NO: 66408 - protein, 27 aa, unidentified
  source 1..27: note = methanogen bacteria
GGIVPADPTNAIAAKAIAVSEGKVKLD

SEQ ID NO: 66409 - protein, 11 aa, unidentified
  source 1..11: note = methanogen bacteria
FLGAEGVNWAT

SEQ ID NO: 66410 - protein, 20 aa, unidentified
  source 1..20: note = methanogen bacteria
LSSSSRDLIFNYKIIEFFLN

SEQ ID NO: 66411 - protein, 29 aa, unidentified
  source 1..29: note = methanogen bacteria
ESVAPLDALVMVSNAFTSNGYAILGNTGI

SEQ ID NO: 66412 - protein, 28 aa, unidentified
  source 1..28: note = methanogen bacteria
EGVDPLSALVMVSNAFTSNGYAILGKSG

SEQ ID NO: 66413 - protein, 16 aa, unidentified
  source 1..16: note = methanogen bacteria
MSYVSHIVGIIEHHIA

SEQ ID NO: 66414 - protein, 11 aa, unidentified
  source 1..11: note = methanogen bacteria
MGGFLAASAIG

SEQ ID NO: 66415 - protein, 17 aa, unidentified
  source 1..17: note = methanogen bacteria
EIMGLVYFTNSAYMNGA

SEQ ID NO: 66416 - protein, 13 aa, unidentified
  source 1..13: note = methanogen bacteria
SSSFNPSFSVDWG

SEQ ID NO: 66417 - protein, 14 aa, unidentified
  source 1..14: note = methanogen bacteria
FNLPVVEIYTPIES

SEQ ID NO: 66418 - protein, 19 aa, unidentified
  source 1..19: note = methanogen bacteria
TSCNHWSHCIVHIHVLCSC

SEQ ID NO: 66419 - protein, 14 aa, unidentified
  source 1..14: note = methanogen bacteria
EMQVYMISFVQLPL

SEQ ID NO: 66420 - protein, 29 aa, unidentified
  source 1..29: note = methanogen bacteria
ESVDPLNALVMVSNAFTSNGYAILGKSGV

SEQ ID NO: 66421 - protein, 34 aa, unidentified
  source 1..34: note = methanogen bacteria
NNMMNVVGSSNFDLKEMVIESRGIMPQNLIHNIG

SEQ ID NO: 66422 - protein, 20 aa, unidentified
  source 1..20: note = methanogen bacteria
MNMLIDFIKENFFYLHPGYT

SEQ ID NO: 66423 - protein, 14 aa, unidentified
  source 1..14: note = methanogen bacteria
VDNHVYPRIHLLAT

SEQ ID NO: 66424 - protein, 23 aa, unidentified
  source 1..23: note = methanogen bacteria
MDFFGYYEQHVLPTFMINLTGSA

SEQ ID NO: 66425 - protein, 28 aa, unidentified
  source 1..28: note = methanogen bacteria
ENVDPLNSLVMVSNAFTSNGYAILGNTG

SEQ ID NO: 66426 - protein, 14 aa, unidentified
  source 1..14: note = methanogen bacteria
MLNIITMITNPQNA

SEQ ID NO: 66427 - protein, 19 aa, unidentified
  source 1..19: note = methanogen bacteria
LSNSILDFVPSVNLFNSFL

SEQ ID NO: 66428 - protein, 28 aa, unidentified
  source 1..28: note = methanogen bacteria
ESVDPLSALVMVSNAFTSNGYAILGSTG

SEQ ID NO: 66429 - protein, 14 aa, unidentified
  source 1..14: note = methanogen bacteria
GSLLSLSINDLNTF

SEQ ID NO: 66430 - protein, 30 aa, unidentified
  source 1..30: note = methanogen bacteria
EDVSPMDSITMVSNAFTSNSFDPAGKSMIG

SEQ ID NO: 66431 - protein, 17 aa, unidentified
  source 1..17: note = methanogen bacteria
APASVGQLQDLQVHTFI

SEQ ID NO: 66432 - protein, 18 aa, unidentified
  source 1..18: note = methanogen bacteria
LGPISRDLIYNFRIGEFI

SEQ ID NO: 66433 - protein, 28 aa, unidentified
  source 1..28: note = methanogen bacteria
ESVDPLSALVMVSNAFTSNGYAILGSTG

SEQ ID NO: 66434 - protein, 18 aa, unidentified
  source 1..18: note = methanogen bacteria
GMSSIDMLSDLRVLSFAL

SEQ ID NO: 66435 - protein, 29 aa, unidentified
  source 1..29: note = methanogen bacteria
EGVEPLNSAVMVSNAFTSNGYAVLGKSGI

SEQ ID NO: 66436 - protein, 30 aa, unidentified
  source 1..30: note = methanogen bacteria
SLDFKLPEFQLKFALSHIMETMKLFYIHNP

SEQ ID NO: 66437 - protein, 28 aa, unidentified
  source 1..28: note = methanogen bacteria
ENVSPMDSMTMVSNAFTSNSFDASGKNM

SEQ ID NO: 66438 - protein, 24 aa, unidentified
  source 1..24: note = methanogen bacteria
NPKAKPTTTFTQLEEEKKAGKDSK

SEQ ID NO: 66439 - protein, 61 aa, unidentified
  source 1..61: note = methanogen bacteria
SSTERRRYNASSETEEAAPAEEPKEKEASSFSELADEKKAKKSSGKDGEGKKLKYVSSRRK

SEQ ID NO: 66440 - protein, 41 aa, unidentified
  source 1..41: note = methanogen bacteria
GVYNNLGNFLIALNNTNMVNSTPAEVLSAVPTDVMNSLVGS

SEQ ID NO: 66441 - protein, 28 aa, unidentified
  source 1..28: note = methanogen bacteria
ESVDPLSSLVMVSNAFTSNGYAILGSTG

SEQ ID NO: 66442 - protein, 21 aa, unidentified
  source 1..21: note = methanogen bacteria
MPTVDTFLPEIIQSTFFSGYT

SEQ ID NO: 66443 - protein, 15 aa, unidentified
  source 1..15: note = methanogen bacteria
VDNGIYPKTVFLITP

SEQ ID NO: 66444 - protein, 24 aa, unidentified
  source 1..24: note = methanogen bacteria
AVDFFNYSEQHILSNAIYSLTDTA

SEQ ID NO: 66445 - protein, 30 aa, unidentified
  source 1..30: note = methanogen bacteria
EEVSPINSMVMVSNAFTSNGYSILGSSGWG

SEQ ID NO: 66446 - protein, 59 aa, unidentified
  source 1..59: note = methanogen bacteria
MQCIELTAILTGFVGSNSYADISTTVSSLSAYLPFNFDVNSISASLNSSIQEIGRYVLN

SEQ ID NO: 66447 - protein, 16 aa, unidentified
  source 1..16: note = methanogen bacteria
SSTSRDLIYNYKIIEF

SEQ ID NO: 66448 - protein, 10 aa, unidentified
  source 1..10: note = methanogen bacteria
GMLAAGAPVG

SEQ ID NO: 66449 - protein, 26 aa, unidentified
  source 1..26: note = methanogen bacteria
GGLFPADSAFATKATSVASAKVKLAW

SEQ ID NO: 66450 - protein, 11 aa, unidentified
  source 1..11: note = methanogen bacteria
FLGAKGVTWST

SEQ ID NO: 66451 - protein, 31 aa, unidentified
  source 1..31: note = methanogen bacteria
SEGANALDSLVIVSNEFTGNGYSVFGETIPG

SEQ ID NO: 66452 - protein, 20 aa, unidentified
  source 1..20: note = methanogen bacteria
GIKSNNSISQIPFTQLPAGD

SEQ ID NO: 66453 - protein, 14 aa, unidentified
  source 1..14: note = methanogen bacteria
MLSIDMISNLRVLT

SEQ ID NO: 66454 - protein, 21 aa, unidentified
  source 1..21: note = methanogen bacteria
MATVDSFLPDIIQSTFFSGYT

SEQ ID NO: 66455 - protein, 15 aa, unidentified
  source 1..15: note = methanogen bacteria
VDNGIYPKTVFLITP

SEQ ID NO: 66456 - protein, 23 aa, unidentified
  source 1..23: note = methanogen bacteria
VEYFNYSEQHVLANGLYQLFDTS

SEQ ID NO: 66457 - protein, 16 aa, unidentified
  source 1..16: note = methanogen bacteria
GVSSIDLLKNLKVIEF

SEQ ID NO: 66458 - protein, 36 aa, unidentified
  source 1..36: note = methanogen bacteria
CWGGAICADGDVYIDNSTFENNSAGDYGGAIHAANV

SEQ ID NO: 66459 - protein, 11 aa, unidentified
  source 1..11: note = methanogen bacteria
FIPNFEYNLPQ

SEQ ID NO: 66460 - protein, 51 aa, unidentified
  source 1..51: note = methanogen bacteria
YALIHHGFDINSYFSLNPSPIDYLLNCMVFDILTPIGNILTTIQVNGWNTS

SEQ ID NO: 66461 - protein, 11 aa, unidentified
  source 1..11: note = methanogen bacteria
IPRPENPPANF

SEQ ID NO: 66462 - protein, 21 aa, unidentified
  source 1..21: note = methanogen bacteria
IKSVNPISQIPFTQLPAGHIY

SEQ ID NO: 66463 - protein, 10 aa, unidentified
  source 1..10: note = methanogen bacteria
GMLAAGAPVG

SEQ ID NO: 66464 - protein, 25 aa, unidentified
  source 1..25: note = methanogen bacteria
GGLFPANSAFATKATAVAVAKVKMP

SEQ ID NO: 66465 - protein, 11 aa, unidentified
  source 1..11: note = methanogen bacteria
FLGAEGVTWST

SEQ ID NO: 66466 - protein, 29 aa, unidentified
  source 1..29: note = methanogen bacteria
EDVSPLDSIVMVTNAFTSNSFEASGNSIV

SEQ ID NO: 66467 - protein, 21 aa, unidentified
  source 1..21: note = methanogen bacteria
MPTVDTFLPEIIQSTFFSGYT

SEQ ID NO: 66468 - protein, 16 aa, unidentified
  source 1..16: note = methanogen bacteria
LVDNGIYPKTVFLITP

SEQ ID NO: 66469 - protein, 24 aa, unidentified
  source 1..24: note = methanogen bacteria
AVDFFNYSEQHVLSNAIYSLTDTA

SEQ ID NO: 66470 - protein, 18 aa, unidentified
  source 1..18: note = methanogen bacteria
SIPDFVSFYSNHFISSPI

SEQ ID NO: 66471 - protein, 16 aa, unidentified
  source 1..16: note = methanogen bacteria
GPSSLKMFAEMKVPSF

SEQ ID NO: 66472 - protein, 16 aa, unidentified
  source 1..16: note = methanogen bacteria
GPTSMDLLRNFQIHTF

SEQ ID NO: 66473 - protein, 13 aa, unidentified
  source 1..13: note = methanogen bacteria
IFNVSYPADIPTI

SEQ ID NO: 66474 - protein, 14 aa, unidentified
  source 1..14: note = methanogen bacteria
GAVMSLSVNDLNSF

SEQ ID NO: 66475 - protein, 31 aa, unidentified
  source 1..31: note = methanogen bacteria
SEHVNALDALVMVSNSFTSNGYAVLGNSIAG

SEQ ID NO: 66476 - protein, 30 aa, unidentified
  source 1..30: note = methanogen bacteria
GTSYGLFDDFYFVIVTLTTVGYGDVVPQTY

SEQ ID NO: 66477 - protein, 36 aa, unidentified
  source 1..36: note = methanogen bacteria
VFAGAKSLTQAITVLWTINVPWMWAYHGNVIAPWVS

SEQ ID NO: 66478 - protein, 31 aa, unidentified
  source 1..31: note = methanogen bacteria
AEGVNALDSLVMISNQFTGNGFAVFGNSIPG

SEQ ID NO: 66479 - protein, 30 aa, unidentified
  source 1..30: note = methanogen bacteria
EDVSPLDSLNMVSNAFTSNGYTVLGQSGLG

SEQ ID NO: 66480 - protein, 15 aa, unidentified
  source 1..15: note = methanogen bacteria
MDFTSQILDVMFHLF

SEQ ID NO: 66481 - protein, 29 aa, unidentified
  source 1..29: note = methanogen bacteria
FDLPLFDLHHLLLNLDETIEMFFVNSPEF

SEQ ID NO: 66482 - protein, 18 aa, unidentified
  source 1..18: note = methanogen bacteria
LGSSAGDLLFDFKIPNFL

SEQ ID NO: 66483 - protein, 31 aa, unidentified
  source 1..31: note = methanogen bacteria
SRRFFLPEFHLKFALSHIMNTLKMYYLYDPV

SEQ ID NO: 66484 - protein, 20 aa, unidentified
  source 1..20: note = methanogen bacteria
TYFDYSLAFGLSEGRNALRS

SEQ ID NO: 66485 - protein, 14 aa, unidentified
  source 1..14: note = methanogen bacteria
YFIMFFNGELSTGR

SEQ ID NO: 66486 - protein, 17 aa, unidentified
  source 1..17: note = methanogen bacteria
YGNFDGGISDFLTGRHA

SEQ ID NO: 66487 - protein, 22 aa, unidentified
  source 1..22: note = methanogen bacteria
FIVDESNLPSSTAEIMTFVSQN

SEQ ID NO: 66488 - protein, 17 aa, unidentified
  source 1..17: note = methanogen bacteria
FIFAGSGAHVSTLMAQL

SEQ ID NO: 66489 - protein, 12 aa, unidentified
  source 1..12: note = methanogen bacteria
AGGVTSSNSAIF

SEQ ID NO: 66490 - protein, 10 aa, unidentified
  source 1..10: note = methanogen bacteria
IFDLSPTFYH

SEQ ID NO: 66491 - protein, 32 aa, unidentified
  source 1..32: note = methanogen bacteria
IDPSMNNIFDNLWFVVVSLTTVGYGDITPNTI

SEQ ID NO: 66492 - protein, 20 aa, unidentified
  source 1..20: note = methanogen bacteria
EDILTYMGATSSMDLSMQYL

SEQ ID NO: 66493 - protein, 10 aa, unidentified
  source 1..10: note = methanogen bacteria
IEQLGQIGVL

SEQ ID NO: 66494 - protein, 10 aa, unidentified
  source 1..10: note = methanogen bacteria
MNVADIINQP

SEQ ID NO: 66495 - protein, 31 aa, unidentified
  source 1..31: note = methanogen bacteria
AEHVNALDSLVMVSNAFTSNGYTVLGKTIPG

SEQ ID NO: 66496 - protein, 19 aa, unidentified
  source 1..19: note = methanogen bacteria
LGVSGIDSLSHFQVSGLAS

SEQ ID NO: 66497 - protein, 19 aa, unidentified
  source 1..19: note = methanogen bacteria
MSLIELIRDNFFYLEPGYT

SEQ ID NO: 66498 - protein, 14 aa, unidentified
  source 1..14: note = methanogen bacteria
VDNNIYPLIHLLVT

SEQ ID NO: 66499 - protein, 23 aa, unidentified
  source 1..23: note = methanogen bacteria
VDFFGYWEQHVLPSILTSLTGTA

SEQ ID NO: 66500 - protein, 10 aa, unidentified
  source 1..10: note = methanogen bacteria
VTNVPYGLYQ

SEQ ID NO: 66501 - protein, 32 aa, unidentified
  source 1..32: note = methanogen bacteria
VDPTMNNLFNDLWFVIVSITTVGYGDVIPNTL

SEQ ID NO: 66502 - protein, 32 aa, unidentified
  source 1..32: note = methanogen bacteria
SSPLGFPPFDLEDMLMDAPETVQLLISHSPVD

SEQ ID NO: 66503 - protein, 16 aa, unidentified
  source 1..16: note = methanogen bacteria
DNEVRHIVRQSTPVLQ

SEQ ID NO: 66504 - protein, 11 aa, unidentified
  source 1..11: note = methanogen bacteria
TIAFNNIGVGY

SEQ ID NO: 66505 - protein, 20 aa, unidentified
  source 1..20: note = methanogen bacteria
AVPTVSEISSGAALNEYFIN

SEQ ID NO: 66506 - protein, 31 aa, unidentified
  source 1..31: note = methanogen bacteria
TFFQFPVFDLHKIFFDFYDTFQLLIYSNPKD

SEQ ID NO: 66507 - protein, 28 aa, unidentified
  source 1..28: note = methanogen bacteria
ESVDPLSSLVMVSNAFTSNGYAILGSTG

SEQ ID NO: 66508 - protein, 20 aa, unidentified
  source 1..20: note = methanogen bacteria
AVPAVTQITSHATLNSYVIS

SEQ ID NO: 66509 - protein, 21 aa, unidentified
  source 1..21: note = methanogen bacteria
AVPAVSNITSHAAVNSYIMNY

SEQ ID NO: 66510 - protein, 30 aa, unidentified
  source 1..30: note = methanogen bacteria
DPSLNMVDSLWFVMSTLTTVGYGDVTPNTL

SEQ ID NO: 66511 - protein, 12 aa, unidentified
  source 1..12: note = methanogen bacteria
PQIAQYFNVDIT

SEQ ID NO: 66512 - protein, 12 aa, unidentified
  source 1..12: note = methanogen bacteria
EFLNTLTHIIGT

SEQ ID NO: 66513 - protein, 30 aa, unidentified
  source 1..30: note = methanogen bacteria
VEDTGPLNALVMVSNAFTSNGYAVLGKSSL

SEQ ID NO: 66514 - protein, 10 aa, unidentified
  source 1..10: note = methanogen bacteria
IFDVSNEFYQ

SEQ ID NO: 66515 - protein, 32 aa, unidentified
  source 1..32: note = methanogen bacteria
IDPGMNNLFDNLWFVVVSLTTVGYGDITPHSV

SEQ ID NO: 66516 - protein, 30 aa, unidentified
  source 1..30: note = methanogen bacteria
VENTGPLNALVMVSNAFTSNGYAVLGKSSL

SEQ ID NO: 66517 - protein, 28 aa, unidentified
  source 1..28: note = methanogen bacteria
EGVDPLSALVMVSNAFTSNGYAILGKSG

SEQ ID NO: 66518 - protein, 32 aa, unidentified
  source 1..32: note = methanogen bacteria
IDPSMNNLFDNLWFVVVSITTVGYGDITPNTI

SEQ ID NO: 66519 - protein, 16 aa, unidentified
  source 1..16: note = methanogen bacteria
GPIKIPLTKGVEVSIM

SEQ ID NO: 66520 - protein, 10 aa, unidentified
  source 1..10: note = methanogen bacteria
GQSMHLLFEM

SEQ ID NO: 66521 - protein, 41 aa, unidentified
  source 1..41: note = methanogen bacteria
SILPLHPYAFAMASGVGSASMNAASLGPTLAAFPGLETQIE

SEQ ID NO: 66522 - protein, 31 aa, unidentified
  source 1..31: note = methanogen bacteria
VEGVNMLDALVMSSNAFTSNGYAVLGNSVPG

SEQ ID NO: 66523 - protein, 38 aa, unidentified
  source 1..38: note = methanogen bacteria
LVFAGTKSLSQAVTVLWTFNVPWSLAYHGNIIAPWVSQ

SEQ ID NO: 66524 - protein, 16 aa, unidentified
  source 1..16: note = methanogen bacteria
GPTSIDLIRNFQIHTF

SEQ ID NO: 66525 - protein, 35 aa, unidentified
  source 1..35: note = methanogen bacteria
GYMSLQSGTPVSEIVSQGTTLIFVVYPQVFNILGT

SEQ ID NO: 66526 - protein, 25 aa, unidentified
  source 1..25: note = methanogen bacteria
VSYFPQLMFLVNFSLPSMAIIDTLP

SEQ ID NO: 66527 - protein, 11 aa, unidentified
  source 1..11: note = methanogen bacteria
LVDVHEVLFNN

SEQ ID NO: 66528 - protein, 30 aa, unidentified
  source 1..30: note = methanogen bacteria
AENKSALDSLVMVSNAFTSNGYAVLGNSIF

SEQ ID NO: 66529 - protein, 20 aa, unidentified
  source 1..20: note = methanogen bacteria
DMIHISSPVLVNESTTTIFS

SEQ ID NO: 66530 - protein, 10 aa, unidentified
  source 1..10: note = methanogen bacteria
ERSWDNGVSE

SEQ ID NO: 66531 - protein, 10 aa, unidentified
  source 1..10: note = methanogen bacteria
LVVLTKIPAD

SEQ ID NO: 66532 - protein, 72 aa, unidentified
  source 1..72: note = methanogen bacteria
FDSYKTALVQTIMKADMQSRIIYISADSWNASGYLDDRGLYLDDEIHLNAKGYEVLDSCIASEILKDIKKKQ

SEQ ID NO: 66533 - protein, 32 aa, unidentified
  source 1..32: note = methanogen bacteria
SSPFGFPPFDLEDLLMDAPETVHLLLSHSFVD

SEQ ID NO: 66534 - protein, 20 aa, unidentified
  source 1..20: note = methanogen bacteria
AVPTVAEIQSGANLTDYLIS

SEQ ID NO: 66535 - protein, 29 aa, unidentified
  source 1..29: note = methanogen bacteria
SFFGFPLFNLEEMLLKFDQTLHLFFIHNP

SEQ ID NO: 66536 - protein, 16 aa, unidentified
  source 1..16: note = methanogen bacteria
FMQSVYEGLFSWTKGG

SEQ ID NO: 66537 - protein, 10 aa, unidentified
  source 1..10: note = methanogen bacteria
ERTLVAGHSL

SEQ ID NO: 66538 - protein, 11 aa, unidentified
  source 1..11: note = methanogen bacteria
NFINDLLNSTY

SEQ ID NO: 66539 - protein, 13 aa, unidentified
  source 1..13: note = methanogen bacteria
LNGIEEEFGAGKL

SEQ ID NO: 66540 - protein, 15 aa, unidentified
  source 1..15: note = methanogen bacteria
ADIDWKSPFLVYAIG

SEQ ID NO: 66541 - protein, 31 aa, unidentified
  source 1..31: note = methanogen bacteria
SEGVNALDSLVIVSNQFTGNGYSAFGNTVSG

SEQ ID NO: 66542 - protein, 31 aa, unidentified
  source 1..31: note = methanogen bacteria
TEGKNPLDALVMVSNAFTSNGYAVLGNSIPG

SEQ ID NO: 66543 - protein, 16 aa, unidentified
  source 1..16: note = methanogen bacteria
GPTSVDLLRNFQIHTF

SEQ ID NO: 66544 - protein, 30 aa, unidentified
  source 1..30: note = methanogen bacteria
ENKNPLDSLVMVSNAFTSNGYAVLGSSIAG

SEQ ID NO: 66545 - protein, 28 aa, unidentified
  source 1..28: note = methanogen bacteria
LGLFSSYILPGPIDVINSAWVVIQNGKL

SEQ ID NO: 66546 - protein, 20 aa, unidentified
  source 1..20: note = methanogen bacteria
GSSSGLGYMILTATNLFDTG

SEQ ID NO: 66547 - protein, 31 aa, unidentified
  source 1..31: note = methanogen bacteria
AEGANALDSLVIVSNQFTGNGYSSFGNTISG

SEQ ID NO: 66548 - protein, 30 aa, unidentified
  source 1..30: note = methanogen bacteria
LGLFSSYILPGPIDVVKSAVVVIQNGKLLT

SEQ ID NO: 66549 - protein, 20 aa, unidentified
  source 1..20: note = methanogen bacteria
GSSSGLGYMILTATNLFDTG

SEQ ID NO: 66550 - protein, 29 aa, unidentified
  source 1..29: note = methanogen bacteria
ENKDPLDSFVMVSNAFTSNGYSVLGNSTL

SEQ ID NO: 66551 - protein, 30 aa, unidentified
  source 1..30: note = methanogen bacteria
LGIVNPYILPGPITVCQSAWELIMNGKLLT

SEQ ID NO: 66552 - protein, 20 aa, unidentified
  source 1..20: note = methanogen bacteria
GSSSGLGYMILTATSLFDPG

SEQ ID NO: 66553 - protein, 10 aa, unidentified
  source 1..10: note = methanogen bacteria
SNVNSSNDIA

SEQ ID NO: 66554 - protein, 10 aa, unidentified
  source 1..10: note = methanogen bacteria
LVGHEIQLGT

SEQ ID NO: 66555 - protein, 31 aa, unidentified
  source 1..31: note = methanogen bacteria
VENKNPLDSLVMVSNAFTSNGYAVLGSSIPG

SEQ ID NO: 66556 - protein, 16 aa, unidentified
  source 1..16: note = methanogen bacteria
GMSAVDMIRDFKLPSL

SEQ ID NO: 66557 - protein, 31 aa, unidentified
  source 1..31: note = methanogen bacteria
AEGANALDSLVIVSNQFTGNGYSAFGNTISG

SEQ ID NO: 66558 - protein, 16 aa, unidentified
  source 1..16: note = methanogen bacteria
MTTSDWFEAILANLFD

SEQ ID NO: 66559 - protein, 31 aa, unidentified
  source 1..31: note = methanogen bacteria
SEGVNALDSIVIVSNQFTGNGYSVFGNTISG

SEQ ID NO: 66560 - protein, 14 aa, unidentified
  source 1..14: note = methanogen bacteria
RWGMDSIFGFDFDP

SEQ ID NO: 66561 - protein, 11 aa, unidentified
  source 1..11: note = methanogen bacteria
LHETVEAEFDF

SEQ ID NO: 66562 - protein, 31 aa, unidentified
  source 1..31: note = methanogen bacteria
SEGKNALDSLVIVSNQFTGNGYSVFGSTISG

SEQ ID NO: 66563 - protein, 31 aa, unidentified; identical to SEQ ID NO: 66557
  source 1..31: note = methanogen bacteria

SEQ ID NO: 66564 - protein, 29 aa, unidentified
  source 1..29: note = methanogen bacteria
ERVNPLDALVMVSNAFTSNGYAVLGHSIL

SEQ ID NO: 66565 - protein, 35 aa, unidentified
  source 1..35: note = methanogen bacteria
TSGFAFTRLAGLNNVENATAAEAASQIFTPDFIAA

SEQ ID NO: 66566 - protein, 31 aa, unidentified
  source 1..31: note = methanogen bacteria
CSPFNFPAFDLEEMLLLWPETIHMIYTHNPV

SEQ ID NO: 66567 - protein, 14 aa, unidentified
  source 1..14: note = methanogen bacteria
RWGMDSIFGFGFDP

SEQ ID NO: 66568 - protein, 31 aa, unidentified
  source 1..31: note = methanogen bacteria
SERVNALDSLVIVSNQFTGNGYSVFGNSISG

SEQ ID NO: 66569 - protein, 13 aa, unidentified
  source 1..13: note = methanogen bacteria
MLDIVNILNQIDN

SEQ ID NO: 66570 - protein, 11 aa, unidentified
  source 1..11: note = methanogen bacteria
STFMDYSFYNP

SEQ ID NO: 66571 - protein, 28 aa, unidentified
  source 1..28: note = methanogen bacteria
LCHSGFDCDSGQLCKYSCNVCPYLPGCF

SEQ ID NO: 66572 - protein, 12 aa, unidentified
  source 1..12: note = methanogen bacteria
ILPAVIPGVGLL

SEQ ID NO: 66573 - protein, 30 aa, unidentified
  source 1..30: note = methanogen bacteria
GPTYGLYDDFYFVMVTLTTVGYGDIIPVTL

SEQ ID NO: 66574 - protein, 31 aa, unidentified
  source 1..31: note = methanogen bacteria
SEGVNALDSLVIVSNEFTGNGYAVFGDTIPG

SEQ ID NO: 66575 - protein, 30 aa, unidentified
  source 1..30: note = methanogen bacteria
AESVNALDSLVMISNEFTGNGYGIFGATIL

SEQ ID NO: 66576 - protein, 31 aa, unidentified
  source 1..31: note = methanogen bacteria
AEGENALDSLVIVSNQFTGNGYSSFGSTISG

SEQ ID NO: 66577 - protein, 18 aa, unidentified
  source 1..18: note = methanogen bacteria
IADSIHPGNAGIGILGGL

SEQ ID NO: 66578 - protein, 22 aa, unidentified
  source 1..22: note = methanogen bacteria
LGSGAVTIGALGATAPGLGVGY

SEQ ID NO: 66579 - protein, 30 aa, unidentified
  source 1..30: note = methanogen bacteria
EGKDALDSLVMVSNAFTSNGYAVLGNSIPG

SEQ ID NO: 66580 - protein, 10 aa, unidentified
  source 1..10: note = methanogen bacteria
FSNGINLDYN

SEQ ID NO: 66581 - protein, 10 aa, unidentified
  source 1..10: note = methanogen bacteria
GELLYSNLES

SEQ ID NO: 66582 - protein, 31 aa, unidentified; identical to SEQ ID NO: 66557
  source 1..31: note = methanogen bacteria

SEQ ID NO: 66583 - protein, 31 aa, unidentified
  source 1..31: note = methanogen bacteria
VEHKNPLDALVMVSNAFTSNGYAVLGKSIPG

SEQ ID NO: 66584 - protein, 31 aa, unidentified
  source 1..31: note = methanogen bacteria
AEGANALDSLVIVSNQFTGNGYSAFGNTVSG

SEQ ID NO: 66585 - protein, 16 aa, unidentified
  source 1..16: note = methanogen bacteria
SPVKEPTVELLARTSP

SEQ ID NO: 66586 - protein, 16 aa, unidentified
  source 1..16: note = methanogen bacteria
IAASFSTKGFAGFAFS

SEQ ID NO: 66587 - protein, 11 aa, unidentified
  source 1..11: note = methanogen bacteria
LKLNFLTSLSN

SEQ ID NO: 66588 - protein, 34 aa, unidentified
  source 1..34: note = methanogen bacteria
HYLLIFINFLKYYLFIKFYNLFNNLSYFVTIHLF

SEQ ID NO: 66589 - protein, 25 aa, unidentified
  source 1..25: note = methanogen bacteria
DHIPGFRSLIFAPIFSILAITSLAG

SEQ ID NO: 66590 - protein, 11 aa, unidentified
  source 1..11: note = methanogen bacteria
HIDSGNLIFTN

SEQ ID NO: 66591 - protein, 13 aa, unidentified
  source 1..13: note = methanogen bacteria
VYLMRDFSVSSTQ

SEQ ID NO: 66592 - protein, 25 aa, unidentified
  source 1..25: note = methanogen bacteria
QDNIPGLNSFLAMSILPLLPINSLF

SEQ ID NO: 66593 - protein, 31 aa, unidentified
  source 1..31: note = methanogen bacteria
VENANAVDSLVMVSNAFTSNGYAILGQSIPG

SEQ ID NO: 66594 - protein, 27 aa, unidentified
  source 1..27: note = methanogen bacteria
FNPDNGDLYEFMSGFYWFISYLGVDIN

SEQ ID NO: 66595 - protein, 16 aa, unidentified
  source 1..16: note = methanogen bacteria
SPVKEPTVELIARTSP

SEQ ID NO: 66596 - protein, 24 aa, unidentified
  source 1..24: note = methanogen bacteria
DNIPALNSFLGMSILPLLPINSLL

SEQ ID NO: 66597 - protein, 10 aa, unidentified
  source 1..10: note = methanogen bacteria
MDSGNLIFTN

SEQ ID NO: 66598 - protein, 22 aa, unidentified
  source 1..22: note = methanogen bacteria
NAIYGWNFIMQIATGGYEVLNT

SEQ ID NO: 66599 - protein, 10 aa, unidentified
  source 1..10: note = methanogen bacteria
RGSIGTNHFT

SEQ ID NO: 66600 - protein, 28 aa, unidentified
  source 1..28: note = methanogen bacteria
YNSLGTNNLSICLFVMFGLHSTSSTLEL

SEQ ID NO: 66601 - protein, 15 aa, unidentified
  source 1..15: note = methanogen bacteria
TIKIPITHDVAITIM

SEQ ID NO: 66602 - protein, 10 aa, unidentified
  source 1..10: note = methanogen bacteria
GQSITLIFEM

SEQ ID NO: 66603 - protein, 41 aa, unidentified; identical to SEQ ID NO: 64577
  source 1..41: note = methanogen bacteria

SEQ ID NO: 66604 - protein, 31 aa, unidentified
  source 1..31: note = methanogen bacteria
VEKANAVDSLVMVSNAFTSNGYVVLGQSIPG

SEQ ID NO: 66605 - protein, 23 aa, unidentified
  source 1..23: note = methanogen bacteria
DNIPGFRELVYAPLFSIVGMNYL

SEQ ID NO: 66606 - protein, 10 aa, unidentified
  source 1..10: note = methanogen bacteria
LDSGNLIFTN

SEQ ID NO: 66607 - protein, 15 aa, unidentified
  source 1..15: note = methanogen bacteria
TIEIPLTKDVAITIM

SEQ ID NO: 66608 - protein, 10 aa, unidentified
  source 1..10: note = methanogen bacteria
GQSIGLIFDM

SEQ ID NO: 66609 - protein, 41 aa, unidentified; identical to SEQ ID NO: 64577
  source 1..41: note = methanogen bacteria

SEQ ID NO: 66610 - protein, 16 aa, unidentified
  source 1..16: note = methanogen bacteria
SPVKEPTAELLARTSP

SEQ ID NO: 66611 - protein, 31 aa, unidentified
  source 1..31: note = methanogen bacteria
FGSSYSLFDYFYFVIVTLATVGYGDIVPLTF

SEQ ID NO: 66612 - protein, 19 aa, unidentified
  source 1..19: note = methanogen bacteria
ALPELQIANYSDFILFITT

SEQ ID NO: 66613 - protein, 15 aa, unidentified
  source 1..15: note = methanogen bacteria
TIEIPITKDVAITIM

SEQ ID NO: 66614 - protein, 10 aa, unidentified
  source 1..10: note = methanogen bacteria
GQSIGLIFQM

SEQ ID NO: 66615 - protein, 41 aa, unidentified; identical to SEQ ID NO: 64833
  source 1..41: note = methanogen bacteria

SEQ ID NO: 66616 - protein, 38 aa, unidentified
  source 1..38: note = methanogen bacteria
LVFAGTKGLSQAVTLLWTFNVPWNWAYHGNVIAPWVSQ

SEQ ID NO: 66617 - protein, 24 aa, unidentified
  source 1..24: note = methanogen bacteria
AYIPGFRDLLFTPLFSIMAFGSFG

SEQ ID NO: 66618 - protein, 11 aa, unidentified
  source 1..11: note = methanogen bacteria
HIDTGNLIFTN

SEQ ID NO: 66619 - protein, 16 aa, unidentified
  source 1..16: note = methanogen bacteria
SPVKEPTVELLARTSP

SEQ ID NO: 66620 - protein, 16 aa, unidentified
  source 1..16: note = methanogen bacteria
SPVKEPTVELLARTSP

SEQ ID NO: 66621 - protein, 16 aa, unidentified
  source 1..16: note = methanogen bacteria
SPVKEPTVELLARTSP

SEQ ID NO: 66622 - protein, 20 aa, unidentified
  source 1..20: note = methanogen bacteria
LISDSFNPGNAAIGFLGGLG

SEQ ID NO: 66623 - protein, 21 aa, unidentified
  source 1..21: note = methanogen bacteria
MGASAVTIGGLGATAPGVGVS

SEQ ID NO: 66624 - protein, 16 aa, unidentified
  source 1..16: note = methanogen bacteria
SPVKEPTVELLARTSP

SEQ ID NO: 66625 - protein, 13 aa, unidentified
  source 1..13: note = methanogen bacteria
LDIVFILNEIDSV

SEQ ID NO: 66626 - protein, 11 aa, unidentified
  source 1..11: note = methanogen bacteria
IDYPFYNPHTT

SEQ ID NO: 66627 - protein, 21 aa, unidentified
  source 1..21: note = methanogen bacteria
YQNIPSMFMLIFQNAFDFQSI

SEQ ID NO: 66628 - protein, 21 aa, unidentified
  source 1..21: note = methanogen bacteria
VTGTMNIGEIITYQSVHGPLI

SEQ ID NO: 66629 - protein, 20 aa, unidentified
  source 1..20: note = methanogen bacteria
LISEGVTPGAAGIGLLGGLG

SEQ ID NO: 66630 - protein, 21 aa, unidentified
  source 1..21: note = methanogen bacteria
LGAPAVAIGGLGATAPGMGVS

SEQ ID NO: 66631 - protein, 32 aa, unidentified
  source 1..32: note = methanogen bacteria
ISSLMHFPEFDLEDMLLELPKTINTLFSHNPV

SEQ ID NO: 66632 - protein, 19 aa, unidentified
  source 1..19: note = methanogen bacteria
ISNTVTPGAAAIGPLGGLG

SEQ ID NO: 66633 - protein, 21 aa, unidentified
  source 1..21: note = methanogen bacteria
LGAPAVTIGGLGATAPGLGVS

SEQ ID NO: 66634 - protein, 16 aa, unidentified
  source 1..16: note = methanogen bacteria
SPVKEPTVELLARTSP

SEQ ID NO: 66635 - protein, 16 aa, unidentified
  source 1..16: note = methanogen bacteria
MGRIVGQSQFEQPLFM

SEQ ID NO: 66636 - protein, 13 aa, unidentified
  source 1..13: note = methanogen bacteria
TIPINGTPLHVFP

SEQ ID NO: 66637 - protein, 20 aa, unidentified
  source 1..20: note = methanogen bacteria
LISESITPGAAGIGLLGGLG

SEQ ID NO: 66638 - protein, 22 aa, unidentified
  source 1..22: note = methanogen bacteria
LGDPAVAVGGLGATAPGLGVGY

SEQ ID NO: 66639 - protein, 31 aa, unidentified
  source 1..31: note = methanogen bacteria
TEQKNPLDSLVMVSNAFTSNGYAVLGKSIPG

SEQ ID NO: 66640 - protein, 19 aa, unidentified
  source 1..19: note = methanogen bacteria
ISESVTPGLAGIGLLGGLG

SEQ ID NO: 66641 - protein, 21 aa, unidentified
  source 1..21: note = methanogen bacteria
LGAPAVAVGGLGATAPGLGVS

SEQ ID NO: 66642 - protein, 16 aa, unidentified
  source 1..16: note = methanogen bacteria
SPVKEPTVELLARTSP

SEQ ID NO: 66643 - protein, 19 aa, unidentified
  source 1..19: note = methanogen bacteria
LIDDGVDPGAAGIGLLGGL

SEQ ID NO: 66644 - protein, 20 aa, unidentified
  source 1..20: note = methanogen bacteria
GAPAVTIGGLGATAPGLSVG

SEQ ID NO: 66645 - protein, 11 aa, unidentified
  source 1..11: note = methanogen bacteria
DTLLGGANLWG

SEQ ID NO: 66646 - protein, 30 aa, unidentified
  source 1..30: note = methanogen bacteria
MELVQFNSGGDLMVARASGKVDIGYVGISP

SEQ ID NO: 66647 - protein, 46 aa, unidentified
  source 1..46: note = methanogen bacteria
VEKEVPVKIISAAQSEGSGIILSKDSNISTVSDLRGKIIATPGEAS

SEQ ID NO: 66648 - protein, 20 aa, unidentified
  source 1..20: note = methanogen bacteria
LISDSVTPGAAGIGLLGGLG

SEQ ID NO: 66649 - protein, 22 aa, unidentified
  source 1..22: note = methanogen bacteria
LGSAAVTVGGLGATAPGMGVGY

SEQ ID NO: 66650 - protein, 11 aa, unidentified
  source 1..11: note = methanogen bacteria
DMLLGGQNLWG

SEQ ID NO: 66651 - protein, 15 aa, unidentified
  source 1..15: note = methanogen bacteria
MDYGYEILKIPFNHL

SEQ ID NO: 66652 - protein, 22 aa, unidentified
  source 1..22: note = methanogen bacteria
AVCPEINNLFNLQIFSGNANNS

SEQ ID NO: 66653 - protein, 11 aa, unidentified
  source 1..11: note = methanogen bacteria
VFIQGVAYNSA

SEQ ID NO: 66654 - protein, 15 aa, unidentified
  source 1..15: note = methanogen bacteria
AGGNIGHDLASVVAF

SEQ ID NO: 66655 - protein, 12 aa, unidentified
  source 1..12: note = methanogen bacteria
DNSQLWNFLEHN

SEQ ID NO: 66656 - protein, 13 aa, unidentified
  source 1..13: note = methanogen bacteria
ALMSGLSELWKRI

SEQ ID NO: 66657 - protein, 31 aa, unidentified
  source 1..31: note = methanogen bacteria
SENVNALDSLVMISNEFTGNGYGIFGNTIPG

SEQ ID NO: 66658 - protein, 20 aa, unidentified
  source 1..20: note = methanogen bacteria
AVPTITDISSGVALNEYFIN

SEQ ID NO: 66659 - protein, 16 aa, unidentified
  source 1..16: note = methanogen bacteria
SPVKEPTVELIARTSP

SEQ ID NO: 66660 - protein, 10 aa, unidentified
  source 1..10: note = methanogen bacteria
FTPIPSNIQF

SEQ ID NO: 66661 - protein, 11 aa, unidentified
  source 1..11: note = methanogen bacteria
VLLPVIIPGIR

SEQ ID NO: 66662 - protein, 30 aa, unidentified
  source 1..30: note = methanogen bacteria
GSSYNLFDYFYFVIVTLATVGYGDVVPTTV

SEQ ID NO: 66663 - protein, 18 aa, unidentified
  source 1..18: note = methanogen bacteria
LIADGVGDAGIGLLGGLG

SEQ ID NO: 66664 - protein, 22 aa, unidentified
  source 1..22: note = methanogen bacteria
LGMQAVTVGGLGATAPGLGVSY

SEQ ID NO: 66665 - protein, 20 aa, unidentified
  source 1..20: note = methanogen bacteria
AVPTISDISSGVALNEYFIN

SEQ ID NO: 66666 - protein, 10 aa, unidentified
  source 1..10: note = methanogen bacteria
LLPVIIPGVN

SEQ ID NO: 66667 - protein, 31 aa, unidentified
  source 1..31: note = methanogen bacteria
FGSSYTLFDYFYLVVVTITTVGYGDIVPLTF

SEQ ID NO: 66668 - protein, 10 aa, unidentified
  source 1..10: note = methanogen bacteria
LLPVIIPGVN

SEQ ID NO: 66669 - protein, 31 aa, unidentified
  source 1..31: note = methanogen bacteria
FGSSYNLFDYFYLVIVTITTVGYGDIVPLTV

SEQ ID NO: 66670 - protein, 12 aa, unidentified
  source 1..12: note = methanogen bacteria
DYAKDILVSSYF

SEQ ID NO: 66671 - protein, 20 aa, unidentified
  source 1..20: note = methanogen bacteria
AVPTISDISSGVALNEYFIT

SEQ ID NO: 66672 - protein, 21 aa, unidentified
  source 1..21: note = methanogen bacteria
AVPTITDISSGVALNGYFIDY

SEQ ID NO: 66673 - protein, 25 aa, unidentified
  source 1..25: note = methanogen bacteria
VAHFPALNFLVGFYAPSMSLIGSLP

SEQ ID NO: 66674 - protein, 20 aa, unidentified
  source 1..20: note = methanogen bacteria
AVPTIADISSGVALNEYFIN

SEQ ID NO: 66675 - protein, 23 aa, unidentified
  source 1..23: note = methanogen bacteria
IGGVVNAFVMIFEYAFDFKSFVG

SEQ ID NO: 66676 - protein, 29 aa, unidentified
  source 1..29: note = methanogen bacteria
YGSYAEITAIGEKGAPLVQAVVASTAIGD

SEQ ID NO: 66677 - protein, 20 aa, unidentified
  source 1..20: note = methanogen bacteria
AVPTVSDITSGATLNEYFLN

SEQ ID NO: 66678 - protein, 24 aa, unidentified
  source 1..24: note = methanogen bacteria
NHFPFLNFLVNFSVPSMSILSSLP

SEQ ID NO: 66679 - protein, 11 aa, unidentified
  source 1..11: note = methanogen bacteria
LVDVNELLFTD

SEQ ID NO: 66680 - protein, 20 aa, unidentified
  source 1..20: note = methanogen bacteria
AVPTIADISSGVGLSDYLVN

SEQ ID NO: 66681 - protein, 13 aa, unidentified
  source 1..13: note = methanogen bacteria
FFKYAVTHDVFHI

SEQ ID NO: 66682 - protein, 11 aa, unidentified
  source 1..11: note = methanogen bacteria
NQSTNSATFFM

SEQ ID NO: 66683 - protein, 24 aa, unidentified
  source 1..24: note = methanogen bacteria
YTIPVKNSFANVRNLIILIGGLFG

SEQ ID NO: 66684 - protein, 11 aa, unidentified
  source 1..11: note = methanogen bacteria
YYFQYVKGFGP

SEQ ID NO: 66685 - protein, 17 aa, unidentified
  source 1..17: note = methanogen bacteria
IMGDLVFSLGYASLIVR

SEQ ID NO: 66686 - protein, 21 aa, unidentified
  source 1..21: note = methanogen bacteria
AVPTMADISSGVVLKDYFINF

SEQ ID NO: 66687 - protein, 11 aa, unidentified
  source 1..11: note = methanogen bacteria
VKDILVSSYFT

SEQ ID NO: 66688 - protein, 25 aa, unidentified
  source 1..25: note = methanogen bacteria
VVHFPALNFLVGFYVPSMSLTGSLP

SEQ ID NO: 66689 - protein, 11 aa, unidentified
  source 1..11: note = methanogen bacteria
VAGLGADALAA

SEQ ID NO: 66690 - protein, 18 aa, unidentified
  source 1..18: note = methanogen bacteria
PILKFMGAGNTIQYAMDY

SEQ ID NO: 66691 - protein, 16 aa, unidentified
  source 1..16: note = methanogen bacteria
SPIKEPTVELLARTSP

SEQ ID NO: 66692 - protein, 18 aa, unidentified
  source 1..18: note = methanogen bacteria
LITEAAGATGIGPLGGLG

SEQ ID NO: 66693 - protein, 21 aa, unidentified
  source 1..21: note = methanogen bacteria
LGAPAVTIGGLGATAPGLGVS

SEQ ID NO: 66694 - protein, 30 aa, unidentified
  source 1..30: note = methanogen bacteria
ENVNPLDSLDMVSNAFTSNGYTVLGNSIGG

SEQ ID NO: 66695 - protein, 16 aa, unidentified
  source 1..16: note = methanogen bacteria
SPVKEPTVELLARTSP

SEQ ID NO: 66696 - protein, 27 aa, unidentified
  source 1..27: note = methanogen bacteria
KAFLGTSPISCIPATLTDCYPEWGLTL

SEQ ID NO: 66697 - protein, 12 aa, unidentified
  source 1..12: note = methanogen bacteria
DYLLFFMNADSY

SEQ ID NO: 66698 - protein, 19 aa, unidentified
  source 1..19: note = methanogen bacteria
NPIPSELIYNKIIWLNGGI

SEQ ID NO: 66699 - protein, 20 aa, unidentified
  source 1..20: note = methanogen bacteria
AVPTAADISSGVALNEYFIS

SEQ ID NO: 66700 - protein, 14 aa, unidentified
  source 1..14: note = methanogen bacteria
EISSGFQFSYQLFS

SEQ ID NO: 66701 - protein, 17 aa, unidentified
  source 1..17: note = methanogen bacteria
MNIFNFIKNIKWNLIDD

SEQ ID NO: 66702 - protein, 16 aa, unidentified
  source 1..16: note = methanogen bacteria
SPVKEPTAELFARTAP

SEQ ID NO: 66703 - protein, 19 aa, unidentified
  source 1..19: note = methanogen bacteria
ALPNFNILTDTDLSYAIES

SEQ ID NO: 66704 - protein, 19 aa, unidentified
  source 1..19: note = methanogen bacteria
AVPTITDISSGVALNEYFL

SEQ ID NO: 66705 - protein, 21 aa, unidentified
  source 1..21: note = methanogen bacteria
YSNIPSMFVLIFQDAFNFRPI

SEQ ID NO: 66706 - protein, 25 aa, unidentified
  source 1..25: note = methanogen bacteria
STGVARDASVAGAPYVQNAIQSVFG

SEQ ID NO: 66707 - protein, 17 aa, unidentified
  source 1..17: note = methanogen bacteria
GVSSMNLLDIRSIGYLL

SEQ ID NO: 66708 - protein, 11 aa, unidentified
  source 1..11: note = methanogen bacteria
VVGLGPEPLVA

SEQ ID NO: 66709 - protein, 16 aa, unidentified
  source 1..16: note = methanogen bacteria
LILLGEGVALDYGIDY

SEQ ID NO: 66710 - protein, 31 aa, unidentified
  source 1..31: note = methanogen bacteria
CSPLDFPEFDLEDMLLDFPQTIHNLYSHNPI

SEQ ID NO: 66711 - protein, 16 aa, unidentified
  source 1..16: note = methanogen bacteria
SPVKEPTTELIARTGP

SEQ ID NO: 66712 - protein, 18 aa, unidentified
  source 1..18: note = methanogen bacteria
TYLFYGYCLWCARYSSPF

SEQ ID NO: 66713 - protein, 18 aa, unidentified
  source 1..18: note = methanogen bacteria
IYLKGLGGYELASIDYFD

SEQ ID NO: 66714 - protein, 13 aa, unidentified
  source 1..13: note = methanogen bacteria
YRGFLSSIVKTNA

SEQ ID NO: 66715 - protein, 32 aa, unidentified
  source 1..32: note = methanogen bacteria
CSPLNFPEFDLEDMLVDFPETIHTLYSHNPVD

SEQ ID NO: 66716 - protein, 13 aa, unidentified
  source 1..13: note = methanogen bacteria
FSSLHQSFYNNNP

SEQ ID NO: 66717 - protein, 19 aa, unidentified
  source 1..19: note = methanogen bacteria
SSQIWADKLGWLNGLMGVS

SEQ ID NO: 66718 - protein, 22 aa, unidentified
  source 1..22: note = methanogen bacteria
MDIIGPIIGGFEMIMEMLQSGG

SEQ ID NO: 66719 - protein, 15 aa, unidentified
  source 1..15: note = methanogen bacteria
NLGIDILLPLHTYIE

SEQ ID NO: 66720 - protein, 25 aa, unidentified
  source 1..25: note = methanogen bacteria
VDNIPGLSSLFTLVLFPNVVNSFVG

SEQ ID NO: 66721 - protein, 19 aa, unidentified
  source 1..19: note = methanogen bacteria
VLPDKEILNYTGFINFLGS

SEQ ID NO: 66722 - protein, 32 aa, unidentified
  source 1..32: note = methanogen bacteria
STFLNFPEFELESLVFNYYQTLHLIRVHDPVS

SEQ ID NO: 66723 - protein, 15 aa, unidentified
  source 1..15: note = methanogen bacteria
MLDFTSLSYQGIVGY

SEQ ID NO: 66724 - protein, 18 aa, unidentified
  source 1..18: note = methanogen bacteria
SMAMEFDPATNVQSTITS

SEQ ID NO: 66725 - protein, 41 aa, unidentified
  source 1..41: note = methanogen bacteria
SDMHYFVIDAIYDSYKLIPIGGANLKGDFLSVMATYITDYF

SEQ ID NO: 66726 - protein, 23 aa, unidentified
  source 1..23: note = methanogen bacteria
PNIVDFLFVEMQKLTKLFMEQMS

SEQ ID NO: 66727 - protein, 24 aa, unidentified
  source 1..24: note = methanogen bacteria
KIVPGLDSFIGISSLSMSIGQISG

SEQ ID NO: 66728 - protein, 10 aa, unidentified
  source 1..10: note = methanogen bacteria
LDSGNLIFTN

SEQ ID NO: 66729 - protein, 19 aa, unidentified
  source 1..19: note = methanogen bacteria
YILGSSELPSDVMAFATQN

SEQ ID NO: 66730 - protein, 35 aa, unidentified
  source 1..35: note = methanogen bacteria
ANIPDPNIYFEEYRPLGLSFVDAMIGGMHQYYHDM

SEQ ID NO: 66731 - protein, 41 aa, unidentified
  source 1..41: note = methanogen bacteria
SLDILHPYAFAMASGIGSASMNAAAISPLVYMFPAMKTDLM

SEQ ID NO: 66732 - protein, 37 aa, unidentified
  source 1..37: note = methanogen bacteria
YTKVPYPHYVPKGDSVLAMWSLGEYAAQMEYYQKMSS

SEQ ID NO: 66733 - protein, 19 aa, unidentified
  source 1..19: note = methanogen bacteria
SSQIWADQLGWLNSLMGIN

SEQ ID NO: 66734 - protein, 27 aa, unidentified
  source 1..27: note = methanogen bacteria
FHFPEFDLEEMIINLHETISLFFEHDP

SEQ ID NO: 66735 - protein, 20 aa, unidentified
  source 1..20: note = methanogen bacteria
AVPTVAVISSDAALDEYFIN

SEQ ID NO: 66736 - protein, 24 aa, unidentified
  source 1..24: note = methanogen bacteria
TLPGASIGINTLINPNWNLLGDIN

SEQ ID NO: 66737 - protein, 35 aa, unidentified
  source 1..35: note = methanogen bacteria
GYMSVTSGTPMIQLVSEGTGLIFVVFPKIFSLMGV

SEQ ID NO: 66738 - protein, 27 aa, unidentified
  source 1..27: note = methanogen bacteria
ASPAIYTNLNPAQFSSDFTGSLLFASL

SEQ ID NO: 66739 - protein, 14 aa, unidentified
  source 1..14: note = methanogen bacteria
IYGPDAAIVKAFSR

SEQ ID NO: 66740 - protein, 22 aa, unidentified
  source 1..22: note = methanogen bacteria
TTGLSNWMGSCLSNMIGPHPSE

SEQ ID NO: 66741 - protein, 11 aa, unidentified
  source 1..11: note = methanogen bacteria
TTALSMGFSPI

SEQ ID NO: 66742 - protein, 11 aa, unidentified
  source 1..11: note = methanogen bacteria
MSGFLIDATLG

SEQ ID NO: 66743 - protein, 10 aa, unidentified
  source 1..10: note = methanogen bacteria
NCPVLFGWEN

SEQ ID NO: 66744 - protein, 17 aa, unidentified
  source 1..17: note = methanogen bacteria
LKGNIDILIGFFMLILI

SEQ ID NO: 66745 - protein, 10 aa, unidentified
  source 1..10: note = methanogen bacteria
FSNGISLDYP

SEQ ID NO: 66746 - protein, 10 aa, unidentified
  source 1..10: note = methanogen bacteria
GKLLYSNLES

SEQ ID NO: 66747 - protein, 12 aa, unidentified
  source 1..12: note = methanogen bacteria
MDIMNFITRPHN

SEQ ID NO: 66748 - protein, 21 aa, unidentified
  source 1..21: note = methanogen bacteria
AVPTMAEISSGAALSEYFLSY

SEQ ID NO: 66749 - protein, 20 aa, unidentified
  source 1..20: note = methanogen bacteria
ISSQVWADQLGWLNSLMGVN

SEQ ID NO: 66750 - protein, 16 aa, unidentified
  source 1..16: note = methanogen bacteria
LVSAVGTKGLSSFALG

SEQ ID NO: 66751 - protein, 22 aa, unidentified
  source 1..22: note = methanogen bacteria
PMDSQVWADKLGVLIFSLNFYF

SEQ ID NO: 66752 - protein, 18 aa, unidentified
  source 1..18: note = methanogen bacteria
YGWNIKVTCYENNIYNSR

SEQ ID NO: 66753 - protein, 10 aa, unidentified
  source 1..10: note = methanogen bacteria
FLELPPAVEV

SEQ ID NO: 66754 - protein, 30 aa, unidentified
  source 1..30: note = methanogen bacteria
GPTYGLFEDFYFVVVTLSTVGYGDVVPETF

SEQ ID NO: 66755 - protein, 31 aa, unidentified
  source 1..31: note = methanogen bacteria
SSPFNFPRFELEDMLLDLPNTMNMLISHNHV

SEQ ID NO: 66756 - protein, 21 aa, unidentified
  source 1..21: note = methanogen bacteria
AVPTVAEISSGVALNEYFINY

SEQ ID NO: 66757 - protein, 30 aa, unidentified
  source 1..30: note = methanogen bacteria
NLNFPDSFNIKEFFLNYSKTMYLFRHHDPV

SEQ ID NO: 66758 - protein, 11 aa, unidentified
  source 1..11: note = methanogen bacteria
VLLPVVIPGVN

SEQ ID NO: 66759 - protein, 32 aa, unidentified
  source 1..32: note = methanogen bacteria
FGTSYSPFDYFYFVIITIATVGYGDIVPLTFE

SEQ ID NO: 66760 - protein, 19 aa, unidentified
  source 1..19: note = methanogen bacteria
SSQIWADQLGWLNSLMGVS

SEQ ID NO: 66761 - protein, 32 aa, unidentified
  source 1..32: note = methanogen bacteria
SNPLNFPEFDLEDLLLQLPETIKLFFSHSPAD

SEQ ID NO: 66762 - protein, 24 aa, unidentified
  source 1..24: note = methanogen bacteria
TLPGAMISLKELFAPDWSLLLDFD

SEQ ID NO: 66763 - protein, 37 aa, unidentified
  source 1..37: note = methanogen bacteria
LGYMSLESGTAVAYLVTQGTGLVFIAYPTVLNVLGQY

SEQ ID NO: 66764 - protein, 20 aa, unidentified
  source 1..20: note = methanogen bacteria
SYFPILNNLILTDDYTSSVF

SEQ ID NO: 66765 - protein, 10 aa, unidentified
  source 1..10: note = methanogen bacteria
IPNIDAFFSN

SEQ ID NO: 66766 - protein, 22 aa, unidentified
  source 1..22: note = methanogen bacteria
HPISEGFNFINGNPQMTERTAE

SEQ ID NO: 66767 - protein, 13 aa, unidentified
  source 1..13: note = methanogen bacteria
MINTDLILNEATE

SEQ ID NO: 66768 - protein, 26 aa, unidentified
  source 1..26: note = methanogen bacteria
GGIITSDPAIQAGAIKVATGKVGMSF

SEQ ID NO: 66769 - protein, 11 aa, unidentified
  source 1..11: note = methanogen bacteria
FLGAEGVNWST

SEQ ID NO: 66770 - protein, 12 aa, unidentified
  source 1..12: note = methanogen bacteria
MDLTQFYEIYSS

SEQ ID NO: 66771 - protein, 20 aa, unidentified
  source 1..20: note = methanogen bacteria
QWVNAGDFHVPFMSLNGGII

SEQ ID NO: 66772 - protein, 12 aa, unidentified
  source 1..12: note = methanogen bacteria
HLDCGEILFTNW

SEQ ID NO: 66773 - protein, 20 aa, unidentified
  source 1..20: note = methanogen bacteria
AVPTFSEISSGVALNEYFIS

SEQ ID NO: 66774 - protein, 22 aa, unidentified
  source 1..22: note = methanogen bacteria
LQVVDSNSIFGSFMSLNIELFG

SEQ ID NO: 66775 - protein, 11 aa, unidentified
  source 1..11: note = methanogen bacteria
HLDSSQILFNN

SEQ ID NO: 66776 - protein, 22 aa, unidentified
  source 1..22: note = methanogen bacteria
LNPTYTIPEFTTQGLYLTDKSI

SEQ ID NO: 66777 - protein, 12 aa, unidentified
  source 1..12: note = methanogen bacteria
FFHSQPPTCSNL

SEQ ID NO: 66778 - protein, 30 aa, unidentified
  source 1..30: note = methanogen bacteria
SSSYPTFLDALFGLFTDPGKLFGSLFAKPS

SEQ ID NO: 66779 - protein, 22 aa, unidentified
  source 1..22: note = methanogen bacteria
LHVVDSNSIFGSFMSLNVGLFG

SEQ ID NO: 66780 - protein, 11 aa, unidentified
  source 1..11: note = methanogen bacteria
HLDSSQILFNN

SEQ ID NO: 66781 - protein, 14 aa, unidentified
  source 1..14: note = methanogen bacteria
IELNISSGVTVSIM

SEQ ID NO: 66782 - protein, 10 aa, unidentified
  source 1..10: note = methanogen bacteria
GQSIHLIFEM

SEQ ID NO: 66783 - protein, 41 aa, unidentified
  source 1..41: note = methanogen bacteria
ELLPLHPYAFAMASGVGSASMNAASLGPTLAAFPALKTQIE

SEQ ID NO: 66784 - protein, 15 aa, unidentified
  source 1..15: note = methanogen bacteria
QFIADNTLMESYSAT

SEQ ID NO: 66785 - protein, 30 aa, unidentified
  source 1..30: note = methanogen bacteria
HPIPSELIYDKIIFLNGGLWWTWMKNIFPI

SEQ ID NO: 66786 - protein, 28 aa, unidentified
  source 1..28: note = methanogen bacteria
YTETFFPSPIETFKGFKEILLNGKLGED

SEQ ID NO: 66787 - protein, 20 aa, unidentified
  source 1..20: note = methanogen bacteria
AANSGLGYLIYTSRLYYRTD

SEQ ID NO: 66788 - protein, 17 aa, unidentified
  source 1..17: note = methanogen bacteria
GSESIKMLYNFQFHGFI

SEQ ID NO: 66789 - protein, 30 aa, unidentified
  source 1..30: note = methanogen bacteria
LTVLPSYMFPGPVEVVNSFIKLWSTGELFT

SEQ ID NO: 66790 - protein, 20 aa, unidentified
  source 1..20: note = methanogen bacteria
IGSSSGIGYMILTSTNIFDT

SEQ ID NO: 66791 - protein, 11 aa, unidentified
  source 1..11: note = methanogen bacteria
MLESNINTLIT

SEQ ID NO: 66792 - protein, 21 aa, unidentified
  source 1..21: note = methanogen bacteria
LNLVPALNFLFGSNTASNSIM

SEQ ID NO: 66793 - protein, 10 aa, unidentified
  source 1..10: note = methanogen bacteria
ADVNSLLFTN

SEQ ID NO: 66794 - protein, 13 aa, unidentified
  source 1..13: note = methanogen bacteria
DLILPMVFSSLRY

SEQ ID NO: 66795 - protein, 31 aa, unidentified
  source 1..31: note = methanogen bacteria
DPNMDLFESLWFVIVTLTTVGYGDITPQTFN

SEQ ID NO: 66796 - protein, 31 aa, unidentified
  source 1..31: note = methanogen bacteria
DSGINDMQTAVWYIIVSMTSTGYGDVVPATL

SEQ ID NO: 66797 - protein, 29 aa, unidentified
  source 1..29: note = methanogen bacteria
FQLIPSFMFPGPTDVANSFVKLVVSGQLF

SEQ ID NO: 66798 - protein, 19 aa, unidentified
  source 1..19: note = methanogen bacteria
GSSSGIGYMILTSTNLFDT

SEQ ID NO: 66799 - protein, 19 aa, unidentified
  source 1..19: note = methanogen bacteria
ALPEVMLVTDGQFLAFLES

SEQ ID NO: 66800 - protein, 28 aa, unidentified
  source 1..28: note = methanogen bacteria
LHLIPPYILPSPLNVVSAIWKLIIDGKL

SEQ ID NO: 66801 - protein, 19 aa, unidentified
  source 1..19: note = methanogen bacteria
ASSNGLGYMILTASQLFQP

SEQ ID NO: 66802 - protein, 28 aa, unidentified
  source 1..28: note = methanogen bacteria
FQLIPVYMFPGPTDVATSFVKLIVSGKL

SEQ ID NO: 66803 - protein, 19 aa, unidentified
  source 1..19: note = methanogen bacteria
GSSSGIGYMILTSTNLFDT

SEQ ID NO: 66804 - protein, 28 aa, unidentified
  source 1..28: note = methanogen bacteria
FHLIPSYMFPGPTDVVNSFVKLVVSGKL

SEQ ID NO: 66805 - protein, 20 aa, unidentified
  source 1..20: note = methanogen bacteria
GSSSGIGYMILTSTSLFDTG

SEQ ID NO: 66806 - protein, 30 aa, unidentified
  source 1..30: note = methanogen bacteria
LNLIPYYILPSPIDVFNAAYALIINGKLLD

SEQ ID NO: 66807 - protein, 21 aa, unidentified
  source 1..21: note = methanogen bacteria
IASSKGLGYMILTASNLFDPG

SEQ ID NO: 66808 - protein, 12 aa, unidentified
  source 1..12: note = methanogen bacteria
PTGTTGPLHVFP

SEQ ID NO: 66809 - protein, 22 aa, unidentified
  source 1..22: note = methanogen bacteria
SLLGLASKAPVDAEAQTTTIIS

SEQ ID NO: 66810 - protein, 30 aa, unidentified
  source 1..30: note = methanogen bacteria
LHLIPYYILPSPLNVFTAAWTLISNGKLFM

SEQ ID NO: 66811 - protein, 20 aa, unidentified
  source 1..20: note = methanogen bacteria
IASSRGLGYMILTASQLFQP

SEQ ID NO: 66812 - protein, 40 aa, unidentified
  source 1..40: note = methanogen bacteria
VGEDQLAAQLSTIISVTRQAPETVGTALRTVYARITDIQA

SEQ ID NO: 66813 - protein, 31 aa, unidentified
  source 1..31: note = methanogen bacteria
RNMGEVMEEIGNKWSTMTKEQKTYLAQTMAG

SEQ ID NO: 66814 - protein, 51 aa, unidentified
  source 1..51: note = methanogen bacteria
EQQDIYMDRLSTHVQQLTTATEHMWMGLTDTDGFKDVIDGLTTIVEKVDKL

SEQ ID NO: 66815 - protein, 30 aa, unidentified
  source 1..30: note = methanogen bacteria
LHMIPYYILPSPVNVFTAAWTLLTNGKLAM

SEQ ID NO: 66816 - protein, 20 aa, unidentified
  source 1..20: note = methanogen bacteria
IASSRGLGYMILTASQLFQP

SEQ ID NO: 66817 - protein, 11 aa, unidentified
  source 1..11: note = methanogen bacteria
VSGFLLGVNTA

SEQ ID NO: 66818 - protein, 26 aa, unidentified
  source 1..26: note = methanogen bacteria
GIAKVFYGNLDLFSNMAPWVAKDIFA

SEQ ID NO: 66819 - protein, 14 aa, unidentified
  source 1..14: note = methanogen bacteria
IEITPTKGVTVSVM

SEQ ID NO: 66820 - protein, 10 aa, unidentified
  source 1..10: note = methanogen bacteria
GQSIHLLLEM

SEQ ID NO: 66821 - protein, 41 aa, unidentified
  source 1..41: note = methanogen bacteria
SILPLHPFAFAMASGVGSASMNAASLGPTLAAFPGLETQIE

SEQ ID NO: 66822 - protein, 29 aa, unidentified
  source 1..29: note = methanogen bacteria
FQLIPSFMFPGPTDVANSFVRLAVSGKLF

SEQ ID NO: 66823 - protein, 19 aa, unidentified
  source 1..19: note = methanogen bacteria
GSSSGIGYMILTSTSLFDT

SEQ ID NO: 66824 - protein, 31 aa, unidentified
  source 1..31: note = methanogen bacteria
DPSMNSLFDSLWFVVSSLTTVGYGDVLPDSM

SEQ ID NO: 66825 - protein, 30 aa, unidentified
  source 1..30: note = methanogen bacteria
LGLIPYYILPSPVNVFNAAFQLIANGKLIE

SEQ ID NO: 66826 - protein, 19 aa, unidentified
  source 1..19: note = methanogen bacteria
ASSKGLGYMILTASQLFDP

SEQ ID NO: 66827 - protein, 29 aa, unidentified
  source 1..29: note = methanogen bacteria
FQLVPGYMFPGPSDVATSFVKLIVSGRLF

SEQ ID NO: 66828 - protein, 19 aa, unidentified
  source 1..19: note = methanogen bacteria
GSSSGIGYMILTSTNLFDT

SEQ ID NO: 66829 - protein, 28 aa, unidentified
  source 1..28: note = methanogen bacteria
LILVPSYMFPGPVEVVNAFIKLLVSGKL

SEQ ID NO: 66830 - protein, 19 aa, unidentified
  source 1..19: note = methanogen bacteria
GSSSGIGYMILTSTNLFDT

SEQ ID NO: 66831 - protein, 12 aa, unidentified
  source 1..12: note = methanogen bacteria
ATVASTDAVAVY

SEQ ID NO: 66832 - protein, 21 aa, unidentified
  source 1..21: note = methanogen bacteria
QIAGVFTYAGTSARLTPSLVA

SEQ ID NO: 66833 - protein, 30 aa, unidentified
  source 1..30: note = methanogen bacteria
LHLIPYYVLPSPVDVLSAAYKIIINGSLLK

SEQ ID NO: 66834 - protein, 20 aa, unidentified
  source 1..20: note = methanogen bacteria
IASTSGLGYMILTASQLFDP

SEQ ID NO: 66835 - protein, 30 aa, unidentified
  source 1..30: note = methanogen bacteria
WGIVNPYILPGPITVCQSAWELILNGKLLT

SEQ ID NO: 66836 - protein, 20 aa, unidentified
  source 1..20: note = methanogen bacteria
GSSSGLGYMILTATSLFDPG

SEQ ID NO: 66837 - protein, 16 aa, unidentified
  source 1..16: note = methanogen bacteria
ILDFVPSVNLFNSFLT

SEQ ID NO: 66838 - protein, 11 aa, unidentified
  source 1..11: note = methanogen bacteria
MDPNKILFTNT

SEQ ID NO: 66839 - protein, 10 aa, unidentified
  source 1..10: note = methanogen bacteria
DMFVKGSFLN

SEQ ID NO: 66840 - protein, 20 aa, unidentified
  source 1..20: note = methanogen bacteria
ALPGIELLNEMDFITFLQSN

SEQ ID NO: 66841 - protein, 16 aa, unidentified
  source 1..16: note = methanogen bacteria
LVITPEFNFGFNAIST

SEQ ID NO: 66842 - protein, 11 aa, unidentified
  source 1..11: note = methanogen bacteria
LDGNHIFFTNS

SEQ ID NO: 66843 - protein, 28 aa, unidentified
  source 1..28: note = methanogen bacteria
LGLFSAYILPGPLDVLNSAWVVIENGKL

SEQ ID NO: 66844 - protein, 20 aa, unidentified
  source 1..20: note = methanogen bacteria
GSSSGLGYMILTATNLFDTG

SEQ ID NO: 66845 - protein, 30 aa, unidentified
  source 1..30: note = methanogen bacteria
LGLFSSYILPGPLDVLNSARVVIENGKLLT

SEQ ID NO: 66846 - protein, 20 aa, unidentified
  source 1..20: note = methanogen bacteria
GSSSGLGYMILTATNLFDTG

SEQ ID NO: 66847 - protein, 28 aa, unidentified
  source 1..28: note = methanogen bacteria
FGIVNPYILPGPIEVCKSAWELIVSGKL

SEQ ID NO: 66848 - protein, 20 aa, unidentified
  source 1..20: note = methanogen bacteria
GSSSGLGYMILTATSLFDPG

SEQ ID NO: 66849 - protein, 16 aa, unidentified
  source 1..16: note = methanogen bacteria
LGIVPSFNLFNSFLTG

SEQ ID NO: 66850 - protein, 11 aa, unidentified
  source 1..11: note = methanogen bacteria
FDSDKVLFTDG

SEQ ID NO: 66851 - protein, 21 aa, unidentified
  source 1..21: note = methanogen bacteria
FLGIPMAKNSAEAALHSIFPF

SEQ ID NO: 66852 - protein, 30 aa, unidentified
  source 1..30: note = methanogen bacteria
LGLFSSYILPGPLDVVNSAWVVIENGKLLT

SEQ ID NO: 66853 - protein, 21 aa, unidentified
  source 1..21: note = methanogen bacteria
IGSSSGLGYMILTATNLFDTG

SEQ ID NO: 66854 - protein, 17 aa, unidentified
  source 1..17: note = methanogen bacteria
GIYIISSDMIMNYTLFS

SEQ ID NO: 66855 - protein, 23 aa, unidentified
  source 1..23: note = methanogen bacteria
YVAVFAPEINMAEAGTLFFSHMW

SEQ ID NO: 66856 - protein, 10 aa, unidentified
  source 1..10: note = methanogen bacteria
MGVQNINIQY

SEQ ID NO: 66857 - protein, 28 aa, unidentified
  source 1..28: note = methanogen bacteria
FHIVNPYILPGPIEVCNSAWDLILSGKL

SEQ ID NO: 66858 - protein, 20 aa, unidentified
  source 1..20: note = methanogen bacteria
IGSSSGLGYMILQATSRFDP

SEQ ID NO: 66859 - protein, 44 aa, unidentified; identical to SEQ ID NO: 66311
  source 1..44: note = methanogen bacteria

SEQ ID NO: 66860 - protein, 30 aa, unidentified
  source 1..30: note = methanogen bacteria
LGIVDLYKLPGPITVCQAAWILILNGKLLT

SEQ ID NO: 66861 - protein, 20 aa, unidentified
  source 1..20: note = methanogen bacteria
GSGSGLGYMILTATSLFDPG

SEQ ID NO: 66862 - protein, 28 aa, unidentified
  source 1..28: note = methanogen bacteria
LGLVNPYILPGPITVCQSAWSLILSGKL

SEQ ID NO: 66863 - protein, 20 aa, unidentified
  source 1..20: note = methanogen bacteria
GSSSGLGYMILTATSLFDPG

SEQ ID NO: 66864 - protein, 10 aa, unidentified
  source 1..10: note = methanogen bacteria
NHKHNAHICL

SEQ ID NO: 66865 - protein, 28 aa, unidentified
  source 1..28: note = methanogen bacteria
LGIISAYILPGPADVIYAASSVIVNGKL

SEQ ID NO: 66866 - protein, 20 aa, unidentified
  source 1..20: note = methanogen bacteria
GSSTGLGYMILTASNLFDTG

SEQ ID NO: 66867 - protein, 15 aa, unidentified
  source 1..15: note = methanogen bacteria
SANFNLNSILPFSIT

SEQ ID NO: 66868 - protein, 12 aa, unidentified
  source 1..12: note = methanogen bacteria
FIDKQEIIFNNV

SEQ ID NO: 66869 - protein, 28 aa, unidentified
  source 1..28: note = methanogen bacteria
LGLVNPYILPGPITVCQSAWELILNGKL

SEQ ID NO: 66870 - protein, 20 aa, unidentified
  source 1..20: note = methanogen bacteria
GSSSGLGYMILTATSLFDPG

SEQ ID NO: 66871 - protein, 15 aa, unidentified
  source 1..15: note = methanogen bacteria
ILKGVNSFNAFNTFL

SEQ ID NO: 66872 - protein, 11 aa, unidentified
  source 1..11: note = methanogen bacteria
LDSGEILFTNN

SEQ ID NO: 66873 - protein, 30 aa, unidentified
  source 1..30: note = methanogen bacteria
LGLVNPYILPGPITVVESAWTLILNGKLLT

SEQ ID NO: 66874 - protein, 20 aa, unidentified
  source 1..20: note = methanogen bacteria
GSSSGLGYMILTATSLFDPG

SEQ ID NO: 66875 - protein, 28 aa, unidentified
  source 1..28: note = methanogen bacteria
LGLFSSYILPGPLDVINSAWVVIQNGKL

SEQ ID NO: 66876 - protein, 21 aa, unidentified
  source 1..21: note = methanogen bacteria
IGSSSGLGYMILTATNLFDTG

SEQ ID NO: 66877 - protein, 13 aa, unidentified
  source 1..13: note = methanogen bacteria
GSITTLLKSQTLL

SEQ ID NO: 66878 - protein, 11 aa, unidentified
  source 1..11: note = methanogen bacteria
TTVLGNAGVNY

SEQ ID NO: 66879 - protein, 10 aa, unidentified
  source 1..10: note = methanogen bacteria
GLLPIPLFLL

SEQ ID NO: 66880 - protein, 20 aa, unidentified
  source 1..20: note = methanogen bacteria
LGIHMATNTADAALHSFFPF

SEQ ID NO: 66881 - protein, 15 aa, unidentified
  source 1..15: note = methanogen bacteria
LDIVPSFNLFNSFLT

SEQ ID NO: 66882 - protein, 11 aa, unidentified
  source 1..11: note = methanogen bacteria
MDPNKILFTNS

SEQ ID NO: 66883 - protein, 27 aa, unidentified
  source 1..27: note = methanogen bacteria
KAFLGTSPISCIPATLTDCFPEWGLTL

SEQ ID NO: 66884 - protein, 19 aa, unidentified
  source 1..19: note = methanogen bacteria
NSILDIVPSGNAFNSFLTG

SEQ ID NO: 66885 - protein, 11 aa, unidentified
  source 1..11: note = methanogen bacteria
LDPNKILFTNN

SEQ ID NO: 66886 - protein, 11 aa, unidentified
  source 1..11: note = methanogen bacteria
TSQYIRSGGTI

SEQ ID NO: 66887 - protein, 15 aa, unidentified
  source 1..15: note = methanogen bacteria
IRFASAEFLITGTGM

SEQ ID NO: 66888 - protein, 24 aa, unidentified
  source 1..24: note = methanogen bacteria
ISPAINWISQQLFNLISLIAIGHI

SEQ ID NO: 66889 - protein, 19 aa, unidentified
  source 1..19: note = methanogen bacteria
FAENHVHNVIPFINQEVTP

SEQ ID NO: 66890 - protein, 67 aa, unidentified
  source 1..67: note = methanogen bacteria
MSPIDPVKAYLGQRIVSQEQLAIMGEYWGTNLSLGERVMGWLQTLASGSMGFSLIYRVPVTEVIIQK

SEQ ID NO: 66891 - protein, 29 aa, unidentified
  source 1..29: note = methanogen bacteria
VYLGWFPIGLSVPIGQLSDTVTFWQWLYR

SEQ ID NO: 66892 - protein, 13 aa, unidentified
  source 1..13: note = methanogen bacteria
LLTIVGLNPILQN

SEQ ID NO: 66893 - protein, 19 aa, unidentified
  source 1..19: note = methanogen bacteria
NPIPSELIYDKINFLNGGL

SEQ ID NO: 66894 - protein, 16 aa, unidentified
  source 1..16: note = methanogen bacteria
NFILKTTALNFASNSL

SEQ ID NO: 66895 - protein, 10 aa, unidentified
  source 1..10: note = methanogen bacteria
DSNNILFTND

SEQ ID NO: 66896 - protein, 17 aa, unidentified
  source 1..17: note = methanogen bacteria
DHVLNFIPSFGLSHSIT

SEQ ID NO: 66897 - protein, 11 aa, unidentified
  source 1..11: note = methanogen bacteria
IDSGKVLFTNG

SEQ ID NO: 66898 - protein, 36 aa, unidentified
  source 1..36: note = methanogen bacteria
ITACVYRPWVLDSRVQPLKDAFHGASGYSFPSGHTT

SEQ ID NO: 66899 - protein, 21 aa, unidentified
  source 1..21: note = methanogen bacteria
TKSYPMDYDAAGKLLVDPAKL

SEQ ID NO: 66900 - protein, 17 aa, unidentified
  source 1..17: note = methanogen bacteria
LDDVIKVSDNVMYAEHE

SEQ ID NO: 66901 - protein, 15 aa, unidentified
  source 1..15: note = methanogen bacteria
GLTHSIHQATGINVS

SEQ ID NO: 66902 - protein, 38 aa, unidentified
  source 1..38: note = methanogen bacteria
MKIIACIYRPWILDPRVHPVKEAIPTATGYSFPSGHTT

SEQ ID NO: 66903 - protein, 22 aa, unidentified
  source 1..22: note = methanogen bacteria
TKSYPLDYNSAGKLIVDPAIMT

SEQ ID NO: 66904 - protein, 10 aa, unidentified
  source 1..10: note = methanogen bacteria
SQMNAESFFA

SEQ ID NO: 66905 - protein, 13 aa, unidentified
  source 1..13: note = methanogen bacteria
LTYMGATSSFDSN

SEQ ID NO: 66906 - protein, 14 aa, unidentified
  source 1..14: note = methanogen bacteria
YFHFRFRLGSQRCR

SEQ ID NO: 66907 - protein, 85 aa, unidentified
  source 1..85: note = methanogen bacteria
MAICNNCTFTNNYAKNGGAIFSQGELYLNNCIFNENTGYGTGNDILNVDNGKVFMNGEQVNGTQGTVKYVKSISDLSSSLITTVA

SEQ ID NO: 66908 - protein, 32 aa, unidentified
  source 1..32: note = methanogen bacteria
YAAYAITSDQYNLAFNRLNTAISIISGTVAFG

SEQ ID NO: 66909 - protein, 42 aa, unidentified
  source 1..42: note = methanogen bacteria
TNIKNIVNQGTYNGVIEFEGGTIIEFDSKDYKFSGKWKFTQN

SEQ ID NO: 66910 - protein, 29 aa, unidentified
  source 1..29: note = methanogen bacteria
LNLVPYYILPSPLDVCNAALKLVANGKLL

SEQ ID NO: 66911 - protein, 19 aa, unidentified
  source 1..19: note = methanogen bacteria
ASSKGLGYMILTASQLFDP

SEQ ID NO: 66912 - protein, 16 aa, unidentified
  source 1..16: note = methanogen bacteria
GLIETGFGLYSFNCYL

SEQ ID NO: 66913 - protein, 19 aa, unidentified
  source 1..19: note = methanogen bacteria
IVDKYVLAKKFAFLANMDP

SEQ ID NO: 66914 - protein, 15 aa, unidentified
  source 1..15: note = methanogen bacteria
ITQAPATDNPAAKFG

SEQ ID NO: 66915 - protein, 28 aa, unidentified
  source 1..28: note = methanogen bacteria
NDLNIVSSAVNAFLAIGNEVISCMADPW

SEQ ID NO: 66916 - protein, 31 aa, unidentified
  source 1..31: note = methanogen bacteria
ASGFKSIGMDVSGFGIFLQTMANEKSRTRGT

SEQ ID NO: 66917 - protein, 38 aa, unidentified
  source 1..38: note = methanogen bacteria
ADEAAFQGSNNGLFAFFSNTNGTGFPILDSSLTAITQA

SEQ ID NO: 66918 - protein, 17 aa, unidentified
  source 1..17: note = methanogen bacteria
PGLAALGTGDVTTLASA

SEQ ID NO: 66919 - protein, 16 aa, unidentified
  source 1..16: note = methanogen bacteria
NFILKTTALNLASNSL

SEQ ID NO: 66920 - protein, 10 aa, unidentified
  source 1..10: note = methanogen bacteria
DSNNVLFTND

SEQ ID NO: 66921 - protein, 10 aa, unidentified
  source 1..10: note = methanogen bacteria
NPSLTGPSSM

SEQ ID NO: 66922 - protein, 38 aa, unidentified
  source 1..38: note = methanogen bacteria
MKVFACVYRPWILDSRVHPVKEAITTATGYSFPSGHTT

SEQ ID NO: 66923 - protein, 22 aa, unidentified
  source 1..22: note = methanogen bacteria
TKSYPLDYDAAGKLIVDPAILT

SEQ ID NO: 66924 - protein, 11 aa, unidentified
  source 1..11: note = methanogen bacteria
GFVTGSINFGA

SEQ ID NO: 66925 - protein, 11 aa, unidentified
  source 1..11: note = methanogen bacteria
NCPLDFEPYPS

SEQ ID NO: 66926 - protein, 18 aa, unidentified
  source 1..18: note = methanogen bacteria
NLYATSDARAMAYIGNLA

SEQ ID NO: 66927 - protein, 13 aa, unidentified
  source 1..13: note = methanogen bacteria
VGISSLGNAALGA

SEQ ID NO: 66928 - protein, 31 aa, unidentified
  source 1..31: note = methanogen bacteria
LHLVKPYVLPSPVDVLYSAIDILQSGKLVQN

SEQ ID NO: 66929 - protein, 21 aa, unidentified
  source 1..21: note = methanogen bacteria
IGSSSGLGYMILTATNLFDTG

SEQ ID NO: 66930 - protein, 20 aa, unidentified
  source 1..20: note = methanogen bacteria
ALPGVELLTETDFITFLQAN

SEQ ID NO: 66931 - protein, 12 aa, unidentified
  source 1..12: note = methanogen bacteria
KLPSVTGSCSHP

SEQ ID NO: 66932 - protein, 10 aa, unidentified
  source 1..10: note = methanogen bacteria
AFPTPSFGSA

SEQ ID NO: 66933 - protein, 15 aa, unidentified
  source 1..15: note = methanogen bacteria
AFSIFSITGMENEIF

SEQ ID NO: 66934 - protein, 15 aa, unidentified
  source 1..15: note = methanogen bacteria
YNKKNTYVRIYESQK

SEQ ID NO: 66935 - protein, 17 aa, unidentified
  source 1..17: note = methanogen bacteria
FFVQRDTVRYYTENNDT

SEQ ID NO: 66936 - protein, 39 aa, unidentified
  source 1..39: note = methanogen bacteria
YTQNNDTVNLNIDVKAKELEWVNADFKLHDQFMIINREK

SEQ ID NO: 66937 - protein, 30 aa, unidentified
  source 1..30: note = methanogen bacteria
LHLVKPFILPSPVGVLNSAINILQSGKLFK

SEQ ID NO: 66938 - protein, 20 aa, unidentified
  source 1..20: note = methanogen bacteria
IGSSSGLGYMILTASNLFDT

SEQ ID NO: 66939 - protein, 10 aa, unidentified
  source 1..10: note = methanogen bacteria
VKEPVKEPVK

SEQ ID NO: 66940 - protein, 10 aa, unidentified
  source 1..10: note = methanogen bacteria
MIIENIDIPP

SEQ ID NO: 66941 - protein, 10 aa, unidentified
  source 1..10: note = methanogen bacteria
PLDFEPFPNF

SEQ ID NO: 66942 - protein, 16 aa, unidentified
  source 1..16: note = methanogen bacteria
HLFATDEARELAYSGD

SEQ ID NO: 66943 - protein, 19 aa, unidentified
  source 1..19: note = methanogen bacteria
ALPGVQLLTEGDFIAFLQS

SEQ ID NO: 66944 - protein, 30 aa, unidentified
  source 1..30: note = methanogen bacteria
ISLVKPYVLPSPVAVLYSAISIIQSGKLLQ

SEQ ID NO: 66945 - protein, 20 aa, unidentified
  source 1..20: note = methanogen bacteria
IGSSSGLGYMILTATNLFDP

SEQ ID NO: 66946 - protein, 29 aa, unidentified
  source 1..29: note = methanogen bacteria
ERLNFPEFNMEEGLVGFEKILMLLFNHDI

SEQ ID NO: 66947 - protein, 11 aa, unidentified
  source 1..11: note = methanogen bacteria
STAMVSSNIAG

SEQ ID NO: 66948 - protein, 13 aa, unidentified
  source 1..13: note = methanogen bacteria
NTAVNESTFVTDP

SEQ ID NO: 66949 - protein, 12 aa, unidentified
  source 1..12: note = methanogen bacteria
NYNPVAVNWIGT

SEQ ID NO: 66950 - protein, 31 aa, unidentified
  source 1..31: note = methanogen bacteria
SSFNFAWGNDAGSFFTNVVGGSHNLNSMTTF

SEQ ID NO: 66951 - protein, 43 aa, unidentified
  source 1..43: note = methanogen bacteria
TLPGAGIGINTLLTPDWSKLLDVNIWLAKYGSGNCDYLCKLFA

SEQ ID NO: 66952 - protein, 27 aa, unidentified
  source 1..27: note = methanogen bacteria
MCLLEELIKNISKDWSTLDKNELKSYM

SEQ ID NO: 66953 - protein, 11 aa, unidentified
  source 1..11: note = methanogen bacteria
MGAFLTAAAVG

SEQ ID NO: 66954 - protein, 23 aa, unidentified
  source 1..23: note = methanogen bacteria
HPIPSEQIYDKIMFLNGGAWNGG

SEQ ID NO: 66955 - protein, 11 aa, unidentified
  source 1..11: note = methanogen bacteria
SGFLFSAEAAG

SEQ ID NO: 66956 - protein, 20 aa, unidentified
  source 1..20: note = methanogen bacteria
FSGTPTASNAALESSMDIIF

SEQ ID NO: 66957 - protein, 15 aa, unidentified
  source 1..15: note = methanogen bacteria
GIFTGTLGFDMAAAG

SEQ ID NO: 66958 - protein, 10 aa, unidentified
  source 1..10: note = methanogen bacteria
ANAVGGYGES

SEQ ID NO: 66959 - protein, 10 aa, unidentified
  source 1..10: note = methanogen bacteria
TGILGFNMAA

SEQ ID NO: 66960 - protein, 13 aa, unidentified
  source 1..13: note = methanogen bacteria
RSGGIHHQHNHVR

SEQ ID NO: 66961 - protein, 13 aa, unidentified
  source 1..13: note = methanogen bacteria
ISGALLGADVMGG

SEQ ID NO: 66962 - protein, 11 aa, unidentified
  source 1..11: note = methanogen bacteria
SGLVFGSSMVG

SEQ ID NO: 66963 - protein, 10 aa, unidentified
  source 1..10: note = methanogen bacteria
SAIGGYGESV

SEQ ID NO: 66964 - protein, 14 aa, unidentified
  source 1..14: note = methanogen bacteria
GIFTGSLGFDMAAG

SEQ ID NO: 66965 - protein, 10 aa, unidentified
  source 1..10: note = methanogen bacteria
SSIGGYGESA

SEQ ID NO: 66966 - protein, 12 aa, unidentified
  source 1..12: note = methanogen bacteria
IFTGTLGFAMAA

SEQ ID NO: 66967 - protein, 13 aa, unidentified
  source 1..13: note = methanogen bacteria
ISGFALGADAASG

SEQ ID NO: 66968 - protein, 12 aa, unidentified
  source 1..12: note = methanogen bacteria
LSGFVFGSNVAG

SEQ ID NO: 66969 - protein, 19 aa, unidentified
  source 1..19: note = methanogen bacteria
FINNGQTFPSIYNIGITMP

SEQ ID NO: 66970 - protein, 21 aa, unidentified
  source 1..21: note = methanogen bacteria
SGTPASSIGALGGVGPFGDIG

SEQ ID NO: 66971 - protein, 10 aa, unidentified
  source 1..10: note = methanogen bacteria
NYFVTGANAF

SEQ ID NO: 66972 - protein, 13 aa, unidentified
  source 1..13: note = methanogen bacteria
ISGFALGADAASG

SEQ ID NO: 66973 - protein, 10 aa, unidentified
  source 1..10: note = methanogen bacteria
DSSLYAQDSD

SEQ ID NO: 66974 - protein, 22 aa, unidentified
  source 1..22: note = methanogen bacteria
NPMPSEWIYDKIIFLNGGSGWI

SEQ ID NO: 66975 - protein, 10 aa, unidentified
  source 1..10: note = methanogen bacteria
FNTEPISVPD

SEQ ID NO: 66976 - protein, 25 aa, unidentified
  source 1..25: note = methanogen bacteria
FPTPPEFISSQLINIDELINNFLSM

SEQ ID NO: 66977 - protein, 32 aa, unidentified
  source 1..32: note = methanogen bacteria
FDPTINSLYESLWFVFQTITTVGYGDIIPQSQ

SEQ ID NO: 66978 - protein, 14 aa, unidentified
  source 1..14: note = methanogen bacteria
IVTSLAEYAHYALP

SEQ ID NO: 66979 - protein, 16 aa, unidentified
  source 1..16: note = methanogen bacteria
FGHMLFTYQPVLNYII

SEQ ID NO: 66980 - protein, 13 aa, unidentified
  source 1..13: note = methanogen bacteria
FSGLLFSAEAASG

SEQ ID NO: 66981 - protein, 37 aa, unidentified
  source 1..37: note = methanogen bacteria
ADEAAFQSSNGLLNMFSTTNGTGLPILDSSLTAITQA

SEQ ID NO: 66982 - protein, 17 aa, unidentified
  source 1..17: note = methanogen bacteria
PGLAALGTGDVTTLASA

SEQ ID NO: 66983 - protein, 13 aa, unidentified
  source 1..13: note = methanogen bacteria
LSTAILGINPSSI

SEQ ID NO: 66984 - protein, 27 aa, unidentified
  source 1..27: note = methanogen bacteria
FNFPTFDFEEFFLKLPETIHLIYTHNP

SEQ ID NO: 66985 - protein, 12 aa, unidentified
  source 1..12: note = methanogen bacteria
SYESILNLASTS

SEQ ID NO: 66986 - protein, 17 aa, unidentified
  source 1..17: note = methanogen bacteria
APVISLPIAGKPMNFSM

SEQ ID NO: 66987 - protein, 18 aa, unidentified
  source 1..18: note = methanogen bacteria
PTLATTLNAPVSELELIS

SEQ ID NO: 66988 - protein, 10 aa, unidentified
  source 1..10: note = methanogen bacteria
QIASASPLNS

SEQ ID NO: 66989 - protein, 17 aa, unidentified
  source 1..17: note = methanogen bacteria
AMGGYNLMPVANSETLT

SEQ ID NO: 66990 - protein, 15 aa, unidentified
  source 1..15: note = methanogen bacteria
WRAGSHHSGPLHSHN

SEQ ID NO: 66991 - protein, 11 aa, unidentified
  source 1..11: note = methanogen bacteria
IRSLSGAGLNS

SEQ ID NO: 66992 - protein, 11 aa, unidentified
  source 1..11: note = methanogen bacteria
VNGAKGTYQFS

SEQ ID NO: 66993 - protein, 10 aa, unidentified
  source 1..10: note = methanogen bacteria
GLVTSTSSPQ

SEQ ID NO: 66994 - protein, 29 aa, unidentified
  source 1..29: note = methanogen bacteria
LFDFPSFEMEELVLKLPETIHQIYTHNPV

SEQ ID NO: 66995 - protein, 13 aa, unidentified
  source 1..13: note = methanogen bacteria
FSGFILGVDASGI

SEQ ID NO: 66996 - protein, 12 aa, unidentified
  source 1..12: note = methanogen bacteria
GFSGFMLGADAG

SEQ ID NO: 66997 - protein, 12 aa, unidentified
  source 1..12: note = methanogen bacteria
ISGSILGVDAGG

SEQ ID NO: 66998 - protein, 13 aa, unidentified
  source 1..13: note = methanogen bacteria
GISGALLGANTGG

SEQ ID NO: 66999 - protein, 10 aa, unidentified
  source 1..10: note = methanogen bacteria
ESILSSTFFS

SEQ ID NO: 67000 - protein, 17 aa, unidentified
  source 1..17: note = methanogen bacteria
PSFLFSAQNFSFNLTMI

SEQ ID NO: 67001 - protein, 17 aa, unidentified
  source 1..17: note = methanogen bacteria
NMAPVFANPSTELSLMP

SEQ ID NO: 67002 - protein, 16 aa, unidentified
  source 1..16: note = methanogen bacteria
IASATDSLGDSVDVAG

SEQ ID NO: 67003 - protein, 14 aa, unidentified
  source 1..14: note = methanogen bacteria
GFSGAMLGIDPTGI

SEQ ID NO: 67004 - protein, 22 aa, unidentified
  source 1..22: note = methanogen bacteria
NPVSSQAIYDRIIFLNGGSHWM

SEQ ID NO: 67005 - protein, 30 aa, unidentified
  source 1..30: note = methanogen bacteria
VFDFPSFEVEEFILKFPETIHLIYTHSPVD

SEQ ID NO: 67006 - protein, 13 aa, unidentified
  source 1..13: note = methanogen bacteria
FSGAILGANPGGI

SEQ ID NO: 67007 - protein, 10 aa, unidentified
  source 1..10: note = methanogen bacteria
YESLIGLTVN

SEQ ID NO: 67008 - protein, 15 aa, unidentified
  source 1..15: note = methanogen bacteria
PSFVFDTANFSMTIS

SEQ ID NO: 67009 - protein, 18 aa, unidentified
  source 1..18: note = methanogen bacteria
VPTISQVLEYPSTQLTLM

SEQ ID NO: 67010 - protein, 11 aa, unidentified
  source 1..11: note = methanogen bacteria
YEFILNLASTS

SEQ ID NO: 67011 - protein, 11 aa, unidentified
  source 1..11: note = methanogen bacteria
LPVAGKPMNFT

SEQ ID NO: 67012 - protein, 17 aa, unidentified
  source 1..17: note = methanogen bacteria
TLATTLNAPVSELELIS

SEQ ID NO: 67013 - protein, 35 aa, unidentified
  source 1..35: note = methanogen bacteria
ANEAMYQSGGGLSVSSGMNWTSQFLDTSMSAITQG

SEQ ID NO: 67014 - protein, 17 aa, unidentified
  source 1..17: note = methanogen bacteria
PGLAALGTGDVTALASA

SEQ ID NO: 67015 - protein, 10 aa, unidentified
  source 1..10: note = methanogen bacteria
YETVISLTVN

SEQ ID NO: 67016 - protein, 15 aa, unidentified
  source 1..15: note = methanogen bacteria
PSFVFNSANVSLTIT

SEQ ID NO: 67017 - protein, 12 aa, unidentified
  source 1..12: note = methanogen bacteria
GKVLENPSTQLT

SEQ ID NO: 67018 - protein, 19 aa, unidentified
  source 1..19: note = methanogen bacteria
NPISSQLIYDKIIFLNGGM

SEQ ID NO: 67019 - protein, 13 aa, unidentified
  source 1..13: note = methanogen bacteria
ISGAVLGADPSGV

SEQ ID NO: 67020 - protein, 14 aa, unidentified
  source 1..14: note = methanogen bacteria
TAFDEGHSFEALFT

SEQ ID NO: 67021 - protein, 13 aa, unidentified
  source 1..13: note = methanogen bacteria
AGLEGLTLKLIIT

SEQ ID NO: 67022 - protein, 26 aa, unidentified
  source 1..26: note = methanogen bacteria
GQNWAPFVPWVCPYLIASGEIAKYGA

SEQ ID NO: 67023 - protein, 32 aa, unidentified
  source 1..32: note = methanogen bacteria
PEQVAEYVKPIADAFEENVANGTVELTTQSLF

SEQ ID NO: 67024 - protein, 16 aa, unidentified
  source 1..16: note = methanogen bacteria
GYTGANFNLLAYAALV

SEQ ID NO: 67025 - protein, 13 aa, unidentified
  source 1..13: note = methanogen bacteria
AKVFLSFFGIGIA

SEQ ID NO: 67026 - protein, 10 aa, unidentified
  source 1..10: note = methanogen bacteria
YESLIGLTVN

SEQ ID NO: 67027 - protein, 15 aa, unidentified
  source 1..15: note = methanogen bacteria
PSFVFDTANFSMTIS

SEQ ID NO: 67028 - protein, 17 aa, unidentified
  source 1..17: note = methanogen bacteria
VPTISQVLEYPSTQLTL

SEQ ID NO: 67029 - protein, 42 aa, unidentified
  source 1..42: note = methanogen bacteria
TCPYCGSESVYETGGYYRCAECGNSIYSPDELELGYWDGYME

SEQ ID NO: 67030 - protein, 33 aa, unidentified
  source 1..33: note = methanogen bacteria
ADSISEYIQPMVDNFQKQVDEGVITLTTHSIFT

SEQ ID NO: 67031 - protein, 11 aa, unidentified
  source 1..11: note = methanogen bacteria
YFGADFNIYAY

SEQ ID NO: 67032 - protein, 37 aa, unidentified
  source 1..37: note = methanogen bacteria
KHGLISFYFFNSFFTLLFFLFLLLFSFFLIFLIFLDF

SEQ ID NO: 67033 - protein, 10 aa, unidentified
  source 1..10: note = methanogen bacteria
GNLSGAASSA

SEQ ID NO: 67034 - protein, 14 aa, unidentified
  source 1..14: note = methanogen bacteria
GISGAVLGADPSGI

SEQ ID NO: 67035 - protein, 12 aa, unidentified
  source 1..12: note = methanogen bacteria
FSGLMLGINTSG

SEQ ID NO: 67036 - protein, 13 aa, unidentified
  source 1..13: note = methanogen bacteria
GFSTAVLGIDPTG

SEQ ID NO: 67037 - protein, 19 aa, unidentified
  source 1..19: note = methanogen bacteria
NPIPSEIIYEKLMFVSGGM

SEQ ID NO: 67038 - protein, 11 aa, unidentified
  source 1..11: note = methanogen bacteria
VTSAFLGANAG

SEQ ID NO: 67039 - protein, 17 aa, unidentified
  source 1..17: note = methanogen bacteria
EEFGEFSETITFQTFLT

SEQ ID NO: 67040 - protein, 15 aa, unidentified
  source 1..15: note = methanogen bacteria
ATGATGLTANIVLDS

SEQ ID NO: 67041 - protein, 28 aa, unidentified
  source 1..28: note = methanogen bacteria
SHKYGIYFPWSSPYLIASGEIAQYTNNY

SEQ ID NO: 67042 - protein, 11 aa, unidentified
  source 1..11: note = methanogen bacteria
ISTAVLGINPS

SEQ ID NO: 67043 - protein, 27 aa, unidentified
  source 1..27: note = methanogen bacteria
FDFPRFEIEEFVFNFQETFHLIYNHNP

SEQ ID NO: 67044 - protein, 10 aa, unidentified
  source 1..10: note = methanogen bacteria
MFVPQAFISM

SEQ ID NO: 67045 - protein, 17 aa, unidentified
  source 1..17: note = methanogen bacteria
TMNVNGIPANSRGLIVM

SEQ ID NO: 67046 - protein, 11 aa, unidentified
  source 1..11: note = methanogen bacteria
TPRPEGVIIAN

SEQ ID NO: 67047 - protein, 53 aa, unidentified
  source 1..53: note = methanogen bacteria
ITKATPANINDGDAILGNFNGVSDEITIRIYDSTDSQVDSIEKNYDVVNIRNF

SEQ ID NO: 67048 - protein, 15 aa, unidentified
  source 1..15: note = methanogen bacteria
MSAGGSGAPAEGAVD

SEQ ID NO: 67049 - protein, 14 aa, unidentified
  source 1..14: note = methanogen bacteria
SVAAAFKLTGLEIA

SEQ ID NO: 67050 - protein, 10 aa, unidentified
  source 1..10: note = methanogen bacteria
YETVISLTVN

SEQ ID NO: 67051 - protein, 15 aa, unidentified
  source 1..15: note = methanogen bacteria
SPSFVFNTANISLNV

SEQ ID NO: 67052 - protein, 17 aa, unidentified
  source 1..17: note = methanogen bacteria
PTIGKVLENPSTELTLM

SEQ ID NO: 67053 - protein, 11 aa, unidentified
  source 1..11: note = methanogen bacteria
TSQITYFINSY

SEQ ID NO: 67054 - protein, 10 aa, unidentified
  source 1..10: note = methanogen bacteria
MAAPTVGLGA

SEQ ID NO: 67055 - protein, 20 aa, unidentified
  source 1..20: note = methanogen bacteria
PNIIQVFNKSMKYMTIPSLN

SEQ ID NO: 67056 - protein, 40 aa, unidentified
  source 1..40: note = methanogen bacteria
MSGILLTKTSTFIIGPVASLLGYLMSGIFTILEKIGIPNI

SEQ ID NO: 67057 - protein, 11 aa, unidentified
  source 1..11: note = methanogen bacteria
FTNIFKIPQTS

SEQ ID NO: 67058 - protein, 12 aa, unidentified
  source 1..12: note = methanogen bacteria
ITLIQSTISTLD

SEQ ID NO: 67059 - protein, 14 aa, unidentified
  source 1..14: note = methanogen bacteria
VGSISGIFASIDTV

SEQ ID NO: 67060 - protein, 11 aa, unidentified
  source 1..11: note = methanogen bacteria
YRSAFTSQTAV

SEQ ID NO: 67061 - protein, 15 aa, unidentified
  source 1..15: note = methanogen bacteria
TIGFENIVRMIMGIA

SEQ ID NO: 67062 - protein, 20 aa, unidentified
  source 1..20: note = methanogen bacteria
GAIGIIPYDIFYSLETITNW

SEQ ID NO: 67063 - protein, 16 aa, unidentified
  source 1..16: note = methanogen bacteria
ADINHGAMMLFSIISA

SEQ ID NO: 67064 - protein, 13 aa, unidentified
  source 1..13: note = methanogen bacteria
AFDEGHTFELLFS

SEQ ID NO: 67065 - protein, 14 aa, unidentified
  source 1..14: note = methanogen bacteria
AGLDGFSLKLFIDS

SEQ ID NO: 67066 - protein, 27 aa, unidentified
  source 1..27: note = methanogen bacteria
GQTWAPYVPWVCPYLIASGEIAEYSSS

SEQ ID NO: 67067 - protein, 14 aa, unidentified
  source 1..14: note = methanogen bacteria
TSFGEGQTFEALFT

SEQ ID NO: 67068 - protein, 14 aa, unidentified
  source 1..14: note = methanogen bacteria
AGLDGFSLSLFAEC

SEQ ID NO: 67069 - protein, 27 aa, unidentified
  source 1..27: note = methanogen bacteria
GQNWAPFVPWVCPYLIASGEIAQYGVS

SEQ ID NO: 67070 - protein, 21 aa, unidentified
  source 1..21: note = methanogen bacteria
MHYPLAGNGILPIAEQLSPTF

SEQ ID NO: 67071 - protein, 14 aa, unidentified
  source 1..14: note = methanogen bacteria
TAFDEGGAFEALFT

SEQ ID NO: 67072 - protein, 14 aa, unidentified
  source 1..14: note = methanogen bacteria
AGLDGFSLKLFVDS

SEQ ID NO: 67073 - protein, 27 aa, unidentified
  source 1..27: note = methanogen bacteria
GQNWAPFVPWVSPYLIASGEIAEYGAS

SEQ ID NO: 67074 - protein, 12 aa, unidentified
  source 1..12: note = methanogen bacteria
TDQITDLIYTYN

SEQ ID NO: 67075 - protein, 10 aa, unidentified
  source 1..10: note = methanogen bacteria
LVAPTVGLGL

SEQ ID NO: 67076 - protein, 19 aa, unidentified
  source 1..19: note = methanogen bacteria
PNITAMIQNPMEAISISSP

SEQ ID NO: 67077 - protein, 14 aa, unidentified
  source 1..14: note = methanogen bacteria
TSFDEGQTFEALFT

SEQ ID NO: 67078 - protein, 14 aa, unidentified
  source 1..14: note = methanogen bacteria
AGLEGFSVNLFLDS

SEQ ID NO: 67079 - protein, 28 aa, unidentified
  source 1..28: note = methanogen bacteria
GQKWAPFVPWTCPYLIASGEITEYATSI

SEQ ID NO: 67080 - protein, 13 aa, unidentified
  source 1..13: note = methanogen bacteria
AFDEGHSFEALFT

SEQ ID NO: 67081 - protein, 13 aa, unidentified
  source 1..13: note = methanogen bacteria
AGLEGLTLKLIIT

SEQ ID NO: 67082 - protein, 27 aa, unidentified
  source 1..27: note = methanogen bacteria
GQNWAPFVPWVCPYLIASGEIVKYGAN

SEQ ID NO: 67083 - protein, 13 aa, unidentified
  source 1..13: note = methanogen bacteria
VFGEEGTFEAFFT

SEQ ID NO: 67084 - protein, 13 aa, unidentified
  source 1..13: note = methanogen bacteria
AGLDGFTLKLFIT

SEQ ID NO: 67085 - protein, 27 aa, unidentified
  source 1..27: note = methanogen bacteria
GQNWAPFIPWVSPYLIASGEIVEYSVS

SEQ ID NO: 67086 - protein, 13 aa, unidentified
  source 1..13: note = methanogen bacteria
AFGEGNTFELLFT

SEQ ID NO: 67087 - protein, 14 aa, unidentified
  source 1..14: note = methanogen bacteria
AGLEGFSLMLFIDS

SEQ ID NO: 67088 - protein, 27 aa, unidentified
  source 1..27: note = methanogen bacteria
GQNWAPFVPWVCPYLIASGEIAKYSTS

SEQ ID NO: 67089 - protein, 16 aa, unidentified
  source 1..16: note = methanogen bacteria
MDLSSYFNLSAITSIP

SEQ ID NO: 67090 - protein, 10 aa, unidentified
  source 1..10: note = methanogen bacteria
FLPILRINVH

SEQ ID NO: 67091 - protein, 11 aa, unidentified
  source 1..11: note = methanogen bacteria
YNKLIFYFGLF

SEQ ID NO: 67092 - protein, 11 aa, unidentified
  source 1..11: note = methanogen bacteria
LFSASSKNVLA

SEQ ID NO: 67093 - protein, 18 aa, unidentified
  source 1..18: note = methanogen bacteria
PMPSEWIYDKIIFLNGGM

SEQ ID NO: 67094 - protein, 13 aa, unidentified
  source 1..13: note = methanogen bacteria
AFDEGHTFDLLFK

SEQ ID NO: 67095 - protein, 13 aa, unidentified
  source 1..13: note = methanogen bacteria
AGLDGFSLRLFIE

SEQ ID NO: 67096 - protein, 27 aa, unidentified
  source 1..27: note = methanogen bacteria
GQTWAPYVPWVCPYLIASGEIAQYSTS

SEQ ID NO: 67097 - protein, 31 aa, unidentified
  source 1..31: note = methanogen bacteria
DTQINDFATALWYVVVSITATGYGDVVPTTL

SEQ ID NO: 67098 - protein, 19 aa, unidentified
  source 1..19: note = methanogen bacteria
VFFNLFEQYVSNSISIIGI

SEQ ID NO: 67099 - protein, 41 aa, unidentified
  source 1..41: note = methanogen bacteria
SVLPLHPFAFAMASGVGSASMNAASLGPTLAAFPGLETQIE

SEQ ID NO: 67100 - protein, 14 aa, unidentified
  source 1..14: note = methanogen bacteria
TAFDEGRTFEALFT

SEQ ID NO: 67101 - protein, 14 aa, unidentified
  source 1..14: note = methanogen bacteria
AGLEGFSINLYLNS

SEQ ID NO: 67102 - protein, 27 aa, unidentified
  source 1..27: note = methanogen bacteria
GQNWAPFVPWICPYLLASGKIAEYTSS

SEQ ID NO: 67103 - protein, 13 aa, unidentified
  source 1..13: note = methanogen bacteria
AFDETQSFDALFS

SEQ ID NO: 67104 - protein, 14 aa, unidentified
  source 1..14: note = methanogen bacteria
AGLSGFSLQLFINS

SEQ ID NO: 67105 - protein, 27 aa, unidentified
  source 1..27: note = methanogen bacteria
GQSWAPYVPWACPYLISSGEIADYSVS

SEQ ID NO: 67106 - protein, 20 aa, unidentified
  source 1..20: note = methanogen bacteria
ALPGAELLTETDLMTFLQAN

SEQ ID NO: 67107 - protein, 13 aa, unidentified
  source 1..13: note = methanogen bacteria
AFDEGSTFDMLFT

SEQ ID NO: 67108 - protein, 13 aa, unidentified
  source 1..13: note = methanogen bacteria
AGLEGFTLKLFMD

SEQ ID NO: 67109 - protein, 28 aa, unidentified
  source 1..28: note = methanogen bacteria
GQTWAPYVPWVCPYLIASGEIAEYATSP

SEQ ID NO: 67110 - protein, 28 aa, unidentified
  source 1..28: note = methanogen bacteria
MHVVNGQYLLIASFAEMGVDAMFGGIPL

SEQ ID NO: 67111 - protein, 10 aa, unidentified
  source 1..10: note = methanogen bacteria
RMNTDLFTTP

SEQ ID NO: 67112 - protein, 19 aa, unidentified
  source 1..19: note = methanogen bacteria
NPIPSEMIYDKIIFLNGGM

SEQ ID NO: 67113 - protein, 13 aa, unidentified
  source 1..13: note = methanogen bacteria
AFDETQSFDALFS

SEQ ID NO: 67114 - protein, 13 aa, unidentified
  source 1..13: note = methanogen bacteria
AGLSGFTLGLFIN

SEQ ID NO: 67115 - protein, 28 aa, unidentified
  source 1..28: note = methanogen bacteria
GQSWAPYVPWACPYLISSGEIADYGVSL

SEQ ID NO: 67116 - protein, 34 aa, unidentified
  source 1..34: note = methanogen bacteria
GLLHTVQSDLPNIVASMTNSGAVPAFNYMIRNSG

SEQ ID NO: 67117 - protein, 12 aa, unidentified
  source 1..12: note = methanogen bacteria
HMCSSYPIEQSV

SEQ ID NO: 67118 - protein, 13 aa, unidentified
  source 1..13: note = methanogen bacteria
AFDEGNTFELLFN

SEQ ID NO: 67119 - protein, 13 aa, unidentified
  source 1..13: note = methanogen bacteria
AGLEGFSLKLFID

SEQ ID NO: 67120 - protein, 27 aa, unidentified
  source 1..27: note = methanogen bacteria
GQTWAPYVPWVCPYLIASGEIAEYSAS

SEQ ID NO: 67121 - protein, 20 aa, unidentified
  source 1..20: note = methanogen bacteria
QFSGYPVANNANIALNLNLM

SEQ ID NO: 67122 - protein, 19 aa, unidentified
  source 1..19: note = methanogen bacteria
NPIPSEMIYDKIIFLNGGM

SEQ ID NO: 67123 - protein, 14 aa, unidentified
  source 1..14: note = methanogen bacteria
SAFGEGNTFKVLFT

SEQ ID NO: 67124 - protein, 13 aa, unidentified
  source 1..13: note = methanogen bacteria
AGLDGFSLKVFIY

SEQ ID NO: 67125 - protein, 28 aa, unidentified
  source 1..28: note = methanogen bacteria
GQSWAPYVPWVCPYLIASGEIAGYGTSI

SEQ ID NO: 67126 - protein, 14 aa, unidentified
  source 1..14: note = methanogen bacteria
TSFDEGQTFEALFT

SEQ ID NO: 67127 - protein, 14 aa, unidentified
  source 1..14: note = methanogen bacteria
AGLDGFSLKIFADG

SEQ ID NO: 67128 - protein, 27 aa, unidentified
  source 1..27: note = methanogen bacteria
GQNWAPFVPWVCPYLIASGEIAEYSTS

SEQ ID NO: 67129 - protein, 14 aa, unidentified
  source 1..14: note = methanogen bacteria
TSFDEGHSFEMLFA

SEQ ID NO: 67130 - protein, 13 aa, unidentified
  source 1..13: note = methanogen bacteria
AGLEGFSIGMFMD

SEQ ID NO: 67131 - protein, 27 aa, unidentified
  source 1..27: note = methanogen bacteria
GQNWAPFVPWVCPYLIASGEIAEYSTS

SEQ ID NO: 67132 - protein, 13 aa, unidentified
  source 1..13: note = methanogen bacteria
AFGEGHTFELLFD

SEQ ID NO: 67133 - protein, 13 aa, unidentified
  source 1..13: note = methanogen bacteria
AGLDGFSLKLFID

SEQ ID NO: 67134 - protein, 27 aa, unidentified
  source 1..27: note = methanogen bacteria
GQAWAPYVPWVCPYLISSGEIAKYGTG

SEQ ID NO: 67135 - protein, 13 aa, unidentified
  source 1..13: note = methanogen bacteria
SFDEAQSFDKLFA

SEQ ID NO: 67136 - protein, 14 aa, unidentified
  source 1..14: note = methanogen bacteria
AGLDGFSINLFISR

SEQ ID NO: 67137 - protein, 28 aa, unidentified
  source 1..28: note = methanogen bacteria
GQNWASFVPWISPYLIASGEIAKYSTSP

SEQ ID NO: 67138 - protein, 18 aa, unidentified
  source 1..18: note = methanogen bacteria
PIPSEWIYDKIIFLNGGL

SEQ ID NO: 67139 - protein, 14 aa, unidentified
  source 1..14: note = methanogen bacteria
TAFDEGGTFEALFT

SEQ ID NO: 67140 - protein, 14 aa, unidentified
  source 1..14: note = methanogen bacteria
ANLDGFSLKLFMDS

SEQ ID NO: 67141 - protein, 27 aa, unidentified
  source 1..27: note = methanogen bacteria
GQNWAPFVPWISPYLIASGKIAEYGAS

SEQ ID NO: 67142 - protein, 11 aa, unidentified
  source 1..11: note = methanogen bacteria
MSFNPQSNINI

SEQ ID NO: 67143 - protein, 22 aa, unidentified
  source 1..22: note = methanogen bacteria
PQSVNIFTSQIEFINQIFTLGV

SEQ ID NO: 67144 - protein, 19 aa, unidentified
  source 1..19: note = methanogen bacteria
HPIPSGLIYDKIIFLNGGI

SEQ ID NO: 67145 - protein, 19 aa, unidentified
  source 1..19: note = methanogen bacteria
HPIPSELIYDKIIFLNGGI

SEQ ID NO: 67146 - protein, 19 aa, unidentified
  source 1..19: note = methanogen bacteria
NPIPSELIYDKIIFLNGGL

SEQ ID NO: 67147 - protein, 19 aa, unidentified
  source 1..19: note = methanogen bacteria
NPISSQIIYDKIIFLNGGI

SEQ ID NO: 67148 - protein, 14 aa, unidentified
  source 1..14: note = methanogen bacteria
NSGYSIGFETDSVV

SEQ ID NO: 67149 - protein, 18 aa, unidentified
  source 1..18: note = methanogen bacteria
TVDLLISNLDSSNDIAIY

SEQ ID NO: 67150 - protein, 18 aa, unidentified
  source 1..18: note = methanogen bacteria
PIPSEIIYDKINFLNGGM

SEQ ID NO: 67151 - protein, 26 aa, unidentified
  source 1..26: note = methanogen bacteria
AVNSPALPTPDAAVAVLLANVDQLVP

SEQ ID NO: 67152 - protein, 21 aa, unidentified
  source 1..21: note = methanogen bacteria
AGSTGLGYFIMQSWSMVNYPR

SEQ ID NO: 67153 - protein, 20 aa, unidentified
  source 1..20: note = methanogen bacteria
NAVETSSLIANFFPKNLVDP

SEQ ID NO: 67154 - protein, 18 aa, unidentified
  source 1..18: note = methanogen bacteria
PIPSEIIYDKINFLNGGM

SEQ ID NO: 67155 - protein, 19 aa, unidentified
  source 1..19: note = methanogen bacteria
NPISSQVIYDKIIFLNGGI

SEQ ID NO: 67156 - protein, 19 aa, unidentified
  source 1..19: note = methanogen bacteria
NPISSQVIYDKIIFLNGGM

SEQ ID NO: 67157 - protein, 10 aa, unidentified
  source 1..10: note = methanogen bacteria
FYPTSLQFSR

SEQ ID NO: 67158 - protein, 33 aa, unidentified
  source 1..33: note = methanogen bacteria
VDSNINNIHTAVWYIIVSMTSTGYGDIVPATTS

SEQ ID NO: 67159 - protein, 19 aa, unidentified
  source 1..19: note = methanogen bacteria
NPIPSELIYDHIIFLNGGL

SEQ ID NO: 67160 - protein, 25 aa, unidentified
  source 1..25: note = methanogen bacteria
LENNYDDTAIEVLPLCDLVITITSD

SEQ ID NO: 67161 - protein, 62 aa, unidentified
  source 1..62: note = methanogen bacteria
TIINWTITVTNNGPDDALDVVMHNILPEELEFISYLASQGILRNGLNESVENISNDSNESGE

SEQ ID NO: 67162 - protein, 19 aa, unidentified
  source 1..19: note = methanogen bacteria
NPMSSQFIYDNIIILNGGI

SEQ ID NO: 67163 - protein, 17 aa, unidentified
  source 1..17: note = methanogen bacteria
TVSMSYLKHKLVYYQYE

SEQ ID NO: 67164 - protein, 14 aa, unidentified
  source 1..14: note = methanogen bacteria
WFSKHYIPIFSRNP

SEQ ID NO: 67165 - protein, 23 aa, unidentified
  source 1..23: note = methanogen bacteria
STLGTTPISSISYSLTLITNINI

SEQ ID NO: 67166 - protein, 32 aa, unidentified
  source 1..32: note = methanogen bacteria
PFFKSSVEPVISTMRKQITSGQITLTYLSIFS

SEQ ID NO: 67167 - protein, 10 aa, unidentified
  source 1..10: note = methanogen bacteria
YFLTRGSFMQ

SEQ ID NO: 67168 - protein, 14 aa, unidentified
  source 1..14: note = methanogen bacteria
KDLANYLIQTYHIK

SEQ ID NO: 67169 - protein, 19 aa, unidentified
  source 1..19: note = methanogen bacteria
NPIPSELIYDKIIFLNGGL

SEQ ID NO: 67170 - protein, 17 aa, unidentified
  source 1..17: note = methanogen bacteria
LLFNMFEQYVYILIASI

SEQ ID NO: 67171 - protein, 33 aa, unidentified
  source 1..33: note = methanogen bacteria
FDTNITDFATAFWYIIVSMTGTGYGDVVPGTLT

SEQ ID NO: 67172 - protein, 14 aa, unidentified
  source 1..14: note = methanogen bacteria
LASQGLFAGRTVDI

SEQ ID NO: 67173 - protein, 20 aa, unidentified
  source 1..20: note = methanogen bacteria
DMIHISSPVLVNESTTTIFS

SEQ ID NO: 67174 - protein, 13 aa, unidentified
  source 1..13: note = methanogen bacteria
VAGQQANNLFSSG

SEQ ID NO: 67175 - protein, 10 aa, unidentified
  source 1..10: note = methanogen bacteria
PFLSSTLYTY

SEQ ID NO: 67176 - protein, 32 aa, unidentified
  source 1..32: note = methanogen bacteria
DPSIVSLFDAVWFIFQTISTVGYGDVIPTSPI

SEQ ID NO: 67177 - protein, 10 aa, unidentified
  source 1..10: note = methanogen bacteria
MNFSIAPENP

SEQ ID NO: 67178 - protein, 17 aa, unidentified
  source 1..17: note = methanogen bacteria
LLFNLFEQYVYILISSI

SEQ ID NO: 67179 - protein, 19 aa, unidentified
  source 1..19: note = methanogen bacteria
NPIPSELIYDKIIFLNGGM

SEQ ID NO: 67180 - protein, 16 aa, unidentified
  source 1..16: note = methanogen bacteria
LAATYTSKGLGGYAFG

SEQ ID NO: 67181 - protein, 11 aa, unidentified
  source 1..11: note = methanogen bacteria
SVDFFNLSHTQ

SEQ ID NO: 67182 - protein, 25 aa, unidentified
  source 1..25: note = methanogen bacteria
TNIVDGYVNWVELFGIDDLEVIAQK

SEQ ID NO: 67183 - protein, 20 aa, unidentified
  source 1..20: note = methanogen bacteria
LSNGVSHTQNPVMYNVTYVT

SEQ ID NO: 67184 - protein, 14 aa, unidentified
  source 1..14: note = methanogen bacteria
LQELNIPISLLFLL

SEQ ID NO: 67185 - protein, 19 aa, unidentified
  source 1..19: note = methanogen bacteria
NPIPSEIIYEKIIFLNGGL

SEQ ID NO: 67186 - protein, 20 aa, unidentified
  source 1..20: note = methanogen bacteria
VLQVPISANVILETFKNPTL

SEQ ID NO: 67187 - protein, 21 aa, unidentified
  source 1..21: note = methanogen bacteria
ESILGINIVSTISNTAGNLDL

SEQ ID NO: 67188 - protein, 20 aa, unidentified
  source 1..20: note = methanogen bacteria
LTAMGVPVPINRSQSSDNPV

SEQ ID NO: 67189 - protein, 28 aa, unidentified
  source 1..28: note = methanogen bacteria
IPLYGLSAAAVDQFAALRAVMAGNFGSI

SEQ ID NO: 67190 - protein, 11 aa, unidentified
  source 1..11: note = methanogen bacteria
TGNLVPIDNSY

SEQ ID NO: 67191 - protein, 16 aa, unidentified
  source 1..16: note = methanogen bacteria
IPSEIIYEKIILLNGG

SEQ ID NO: 67192 - protein, 18 aa, unidentified
  source 1..18: note = methanogen bacteria
DSFASASTVLSGVDATAA

SEQ ID NO: 67193 - protein, 16 aa, unidentified
  source 1..16: note = methanogen bacteria
FLTAAGTTGASSFALD

SEQ ID NO: 67194 - protein, 18 aa, unidentified
  source 1..18: note = methanogen bacteria
ISILGALGTTGWTEFAFS

SEQ ID NO: 67195 - protein, 20 aa, unidentified
  source 1..20: note = methanogen bacteria
LLSSAASFSSQGFAGFAFSG

SEQ ID NO: 67196 - protein, 17 aa, unidentified
  source 1..17: note = methanogen bacteria
FATSMATKGFSSFALGG

SEQ ID NO: 67197 - protein, 12 aa, unidentified
  source 1..12: note = methanogen bacteria
YELVLGFTILDN

SEQ ID NO: 67198 - protein, 14 aa, unidentified
  source 1..14: note = methanogen bacteria
PILFKLFEQYISMF

SEQ ID NO: 67199 - protein, 13 aa, unidentified
  source 1..13: note = methanogen bacteria
AVGASFDSVATVG

SEQ ID NO: 67200 - protein, 25 aa, unidentified
  source 1..25: note = methanogen bacteria
RYGGEIFSEHFAQDIISYLESHRSE

SEQ ID NO: 67201 - protein, 21 aa, unidentified
  source 1..21: note = methanogen bacteria
AGASIGSVIGPQFTTRYSADQ

SEQ ID NO: 67202 - protein, 13 aa, unidentified
  source 1..13: note = methanogen bacteria
LAMFSKGALSFTF

SEQ ID NO: 67203 - protein, 20 aa, unidentified
  source 1..20: note = methanogen bacteria
LFTSAASFSTQGFAGFALSG

SEQ ID NO: 67204 - protein, 20 aa, unidentified
  source 1..20: note = methanogen bacteria
ITIATSFSTVGFSSFALGGV

SEQ ID NO: 67205 - protein, 11 aa, unidentified
  source 1..11: note = methanogen bacteria
AIGAGLNQLVA

SEQ ID NO: 67206 - protein, 18 aa, unidentified
  source 1..18: note = methanogen bacteria
FAVAFTTKGVGGAALAGL

SEQ ID NO: 67207 - protein, 13 aa, unidentified
  source 1..13: note = methanogen bacteria
VIGASMDSAAAVG

SEQ ID NO: 67208 - protein, 31 aa, unidentified
  source 1..31: note = methanogen bacteria
DTQINDFATAFWYVIVSITATGYGDVVPTTL

SEQ ID NO: 67209 - protein, 16 aa, unidentified
  source 1..16: note = methanogen bacteria
AGAYTSKGIAGFAFGG

SEQ ID NO: 67210 - protein, 19 aa, unidentified
  source 1..19: note = methanogen bacteria
ISTAASFSSKGLAGFAFSG

SEQ ID NO: 67211 - protein, 17 aa, unidentified
  source 1..17: note = methanogen bacteria
FVTAASTKGLSSYALGG

SEQ ID NO: 67212 - protein, 31 aa, unidentified
  source 1..31: note = methanogen bacteria
GRVAVGSDNLCPYCLEEGLDARTLKGSTEYI

SEQ ID NO: 67213 - protein, 17 aa, unidentified
  source 1..17: note = methanogen bacteria
IVAAFSSRGLAGYAFSG

SEQ ID NO: 67214 - protein, 17 aa, unidentified
  source 1..17: note = methanogen bacteria
IATAMTSTGAAGFAFSG

SEQ ID NO: 67215 - protein, 17 aa, unidentified
  source 1..17: note = methanogen bacteria
FATAITTKGASSFALGG

SEQ ID NO: 67216 - protein, 20 aa, unidentified
  source 1..20: note = methanogen bacteria
LISSAASFSSKGMAGFAFSG

SEQ ID NO: 67217 - protein, 13 aa, unidentified
  source 1..13: note = methanogen bacteria
AVGASFDSAATVG

SEQ ID NO: 67218 - protein, 15 aa, unidentified
  source 1..15: note = methanogen bacteria
IGAGEATGLLSGGLG

SEQ ID NO: 67219 - protein, 17 aa, unidentified
  source 1..17: note = methanogen bacteria
VGMLAAVTGQNAVAAGG

SEQ ID NO: 67220 - protein, 14 aa, unidentified
  source 1..14: note = methanogen bacteria
MIPQASNNHIIAAG

SEQ ID NO: 67221 - protein, 14 aa, unidentified
  source 1..14: note = methanogen bacteria
NHNTFKGTYINNTV

SEQ ID NO: 67222 - protein, 16 aa, unidentified
  source 1..16: note = methanogen bacteria
VAAAVSTKGLGGFAFS

SEQ ID NO: 67223 - protein, 11 aa, unidentified
  source 1..11: note = methanogen bacteria
LYSYNLDFNNS

SEQ ID NO: 67224 - protein, 10 aa, unidentified
  source 1..10: note = methanogen bacteria
GLIPPLKINL

SEQ ID NO: 67225 - protein, 12 aa, unidentified
  source 1..12: note = methanogen bacteria
NKLLFYLNFLSL

SEQ ID NO: 67226 - protein, 15 aa, unidentified
  source 1..15: note = methanogen bacteria
GLVAGQETNQLFASG

SEQ ID NO: 67227 - protein, 10 aa, unidentified
  source 1..10: note = methanogen bacteria
FYPVDLFFKN

SEQ ID NO: 67228 - protein, 32 aa, unidentified
  source 1..32: note = methanogen bacteria
ENDINDISTALWFTFVSMTSTGYGDIVPTTFS

SEQ ID NO: 67229 - protein, 13 aa, unidentified
  source 1..13: note = methanogen bacteria
TSASNLGSSLEII

SEQ ID NO: 67230 - protein, 15 aa, unidentified
  source 1..15: note = methanogen bacteria
AASFSSKGWAGFAFS

SEQ ID NO: 67231 - protein, 16 aa, unidentified
  source 1..16: note = methanogen bacteria
TASITSQGWAGFAFSG

SEQ ID NO: 67232 - protein, 45 aa, unidentified
  source 1..45: note = methanogen bacteria
MNTIIHASDTMFNSSSNGLLSFFSGNATQGANDALNSALTIVSQS

SEQ ID NO: 67233 - protein, 17 aa, unidentified
  source 1..17: note = methanogen bacteria
PGLAALGQGDVTALATA

SEQ ID NO: 67234 - protein, 20 aa, unidentified
  source 1..20: note = methanogen bacteria
LLGMLGAVGSTGWSSFAFSG

SEQ ID NO: 67235 - protein, 19 aa, unidentified
  source 1..19: note = methanogen bacteria
NPFPSELIYEKILFLNGGM

SEQ ID NO: 67236 - protein, 13 aa, unidentified
  source 1..13: note = methanogen bacteria
GTIGAGLNNLFAG

SEQ ID NO: 67237 - protein, 16 aa, unidentified
  source 1..16: note = methanogen bacteria
FIGAASTKGLSSFALG

SEQ ID NO: 67238 - protein, 18 aa, unidentified
  source 1..18: note = methanogen bacteria
TGGTNSPTDNSVNGSASV

SEQ ID NO: 67239 - protein, 16 aa, unidentified
  source 1..16: note = methanogen bacteria
AASFSTKGLAGFAFSG

SEQ ID NO: 67240 - protein, 18 aa, unidentified
  source 1..18: note = methanogen bacteria
TFLTAAGTTGISTFALDG

SEQ ID NO: 67241 - protein, 21 aa, unidentified
  source 1..21: note = methanogen bacteria
IGNPRSGIAVYMSYLISEMTL

SEQ ID NO: 67242 - protein, 15 aa, unidentified
  source 1..15: note = methanogen bacteria
AASFSTKGFAGFAFS

SEQ ID NO: 67243 - protein, 18 aa, unidentified
  source 1..18: note = methanogen bacteria
VTTIAAFRTKGLASITLS

SEQ ID NO: 67244 - protein, 13 aa, unidentified
  source 1..13: note = methanogen bacteria
AVGASFDSVATVG

SEQ ID NO: 67245 - protein, 15 aa, unidentified
  source 1..15: note = methanogen bacteria
FGAIGAGLDKMAGSL

SEQ ID NO: 67246 - protein, 17 aa, unidentified
  source 1..17: note = methanogen bacteria
SDVAKQSFKTIVANPSP

SEQ ID NO: 67247 - protein, 13 aa, unidentified
  source 1..13: note = methanogen bacteria
DIGMSFLNPYVGG

SEQ ID NO: 67248 - protein, 19 aa, unidentified
  source 1..19: note = methanogen bacteria
TGGIGNTATDAAMKGSPTV

SEQ ID NO: 67249 - protein, 14 aa, unidentified
  source 1..14: note = methanogen bacteria
GLIGTGFRQVLGSL

SEQ ID NO: 67250 - protein, 12 aa, unidentified
  source 1..12: note = methanogen bacteria
MKITKAAQLVKL

SEQ ID NO: 67251 - protein, 10 aa, unidentified
  source 1..10: note = methanogen bacteria
DKVPKDQFYD

SEQ ID NO: 67252 - protein, 14 aa, unidentified
  source 1..14: note = methanogen bacteria
SVGTGIGINSSSLG

SEQ ID NO: 67253 - protein, 14 aa, unidentified
  source 1..14: note = methanogen bacteria
ANSADRLGGALGAG

SEQ ID NO: 67254 - protein, 20 aa, unidentified
  source 1..20: note = methanogen bacteria
GLPEFLITDYSDFISYIFSL

SEQ ID NO: 67255 - protein, 11 aa, unidentified
  source 1..11: note = methanogen bacteria
AMVGGYQSVGV

SEQ ID NO: 67256 - protein, 20 aa, unidentified
  source 1..20: note = methanogen bacteria
IAPLFASGEVSSTLIPQLAT

SEQ ID NO: 67257 - protein, 10 aa, unidentified
  source 1..10: note = methanogen bacteria
IFGDIFGTES

SEQ ID NO: 67258 - protein, 15 aa, unidentified
  source 1..15: note = methanogen bacteria
FGAIGSGINQVAGSL

SEQ ID NO: 67259 - protein, 33 aa, unidentified
  source 1..33: note = methanogen bacteria
LDPNINDIPTAIWFIVVSMTSTGYGDIVPVTHS

SEQ ID NO: 67260 - protein, 11 aa, unidentified
  source 1..11: note = methanogen bacteria
QLITAVTIITN

SEQ ID NO: 67261 - protein, 15 aa, unidentified
  source 1..15: note = methanogen bacteria
ILFEIFGHYILSNGG

SEQ ID NO: 67262 - protein, 14 aa, unidentified
  source 1..14: note = methanogen bacteria
MASQVSGNNYVAAG

SEQ ID NO: 67263 - protein, 14 aa, unidentified
  source 1..14: note = methanogen bacteria
MATQVSGNNVVAAG

SEQ ID NO: 67264 - protein, 20 aa, unidentified
  source 1..20: note = methanogen bacteria
TYFDYSLAFGLSEGRNALRS

SEQ ID NO: 67265 - protein, 12 aa, unidentified
  source 1..12: note = methanogen bacteria
IMFFNGELSTGR

SEQ ID NO: 67266 - protein, 47 aa, unidentified
  source 1..47: note = methanogen bacteria
IEYLPSRSVVTPVPVPLTITAAPGAGSPDAFSKTVPLRVKLPCACAG

SEQ ID NO: 67267 - protein, 11 aa, unidentified
  source 1..11: note = methanogen bacteria
QLINAVTIIDN

SEQ ID NO: 67268 - protein, 16 aa, unidentified
  source 1..16: note = methanogen bacteria
PVLFEIFGYYVLLGRV

SEQ ID NO: 67269 - protein, 13 aa, unidentified
  source 1..13: note = methanogen bacteria
LLSGKAITNVFAS

SEQ ID NO: 67270 - protein, 19 aa, unidentified
  source 1..19: note = methanogen bacteria
INIIGALSTTGWSSVAFSG

SEQ ID NO: 67271 - protein, 17 aa, unidentified
  source 1..17: note = methanogen bacteria
MPGMLENQTLANFLHVK

SEQ ID NO: 67272 - protein, 12 aa, unidentified
  source 1..12: note = methanogen bacteria
LLAAQGNNVLMA

SEQ ID NO: 67273 - protein, 11 aa, unidentified
  source 1..11: note = methanogen bacteria
QLVTSVTILDN

SEQ ID NO: 67274 - protein, 16 aa, unidentified
  source 1..16: note = methanogen bacteria
PFLFNIFEKYVLHVHS

SEQ ID NO: 67275 - protein, 12 aa, unidentified
  source 1..12: note = methanogen bacteria
YISSIQGFFTQY

SEQ ID NO: 67276 - protein, 12 aa, unidentified
  source 1..12: note = methanogen bacteria
TVSPIIGLSAST

SEQ ID NO: 67277 - protein, 19 aa, unidentified
  source 1..19: note = methanogen bacteria
PNISSVLQNQLAPMSAPSL

SEQ ID NO: 67278 - protein, 13 aa, unidentified
  source 1..13: note = methanogen bacteria
LVNGGLSIAAITM

SEQ ID NO: 67279 - protein, 22 aa, unidentified
  source 1..22: note = methanogen bacteria
AGVDIASTTGALGSVGDVAGIG

SEQ ID NO: 67280 - protein, 10 aa, unidentified
  source 1..10: note = methanogen bacteria
NTVVGNAAPW

SEQ ID NO: 67281 - protein, 11 aa, unidentified
  source 1..11: note = methanogen bacteria
ATITLMETLGG

SEQ ID NO: 67282 - protein, 19 aa, unidentified
  source 1..19: note = methanogen bacteria
ETLKISAESPIEPISTTLL

SEQ ID NO: 67283 - protein, 26 aa, unidentified
  source 1..26: note = methanogen bacteria
MNFIPIELTKNFAVTRTDVFTSYVDV

SEQ ID NO: 67284 - protein, 12 aa, unidentified
  source 1..12: note = methanogen bacteria
FYVKPLTLTGKQ

SEQ ID NO: 67285 - protein, 11 aa, unidentified
  source 1..11: note = methanogen bacteria
ILGGLYGSGSS

SEQ ID NO: 67286 - protein, 16 aa, unidentified
  source 1..16: note = methanogen bacteria
MFGAIGAGLDKMAGSL

SEQ ID NO: 67287 - protein, 11 aa, unidentified
  source 1..11: note = methanogen bacteria
SEQLVQAIYSY

SEQ ID NO: 67288 - protein, 12 aa, unidentified
  source 1..12: note = methanogen bacteria
IVAPTIGVTSLD

SEQ ID NO: 67289 - protein, 19 aa, unidentified
  source 1..19: note = methanogen bacteria
PNIAGVLSKTQSPITLGSP

SEQ ID NO: 67290 - protein, 12 aa, unidentified
  source 1..12: note = methanogen bacteria
MASAMANNVFAA

SEQ ID NO: 67291 - protein, 52 aa, unidentified
  source 1..52: note = methanogen bacteria
THTILHIDEYWTYSLVNLTFMQGMTVAVHDVHPILYYLILYLFKPVAGSDNF

SEQ ID NO: 67292 - protein, 16 aa, unidentified
  source 1..16: note = methanogen bacteria
CWFTRFRGKVMSFTRQ

SEQ ID NO: 67293 - protein, 11 aa, unidentified
  source 1..11: note = methanogen bacteria
ADQLIQAIYGY

SEQ ID NO: 67294 - protein, 12 aa, unidentified
  source 1..12: note = methanogen bacteria
IVAPTIGVSSLN

SEQ ID NO: 67295 - protein, 19 aa, unidentified
  source 1..19: note = methanogen bacteria
PNIAGALTKTVSPISISSP

SEQ ID NO: 67296 - protein, 23 aa, unidentified
  source 1..23: note = methanogen bacteria
GTTTIDFILDFLGINNIIANESG

SEQ ID NO: 67297 - protein, 12 aa, unidentified
  source 1..12: note = methanogen bacteria
ELNPVSLTFRNE

SEQ ID NO: 67298 - protein, 33 aa, unidentified
  source 1..33: note = methanogen bacteria
IDPNVNDIHTALWYIIVTITSTGYGDIVPSTLS

SEQ ID NO: 67299 - protein, 11 aa, unidentified
  source 1..11: note = methanogen bacteria
ADQLVQAIYSY

SEQ ID NO: 67300 - protein, 12 aa, unidentified
  source 1..12: note = methanogen bacteria
IVAPTIGVSSLN

SEQ ID NO: 67301 - protein, 19 aa, unidentified
  source 1..19: note = methanogen bacteria
PNIAGALSKTTSPITLGSP

SEQ ID NO: 67302 - protein, 18 aa, unidentified
  source 1..18: note = methanogen bacteria
RLTGSIAGHSEMNTIPSL

SEQ ID NO: 67303 - protein, 11 aa, unidentified
  source 1..11: note = methanogen bacteria
AFRPVSPTFRN

SEQ ID NO: 67304 - protein, 33 aa, unidentified
  source 1..33: note = methanogen bacteria
IDPNINDINTSLWYTIVTVTSTGYGDVVPSSVY

SEQ ID NO: 67305 - protein, 16 aa, unidentified
  source 1..16: note = methanogen bacteria
GAAAASAAASNLAAAM

SEQ ID NO: 67306 - protein, 10 aa, unidentified
  source 1..10: note = methanogen bacteria
QLVTNLTDLQ

SEQ ID NO: 67307 - protein, 14 aa, unidentified
  source 1..14: note = methanogen bacteria
VLYNLFEQYLFLKL

SEQ ID NO: 67308 - protein, 11 aa, unidentified
  source 1..11: note = methanogen bacteria
AEQLIQAIYGY

SEQ ID NO: 67309 - protein, 12 aa, unidentified
  source 1..12: note = methanogen bacteria
IVAPTIGVSSLN

SEQ ID NO: 67310 - protein, 19 aa, unidentified
  source 1..19: note = methanogen bacteria
PNIAGALSKTTTPITIGSP

SEQ ID NO: 67311 - protein, 11 aa, unidentified
  source 1..11: note = methanogen bacteria
AEQLTQAIYSY

SEQ ID NO: 67312 - protein, 10 aa, unidentified
  source 1..10: note = methanogen bacteria
IVAPTIGVGA

SEQ ID NO: 67313 - protein, 19 aa, unidentified
  source 1..19: note = methanogen bacteria
PNIAGSLTKDFKDLTMNSP

SEQ ID NO: 67314 - protein, 11 aa, unidentified
  source 1..11: note = methanogen bacteria
AEQLTQAIYSY

SEQ ID NO: 67315 - protein, 10 aa, unidentified
  source 1..10: note = methanogen bacteria
IVAPTIGVGA

SEQ ID NO: 67316 - protein, 19 aa, unidentified
  source 1..19: note = methanogen bacteria
PNIAGSLSKDFGDLAMTSP

SEQ ID NO: 67317 - protein, 15 aa, unidentified
  source 1..15: note = methanogen bacteria
PFLFSIFENFLRFYM

SEQ ID NO: 67318 - protein, 13 aa, unidentified
  source 1..13: note = methanogen bacteria
MVVSINGGKVVET

SEQ ID NO: 67319 - protein, 11 aa, unidentified
  source 1..11: note = methanogen bacteria
ASGVAVNNLWA

SEQ ID NO: 67320 - protein, 14 aa, unidentified
  source 1..14: note = methanogen bacteria
FGAIGSGLNQVVGS

SEQ ID NO: 67321 - protein, 33 aa, unidentified
  source 1..33: note = methanogen bacteria
LDPGINDIPTAIWFIVVSMTSTGYGDVVPVTHS

SEQ ID NO: 67322 - protein, 11 aa, unidentified
  source 1..11: note = methanogen bacteria
ADQLIQAIYGY

SEQ ID NO: 67323 - protein, 12 aa, unidentified
  source 1..12: note = methanogen bacteria
IVAPTIGVSSLN

SEQ ID NO: 67324 - protein, 19 aa, unidentified
  source 1..19: note = methanogen bacteria
PNIAGAMSKTMSPISIGSP

SEQ ID NO: 67325 - protein, 11 aa, unidentified
  source 1..11: note = methanogen bacteria
TGFQFSYEIFS

SEQ ID NO: 67326 - protein, 17 aa, unidentified
  source 1..17: note = methanogen bacteria
STDFVTAYFKFYLGDLW

SEQ ID NO: 67327 - protein, 12 aa, unidentified
  source 1..12: note = methanogen bacteria
FGLLPTFQYTLG

SEQ ID NO: 67328 - protein, 32 aa, unidentified
  source 1..32: note = methanogen bacteria
DAGITDFGTAIWYTFASMTSTGYGDVVPTTVS

SEQ ID NO: 67329 - protein, 11 aa, unidentified
  source 1..11: note = methanogen bacteria
ADQLIQAIYSY

SEQ ID NO: 67330 - protein, 12 aa, unidentified
  source 1..12: note = methanogen bacteria
IVAPTIGVSSLN

SEQ ID NO: 67331 - protein, 19 aa, unidentified
  source 1..19: note = methanogen bacteria
PNIAGALSKTTTPVTLGSP

SEQ ID NO: 67332 - protein, 11 aa, unidentified
  source 1..11: note = methanogen bacteria
MAGALANNALA

SEQ ID NO: 67333 - protein, 11 aa, unidentified
  source 1..11: note = methanogen bacteria
ALHPVSSTFRF

SEQ ID NO: 67334 - protein, 33 aa, unidentified
  source 1..33: note = methanogen bacteria
LEPNITDINTAFWYIIVSITNTGYGDIVPSSLS

SEQ ID NO: 67335 - protein, 11 aa, unidentified
  source 1..11: note = methanogen bacteria
ADQLVQAIYSY

SEQ ID NO: 67336 - protein, 12 aa, unidentified
  source 1..12: note = methanogen bacteria
IVAPTIGVSSLD

SEQ ID NO: 67337 - protein, 19 aa, unidentified
  source 1..19: note = methanogen bacteria
PNIAGALTKTTSPITIGSP

SEQ ID NO: 67338 - protein, 10 aa, unidentified
  source 1..10: note = methanogen bacteria
LRPVSSTFRD

SEQ ID NO: 67339 - protein, 33 aa, unidentified
  source 1..33: note = methanogen bacteria
VDPSIHDIHTALWYVIVSITSTGYGDVVPSTLS

SEQ ID NO: 67340 - protein, 11 aa, unidentified
  source 1..11: note = methanogen bacteria
ASGVAVNNLWA

SEQ ID NO: 67341 - protein, 11 aa, unidentified
  source 1..11: note = methanogen bacteria
SEQLIQAIYSY

SEQ ID NO: 67342 - protein, 12 aa, unidentified
  source 1..12: note = methanogen bacteria
IVAPTIGVTSLD

SEQ ID NO: 67343 - protein, 20 aa, unidentified
  source 1..20: note = methanogen bacteria
PNIAGVLSKTQSPITMGSPQ

SEQ ID NO: 67344 - protein, 10 aa, unidentified
  source 1..10: note = methanogen bacteria
AAGAAANNLF

SEQ ID NO: 67345 - protein, 11 aa, unidentified
  source 1..11: note = methanogen bacteria
AEQLTQAIYSY

SEQ ID NO: 67346 - protein, 10 aa, unidentified
  source 1..10: note = methanogen bacteria
IVAPTIGVGA

SEQ ID NO: 67347 - protein, 19 aa, unidentified
  source 1..19: note = methanogen bacteria
PNIAGSLSKDFSDLTMSSP

SEQ ID NO: 67348 - protein, 11 aa, unidentified
  source 1..11: note = methanogen bacteria
SEQLVQAIYSY

SEQ ID NO: 67349 - protein, 12 aa, unidentified
  source 1..12: note = methanogen bacteria
IVAPTIGVSSLD

SEQ ID NO: 67350 - protein, 19 aa, unidentified
  source 1..19: note = methanogen bacteria
PNIAGVLAKTTSPITMGSP

SEQ ID NO: 67351 - protein, 11 aa, unidentified
  source 1..11: note = methanogen bacteria
AEELTQVIYTY

SEQ ID NO: 67352 - protein, 11 aa, unidentified
  source 1..11: note = methanogen bacteria
IVAPTIGITAF

SEQ ID NO: 67353 - protein, 19 aa, unidentified
  source 1..19: note = methanogen bacteria
PNIAGALSKQFGTVDMGSS

SEQ ID NO: 67354 - protein, 13 aa, unidentified
  source 1..13: note = methanogen bacteria
VEFHPVSLTFRQD

SEQ ID NO: 67355 - protein, 33 aa, unidentified
  source 1..33: note = methanogen bacteria
VDPGINDINTAFWYIIVSITSTGYGDVVPSSIS

SEQ ID NO: 67356 - protein, 11 aa, unidentified
  source 1..11: note = methanogen bacteria
ADQLIQAIYSY

SEQ ID NO: 67357 - protein, 12 aa, unidentified
  source 1..12: note = methanogen bacteria
IVAPTIGVTSLD

SEQ ID NO: 67358 - protein, 19 aa, unidentified
  source 1..19: note = methanogen bacteria
PNIAGVLSKTLSPISISSP

SEQ ID NO: 67359 - protein, 11 aa, unidentified
  source 1..11: note = methanogen bacteria
MVGAAARNAFA

SEQ ID NO: 67360 - protein, 11 aa, unidentified
  source 1..11: note = methanogen bacteria
SEQLVQAIYSY

SEQ ID NO: 67361 - protein, 12 aa, unidentified
  source 1..12: note = methanogen bacteria
IVAPTIGVSSLN

SEQ ID NO: 67362 - protein, 20 aa, unidentified
  source 1..20: note = methanogen bacteria
PNIAGALSKTTSPITIGSPQ

SEQ ID NO: 67363 - protein, 10 aa, unidentified
  source 1..10: note = methanogen bacteria
FYPVSQTFRF

SEQ ID NO: 67364 - protein, 33 aa, unidentified
  source 1..33: note = methanogen bacteria
VDTNIPDIHTAIWYIVVSMTGTGYGDIVPATTT

SEQ ID NO: 67365 - protein, 13 aa, unidentified
  source 1..13: note = methanogen bacteria
VAASAAIDNVLAA

SEQ ID NO: 67366 - protein, 21 aa, unidentified
  source 1..21: note = methanogen bacteria
LDGTGTGGSGLANSFTIHLES

SEQ ID NO: 67367 - protein, 11 aa, unidentified
  source 1..11: note = methanogen bacteria
AEQITQAIYSY

SEQ ID NO: 67368 - protein, 10 aa, unidentified
  source 1..10: note = methanogen bacteria
IVAPTIGVGA

SEQ ID NO: 67369 - protein, 19 aa, unidentified
  source 1..19: note = methanogen bacteria
PNIAGSLSKDFSTISMTSP

SEQ ID NO: 67370 - protein, 12 aa, unidentified
  source 1..12: note = methanogen bacteria
VLGMNSNNVFTV

SEQ ID NO: 67371 - protein, 20 aa, unidentified
  source 1..20: note = methanogen bacteria
EYAGMTSSSPASTETASTTL

SEQ ID NO: 67372 - protein, 16 aa, unidentified
  source 1..16: note = methanogen bacteria
TGVSASFSIGSVESMG

SEQ ID NO: 67373 - protein, 11 aa, unidentified
  source 1..11: note = methanogen bacteria
AEQLTQAIYSY

SEQ ID NO: 67374 - protein, 19 aa, unidentified
  source 1..19: note = methanogen bacteria
PNIAGSLSKDFSSPTITSF

SEQ ID NO: 67375 - protein, 15 aa, unidentified
  source 1..15: note = methanogen bacteria
LIQMGAGEVIEDALN

SEQ ID NO: 67376 - protein, 11 aa, unidentified
  source 1..11: note = methanogen bacteria
TFLSGTIAVAS

SEQ ID NO: 67377 - protein, 11 aa, unidentified
  source 1..11: note = methanogen bacteria
ADQLIQAIYGY

SEQ ID NO: 67378 - protein, 12 aa, unidentified
  source 1..12: note = methanogen bacteria
VVAPTIGVSSLN

SEQ ID NO: 67379 - protein, 19 aa, unidentified
  source 1..19: note = methanogen bacteria
PNIAGAMTKTLSPITIGSP

SEQ ID NO: 67380 - protein, 11 aa, unidentified
  source 1..11: note = methanogen bacteria
FYPTSLTFKNQ

SEQ ID NO: 67381 - protein, 33 aa, unidentified
  source 1..33: note = methanogen bacteria
ADPNLSNPRTAFWYIIVTITSTGYGDIVPSTLS

SEQ ID NO: 67382 - protein, 12 aa, unidentified
  source 1..12: note = methanogen bacteria
FAGISDGNVIEV

SEQ ID NO: 67383 - protein, 12 aa, unidentified
  source 1..12: note = methanogen bacteria
TQQITDLIYTYN

SEQ ID NO: 67384 - protein, 10 aa, unidentified
  source 1..10: note = methanogen bacteria
LVAPTVGLGL

SEQ ID NO: 67385 - protein, 19 aa, unidentified
  source 1..19: note = methanogen bacteria
PNITAMIQNPMEAISIASP

SEQ ID NO: 67386 - protein, 12 aa, unidentified
  source 1..12: note = methanogen bacteria
TEQITDLIYTYN

SEQ ID NO: 67387 - protein, 10 aa, unidentified
  source 1..10: note = methanogen bacteria
LVAPTVGLGL

SEQ ID NO: 67388 - protein, 19 aa, unidentified
  source 1..19: note = methanogen bacteria
PNITAMIANPMDAISISSP

SEQ ID NO: 67389 - protein, 12 aa, unidentified
  source 1..12: note = methanogen bacteria
TTQITDLIYTYN

SEQ ID NO: 67390 - protein, 10 aa, unidentified
  source 1..10: note = methanogen bacteria
LVAPTVGLGL

SEQ ID NO: 67391 - protein, 20 aa, unidentified
  source 1..20: note = methanogen bacteria
LPNITALLADPMDAISIQSP

SEQ ID NO: 67392 - protein, 10 aa, unidentified
  source 1..10: note = methanogen bacteria
QLIVNVTTLS

SEQ ID NO: 67393 - protein, 13 aa, unidentified
  source 1..13: note = methanogen bacteria
PFLFSLFEIVINY

SEQ ID NO: 67394 - protein, 13 aa, unidentified
  source 1..13: note = methanogen bacteria
YTKQITDLIYTYN

SEQ ID NO: 67395 - protein, 10 aa, unidentified
  source 1..10: note = methanogen bacteria
LVAPTVGLGL

SEQ ID NO: 67396 - protein, 20 aa, unidentified
  source 1..20: note = methanogen bacteria
LPNITALLQSPMDAISIQSP

SEQ ID NO: 67397 - protein, 31 aa, unidentified
  source 1..31: note = methanogen bacteria
ADQISSYIQPVVENFEKQVENGTVTLTTHSL

SEQ ID NO: 67398 - protein, 16 aa, unidentified
  source 1..16: note = methanogen bacteria
GFYGNGYDLLTYIILT

SEQ ID NO: 67399 - protein, 15 aa, unidentified
  source 1..15: note = methanogen bacteria
AYWISSIFGNAMAFI

SEQ ID NO: 67400 - protein, 14 aa, unidentified
  source 1..14: note = methanogen bacteria
MTFEGNEVLAVYPY

SEQ ID NO: 67401 - protein, 67 aa, unidentified
  source 1..67: note = methanogen bacteria
LSPINPVSVYLKGAAVSESQRAILNEYFGVGVPLQTKIYHWLLNLIQGNLGTSLIYRAPVLDVIIDK

SEQ ID NO: 67402 - protein, 30 aa, unidentified
  source 1..30: note = methanogen bacteria
AVYLKLFPIGFGVPIGVRSTDASFIDWASR

SEQ ID NO: 67403 - protein, 29 aa, unidentified
  source 1..29: note = methanogen bacteria
MGAFDLTWDAATASDVPGANSLNGVNDTI

SEQ ID NO: 67404 - protein, 10 aa, unidentified
  source 1..10: note = methanogen bacteria
FQTPISSGIT

SEQ ID NO: 67405 - protein, 12 aa, unidentified
  source 1..12: note = methanogen bacteria
SQLVNAVTIIDN

SEQ ID NO: 67406 - protein, 13 aa, unidentified
  source 1..13: note = methanogen bacteria
VLFNLFGNYILSG

SEQ ID NO: 67407 - protein, 13 aa, unidentified
  source 1..13: note = methanogen bacteria
YTAQITDLIYTYN

SEQ ID NO: 67408 - protein, 10 aa, unidentified
  source 1..10: note = methanogen bacteria
LVAPTVGLGL

SEQ ID NO: 67409 - protein, 20 aa, unidentified
  source 1..20: note = methanogen bacteria
LPNITALLMDPMDAITIQSP

SEQ ID NO: 67410 - protein, 11 aa, unidentified
  source 1..11: note = methanogen bacteria
MGIMVEAVMIN

SEQ ID NO: 67411 - protein, 12 aa, unidentified
  source 1..12: note = methanogen bacteria
YANEITDLIYTY

SEQ ID NO: 67412 - protein, 12 aa, unidentified
  source 1..12: note = methanogen bacteria
LVAPTVGLGAVD

SEQ ID NO: 67413 - protein, 20 aa, unidentified
  source 1..20: note = methanogen bacteria
PNIAAIMNKSMGSISIVSMD

SEQ ID NO: 67414 - protein, 12 aa, unidentified
  source 1..12: note = methanogen bacteria
TEEITNLIYTYN

SEQ ID NO: 67415 - protein, 10 aa, unidentified
  source 1..10: note = methanogen bacteria
LVAPTVGLGL

SEQ ID NO: 67416 - protein, 20 aa, unidentified
  source 1..20: note = methanogen bacteria
PNITAMIQNPMDAITIASMD

SEQ ID NO: 67417 - protein, 14 aa, unidentified
  source 1..14: note = methanogen bacteria
PFLFNLFENYVKAY

SEQ ID NO: 67418 - protein, 13 aa, unidentified
  source 1..13: note = methanogen bacteria
FTQQITDLIYTYN

SEQ ID NO: 67419 - protein, 10 aa, unidentified
  source 1..10: note = methanogen bacteria
LVAPTVGLGL

SEQ ID NO: 67420 - protein, 19 aa, unidentified
  source 1..19: note = methanogen bacteria
PNITAMIQNPMDAISISSP

SEQ ID NO: 67421 - protein, 12 aa, unidentified
  source 1..12: note = methanogen bacteria
VATLSFSTQGVG

SEQ ID NO: 67422 - protein, 12 aa, unidentified
  source 1..12: note = methanogen bacteria
TKQITDLIYTYN

SEQ ID NO: 67423 - protein, 10 aa, unidentified
  source 1..10: note = methanogen bacteria
LVAPTVGLGL

SEQ ID NO: 67424 - protein, 19 aa, unidentified
  source 1..19: note = methanogen bacteria
PNITAMIQNPMEAISIASP

SEQ ID NO: 67425 - protein, 13 aa, unidentified
  source 1..13: note = methanogen bacteria
YTTQITDLIYSYN

SEQ ID NO: 67426 - protein, 10 aa, unidentified
  source 1..10: note = methanogen bacteria
LVAPTVGLGL

SEQ ID NO: 67427 - protein, 19 aa, unidentified
  source 1..19: note = methanogen bacteria
PNITAMIQNPMDAITISSP

SEQ ID NO: 67428 - protein, 13 aa, unidentified
  source 1..13: note = methanogen bacteria
YTTQITDLIYTYN

SEQ ID NO: 67429 - protein, 10 aa, unidentified
  source 1..10: note = methanogen bacteria
LVAPTVGLGL

SEQ ID NO: 67430 - protein, 20 aa, unidentified
  source 1..20: note = methanogen bacteria
PNITAMIQNPMDAITIASVD

SEQ ID NO: 67431 - protein, 19 aa, unidentified
  source 1..19: note = methanogen bacteria
GWLVSQGMIPVSRVPYVTA

SEQ ID NO: 67432 - protein, 12 aa, unidentified
  source 1..12: note = methanogen bacteria
TQQITDLIYTYN

SEQ ID NO: 67433 - protein, 10 aa, unidentified
  source 1..10: note = methanogen bacteria
LVAPSVGLGL

SEQ ID NO: 67434 - protein, 19 aa, unidentified
  source 1..19: note = methanogen bacteria
PNITAMIANPMDAISISSP

SEQ ID NO: 67435 - protein, 12 aa, unidentified
  source 1..12: note = methanogen bacteria
SQLVDAVTIIDN

SEQ ID NO: 67436 - protein, 13 aa, unidentified
  source 1..13: note = methanogen bacteria
ILFQIFGNYILSS

SEQ ID NO: 67437 - protein, 11 aa, unidentified
  source 1..11: note = methanogen bacteria
ADQLVQAIYSY

SEQ ID NO: 67438 - protein, 12 aa, unidentified
  source 1..12: note = methanogen bacteria
IVAPTIGVTSLD

SEQ ID NO: 67439 - protein, 19 aa, unidentified
  source 1..19: note = methanogen bacteria
PNIAGVLSKTSSPITIGSP

SEQ ID NO: 67440 - protein, 12 aa, unidentified
  source 1..12: note = methanogen bacteria
TKQITDLIYTYN

SEQ ID NO: 67441 - protein, 10 aa, unidentified
  source 1..10: note = methanogen bacteria
LVAPTVGLGL

SEQ ID NO: 67442 - protein, 19 aa, unidentified
  source 1..19: note = methanogen bacteria
PNITAMIQNPMDGITISSP

SEQ ID NO: 67443 - protein, 16 aa, unidentified
  source 1..16: note = methanogen bacteria
DEAISTSIKFPNLSPE

SEQ ID NO: 67444 - protein, 20 aa, unidentified
  source 1..20: note = methanogen bacteria
GWLVSQGMIPVSRVPYVTAV

SEQ ID NO: 67445 - protein, 10 aa, unidentified
  source 1..10: note = methanogen bacteria
SIGGYGESAL

SEQ ID NO: 67446 - protein, 13 aa, unidentified
  source 1..13: note = methanogen bacteria
IFTGTLGFAMAAG

SEQ ID NO: 67447 - protein, 18 aa, unidentified
  source 1..18: note = methanogen bacteria
HALGLHMFSDKAVSGDRI

SEQ ID NO: 67448 - protein, 40 aa, unidentified
  source 1..40: note = methanogen bacteria
MHIPDGLIGENPFTEAVEHGHEHAHELLENGPLGHALINP

SEQ ID NO: 67449 - protein, 11 aa, unidentified
  source 1..11: note = methanogen bacteria
EIPLPVAACAH

SEQ ID NO: 67450 - protein, 21 aa, unidentified
  source 1..21: note = methanogen bacteria
MEIIDLFSIALTGVKEQKIGL

SEQ ID NO: 67451 - protein, 31 aa, unidentified
  source 1..31: note = methanogen bacteria
TEHKNALDSLVMVSNAFTSNGYAVLGQSIPG

SEQ ID NO: 67452 - protein, 33 aa, unidentified
  source 1..33: note = methanogen bacteria
DSNITDFRTAIWYTFASMTSTGYGDVVPTSSPG

SEQ ID NO: 67453 - protein, 10 aa, unidentified
  source 1..10: note = methanogen bacteria
TFYSTSRTFK

SEQ ID NO: 67454 - protein, 33 aa, unidentified
  source 1..33: note = methanogen bacteria
VDSNINNLQTAFWYIVVTITSTGYGDVVPATAS

SEQ ID NO: 67455 - protein, 22 aa, unidentified
  source 1..22: note = methanogen bacteria
MAIEEMVTNMSITESGAATSSP

SEQ ID NO: 67456 - protein, 13 aa, unidentified
  source 1..13: note = methanogen bacteria
YSGTALQITPIIA

SEQ ID NO: 67457 - protein, 17 aa, unidentified
  source 1..17: note = methanogen bacteria
DGTARGLSIGDDPHPPE

SEQ ID NO: 67458 - protein, 16 aa, unidentified
  source 1..16: note = methanogen bacteria
DMVTGTNYMTYGVFDT

SEQ ID NO: 67459 - protein, 22 aa, unidentified
  source 1..22: note = methanogen bacteria
MSAMDQMLTNMTTSGNAVVNSQ

SEQ ID NO: 67460 - protein, 13 aa, unidentified
  source 1..13: note = methanogen bacteria
YSGTALEITPIIA

SEQ ID NO: 67461 - protein, 12 aa, unidentified
  source 1..12: note = methanogen bacteria
QVYLISQIKLPI

SEQ ID NO: 67462 - protein, 24 aa, unidentified
  source 1..24: note = methanogen bacteria
MSGLDQMLTNMTVSSNGVVDSPIF

SEQ ID NO: 67463 - protein, 13 aa, unidentified
  source 1..13: note = methanogen bacteria
YSRTALEITPIIA

SEQ ID NO: 67464 - protein, 24 aa, unidentified
  source 1..24: note = methanogen bacteria
MSAMDQMLSNMTASGNGIVNSQLF

SEQ ID NO: 67465 - protein, 13 aa, unidentified
  source 1..13: note = methanogen bacteria
YSGTALEITPIIA

SEQ ID NO: 67466 - protein, 23 aa, unidentified
  source 1..23: note = methanogen bacteria
NIFVDPLLFLQFLRELCNGVFNN

SEQ ID NO: 67467 - protein, 30 aa, unidentified
  source 1..30: note = methanogen bacteria
VCMYRPWILDSRIHSVEAALPAAGGYSFPS

SEQ ID NO: 67468 - protein, 62 aa, unidentified
  source 1..62: note = methanogen bacteria
NKIKTQTKAEITDSDTHMFTVHVTVTEQGTGKPVTKGRVTIKSKKGKIIGTGKIKEGTADIT

SEQ ID NO: 67469 - protein, 37 aa, unidentified
  source 1..37: note = methanogen bacteria
LITAYPQSQLAHTLSSIIPYVAVSNTTMQHFYLANLH

SEQ ID NO: 67470 - protein, 10 aa, unidentified
  source 1..10: note = methanogen bacteria
MINMVETVMI

SEQ ID NO: 67471 - protein, 33 aa, unidentified
  source 1..33: note = methanogen bacteria
VDSNIVDFRTAIWYTFVSMTSTGYGDVVPTSTS

SEQ ID NO: 67472 - protein, 25 aa, unidentified
  source 1..25: note = methanogen bacteria
SDFGSVPLNILFGYFIGTSYEFTAF

SEQ ID NO: 67473 - protein, 16 aa, unidentified
  source 1..16: note = methanogen bacteria
YDSYGTFPEGYYFYMS

SEQ ID NO: 67474 - protein, 11 aa, unidentified
  source 1..11: note = methanogen bacteria
KYANKSVVFND

SEQ ID NO: 67475 - protein, 10 aa, unidentified
  source 1..10: note = methanogen bacteria
FYPVDTSFKF

SEQ ID NO: 67476 - protein, 32 aa, unidentified
  source 1..32: note = methanogen bacteria
DSNIADFKTAIWYTFASMTSTGYGDVVPTSTS

SEQ ID NO: 67477 - protein, 22 aa, unidentified
  source 1..22: note = methanogen bacteria
MSAMDEMLSNMTVSSSGTVNTP

SEQ ID NO: 67478 - protein, 13 aa, unidentified
  source 1..13: note = methanogen bacteria
YSGTALEITPIIA

SEQ ID NO: 67479 - protein, 13 aa, unidentified
  source 1..13: note = methanogen bacteria
QAVQDSTFVTDPA

SEQ ID NO: 67480 - protein, 12 aa, unidentified
  source 1..12: note = methanogen bacteria
QAVQDSTFVTDP

SEQ ID NO: 67481 - protein, 14 aa, unidentified
  source 1..14: note = methanogen bacteria
QEMAKNSTLFAGNM

SEQ ID NO: 67482 - protein, 19 aa, unidentified
  source 1..19: note = methanogen bacteria
SYLGLVGADNSWLNYTIWD

SEQ ID NO: 67483 - protein, 12 aa, unidentified
  source 1..12: note = methanogen bacteria
SQLIDAVTVIGN

SEQ ID NO: 67484 - protein, 12 aa, unidentified
  source 1..12: note = methanogen bacteria
PILFKLFVNYVH

SEQ ID NO: 67485 - protein, 22 aa, unidentified
  source 1..22: note = methanogen bacteria
DMVGLGGVEASSAEEVGVTIQS

SEQ ID NO: 67486 - protein, 13 aa, unidentified
  source 1..13: note = methanogen bacteria
NTAVKESTFVSDP

SEQ ID NO: 67487 - protein, 15 aa, unidentified
  source 1..15: note = methanogen bacteria
NSGYTIGFETDCVFD

SEQ ID NO: 67488 - protein, 19 aa, unidentified
  source 1..19: note = methanogen bacteria
ADLLLSNSNTFNDPTVYTN

SEQ ID NO: 67489 - protein, 14 aa, unidentified
  source 1..14: note = methanogen bacteria
NEFATANMTGFDAT

SEQ ID NO: 67490 - protein, 32 aa, unidentified
  source 1..32: note = methanogen bacteria
ADQVAEYIKPMVDSFEQNVESGTVTLTTHSLF

SEQ ID NO: 67491 - protein, 11 aa, unidentified
  source 1..11: note = methanogen bacteria
FYGTKLNIVQY

SEQ ID NO: 67492 - protein, 16 aa, unidentified
  source 1..16: note = methanogen bacteria
IPIAYKILPFFGIGIR

SEQ ID NO: 67493 - protein, 12 aa, unidentified
  source 1..12: note = methanogen bacteria
SQLADAVTVIDN

SEQ ID NO: 67494 - protein, 11 aa, unidentified
  source 1..11: note = methanogen bacteria
MLFKLFERYVI

SEQ ID NO: 67495 - protein, 13 aa, unidentified
  source 1..13: note = methanogen bacteria
NTAVNQSSFVTDP

SEQ ID NO: 67496 - protein, 13 aa, unidentified
  source 1..13: note = methanogen bacteria
PYTKELYNFVYNY

SEQ ID NO: 67497 - protein, 10 aa, unidentified
  source 1..10: note = methanogen bacteria
LVSPMAGVSS

SEQ ID NO: 67498 - protein, 18 aa, unidentified
  source 1..18: note = methanogen bacteria
PNISSLTSGSAVQIQSLT

SEQ ID NO: 67499 - protein, 32 aa, unidentified
  source 1..32: note = methanogen bacteria
DSQINDMQTAVWYIIVSMTSTGYGDVVPIIIP

SEQ ID NO: 67500 - protein, 14 aa, unidentified
  source 1..14: note = methanogen bacteria
NTAVNDSTFIVDPT

SEQ ID NO: 67501 - protein, 11 aa, unidentified
  source 1..11: note = methanogen bacteria
QLIDAVTLIDN

SEQ ID NO: 67502 - protein, 10 aa, unidentified
  source 1..10: note = methanogen bacteria
LFKLFEQYLL

SEQ ID NO: 67503 - protein, 35 aa, unidentified
  source 1..35: note = methanogen bacteria
IDLGHIGYKELLHIIFNKNDPSNDLINGILIWDLG

SEQ ID NO: 67504 - protein, 19 aa, unidentified
  source 1..19: note = methanogen bacteria
LGGGMISGQSHATISIDNP

SEQ ID NO: 67505 - protein, 24 aa, unidentified
  source 1..24: note = methanogen bacteria
YMFNEYALSTIVFWQFGSMGKAGW

SEQ ID NO: 67506 - protein, 13 aa, unidentified
  source 1..13: note = methanogen bacteria
PLLFKLFENFINY

SEQ ID NO: 67507 - protein, 12 aa, unidentified
  source 1..12: note = methanogen bacteria
IATSFISLNGVG

SEQ ID NO: 67508 - protein, 12 aa, unidentified
  source 1..12: note = methanogen bacteria
NGFTLFGLYTIL

SEQ ID NO: 67509 - protein, 13 aa, unidentified
  source 1..13: note = methanogen bacteria
PFTQQVYDIVYGY

SEQ ID NO: 67510 - protein, 10 aa, unidentified
  source 1..10: note = methanogen bacteria
LVAPIAGVSS

SEQ ID NO: 67511 - protein, 17 aa, unidentified
  source 1..17: note = methanogen bacteria
PNISLLVEGTTLELQSL

SEQ ID NO: 67512 - protein, 15 aa, unidentified
  source 1..15: note = methanogen bacteria
FTAVTDSILIVDPDV

SEQ ID NO: 67513 - protein, 12 aa, unidentified
  source 1..12: note = methanogen bacteria
CSFGNVDYGKTT

SEQ ID NO: 67514 - protein, 19 aa, unidentified
  source 1..19: note = methanogen bacteria
NYGAGVPLEYSLLSFLAND

SEQ ID NO: 67515 - protein, 28 aa, unidentified
  source 1..28: note = methanogen bacteria
DFTFSNMYLNQLLGNLIETHGQNIVSCF

SEQ ID NO: 67516 - protein, 10 aa, unidentified
  source 1..10: note = methanogen bacteria
SIGCTMPEFN

SEQ ID NO: 67517 - protein, 11 aa, unidentified
  source 1..11: note = methanogen bacteria
TSIGCTMPEFN

SEQ ID NO: 67518 - protein, 21 aa, unidentified
  source 1..21: note = methanogen bacteria
EIFQMVPAGGESAFQDIDIIS

SEQ ID NO: 67519 - protein, 11 aa, unidentified
  source 1..11: note = methanogen bacteria
TSIGCAMPEFN

SEQ ID NO: 67520 - protein, 10 aa, unidentified
  source 1..10: note = methanogen bacteria
YIFVTLAIMV

SEQ ID NO: 67521 - protein, 10 aa, unidentified
  source 1..10: note = methanogen bacteria
SIGCTMPEFN

SEQ ID NO: 67522 - protein, 10 aa, unidentified
  source 1..10: note = methanogen bacteria
SIGCTMPEFN

SEQ ID NO: 67523 - protein, 32 aa, unidentified
  source 1..32: note = methanogen bacteria
ADSISDYIQPMVDNFQKQVEEGAITLTTYSIF

SEQ ID NO: 67524 - protein, 11 aa, unidentified
  source 1..11: note = methanogen bacteria
YFGSDFNIYAY

SEQ ID NO: 67525 - protein, 13 aa, unidentified
  source 1..13: note = methanogen bacteria
AGKLLPFFGLSMG

SEQ ID NO: 67526 - protein, 27 aa, unidentified
  source 1..27: note = methanogen bacteria
FDFPFISIKEGEILLLNVGSLFTAHGS

SEQ ID NO: 67527 - protein, 10 aa, unidentified
  source 1..10: note = methanogen bacteria
GQSIHLIFEM

SEQ ID NO: 67528 - protein, 41 aa, unidentified
  source 1..41: note = methanogen bacteria
SVLPLHPFAFAMASGVGSASMNAASLAPTLAAFPALETQIE

SEQ ID NO: 67529 - protein, 11 aa, unidentified
  source 1..11: note = methanogen bacteria
TSIGCTMPEFN

SEQ ID NO: 67530 - protein, 10 aa, unidentified
  source 1..10: note = methanogen bacteria
SIGCTMPEFN

SEQ ID NO: 67531 - protein, 12 aa, unidentified
  source 1..12: note = methanogen bacteria
VYQSAFTSSDAL

SEQ ID NO: 67532 - protein, 14 aa, unidentified
  source 1..14: note = methanogen bacteria
TIGVENIVRLILGM

SEQ ID NO: 67533 - protein, 13 aa, unidentified
  source 1..13: note = methanogen bacteria
GATLAEAGGASIG

SEQ ID NO: 67534 - protein, 31 aa, unidentified
  source 1..31: note = methanogen bacteria
ADSISDYIQPMVDNFQKQVDEGVITLTTQSI

SEQ ID NO: 67535 - protein, 12 aa, unidentified
  source 1..12: note = methanogen bacteria
GYFGADFNIYAY

SEQ ID NO: 67536 - protein, 16 aa, unidentified
  source 1..16: note = methanogen bacteria
VPLAGKLLPFFGLSMG

SEQ ID NO: 67537 - protein, 10 aa, unidentified
  source 1..10: note = methanogen bacteria
IRFLASDQQP

SEQ ID NO: 67538 - protein, 21 aa, unidentified
  source 1..21: note = methanogen bacteria
DYFSLTGTSTLEGVSITWASI

SEQ ID NO: 67539 - protein, 10 aa, unidentified
  source 1..10: note = methanogen bacteria
SIGCTMPEFN

SEQ ID NO: 67540 - protein, 20 aa, unidentified
  source 1..20: note = methanogen bacteria
LGHENLSLSGFWYYLSLGVF

SEQ ID NO: 67541 - protein, 10 aa, unidentified
  source 1..10: note = methanogen bacteria
KSDLGTTPIS

SEQ ID NO: 67542 - protein, 16 aa, unidentified
  source 1..16: note = methanogen bacteria
YNELNLKQVYSTMACG

SEQ ID NO: 67543 - protein, 11 aa, unidentified
  source 1..11: note = methanogen bacteria
RLSLYLGYSIP

SEQ ID NO: 67544 - protein, 10 aa, unidentified
  source 1..10: note = methanogen bacteria
FPVDYSLIQW

SEQ ID NO: 67545 - protein, 12 aa, unidentified
  source 1..12: note = methanogen bacteria
PLLFSLFETYVL

SEQ ID NO: 67546 - protein, 32 aa, unidentified
  source 1..32: note = methanogen bacteria
ADSISEYIQPMVDNFQKQVDEGVITLTTHSIF

SEQ ID NO: 67547 - protein, 11 aa, unidentified
  source 1..11: note = methanogen bacteria
YFGADFNIYAY

SEQ ID NO: 67548 - protein, 16 aa, unidentified
  source 1..16: note = methanogen bacteria
VPLAGKLLPFFGLSMG

SEQ ID NO: 67549 - protein, 27 aa, unidentified
  source 1..27: note = methanogen bacteria
MGMTDFSFETVRNMDLGANFVHGTGKA

SEQ ID NO: 67550 - protein, 21 aa, unidentified
  source 1..21: note = methanogen bacteria
RVQIGEALNYVFKYIDFGGKY

SEQ ID NO: 67551 - protein, 29 aa, unidentified
  source 1..29: note = methanogen bacteria
TFTMHGDTTPLIIAMPWGTANLMDNVMGF

SEQ ID NO: 67552 - protein, 11 aa, unidentified
  source 1..11: note = methanogen bacteria
TSIGCTMPEFN

SEQ ID NO: 67553 - protein, 10 aa, unidentified
  source 1..10: note = methanogen bacteria
SIGCTMPEFN

SEQ ID NO: 67554 - protein, 20 aa, unidentified
  source 1..20: note = methanogen bacteria
DYYGWSATPTIAVNSLNIAS

SEQ ID NO: 67555 - protein, 32 aa, unidentified
  source 1..32: note = methanogen bacteria
SSPLGFPTFDLEDLLMDAPETAHLLFSHDPVD

SEQ ID NO: 67556 - protein, 27 aa, unidentified
  source 1..27: note = methanogen bacteria
MGFADISFEAVRNMNLGANFVHGAGKA

SEQ ID NO: 67557 - protein, 11 aa, unidentified
  source 1..11: note = methanogen bacteria
KDKILELAHGE

SEQ ID NO: 67558 - protein, 14 aa, unidentified
  source 1..14: note = methanogen bacteria
QDQQDALIAYAVLI

SEQ ID NO: 67559 - protein, 11 aa, unidentified
  source 1..11: note = methanogen bacteria
TSIGCAMPEFN

SEQ ID NO: 67560 - protein, 10 aa, unidentified
  source 1..10: note = methanogen bacteria
SIGCTMPEFN

SEQ ID NO: 67561 - protein, 16 aa, unidentified
  source 1..16: note = methanogen bacteria
MVMIPPYVPEAFLTMY

SEQ ID NO: 67562 - protein, 33 aa, unidentified
  source 1..33: note = methanogen bacteria
YPDSFASVLQPMIQQFEQNIADGTVTLATDSLF

SEQ ID NO: 67563 - protein, 10 aa, unidentified
  source 1..10: note = methanogen bacteria
FAAQMDLTSY

SEQ ID NO: 67564 - protein, 12 aa, unidentified
  source 1..12: note = methanogen bacteria
ARFFLSFFGIQI

SEQ ID NO: 67565 - protein, 27 aa, unidentified
  source 1..27: note = methanogen bacteria
HSYLNGWSAEKSEWTITRAIGGYNGQA

SEQ ID NO: 67566 - protein, 16 aa, unidentified
  source 1..16: note = methanogen bacteria
MVLIPPYVPDVFISMY

SEQ ID NO: 67567 - protein, 19 aa, unidentified
  source 1..19: note = methanogen bacteria
YFTISSTPTVDENTISVMS

SEQ ID NO: 67568 - protein, 16 aa, unidentified
  source 1..16: note = methanogen bacteria
MMFIPPHVPAEFVSMY

SEQ ID NO: 67569 - protein, 17 aa, unidentified
  source 1..17: note = methanogen bacteria
MVFIPFYVPAEFLSMYL

SEQ ID NO: 67570 - protein, 21 aa, unidentified
  source 1..21: note = methanogen bacteria
DMFHLAGTDIASSRAVNLEMT

SEQ ID NO: 67571 - protein, 16 aa, unidentified
  source 1..16: note = methanogen bacteria
MVVLPVVVPDAFISMY

SEQ ID NO: 67572 - protein, 17 aa, unidentified
  source 1..17: note = methanogen bacteria
MVFIPPYVPDAFLSMYL

SEQ ID NO: 67573 - protein, 12 aa, unidentified
  source 1..12: note = methanogen bacteria
TYLCTVTLMNPE

SEQ ID NO: 67574 - protein, 19 aa, unidentified
  source 1..19: note = methanogen bacteria
MIGQGSTSTVESMGVDIYM

SEQ ID NO: 67575 - protein, 16 aa, unidentified
  source 1..16: note = methanogen bacteria
MVFIPPHVPAEFISMY

SEQ ID NO: 67576 - protein, 11 aa, unidentified
  source 1..11: note = methanogen bacteria
VSGLGSDPLAA

SEQ ID NO: 67577 - protein, 18 aa, unidentified
  source 1..18: note = methanogen bacteria
PMLVAMGASSVMQYAKPY

SEQ ID NO: 67578 - protein, 16 aa, unidentified
  source 1..16: note = methanogen bacteria
MLFLPNFVPDVFVSMY

SEQ ID NO: 67579 - protein, 16 aa, unidentified
  source 1..16: note = methanogen bacteria
MWESSGDSFYILPSIS

SEQ ID NO: 67580 - protein, 16 aa, unidentified
  source 1..16: note = methanogen bacteria
MVFIPQYVPQAFISMY

SEQ ID NO: 67581 - protein, 21 aa, unidentified
  source 1..21: note = methanogen bacteria
ANIGLMGNEAADNGFISWFST

SEQ ID NO: 67582 - protein, 16 aa, unidentified
  source 1..16: note = methanogen bacteria
MIFTPPYVPSEFIFMY

SEQ ID NO: 67583 - protein, 23 aa, unidentified
  source 1..23: note = methanogen bacteria
SGLGSAPVSSIPYAINLIWMVEI

SEQ ID NO: 67584 - protein, 13 aa, unidentified
  source 1..13: note = methanogen bacteria
GIATLSISTAGFG

SEQ ID NO: 67585 - protein, 18 aa, unidentified
  source 1..18: note = methanogen bacteria
GLGLKAIGVEEMFIGFLM

SEQ ID NO: 67586 - protein, 14 aa, unidentified
  source 1..14: note = methanogen bacteria
LGYSHIVIGDYMIS

SEQ ID NO: 67587 - protein, 24 aa, unidentified
  source 1..24: note = methanogen bacteria
KAGLGTAPISCIPATLTDCVGMTS

SEQ ID NO: 67588 - protein, 11 aa, unidentified
  source 1..11: note = methanogen bacteria
LDALGMSPDGY

SEQ ID NO: 67589 - protein, 14 aa, unidentified
  source 1..14: note = methanogen bacteria
FGIAASGVSTAGFG

SEQ ID NO: 67590 - protein, 21 aa, unidentified
  source 1..21: note = methanogen bacteria
DMFHLAGTGVASSLEVTLEST

SEQ ID NO: 67591 - protein, 20 aa, unidentified
  source 1..20: note = methanogen bacteria
VAFIFSYSEASSHLEPLIAS

SEQ ID NO: 67592 - protein, 20 aa, unidentified
  source 1..20: note = methanogen bacteria
AVPTVAVISSDAALDEYFIN

SEQ ID NO: 67593 - protein, 45 aa, unidentified
  source 1..45: note = methanogen bacteria
NIGNALIFADEAAFQGSNGLLSMFSNTNGTGLPILDSSLTAITQA

SEQ ID NO: 67594 - protein, 17 aa, unidentified
  source 1..17: note = methanogen bacteria
PGLAALGTGDVTTLASA

SEQ ID NO: 67595 - protein, 25 aa, unidentified
  source 1..25: note = methanogen bacteria
AMGMNDCALDDLANVGSNHLVQDDV

SEQ ID NO: 67596 - protein, 14 aa, unidentified
  source 1..14: note = methanogen bacteria
AIVDAIADVGNAGD

SEQ ID NO: 67597 - protein, 21 aa, unidentified
  source 1..21: note = methanogen bacteria
EILIYYLPDSYMFADGYVESM

SEQ ID NO: 67598 - protein, 19 aa, unidentified
  source 1..19: note = methanogen bacteria
DQFGIVSSGTVNPESFNVM

SEQ ID NO: 67599 - protein, 13 aa, unidentified
  source 1..13: note = methanogen bacteria
SEIISSVIQGSNT

SEQ ID NO: 67600 - protein, 19 aa, unidentified
  source 1..19: note = methanogen bacteria
PNISIIRSGDLAAIKIGSI

SEQ ID NO: 67601 - protein, 10 aa, unidentified
  source 1..10: note = methanogen bacteria
YDKVQASFEP

SEQ ID NO: 67602 - protein, 11 aa, unidentified
  source 1..11: note = methanogen bacteria
GYSSDVLGVGS

SEQ ID NO: 67603 - protein, 18 aa, unidentified
  source 1..18: note = methanogen bacteria
IFGLNGANLIPDNITIMT

SEQ ID NO: 67604 - protein, 11 aa, unidentified
  source 1..11: note = methanogen bacteria
SSVGYHLPTLN

SEQ ID NO: 67605 - protein, 11 aa, unidentified
  source 1..11: note = methanogen bacteria
TAMGYTLPELN

SEQ ID NO: 67606 - protein, 20 aa, unidentified
  source 1..20: note = methanogen bacteria
EHFGIVSSGLVDGESVTIMV

SEQ ID NO: 67607 - protein, 11 aa, unidentified
  source 1..11: note = methanogen bacteria
TAMGYTLPELN

SEQ ID NO: 67608 - protein, 11 aa, unidentified
  source 1..11: note = methanogen bacteria
SAMGYTLPELN

SEQ ID NO: 67609 - protein, 13 aa, unidentified
  source 1..13: note = methanogen bacteria
ILSFGQHEFTHPF

SEQ ID NO: 67610 - protein, 38 aa, unidentified
  source 1..38: note = methanogen bacteria
RTMPCLWHSPIQVLKYSMHLEYFPFVVFPQVFNQMGDA

SEQ ID NO: 67611 - protein, 20 aa, unidentified
  source 1..20: note = methanogen bacteria
ENFGIVSEGIIDSTTVSVMS

SEQ ID NO: 67612 - protein, 11 aa, unidentified
  source 1..11: note = methanogen bacteria
KVCSWGFFSIE

SEQ ID NO: 67613 - protein, 21 aa, unidentified
  source 1..21: note = methanogen bacteria
AMPFDPATFTAQPHLAYVFGF

SEQ ID NO: 67614 - protein, 21 aa, unidentified
  source 1..21: note = methanogen bacteria
ENVGIMGADLVGQSTLSLFEV

SEQ ID NO: 67615 - protein, 20 aa, unidentified
  source 1..20: note = methanogen bacteria
YLYNTAIDVFNSTNDFYYTL

SEQ ID NO: 67616 - protein, 20 aa, unidentified
  source 1..20: note = methanogen bacteria
ICGENIMVQLLHGGYEVMNS

SEQ ID NO: 67617 - protein, 10 aa, unidentified
  source 1..10: note = methanogen bacteria
LGNGGNYHFT

SEQ ID NO: 67618 - protein, 16 aa, unidentified
  source 1..16: note = methanogen bacteria
NNFRFSNGIFSMESQW

SEQ ID NO: 67619 - protein, 17 aa, unidentified
  source 1..17: note = methanogen bacteria
QFPFKVIAMNSHYANNF

SEQ ID NO: 67620 - protein, 11 aa, unidentified
  source 1..11: note = methanogen bacteria
NYKMLHINDGK

SEQ ID NO: 67621 - protein, 20 aa, unidentified
  source 1..20: note = methanogen bacteria
GHFGIVGGNLMGDQPTWMDV

SEQ ID NO: 67622 - protein, 18 aa, unidentified
  source 1..18: note = methanogen bacteria
ENIGLNGATLTPETVTVM

SEQ ID NO: 67623 - protein, 11 aa, unidentified
  source 1..11: note = methanogen bacteria
ELDFKFIIENY

SEQ ID NO: 67624 - protein, 12 aa, unidentified
  source 1..12: note = methanogen bacteria
KLPSVTGSSAHP

SEQ ID NO: 67625 - protein, 15 aa, unidentified
  source 1..15: note = methanogen bacteria
VFTTNNANFVDAFVD

SEQ ID NO: 67626 - protein, 21 aa, unidentified
  source 1..21: note = methanogen bacteria
EHFGITSPGTVEQSSVNIFSI

SEQ ID NO: 67627 - protein, 18 aa, unidentified
  source 1..18: note = methanogen bacteria
EMFNLLPVDETPLNLNII

SEQ ID NO: 67628 - protein, 97 aa, unidentified
  source 1..97: note = methanogen bacteria
VSGMTIFSPLLRIGRIEQYSLSSIKTVLSNIQLIGHNANASYWGAEGTAFAEGYITLPMQLVLFFGLPFPMFFGILVNQKDTIDYMLPGIFGWGFDF

SEQ ID NO: 67629 - protein, 95 aa, unidentified
  source 1..95: note = methanogen bacteria
DTAFPQVVKNKTVDSNITYSTTKTNYSSAEIDSSDSDDSSSSSSSSIDTGDSSGGGSSYDGGSSGGGSSSGGGSSGGGSSSGGGSSGGGSSSGGG

SEQ ID NO: 67630 - protein, 29 aa, unidentified
  source 1..29: note = methanogen bacteria
INSAPSLGGYMTTGLGANGYGAASSVGIN

SEQ ID NO: 67631 - protein, 12 aa, unidentified
  source 1..12: note = methanogen bacteria
KLPSVTGSSAHP

SEQ ID NO: 67632 - protein, 16 aa, unidentified
  source 1..16: note = methanogen bacteria
NVVTANNASFVDAFVD

SEQ ID NO: 67633 - protein, 98 aa, unidentified
  source 1..98: note = methanogen bacteria
VFNFDFDKVSPTESVATIQDTAFPEFKEVKTSNTTSTSHNNSWSTSSSNTIETTTDTSSTPSSDSSGSGGGQQSDPGSDGGGSDSGGGTTPNNGGNAN

SEQ ID NO: 67634 - protein, 13 aa, unidentified
  source 1..13: note = methanogen bacteria
RPFHLIFINNFFE

SEQ ID NO: 67635 - protein, 76 aa, unidentified
  source 1..76: note = methanogen bacteria
VATPEISMGSPVNFYNLSNNSNIPLNNSNITYDDENVHLNINVDIDDEEEKNITINRYDNRTTFLISNYDSSQSNV

SEQ ID NO: 67636 - protein, 20 aa, unidentified
  source 1..20: note = methanogen bacteria
GNFGIVGGDLVGSHPTWMDI

SEQ ID NO: 67637 - protein, 20 aa, unidentified
  source 1..20: note = methanogen bacteria
GNFGIVGGDLIGPNPTWMDV

SEQ ID NO: 67638 - protein, 19 aa, unidentified
  source 1..19: note = methanogen bacteria
VRELDYSIFKSFLILTPTY

SEQ ID NO: 67639 - protein, 18 aa, unidentified
  source 1..18: note = methanogen bacteria
LDASGLASIASGEENIIS

SEQ ID NO: 67640 - protein, 29 aa, unidentified
  source 1..29: note = methanogen bacteria
INSAPMLGGYAATGLGQNGFGSASSVGLD

SEQ ID NO: 67641 - protein, 29 aa, unidentified
  source 1..29: note = methanogen bacteria
INSSAYLGGYATTGLGQNGFGMASSVGLN

SEQ ID NO: 67642 - protein, 17 aa, unidentified
  source 1..17: note = methanogen bacteria
GTWGIPDVGNSNANIVT

SEQ ID NO: 67643 - protein, 30 aa, unidentified
  source 1..30: note = methanogen bacteria
INSAPSLGGYAVTGLGQNGFGSASLVGLNV

SEQ ID NO: 67644 - protein, 29 aa, unidentified
  source 1..29: note = methanogen bacteria
INSAPSLGGYAATGLGQNGFGSASSVGID

SEQ ID NO: 67645 - protein, 29 aa, unidentified
  source 1..29: note = methanogen bacteria
INSAPDLGGYMTTGLGQNGFGSASSVGLN

SEQ ID NO: 67646 - protein, 20 aa, unidentified
  source 1..20: note = methanogen bacteria
QFMGLDGFSESYPTINLFND

SEQ ID NO: 67647 - protein, 29 aa, unidentified
  source 1..29: note = methanogen bacteria
INSSAHLGGYALTGLGQNGFGPASSVGLN

SEQ ID NO: 67648 - protein, 22 aa, unidentified
  source 1..22: note = methanogen bacteria
FGVRGPIGKFFLEFFAVKIAFS

SEQ ID NO: 67649 - protein, 27 aa, unidentified
  source 1..27: note = methanogen bacteria
LAGNIARQTRTLPMAVYSEVAAGNMGE

SEQ ID NO: 67650 - protein, 17 aa, unidentified
  source 1..17: note = methanogen bacteria
DASGLASTGSGDADIVP

SEQ ID NO: 67651 - protein, 17 aa, unidentified
  source 1..17: note = methanogen bacteria
SAYGIPDVGNSDANVIT

SEQ ID NO: 67652 - protein, 29 aa, unidentified
  source 1..29: note = methanogen bacteria
INSSAHLGGYMTTGLGQNGFGTASAVGLN

SEQ ID NO: 67653 - protein, 12 aa, unidentified
  source 1..12: note = methanogen bacteria
KNQLYSAIGVYN

SEQ ID NO: 67654 - protein, 18 aa, unidentified
  source 1..18: note = methanogen bacteria
NIISLDMNGMKPINIVSA

SEQ ID NO: 67655 - protein, 13 aa, unidentified
  source 1..13: note = methanogen bacteria
AAFGFSGFMLGAD

SEQ ID NO: 67656 - protein, 28 aa, unidentified
  source 1..28: note = methanogen bacteria
NSAPSLGGYMATGLGQNGFGSASSVGLG

SEQ ID NO: 67657 - protein, 11 aa, unidentified
  source 1..11: note = methanogen bacteria
KTQLNSVMGAY

SEQ ID NO: 67658 - protein, 10 aa, unidentified
  source 1..10: note = methanogen bacteria
GSKESLFGLD

SEQ ID NO: 67659 - protein, 18 aa, unidentified
  source 1..18: note = methanogen bacteria
PNIIGLNMNDMKPINVVS

SEQ ID NO: 67660 - protein, 19 aa, unidentified
  source 1..19: note = methanogen bacteria
QCIGITSTAPYSTTVTVES

SEQ ID NO: 67661 - protein, 29 aa, unidentified
  source 1..29: note = methanogen bacteria
INSAPSLGGYAATGLGQNGFGSASSVGLS

SEQ ID NO: 67662 - protein, 29 aa, unidentified
  source 1..29: note = methanogen bacteria
INSAPILGGYAATGLGQNGFGSASSVGLD

SEQ ID NO: 67663 - protein, 19 aa, unidentified
  source 1..19: note = methanogen bacteria
VRELDYSIFKSFLILTPTY

SEQ ID NO: 67664 - protein, 29 aa, unidentified
  source 1..29: note = methanogen bacteria
INSAPSLGGYAATGLGQNGFGSASSVGLD

SEQ ID NO: 67665 - protein, 24 aa, unidentified
  source 1..24: note = methanogen bacteria
PLTGASVNPARSLAPALFLGGQAL

SEQ ID NO: 67666 - protein, 23 aa, unidentified
  source 1..23: note = methanogen bacteria
EQEWAKALGTSKDSGTSPQQLID

SEQ ID NO: 67667 - protein, 10 aa, unidentified
  source 1..10: note = methanogen bacteria
VKKYLKKGFP

SEQ ID NO: 67668 - protein, 28 aa, unidentified
  source 1..28: note = methanogen bacteria
TSAPSLGGYAATGLGQNGFGSASSVGIG

SEQ ID NO: 67669 - protein, 12 aa, unidentified
  source 1..12: note = methanogen bacteria
MLSVPIQFINMY

SEQ ID NO: 67670 - protein, 12 aa, unidentified
  source 1..12: note = methanogen bacteria
MIYVPQEFISMY

SEQ ID NO: 67671 - protein, 29 aa, unidentified
  source 1..29: note = methanogen bacteria
INSAPSLGGYTATGLGQNGFGSASSVGLD

SEQ ID NO: 67672 - protein, 29 aa, unidentified
  source 1..29: note = methanogen bacteria
ENQNPINSLSMVSNAFTSNGYAVLGSSVG

SEQ ID NO: 67673 - protein, 10 aa, unidentified
  source 1..10: note = methanogen bacteria
PSLNLQTEII

SEQ ID NO: 67674 - protein, 19 aa, unidentified
  source 1..19: note = methanogen bacteria
NVRSLDYSMFGSFLILTPT

SEQ ID NO: 67675 - protein, 10 aa, unidentified
  source 1..10: note = methanogen bacteria
ISDLGTTPIS

SEQ ID NO: 67676 - protein, 17 aa, unidentified
  source 1..17: note = methanogen bacteria
DASGLASIGSGDADIVP

SEQ ID NO: 67677 - protein, 11 aa, unidentified
  source 1..11: note = methanogen bacteria
KDQLYSAIGIY

SEQ ID NO: 67678 - protein, 17 aa, unidentified
  source 1..17: note = methanogen bacteria
NIISLNMEDMKPINIVS

SEQ ID NO: 67679 - protein, 17 aa, unidentified
  source 1..17: note = methanogen bacteria
NANGIPDVTKADANVVA

SEQ ID NO: 67680 - protein, 20 aa, unidentified
  source 1..20: note = methanogen bacteria
SVRELDYSIFKSFLILTPTY

SEQ ID NO: 67681 - protein, 30 aa, unidentified
  source 1..30: note = methanogen bacteria
FFHSQPQLAAIYSASPSVAVNEMASVLVGP

SEQ ID NO: 67682 - protein, 10 aa, unidentified
  source 1..10: note = methanogen bacteria
MYVPQAFISM

SEQ ID NO: 67683 - protein, 16 aa, unidentified
  source 1..16: note = methanogen bacteria
MVPVPPYVPLEIVKMY

SEQ ID NO: 67684 - protein, 18 aa, unidentified
  source 1..18: note = methanogen bacteria
LFTSGLPDVGTSDANIVT

SEQ ID NO: 67685 - protein, 29 aa, unidentified
  source 1..29: note = methanogen bacteria
INTAPSLGGYMATGLGQNGFGAASSVGIN

SEQ ID NO: 67686 - protein, 29 aa, unidentified
  source 1..29: note = methanogen bacteria
INSAPSLGGYMATGLGQNGFGAASTVGIN

SEQ ID NO: 67687 - protein, 11 aa, unidentified
  source 1..11: note = methanogen bacteria
RTQLNSIIGVY

SEQ ID NO: 67688 - protein, 10 aa, unidentified
  source 1..10: note = methanogen bacteria
SKDAIFGLNS

SEQ ID NO: 67689 - protein, 19 aa, unidentified
  source 1..19: note = methanogen bacteria
PNIISLDFNEMKPINIGSI

SEQ ID NO: 67690 - protein, 15 aa, unidentified
  source 1..15: note = methanogen bacteria
LSQPASPTWSGVLGL

SEQ ID NO: 67691 - protein, 12 aa, unidentified
  source 1..12: note = methanogen bacteria
IPMVSGGSWEAF

SEQ ID NO: 67692 - protein, 15 aa, unidentified
  source 1..15: note = methanogen bacteria
AVWEDTFDVFGHAMS

SEQ ID NO: 67693 - protein, 30 aa, unidentified
  source 1..30: note = methanogen bacteria
LFISPEALSSLYAWSVGSIDIAGSGVNGWS

SEQ ID NO: 67694 - protein, 11 aa, unidentified
  source 1..11: note = methanogen bacteria
MFVPPEFVSMY

SEQ ID NO: 67695 - protein, 15 aa, unidentified
  source 1..15: note = methanogen bacteria
YANKIPDVSNINPNI

SEQ ID NO: 67696 - protein, 23 aa, unidentified
  source 1..23: note = methanogen bacteria
FGVRGPIGSFFIEFFAYKIAFSW

SEQ ID NO: 67697 - protein, 27 aa, unidentified
  source 1..27: note = methanogen bacteria
LAGNIAGQTRTLPMAVYSEVAAGNMGE

SEQ ID NO: 67698 - protein, 10 aa, unidentified
  source 1..10: note = methanogen bacteria
AGLGTEALAA

SEQ ID NO: 67699 - protein, 17 aa, unidentified
  source 1..17: note = methanogen bacteria
ILEAIGARDTMQYSLDY

SEQ ID NO: 67700 - protein, 11 aa, unidentified
  source 1..11: note = methanogen bacteria
MYVPQAFIGMY

SEQ ID NO: 67701 - protein, 10 aa, unidentified
  source 1..10: note = methanogen bacteria
AGLGAEPLAA

SEQ ID NO: 67702 - protein, 15 aa, unidentified
  source 1..15: note = methanogen bacteria
LELMGASSVINYAMD

SEQ ID NO: 67703 - protein, 23 aa, unidentified
  source 1..23: note = methanogen bacteria
FGVRGPIGSFFIDFFAYKIAFSW

SEQ ID NO: 67704 - protein, 27 aa, unidentified
  source 1..27: note = methanogen bacteria
LAGNIAGQTRTLPMAVYSEVAAGNMGE

SEQ ID NO: 67705 - protein, 55 aa, unidentified
  source 1..55: note = methanogen bacteria
NNPLVMDYQDSSVTCGPTSLSMAAQMLYGNTSESAFKKACNTDSNGTSPDELVAG

SEQ ID NO: 67706 - protein, 16 aa, unidentified
  source 1..16: note = methanogen bacteria
RNSSAVKNSLKLGKPV

SEQ ID NO: 67707 - protein, 11 aa, unidentified
  source 1..11: note = methanogen bacteria
TKGIKKCAFSQ

SEQ ID NO: 67708 - protein, 14 aa, unidentified
  source 1..14: note = methanogen bacteria
LVLSSSQAEFTHPF

SEQ ID NO: 67709 - protein, 57 aa, unidentified
  source 1..57: note = methanogen bacteria
ASVTGMTVFSPMLRLGRIEQYSLSSIKTVLTNVQLIGHNANASYWGAEGTAFAEGYI

SEQ ID NO: 67710 - protein, 29 aa, unidentified
  source 1..29: note = methanogen bacteria
INSAPSLGGYMATGLGQNGFGAASSVGIN

SEQ ID NO: 67711 - protein, 24 aa, unidentified
  source 1..24: note = methanogen bacteria
MDFVTLGGNLLGTIQLGDIVLYLT

SEQ ID NO: 67712 - protein, 18 aa, unidentified
  source 1..18: note = methanogen bacteria
AATGTLSLAVLSQMPASP

SEQ ID NO: 67713 - protein, 23 aa, unidentified
  source 1..23: note = methanogen bacteria
FGVRGPIGAFFIDFFAVKIAFSW

SEQ ID NO: 67714 - protein, 27 aa, unidentified
  source 1..27: note = methanogen bacteria
LAGNIAGQTRTLPMAVYSEVAAGNMGD

SEQ ID NO: 67715 - protein, 30 aa, unidentified
  source 1..30: note = methanogen bacteria
INSAPSLGGYAVTGLGQNGFGAESSVGLNL

SEQ ID NO: 67716 - protein, 10 aa, unidentified
  source 1..10: note = methanogen bacteria
GQNIGIIFNA

SEQ ID NO: 67717 - protein, 41 aa, unidentified
  source 1..41: note = methanogen bacteria
YTIPLHPYAYGMACGIGSASMNAAAVASLSTIFPQYAVEME

SEQ ID NO: 67718 - protein, 19 aa, unidentified
  source 1..19: note = methanogen bacteria
MVVDIVPQFVPAFFQSMYV

SEQ ID NO: 67719 - protein, 26 aa, unidentified
  source 1..26: note = methanogen bacteria
MVMDLGTLGGNLLGTIPLGDIVLYVT

SEQ ID NO: 67720 - protein, 18 aa, unidentified
  source 1..18: note = methanogen bacteria
ASTGTLSLAVLSQMPANP

SEQ ID NO: 67721 - protein, 22 aa, unidentified
  source 1..22: note = methanogen bacteria
FGVRGPIGKFFIEFFAVKIAFS

SEQ ID NO: 67722 - protein, 28 aa, unidentified
  source 1..28: note = methanogen bacteria
LAGNIAGQTRTLPMAVYSEVAAGNMGEA

SEQ ID NO: 67723 - protein, 19 aa, unidentified
  source 1..19: note = methanogen bacteria
LGGDLFGTIPLGDIVLYLN

SEQ ID NO: 67724 - protein, 18 aa, unidentified
  source 1..18: note = methanogen bacteria
AATGTLSLFELQTLPLNA

SEQ ID NO: 67725 - protein, 23 aa, unidentified
  source 1..23: note = methanogen bacteria
FGVRGPIGSFFIEFFAVKIAFSW

SEQ ID NO: 67726 - protein, 27 aa, unidentified
  source 1..27: note = methanogen bacteria
LAGNIAGLTRTLPMAVYSEVAAGNMGE

SEQ ID NO: 67727 - protein, 23 aa, unidentified
  source 1..23: note = methanogen bacteria
FGVRGPIGKFFIDFFTVKIAFSW

SEQ ID NO: 67728 - protein, 27 aa, unidentified
  source 1..27: note = methanogen bacteria
LAGNIAGETRTLPMAVYSEVAAGNMGE

SEQ ID NO: 67729 - protein, 20 aa, unidentified
  source 1..20: note = methanogen bacteria
MVASIIPQFVPAFYSSMYST

SEQ ID NO: 67730 - protein, 22 aa, unidentified
  source 1..22: note = methanogen bacteria
FGVRGPIGRFFLDFFTVKIAFS

SEQ ID NO: 67731 - protein, 27 aa, unidentified
  source 1..27: note = methanogen bacteria
LAGNIAGQTRTLPMAVYSEVAAGNMGE

SEQ ID NO: 67732 - protein, 19 aa, unidentified
  source 1..19: note = methanogen bacteria
MVASVIPQFVPAFYSSMYT

SEQ ID NO: 67733 - protein, 23 aa, unidentified
  source 1..23: note = methanogen bacteria
QFRSAIGEALDVVFSVIDFDGKY

SEQ ID NO: 67734 - protein, 27 aa, unidentified
  source 1..27: note = methanogen bacteria
VNNTVPDDLIDIVMPWGTANLLDYIWF

SEQ ID NO: 67735 - protein, 19 aa, unidentified
  source 1..19: note = methanogen bacteria
MVASVIPQFVPAFYSSMYS

SEQ ID NO: 67736 - protein, 12 aa, unidentified
  source 1..12: note = methanogen bacteria
GLSSYDLDFNNP

SEQ ID NO: 67737 - protein, 15 aa, unidentified
  source 1..15: note = methanogen bacteria
PNKLLFYFYFLANLL

SEQ ID NO: 67738 - protein, 26 aa, unidentified
  source 1..26: note = methanogen bacteria
MGMDFVTLGGNLLGTIPLGDIVLYLT

SEQ ID NO: 67739 - protein, 18 aa, unidentified
  source 1..18: note = methanogen bacteria
ASTGTLSLAVLSQMPASP

SEQ ID NO: 67740 - protein, 11 aa, unidentified
  source 1..11: note = methanogen bacteria
GLSSYDLDFTN

SEQ ID NO: 67741 - protein, 14 aa, unidentified
  source 1..14: note = methanogen bacteria
NKIIFFIDFLTSFH

SEQ ID NO: 67742 - protein, 23 aa, unidentified
  source 1..23: note = methanogen bacteria
GLTSFDGTETGLDGMLRPSHGMR

SEQ ID NO: 67743 - protein, 16 aa, unidentified
  source 1..16: note = methanogen bacteria
PHHRIPCHDGKLRLHH

SEQ ID NO: 67744 - protein, 12 aa, unidentified
  source 1..12: note = methanogen bacteria
NMPIPFGTSGHM

SEQ ID NO: 67745 - protein, 11 aa, unidentified
  source 1..11: note = methanogen bacteria
GSTVMGDVISG

SEQ ID NO: 67746 - protein, 23 aa, unidentified
  source 1..23: note = methanogen bacteria
FGVRGPIGSFFIDFFAFKIAFSW

SEQ ID NO: 67747 - protein, 27 aa, unidentified
  source 1..27: note = methanogen bacteria
LAGNIADQTRTLPMAVYSEVAAGNMGD

SEQ ID NO: 67748 - protein, 23 aa, unidentified
  source 1..23: note = methanogen bacteria
FGVRGPIGRFFIDFFAVKIAFSW

SEQ ID NO: 67749 - protein, 27 aa, unidentified
  source 1..27: note = methanogen bacteria
LAGNIAGQTRTLPMAVYSDVAAGNMGS

SEQ ID NO: 67750 - protein, 11 aa, unidentified
  source 1..11: note = methanogen bacteria
ELVMGVTILND

SEQ ID NO: 67751 - protein, 19 aa, unidentified
  source 1..19: note = methanogen bacteria
PILYNLFEQYVYIIAASVF

SEQ ID NO: 67752 - protein, 22 aa, unidentified
  source 1..22: note = methanogen bacteria
FGVRGPIGKFFIDFFAVKIAFS

SEQ ID NO: 67753 - protein, 27 aa, unidentified
  source 1..27: note = methanogen bacteria
LAGNIAGQTRTLPMAVYSEVAAGNMGS

SEQ ID NO: 67754 - protein, 24 aa, unidentified
  source 1..24: note = methanogen bacteria
MDIVTLGGNLLGTIPLGDIVLYLT

SEQ ID NO: 67755 - protein, 18 aa, unidentified
  source 1..18: note = methanogen bacteria
AATGTLSLSVLSQMSASP

SEQ ID NO: 67756 - protein, 25 aa, unidentified
  source 1..25: note = methanogen bacteria
MMDFVTLGGDLLGTIPLGDIVLYLT

SEQ ID NO: 67757 - protein, 18 aa, unidentified
  source 1..18: note = methanogen bacteria
ASTGTLSLAVLSQMPASP

SEQ ID NO: 67758 - protein, 10 aa, unidentified
  source 1..10: note = methanogen bacteria
TIGYPMPNFN

SEQ ID NO: 67759 - protein, 12 aa, unidentified
  source 1..12: note = methanogen bacteria
KLPSVTGSCSHP

SEQ ID NO: 67760 - protein, 13 aa, unidentified
  source 1..13: note = methanogen bacteria
AFPEPNTMAAITK

SEQ ID NO: 67761 - protein, 16 aa, unidentified
  source 1..16: note = methanogen bacteria
DLIFDKNVMSYSIYDS

SEQ ID NO: 67762 - protein, 23 aa, unidentified
  source 1..23: note = methanogen bacteria
FGVRGPIGKFFIDFFAVKIAFSW

SEQ ID NO: 67763 - protein, 27 aa, unidentified
  source 1..27: note = methanogen bacteria
IAGNIANQTRTLPMAVYSEVAAGNMGD

SEQ ID NO: 67764 - protein, 23 aa, unidentified
  source 1..23: note = methanogen bacteria
GLGFHIDYSSFLMAAGPGLGDPI

SEQ ID NO: 67765 - protein, 23 aa, unidentified
  source 1..23: note = methanogen bacteria
FGVRGPIGSFFIDFFAIKIAFSW

SEQ ID NO: 67766 - protein, 27 aa, unidentified
  source 1..27: note = methanogen bacteria
LAGNIAGQTRTLPMAVYSEVAAGNMGE

SEQ ID NO: 67767 - protein, 22 aa, unidentified
  source 1..22: note = methanogen bacteria
FGVRGVIGKFFIEFFAYKIAFS

SEQ ID NO: 67768 - protein, 27 aa, unidentified
  source 1..27: note = methanogen bacteria
LAGNIAGQTRTLPLAVYSEVAAGNMVE

SEQ ID NO: 67769 - protein, 23 aa, unidentified
  source 1..23: note = methanogen bacteria
FGVRGPIGSFFVEFFAYKIAFSW

SEQ ID NO: 67770 - protein, 27 aa, unidentified
  source 1..27: note = methanogen bacteria
LAGNIAGQTRTLPMAVYSEVAAGNMGD

SEQ ID NO: 67771 - protein, 10 aa, unidentified
  source 1..10: note = methanogen bacteria
TIGYPMPQFN

SEQ ID NO: 67772 - protein, 23 aa, unidentified
  source 1..23: note = methanogen bacteria
FGVRGPIGKFFIDFFAFKIAFSW

SEQ ID NO: 67773 - protein, 27 aa, unidentified
  source 1..27: note = methanogen bacteria
LAGNIAGQTRTLPMAVYSEVAAGNMGT

SEQ ID NO: 67774 - protein, 35 aa, unidentified
  source 1..35: note = methanogen bacteria
EIIVFKENNNISSLNATINGSEIVPGINGLTVDVE

SEQ ID NO: 67775 - protein, 39 aa, unidentified
  source 1..39: note = methanogen bacteria
VYEEVKPSISLADYPEKTIVSGNSQKKAVTILISNKNIN

SEQ ID NO: 67776 - protein, 77 aa, unidentified
  source 1..77: note = methanogen bacteria
IVLDEDFCYFSKQKVKPTIILNNSNFIKYINDVKSGSIIYIDDDLDKIYIDVLIKHIKFYNLNILKLDTHLSESNHI

SEQ ID NO: 67777 - protein, 22 aa, unidentified
  source 1..22: note = methanogen bacteria
FGVRGPIGKFFIDFFTVKIAFS

SEQ ID NO: 67778 - protein, 27 aa, unidentified
  source 1..27: note = methanogen bacteria
LAGNIAGQTRTLPMAVYSEVAAGNMGE

SEQ ID NO: 67779 - protein, 21 aa, unidentified
  source 1..21: note = methanogen bacteria
MHYPLAGNGILPIAEQLSPTF

SEQ ID NO: 67780 - protein, 19 aa, unidentified
  source 1..19: note = methanogen bacteria
YTLNLDYSMFTPFLILTPT

SEQ ID NO: 67781 - protein, 22 aa, unidentified
  source 1..22: note = methanogen bacteria
FGVRGPIGKFFIDFFTVKIAFS

SEQ ID NO: 67782 - protein, 27 aa, unidentified
  source 1..27: note = methanogen bacteria
IAGNIAGQTRTLPMAVYSEVAAGNMGD

SEQ ID NO: 67783 - protein, 24 aa, unidentified
  source 1..24: note = methanogen bacteria
MDFITLGGDLLGVIPLGDIVLYLT

SEQ ID NO: 67784 - protein, 18 aa, unidentified
  source 1..18: note = methanogen bacteria
AATGTLSLEILSSMPANP

SEQ ID NO: 67785 - protein, 23 aa, unidentified
  source 1..23: note = methanogen bacteria
FGVRGPIGHFLIEYFSVKIAFSW

SEQ ID NO: 67786 - protein, 28 aa, unidentified
  source 1..28: note = methanogen bacteria
LAGNIAGETRTLPMAVYSEVAAGNMLDA

SEQ ID NO: 67787 - protein, 23 aa, unidentified
  source 1..23: note = methanogen bacteria
IFGVRGPIGKFFIDFFTVKIAFS

SEQ ID NO: 67788 - protein, 27 aa, unidentified
  source 1..27: note = methanogen bacteria
LAGNIAGQTRTLPMAVYSEVAAGNMGD

SEQ ID NO: 67789 - protein, 24 aa, unidentified
  source 1..24: note = methanogen bacteria
MDFVTLGGNLLGTIPLGDIVLYLN

SEQ ID NO: 67790 - protein, 18 aa, unidentified
  source 1..18: note = methanogen bacteria
ASTGTLSLQVLSQMPANP

SEQ ID NO: 67791 - protein, 23 aa, unidentified
  source 1..23: note = methanogen bacteria
FGVRGPVGQFFLDFFAVKIAFSW

SEQ ID NO: 67792 - protein, 27 aa, unidentified
  source 1..27: note = methanogen bacteria
LAGNIAGQTRTLPMAVYSEVAAGNMGD

SEQ ID NO: 67793 - protein, 22 aa, unidentified
  source 1..22: note = methanogen bacteria
FGVRGPIGKFFLDFFTVKIAFS

SEQ ID NO: 67794 - protein, 27 aa, unidentified
  source 1..27: note = methanogen bacteria
IAGNIAGQTRTLPMAVYSEVAAGNMGE

SEQ ID NO: 67795 - protein, 24 aa, unidentified
  source 1..24: note = methanogen bacteria
MDIAALSGEIFGFIPLGDIMLYIT

SEQ ID NO: 67796 - protein, 18 aa, unidentified
  source 1..18: note = methanogen bacteria
GATGTLSILNLAQIQPNP

SEQ ID NO: 67797 - protein, 12 aa, unidentified
  source 1..12: note = methanogen bacteria
KMPSVSGSCSHP

SEQ ID NO: 67798 - protein, 10 aa, unidentified
  source 1..10: note = methanogen bacteria
AFPGADIGAT

SEQ ID NO: 67799 - protein, 13 aa, unidentified
  source 1..13: note = methanogen bacteria
AALPYPYSLPTFN

SEQ ID NO: 67800 - protein, 23 aa, unidentified
  source 1..23: note = methanogen bacteria
FGVRGPIGKFFIDFFTVKIAFSW

SEQ ID NO: 67801 - protein, 27 aa, unidentified
  source 1..27: note = methanogen bacteria
IAGNIAGQTRTLPMAVYSEVAAGNMGD

SEQ ID NO: 67802 - protein, 18 aa, unidentified
  source 1..18: note = methanogen bacteria
GGNLLGIVPLGDIVFYLN

SEQ ID NO: 67803 - protein, 17 aa, unidentified
  source 1..17: note = methanogen bacteria
ACGTVSLLAIQSMKPTA

SEQ ID NO: 67804 - protein, 12 aa, unidentified
  source 1..12: note = methanogen bacteria
DAVYLDESDGLI

SEQ ID NO: 67805 - protein, 24 aa, unidentified
  source 1..24: note = methanogen bacteria
MNIGSLGGDLLGLIPLGDIVLYIN

SEQ ID NO: 67806 - protein, 17 aa, unidentified
  source 1..17: note = methanogen bacteria
ACGTVSLLAIQSIKPTA

SEQ ID NO: 67807 - protein, 14 aa, unidentified
  source 1..14: note = methanogen bacteria
WMSHFSFIELLTEG

SEQ ID NO: 67808 - protein, 17 aa, unidentified
  source 1..17: note = methanogen bacteria
KVVDGPYPFLKVNSQPI

SEQ ID NO: 67809 - protein, 24 aa, unidentified
  source 1..24: note = methanogen bacteria
MDFATLGGNIFGTIPLGDIVLYIT

SEQ ID NO: 67810 - protein, 18 aa, unidentified
  source 1..18: note = methanogen bacteria
ASTGTLSLEVLSQIQATP

SEQ ID NO: 67811 - protein, 24 aa, unidentified
  source 1..24: note = methanogen bacteria
MDFVTLGGNLLGTIPLGDIVLYIT

SEQ ID NO: 67812 - protein, 18 aa, unidentified
  source 1..18: note = methanogen bacteria
ASTGTLSLAVLSQMPATP

SEQ ID NO: 67813 - protein, 10 aa, unidentified
  source 1..10: note = methanogen bacteria
VSQIPFDGSV

SEQ ID NO: 67814 - protein, 14 aa, unidentified
  source 1..14: note = methanogen bacteria
SAYNASLSPNYNFA

SEQ ID NO: 67815 - protein, 23 aa, unidentified
  source 1..23: note = methanogen bacteria
ATSLGLDASAFPLDSGWLLICVD

SEQ ID NO: 67816 - protein, 26 aa, unidentified
  source 1..26: note = methanogen bacteria
GTDFGIQALNSIFGHLFGTVHGHTAF

SEQ ID NO: 67817 - protein, 56 aa, unidentified
  source 1..56: note = methanogen bacteria
ETCPYCGSEAVYSSGNGYRCAECGNYISNPDDLNLNYEEGYYELTLPSFINSINKV

SEQ ID NO: 67818 - protein, 55 aa, unidentified
  source 1..55: note = methanogen bacteria
TCPYCGSEAIYPSGNGYRCQECGNYISNPDDLNLNYEEGYYELYLAPMLYSINGS

SEQ ID NO: 67819 - protein, 11 aa, unidentified
  source 1..11: note = methanogen bacteria
TQYTTNMGASA

SEQ ID NO: 67820 - protein, 12 aa, unidentified
  source 1..12: note = methanogen bacteria
NMPIPFGTSGHM

SEQ ID NO: 67821 - protein, 24 aa, unidentified
  source 1..24: note = methanogen bacteria
MDFITLGGNLLGTVPLGDIVLYVT

SEQ ID NO: 67822 - protein, 18 aa, unidentified
  source 1..18: note = methanogen bacteria
ASTGTLSLAVLSQMSATP

SEQ ID NO: 67823 - protein, 24 aa, unidentified
  source 1..24: note = methanogen bacteria
MDFVTLGGNLLGTISLGDIVLYVT

SEQ ID NO: 67824 - protein, 18 aa, unidentified
  source 1..18: note = methanogen bacteria
ASTGTLCLAILSQMHANP

SEQ ID NO: 67825 - protein, 12 aa, unidentified
  source 1..12: note = methanogen bacteria
GLSSYDLDLNNS

SEQ ID NO: 67826 - protein, 13 aa, unidentified
  source 1..13: note = methanogen bacteria
PNKLLFYLNFLSL

SEQ ID NO: 67827 - protein, 10 aa, unidentified
  source 1..10: note = methanogen bacteria
SIGYPMPEFN

SEQ ID NO: 67828 - protein, 23 aa, unidentified
  source 1..23: note = methanogen bacteria
FGVRGPIGSFFIDFFAYKIAFSW

SEQ ID NO: 67829 - protein, 27 aa, unidentified
  source 1..27: note = methanogen bacteria
LAGNIAGQTRTLPLAVYSEVAAGNMGE

SEQ ID NO: 67830 - protein, 10 aa, unidentified
  source 1..10: note = methanogen bacteria
TSIGYPMPKF

SEQ ID NO: 67831 - protein, 24 aa, unidentified
  source 1..24: note = methanogen bacteria
MDFVTLGGNLFGTIPLGDIVLYVT

SEQ ID NO: 67832 - protein, 18 aa, unidentified
  source 1..18: note = methanogen bacteria
ASTGTLSLFELSQLPPNP

SEQ ID NO: 67833 - protein, 98 aa, unidentified
  source 1..98: note = methanogen bacteria
GIFSLDSDSLSNTNVSATVIDTAFPDVADVSSIINETAGENFTNVTGYDSTYSEIETVEEAYSVPTSYETPQSSDTGGEAPEAQPQQGGGGEAAPAEG

SEQ ID NO: 67834 - protein, 11 aa, unidentified
  source 1..11: note = methanogen bacteria
YTKVSLIRYEN

SEQ ID NO: 67835 - protein, 12 aa, unidentified
  source 1..12: note = methanogen bacteria
NMPIPFGTSGHM

SEQ ID NO: 67836 - protein, 23 aa, unidentified
  source 1..23: note = methanogen bacteria
SGLGSAPVSSIPYAMNLIGNIEI

SEQ ID NO: 67837 - protein, 10 aa, unidentified
  source 1..10: note = methanogen bacteria
MYFIPPAYNL

SEQ ID NO: 67838 - protein, 23 aa, unidentified
  source 1..23: note = methanogen bacteria
SGLGSAPVSSIPYAMDLVWAIEI

SEQ ID NO: 67839 - protein, 10 aa, unidentified
  source 1..10: note = methanogen bacteria
MGFIPPADNF

SEQ ID NO: 67840 - protein, 23 aa, unidentified
  source 1..23: note = methanogen bacteria
SGLGSAPVSSIPYAIDLIWLINI

SEQ ID NO: 67841 - protein, 19 aa, unidentified
  source 1..19: note = methanogen bacteria
LGGDVMGTIPLGDIVLYLN

SEQ ID NO: 67842 - protein, 18 aa, unidentified
  source 1..18: note = methanogen bacteria
AATGTLSLFELAAIPASP

SEQ ID NO: 67843 - protein, 23 aa, unidentified
  source 1..23: note = methanogen bacteria
SGLGSAPVSSIPYSMNLIWAIEI

SEQ ID NO: 67844 - protein, 10 aa, unidentified
  source 1..10: note = methanogen bacteria
MYFIPNSDNL

SEQ ID NO: 67845 - protein, 24 aa, unidentified
  source 1..24: note = methanogen bacteria
MLIEDLGGNILGTIPLGDIVLYLN

SEQ ID NO: 67846 - protein, 18 aa, unidentified
  source 1..18: note = methanogen bacteria
AATGTLSLFELASIPANP

SEQ ID NO: 67847 - protein, 20 aa, unidentified
  source 1..20: note = methanogen bacteria
PMSDAAAAVIVDARLDGDID

SEQ ID NO: 67848 - protein, 11 aa, unidentified
  source 1..11: note = methanogen bacteria
KTFSLYDIILP

SEQ ID NO: 67849 - protein, 18 aa, unidentified
  source 1..18: note = methanogen bacteria
LPGTDLATSNAFSIILGS

SEQ ID NO: 67850 - protein, 23 aa, unidentified
  source 1..23: note = methanogen bacteria
SGLGSAPVSSIPYAMDLIWMVEI

SEQ ID NO: 67851 - protein, 53 aa, unidentified
  source 1..53: note = methanogen bacteria
PNCGSEAIYSSGNGYRCAECGYSINNPDDLNLNYEEGYYELTLPSFIYSMNNV

SEQ ID NO: 67852 - protein, 10 aa, unidentified
  source 1..10: note = methanogen bacteria
TIGYSMPEFN

SEQ ID NO: 67853 - protein, 23 aa, unidentified
  source 1..23: note = methanogen bacteria
SCLGSAPVSSIPYAINLIWLVEI

SEQ ID NO: 67854 - protein, 10 aa, unidentified
  source 1..10: note = methanogen bacteria
LGFIPMADSV

SEQ ID NO: 67855 - protein, 17 aa, unidentified
  source 1..17: note = methanogen bacteria
RNASFTAYFEEHLGDLW

SEQ ID NO: 67856 - protein, 10 aa, unidentified
  source 1..10: note = methanogen bacteria
TGMLPDFYYG

SEQ ID NO: 67857 - protein, 23 aa, unidentified
  source 1..23: note = methanogen bacteria
SGLGSAPVSSIPYAMNLIWAVEI

SEQ ID NO: 67858 - protein, 10 aa, unidentified
  source 1..10: note = methanogen bacteria
MYFIPPADNL

SEQ ID NO: 67859 - protein, 17 aa, unidentified
  source 1..17: note = methanogen bacteria
RNASFTAYFEEHLGDLW

SEQ ID NO: 67860 - protein, 10 aa, unidentified
  source 1..10: note = methanogen bacteria
TGMLPDFYYG

SEQ ID NO: 67861 - protein, 23 aa, unidentified
  source 1..23: note = methanogen bacteria
SDLGSAPVSSIPYAMNLIWAIEI

SEQ ID NO: 67862 - protein, 10 aa, unidentified
  source 1..10: note = methanogen bacteria
MYFIPSADSL

SEQ ID NO: 67863 - protein, 16 aa, unidentified
  source 1..16: note = methanogen bacteria
MIAATFVPEYTASIFL

SEQ ID NO: 67864 - protein, 12 aa, unidentified
  source 1..12: note = methanogen bacteria
KLPSVTGSCSHP

SEQ ID NO: 67865 - protein, 12 aa, unidentified
  source 1..12: note = methanogen bacteria
AFPEPTIMAAIT

SEQ ID NO: 67866 - protein, 10 aa, unidentified
  source 1..10: note = methanogen bacteria
SNLGSTPVAS

SEQ ID NO: 67867 - protein, 10 aa, unidentified
  source 1..10: note = methanogen bacteria
VSFIPPAPNF

SEQ ID NO: 67868 - protein, 12 aa, unidentified
  source 1..12: note = methanogen bacteria
KLPSVTGSCSHP

SEQ ID NO: 67869 - protein, 10 aa, unidentified
  source 1..10: note = methanogen bacteria
AFPAPSFGSA

SEQ ID NO: 67870 - protein, 12 aa, unidentified
  source 1..12: note = methanogen bacteria
KLPSVTGSCSHP

SEQ ID NO: 67871 - protein, 10 aa, unidentified
  source 1..10: note = methanogen bacteria
AFPAPNFGAA

SEQ ID NO: 67872 - protein, 12 aa, unidentified
  source 1..12: note = methanogen bacteria
KLPSVTGSCSHP

SEQ ID NO: 67873 - protein, 10 aa, unidentified
  source 1..10: note = methanogen bacteria
AFPAPTFGGA

SEQ ID NO: 67874 - protein, 12 aa, unidentified
  source 1..12: note = methanogen bacteria
KLPSVTGSCSHP

SEQ ID NO: 67875 - protein, 11 aa, unidentified
  source 1..11: note = methanogen bacteria
AFPAPSFGSAL

SEQ ID NO: 67876 - protein, 12 aa, unidentified
  source 1..12: note = methanogen bacteria
KLPSVTGSCSHP

SEQ ID NO: 67877 - protein, 13 aa, unidentified
  source 1..13: note = methanogen bacteria
AFPEPNTMAAITK

SEQ ID NO: 67878 - protein, 23 aa, unidentified
  source 1..23: note = methanogen bacteria
LAGLGTTPISCIPATLSYSTPLS

SEQ ID NO: 67879 - protein, 10 aa, unidentified
  source 1..10: note = methanogen bacteria
VFSFIDPGSY

SEQ ID NO: 67880 - protein, 60 aa, unidentified
  source 1..60: note = methanogen bacteria
NKINLNSLLIKDNSAKFDYISANPVIDAIRIMNVNGGLLISEFAAIFNGTIKTPTNFVFK

SEQ ID NO: 67881 - protein, 12 aa, unidentified
  source 1..12: note = methanogen bacteria
KLPSVTGSCSHP

SEQ ID NO: 67882 - protein, 10 aa, unidentified
  source 1..10: note = methanogen bacteria
AFPAPTFGAA

SEQ ID NO: 67883 - protein, 19 aa, unidentified
  source 1..19: note = methanogen bacteria
LHITGFEHTIGLIEAAMSS

SEQ ID NO: 67884 - protein, 18 aa, unidentified
  source 1..18: note = methanogen bacteria
AIVVDKETGRESIVIDKD

SEQ ID NO: 67885 - protein, 19 aa, unidentified
  source 1..19: note = methanogen bacteria
IKAICRACNYGEYDLDPAK

SEQ ID NO: 67886 - protein, 16 aa, unidentified
  source 1..16: note = methanogen bacteria
GCNALAFPVSSGPGSR

SEQ ID NO: 67887 - protein, 29 aa, unidentified
  source 1..29: note = methanogen bacteria
STFLNFPEFELESLVFNYYHTLHLIRVHD

SEQ ID NO: 67888 - protein, 22 aa, unidentified
  source 1..22: note = methanogen bacteria
MVTVIPGSDLLTSALNVIAQSL

SEQ ID NO: 67889 - protein, 17 aa, unidentified
  source 1..17: note = methanogen bacteria
PGLAALGSGDVNTLASA

SEQ ID NO: 67890 - protein, 12 aa, unidentified
  source 1..12: note = methanogen bacteria
KLPSVTGSCSHP

SEQ ID NO: 67891 - protein, 10 aa, unidentified
  source 1..10: note = methanogen bacteria
AFPAPTFSAA

SEQ ID NO: 67892 - protein, 12 aa, unidentified
  source 1..12: note = methanogen bacteria
KLPSVTGSCSHP

SEQ ID NO: 67893 - protein, 10 aa, unidentified
  source 1..10: note = methanogen bacteria
AFPAPTFETA

SEQ ID NO: 67894 - protein, 12 aa, unidentified
  source 1..12: note = methanogen bacteria
KLPSVTGSCSHP

SEQ ID NO: 67895 - protein, 10 aa, unidentified
  source 1..10: note = methanogen bacteria
AFPAPTFGAS

SEQ ID NO: 67896 - protein, 12 aa, unidentified
  source 1..12: note = methanogen bacteria
KLPSVTGSCSHP

SEQ ID NO: 67897 - protein, 10 aa, unidentified
  source 1..10: note = methanogen bacteria
AFPAPTFGEA

SEQ ID NO: 67898 - protein, 30 aa, unidentified; identical to SEQ ID NO: 62705
  source 1..30: note = methanogen bacteria

SEQ ID NO: 67899 - protein, 12 aa, unidentified
  source 1..12: note = methanogen bacteria
LTIDAEFTVKDF

SEQ ID NO: 67900 - protein, 12 aa, unidentified
  source 1..12: note = methanogen bacteria
KLPSVTGSCSHP

SEQ ID NO: 67901 - protein, 10 aa, unidentified
  source 1..10: note = methanogen bacteria
AFPSPNFGTA

SEQ ID NO: 67902 - protein, 12 aa, unidentified
  source 1..12: note = methanogen bacteria
KLPSVTGSCSHP

SEQ ID NO: 67903 - protein, 10 aa, unidentified
  source 1..10: note = methanogen bacteria
AFPSPSFGSA

SEQ ID NO: 67904 - protein, 21 aa, unidentified
  source 1..21: note = methanogen bacteria
MATTIPGGEILSGTLNVIAQS

SEQ ID NO: 67905 - protein, 17 aa, unidentified
  source 1..17: note = methanogen bacteria
PGLAALGAGDMITLTSN

SEQ ID NO: 67906 - protein, 12 aa, unidentified
  source 1..12: note = methanogen bacteria
KLPSVTGSCSHP

SEQ ID NO: 67907 - protein, 10 aa, unidentified
  source 1..10: note = methanogen bacteria
AFPAPDMSTA

SEQ ID NO: 67908 - protein, 19 aa, unidentified
  source 1..19: note = methanogen bacteria
ALPELQIANYSDFIVFIST

SEQ ID NO: 67909 - protein, 12 aa, unidentified
  source 1..12: note = methanogen bacteria
NMPIPFGTSGHM

SEQ ID NO: 67910 - protein, 30 aa, unidentified; identical to SEQ ID NO: 62107
  source 1..30: note = methanogen bacteria

SEQ ID NO: 67911 - protein, 15 aa, unidentified
  source 1..15: note = methanogen bacteria
GWTLRHTAASAGTFS

SEQ ID NO: 67912 - protein, 11 aa, unidentified
  source 1..11: note = methanogen bacteria
VSGLGADALAG

SEQ ID NO: 67913 - protein, 15 aa, unidentified
  source 1..15: note = methanogen bacteria
LNVMGAGKTIGYATD

SEQ ID NO: 67914 - protein, 14 aa, unidentified
  source 1..14: note = methanogen bacteria
NLNFGVKGVCHFNF

SEQ ID NO: 67915 - protein, 11 aa, unidentified
  source 1..11: note = methanogen bacteria
QLVMGITILNN

SEQ ID NO: 67916 - protein, 15 aa, unidentified
  source 1..15: note = methanogen bacteria
PFLFSLFEKYLGIKS

SEQ ID NO: 67917 - protein, 20 aa, unidentified
  source 1..20: note = methanogen bacteria
IAIPGGAFLTAALNLISQSL

SEQ ID NO: 67918 - protein, 15 aa, unidentified
  source 1..15: note = methanogen bacteria
GLAALGSGDINTLST

SEQ ID NO: 67919 - protein, 21 aa, unidentified
  source 1..21: note = methanogen bacteria
FLGIPMATNTADAALHSIFPF

SEQ ID NO: 67920 - protein, 27 aa, unidentified
  source 1..27: note = methanogen bacteria
MYVVIYVVSIPGSEFLTAALNVVSQSL

SEQ ID NO: 67921 - protein, 17 aa, unidentified
  source 1..17: note = methanogen bacteria
PGLAALGSGDVSTLASA

SEQ ID NO: 67922 - protein, 22 aa, unidentified
  source 1..22: note = methanogen bacteria
FREPIGSALNVVFCVVDFGGDY

SEQ ID NO: 67923 - protein, 30 aa, unidentified
  source 1..30: note = methanogen bacteria
VSNTVPTELLDISMPWGTTNLNDTLLNFMP

SEQ ID NO: 67924 - protein, 27 aa, unidentified
  source 1..27: note = methanogen bacteria
PVTFKINGATYTRISDEKGIASIAINL

SEQ ID NO: 67925 - protein, 95 aa, unidentified
  source 1..95: note = methanogen bacteria
GVFNFDFESLSDANAVAIVTDTAFPDVADIQVNNTVTNTSTTDVAGGYVETVQDTSGSSSQGSSSYTPSEPTPAPSTGGGGESPESGSSSEQPAG

SEQ ID NO: 67926 - protein, 19 aa, unidentified
  source 1..19: note = methanogen bacteria
FMSIIKNAVNDILVYIVNF

SEQ ID NO: 67927 - protein, 33 aa, unidentified
  source 1..33: note = methanogen bacteria
AGPIGATLSEFQNMSSSTPAAMQNASAVDLFIN

SEQ ID NO: 67928 - protein, 17 aa, unidentified
  source 1..17: note = methanogen bacteria
LIGQLFSQVLPNGGMKF

SEQ ID NO: 67929 - protein, 11 aa, unidentified
  source 1..11: note = methanogen bacteria
VPFSELILGTW

SEQ ID NO: 67930 - protein, 12 aa, unidentified
  source 1..12: note = methanogen bacteria
KMPSVTGSCSHP

SEQ ID NO: 67931 - protein, 12 aa, unidentified
  source 1..12: note = methanogen bacteria
AFPLPSFAAALP

SEQ ID NO: 67932 - protein, 11 aa, unidentified
  source 1..11: note = methanogen bacteria
KTINYSFIILP

SEQ ID NO: 67933 - protein, 17 aa, unidentified
  source 1..17: note = methanogen bacteria
LPSNSPNSDAFAAILGT

SEQ ID NO: 67934 - protein, 10 aa, unidentified
  source 1..10: note = methanogen bacteria
FVDDDMNDEV

SEQ ID NO: 67935 - protein, 19 aa, unidentified
  source 1..19: note = methanogen bacteria
ANIVNIGVANSDMNYVYDT

SEQ ID NO: 67936 - protein, 12 aa, unidentified
  source 1..12: note = methanogen bacteria
IGAENMVMMFVG

SEQ ID NO: 67937 - protein, 27 aa, unidentified
  source 1..27: note = methanogen bacteria
MDGDIFMVSFPGSDLVASAMNIISQSL

SEQ ID NO: 67938 - protein, 17 aa, unidentified
  source 1..17: note = methanogen bacteria
PGLAALGAGDINTLASS

SEQ ID NO: 67939 - protein, 20 aa, unidentified
  source 1..20: note = methanogen bacteria
MIIQGTETLTSLIHIISESL

SEQ ID NO: 67940 - protein, 17 aa, unidentified
  source 1..17: note = methanogen bacteria
PGLAALGSGDITTLAES

SEQ ID NO: 67941 - protein, 11 aa, unidentified
  source 1..11: note = methanogen bacteria
KTFSVYDIILP

SEQ ID NO: 67942 - protein, 19 aa, unidentified
  source 1..19: note = methanogen bacteria
MLPGTDLTISNAFSIILGN

SEQ ID NO: 67943 - protein, 20 aa, unidentified
  source 1..20: note = methanogen bacteria
NTEKDKEFAREIRNQRIVLF

SEQ ID NO: 67944 - protein, 11 aa, unidentified
  source 1..11: note = methanogen bacteria
KTFSFYDFILP

SEQ ID NO: 67945 - protein, 19 aa, unidentified
  source 1..19: note = methanogen bacteria
ALPGTDAATANAFNIILGS

SEQ ID NO: 67946 - protein, 13 aa, unidentified
  source 1..13: note = methanogen bacteria
AEVYDVYSSQGFF

SEQ ID NO: 67947 - protein, 10 aa, unidentified
  source 1..10: note = methanogen bacteria
STGNIDLWVP

SEQ ID NO: 67948 - protein, 89 aa, unidentified
  source 1..89: note = methanogen bacteria
VALNTVPANNTTNVTITDSAFTTNQSVVNASNMSANTTNNTTTVKATTKKYSSSSYSSGSSSKSSSSRQSNSKSSSKGSTRDIYSSNST

SEQ ID NO: 67949 - protein, 14 aa, unidentified
  source 1..14: note = methanogen bacteria
QITGTGMQYSPFDT

SEQ ID NO: 67950 - protein, 14 aa, unidentified
  source 1..14: note = methanogen bacteria
CGYGFFDISGYSLS

SEQ ID NO: 67951 - protein, 22 aa, unidentified
  source 1..22: note = methanogen bacteria
LKNPTLGFNIITIASIFVILQA

SEQ ID NO: 67952 - protein, 14 aa, unidentified
  source 1..14: note = methanogen bacteria
QITGTGMQYSPFDT

SEQ ID NO: 67953 - protein, 22 aa, unidentified
  source 1..22: note = methanogen bacteria
MVSTIPGSEILTSTLNMISQSL

SEQ ID NO: 67954 - protein, 17 aa, unidentified
  source 1..17: note = methanogen bacteria
PGLAALGAGDVNTLANA

SEQ ID NO: 67955 - protein, 18 aa, unidentified
  source 1..18: note = methanogen bacteria
TFNLDYSMFSSFLILTPT

SEQ ID NO: 67956 - protein, 11 aa, unidentified
  source 1..11: note = methanogen bacteria
KTFDFFSFVLP

SEQ ID NO: 67957 - protein, 19 aa, unidentified
  source 1..19: note = methanogen bacteria
LPAPAFFENSDAFNVVLGS

SEQ ID NO: 67958 - protein, 12 aa, unidentified
  source 1..12: note = methanogen bacteria
NMPIPFGTSGHM

SEQ ID NO: 67959 - protein, 25 aa, unidentified
  source 1..25: note = methanogen bacteria
MVIYVVSIPGSELLTAALNVVSQSL

SEQ ID NO: 67960 - protein, 17 aa, unidentified
  source 1..17: note = methanogen bacteria
PGLAALGSGDVTTLANA

SEQ ID NO: 67961 - protein, 10 aa, unidentified
  source 1..10: note = methanogen bacteria
PYVLYSNGGG

SEQ ID NO: 67962 - protein, 31 aa, unidentified
  source 1..31: note = methanogen bacteria
SFTKGWGADPNTFFTTTLLQSSGNYLHLAHF

SEQ ID NO: 67963 - protein, 23 aa, unidentified
  source 1..23: note = methanogen bacteria
LTLPGASIGLAYGWLLLAKLCFP

SEQ ID NO: 67964 - protein, 18 aa, unidentified
  source 1..18: note = methanogen bacteria
TFNLDYSMFSSFLILTPT

SEQ ID NO: 67965 - protein, 16 aa, unidentified
  source 1..16: note = methanogen bacteria
GDMQVYLISHIKLPLT

SEQ ID NO: 67966 - protein, 21 aa, unidentified
  source 1..21: note = methanogen bacteria
GLELANTVLNHYNITILNNII

SEQ ID NO: 67967 - protein, 13 aa, unidentified
  source 1..13: note = methanogen bacteria
KVFNLGFWGLTTD

SEQ ID NO: 67968 - protein, 20 aa, unidentified
  source 1..20: note = methanogen bacteria
YMPYPSYWTGQEAYAYMFGF

SEQ ID NO: 67969 - protein, 12 aa, unidentified
  source 1..12: note = methanogen bacteria
NYNPVAVNWIGT

SEQ ID NO: 67970 - protein, 12 aa, unidentified
  source 1..12: note = methanogen bacteria
AVGASFDSVATV

SEQ ID NO: 67971 - protein, 11 aa, unidentified
  source 1..11: note = methanogen bacteria
KTFIINNIVLP

SEQ ID NO: 67972 - protein, 19 aa, unidentified
  source 1..19: note = methanogen bacteria
LLPGTDPIVSNAFNIVLGS

SEQ ID NO: 67973 - protein, 10 aa, unidentified
  source 1..10: note = methanogen bacteria
KSDLGTTSIS

SEQ ID NO: 67974 - protein, 13 aa, unidentified
  source 1..13: note = methanogen bacteria
GYLNAQLAFLLDN

SEQ ID NO: 67975 - protein, 21 aa, unidentified
  source 1..21: note = methanogen bacteria
NSTLNLDYTMFSSFLILTPTY

SEQ ID NO: 67976 - protein, 13 aa, unidentified
  source 1..13: note = methanogen bacteria
KIIDVGFLGMQVP

SEQ ID NO: 67977 - protein, 19 aa, unidentified
  source 1..19: note = methanogen bacteria
LPSPSYYTGGPALQFVFTQ

SEQ ID NO: 67978 - protein, 12 aa, unidentified
  source 1..12: note = methanogen bacteria
GHLNAQLAFLLD

SEQ ID NO: 67979 - protein, 21 aa, unidentified
  source 1..21: note = methanogen bacteria
NSTINLDYTMFSSFLILTPTY

SEQ ID NO: 67980 - protein, 19 aa, unidentified
  source 1..19: note = methanogen bacteria
STLNLNYRMFSAFLILTPT

SEQ ID NO: 67981 - protein, 23 aa, unidentified
  source 1..23: note = methanogen bacteria
MPESCFAEAAVYGVADAKLVDPD

SEQ ID NO: 67982 - protein, 12 aa, unidentified
  source 1..12: note = methanogen bacteria
EFIQDTGVEGGA

SEQ ID NO: 67983 - protein, 35 aa, unidentified
  source 1..35: note = methanogen bacteria
THLIDGFDSSIYNMIAPYINDNLTSIFKSLTFFGG

SEQ ID NO: 67984 - protein, 23 aa, unidentified
  source 1..23: note = methanogen bacteria
VQRPRPEILRLVHETSYSFPSGH

SEQ ID NO: 67985 - protein, 22 aa, unidentified
  source 1..22: note = methanogen bacteria
MAMAIPGGDFLTTGLNLIAQSL

SEQ ID NO: 67986 - protein, 16 aa, unidentified
  source 1..16: note = methanogen bacteria
GLAALGSGDVNTLSES

SEQ ID NO: 67987 - protein, 11 aa, unidentified
  source 1..11: note = methanogen bacteria
VPVFALFLRFE

SEQ ID NO: 67988 - protein, 30 aa, unidentified; identical to SEQ ID NO: 54433
  source 1..30: note = methanogen bacteria

SEQ ID NO: 67989 - protein, 24 aa, unidentified
  source 1..24: note = methanogen bacteria
ICCFPARIPYRNNGLIQPKLGLSI

SEQ ID NO: 67990 - protein, 32 aa, unidentified
  source 1..32: note = methanogen bacteria
SGNTGEIMQNIQNAQTTTPTTTDTLGTNPLDL

SEQ ID NO: 67991 - protein, 16 aa, unidentified
  source 1..16: note = methanogen bacteria
LGPVLGTYLAHGGLQY

SEQ ID NO: 67992 - protein, 10 aa, unidentified
  source 1..10: note = methanogen bacteria
LPFSEWILGA

SEQ ID NO: 67993 - protein, 21 aa, unidentified
  source 1..21: note = methanogen bacteria
MAMAIPGGDFLTTGLNLIAQS

SEQ ID NO: 67994 - protein, 16 aa, unidentified
  source 1..16: note = methanogen bacteria
GLAALGSGDVNTLSQS

SEQ ID NO: 67995 - protein, 18 aa, unidentified
  source 1..18: note = methanogen bacteria
RSGSVADYFERHFGGSEY

SEQ ID NO: 67996 - protein, 13 aa, unidentified
  source 1..13: note = methanogen bacteria
KIIDLHFLGLEVP

SEQ ID NO: 67997 - protein, 20 aa, unidentified
  source 1..20: note = methanogen bacteria
VLPSPAFYTGDSSLQFVFTQ

SEQ ID NO: 67998 - protein, 14 aa, unidentified
  source 1..14: note = methanogen bacteria
LDYSKFTPFLILTP

SEQ ID NO: 67999 - protein, 29 aa, unidentified
  source 1..29: note = methanogen bacteria
INSSAYLGGYLTTGLGQNGFGAASTVGIN

SEQ ID NO: 68000 - protein, 11 aa, unidentified
  source 1..11: note = methanogen bacteria
YLNTQLAFLLD

SEQ ID NO: 68001 - protein, 21 aa, unidentified
  source 1..21: note = methanogen bacteria
NSTLNLDYTMFSSFLILTPTY

SEQ ID NO: 68002 - protein, 25 aa, unidentified
  source 1..25: note = methanogen bacteria
QADSSWTWGYNSLSDFGISYGTPAA

SEQ ID NO: 68003 - protein, 12 aa, unidentified
  source 1..12: note = methanogen bacteria
YLNTQFAFLLDN

SEQ ID NO: 68004 - protein, 20 aa, unidentified
  source 1..20: note = methanogen bacteria
NSTVNLDYTMFSSFLILTPT

SEQ ID NO: 68005 - protein, 13 aa, unidentified
  source 1..13: note = methanogen bacteria
YTGIRLELGPILA

SEQ ID NO: 68006 - protein, 10 aa, unidentified
  source 1..10: note = methanogen bacteria
TSQIPFDGSV

SEQ ID NO: 68007 - protein, 22 aa, unidentified
  source 1..22: note = methanogen bacteria
MVLNIPGGEFLTGSLDVISQSL

SEQ ID NO: 68008 - protein, 17 aa, unidentified
  source 1..17: note = methanogen bacteria
PGLAALGAGDINTLASS

SEQ ID NO: 68009 - protein, 12 aa, unidentified
  source 1..12: note = methanogen bacteria
NMPIPFGTSGHM

SEQ ID NO: 68010 - protein, 77 aa, unidentified
  source 1..77: note = methanogen bacteria
IFVVENYTPSNSNTHYYDVGSGSSRGSYSHSSHSSHYGGVDTSPNTIAKNDPDWYYDHYEYGDNPDIDDYLESQGYD

SEQ ID NO: 68011 - protein, 21 aa, unidentified
  source 1..21: note = methanogen bacteria
MSVSIPGGEFLTGSLDVISQS

SEQ ID NO: 68012 - protein, 17 aa, unidentified
  source 1..17: note = methanogen bacteria
PGLAALGAGDVNTLAES

SEQ ID NO: 68013 - protein, 20 aa, unidentified
  source 1..20: note = methanogen bacteria
MIIQGTEALTSLIHIISESL

SEQ ID NO: 68014 - protein, 17 aa, unidentified
  source 1..17: note = methanogen bacteria
PGLAALGSGDITTLAES

SEQ ID NO: 68015 - protein, 21 aa, unidentified
  source 1..21: note = methanogen bacteria
MSISVPGGEYLTGSLDVISQS

SEQ ID NO: 68016 - protein, 17 aa, unidentified
  source 1..17: note = methanogen bacteria
PGLAALGAGDVNTLAES

SEQ ID NO: 68017 - protein, 10 aa, unidentified
  source 1..10: note = methanogen bacteria
YPLRSYSIVF

SEQ ID NO: 68018 - protein, 15 aa, unidentified
  source 1..15: note = methanogen bacteria
IGAEKMVMTLIQMQI

SEQ ID NO: 68019 - protein, 10 aa, unidentified
  source 1..10: note = methanogen bacteria
STLGTTPISS

SEQ ID NO: 68020 - protein, 21 aa, unidentified
  source 1..21: note = methanogen bacteria
MALNIPGGEFLTGSLDVISQS

SEQ ID NO: 68021 - protein, 17 aa, unidentified
  source 1..17: note = methanogen bacteria
PGLAALGAGDINTLASS

SEQ ID NO: 68022 - protein, 11 aa, unidentified
  source 1..11: note = methanogen bacteria
YPLRSYSNVFN

SEQ ID NO: 68023 - protein, 14 aa, unidentified
  source 1..14: note = methanogen bacteria
GAEKMVMMLIQMQI

SEQ ID NO: 68024 - protein, 10 aa, unidentified
  source 1..10: note = methanogen bacteria
PYVLYSNGGG

SEQ ID NO: 68025 - protein, 29 aa, unidentified
  source 1..29: note = methanogen bacteria
FFKGWGADPNTYLNVNVLQATDSLSGVFN

SEQ ID NO: 68026 - protein, 20 aa, unidentified
  source 1..20: note = methanogen bacteria
TLPGASIGLAELFNPDWSLL

SEQ ID NO: 68027 - protein, 23 aa, unidentified
  source 1..23: note = methanogen bacteria
MVGTTIPGSEILTSGLNMIAQSL

SEQ ID NO: 68028 - protein, 17 aa, unidentified
  source 1..17: note = methanogen bacteria
PGLAALGAGDVNTLANA

SEQ ID NO: 68029 - protein, 77 aa, unidentified
  source 1..77: note = methanogen bacteria
SSLTLNSYSSSDSKSHYYSSGSGSSSGSSHSTHSSHYSGVDDSPHTIARNDPDWYYDHYEYGDNPDIDDYLESQGYD

SEQ ID NO: 68030 - protein, 10 aa, unidentified
  source 1..10: note = methanogen bacteria
TSQIPFDGSV

SEQ ID NO: 68031 - protein, 11 aa, unidentified
  source 1..11: note = methanogen bacteria
VAGLGAGPLAA

SEQ ID NO: 68032 - protein, 18 aa, unidentified
  source 1..18: note = methanogen bacteria
DMLLLFGAESVIDYAMDY

SEQ ID NO: 68033 - protein, 78 aa, unidentified
  source 1..78: note = methanogen bacteria
SLLTMDTYSPIHSNTHYYDVGSGSSSGSHSHSSHSSHYGGVDTSPNKIAKNDPDWYYDHYEYGDNPNIDDYLESQGYD

SEQ ID NO: 68034 - protein, 21 aa, unidentified
  source 1..21: note = methanogen bacteria
MAMAIPGGDFLTTGLNLISQS

SEQ ID NO: 68035 - protein, 16 aa, unidentified
  source 1..16: note = methanogen bacteria
GLAALGSGDVNTLSQS

SEQ ID NO: 68036 - protein, 10 aa, unidentified
  source 1..10: note = methanogen bacteria
YFDGGSTVFS

SEQ ID NO: 68037 - protein, 16 aa, unidentified
  source 1..16: note = methanogen bacteria
ADWGIFAEYLTTNSSF

SEQ ID NO: 68038 - protein, 21 aa, unidentified
  source 1..21: note = methanogen bacteria
MSVSIPGGEFLTGSLDVISQS

SEQ ID NO: 68039 - protein, 17 aa, unidentified
  source 1..17: note = methanogen bacteria
PGLAALGAGDVNTLAQS

SEQ ID NO: 68040 - protein, 22 aa, unidentified
  source 1..22: note = methanogen bacteria
STLGTTPISSISYSLTLITDIN

SEQ ID NO: 68041 - protein, 17 aa, unidentified
  source 1..17: note = methanogen bacteria
EIMGLVYFTNSAYMNGA

SEQ ID NO: 68042 - protein, 17 aa, unidentified
  source 1..17: note = methanogen bacteria
TLPEMELLTAGDFLAFI

SEQ ID NO: 68043 - protein, 32 aa, unidentified
  source 1..32: note = methanogen bacteria
VSDSASSTFQNIQNMSAATPSPVVSDLSPLDL

SEQ ID NO: 68044 - protein, 23 aa, unidentified
  source 1..23: note = methanogen bacteria
LGAVGPVLEAVHAGGGLQYIIYL

SEQ ID NO: 68045 - protein, 10 aa, unidentified
  source 1..10: note = methanogen bacteria
VPFSDWIFGL

SEQ ID NO: 68046 - protein, 21 aa, unidentified
  source 1..21: note = methanogen bacteria
MSVSIPGGEFLTGSLDVISQS

SEQ ID NO: 68047 - protein, 17 aa, unidentified
  source 1..17: note = methanogen bacteria
PGLAALGAGDVNTLAES

SEQ ID NO: 68048 - protein, 11 aa, unidentified
  source 1..11: note = methanogen bacteria
NMPIPFGTSGH

SEQ ID NO: 68049 - protein, 23 aa, unidentified
  source 1..23: note = methanogen bacteria
STLGTTPISSISYSLTLITNINI

SEQ ID NO: 68050 - protein, 21 aa, unidentified
  source 1..21: note = methanogen bacteria
MVTVIPGSDLLTSALNVVSQS

SEQ ID NO: 68051 - protein, 17 aa, unidentified
  source 1..17: note = methanogen bacteria
PGLAALGSGDVTTLSNA

SEQ ID NO: 68052 - protein, 22 aa, unidentified
  source 1..22: note = methanogen bacteria
MVSTIPGSEVLTSTLNMISQSL

SEQ ID NO: 68053 - protein, 17 aa, unidentified
  source 1..17: note = methanogen bacteria
PGLAALGAGDVNTLANA

SEQ ID NO: 68054 - protein, 22 aa, unidentified
  source 1..22: note = methanogen bacteria
MVTTIPGSEILTSTLNMISQSL

SEQ ID NO: 68055 - protein, 17 aa, unidentified
  source 1..17: note = methanogen bacteria
PGLAALGAGDVNTLANA

SEQ ID NO: 68056 - protein, 21 aa, unidentified
  source 1..21: note = methanogen bacteria
MALNIPGGEFLTGSLDVISQS

SEQ ID NO: 68057 - protein, 17 aa, unidentified
  source 1..17: note = methanogen bacteria
PGLAALGAGDINTLASS

SEQ ID NO: 68058 - protein, 11 aa, unidentified
  source 1..11: note = methanogen bacteria
KTLEFEFIALP

SEQ ID NO: 68059 - protein, 17 aa, unidentified
  source 1..17: note = methanogen bacteria
FTSSSQNASSFVTILST

SEQ ID NO: 68060 - protein, 20 aa, unidentified
  source 1..20: note = methanogen bacteria
NSTLNLDYSMFSPFLILTPT

SEQ ID NO: 68061 - protein, 22 aa, unidentified
  source 1..22: note = methanogen bacteria
MVLNIPGGEFLTGSLDVISQSL

SEQ ID NO: 68062 - protein, 17 aa, unidentified
  source 1..17: note = methanogen bacteria
PGLAALGAGDINTLASS

SEQ ID NO: 68063 - protein, 22 aa, unidentified
  source 1..22: note = methanogen bacteria
ANLGTSPIICVPYVSSLILKLS

SEQ ID NO: 68064 - protein, 11 aa, unidentified
  source 1..11: note = methanogen bacteria
KTLSISFIVLP

SEQ ID NO: 68065 - protein, 17 aa, unidentified
  source 1..17: note = methanogen bacteria
LPSTSPNSDAFTTILST

SEQ ID NO: 68066 - protein, 11 aa, unidentified
  source 1..11: note = methanogen bacteria
RTLEFEFIALP

SEQ ID NO: 68067 - protein, 18 aa, unidentified
  source 1..18: note = methanogen bacteria
AFPTSSPNAHAFTALLST

SEQ ID NO: 68068 - protein, 22 aa, unidentified
  source 1..22: note = methanogen bacteria
MVTTVPGSEILTSGLNMIAQSL

SEQ ID NO: 68069 - protein, 17 aa, unidentified
  source 1..17: note = methanogen bacteria
PGLAALGAGDVNTLANA

SEQ ID NO: 68070 - protein, 11 aa, unidentified
  source 1..11: note = methanogen bacteria
NMPIPFGTSGH

SEQ ID NO: 68071 - protein, 26 aa, unidentified
  source 1..26: note = methanogen bacteria
DFIYTPAELSNYAYLSQETFFSFHDM

SEQ ID NO: 68072 - protein, 23 aa, unidentified
  source 1..23: note = methanogen bacteria
MSGIVSRATELACGDPFLFLKLT

SEQ ID NO: 68073 - protein, 11 aa, unidentified
  source 1..11: note = methanogen bacteria
KTLKFEWIMLP

SEQ ID NO: 68074 - protein, 17 aa, unidentified
  source 1..17: note = methanogen bacteria
MPSNSPNADAFSTILST

SEQ ID NO: 68075 - protein, 12 aa, unidentified
  source 1..12: note = methanogen bacteria
NIPIPFGTSGHM

SEQ ID NO: 68076 - protein, 12 aa, unidentified
  source 1..12: note = methanogen bacteria
IYGPAHYNSTMQ

SEQ ID NO: 68077 - protein, 14 aa, unidentified
  source 1..14: note = methanogen bacteria
TIGAENIIRMILGL

SEQ ID NO: 68078 - protein, 26 aa, unidentified
  source 1..26: note = methanogen bacteria
DYIFTPYELADLAYLSQETQFSFMDM

SEQ ID NO: 68079 - protein, 23 aa, unidentified
  source 1..23: note = methanogen bacteria
MSGIVSRATEMACGDPFLFLKLT

SEQ ID NO: 68080 - protein, 11 aa, unidentified
  source 1..11: note = methanogen bacteria
RTLEISFIALP

SEQ ID NO: 68081 - protein, 18 aa, unidentified
  source 1..18: note = methanogen bacteria
IFPSSSPNAPAFAALLST

SEQ ID NO: 68082 - protein, 22 aa, unidentified
  source 1..22: note = methanogen bacteria
MVTTIPGSEVLTSGLNMIAQSL

SEQ ID NO: 68083 - protein, 17 aa, unidentified
  source 1..17: note = methanogen bacteria
PGLAALGAGDVNTLANA

SEQ ID NO: 68084 - protein, 11 aa, unidentified
  source 1..11: note = methanogen bacteria
KTLEFEFIALP

SEQ ID NO: 68085 - protein, 18 aa, unidentified
  source 1..18: note = methanogen bacteria
AFPSSSPNAPAFAMLLST

SEQ ID NO: 68086 - protein, 11 aa, unidentified
  source 1..11: note = methanogen bacteria
RTLEIGFIALP

SEQ ID NO: 68087 - protein, 18 aa, unidentified
  source 1..18: note = methanogen bacteria
LFPSSSPNAPAFAALLST

SEQ ID NO: 68088 - protein, 11 aa, unidentified
  source 1..11: note = methanogen bacteria
RTLEIEFIVLP

SEQ ID NO: 68089 - protein, 17 aa, unidentified
  source 1..17: note = methanogen bacteria
FPSNSPNADAFAMLLST

SEQ ID NO: 68090 - protein, 12 aa, unidentified
  source 1..12: note = methanogen bacteria
NMPIPFGTSGHM

SEQ ID NO: 68091 - protein, 23 aa, unidentified
  source 1..23: note = methanogen bacteria
KANLGTSPIICLPYVSSLILKMS

SEQ ID NO: 68092 - protein, 60 aa, unidentified; identical to SEQ ID NO: 56254
  source 1..60: note = methanogen bacteria

SEQ ID NO: 68093 - protein, 11 aa, unidentified
  source 1..11: note = methanogen bacteria
KTLQIEFIVLP

SEQ ID NO: 68094 - protein, 18 aa, unidentified
  source 1..18: note = methanogen bacteria
ALPSNSPNADAFATILGT

SEQ ID NO: 68095 - protein, 37 aa, unidentified
  source 1..37: note = methanogen bacteria
TYQNMGSNYGMISQNLYHLSQTGHPSPIQGVDGVEIF

SEQ ID NO: 68096 - protein, 16 aa, unidentified
  source 1..16: note = methanogen bacteria
IGAPFGTDVLFASVSI

SEQ ID NO: 68097 - protein, 10 aa, unidentified
  source 1..10: note = methanogen bacteria
VPIVNWVYGF

SEQ ID NO: 68098 - protein, 23 aa, unidentified
  source 1..23: note = methanogen bacteria
KANLGTSPIICLPYVSSLILKMS

SEQ ID NO: 68099 - protein, 22 aa, unidentified
  source 1..22: note = methanogen bacteria
MVTTVPGSDILTSGLNMISQSL

SEQ ID NO: 68100 - protein, 17 aa, unidentified
  source 1..17: note = methanogen bacteria
PGLAALGAGDVNTLASA

SEQ ID NO: 68101 - protein, 22 aa, unidentified
  source 1..22: note = methanogen bacteria
MVLNIPGGEFLTGSLDVISQSL

SEQ ID NO: 68102 - protein, 17 aa, unidentified
  source 1..17: note = methanogen bacteria
PGLAALGAGDINTLASS

SEQ ID NO: 68103 - protein, 26 aa, unidentified
  source 1..26: note = methanogen bacteria
ASKVQMAFANIPFGNGTDISISALEL

SEQ ID NO: 68104 - protein, 20 aa, unidentified
  source 1..20: note = methanogen bacteria
VIGQLISTVTHNDGMFYFVY

SEQ ID NO: 68105 - protein, 10 aa, unidentified
  source 1..10: note = methanogen bacteria
VPVAEFLTGV

SEQ ID NO: 68106 - protein, 21 aa, unidentified
  source 1..21: note = methanogen bacteria
MALNIPGGEFLTGSLDVISQS

SEQ ID NO: 68107 - protein, 17 aa, unidentified
  source 1..17: note = methanogen bacteria
PGLAALGAGDINTLASS

SEQ ID NO: 68108 - protein, 22 aa, unidentified
  source 1..22: note = methanogen bacteria
MVATIPGSEILTSTLNMISQSL

SEQ ID NO: 68109 - protein, 17 aa, unidentified
  source 1..17: note = methanogen bacteria
PGLAALGAGDVNTLANA

SEQ ID NO: 68110 - protein, 11 aa, unidentified
  source 1..11: note = methanogen bacteria
YPFSLHSQTIH

SEQ ID NO: 68111 - protein, 15 aa, unidentified
  source 1..15: note = methanogen bacteria
TIGAENMVLMIMGLT

SEQ ID NO: 68112 - protein, 12 aa, unidentified
  source 1..12: note = methanogen bacteria
IYIPAHNNATML

SEQ ID NO: 68113 - protein, 15 aa, unidentified
  source 1..15: note = methanogen bacteria
MTMGAQNIIRMILGL

SEQ ID NO: 68114 - protein, 21 aa, unidentified
  source 1..21: note = methanogen bacteria
HKSIMNLDYGMFSSFLILTPT

SEQ ID NO: 68115 - protein, 25 aa, unidentified
  source 1..25: note = methanogen bacteria
LIFTPQELTDYEYLAQETFFSFEDM

SEQ ID NO: 68116 - protein, 22 aa, unidentified
  source 1..22: note = methanogen bacteria
SGITSRATELACGDPFLFLKLT

SEQ ID NO: 68117 - protein, 11 aa, unidentified
  source 1..11: note = methanogen bacteria
RTMEISFIALP

SEQ ID NO: 68118 - protein, 18 aa, unidentified
  source 1..18: note = methanogen bacteria
IFPSSGSNAPAFAALLST

SEQ ID NO: 68119 - protein, 21 aa, unidentified
  source 1..21: note = methanogen bacteria
MASTIPGGDILTGILNVVAQS

SEQ ID NO: 68120 - protein, 17 aa, unidentified
  source 1..17: note = methanogen bacteria
PGLAALGAGDMMTLTTN

SEQ ID NO: 68121 - protein, 20 aa, unidentified
  source 1..20: note = methanogen bacteria
MSAIPGGEFLTGSLDVISQS

SEQ ID NO: 68122 - protein, 17 aa, unidentified
  source 1..17: note = methanogen bacteria
PGLAALGAGDINTLASS

SEQ ID NO: 68123 - protein, 21 aa, unidentified
  source 1..21: note = methanogen bacteria
MVTTIPGSEVLTSALNMISQS

SEQ ID NO: 68124 - protein, 17 aa, unidentified
  source 1..17: note = methanogen bacteria
PGLAALGAGDVNTLANA

SEQ ID NO: 68125 - protein, 22 aa, unidentified
  source 1..22: note = methanogen bacteria
MALNIPGGEFLTGSLDVISQSL

SEQ ID NO: 68126 - protein, 17 aa, unidentified
  source 1..17: note = methanogen bacteria
PGLAALGAGDINTLASS

SEQ ID NO: 68127 - protein, 20 aa, unidentified
  source 1..20: note = methanogen bacteria
MIFQGTESLTTLIHIISESL

SEQ ID NO: 68128 - protein, 17 aa, unidentified
  source 1..17: note = methanogen bacteria
PGLSALGTGDISTLAQA

SEQ ID NO: 68129 - protein, 22 aa, unidentified
  source 1..22: note = methanogen bacteria
MVLNIPGGEFLTGSLDVISQSL

SEQ ID NO: 68130 - protein, 17 aa, unidentified
  source 1..17: note = methanogen bacteria
PGLAALGAGDINTLATS

SEQ ID NO: 68131 - protein, 10 aa, unidentified
  source 1..10: note = methanogen bacteria
FPLKTYSDVF

SEQ ID NO: 68132 - protein, 14 aa, unidentified
  source 1..14: note = methanogen bacteria
IGAEKMVQLIITGI

SEQ ID NO: 68133 - protein, 23 aa, unidentified
  source 1..23: note = methanogen bacteria
MPADAFANNVVPNLVDPKLAMTD

SEQ ID NO: 68134 - protein, 11 aa, unidentified
  source 1..11: note = methanogen bacteria
VFSDMYYANVP

SEQ ID NO: 68135 - protein, 31 aa, unidentified
  source 1..31: note = methanogen bacteria
FDLWYTGQPFFNQYTGEYVEHLPPEIVLSNR

SEQ ID NO: 68136 - protein, 22 aa, unidentified
  source 1..22: note = methanogen bacteria
MVTTIPGSEVLTSTLNMISQSL

SEQ ID NO: 68137 - protein, 17 aa, unidentified
  source 1..17: note = methanogen bacteria
PGLAALGAGDVNTLANA

SEQ ID NO: 68138 - protein, 22 aa, unidentified
  source 1..22: note = methanogen bacteria
MALSIPGGEFLTGSLDVISQSL

SEQ ID NO: 68139 - protein, 17 aa, unidentified
  source 1..17: note = methanogen bacteria
PGLAALGAGDINTLASS

SEQ ID NO: 68140 - protein, 11 aa, unidentified
  source 1..11: note = methanogen bacteria
MFSDMYYANVP

SEQ ID NO: 68141 - protein, 30 aa, unidentified
  source 1..30: note = methanogen bacteria
FDLWYTGQPFFNQYTGEYVEHLPPEIVLSN

SEQ ID NO: 68142 - protein, 13 aa, unidentified
  source 1..13: note = methanogen bacteria
VYPSALTSNSTSL

SEQ ID NO: 68143 - protein, 14 aa, unidentified
  source 1..14: note = methanogen bacteria
TMGVENIVRSIIGL

SEQ ID NO: 68144 - protein, 22 aa, unidentified
  source 1..22: note = methanogen bacteria
MVSTIPGSEILTSTLNMISQSL

SEQ ID NO: 68145 - protein, 17 aa, unidentified
  source 1..17: note = methanogen bacteria
PGLAALGAGDVNTLANA

SEQ ID NO: 68146 - protein, 11 aa, unidentified
  source 1..11: note = methanogen bacteria
YGPAHYNATMQ

SEQ ID NO: 68147 - protein, 15 aa, unidentified
  source 1..15: note = methanogen bacteria
MTMGAENIIRMILGL

SEQ ID NO: 68148 - protein, 29 aa, unidentified
  source 1..29: note = methanogen bacteria
DWIYTPAELVDYEYLSQETFYSFEDMMYI

SEQ ID NO: 68149 - protein, 24 aa, unidentified
  source 1..24: note = methanogen bacteria
MSGITSRATELACGDPFLFLKLTC

SEQ ID NO: 68150 - protein, 27 aa, unidentified
  source 1..27: note = methanogen bacteria
STGLPLFEVYTQNTISALGVPGYISPI

SEQ ID NO: 68151 - protein, 20 aa, unidentified
  source 1..20: note = methanogen bacteria
MSTFPGSEILTGILHIVSES

SEQ ID NO: 68152 - protein, 17 aa, unidentified
  source 1..17: note = methanogen bacteria
PGLAALGSGDITSLASA

SEQ ID NO: 68153 - protein, 12 aa, unidentified
  source 1..12: note = methanogen bacteria
NMPIPFGTSGHM

SEQ ID NO: 68154 - protein, 22 aa, unidentified
  source 1..22: note = methanogen bacteria
MSVAIPGGEYLTGALDVISQSL

SEQ ID NO: 68155 - protein, 17 aa, unidentified
  source 1..17: note = methanogen bacteria
PGLAALGTGDVTTLAES

SEQ ID NO: 68156 - protein, 11 aa, unidentified
  source 1..11: note = methanogen bacteria
KTLKIGLIMLP

SEQ ID NO: 68157 - protein, 18 aa, unidentified
  source 1..18: note = methanogen bacteria
MLPSNSPSADAFATILGT

SEQ ID NO: 68158 - protein, 12 aa, unidentified
  source 1..12: note = methanogen bacteria
NMPIPFGTSGHM

SEQ ID NO: 68159 - protein, 21 aa, unidentified
  source 1..21: note = methanogen bacteria
MVSNIPGGEFLTGSLDVISQS

SEQ ID NO: 68160 - protein, 17 aa, unidentified
  source 1..17: note = methanogen bacteria
PGLAALGAGDINTLASS

SEQ ID NO: 68161 - protein, 12 aa, unidentified
  source 1..12: note = methanogen bacteria
NIPIPFGTSGHM

SEQ ID NO: 68162 - protein, 19 aa, unidentified
  source 1..19: note = methanogen bacteria
MILQGTGILTSFIHIISES

SEQ ID NO: 68163 - protein, 17 aa, unidentified
  source 1..17: note = methanogen bacteria
PGLSALGTGDITTLAQS

SEQ ID NO: 68164 - protein, 20 aa, unidentified
  source 1..20: note = methanogen bacteria
MILQGTETLTSLIHIISESL

SEQ ID NO: 68165 - protein, 17 aa, unidentified
  source 1..17: note = methanogen bacteria
PGLAALGTGDIATLAQS

SEQ ID NO: 68166 - protein, 11 aa, unidentified
  source 1..11: note = methanogen bacteria
YRSAFTSQTSL

SEQ ID NO: 68167 - protein, 15 aa, unidentified
  source 1..15: note = methanogen bacteria
MTMGFEIMVRTVLGF

SEQ ID NO: 68168 - protein, 11 aa, unidentified
  source 1..11: note = methanogen bacteria
YPLKIHSNIFH

SEQ ID NO: 68169 - protein, 13 aa, unidentified
  source 1..13: note = methanogen bacteria
IGAENAVQLIMGV

SEQ ID NO: 68170 - protein, 11 aa, unidentified
  source 1..11: note = methanogen bacteria
YRSAFTSQTSL

SEQ ID NO: 68171 - protein, 14 aa, unidentified
  source 1..14: note = methanogen bacteria
TMGVENMVRIIIGF

SEQ ID NO: 68172 - protein, 20 aa, unidentified
  source 1..20: note = methanogen bacteria
MIIQGTETLTSLIHILSESL

SEQ ID NO: 68173 - protein, 17 aa, unidentified
  source 1..17: note = methanogen bacteria
PGLAALGSGDIATLAES

SEQ ID NO: 68174 - protein, 14 aa, unidentified
  source 1..14: note = methanogen bacteria
VKIINIGFLGMETP

SEQ ID NO: 68175 - protein, 19 aa, unidentified
  source 1..19: note = methanogen bacteria
LPSPSFFTGDSSLAFVFTQ

SEQ ID NO: 68176 - protein, 11 aa, unidentified
  source 1..11: note = methanogen bacteria
YRSAFNSQTSL

SEQ ID NO: 68177 - protein, 15 aa, unidentified
  source 1..15: note = methanogen bacteria
MTMGFETIVRTILGF

SEQ ID NO: 68178 - protein, 20 aa, unidentified
  source 1..20: note = methanogen bacteria
MIIQGTEALTSFIHILSESL

SEQ ID NO: 68179 - protein, 17 aa, unidentified
  source 1..17: note = methanogen bacteria
PGLAALGTGDIATLAES

SEQ ID NO: 68180 - protein, 11 aa, unidentified
  source 1..11: note = methanogen bacteria
SQIGLDLKVVP

SEQ ID NO: 68181 - protein, 29 aa, unidentified
  source 1..29: note = methanogen bacteria
GLVDFSSVLAADAVEIPKFYLPFINYDLN

SEQ ID NO: 68182 - protein, 12 aa, unidentified
  source 1..12: note = methanogen bacteria
VYPSAFHSANSV

SEQ ID NO: 68183 - protein, 15 aa, unidentified
  source 1..15: note = methanogen bacteria
MTMGVENLVRLIIGF

SEQ ID NO: 68184 - protein, 21 aa, unidentified
  source 1..21: note = methanogen bacteria
MALNIPGGEFLTGSLDVISQS

SEQ ID NO: 68185 - protein, 17 aa, unidentified
  source 1..17: note = methanogen bacteria
PGLAALGAGDINTLASS

SEQ ID NO: 68186 - protein, 11 aa, unidentified
  source 1..11: note = methanogen bacteria
YPSAFSSQTSL

SEQ ID NO: 68187 - protein, 14 aa, unidentified
  source 1..14: note = methanogen bacteria
TIGVENIIRLIIGI

SEQ ID NO: 68188 - protein, 20 aa, unidentified
  source 1..20: note = methanogen bacteria
MILQGTETLTSFIHILSESL

SEQ ID NO: 68189 - protein, 17 aa, unidentified
  source 1..17: note = methanogen bacteria
PGLAALGTGDIATLAES

SEQ ID NO: 68190 - protein, 19 aa, unidentified
  source 1..19: note = methanogen bacteria
MTIPGGDFLTTGLNLISQS

SEQ ID NO: 68191 - protein, 16 aa, unidentified
  source 1..16: note = methanogen bacteria
GLAALGSGDVNTLSES

SEQ ID NO: 68192 - protein, 20 aa, unidentified
  source 1..20: note = methanogen bacteria
MIIQGTETLTSLIHILSESL

SEQ ID NO: 68193 - protein, 17 aa, unidentified
  source 1..17: note = methanogen bacteria
PGLAALGSGDIATLAES

SEQ ID NO: 68194 - protein, 20 aa, unidentified
  source 1..20: note = methanogen bacteria
NSTLNLDYSMFSPFLILTPT

SEQ ID NO: 68195 - protein, 23 aa, unidentified
  source 1..23: note = methanogen bacteria
ANLGTSPLICLPYVSSLIVNLSV

SEQ ID NO: 68196 - protein, 12 aa, unidentified
  source 1..12: note = methanogen bacteria
VYPSAFTSETSV

SEQ ID NO: 68197 - protein, 14 aa, unidentified
  source 1..14: note = methanogen bacteria
TIGFGTIVRMILGI

SEQ ID NO: 68198 - protein, 20 aa, unidentified
  source 1..20: note = methanogen bacteria
MIIQGTETLTSLIHILSESL

SEQ ID NO: 68199 - protein, 17 aa, unidentified
  source 1..17: note = methanogen bacteria
PGLAALGTGDIATLAQA

SEQ ID NO: 68200 - protein, 22 aa, unidentified
  source 1..22: note = methanogen bacteria
MALNIPGGEFLTGSLDVISQSL

SEQ ID NO: 68201 - protein, 17 aa, unidentified
  source 1..17: note = methanogen bacteria
PGLAALGAGDINTLASS

SEQ ID NO: 68202 - protein, 10 aa, unidentified
  source 1..10: note = methanogen bacteria
YPLNGHSSFF

SEQ ID NO: 68203 - protein, 13 aa, unidentified
  source 1..13: note = methanogen bacteria
IGAENMVKLFLVL

SEQ ID NO: 68204 - protein, 11 aa, unidentified
  source 1..11: note = methanogen bacteria
YPSAFHSQTSV

SEQ ID NO: 68205 - protein, 15 aa, unidentified
  source 1..15: note = methanogen bacteria
MTIGVENIIRLIIGF

SEQ ID NO: 68206 - protein, 13 aa, unidentified
  source 1..13: note = methanogen bacteria
KIININFLGMETP

SEQ ID NO: 68207 - protein, 19 aa, unidentified
  source 1..19: note = methanogen bacteria
LPSPDFFTGDAALSFVFTQ

SEQ ID NO: 68208 - protein, 90 aa, unidentified
  source 1..90: note = methanogen bacteria
NWTLVKHQIIDWDTKEAELDSGAIDCIWSGFTINGREDDYAWTDPYFNNSQVFVVKADSNISSVEDLKGKDIDVEMGSSAIAALENNKDL

SEQ ID NO: 68209 - protein, 58 aa, unidentified
  source 1..58: note = methanogen bacteria
NTKYNEEDYRILETPLSLEQYGVGFAKDNTELRDQVQETLNEMYEDGTIDKIAQKYKD

SEQ ID NO: 68210 - protein, 29 aa, unidentified
  source 1..29: note = methanogen bacteria
GGHMENVIDDIPDSAGGSKDGNVTATELF

SEQ ID NO: 68211 - protein, 16 aa, unidentified
  source 1..16: note = methanogen bacteria
TGALLSHFMPKGWIQY

SEQ ID NO: 68212 - protein, 10 aa, unidentified
  source 1..10: note = methanogen bacteria
IPLSNFILGV

SEQ ID NO: 68213 - protein, 11 aa, unidentified
  source 1..11: note = methanogen bacteria
KATLGTSPISC

SEQ ID NO: 68214 - protein, 12 aa, unidentified
  source 1..12: note = methanogen bacteria
VYPSALYSEGTA

SEQ ID NO: 68215 - protein, 14 aa, unidentified
  source 1..14: note = methanogen bacteria
TIGVQNIVRLILGF

SEQ ID NO: 68216 - protein, 18 aa, unidentified
  source 1..18: note = methanogen bacteria
NSTMNLDYTMFKSFLILT

SEQ ID NO: 68217 - protein, 20 aa, unidentified
  source 1..20: note = methanogen bacteria
MIIQGTETLTSLIHIISESL

SEQ ID NO: 68218 - protein, 17 aa, unidentified
  source 1..17: note = methanogen bacteria
PGLAALGSGDIMTLAQS

SEQ ID NO: 68219 - protein, 17 aa, unidentified
  source 1..17: note = methanogen bacteria
MMNYNYAFSPIYEFTVG

SEQ ID NO: 68220 - protein, 26 aa, unidentified
  source 1..26: note = methanogen bacteria
NIVSGILLGNWDAFPISGGLLLFCVD

SEQ ID NO: 68221 - protein, 26 aa, unidentified
  source 1..26: note = methanogen bacteria
GTDFGIPLMNLFFADFIGSAGGFTAF

SEQ ID NO: 68222 - protein, 11 aa, unidentified
  source 1..11: note = methanogen bacteria
YPFKIYSNIFN

SEQ ID NO: 68223 - protein, 13 aa, unidentified
  source 1..13: note = methanogen bacteria
IGAENMVSLLIGA

SEQ ID NO: 68224 - protein, 21 aa, unidentified
  source 1..21: note = methanogen bacteria
MVAIPGSEFLTAALNVVSQSL

SEQ ID NO: 68225 - protein, 17 aa, unidentified
  source 1..17: note = methanogen bacteria
PGLAALGSGDVTTLANA

SEQ ID NO: 68226 - protein, 11 aa, unidentified
  source 1..11: note = methanogen bacteria
YPSAFHSQTSV

SEQ ID NO: 68227 - protein, 15 aa, unidentified
  source 1..15: note = methanogen bacteria
MTIGVENIIRLIIGI

SEQ ID NO: 68228 - protein, 11 aa, unidentified
  source 1..11: note = methanogen bacteria
YPLRFYSNIIN

SEQ ID NO: 68229 - protein, 12 aa, unidentified
  source 1..12: note = methanogen bacteria
GAEHMIQILMGL

SEQ ID NO: 68230 - protein, 12 aa, unidentified
  source 1..12: note = methanogen bacteria
IYPYALSSETNV

SEQ ID NO: 68231 - protein, 14 aa, unidentified
  source 1..14: note = methanogen bacteria
TVGIESIIRLFLGM

SEQ ID NO: 68232 - protein, 14 aa, unidentified
  source 1..14: note = methanogen bacteria
VKIINIGFLGMETP

SEQ ID NO: 68233 - protein, 19 aa, unidentified
  source 1..19: note = methanogen bacteria
LPSPAFYTGDSSLAFVFTQ

SEQ ID NO: 68234 - protein, 20 aa, unidentified
  source 1..20: note = methanogen bacteria
MIIQGTETLTSLIHIISESL

SEQ ID NO: 68235 - protein, 17 aa, unidentified
  source 1..17: note = methanogen bacteria
PGLAALGTGDIATLAQS

SEQ ID NO: 68236 - protein, 20 aa, unidentified
  source 1..20: note = methanogen bacteria
MILQGTGILTSFIHIISESL

SEQ ID NO: 68237 - protein, 17 aa, unidentified
  source 1..17: note = methanogen bacteria
PGLSALGTGDITTLAQS

SEQ ID NO: 68238 - protein, 10 aa, unidentified
  source 1..10: note = methanogen bacteria
KSTLGTPPIS

SEQ ID NO: 68239 - protein, 29 aa, unidentified
  source 1..29: note = methanogen bacteria
GGHMENVIDDTPDSAGGSKDGNVTATELF

SEQ ID NO: 68240 - protein, 16 aa, unidentified
  source 1..16: note = methanogen bacteria
TGALLSHFMPKGWIQY

SEQ ID NO: 68241 - protein, 10 aa, unidentified
  source 1..10: note = methanogen bacteria
IPLSNFILGV

SEQ ID NO: 68242 - protein, 13 aa, unidentified
  source 1..13: note = methanogen bacteria
IYPTALASETNIT

SEQ ID NO: 68243 - protein, 15 aa, unidentified
  source 1..15: note = methanogen bacteria
MTVGVENIIRLILGM

SEQ ID NO: 68244 - protein, 11 aa, unidentified
  source 1..11: note = methanogen bacteria
IYRQSFFNAGL

SEQ ID NO: 68245 - protein, 14 aa, unidentified
  source 1..14: note = methanogen bacteria
TVGVENIIRMIIGF

SEQ ID NO: 68246 - protein, 20 aa, unidentified
  source 1..20: note = methanogen bacteria
MILGGTETLTSLIHILSECL

SEQ ID NO: 68247 - protein, 17 aa, unidentified
  source 1..17: note = methanogen bacteria
PGLAALGTGDIATLAES

SEQ ID NO: 68248 - protein, 13 aa, unidentified
  source 1..13: note = methanogen bacteria
KIINIEFLGMETP

SEQ ID NO: 68249 - protein, 19 aa, unidentified
  source 1..19: note = methanogen bacteria
LPSPSFYTGDSSLAFVFTQ

SEQ ID NO: 68250 - protein, 11 aa, unidentified
  source 1..11: note = methanogen bacteria
YTSAFSSETLR

SEQ ID NO: 68251 - protein, 14 aa, unidentified
  source 1..14: note = methanogen bacteria
TIGVENMVRIIVGV

SEQ ID NO: 68252 - protein, 21 aa, unidentified
  source 1..21: note = methanogen bacteria
MTAVPGSEIITSGLNMISQSL

SEQ ID NO: 68253 - protein, 17 aa, unidentified
  source 1..17: note = methanogen bacteria
PGLAALGAGDVNTLANA

SEQ ID NO: 68254 - protein, 12 aa, unidentified
  source 1..12: note = methanogen bacteria
VYPSALYSETYA

SEQ ID NO: 68255 - protein, 14 aa, unidentified
  source 1..14: note = methanogen bacteria
TMGVQNIVRLIIGM

SEQ ID NO: 68256 - protein, 20 aa, unidentified
  source 1..20: note = methanogen bacteria
MIIQGTETLTSLIHIISESL

SEQ ID NO: 68257 - protein, 17 aa, unidentified
  source 1..17: note = methanogen bacteria
PGLAALGTGDIATLAQS

SEQ ID NO: 68258 - protein, 14 aa, unidentified
  source 1..14: note = methanogen bacteria
VKIINIGFLGMETP

SEQ ID NO: 68259 - protein, 19 aa, unidentified
  source 1..19: note = methanogen bacteria
LPSPATFTGDSSLAFVFTQ

SEQ ID NO: 68260 - protein, 20 aa, unidentified
  source 1..20: note = methanogen bacteria
DIFNQIIRPITYLFLMGSSK

SEQ ID NO: 68261 - protein, 61 aa, unidentified
  source 1..61: note = methanogen bacteria
LQLGIGLNTVFCSMGKSMTSTSILHTHLLKSIFGGVLVNLLGPVIGNGINTGVGLYHYVPT

SEQ ID NO: 68262 - protein, 12 aa, unidentified
  source 1..12: note = methanogen bacteria
GMFAELWKIQAS

SEQ ID NO: 68263 - protein, 22 aa, unidentified
  source 1..22: note = methanogen bacteria
MALNIPGGEFLTGSLDVISQSL

SEQ ID NO: 68264 - protein, 17 aa, unidentified
  source 1..17: note = methanogen bacteria
PGLAALGAGDINTLASS

SEQ ID NO: 68265 - protein, 19 aa, unidentified
  source 1..19: note = methanogen bacteria
MFKFNDIIFSGTGNVNSLN

SEQ ID NO: 68266 - protein, 16 aa, unidentified
  source 1..16: note = methanogen bacteria
IPIKDPTSELIARTSP

SEQ ID NO: 68267 - protein, 19 aa, unidentified
  source 1..19: note = methanogen bacteria
MILQGTSILTSFIHIVSES

SEQ ID NO: 68268 - protein, 17 aa, unidentified
  source 1..17: note = methanogen bacteria
PGLSALGSGDITTLAES

SEQ ID NO: 68269 - protein, 11 aa, unidentified
  source 1..11: note = methanogen bacteria
YPFNVHSDIFH

SEQ ID NO: 68270 - protein, 14 aa, unidentified
  source 1..14: note = methanogen bacteria
TIGPEKMVLLFMGG

SEQ ID NO: 68271 - protein, 11 aa, unidentified
  source 1..11: note = methanogen bacteria
YRSAFISQTSA

SEQ ID NO: 68272 - protein, 14 aa, unidentified
  source 1..14: note = methanogen bacteria
TIGFESIVRMIIGI

SEQ ID NO: 68273 - protein, 11 aa, unidentified
  source 1..11: note = methanogen bacteria
YPNALYSQTSI

SEQ ID NO: 68274 - protein, 15 aa, unidentified
  source 1..15: note = methanogen bacteria
MTIGVENIIRLIIGY

SEQ ID NO: 68275 - protein, 20 aa, unidentified
  source 1..20: note = methanogen bacteria
MIIQGTGTLTSFIHILSESL

SEQ ID NO: 68276 - protein, 17 aa, unidentified
  source 1..17: note = methanogen bacteria
PGLAALGTGDIATLAES

SEQ ID NO: 68277 - protein, 11 aa, unidentified
  source 1..11: note = methanogen bacteria
KTFDFFSFTLP

SEQ ID NO: 68278 - protein, 19 aa, unidentified
  source 1..19: note = methanogen bacteria
LPAPAFFENSEAFSIVLGS

SEQ ID NO: 68279 - protein, 23 aa, unidentified
  source 1..23: note = methanogen bacteria
KANLGTSPLICLPYVSSEIVKLS

SEQ ID NO: 68280 - protein, 11 aa, unidentified
  source 1..11: note = methanogen bacteria
KTFDFFSFTLP

SEQ ID NO: 68281 - protein, 19 aa, unidentified
  source 1..19: note = methanogen bacteria
LPAPVFFENSEAFSIVLGS

SEQ ID NO: 68282 - protein, 11 aa, unidentified
  source 1..11: note = methanogen bacteria
RTLEISFIALP

SEQ ID NO: 68283 - protein, 18 aa, unidentified
  source 1..18: note = methanogen bacteria
IFPSTSPNAPAFAALLST

SEQ ID NO: 68284 - protein, 18 aa, unidentified
  source 1..18: note = methanogen bacteria
TTEMHHNTLLKFYVMTVK

SEQ ID NO: 68285 - protein, 11 aa, unidentified
  source 1..11: note = methanogen bacteria
RTLEISFIALP

SEQ ID NO: 68286 - protein, 18 aa, unidentified
  source 1..18: note = methanogen bacteria
MFPSSSPNAPAFAALLST

SEQ ID NO: 68287 - protein, 11 aa, unidentified
  source 1..11: note = methanogen bacteria
KTFDFFSFTLP

SEQ ID NO: 68288 - protein, 20 aa, unidentified
  source 1..20: note = methanogen bacteria
MLPAPVFFENSDAYSIVLGS

SEQ ID NO: 68289 - protein, 21 aa, unidentified
  source 1..21: note = methanogen bacteria
RLFFIQFNSPLFGDFSSLSIE

SEQ ID NO: 68290 - protein, 11 aa, unidentified
  source 1..11: note = methanogen bacteria
KTFVLFSFTLP

SEQ ID NO: 68291 - protein, 20 aa, unidentified
  source 1..20: note = methanogen bacteria
WLPAPSFFENAAAFEIVLGS

SEQ ID NO: 68292 - protein, 20 aa, unidentified
  source 1..20: note = methanogen bacteria
NSTLNLNYAMFSSFLILTPT

SEQ ID NO: 68293 - protein, 32 aa, unidentified
  source 1..32: note = methanogen bacteria
ISSPFNFPSFELEEMLLDLPNTLNMLISHNHV

SEQ ID NO: 68294 - protein, 11 aa, unidentified
  source 1..11: note = methanogen bacteria
RTMEISFIALP

SEQ ID NO: 68295 - protein, 18 aa, unidentified
  source 1..18: note = methanogen bacteria
IFPSSSPNAPAFAALLST

SEQ ID NO: 68296 - protein, 13 aa, unidentified
  source 1..13: note = methanogen bacteria
KVVNLNFYGMEVT

SEQ ID NO: 68297 - protein, 19 aa, unidentified
  source 1..19: note = methanogen bacteria
LPSPVWYTGDSSLAFVFTQ

SEQ ID NO: 68298 - protein, 19 aa, unidentified
  source 1..19: note = methanogen bacteria
QLIGVVSADSQPMQVTVES

SEQ ID NO: 68299 - protein, 12 aa, unidentified
  source 1..12: note = methanogen bacteria
KLPSVTGSCSHP

SEQ ID NO: 68300 - protein, 10 aa, unidentified
  source 1..10: note = methanogen bacteria
AFPAPSFGSA

SEQ ID NO: 68301 - protein, 30 aa, unidentified
  source 1..30: note = methanogen bacteria
VGPVGAKLSAAQNMSSSTPAAMQDASPVDL

SEQ ID NO: 68302 - protein, 16 aa, unidentified
  source 1..16: note = methanogen bacteria
IGQLFSQVLPNGGMRF

SEQ ID NO: 68303 - protein, 11 aa, unidentified
  source 1..11: note = methanogen bacteria
VPFSELILGTW

SEQ ID NO: 68304 - protein, 12 aa, unidentified
  source 1..12: note = methanogen bacteria
NMPIPFGTSGHM

SEQ ID NO: 68305 - protein, 15 aa, unidentified
  source 1..15: note = methanogen bacteria
MDLLTFYYNFPNISF

SEQ ID NO: 68306 - protein, 16 aa, unidentified
  source 1..16: note = methanogen bacteria
GVEIIFMTLRYIGIPI

SEQ ID NO: 68307 - protein, 11 aa, unidentified
  source 1..11: note = methanogen bacteria
NLPVPFGSSGH

SEQ ID NO: 68308 - protein, 12 aa, unidentified
  source 1..12: note = methanogen bacteria
MIDPSTKVLINP

SEQ ID NO: 68309 - protein, 11 aa, unidentified
  source 1..11: note = methanogen bacteria
ERVDLGYQFIR

SEQ ID NO: 68310 - protein, 11 aa, unidentified
  source 1..11: note = methanogen bacteria
RTLEISFIALP

SEQ ID NO: 68311 - protein, 17 aa, unidentified
  source 1..17: note = methanogen bacteria
FPSSSPNAPAFAALLST

SEQ ID NO: 68312 - protein, 43 aa, unidentified
  source 1..43: note = methanogen bacteria
NIYGNFMIIANEVMSQAQNVYMGNSTFILSEAASQAIANLMIS

SEQ ID NO: 68313 - protein, 32 aa, unidentified
  source 1..32: note = methanogen bacteria
SADAISASLSGIQNASSSTPTLDNTISAMDIL

SEQ ID NO: 68314 - protein, 18 aa, unidentified
  source 1..18: note = methanogen bacteria
GMFGQLFCQYVPNGGLKY

SEQ ID NO: 68315 - protein, 10 aa, unidentified
  source 1..10: note = methanogen bacteria
VPFSEFIVGA

SEQ ID NO: 68316 - protein, 10 aa, unidentified
  source 1..10: note = methanogen bacteria
SVMANVGLVA

SEQ ID NO: 68317 - protein, 12 aa, unidentified
  source 1..12: note = methanogen bacteria
NMPIPFGTSGHM

SEQ ID NO: 68318 - protein, 25 aa, unidentified
  source 1..25: note = methanogen bacteria
AMGMNDCALDDLTSVGSNHLVHDDV

SEQ ID NO: 68319 - protein, 21 aa, unidentified
  source 1..21: note = methanogen bacteria
YNSTITLDYTAFDPFLILTPT

SEQ ID NO: 68320 - protein, 51 aa, unidentified
  source 1..51: note = methanogen bacteria
ADWASETVTVSSSLLGSTAKTGSGTGLDVAGKDFFTEIDSGGNIVAVDNWH

SEQ ID NO: 68321 - protein, 24 aa, unidentified
  source 1..24: note = methanogen bacteria
WDRFGTSEYSILGVKTAYDVSPEF

SEQ ID NO: 68322 - protein, 10 aa, unidentified
  source 1..10: note = methanogen bacteria
NPFGTQALAG

SEQ ID NO: 68323 - protein, 22 aa, unidentified
  source 1..22: note = methanogen bacteria
TQISSLFLGKDGTALAYQVSGD

SEQ ID NO: 68324 - protein, 29 aa, unidentified
  source 1..29: note = methanogen bacteria
LLDSYMNIIYKELSENISNGNIELTTLSI

SEQ ID NO: 68325 - protein, 14 aa, unidentified
  source 1..14: note = methanogen bacteria
YFAAQSASSGKLLD

SEQ ID NO: 68326 - protein, 12 aa, unidentified
  source 1..12: note = methanogen bacteria
SVYMDMMVNPFL

SEQ ID NO: 68327 - protein, 12 aa, unidentified
  source 1..12: note = methanogen bacteria
MTMGFENIVLRL

SEQ ID NO: 68328 - protein, 10 aa, unidentified
  source 1..10: note = methanogen bacteria
TRPMGWSLDS

SEQ ID NO: 68329 - protein, 12 aa, unidentified
  source 1..12: note = methanogen bacteria
RPFITFDNGWYM

SEQ ID NO: 68330 - protein, 18 aa, unidentified
  source 1..18: note = methanogen bacteria
MVGSNILTSTLDLVSQSL

SEQ ID NO: 68331 - protein, 17 aa, unidentified
  source 1..17: note = methanogen bacteria
PGLAALGTGDIVTLSNA

SEQ ID NO: 68332 - protein, 11 aa, unidentified
  source 1..11: note = methanogen bacteria
KMFSFFSFVLP

SEQ ID NO: 68333 - protein, 19 aa, unidentified
  source 1..19: note = methanogen bacteria
LPAPEFFTNSEAYAIVLGS

SEQ ID NO: 68334 - protein, 29 aa, unidentified
  source 1..29: note = methanogen bacteria
PYLYSYLNPVVEDVTNKIQTGVIQLTFQD

SEQ ID NO: 68335 - protein, 11 aa, unidentified
  source 1..11: note = methanogen bacteria
YYAATSQSLLH

SEQ ID NO: 68336 - protein, 11 aa, unidentified
  source 1..11: note = methanogen bacteria
KTFVFFQVVLP

SEQ ID NO: 68337 - protein, 19 aa, unidentified
  source 1..19: note = methanogen bacteria
LPAPAFFENSQAFNIVLGS

SEQ ID NO: 68338 - protein, 11 aa, unidentified
  source 1..11: note = methanogen bacteria
KTFKISIFILP

SEQ ID NO: 68339 - protein, 20 aa, unidentified
  source 1..20: note = methanogen bacteria
LMPTPPFFINAEAYSTVLGS

SEQ ID NO: 68340 - protein, 30 aa, unidentified
  source 1..30: note = methanogen bacteria
SADVVNSALNSTVPSNGTQLNSEINALDLF

SEQ ID NO: 68341 - protein, 21 aa, unidentified
  source 1..21: note = methanogen bacteria
GAAGALFNSLMPHGGLRYVIY

SEQ ID NO: 68342 - protein, 11 aa, unidentified
  source 1..11: note = methanogen bacteria
VPFSDFIMNLL

SEQ ID NO: 68343 - protein, 11 aa, unidentified
  source 1..11: note = methanogen bacteria
KTFDFFSLTLP

SEQ ID NO: 68344 - protein, 20 aa, unidentified
  source 1..20: note = methanogen bacteria
MLPAPVFFENSEAFNAVLGN

SEQ ID NO: 68345 - protein, 13 aa, unidentified
  source 1..13: note = methanogen bacteria
RFISIMGTLTDNE

SEQ ID NO: 68346 - protein, 30 aa, unidentified
  source 1..30: note = methanogen bacteria
DDIASYLMPILKQAMGVEGGASSINAWDIM

SEQ ID NO: 68347 - protein, 12 aa, unidentified
  source 1..12: note = methanogen bacteria
GYTVKSIPSLAI

SEQ ID NO: 68348 - protein, 14 aa, unidentified
  source 1..14: note = methanogen bacteria
GNIVSQQISGTKLF

SEQ ID NO: 68349 - protein, 11 aa, unidentified
  source 1..11: note = methanogen bacteria
KTFAFFSFSLP

SEQ ID NO: 68350 - protein, 19 aa, unidentified
  source 1..19: note = methanogen bacteria
LPSPAFFKNSEAFSIVLGS

SEQ ID NO: 68351 - protein, 18 aa, unidentified
  source 1..18: note = methanogen bacteria
MVGTNILTSTLDLVSQSL

SEQ ID NO: 68352 - protein, 17 aa, unidentified
  source 1..17: note = methanogen bacteria
PGLAALGSGDIVTLSNA

SEQ ID NO: 68353 - protein, 32 aa, unidentified
  source 1..32: note = methanogen bacteria
GSSNSLFESFYFVIVTLTTVGYGDIVPKTFNE

SEQ ID NO: 68354 - protein, 18 aa, unidentified
  source 1..18: note = methanogen bacteria
MAGSNILASTLNLVSQSL

SEQ ID NO: 68355 - protein, 17 aa, unidentified
  source 1..17: note = methanogen bacteria
PGLAELGTGDIVTLSKA

SEQ ID NO: 68356 - protein, 18 aa, unidentified
  source 1..18: note = methanogen bacteria
MVGTNILTSTLDLVSQSL

SEQ ID NO: 68357 - protein, 17 aa, unidentified
  source 1..17: note = methanogen bacteria
PGLAALGSGDIVTLSNA

SEQ ID NO: 68358 - protein, 23 aa, unidentified
  source 1..23: note = methanogen bacteria
KANLGTSPLICIPYVSSIITNLS

SEQ ID NO: 68359 - protein, 12 aa, unidentified
  source 1..12: note = methanogen bacteria
NMPIPFGTSGHM

SEQ ID NO: 68360 - protein, 16 aa, unidentified
  source 1..16: note = methanogen bacteria
ATYSTPDSIYKLDRYS

SEQ ID NO: 68361 - protein, 10 aa, unidentified
  source 1..10: note = methanogen bacteria
TMLGISTKSY

SEQ ID NO: 68362 - protein, 12 aa, unidentified
  source 1..12: note = methanogen bacteria
HPWLTSANMDII

SEQ ID NO: 68363 - protein, 12 aa, unidentified
  source 1..12: note = methanogen bacteria
NMPIPFGTSGHM

SEQ ID NO: 68364 - protein, 11 aa, unidentified
  source 1..11: note = methanogen bacteria
KTFDFFSFTLP

SEQ ID NO: 68365 - protein, 20 aa, unidentified
  source 1..20: note = methanogen bacteria
IMPAPAFFTNSEAFSIVLGS

SEQ ID NO: 68366 - protein, 29 aa, unidentified
  source 1..29: note = methanogen bacteria
ADEIASVLMPMLKDALLKGNVTSVDAFNI

SEQ ID NO: 68367 - protein, 13 aa, unidentified
  source 1..13: note = methanogen bacteria
GYTIHSTYDLVMY

SEQ ID NO: 68368 - protein, 15 aa, unidentified
  source 1..15: note = methanogen bacteria
GNIISQQMGGANLLK

SEQ ID NO: 68369 - protein, 11 aa, unidentified
  source 1..11: note = methanogen bacteria
KTFSFFSFVLP

SEQ ID NO: 68370 - protein, 19 aa, unidentified
  source 1..19: note = methanogen bacteria
LPAPEFFKNSEAFSTVLGS

SEQ ID NO: 68371 - protein, 12 aa, unidentified
  source 1..12: note = methanogen bacteria
MVTLHLPDGIIS

SEQ ID NO: 68372 - protein, 11 aa, unidentified
  source 1..11: note = methanogen bacteria
SVPSPLGVPIH

SEQ ID NO: 68373 - protein, 14 aa, unidentified
  source 1..14: note = methanogen bacteria
AGAIFGPYTVGTSI

SEQ ID NO: 68374 - protein, 10 aa, unidentified
  source 1..10: note = methanogen bacteria
YNGGLLNLLM

SEQ ID NO: 68375 - protein, 12 aa, unidentified
  source 1..12: note = methanogen bacteria
NMPIPFGTSGHM

SEQ ID NO: 68376 - protein, 29 aa, unidentified
  source 1..29: note = methanogen bacteria
PSLHSYLNPVVDDLTNKVETGVVQLTFKD

SEQ ID NO: 68377 - protein, 12 aa, unidentified
  source 1..12: note = methanogen bacteria
YYTAISPNVLQS

SEQ ID NO: 68378 - protein, 27 aa, unidentified
  source 1..27: note = methanogen bacteria
PYLYSYLNPVVEDLTNKVQTGVIQLTF

SEQ ID NO: 68379 - protein, 11 aa, unidentified
  source 1..11: note = methanogen bacteria
YYAATSPSLLH

SEQ ID NO: 68380 - protein, 19 aa, unidentified
  source 1..19: note = methanogen bacteria
EMFQLMPTSPPVSSDITFV

SEQ ID NO: 68381 - protein, 86 aa, unidentified
  source 1..86: note = methanogen bacteria
GVFNFDFGAFTNTNASAIVTDTAFPNVADVHVNTTTSNVSSHTTNYTSNVQQTQSSYNYVTPTSSDSENTPVTPEGGGGGSGNNTG

SEQ ID NO: 68382 - protein, 11 aa, unidentified
  source 1..11: note = methanogen bacteria
KTFEFFYFTLP

SEQ ID NO: 68383 - protein, 19 aa, unidentified
  source 1..19: note = methanogen bacteria
LPAPSFFESSDAFGIVLGS

SEQ ID NO: 68384 - protein, 29 aa, unidentified
  source 1..29: note = methanogen bacteria
DDIAPVLMPALKELVKDANISSINAFSIM

SEQ ID NO: 68385 - protein, 12 aa, unidentified
  source 1..12: note = methanogen bacteria
GYTIKSAYGLII

SEQ ID NO: 68386 - protein, 14 aa, unidentified
  source 1..14: note = methanogen bacteria
GNIINQQINGTRLF

SEQ ID NO: 68387 - protein, 11 aa, unidentified
  source 1..11: note = methanogen bacteria
KTFEFFSFTLP

SEQ ID NO: 68388 - protein, 19 aa, unidentified
  source 1..19: note = methanogen bacteria
LPAPSFFEGSEAFSIVLGS

SEQ ID NO: 68389 - protein, 10 aa, unidentified
  source 1..10: note = methanogen bacteria
MHLPDGILPL

SEQ ID NO: 68390 - protein, 11 aa, unidentified
  source 1..11: note = methanogen bacteria
SVPSPLGVPIH

SEQ ID NO: 68391 - protein, 36 aa, unidentified
  source 1..36: note = methanogen bacteria
GIFGMLSSIFPGSGSTPTYTGTSQSTASNYVPSFDL

SEQ ID NO: 68392 - protein, 35 aa, unidentified
  source 1..35: note = methanogen bacteria
AKCIGCNTCVEACPGDFIAANSASLTVAIPSVCAA

SEQ ID NO: 68393 - protein, 28 aa, unidentified
  source 1..28: note = methanogen bacteria
VKVCPVDALDIDVEWGEGAPVDAEGIGR

SEQ ID NO: 68394 - protein, 34 aa, unidentified
  source 1..34: note = methanogen bacteria
NKCPTQAIRVVTKTGMSCPALVETDAEPSFTSCI

SEQ ID NO: 68395 - protein, 29 aa, unidentified
  source 1..29: note = methanogen bacteria
SMCSNDALKVDQYEVTIDGEPVLRDRILF

SEQ ID NO: 68396 - protein, 23 aa, unidentified
  source 1..23: note = methanogen bacteria
DQCGDCIEACPYDMIHKTDDPKL

SEQ ID NO: 68397 - protein, 11 aa, unidentified
  source 1..11: note = methanogen bacteria
KTFDFFSLTLP

SEQ ID NO: 68398 - protein, 20 aa, unidentified
  source 1..20: note = methanogen bacteria
MLPAPVFFENSQAFSTVLGS

SEQ ID NO: 68399 - protein, 31 aa, unidentified
  source 1..31: note = methanogen bacteria
ADDISSILMPVLKEAMLEGNVTSIDAVNIMV

SEQ ID NO: 68400 - protein, 14 aa, unidentified
  source 1..14: note = methanogen bacteria
AGHTIKSTYDLIMY

SEQ ID NO: 68401 - protein, 15 aa, unidentified
  source 1..15: note = methanogen bacteria
LGNIVSQQMGGPALF

SEQ ID NO: 68402 - protein, 49 aa, unidentified
  source 1..49: note = methanogen bacteria
NLKTDNNGRIIINNTLKPGTYKVTIKNPVTLEEKNQTIKVLKRITENKN

SEQ ID NO: 68403 - protein, 30 aa, unidentified
  source 1..30: note = methanogen bacteria
PYLYHYFNPVVEDLTNKVQTGVVKLTFEDV

SEQ ID NO: 68404 - protein, 11 aa, unidentified
  source 1..11: note = methanogen bacteria
YYVASADNLLV

SEQ ID NO: 68405 - protein, 29 aa, unidentified
  source 1..29: note = methanogen bacteria
IMDGTLSYCFTFLTARAGGDGSQWDAIAG

SEQ ID NO: 68406 - protein, 25 aa, unidentified
  source 1..25: note = methanogen bacteria
LLTLACDSNLIAVATVVSWSDAVAP

SEQ ID NO: 68407 - protein, 21 aa, unidentified
  source 1..21: note = methanogen bacteria
IESGQIADFNEIAKNIGTWLK

SEQ ID NO: 68408 - protein, 30 aa, unidentified
  source 1..30: note = methanogen bacteria
SNSLNLLETMGEVSVGSGVSIEGLHVGLDG

SEQ ID NO: 68409 - protein, 37 aa, unidentified
  source 1..37: note = methanogen bacteria
AAKAAEPRAAPSKTEKKKYGGSEEDSGKIKYTSSRRK

SEQ ID NO: 68410 - protein, 29 aa, unidentified
  source 1..29: note = methanogen bacteria
PALYSYFNPLVEDLSDKVRSGVIKLTFQD

SEQ ID NO: 68411 - protein, 16 aa, unidentified
  source 1..16: note = methanogen bacteria
YFISSAPNLTYALVLI

SEQ ID NO: 68412 - protein, 17 aa, unidentified
  source 1..17: note = methanogen bacteria
MLESIYQSITIFFLNYG

SEQ ID NO: 68413 - protein, 11 aa, unidentified
  source 1..11: note = methanogen bacteria
LLYGQKITIIS

SEQ ID NO: 68414 - protein, 12 aa, unidentified
  source 1..12: note = methanogen bacteria
GIIYNELNEKIS

SEQ ID NO: 68415 - protein, 36 aa, unidentified
  source 1..36: note = methanogen bacteria
MGILANISSAFSSLGGSSSYSSSHQPTASNFAPSVD

SEQ ID NO: 68416 - protein, 30 aa, unidentified
  source 1..30: note = methanogen bacteria
SYLHPYMNPIVEALTKRIEDGTIQLTFQSI

SEQ ID NO: 68417 - protein, 11 aa, unidentified
  source 1..11: note = methanogen bacteria
VVATKGNLVQT

SEQ ID NO: 68418 - protein, 14 aa, unidentified
  source 1..14: note = methanogen bacteria
NFGIFASLNQVTLV

SEQ ID NO: 68419 - protein, 36 aa, unidentified
  source 1..36: note = methanogen bacteria
MGILANISSAFSSLGGSSSYSSSHQPSASNFSPSVD

SEQ ID NO: 68420 - protein, 12 aa, unidentified
  source 1..12: note = methanogen bacteria
NMPIPFGTSGHM

SEQ ID NO: 68421 - protein, 26 aa, unidentified
  source 1..26: note = methanogen bacteria
YGADSSWEWGTNALSDFGVSDTDAAT

SEQ ID NO: 68422 - protein, 14 aa, unidentified
  source 1..14: note = methanogen bacteria
GGILAAAVPFSIQY

SEQ ID NO: 68423 - protein, 27 aa, unidentified
  source 1..27: note = methanogen bacteria
FPADFGLESIWKNLIPTFYTQGQFSRY

SEQ ID NO: 68424 - protein, 12 aa, unidentified
  source 1..12: note = methanogen bacteria
NQDMAFNLNEGY

SEQ ID NO: 68425 - protein, 12 aa, unidentified
  source 1..12: note = methanogen bacteria
NMPIPFGTSGHM

SEQ ID NO: 68426 - protein, 92 aa, unidentified
  source 1..92: note = methanogen bacteria
QNIGSSYLDTITSIYNMLYTLKAAGYKVEDLPNNVSELEDMILKCGINVANWAPGELEKLANQSGVTLLPVSEYTKWFNSLDDIIKLQVREG

SEQ ID NO: 68427 - protein, 64 aa, unidentified
  source 1..64: note = methanogen bacteria
ELARRAVELNYTVTIGDTIDDWRNQVVSLLPDDQMADATTVLNKIVGALKNYTNTHDAKYFELF

SEQ ID NO: 68428 - protein, 31 aa, unidentified
  source 1..31: note = methanogen bacteria
EPNLHAYLNPVVEQVENQVRSGEITITFQSI

SEQ ID NO: 68429 - protein, 12 aa, unidentified
  source 1..12: note = methanogen bacteria
YFTAVQDDLFLT

SEQ ID NO: 68430 - protein, 23 aa, unidentified
  source 1..23: note = methanogen bacteria
ANLGTSPLICLPYVSSLITKFSV

SEQ ID NO: 68431 - protein, 22 aa, unidentified
  source 1..22: note = methanogen bacteria
FGVRGPIGKFFIEFFAVKIAFS

SEQ ID NO: 68432 - protein, 20 aa, unidentified
  source 1..20: note = methanogen bacteria
TRTLPMAVYSEVAAGNMGEA

SEQ ID NO: 68433 - protein, 26 aa, unidentified
  source 1..26: note = methanogen bacteria
LRDYFMEAMRVSMGNDYVNVIAPFLN

SEQ ID NO: 68434 - protein, 21 aa, unidentified
  source 1..21: note = methanogen bacteria
IESGTIADFNEIGKNMGIWLK

SEQ ID NO: 68435 - protein, 31 aa, unidentified
  source 1..31: note = methanogen bacteria
ASNSLNLMDTVGEISAGETVTIEGLNVGLEG

SEQ ID NO: 68436 - protein, 36 aa, unidentified
  source 1..36: note = methanogen bacteria
AAKTAEPQAAPAKTEKKKYGGSEETGKIKYTSSRRK

SEQ ID NO: 68437 - protein, 29 aa, unidentified
  source 1..29: note = methanogen bacteria
PLLFDFLNPAVDELTQKVDNGIIQLTFHD

SEQ ID NO: 68438 - protein, 12 aa, unidentified
  source 1..12: note = methanogen bacteria
YYVAISQDFFRT

SEQ ID NO: 68439 - protein, 13 aa, unidentified
  source 1..13: note = methanogen bacteria
NFILCWNFLIVFQ

SEQ ID NO: 68440 - protein, 28 aa, unidentified
  source 1..28: note = methanogen bacteria
ADDIAGFLMPILKEALGGDDISINAFDI

SEQ ID NO: 68441 - protein, 12 aa, unidentified
  source 1..12: note = methanogen bacteria
GYTIKSTSTLLL

SEQ ID NO: 68442 - protein, 14 aa, unidentified
  source 1..14: note = methanogen bacteria
GNIVGQQLGIQHLV

SEQ ID NO: 68443 - protein, 28 aa, unidentified
  source 1..28: note = methanogen bacteria
PYLYSYFNPVVEDLTEKVQTGVIQLTFQ

SEQ ID NO: 68444 - protein, 12 aa, unidentified
  source 1..12: note = methanogen bacteria
YYTATSPNLLQV

SEQ ID NO: 68445 - protein, 36 aa, unidentified
  source 1..36: note = methanogen bacteria
GILTSISSAFSSLANPSPYASSYQPKTSSFTPNFDL

SEQ ID NO: 68446 - protein, 24 aa, unidentified
  source 1..24: note = methanogen bacteria
MNIFVDPLLFLQFLRELCNGVFNN

SEQ ID NO: 68447 - protein, 32 aa, unidentified
  source 1..32: note = methanogen bacteria
VCMYRPWILDSRIHSVEAALPAAGGYSFPSGH

SEQ ID NO: 68448 - protein, 10 aa, unidentified
  source 1..10: note = methanogen bacteria
MHIPDGLIPF

SEQ ID NO: 68449 - protein, 11 aa, unidentified
  source 1..11: note = methanogen bacteria
TIPSPMGVQIH

SEQ ID NO: 68450 - protein, 10 aa, unidentified
  source 1..10: note = methanogen bacteria
MHLADGLIPF

SEQ ID NO: 68451 - protein, 11 aa, unidentified
  source 1..11: note = methanogen bacteria
TVPTPFGISIH

SEQ ID NO: 68452 - protein, 11 aa, unidentified
  source 1..11: note = methanogen bacteria
TVPSPIGIPMH

SEQ ID NO: 68453 - protein, 11 aa, unidentified
  source 1..11: note = methanogen bacteria
SIPSPLGVPIH

SEQ ID NO: 68454 - protein, 15 aa, unidentified
  source 1..15: note = methanogen bacteria
GDALTGVKSQNADLL

SEQ ID NO: 68455 - protein, 10 aa, unidentified
  source 1..10: note = methanogen bacteria
MHIPDGLIPM

SEQ ID NO: 68456 - protein, 11 aa, unidentified
  source 1..11: note = methanogen bacteria
SIPSPFGIPMH

SEQ ID NO: 68457 - protein, 11 aa, unidentified
  source 1..11: note = methanogen bacteria
SVPSPLGVPIH

SEQ ID NO: 68458 - protein, 11 aa, unidentified
  source 1..11: note = methanogen bacteria
SIPSPLGVPIH

SEQ ID NO: 68459 - protein, 10 aa, unidentified
  source 1..10: note = methanogen bacteria
LYAVEVNLTA

SEQ ID NO: 68460 - protein, 38 aa, unidentified
  source 1..38: note = methanogen bacteria
FSMGIIATISSAFSSLSNNSPYGAAYQPTVPSYTPSVN

SEQ ID NO: 68461 - protein, 34 aa, unidentified; identical to SEQ ID NO: 61560
  source 1..34: note = methanogen bacteria

SEQ ID NO: 68462 - protein, 15 aa, unidentified
  source 1..15: note = methanogen bacteria
VWGGGWLMQMGALDF

SEQ ID NO: 68463 - protein, 11 aa, unidentified
  source 1..11: note = methanogen bacteria
SIPSPLGVPIH

SEQ ID NO: 68464 - protein, 11 aa, unidentified
  source 1..11: note = methanogen bacteria
SIPSPLGVPIH

SEQ ID NO: 68465 - protein, 32 aa, unidentified
  source 1..32: note = methanogen bacteria
YSSYTEIATSMMGEVASVASSDYTVTDNMMVL

SEQ ID NO: 68466 - protein, 12 aa, unidentified
  source 1..12: note = methanogen bacteria
YVFSTRDFFRTF

SEQ ID NO: 68467 - protein, 14 aa, unidentified
  source 1..14: note = methanogen bacteria
MLWVSQIGIEAFYA

SEQ ID NO: 68468 - protein, 15 aa, unidentified
  source 1..15: note = methanogen bacteria
LYNLKQADSYILTFE

SEQ ID NO: 68469 - protein, 31 aa, unidentified
  source 1..31: note = methanogen bacteria
EPNLYSYFNPVVEDLTQKVQSGTVKLTFADI

SEQ ID NO: 68470 - protein, 12 aa, unidentified
  source 1..12: note = methanogen bacteria
YYVAISGNLFYT

SEQ ID NO: 68471 - protein, 29 aa, unidentified
  source 1..29: note = methanogen bacteria
PYLHSYFNPVVDDLTQKVQQGTITLTFQS

SEQ ID NO: 68472 - protein, 12 aa, unidentified
  source 1..12: note = methanogen bacteria
YYVATADNLFTT

SEQ ID NO: 68473 - protein, 10 aa, unidentified
  source 1..10: note = methanogen bacteria
MNFVPNADNL

SEQ ID NO: 68474 - protein, 29 aa, unidentified
  source 1..29: note = methanogen bacteria
FTFGWGSDPSSFFATNVGGTSDFGSIGSI

SEQ ID NO: 68475 - protein, 13 aa, unidentified
  source 1..13: note = methanogen bacteria
FTLPGFEVGLKTC

SEQ ID NO: 68476 - protein, 10 aa, unidentified
  source 1..10: note = methanogen bacteria
LLVTSNDAAY

SEQ ID NO: 68477 - protein, 32 aa, unidentified
  source 1..32: note = methanogen bacteria
MLETPHVNDIKYETLGNTSIGTVEVGISGNEN

SEQ ID NO: 68478 - protein, 36 aa, unidentified
  source 1..36: note = methanogen bacteria
MGILSAMSSAFSSINGGSSYGSAVQPTTPNYLSNID

SEQ ID NO: 68479 - protein, 11 aa, unidentified
  source 1..11: note = methanogen bacteria
ELPLPVAACVH

SEQ ID NO: 68480 - protein, 29 aa, unidentified
  source 1..29: note = methanogen bacteria
PYLYSFFNPVVEDLTHKVQTGVITITFQS

SEQ ID NO: 68481 - protein, 13 aa, unidentified
  source 1..13: note = methanogen bacteria
YYLAANDDFLKTF

SEQ ID NO: 68482 - protein, 70 aa, unidentified
  source 1..70: note = methanogen bacteria
GKTKKVQNALFAKTVVKNDAKIYRGDSSVVTVYAYIDEDGDESTTGDQTSIGTTSVEVHVDKGIWDKATS

SEQ ID NO: 68483 - protein, 64 aa, unidentified
  source 1..64: note = methanogen bacteria
DHTEYNTINLIENGTTIEIPNDMKMKSNNNGISVLENDNTIIISFNSANKGVGEITAFADIKIP

SEQ ID NO: 68484 - protein, 77 aa, unidentified
  source 1..77: note = methanogen bacteria
GASYSGNVTIKDPTVAGCSLSGECNAVLVSNNETHDNIIVISKNKNIVNHIINSIQWHAVSSNDDSSTATTSIQQPS

SEQ ID NO: 68485 - protein, 32 aa, unidentified
  source 1..32: note = methanogen bacteria
GTPMYSQAEVDRYMLNKYGMVDYHVGDNGYID

SEQ ID NO: 68486 - protein, 34 aa, unidentified
  source 1..34: note = methanogen bacteria
NIFAGEKYGMISKMMSETNKSISYSDIAGDAVGL

SEQ ID NO: 68487 - protein, 12 aa, unidentified
  source 1..12: note = methanogen bacteria
GAPFGSDLYFSM

SEQ ID NO: 68488 - protein, 29 aa, unidentified
  source 1..29: note = methanogen bacteria
PHLYGYFNPVVEDLTHKVQQGTIKLTFQS

SEQ ID NO: 68489 - protein, 12 aa, unidentified
  source 1..12: note = methanogen bacteria
YYVATTDDMLVT

SEQ ID NO: 68490 - protein, 13 aa, unidentified
  source 1..13: note = methanogen bacteria
VSIAVPWSPVLIT

SEQ ID NO: 68491 - protein, 17 aa, unidentified
  source 1..17: note = methanogen bacteria
MPWFTNMNHGLAFLFAA

SEQ ID NO: 68492 - protein, 14 aa, unidentified
  source 1..14: note = methanogen bacteria
AMLTKTGTALSIPE

SEQ ID NO: 68493 - protein, 29 aa, unidentified
  source 1..29: note = methanogen bacteria
PYLYSYFNPVVDDLTQKVQQGTIKLTFQS

SEQ ID NO: 68494 - protein, 12 aa, unidentified
  source 1..12: note = methanogen bacteria
YYVATTDDLLVT

SEQ ID NO: 68495 - protein, 21 aa, unidentified
  source 1..21: note = methanogen bacteria
PSILSAIGPYIITPIITDVHS

SEQ ID NO: 68496 - protein, 30 aa, unidentified
  source 1..30: note = methanogen bacteria
EPNLYGYFNPVVEELTQKVQSGVVKLTFTD

SEQ ID NO: 68497 - protein, 12 aa, unidentified
  source 1..12: note = methanogen bacteria
YYLASTDNLLYT

SEQ ID NO: 68498 - protein, 33 aa, unidentified
  source 1..33: note = methanogen bacteria
FIAIGSHYGELSAGLRNMSGIAVSDFGMDGLEL

SEQ ID NO: 68499 - protein, 15 aa, unidentified
  source 1..15: note = methanogen bacteria
IATPFGSDFTFAFVG

SEQ ID NO: 68500 - protein, 13 aa, unidentified
  source 1..13: note = methanogen bacteria
VTIATPWSPVLIS

SEQ ID NO: 68501 - protein, 17 aa, unidentified
  source 1..17: note = methanogen bacteria
MPWFTGMEHGLAWILSA

SEQ ID NO: 68502 - protein, 14 aa, unidentified
  source 1..14: note = methanogen bacteria
FMLGTGSALSISQL

SEQ ID NO: 68503 - protein, 25 aa, unidentified
  source 1..25: note = methanogen bacteria
FNASIPDTYIFHTISELGITGSNSP

SEQ ID NO: 68504 - protein, 12 aa, unidentified
  source 1..12: note = methanogen bacteria
CCRCFDRYSWIF

SEQ ID NO: 68505 - protein, 10 aa, unidentified
  source 1..10: note = methanogen bacteria
SFMKNGSIGF

SEQ ID NO: 68506 - protein, 34 aa, unidentified
  source 1..34: note = methanogen bacteria
LMGFMSVLSSISPLGSGSSSTGVSSASNIASSMD

SEQ ID NO: 68507 - protein, 29 aa, unidentified
  source 1..29: note = methanogen bacteria
PYLYSYFNPVVEDLTHQVQQGTIKLTFQS

SEQ ID NO: 68508 - protein, 12 aa, unidentified
  source 1..12: note = methanogen bacteria
YYVATTDDLFQT

SEQ ID NO: 68509 - protein, 10 aa, unidentified
  source 1..10: note = methanogen bacteria
LSFIPSSSNI

SEQ ID NO: 68510 - protein, 16 aa, unidentified
  source 1..16: note = methanogen bacteria
FRETMVFTTGEGFFNG

SEQ ID NO: 68511 - protein, 11 aa, unidentified
  source 1..11: note = methanogen bacteria
VSRGGSWYWNI

SEQ ID NO: 68512 - protein, 30 aa, unidentified
  source 1..30: note = methanogen bacteria
PFLHSFLNPVVEDLTQKVQSGVITLTFQDI

SEQ ID NO: 68513 - protein, 15 aa, unidentified
  source 1..15: note = methanogen bacteria
YYVATSADLVKTSLL

SEQ ID NO: 68514 - protein, 29 aa, unidentified
  source 1..29: note = methanogen bacteria
PYLYSYFNPVVDDLTQKVQSGVITLTFAD

SEQ ID NO: 68515 - protein, 12 aa, unidentified
  source 1..12: note = methanogen bacteria
YYVGTAENIVSV

SEQ ID NO: 68516 - protein, 27 aa, unidentified
  source 1..27: note = methanogen bacteria
SFNDTLINTYLFYTISELGIPNANSPL

SEQ ID NO: 68517 - protein, 12 aa, unidentified
  source 1..12: note = methanogen bacteria
FIGPYTPSEIGD

SEQ ID NO: 68518 - protein, 20 aa, unidentified
  source 1..20: note = methanogen bacteria
DGLLMFFKLHQMPNDGMVEN

SEQ ID NO: 68519 - protein, 31 aa, unidentified
  source 1..31: note = methanogen bacteria
MCTKWRKLEISTKTDTPIFVAFPKIFSLMGV

SEQ ID NO: 68520 - protein, 12 aa, unidentified
  source 1..12: note = methanogen bacteria
AIPLTWTPVPIT

SEQ ID NO: 68521 - protein, 16 aa, unidentified
  source 1..16: note = methanogen bacteria
PWYSGMTGGIATLLGT

SEQ ID NO: 68522 - protein, 13 aa, unidentified
  source 1..13: note = methanogen bacteria
FYLAQGTALTLTQ

SEQ ID NO: 68523 - protein, 18 aa, unidentified
  source 1..18: note = methanogen bacteria
VRGEFDFSLIFFKTDFAL

SEQ ID NO: 68524 - protein, 14 aa, unidentified
  source 1..14: note = methanogen bacteria
FPQPENTSFEAIWN

SEQ ID NO: 68525 - protein, 31 aa, unidentified
  source 1..31: note = methanogen bacteria
DLIREFMIEIFNQLIGNLPPNSSVADEAIFL

SEQ ID NO: 68526 - protein, 12 aa, unidentified
  source 1..12: note = methanogen bacteria
VIPLPWTPVPIT

SEQ ID NO: 68527 - protein, 17 aa, unidentified
  source 1..17: note = methanogen bacteria
IPWFGGMTGGLNVVLGS

SEQ ID NO: 68528 - protein, 13 aa, unidentified
  source 1..13: note = methanogen bacteria
AYLTQGTVLGVVD

SEQ ID NO: 68529 - protein, 12 aa, unidentified
  source 1..12: note = methanogen bacteria
IIPLPWTPVPIT

SEQ ID NO: 68530 - protein, 17 aa, unidentified
  source 1..17: note = methanogen bacteria
VPWFGGMTGGLDVVLGS

SEQ ID NO: 68531 - protein, 13 aa, unidentified
  source 1..13: note = methanogen bacteria
SYLTQGTVLGIAD

SEQ ID NO: 68532 - protein, 12 aa, unidentified
  source 1..12: note = methanogen bacteria
IIPLPWTPVPIT

SEQ ID NO: 68533 - protein, 17 aa, unidentified
  source 1..17: note = methanogen bacteria
IPWFGGMTGGLDVLLGS

SEQ ID NO: 68534 - protein, 12 aa, unidentified
  source 1..12: note = methanogen bacteria
YLTQGTALGVVD

SEQ ID NO: 68535 - protein, 17 aa, unidentified
  source 1..17: note = methanogen bacteria
MNIGQSIYDLFGGNGEI

SEQ ID NO: 68536 - protein, 26 aa, unidentified
  source 1..26: note = methanogen bacteria
FFNAPLIDTYLFHTISELGIPNGNSP

SEQ ID NO: 68537 - protein, 12 aa, unidentified
  source 1..12: note = methanogen bacteria
ICRIHNRFLLIS

SEQ ID NO: 68538 - protein, 20 aa, unidentified
  source 1..20: note = methanogen bacteria
EMFGIVSPGTVDTEAMTSLT

SEQ ID NO: 68539 - protein, 12 aa, unidentified
  source 1..12: note = methanogen bacteria
IIPLPWTPVPIT

SEQ ID NO: 68540 - protein, 17 aa, unidentified
  source 1..17: note = methanogen bacteria
IPWFGGMTGGLDVFLGS

SEQ ID NO: 68541 - protein, 14 aa, unidentified
  source 1..14: note = methanogen bacteria
YSLTQGAAIGVVDL

SEQ ID NO: 68542 - protein, 29 aa, unidentified
  source 1..29: note = methanogen bacteria
SFLHAYLNPVVDDLSQKVHTGVIRITFQS

SEQ ID NO: 68543 - protein, 12 aa, unidentified
  source 1..12: note = methanogen bacteria
YYLAISDDLFKS

SEQ ID NO: 68544 - protein, 12 aa, unidentified
  source 1..12: note = methanogen bacteria
IIPLPWTPVPIT

SEQ ID NO: 68545 - protein, 17 aa, unidentified
  source 1..17: note = methanogen bacteria
VPWFGGMTGGLDVLLGS

SEQ ID NO: 68546 - protein, 12 aa, unidentified
  source 1..12: note = methanogen bacteria
YLTQGAVLGVVD

SEQ ID NO: 68547 - protein, 11 aa, unidentified
  source 1..11: note = methanogen bacteria
FRGSKGTNHFT

SEQ ID NO: 68548 - protein, 11 aa, unidentified
  source 1..11: note = methanogen bacteria
GLHSTSSTVEL

SEQ ID NO: 68549 - protein, 29 aa, unidentified
  source 1..29: note = methanogen bacteria
PFLHAYLNPVVDDLSQKVHTGVIRITFQS

SEQ ID NO: 68550 - protein, 12 aa, unidentified
  source 1..12: note = methanogen bacteria
YYIAISDDLFKS

SEQ ID NO: 68551 - protein, 16 aa, unidentified
  source 1..16: note = methanogen bacteria
KIPQPETLSLSGLMES

SEQ ID NO: 68552 - protein, 12 aa, unidentified
  source 1..12: note = methanogen bacteria
IIPLPWTPVPIT

SEQ ID NO: 68553 - protein, 17 aa, unidentified
  source 1..17: note = methanogen bacteria
VPWFGGMTGGIDIVLGS

SEQ ID NO: 68554 - protein, 13 aa, unidentified
  source 1..13: note = methanogen bacteria
FYLTQGSVLGIVD

SEQ ID NO: 68555 - protein, 12 aa, unidentified
  source 1..12: note = methanogen bacteria
LIPLPWTPVPIT

SEQ ID NO: 68556 - protein, 17 aa, unidentified
  source 1..17: note = methanogen bacteria
IPWFGGMTGGLEALLGS

SEQ ID NO: 68557 - protein, 12 aa, unidentified
  source 1..12: note = methanogen bacteria
NITQGASIGIIN

SEQ ID NO: 68558 - protein, 16 aa, unidentified
  source 1..16: note = methanogen bacteria
MNIGQSIYDLFGGNGE

SEQ ID NO: 68559 - protein, 11 aa, unidentified
  source 1..11: note = methanogen bacteria
KTLKVEFIMLP

SEQ ID NO: 68560 - protein, 18 aa, unidentified
  source 1..18: note = methanogen bacteria
MLPSDSPNAEAFSSILST

SEQ ID NO: 68561 - protein, 12 aa, unidentified
  source 1..12: note = methanogen bacteria
IIPLPWTPVPIT

SEQ ID NO: 68562 - protein, 17 aa, unidentified
  source 1..17: note = methanogen bacteria
IPWFGGMTGGIETFLGS

SEQ ID NO: 68563 - protein, 13 aa, unidentified
  source 1..13: note = methanogen bacteria
YSLTQGATIGIVD

SEQ ID NO: 68564 - protein, 12 aa, unidentified
  source 1..12: note = methanogen bacteria
IIPLPWTPVPIT

SEQ ID NO: 68565 - protein, 17 aa, unidentified
  source 1..17: note = methanogen bacteria
VPWFGGMTGGLDVLLGS

SEQ ID NO: 68566 - protein, 13 aa, unidentified
  source 1..13: note = methanogen bacteria
MYFAQGTVVGIAN

SEQ ID NO: 68567 - protein, 18 aa, unidentified
  source 1..18: note = methanogen bacteria
GSQVETLTGYPETITDKS

SEQ ID NO: 68568 - protein, 12 aa, unidentified
  source 1..12: note = methanogen bacteria
VIPLPWTPVPIT

SEQ ID NO: 68569 - protein, 17 aa, unidentified
  source 1..17: note = methanogen bacteria
IPWFGGMTGGLEVLLGS

SEQ ID NO: 68570 - protein, 12 aa, unidentified
  source 1..12: note = methanogen bacteria
YVVQGSVLSITD

SEQ ID NO: 68571 - protein, 85 aa, unidentified
  source 1..85: note = methanogen bacteria
WGAAIQNAGYCICNNCTFTNNYCSRGGAIFNTGRLELNNCTFIGNTGYTEGNDVLNVGDGIVILNGKKITEDEGPVTCTDSVTST

SEQ ID NO: 68572 - protein, 37 aa, unidentified
  source 1..37: note = methanogen bacteria
MAYQGSFLLGISWMQPVFDAMNALFNPLMALDPTPNN

SEQ ID NO: 68573 - protein, 40 aa, unidentified
  source 1..40: note = methanogen bacteria
IKDMIIVLPPAVYYCTFTPLFHAFGQWIYGGNITTIPYGI

SEQ ID NO: 68574 - protein, 12 aa, unidentified
  source 1..12: note = methanogen bacteria
IIPLPWTPVPIT

SEQ ID NO: 68575 - protein, 17 aa, unidentified
  source 1..17: note = methanogen bacteria
IPWFGGMTGGLDVLLGS

SEQ ID NO: 68576 - protein, 12 aa, unidentified
  source 1..12: note = methanogen bacteria
LSMQGTPVGIVD

SEQ ID NO: 68577 - protein, 12 aa, unidentified
  source 1..12: note = methanogen bacteria
IIPLPWTPVPIT

SEQ ID NO: 68578 - protein, 17 aa, unidentified
  source 1..17: note = methanogen bacteria
IPWFGGMTGGIEVLLGS

SEQ ID NO: 68579 - protein, 12 aa, unidentified
  source 1..12: note = methanogen bacteria
SSYAGAPLGIID

SEQ ID NO: 68580 - protein, 16 aa, unidentified
  source 1..16: note = methanogen bacteria
KIPQPETLSLSGIMDL

SEQ ID NO: 68581 - protein, 12 aa, unidentified
  source 1..12: note = methanogen bacteria
IIPLPWTPVPIT

SEQ ID NO: 68582 - protein, 17 aa, unidentified
  source 1..17: note = methanogen bacteria
IPWFGGMTGGIEVLLGS

SEQ ID NO: 68583 - protein, 13 aa, unidentified
  source 1..13: note = methanogen bacteria
LNATGTPVSIANV

SEQ ID NO: 68584 - protein, 12 aa, unidentified
  source 1..12: note = methanogen bacteria
VIPLSWTPVPIT

SEQ ID NO: 68585 - protein, 16 aa, unidentified
  source 1..16: note = methanogen bacteria
PWYSGMTGGLSVLIGS

SEQ ID NO: 68586 - protein, 10 aa, unidentified
  source 1..10: note = methanogen bacteria
MYTQGISLSL

SEQ ID NO: 68587 - protein, 11 aa, unidentified
  source 1..11: note = methanogen bacteria
LEVGGHTAVAA

SEQ ID NO: 68588 - protein, 20 aa, unidentified
  source 1..20: note = methanogen bacteria
IAYIFSYNSQNMALKPYISS

SEQ ID NO: 68589 - protein, 12 aa, unidentified
  source 1..12: note = methanogen bacteria
IIPLPWTPVPIT

SEQ ID NO: 68590 - protein, 17 aa, unidentified
  source 1..17: note = methanogen bacteria
IPWFGGMTGGIDVFLGS

SEQ ID NO: 68591 - protein, 12 aa, unidentified
  source 1..12: note = methanogen bacteria
MSSQGMAFTFID

SEQ ID NO: 68592 - protein, 14 aa, unidentified
  source 1..14: note = methanogen bacteria
YPLSNFDFQFMFLS

SEQ ID NO: 68593 - protein, 17 aa, unidentified
  source 1..17: note = methanogen bacteria
KIVVGPYPFLKVYEQSV

SEQ ID NO: 68594 - protein, 29 aa, unidentified
  source 1..29: note = methanogen bacteria
PYLYSYFHPVVSDLSHKVETGVIQLTFAD

SEQ ID NO: 68595 - protein, 12 aa, unidentified
  source 1..12: note = methanogen bacteria
YYIAIQNNLFRV

SEQ ID NO: 68596 - protein, 12 aa, unidentified
  source 1..12: note = methanogen bacteria
IIPLPWTPVPIT

SEQ ID NO: 68597 - protein, 17 aa, unidentified
  source 1..17: note = methanogen bacteria
IPWFGGMTGGLDIFLGS

SEQ ID NO: 68598 - protein, 13 aa, unidentified
  source 1..13: note = methanogen bacteria
MSMQGTPVGIVEL

SEQ ID NO: 68599 - protein, 12 aa, unidentified
  source 1..12: note = methanogen bacteria
IIPLPWTSVPIT

SEQ ID NO: 68600 - protein, 17 aa, unidentified
  source 1..17: note = methanogen bacteria
IPWFGGMTGGLEILLGS

SEQ ID NO: 68601 - protein, 12 aa, unidentified
  source 1..12: note = methanogen bacteria
MSLQGATFTVVD

SEQ ID NO: 68602 - protein, 11 aa, unidentified
  source 1..11: note = methanogen bacteria
LGDFVYTDTGA

SEQ ID NO: 68603 - protein, 37 aa, unidentified
  source 1..37: note = methanogen bacteria
MAYQGSFLLGISWLQPVFDAMNAVLNPLVHMDPTPNN

SEQ ID NO: 68604 - protein, 43 aa, unidentified
  source 1..43: note = methanogen bacteria
STIKDIIVVFPPAVYYCTLTPLFHSLGQMLYGGNITTIPYGVG

SEQ ID NO: 68605 - protein, 12 aa, unidentified
  source 1..12: note = methanogen bacteria
IIPLPWTPVPIT

SEQ ID NO: 68606 - protein, 17 aa, unidentified
  source 1..17: note = methanogen bacteria
IPWFGGMTGGLDIFLGS

SEQ ID NO: 68607 - protein, 13 aa, unidentified
  source 1..13: note = methanogen bacteria
LSIQCTPVGIASL

SEQ ID NO: 68608 - protein, 12 aa, unidentified
  source 1..12: note = methanogen bacteria
IIPLPWTPVPIT

SEQ ID NO: 68609 - protein, 17 aa, unidentified
  source 1..17: note = methanogen bacteria
IPWFGGMTGGLEILLGS

SEQ ID NO: 68610 - protein, 13 aa, unidentified
  source 1..13: note = methanogen bacteria
LTSQGTSFGVMDL

SEQ ID NO: 68611 - protein, 27 aa, unidentified
  source 1..27: note = methanogen bacteria
STGLPLFEVYTQNTISALGVPGYISPI

SEQ ID NO: 68612 - protein, 12 aa, unidentified
  source 1..12: note = methanogen bacteria
IIPLPWTPVPIT

SEQ ID NO: 68613 - protein, 17 aa, unidentified
  source 1..17: note = methanogen bacteria
IPWFGGMTGGLEVFLGS

SEQ ID NO: 68614 - protein, 12 aa, unidentified
  source 1..12: note = methanogen bacteria
LGFQGTPVGIID

SEQ ID NO: 68615 - protein, 12 aa, unidentified
  source 1..12: note = methanogen bacteria
IIPLPWTPVPIT

SEQ ID NO: 68616 - protein, 17 aa, unidentified
  source 1..17: note = methanogen bacteria
IPWFGGMTGGLEVLLGS

SEQ ID NO: 68617 - protein, 13 aa, unidentified
  source 1..13: note = methanogen bacteria
LSSQGMAFGVVDL

SEQ ID NO: 68618 - protein, 24 aa, unidentified
  source 1..24: note = methanogen bacteria
WVDPDKLEEIYRWSVGTIDGAKWD

SEQ ID NO: 68619 - protein, 14 aa, unidentified
  source 1..14: note = methanogen bacteria
PMYNFNFQFLFLDG

SEQ ID NO: 68620 - protein, 17 aa, unidentified
  source 1..17: note = methanogen bacteria
NVVSGPYPFLKVNQQAP

SEQ ID NO: 68621 - protein, 13 aa, unidentified
  source 1..13: note = methanogen bacteria
MALNIPGGEFLTG

SEQ ID NO: 68622 - protein, 17 aa, unidentified
  source 1..17: note = methanogen bacteria
PGLAALGAGDINTLASS

SEQ ID NO: 68623 - protein, 12 aa, unidentified
  source 1..12: note = methanogen bacteria
IIPLPWTPVPIT

SEQ ID NO: 68624 - protein, 17 aa, unidentified
  source 1..17: note = methanogen bacteria
VPWFGGMTGGLETFLGS

SEQ ID NO: 68625 - protein, 13 aa, unidentified
  source 1..13: note = methanogen bacteria
SSFAGTPLGIYDL

SEQ ID NO: 68626 - protein, 15 aa, unidentified
  source 1..15: note = methanogen bacteria
YPMHNFDFQFLFLDG

SEQ ID NO: 68627 - protein, 17 aa, unidentified
  source 1..17: note = methanogen bacteria
KVVNGPYPFLRVYEQSI

SEQ ID NO: 68628 - protein, 11 aa, unidentified
  source 1..11: note = methanogen bacteria
LGSYAYTGTGS

SEQ ID NO: 68629 - protein, 21 aa, unidentified
  source 1..21: note = methanogen bacteria
SFGDLSQLTYGVIGIHAYGSV

SEQ ID NO: 68630 - protein, 17 aa, unidentified
  source 1..17: note = methanogen bacteria
SSQYTLTFMNLGNMSTI

SEQ ID NO: 68631 - protein, 20 aa, unidentified
  source 1..20: note = methanogen bacteria
VDFLNHLLGNSGFGLATGNL

SEQ ID NO: 68632 - protein, 34 aa, unidentified
  source 1..34: note = methanogen bacteria
NIQAGDNYGLITKEMSKSNVAIPFSEVSGGAIGL

SEQ ID NO: 68633 - protein, 10 aa, unidentified
  source 1..10: note = methanogen bacteria
IPFGGDFYFA

SEQ ID NO: 68634 - protein, 10 aa, unidentified
  source 1..10: note = methanogen bacteria
PGIVIAVFSK

SEQ ID NO: 68635 - protein, 10 aa, unidentified
  source 1..10: note = methanogen bacteria
LGPITDNTGY

SEQ ID NO: 68636 - protein, 12 aa, unidentified
  source 1..12: note = methanogen bacteria
LGDFAYTETGYL

SEQ ID NO: 68637 - protein, 92 aa, unidentified
  source 1..92: note = methanogen bacteria
VGLDTDQIYTRPAPQSQMDAGLAIAPYDRGGEILESPGVTEAQYPDNSQNLGWINSYMTPIAEMLKGISPYFGTSICASPGGVIDEILYYTR

SEQ ID NO: 68638 - protein, 10 aa, unidentified
  source 1..10: note = methanogen bacteria
LLGPVQLSVV

SEQ ID NO: 68639 - protein, 20 aa, unidentified
  source 1..20: note = methanogen bacteria
DNILMFFNTPQQIFNISKEY

SEQ ID NO: 68640 - protein, 73 aa, unidentified
  source 1..73: note = methanogen bacteria
MGNPFVDSGVFVPLDSLQDITGKEGVSRVLVKTGEDVNDTAISDKIEEDYEDFSTLTSEEISSIADDVLGILD

SEQ ID NO: 68641 - protein, 14 aa, unidentified
  source 1..14: note = methanogen bacteria
LRLFEVTDFALGYS

SEQ ID NO: 68642 - protein, 10 aa, unidentified
  source 1..10: note = methanogen bacteria
TSIGCVMPQF

SEQ ID NO: 68643 - protein, 11 aa, unidentified
  source 1..11: note = methanogen bacteria
LGNYVYTETGA

SEQ ID NO: 68644 - protein, 29 aa, unidentified
  source 1..29: note = methanogen bacteria
PYLYSYFNPVVDDLSQKVETGVVKLTFQD

SEQ ID NO: 68645 - protein, 12 aa, unidentified
  source 1..12: note = methanogen bacteria
YYVAIQNNLFRV

SEQ ID NO: 68646 - protein, 26 aa, unidentified
  source 1..26: note = methanogen bacteria
GADFGTPVLNILIGYFIGTNTSYTAF

SEQ ID NO: 68647 - protein, 18 aa, unidentified
  source 1..18: note = methanogen bacteria
LWGKGLFSGRGILYYYMT

SEQ ID NO: 68648 - protein, 44 aa, unidentified
  source 1..44: note = methanogen bacteria
NTADWSIASVNEYAMDIYLNKVSYSWTLDEKGNIQVNKQKDVYK

SEQ ID NO: 68649 - protein, 24 aa, unidentified
  source 1..24: note = methanogen bacteria
EKSGKDKPDTAFFDIRNKNKYVSR

SEQ ID NO: 68650 - protein, 63 aa, unidentified
  source 1..63: note = methanogen bacteria
LNPQYYDPLVKTPAGMNAYASRFQNFYATTVLGGEKLNKELGNQLADTVLKINSGVNSNTLAA

SEQ ID NO: 68651 - protein, 38 aa, unidentified; identical to SEQ ID NO: 62177
  source 1..38: note = methanogen bacteria

SEQ ID NO: 68652 - protein, 33 aa, unidentified; identical to SEQ ID NO: 67562
  source 1..33: note = methanogen bacteria

SEQ ID NO: 68653 - protein, 10 aa, unidentified
  source 1..10: note = methanogen bacteria
FAAQMDLTSY

SEQ ID NO: 68654 - protein, 12 aa, unidentified
  source 1..12: note = methanogen bacteria
ASWFLGLLGIQL

SEQ ID NO: 68655 - protein, 34 aa, unidentified
  source 1..34: note = methanogen bacteria
GYSSVGGNTGQISQNAYSIGNISLSTGGLTSWDL

SEQ ID NO: 68656 - protein, 17 aa, unidentified
  source 1..17: note = methanogen bacteria
IGAPFGVDFTFASVTII

SEQ ID NO: 68657 - protein, 10 aa, unidentified
  source 1..10: note = methanogen bacteria
APFAMWFYNA

SEQ ID NO: 68658 - protein, 69 aa, unidentified
  source 1..69: note = methanogen bacteria
FNGMEIVNHISESNDYNSYFNNYESRYNNTPGAVQYININPACCVNKNITTINSENTTTTLITEIEKSN

SEQ ID NO: 68659 - protein, 15 aa, unidentified
  source 1..15: note = methanogen bacteria
SWTTDLGLYHLLLHE

SEQ ID NO: 68660 - protein, 17 aa, unidentified
  source 1..17: note = methanogen bacteria
KIVEGPYPFLLVHNQPI

SEQ ID NO: 68661 - protein, 15 aa, unidentified
  source 1..15: note = methanogen bacteria
SWTTELGLYHLLFHE

SEQ ID NO: 68662 - protein, 17 aa, unidentified
  source 1..17: note = methanogen bacteria
KIVKGPYPFLLVHNQPI

SEQ ID NO: 68663 - protein, 36 aa, unidentified
  source 1..36: note = methanogen bacteria
YASNSLPSNIISDSVGSVINTTTLSSNSTANNTIDS

SEQ ID NO: 68664 - protein, 14 aa, unidentified
  source 1..14: note = methanogen bacteria
GTTDFGLYYLLFHE

SEQ ID NO: 68665 - protein, 17 aa, unidentified
  source 1..17: note = methanogen bacteria
KIVEGPYPFLLVHNQPI

SEQ ID NO: 68666 - protein, 18 aa, unidentified
  source 1..18: note = methanogen bacteria
SSQYTLTFMNIGNLTTIY

SEQ ID NO: 68667 - protein, 20 aa, unidentified
  source 1..20: note = methanogen bacteria
KVDFLNHLLGNSGFSLVTGN

SEQ ID NO: 68668 - protein, 26 aa, unidentified
  source 1..26: note = methanogen bacteria
FFNDSLINTYLFHTISELGIPNVNSP

SEQ ID NO: 68669 - protein, 12 aa, unidentified
  source 1..12: note = methanogen bacteria
EMTGDLEGLSHG

SEQ ID NO: 68670 - protein, 36 aa, unidentified
  source 1..36: note = methanogen bacteria
MSGSGTIVDLYHKYYGSASGDLASLEALKSSVVSFK

SEQ ID NO: 68671 - protein, 13 aa, unidentified
  source 1..13: note = methanogen bacteria
LEGDMDDRVYAHM

SEQ ID NO: 68672 - protein, 14 aa, unidentified
  source 1..14: note = methanogen bacteria
FNKNDLDENFFFVD

SEQ ID NO: 68673 - protein, 11 aa, unidentified
  source 1..11: note = methanogen bacteria
SWNYNIPIISV

SEQ ID NO: 68674 - protein, 13 aa, unidentified
  source 1..13: note = methanogen bacteria
FLQEINFNAIIGV

SEQ ID NO: 68675 - protein, 14 aa, unidentified
  source 1..14: note = methanogen bacteria
TIGAENMVGLIIGM

SEQ ID NO: 68676 - protein, 31 aa, unidentified
  source 1..31: note = methanogen bacteria
EDYLYSYFNPVVNNLNHKVSSGVIKLTYMTI

SEQ ID NO: 68677 - protein, 12 aa, unidentified
  source 1..12: note = methanogen bacteria
YYVALQNNFFKT

SEQ ID NO: 68678 - protein, 43 aa, unidentified
  source 1..43: note = methanogen bacteria
GWLGPTSGSGTTYTGWDIWNNVDSIFKPHTEDYGGLGYIKYSG

SEQ ID NO: 68679 - protein, 33 aa, unidentified
  source 1..33: note = methanogen bacteria
MYTGTVTVETYTAGGELISKVTSKVASDGVGFK

SEQ ID NO: 68680 - protein, 45 aa, unidentified
  source 1..45: note = methanogen bacteria
SLNNNQNLEIFGQKYYIISTNSMFPAINKYDVVVCKNVKQNELRV

SEQ ID NO: 68681 - protein, 67 aa, unidentified
  source 1..67: note = methanogen bacteria
DVITYQINDEVITHRISRIEEQDQIYYYTKGDNNADEDKRKITFNNIKGKEIYIIPKIGKLIKILSS

SEQ ID NO: 68682 - protein, 13 aa, unidentified
  source 1..13: note = methanogen bacteria
GEMTGDLEGLSHG

SEQ ID NO: 68683 - protein, 36 aa, unidentified
  source 1..36: note = methanogen bacteria
MSGSGTIVDLYNKYYGSGSDNLASLAALKSVVVSFK

SEQ ID NO: 68684 - protein, 26 aa, unidentified
  source 1..26: note = methanogen bacteria
SFNDTLVSTYLFHTISELGIPNINSP

SEQ ID NO: 68685 - protein, 22 aa, unidentified
  source 1..22: note = methanogen bacteria
LEYFHLVPTDAAPPFDVNIGMT

SEQ ID NO: 68686 - protein, 39 aa, unidentified
  source 1..39: note = methanogen bacteria
AYMKADGNYNIISKELSSQEIKNTQPSNDTDTGMSAIGY

SEQ ID NO: 68687 - protein, 15 aa, unidentified
  source 1..15: note = methanogen bacteria
GGLFGMDLPYAMTSI

SEQ ID NO: 68688 - protein, 10 aa, unidentified
  source 1..10: note = methanogen bacteria
PMVVKGYFGI

SEQ ID NO: 68689 - protein, 26 aa, unidentified
  source 1..26: note = methanogen bacteria
FFNSSLIDAYLFHTISELGIPNANSP

SEQ ID NO: 68690 - protein, 10 aa, unidentified
  source 1..10: note = methanogen bacteria
FTEIVYGYIV

SEQ ID NO: 68691 - protein, 34 aa, unidentified
  source 1..34: note = methanogen bacteria
NIGAGDNYGSITKAFSQSNKSISFSDVKGDAIGL

SEQ ID NO: 68692 - protein, 11 aa, unidentified
  source 1..11: note = methanogen bacteria
GVPFGADMYFA

SEQ ID NO: 68693 - protein, 14 aa, unidentified
  source 1..14: note = methanogen bacteria
PMSNFDFEFLFLKD

SEQ ID NO: 68694 - protein, 17 aa, unidentified
  source 1..17: note = methanogen bacteria
KVVSGPYPFLKVYEQPV

SEQ ID NO: 68695 - protein, 10 aa, unidentified
  source 1..10: note = methanogen bacteria
FTEILYKYIV

SEQ ID NO: 68696 - protein, 21 aa, unidentified
  source 1..21: note = methanogen bacteria
AIYGWNFIMQIATGGYEVLNT

SEQ ID NO: 68697 - protein, 10 aa, unidentified
  source 1..10: note = methanogen bacteria
RGSNGTNHFT

SEQ ID NO: 68698 - protein, 54 aa, unidentified
  source 1..54: note = methanogen bacteria
DSSCIINWTITAVNNGPDKASDVCVDLTDFKTFGLVVLNSSDNVAIYLPVKRWN

SEQ ID NO: 68699 - protein, 14 aa, unidentified
  source 1..14: note = methanogen bacteria
APIFTDFFGKPEAL

SEQ ID NO: 68700 - protein, 15 aa, unidentified
  source 1..15: note = methanogen bacteria
KIHEQIYRSKESQLR

SEQ ID NO: 68701 - protein, 10 aa, unidentified
  source 1..10: note = methanogen bacteria
LLSKKGCKLL

SEQ ID NO: 68702 - protein, 67 aa, unidentified
  source 1..67: note = methanogen bacteria
MYGTVILNTINENDLSTYLDVDENTSGSGGYVQYVNINPAECLNKNITTTRTGNTTTTIITEYNSTK

SEQ ID NO: 68703 - protein, 14 aa, unidentified
  source 1..14: note = methanogen bacteria
PNSPLIEGYFFEPL

SEQ ID NO: 68704 - protein, 16 aa, unidentified
  source 1..16: note = methanogen bacteria
SYEFAGLYFDRIYNLF

SEQ ID NO: 68705 - protein, 27 aa, unidentified
  source 1..27: note = methanogen bacteria
FFNASLFNTYVFHTISELGIPNGNSPL

SEQ ID NO: 68706 - protein, 26 aa, unidentified
  source 1..26: note = methanogen bacteria
QADSSWTWGYNSISDFGISYSTAAAN

SEQ ID NO: 68707 - protein, 10 aa, unidentified
  source 1..10: note = methanogen bacteria
FDTEPISIPD

SEQ ID NO: 68708 - protein, 26 aa, unidentified
  source 1..26: note = methanogen bacteria
FFNSSLMDAYIFHTISELGIPNANSP

SEQ ID NO: 68709 - protein, 37 aa, unidentified
  source 1..37: note = methanogen bacteria
VFAGATSLKQVVTLLWTFNVPWNWAYHGDLFAPWVTQ

SEQ ID NO: 68710 - protein, 10 aa, unidentified
  source 1..10: note = methanogen bacteria
MNQYNLINMT

SEQ ID NO: 68711 - protein, 10 aa, unidentified
  source 1..10: note = methanogen bacteria
FFLNNLGIPY

SEQ ID NO: 68712 - protein, 90 aa, unidentified
  source 1..90: note = methanogen bacteria
LNPDQLYPRPTPQTQMDAGLSIAPYDRGGEILSAPGITKAQYPENSPSLGWINSYMSPIADAIQGISPYFGTSIYSSPGGLIDEILYYTR

SEQ ID NO: 68713 - protein, 19 aa, unidentified
  source 1..19: note = methanogen bacteria
ALPQAHLITEGQFITFLNS

SEQ ID NO: 68714 - protein, 14 aa, unidentified
  source 1..14: note = methanogen bacteria
MYGLISYSPSFQVT

SEQ ID NO: 68715 - protein, 12 aa, unidentified
  source 1..12: note = methanogen bacteria
MSPINVSLTFEI

SEQ ID NO: 68716 - protein, 14 aa, unidentified
  source 1..14: note = methanogen bacteria
WMTDWGLFNLLFQG

SEQ ID NO: 68717 - protein, 17 aa, unidentified
  source 1..17: note = methanogen bacteria
EKVIGPYPFLMVNTQPV

SEQ ID NO: 68718 - protein, 29 aa, unidentified
  source 1..29: note = methanogen bacteria
FDLPIFDLHHLLLNFNETIDMFFANSPEY

SEQ ID NO: 68719 - protein, 14 aa, unidentified
  source 1..14: note = methanogen bacteria
SWTTDLGLYHLLFN

SEQ ID NO: 68720 - protein, 17 aa, unidentified
  source 1..17: note = methanogen bacteria
KIVEGPYPFLLVNKQPI

SEQ ID NO: 68721 - protein, 91 aa, unidentified
  source 1..91: note = methanogen bacteria
GLNTDQIYIRPAPQSQMDAGLAIAPYDRGGEVLVSPGVTEAQYPENSKNLGWINSYMTPIAELLKALSPYFGTSICASPGGLIDEILYYTR

SEQ ID NO: 68722 - protein, 16 aa, unidentified
  source 1..16: note = methanogen bacteria
LILNEDNTFIDHTDEN

SEQ ID NO: 68723 - protein, 10 aa, unidentified
  source 1..10: note = methanogen bacteria
EDNTFIDHTD

SEQ ID NO: 68724 - protein, 14 aa, unidentified
  source 1..14: note = methanogen bacteria
WTTDWGLHYLLFEG

SEQ ID NO: 68725 - protein, 17 aa, unidentified
  source 1..17: note = methanogen bacteria
KIVEGPYPFLLVYNQPV

SEQ ID NO: 68726 - protein, 19 aa, unidentified
  source 1..19: note = methanogen bacteria
ALPEIKILTYGDFIGFIHS

SEQ ID NO: 68727 - protein, 39 aa, unidentified
  source 1..39: note = methanogen bacteria
LYLHTFSILFLSFSTEFPKTSAEYIAPPAPAPSLTNPFK

SEQ ID NO: 68728 - protein, 14 aa, unidentified
  source 1..14: note = methanogen bacteria
IDIKSYLENTGNLW

SEQ ID NO: 68729 - protein, 12 aa, unidentified
  source 1..12: note = methanogen bacteria
MNNSNDLSITSF

SEQ ID NO: 68730 - protein, 18 aa, unidentified
  source 1..18: note = methanogen bacteria
HYCLFGFNYFESPFKAHY

SEQ ID NO: 68731 - protein, 12 aa, unidentified
  source 1..12: note = methanogen bacteria
INNSNDLSITSF

SEQ ID NO: 68732 - protein, 89 aa, unidentified
  source 1..89: note = methanogen bacteria
LNPDQLYVRPAPQEQVDEGLAIAPYDRGGVPLKEPGNIDPQYPENAESLGMITGYMSPLAEFVSSISPYFGTSIYSSPGGLIDEILYYT

SEQ ID NO: 68733 - protein, 90 aa, unidentified
  source 1..90: note = methanogen bacteria
LNPDQLYVRPAPQVQVDEGLAIAPYDRGGEVLKSPGNINPQYPENAAELGMITAYMSPLAQWISSISPYFGTSIYSSPGGLIDEVLYYTR

SEQ ID NO: 68734 - protein, 91 aa, unidentified
  source 1..91: note = methanogen bacteria
GLNVDQIYPRPEPQVQVDQGMAMAPYARGGEPLKERGITISQYPQYEPNLGWINSYVSPLSQFVMSISPYFGTSIYSSPGGLIDEILYYTR

SEQ ID NO: 68735 - protein, 90 aa, unidentified
  source 1..90: note = methanogen bacteria
LNPDQLYPRPAPQVQVDEGLAIAPYDRGGEVLSQPGIIKPQYPDNAEALGMITGYMSPPAQWISSISPYFGTSIYSSPGGLIDEILYYTR

SEQ ID NO: 68736 - protein, 89 aa, unidentified
  source 1..89: note = methanogen bacteria
LNPDQIYVRPAPQEQVDEGLALAPYDRGGEPLKEAGVIDPQYPENAASLGMITGYMSPIAQWISSISPYFGTSIYSSPGGLIDEILYYT

SEQ ID NO: 68737 - protein, 90 aa, unidentified
  source 1..90: note = methanogen bacteria
LNPDQIYPRVEPQVQVENNLSMAPYDRGGEVLKSPGITDSQYPQYEPELGWINSYVSPLAQFIKSISPYFGTSIYSSPGGLIDEILYYTR

SEQ ID NO: 68738 - protein, 27 aa, unidentified
  source 1..27: note = methanogen bacteria
TFKDTLINTYLIHTISELGIPNSNSPY

SEQ ID NO: 68739 - protein, 89 aa, unidentified
  source 1..89: note = methanogen bacteria
LNPDQLYVRPAPQEQIDEGLAIAPYDRGGEVLTQPGEINPQYPDNAASLGMITGYMSPLAQFISSISPYFGTSIYSSPGGLIDEILYYT

SEQ ID NO: 68740 - protein, 89 aa, unidentified
  source 1..89: note = methanogen bacteria
LNPDQLYVRPAPQEQIDDGLAIAPYDRGGEVLTQPGSIHPQYPENAASLGMITGYMSPLAQFVSSISPYFGTSIYSSPGGLIDEILYYT

SEQ ID NO: 68741 - protein, 19 aa, unidentified
  source 1..19: note = methanogen bacteria
IFEINGRNYTRVSDENGTA

SEQ ID NO: 68742 - protein, 92 aa, unidentified
  source 1..92: note = methanogen bacteria
NYTIKTLFNGTTVENTITVLPTLIADNLVKYYKNASQFFISLIDGESNPISGVNITMNINGVFYNRTTNEKGTAKLNINLPPGEYILTAIDP

SEQ ID NO: 68743 - protein, 29 aa, unidentified
  source 1..29: note = methanogen bacteria
LDGQGNPLANAAVKFNINGVFYTKHTDSK

SEQ ID NO: 68744 - protein, 20 aa, unidentified
  source 1..20: note = methanogen bacteria
YIITSEYDGLKISNTITIND

SEQ ID NO: 68745 - protein, 40 aa, unidentified
  source 1..40: note = methanogen bacteria
GYFEAGDSYGEMSEMIAFGHEHNIKTNMSVTQDGTSALEY

SEQ ID NO: 68746 - protein, 18 aa, unidentified
  source 1..18: note = methanogen bacteria
FIAGHYIGQDFVFGLVST

SEQ ID NO: 68747 - protein, 10 aa, unidentified
  source 1..10: note = methanogen bacteria
QGIVSSVFGI

SEQ ID NO: 68748 - protein, 90 aa, unidentified
  source 1..90: note = methanogen bacteria
LNPEQLYVRPAPQVQVDEGVAIAPYARGGVPLEEAGNISPQYPENAESLGMITGYMSPLAEWISSISPYFGTTIYSSPGGLIDEILYYTR

SEQ ID NO: 68749 - protein, 89 aa, unidentified
  source 1..89: note = methanogen bacteria
LNPDQLYVRPAPQEQVDEGLAIAPYDRGGEVLTQPGIINPQYPDNAASLGMITGYMSPIAEWISAISPYFGTSIYSSPGGLIDEILYYT

SEQ ID NO: 68750 - protein, 27 aa, unidentified
  source 1..27: note = methanogen bacteria
SFNDTLANTYLIHTISELGIPNLNSPY

SEQ ID NO: 68751 - protein, 89 aa, unidentified
  source 1..89: note = methanogen bacteria
LNPDQLYVRPAPQEQIDEGLAIAPYDRGGEVLTEPGNINPQYPENAAQLGMITGYMSPISQWVSSISPYFGTSIYSSPGGLIDEILYYT

SEQ ID NO: 68752 - protein, 89 aa, unidentified
  source 1..89: note = methanogen bacteria
LNPDQLYVRPDPQQQIDEGSSLAPYDRGGEPLKEAGDINPQYLENAAVLGMITGYMSPLAEWVSSISPYFGTSIYSSPGGLIDEILYYT

SEQ ID NO: 68753 - protein, 26 aa, unidentified
  source 1..26: note = methanogen bacteria
SVNDTLFNMYVFHTISDLGIPNGNCP

SEQ ID NO: 68754 - protein, 33 aa, unidentified
  source 1..33: note = methanogen bacteria
GVEDIVSYYYREYQYYYASAYMDYKGLYYSIMG

SEQ ID NO: 68755 - protein, 89 aa, unidentified
  source 1..89: note = methanogen bacteria
LNSDQLYVRPAPQDQIDAGLALAPYDRGGEVLKDPGFIKPQFPENAEQLGMITGYMSPLAQWISSISPYFGTSIYSSPGGLIDEILYYT

SEQ ID NO: 68756 - protein, 22 aa, unidentified
  source 1..22: note = methanogen bacteria
GPDLMFVFGDYIKTPIAIGVAN

SEQ ID NO: 68757 - protein, 89 aa, unidentified
  source 1..89: note = methanogen bacteria
LNPDQLYVKPFSQVQVDKGLPLAPYDRDGDPLVQPGNILPQFPDNVKSLGMVTGYMSPLAQFVSSVSPYFGTSIYSSPGGLIDEILYYT

SEQ ID NO: 68758 - protein, 89 aa, unidentified
  source 1..89: note = methanogen bacteria
LNPDQLYPRPAPQEQVDAGLAIAPYDRGGEVLVEPGEINPQYPDNAASLGMITAYMSPLAQWISSISPYFGTSIYSSPGGLIDEILYYT

SEQ ID NO: 68759 - protein, 17 aa, unidentified
  source 1..17: note = methanogen bacteria
MNLGQAIYDLFGANGEW

SEQ ID NO: 68760 - protein, 89 aa, unidentified
  source 1..89: note = methanogen bacteria
LNPDQLYVRPAPQEQIDEGLAIAPYDRGGQPLTQPGEIDPQYPENAESLGMITGYMSPLAQWISSISPYFGTSIYSSPGGLIDEILYYT

SEQ ID NO: 68761 - protein, 89 aa, unidentified
  source 1..89: note = methanogen bacteria
LNPDQLYVRPAPQEQIDEGLAIAPYDRGGIVLKEPGEIHPQYPDNAASLGMITAYMSPLAQWISSISPYFGTSIYSSPGGLIDEILYYT

SEQ ID NO: 68762 - protein, 12 aa, unidentified
  source 1..12: note = methanogen bacteria
NLFTEPNPLIKY

SEQ ID NO: 68763 - protein, 26 aa, unidentified
  source 1..26: note = methanogen bacteria
NNSSNSDYGIFIVTYLVPFIFVNFSW

SEQ ID NO: 68764 - protein, 23 aa, unidentified
  source 1..23: note = methanogen bacteria
MTTINTNLFNFINHGLENPLLNT

SEQ ID NO: 68765 - protein, 29 aa, unidentified
  source 1..29: note = methanogen bacteria
VNEPRPEATLSNVHLLIVENDPRSFPSGH

SEQ ID NO: 68766 - protein, 40 aa, unidentified
  source 1..40: note = methanogen bacteria
GYFEAGDSYGEMSEMIAFSHEHNIKTNITSNDNGTSALEY

SEQ ID NO: 68767 - protein, 17 aa, unidentified
  source 1..17: note = methanogen bacteria
IAGHYIGQDFLFGMVST

SEQ ID NO: 68768 - protein, 10 aa, unidentified
  source 1..10: note = methanogen bacteria
PGIISSVFGI

SEQ ID NO: 68769 - protein, 90 aa, unidentified
  source 1..90: note = methanogen bacteria
LNPDQLYTRPAPQEQVDDGLSIAPYDRGGEVMKTPGTINPQYPENAAELGMITGYMSPLAQWISSISPYFGTSIYSSPGGLIDEILYYTR

SEQ ID NO: 68770 - protein, 26 aa, unidentified
  source 1..26: note = methanogen bacteria
FFNASFSNAYVFHAISELGIPNLNSP

SEQ ID NO: 68771 - protein, 37 aa, unidentified
  source 1..37: note = methanogen bacteria
INIGDHYGQITKGFLQAKANGTLSVNESMPKLNTFDL

SEQ ID NO: 68772 - protein, 14 aa, unidentified
  source 1..14: note = methanogen bacteria
GMPFGTDLTFFSVT

SEQ ID NO: 68773 - protein, 10 aa, unidentified
  source 1..10: note = methanogen bacteria
HLQYVFGFDS

SEQ ID NO: 68774 - protein, 17 aa, unidentified
  source 1..17: note = methanogen bacteria
IGNQAIGSDTVPGLISS

SEQ ID NO: 68775 - protein, 37 aa, unidentified
  source 1..37: note = methanogen bacteria
AYSSVGENYGAISNALWHKNVTGNQTSNMSFKLNTID

SEQ ID NO: 68776 - protein, 10 aa, unidentified
  source 1..10: note = methanogen bacteria
IPFGTDLTYS

SEQ ID NO: 68777 - protein, 11 aa, unidentified
  source 1..11: note = methanogen bacteria
DPISTWYYGLN

SEQ ID NO: 68778 - protein, 15 aa, unidentified
  source 1..15: note = methanogen bacteria
IPQPSTLNLEGLWNL

SEQ ID NO: 68779 - protein, 10 aa, unidentified
  source 1..10: note = methanogen bacteria
IQQLGQIGVL

SEQ ID NO: 68780 - protein, 15 aa, unidentified
  source 1..15: note = methanogen bacteria
AFAFFSVTGVPESVF

SEQ ID NO: 68781 - protein, 32 aa, unidentified
  source 1..32: note = methanogen bacteria
MADIFSMFSGGILNVLNTLFNPLLAMDPNPQN

SEQ ID NO: 68782 - protein, 40 aa, unidentified
  source 1..40: note = methanogen bacteria
IISNLVLILPAPAYWLTLTPFWHFIGQFLYGGKATIPYGI

SEQ ID NO: 68783 - protein, 87 aa, unidentified
  source 1..87: note = methanogen bacteria
RSLGEMTITSSTSPIYSLQSRADFTLHVLNLLDFLGGNFGLTHGHMLASSIPGSDLGPRMMVGRLIAWRSEVTVTPTLIGQMVVDFG

SEQ ID NO: 68784 - protein, 14 aa, unidentified
  source 1..14: note = methanogen bacteria
YEFVLVMQTLPYNE

SEQ ID NO: 68785 - protein, 32 aa, unidentified
  source 1..32: note = methanogen bacteria
MADIFGMLSGGVLNALNALFNPLLAMDPNPQN

SEQ ID NO: 68786 - protein, 41 aa, unidentified
  source 1..41: note = methanogen bacteria
SVISQLVLILPAPAYWLTLTPFWHFIGQFLYGGKATIPYGI

SEQ ID NO: 68787 - protein, 14 aa, unidentified
  source 1..14: note = methanogen bacteria
YEFVLVMQTLPYNE

SEQ ID NO: 68788 - protein, 32 aa, unidentified
  source 1..32: note = methanogen bacteria
MVDVIGMLMGGVNNVLNSIFNPILAMDPNPHN

SEQ ID NO: 68789 - protein, 42 aa, unidentified
  source 1..42: note = methanogen bacteria
TSAIHDLVLILPQPVYWVTLTPIWHAIGGFIYGGKATIPYGI

SEQ ID NO: 68790 - protein, 26 aa, unidentified
  source 1..26: note = methanogen bacteria
YFNASFLDTYIFHTISELGIPNSNSP

SEQ ID NO: 68791 - protein, 32 aa, unidentified
  source 1..32: note = methanogen bacteria
ISDPLNLPDFDLKDMLLNLPKTIHVLYSNNPV

SEQ ID NO: 68792 - protein, 17 aa, unidentified
  source 1..17: note = methanogen bacteria
AGYIGSVEGLMGLGKIA

SEQ ID NO: 68793 - protein, 27 aa, unidentified
  source 1..27: note = methanogen bacteria
FFNDSLINTYMFHTISELGIPNVNSPL

SEQ ID NO: 68794 - protein, 14 aa, unidentified
  source 1..14: note = methanogen bacteria
IKVVNLNFYGMEVT

SEQ ID NO: 68795 - protein, 19 aa, unidentified
  source 1..19: note = methanogen bacteria
LPSPVWYTGDSSLAFVFTQ

SEQ ID NO: 68796 - protein, 26 aa, unidentified
  source 1..26: note = methanogen bacteria
FFNDSFSSTYLFHTISELGIPNLNSP

SEQ ID NO: 68797 - protein, 36 aa, unidentified
  source 1..36: note = methanogen bacteria
ISAGEHYGMISKALFQAKANGTLVSNDDVPKSTSLG

SEQ ID NO: 68798 - protein, 10 aa, unidentified
  source 1..10: note = methanogen bacteria
IPFGNDFVYS

SEQ ID NO: 68799 - protein, 10 aa, unidentified
  source 1..10: note = methanogen bacteria
EPIMLWYYGI

SEQ ID NO: 68800 - protein, 18 aa, unidentified
  source 1..18: note = methanogen bacteria
MGGYVETLNGILGLGKVV

SEQ ID NO: 68801 - protein, 32 aa, unidentified
  source 1..32: note = methanogen bacteria
MANFFGMISGEIFNALNAIFNPILSMDPNPHN

SEQ ID NO: 68802 - protein, 41 aa, unidentified
  source 1..41: note = methanogen bacteria
SAIHNLVLILPEPVYWITLTPFWHFIGGFMYGGKATIPFGI

SEQ ID NO: 68803 - protein, 16 aa, unidentified
  source 1..16: note = methanogen bacteria
KIPQPETLSLSGLWGL

SEQ ID NO: 68804 - protein, 37 aa, unidentified
  source 1..37: note = methanogen bacteria
INIGDHYGQITKGFFQAKANGTLNVNESMPKLNTFDL

SEQ ID NO: 68805 - protein, 15 aa, unidentified
  source 1..15: note = methanogen bacteria
GMPFGYDFTFHALTI

SEQ ID NO: 68806 - protein, 26 aa, unidentified
  source 1..26: note = methanogen bacteria
FFNASFFNTYVFHAISELGIPNLNSP

SEQ ID NO: 68807 - protein, 26 aa, unidentified
  source 1..26: note = methanogen bacteria
FFNSSLMDAYIFHTISELGIPNANSP

SEQ ID NO: 68808 - protein, 26 aa, unidentified
  source 1..26: note = methanogen bacteria
FFNSSIFNTYVFHTISELGIPNANSP

SEQ ID NO: 68809 - protein, 27 aa, unidentified
  source 1..27: note = methanogen bacteria
TFNDTLVNTYLEYTISTLGIPNSDSPY

SEQ ID NO: 68810 - protein, 10 aa, unidentified
  source 1..10: note = methanogen bacteria
VQNVAYYSPT

SEQ ID NO: 68811 - protein, 16 aa, unidentified
  source 1..16: note = methanogen bacteria
LANGKITHNQLSVTSF

SEQ ID NO: 68812 - protein, 27 aa, unidentified
  source 1..27: note = methanogen bacteria
TFNDTLVNTYLEYTISTLGIPNSDSPY

SEQ ID NO: 68813 - protein, 30 aa, unidentified
  source 1..30: note = methanogen bacteria
FFHSQPQLAATYAATPPVAANEMATTLLGP

SEQ ID NO: 68814 - protein, 26 aa, unidentified
  source 1..26: note = methanogen bacteria
FFNASFFNTYFFHTISQLGIPNGNSP

SEQ ID NO: 68815 - protein, 32 aa, unidentified
  source 1..32: note = methanogen bacteria
IYNGDKLNFISNAISSNPVNNNVSTASSSISL

SEQ ID NO: 68816 - protein, 13 aa, unidentified
  source 1..13: note = methanogen bacteria
YVFGFDLKFACST

SEQ ID NO: 68817 - protein, 20 aa, unidentified
  source 1..20: note = methanogen bacteria
GSGAYYDSVHTIFGVGAEPA

SEQ ID NO: 68818 - protein, 27 aa, unidentified
  source 1..27: note = methanogen bacteria
FFNASLFDAYVFHAISELGIPDANSPL

SEQ ID NO: 68819 - protein, 26 aa, unidentified
  source 1..26: note = methanogen bacteria
FFNDSIFNTYVFHTISELGIPNGNSP

SEQ ID NO: 68820 - protein, 26 aa, unidentified
  source 1..26: note = methanogen bacteria
FFNASLANTYIFHTISELGIPNANSP

SEQ ID NO: 68821 - protein, 26 aa, unidentified
  source 1..26: note = methanogen bacteria
FFNASFFNTYIFHTISELGIPNGNSP

SEQ ID NO: 68822 - protein, 26 aa, unidentified
  source 1..26: note = methanogen bacteria
FFNDFIGNTYILHTISELGIPHPNSP

SEQ ID NO: 68823 - protein, 28 aa, unidentified
  source 1..28: note = methanogen bacteria
THFNASLYNTYAIHTISELGIPNVNSPL

SEQ ID NO: 68824 - protein, 26 aa, unidentified
  source 1..26: note = methanogen bacteria
FFNASFADTYIFNTISALGIPNSDSP

SEQ ID NO: 68825 - protein, 17 aa, unidentified
  source 1..17: note = methanogen bacteria
TKIIYYIQIPYLGLTIP

SEQ ID NO: 68826 - protein, 26 aa, unidentified
  source 1..26: note = methanogen bacteria
FFNDFIGDTYVLHAISELGIPHSNSP

SEQ ID NO: 68827 - protein, 26 aa, unidentified
  source 1..26: note = methanogen bacteria
LFNASFVNTYLFHTISELGIPNSNSP

SEQ ID NO: 68828 - protein, 26 aa, unidentified
  source 1..26: note = methanogen bacteria
FFNSSIFDTYVFHTISELGIPNANSP

SEQ ID NO: 68829 - protein, 13 aa, unidentified
  source 1..13: note = methanogen bacteria
IVIPLHWTPVPIT

SEQ ID NO: 68830 - protein, 17 aa, unidentified
  source 1..17: note = methanogen bacteria
IPWFAGMTGGIEIVLES

SEQ ID NO: 68831 - protein, 12 aa, unidentified
  source 1..12: note = methanogen bacteria
LSQTTGIQVSLV

SEQ ID NO: 68832 - protein, 12 aa, unidentified
  source 1..12: note = methanogen bacteria
GISTGGNVNPWT

SEQ ID NO: 68833 - protein, 11 aa, unidentified
  source 1..11: note = methanogen bacteria
MVFVPPTWYMG

SEQ ID NO: 68834 - protein, 26 aa, unidentified
  source 1..26: note = methanogen bacteria
FFNASLFNTYVFHTISELGIPNGNSP

SEQ ID NO: 68835 - protein, 22 aa, unidentified
  source 1..22: note = methanogen bacteria
MEYLFYLFFANFIGTAGGFGAF

SEQ ID NO: 68836 - protein, 16 aa, unidentified
  source 1..16: note = methanogen bacteria
GTGVLSNNVHLYYFMT

SEQ ID NO: 68837 - protein, 16 aa, unidentified
  source 1..16: note = methanogen bacteria
SQKILTFLNIGSLTAV

SEQ ID NO: 68838 - protein, 20 aa, unidentified
  source 1..20: note = methanogen bacteria
DVDFYNHLIGNYGFSLVRGN

SEQ ID NO: 68839 - protein, 15 aa, unidentified
  source 1..15: note = methanogen bacteria
LPQPATASFASIWAL

SEQ ID NO: 68840 - protein, 17 aa, unidentified
  source 1..17: note = methanogen bacteria
IYAMLESEMDQTLTNNM

SEQ ID NO: 68841 - protein, 11 aa, unidentified
  source 1..11: note = methanogen bacteria
YYLGNSLLEEI

SEQ ID NO: 68842 - protein, 20 aa, unidentified
  source 1..20: note = methanogen bacteria
PISHAFNFISGNPAMITRTA

SEQ ID NO: 68843 - protein, 13 aa, unidentified
  source 1..13: note = methanogen bacteria
GFIMIMQTLSYNE

SEQ ID NO: 68844 - protein, 15 aa, unidentified
  source 1..15: note = methanogen bacteria
FRSYADFEIDGGLDF

SEQ ID NO: 68845 - protein, 32 aa, unidentified
  source 1..32: note = methanogen bacteria
APEFLVDHPEVVKDILLLKYDGSIAFDGLGAT

SEQ ID NO: 68846 - protein, 14 aa, unidentified
  source 1..14: note = methanogen bacteria
ARVDTLRLNGIHPA

SEQ ID NO: 68847 - protein, 15 aa, unidentified
  source 1..15: note = methanogen bacteria
LYGVISYSPDFQITG

SEQ ID NO: 68848 - protein, 14 aa, unidentified
  source 1..14: note = methanogen bacteria
SFNPMGSESTFYYS

SEQ ID NO: 68849 - protein, 41 aa, unidentified
  source 1..41: note = methanogen bacteria
GLGFATPAGQGFVQGGSPSSFVVWVTDGIFEGHYTAIAGNL

SEQ ID NO: 68850 - protein, 11 aa, unidentified
  source 1..11: note = methanogen bacteria
SSTVMGDIIST

SEQ ID NO: 68851 - protein, 28 aa, unidentified
  source 1..28: note = methanogen bacteria
MTDFFGMVLDVLNAIFNPILALDPNPQN

SEQ ID NO: 68852 - protein, 44 aa, unidentified
  source 1..44: note = methanogen bacteria
ASSISHLVLILPAPAYWLTLTPFWHFIGPMLYGGKATIPYGIGI

SEQ ID NO: 68853 - protein, 25 aa, unidentified
  source 1..25: note = methanogen bacteria
MADIIISFLNYIFNPLLSLDPTPNN

SEQ ID NO: 68854 - protein, 44 aa, unidentified
  source 1..44: note = methanogen bacteria
TIKNTVVILPPLVYYCSLTPIWHTIGPLIPGYGAANPHALPWSI

SEQ ID NO: 68855 - protein, 20 aa, unidentified
  source 1..20: note = methanogen bacteria
ALPELQIAKYSDFIGFISAL

SEQ ID NO: 68856 - protein, 90 aa, unidentified
  source 1..90: note = methanogen bacteria
LNPDQIYTRPAPQEQVDEGLAIAPYDRGGEVLKSPGIINPQYPENARELGMITGYMSPLAQWVSSISPYFGTSIYSSPGGLIDEVLYYTR

SEQ ID NO: 68857 - protein, 90 aa, unidentified
  source 1..90: note = methanogen bacteria
LNPDQLYTRPAPQVQIDDGLPIAPYDRGGVVLKEPGIIKAQFPENSKELGMITGYMSPLAEWVSSISPYFGTSIYSSPGGLIDEVLYYTR

SEQ ID NO: 68858 - protein, 27 aa, unidentified
  source 1..27: note = methanogen bacteria
LRDAYMSAMRASMGNDYVNVIAPYLQT

SEQ ID NO: 68859 - protein, 17 aa, unidentified
  source 1..17: note = methanogen bacteria
SIFDDSGDYWGFGDFWG

SEQ ID NO: 68860 - protein, 13 aa, unidentified
  source 1..13: note = methanogen bacteria
PGWVYDTYIEGWH

SEQ ID NO: 68861 - protein, 23 aa, unidentified
  source 1..23: note = methanogen bacteria
QYGTLDNFFDEIQHMGDWFQPGG

SEQ ID NO: 68862 - protein, 24 aa, unidentified
  source 1..24: note = methanogen bacteria
ASTSLSLPEIFEGMGLEELKIGMD

SEQ ID NO: 68863 - protein, 27 aa, unidentified
  source 1..27: note = methanogen bacteria
LRDVFMSAMRTSMGNDYVNVIAPYLQT

SEQ ID NO: 68864 - protein, 15 aa, unidentified
  source 1..15: note = methanogen bacteria
LPQPAAPTLASLWAL

SEQ ID NO: 68865 - protein, 10 aa, unidentified
  source 1..10: note = methanogen bacteria
LFPAVIPGAN

SEQ ID NO: 68866 - protein, 31 aa, unidentified; identical to SEQ ID NO: 65929
  source 1..31: note = methanogen bacteria

SEQ ID NO: 68867 - protein, 15 aa, unidentified
  source 1..15: note = methanogen bacteria
LPQTATASLASIWAL

SEQ ID NO: 68868 - protein, 30 aa, unidentified
  source 1..30: note = methanogen bacteria
PNLHAYLNPVVENLSKQVETGNIKLTFHSI

SEQ ID NO: 68869 - protein, 13 aa, unidentified
  source 1..13: note = methanogen bacteria
YFVAVNSNDMFKT

SEQ ID NO: 68870 - protein, 27 aa, unidentified
  source 1..27: note = methanogen bacteria
LRDAYMAAMQSSMGNDYVNVIAPFLQT

SEQ ID NO: 68871 - protein, 90 aa, unidentified
  source 1..90: note = methanogen bacteria
LNPDQLYTRPAPQVQVDEGLAIAPYDRGGEVLSEPGNIKPQYPDNSKELGMITGYMSPLAEWISSISPYFGTSIYSSPGGLIDEVLYYTR

SEQ ID NO: 68872 - protein, 27 aa, unidentified
  source 1..27: note = methanogen bacteria
LRDYYISAMNASMGVEYVNFITPFLQY

SEQ ID NO: 68873 - protein, 25 aa, unidentified
  source 1..25: note = methanogen bacteria
FHDVLMNTYTVHTISELGFPGVSPL

SEQ ID NO: 68874 - protein, 90 aa, unidentified
  source 1..90: note = methanogen bacteria
LNPDQLYVRPSPQLQAEDGVNLAPYDRGGEVLKEPVIVKAQYPENSEELGMISAYMSPLAQWISSISPYFGTSIYSSPGGLIDEVLYYTR

SEQ ID NO: 68875 - protein, 10 aa, unidentified
  source 1..10: note = methanogen bacteria
FLPVIKRSSR

SEQ ID NO: 68876 - protein, 11 aa, unidentified
  source 1..11: note = methanogen bacteria
KTLEIEFIALP

SEQ ID NO: 68877 - protein, 17 aa, unidentified
  source 1..17: note = methanogen bacteria
FPSSSPNASAFASLLST

SEQ ID NO: 68878 - protein, 89 aa, unidentified
  source 1..89: note = methanogen bacteria
LNSDQLYTRPAPQEQIDEGLAIAPYDRGGVILKEPGIIHAQYPENSKELGMITAYMSPLAQWVSSISPYFGTSIYSSPGGLIDEVLYYT

SEQ ID NO: 68879 - protein, 15 aa, unidentified
  source 1..15: note = methanogen bacteria
LPQPATASLASLWAL

SEQ ID NO: 68880 - protein, 28 aa, unidentified
  source 1..28: note = methanogen bacteria
MPDPWGIILGALNTVFNPILAMDPNPAN

SEQ ID NO: 68881 - protein, 42 aa, unidentified
  source 1..42: note = methanogen bacteria
SSAISGLVIHLPPSVYWVTLTPLWHFIGSIIYGGQATIPYGI

SEQ ID NO: 68882 - protein, 28 aa, unidentified
  source 1..28: note = methanogen bacteria
MVDIWGMIYEALNSVFNPILAMDPNPAN

SEQ ID NO: 68883 - protein, 42 aa, unidentified
  source 1..42: note = methanogen bacteria
TSAIHDLVIILPKTVYWVTLTPVWHFIGQFLYGGKATIPYGI

SEQ ID NO: 68884 - protein, 34 aa, unidentified
  source 1..34: note = methanogen bacteria
MEDKKIGDIQLDLLFFINNQLQNPFLDMAVPIIY

SEQ ID NO: 68885 - protein, 30 aa, unidentified
  source 1..30: note = methanogen bacteria
FYPSTRPFIAYEAIRLVVHDNGFYSFPSGH

SEQ ID NO: 68886 - protein, 28 aa, unidentified
  source 1..28: note = methanogen bacteria
MVDIMGPIYGVLNAIFNPILAIDPNPAN

SEQ ID NO: 68887 - protein, 41 aa, unidentified
  source 1..41: note = methanogen bacteria
SAIHNLVIILPKTVYWVTLTPLWHVIGSFVYGGKATIPYGI

SEQ ID NO: 68888 - protein, 10 aa, unidentified
  source 1..10: note = methanogen bacteria
LFPAVIPGAN

SEQ ID NO: 68889 - protein, 31 aa, unidentified; identical to SEQ ID NO: 65929
  source 1..31: note = methanogen bacteria

SEQ ID NO: 68890 - protein, 12 aa, unidentified
  source 1..12: note = methanogen bacteria
GTLTGDWEVLAD

SEQ ID NO: 68891 - protein, 24 aa, unidentified
  source 1..24: note = methanogen bacteria
NGTSLFDYIEEYRAGEALIAAFKC

SEQ ID NO: 68892 - protein, 28 aa, unidentified
  source 1..28: note = methanogen bacteria
MVDIMGMLNGALNAIFNPILAMDPNPAN

SEQ ID NO: 68893 - protein, 42 aa, unidentified
  source 1..42: note = methanogen bacteria
SSAIHDLVIILPTTVYWVTLTPLWHAIGSVIYGGKATIPYGI

SEQ ID NO: 68894 - protein, 28 aa, unidentified
  source 1..28: note = methanogen bacteria
MVDFMGPIYGALNAVFNPILAMDPNPAN

SEQ ID NO: 68895 - protein, 42 aa, unidentified
  source 1..42: note = methanogen bacteria
ASAVSNLVIIMPPSVYWVTLVPIWHMIGSFLYGGQATIPYGI

SEQ ID NO: 68896 - protein, 28 aa, unidentified
  source 1..28: note = methanogen bacteria
MADPMGMVYGALNSIFNPILAMDPNPAN

SEQ ID NO: 68897 - protein, 42 aa, unidentified
  source 1..42: note = methanogen bacteria
SSAISSLVVTLPTTVYWITLTPFWHALGGIIYGGKATIPFGI

SEQ ID NO: 68898 - protein, 23 aa, unidentified
  source 1..23: note = methanogen bacteria
IFGVRGPIGKFFIDFFTVKIAFS

SEQ ID NO: 68899 - protein, 27 aa, unidentified
  source 1..27: note = methanogen bacteria
LQDKQGLSLWQFIQKWLQEIWGTLLIM

SEQ ID NO: 68900 - protein, 28 aa, unidentified
  source 1..28: note = methanogen bacteria
MVDIMGMVYGALNTVFNPILAMDPNPAN

SEQ ID NO: 68901 - protein, 42 aa, unidentified
  source 1..42: note = methanogen bacteria
TSAISGLVVHLPVTVYWITLTPVWHFIGSIFYGGKATIPYGI

SEQ ID NO: 68902 - protein, 28 aa, unidentified
  source 1..28: note = methanogen bacteria
MADFMEMIFQALNAVFNPILAIDPNPTN

SEQ ID NO: 68903 - protein, 42 aa, unidentified
  source 1..42: note = methanogen bacteria
HSSISSLVVILPPSVYWATLTPLWHAIGGVIYGGKATIPYGI

SEQ ID NO: 68904 - protein, 17 aa, unidentified
  source 1..17: note = methanogen bacteria
YSNFMQSYGMDSQIIIT

SEQ ID NO: 68905 - protein, 14 aa, unidentified
  source 1..14: note = methanogen bacteria
FGSPDYWGYGGFWG

SEQ ID NO: 68906 - protein, 13 aa, unidentified
  source 1..13: note = methanogen bacteria
PGWVYATYIEGWH

SEQ ID NO: 68907 - protein, 28 aa, unidentified
  source 1..28: note = methanogen bacteria
MADPMGMVYGALNAIFNPILSIDPNPTN

SEQ ID NO: 68908 - protein, 41 aa, unidentified
  source 1..41: note = methanogen bacteria
SVISGLVVILPPSVYWVTLTPFWHFIGHFLYGGNATIPYGI

SEQ ID NO: 68909 - protein, 28 aa, unidentified
  source 1..28: note = methanogen bacteria
MPDPWGIILGALNSVFNPILALDPNPTN

SEQ ID NO: 68910 - protein, 42 aa, unidentified
  source 1..42: note = methanogen bacteria
SSVISGLVIHLPPSVYWVTLTPFWHFIGGFLYGGKATIPYGI

SEQ ID NO: 68911 - protein, 14 aa, unidentified
  source 1..14: note = methanogen bacteria
GIASASGSELSNYA

SEQ ID NO: 68912 - protein, 24 aa, unidentified
  source 1..24: note = methanogen bacteria
MINVDLFYFINHTLQNPLFDVIMP

SEQ ID NO: 68913 - protein, 31 aa, unidentified
  source 1..31: note = methanogen bacteria
TFTQPRPYLLVDGVRVLVMEGDPNAFPSGHT

SEQ ID NO: 68914 - protein, 12 aa, unidentified
  source 1..12: note = methanogen bacteria
MNLLTLLTLIDD

SEQ ID NO: 68915 - protein, 10 aa, unidentified
  source 1..10: note = methanogen bacteria
IGYPFYNPSI

SEQ ID NO: 68916 - protein, 13 aa, unidentified
  source 1..13: note = methanogen bacteria
HFITIMGTLTDDE

SEQ ID NO: 68917 - protein, 33 aa, unidentified
  source 1..33: note = methanogen bacteria
NVYGNAMIVAQEIYLQATYSYMGSSSAIAFDAQ

SEQ ID NO: 68918 - protein, 41 aa, unidentified
  source 1..41: note = methanogen bacteria
NIYGNVMVVAQAIVLQATQVYMGTSTAFMSDAIAQALANLA

SEQ ID NO: 68919 - protein, 15 aa, unidentified
  source 1..15: note = methanogen bacteria
LHQPATASIQSILTL

SEQ ID NO: 68920 - protein, 27 aa, unidentified
  source 1..27: note = methanogen bacteria
MAFTDPIFQALNVVFDPILSMDPNPAN

SEQ ID NO: 68921 - protein, 42 aa, unidentified
  source 1..42: note = methanogen bacteria
SSAIHNLVVILPTTVYWVTLTPLWHAIGSVIYGGKATIPYGI

SEQ ID NO: 68922 - protein, 19 aa, unidentified
  source 1..19: note = methanogen bacteria
YGDLSALTGGIIDLHVYGS

SEQ ID NO: 68923 - protein, 15 aa, unidentified
  source 1..15: note = methanogen bacteria
LPQPATASIQSILAL

SEQ ID NO: 68924 - protein, 12 aa, unidentified
  source 1..12: note = methanogen bacteria
MKNNVILMSFNL

SEQ ID NO: 68925 - protein, 21 aa, unidentified
  source 1..21: note = methanogen bacteria
FYGDLSVLTGGIIDLPVYGSI

SEQ ID NO: 68926 - protein, 21 aa, unidentified
  source 1..21: note = methanogen bacteria
YYGDLSVLTGGVIDLPVYGSI

SEQ ID NO: 68927 - protein, 15 aa, unidentified
  source 1..15: note = methanogen bacteria
IPLASSGSWEALYEL

SEQ ID NO: 68928 - protein, 15 aa, unidentified
  source 1..15: note = methanogen bacteria
LPQPAAASIPSILAL

SEQ ID NO: 68929 - protein, 15 aa, unidentified
  source 1..15: note = methanogen bacteria
LPQPATASIPSILAL

SEQ ID NO: 68930 - protein, 14 aa, unidentified
  source 1..14: note = methanogen bacteria
MVTPIDIMSLPLNI

SEQ ID NO: 68931 - protein, 19 aa, unidentified
  source 1..19: note = methanogen bacteria
FGDLSALTGGVIDLHVYGS

SEQ ID NO: 68932 - protein, 26 aa, unidentified
  source 1..26: note = methanogen bacteria
MSVSELDILIWIRDNMSSAAMDAASE

SEQ ID NO: 68933 - protein, 29 aa, unidentified
  source 1..29: note = methanogen bacteria
VTARDRPFEDYSVDLIISRPSDFSFPSGH

SEQ ID NO: 68934 - protein, 14 aa, unidentified
  source 1..14: note = methanogen bacteria
EDHIFVNRGFLYGP

SEQ ID NO: 68935 - protein, 25 aa, unidentified
  source 1..25: note = methanogen bacteria
DLTKCDWKTLWYYGDEFMNFQGRIA

SEQ ID NO: 68936 - protein, 29 aa, unidentified
  source 1..29: note = methanogen bacteria
INSAPSLGGYMATGLGQNGFGAASSVGLN

SEQ ID NO: 68937 - protein, 15 aa, unidentified
  source 1..15: note = methanogen bacteria
LKIPKIITLDSLLSQ

SEQ ID NO: 68938 - protein, 15 aa, unidentified
  source 1..15: note = methanogen bacteria
ISQPAEPTLSAIWDL

SEQ ID NO: 68939 - protein, 15 aa, unidentified
  source 1..15: note = methanogen bacteria
IAQPVNPTLSAIWDL

SEQ ID NO: 68940 - protein, 38 aa, unidentified
  source 1..38: note = methanogen bacteria
MSNIFNSMFETVFYFPWEVSLIIFLQSTLPSFVLGFFE

SEQ ID NO: 68941 - protein, 41 aa, unidentified
  source 1..41: note = methanogen bacteria
VTVARLRPYAAVDTIKCIRADVADQNPLDFKIQGYSFPSGH

SEQ ID NO: 68942 - protein, 15 aa, unidentified
  source 1..15: note = methanogen bacteria
IPLPASGSWDALYAL

SEQ ID NO: 68943 - protein, 25 aa, unidentified
  source 1..25: note = methanogen bacteria
YFESGTIDNAFSLSGGMKDMLSPGG

SEQ ID NO: 68944 - protein, 22 aa, unidentified
  source 1..22: note = methanogen bacteria
AADSLTIPSVAEGTGLESIEVG

SEQ ID NO: 68945 - protein, 14 aa, unidentified
  source 1..14: note = methanogen bacteria
FGSDDYWGFGGFYG

SEQ ID NO: 68946 - protein, 13 aa, unidentified
  source 1..13: note = methanogen bacteria
PGWVYANFVEGWH

SEQ ID NO: 68947 - protein, 15 aa, unidentified
  source 1..15: note = methanogen bacteria
IPLPASGGWEALYEL

SEQ ID NO: 68948 - protein, 22 aa, unidentified
  source 1..22: note = methanogen bacteria
FGVRGPIGSFFIDFFAYKIAFS

SEQ ID NO: 68949 - protein, 27 aa, unidentified
  source 1..27: note = methanogen bacteria
LAGNIAGQTRTLPMAVYSEVAAGNMGD

SEQ ID NO: 68950 - protein, 13 aa, unidentified
  source 1..13: note = methanogen bacteria
IYVYLIENVIYLI

SEQ ID NO: 68951 - protein, 15 aa, unidentified
  source 1..15: note = methanogen bacteria
IPLASNGSWEALFEL

SEQ ID NO: 68952 - protein, 41 aa, unidentified
  source 1..41: note = methanogen bacteria
AGSFTDMMVEALQQTDMGGGKTGWDVFVENGLSAADLQASF

SEQ ID NO: 68953 - protein, 15 aa, unidentified
  source 1..15: note = methanogen bacteria
ISQPVEPTLAAIWNL

SEQ ID NO: 68954 - protein, 15 aa, unidentified
  source 1..15: note = methanogen bacteria
IAQPAEPTLSAILDL

SEQ ID NO: 68955 - protein, 14 aa, unidentified
  source 1..14: note = methanogen bacteria
IPIPAHPDFASLWE

SEQ ID NO: 68956 - protein, 26 aa, unidentified
  source 1..26: note = methanogen bacteria
FFRDSLANTYIFHTISELGIPNMNSP

SEQ ID NO: 68957 - protein, 15 aa, unidentified
  source 1..15: note = methanogen bacteria
IPLASLGSWESLYEL

SEQ ID NO: 68958 - protein, 15 aa, unidentified
  source 1..15: note = methanogen bacteria
IPLASSGSWEALFAL

SEQ ID NO: 68959 - protein, 25 aa, unidentified
  source 1..25: note = methanogen bacteria
YFESGTFDDAFSLSGDMKDMLSPGG

SEQ ID NO: 68960 - protein, 22 aa, unidentified
  source 1..22: note = methanogen bacteria
AADSLTIPSVAEGTGLESIEVG

SEQ ID NO: 68961 - protein, 31 aa, unidentified
  source 1..31: note = methanogen bacteria
SSITFSWGTDAALYFVNNVGGSSNLSNASFL

SEQ ID NO: 68962 - protein, 23 aa, unidentified
  source 1..23: note = methanogen bacteria
TLPGADIGINTLLNPTWSKLYDV

SEQ ID NO: 68963 - protein, 15 aa, unidentified
  source 1..15: note = methanogen bacteria
IWDSGHIQPELQWCN

SEQ ID NO: 68964 - protein, 14 aa, unidentified
  source 1..14: note = methanogen bacteria
IPLASNGSWEALFE

SEQ ID NO: 68965 - protein, 18 aa, unidentified
  source 1..18: note = methanogen bacteria
VYSGFMQGYGMESEIVIT

SEQ ID NO: 68966 - protein, 15 aa, unidentified
  source 1..15: note = methanogen bacteria
IPMASNGTWTALWQI

SEQ ID NO: 68967 - protein, 49 aa, unidentified
  source 1..49: note = methanogen bacteria
LGRTGNQELHISLVPFWSYWVMLRGVFHALRQCDWQGVIREVSGIGYPA

SEQ ID NO: 68968 - protein, 20 aa, unidentified
  source 1..20: note = methanogen bacteria
TPTLIQLSYGIIPLITYNGL

SEQ ID NO: 68969 - protein, 22 aa, unidentified
  source 1..22: note = methanogen bacteria
APGIISEIGPYIITPIVTGVNN

SEQ ID NO: 68970 - protein, 30 aa, unidentified
  source 1..30: note = methanogen bacteria
MSSNINVDLFYFFNHNFQNPIFDAVMPIVT

SEQ ID NO: 68971 - protein, 29 aa, unidentified
  source 1..29: note = methanogen bacteria
VQEPRPFVTLDNVRLLITEGDPLSFPSGH

SEQ ID NO: 68972 - protein, 16 aa, unidentified
  source 1..16: note = methanogen bacteria
VGYFGGSLPLIDYGGA

SEQ ID NO: 68973 - protein, 15 aa, unidentified
  source 1..15: note = methanogen bacteria
IPMASNGSWEALFEV

SEQ ID NO: 68974 - protein, 21 aa, unidentified
  source 1..21: note = methanogen bacteria
PLILAEIGQYIITPIITDVNS

SEQ ID NO: 68975 - protein, 23 aa, unidentified
  source 1..23: note = methanogen bacteria
MINIDLFYFINDTLKNPLFDFLM

SEQ ID NO: 68976 - protein, 30 aa, unidentified
  source 1..30: note = methanogen bacteria
ILEPRPFVTLSNVHLLISENDPASFPSGHT

SEQ ID NO: 68977 - protein, 21 aa, unidentified
  source 1..21: note = methanogen bacteria
GPDLLAAYGEFITTPIAVGVL

SEQ ID NO: 68978 - protein, 21 aa, unidentified
  source 1..21: note = methanogen bacteria
PTLLAMFGNLIITPIPVGVPN

SEQ ID NO: 68979 - protein, 21 aa, unidentified
  source 1..21: note = methanogen bacteria
SIMRLNHEMFSSFLILTPTYQ

SEQ ID NO: 68980 - protein, 18 aa, unidentified
  source 1..18: note = methanogen bacteria
LSVVGSYLITPMITDIHS

SEQ ID NO: 68981 - protein, 19 aa, unidentified
  source 1..19: note = methanogen bacteria
DPLMGIVHSINHSTGLNIS

SEQ ID NO: 68982 - protein, 10 aa, unidentified
  source 1..10: note = methanogen bacteria
TGAVAGGVPI

SEQ ID NO: 68983 - protein, 39 aa, unidentified
  source 1..39: note = methanogen bacteria
STGIMVPEAFAKGAITVANTKALGGATFMAAGKSTASLT

SEQ ID NO: 68984 - protein, 14 aa, unidentified
  source 1..14: note = methanogen bacteria
MDLATTIMSLPTNI

SEQ ID NO: 68985 - protein, 20 aa, unidentified
  source 1..20: note = methanogen bacteria
PSIINEFGQFITTPIITNIP

SEQ ID NO: 68986 - protein, 21 aa, unidentified
  source 1..21: note = methanogen bacteria
PMILPEIGQYLITPIVTDVNN

SEQ ID NO: 68987 - protein, 30 aa, unidentified
  source 1..30: note = methanogen bacteria
MSDINLDLFYFFNTSIKNPIFDFIMPRITD

SEQ ID NO: 68988 - protein, 29 aa, unidentified
  source 1..29: note = methanogen bacteria
INEPRPFITLDNVNLLIDIEGSYSFPSGH

SEQ ID NO: 68989 - protein, 48 aa, unidentified
  source 1..48: note = methanogen bacteria
VLSDLPSVTPTASNLNKLYVLNKSSTDSDFWYQSWVAVNDGGYKWVRD

SEQ ID NO: 68990 - protein, 21 aa, unidentified
  source 1..21: note = methanogen bacteria
APDILSEVGQYIITPMITNVT

SEQ ID NO: 68991 - protein, 21 aa, unidentified
  source 1..21: note = methanogen bacteria
PWILPEVNPFLITPIITDVNS

SEQ ID NO: 68992 - protein, 28 aa, unidentified
  source 1..28: note = methanogen bacteria
MNINEALFIYINQFMQNQTLDVIMPTVT

SEQ ID NO: 68993 - protein, 31 aa, unidentified
  source 1..31: note = methanogen bacteria
LVHEPRPFMALENVRLLVPEDDPNSFPSGHA

SEQ ID NO: 68994 - protein, 22 aa, unidentified
  source 1..22: note = methanogen bacteria
GPELMQTFGQYIITPIATDLHS

SEQ ID NO: 68995 - protein, 15 aa, unidentified
  source 1..15: note = methanogen bacteria
IPMAADGSWQALFEI

SEQ ID NO: 68996 - protein, 15 aa, unidentified
  source 1..15: note = methanogen bacteria
ISQPAEPTLSAIWAL

SEQ ID NO: 68997 - protein, 20 aa, unidentified
  source 1..20: note = methanogen bacteria
LDIISAFGPYIVTPIPMGVI

SEQ ID NO: 68998 - protein, 21 aa, unidentified
  source 1..21: note = methanogen bacteria
PMILPYIGNSIIVPTVTSVTN

SEQ ID NO: 68999 - protein, 22 aa, unidentified
  source 1..22: note = methanogen bacteria
GPEIMAQFGEYITTPIAVGVTN

SEQ ID NO: 69000 - protein, 21 aa, unidentified
  source 1..21: note = methanogen bacteria
PMILPYIGNSLIVPTVTSIPN

SEQ ID NO: 69001 - protein, 22 aa, unidentified
  source 1..22: note = methanogen bacteria
GPDLLSLFGEYILTPIPVGVIN

SEQ ID NO: 69002 - protein, 13 aa, unidentified
  source 1..13: note = methanogen bacteria
LNGIEEEFGAGKL

SEQ ID NO: 69003 - protein, 14 aa, unidentified
  source 1..14: note = methanogen bacteria
IPLASNGTWQALLD

SEQ ID NO: 69004 - protein, 17 aa, unidentified
  source 1..17: note = methanogen bacteria
LPYIGSTLAPVVTSTYN

SEQ ID NO: 69005 - protein, 12 aa, unidentified
  source 1..12: note = methanogen bacteria
ICRIHNRFLLIS

SEQ ID NO: 69006 - protein, 20 aa, unidentified
  source 1..20: note = methanogen bacteria
EMFGIVSPGTVDTEAMTSMT

SEQ ID NO: 69007 - protein, 32 aa, unidentified
  source 1..32: note = methanogen bacteria
YGPSYNGFDDFYFVIVTLTTVGYGDVTPITYN

SEQ ID NO: 69008 - protein, 15 aa, unidentified
  source 1..15: note = methanogen bacteria
IPLAASGSWEALFEI

SEQ ID NO: 69009 - protein, 14 aa, unidentified
  source 1..14: note = methanogen bacteria
IPMASNGSWEALFE

SEQ ID NO: 69010 - protein, 10 aa, unidentified
  source 1..10: note = methanogen bacteria
AGMVAAGLPI

SEQ ID NO: 69011 - protein, 26 aa, unidentified
  source 1..26: note = methanogen bacteria
GGIITSDPAIQAGAIKVATGKVGMSF

SEQ ID NO: 69012 - protein, 24 aa, unidentified
  source 1..24: note = methanogen bacteria
MINVDLFYFINHNLQNPVFDVIMP

SEQ ID NO: 69013 - protein, 31 aa, unidentified
  source 1..31: note = methanogen bacteria
TFTQPRPYLLVDGVRVLVAEADPNAFPSGHT

SEQ ID NO: 69014 - protein, 12 aa, unidentified
  source 1..12: note = methanogen bacteria
MTFVPPSWWMLG

SEQ ID NO: 69015 - protein, 32 aa, unidentified
  source 1..32: note = methanogen bacteria
GTSYSLFDDFYFVIVTLTTVGYGQSQLPFHHS

SEQ ID NO: 69016 - protein, 28 aa, unidentified
  source 1..28: note = methanogen bacteria
TDVVRIPQDALRTMEMTANDTMIIGGEE

SEQ ID NO: 69017 - protein, 37 aa, unidentified
  source 1..37: note = methanogen bacteria
FMRDIPTSFISANQMPSLEHIFGTDWMGRDMFQRTIA

SEQ ID NO: 69018 - protein, 42 aa, unidentified
  source 1..42: note = methanogen bacteria
MDIYNHNASVSIISIGDSPNVIDHFPMAAWKQKAITAAILTG

SEQ ID NO: 69019 - protein, 24 aa, unidentified
  source 1..24: note = methanogen bacteria
DAIIYSTDNQDYSQFMNRVRDGVV

SEQ ID NO: 69020 - protein, 33 aa, unidentified
  source 1..33: note = methanogen bacteria
HNVINYKPSEFKSNEFDPTNIKPGEYNPSDFLN

SEQ ID NO: 69021 - protein, 15 aa, unidentified
  source 1..15: note = methanogen bacteria
IPLASTGSWQALLDI

SEQ ID NO: 69022 - protein, 29 aa, unidentified
  source 1..29: note = methanogen bacteria
MDINEALFIYINQHLQNPTLDMIMSGITD

SEQ ID NO: 69023 - protein, 32 aa, unidentified
  source 1..32: note = methanogen bacteria
NYVHEPRPFMALKNVHLIIAENDPNSFPSGHA

SEQ ID NO: 69024 - protein, 20 aa, unidentified
  source 1..20: note = methanogen bacteria
ANPGFYEALAAIAAVKFEKT

SEQ ID NO: 69025 - protein, 24 aa, unidentified
  source 1..24: note = methanogen bacteria
MINEDLFYFINHNLQNSVFDVIMP

SEQ ID NO: 69026 - protein, 30 aa, unidentified
  source 1..30: note = methanogen bacteria
FTQPRPFILLNNVRVLVTELDPNSFPSGHT

SEQ ID NO: 69027 - protein, 10 aa, unidentified
  source 1..10: note = methanogen bacteria
KLYNQTGITL

SEQ ID NO: 69028 - protein, 24 aa, unidentified
  source 1..24: note = methanogen bacteria
MSINEIFFYYINNNLQNPIFDAIL

SEQ ID NO: 69029 - protein, 30 aa, unidentified
  source 1..30: note = methanogen bacteria
VQEPRPYMVLDNVRLLIFEDDVFAFPSGHA

SEQ ID NO: 69030 - protein, 14 aa, unidentified
  source 1..14: note = methanogen bacteria
IPLASNGSWQALLD

SEQ ID NO: 69031 - protein, 15 aa, unidentified
  source 1..15: note = methanogen bacteria
IPLASTGSWQALLDI

SEQ ID NO: 69032 - protein, 23 aa, unidentified
  source 1..23: note = methanogen bacteria
YGLGDYFFNISAIQITMVSGYIP

SEQ ID NO: 69033 - protein, 14 aa, unidentified
  source 1..14: note = methanogen bacteria
IPLASNGSWQALLD

SEQ ID NO: 69034 - protein, 10 aa, unidentified
  source 1..10: note = methanogen bacteria
QSFHSLISDY

SEQ ID NO: 69035 - protein, 20 aa, unidentified
  source 1..20: note = methanogen bacteria
IATYYFNLSASQITLISGNI

SEQ ID NO: 69036 - protein, 21 aa, unidentified
  source 1..21: note = methanogen bacteria
PSILSAIGPYIITPIITDVHS

SEQ ID NO: 69037 - protein, 19 aa, unidentified
  source 1..19: note = methanogen bacteria
ILPEIGQYIITPIVTDIPN

SEQ ID NO: 69038 - protein, 17 aa, unidentified
  source 1..17: note = methanogen bacteria
VKGFNYSLNPVYDFVFG

SEQ ID NO: 69039 - protein, 23 aa, unidentified
  source 1..23: note = methanogen bacteria
LGTLLGRWDVFPISGGLFLFCVD

SEQ ID NO: 69040 - protein, 21 aa, unidentified
  source 1..21: note = methanogen bacteria
PSILSAIGPYIITPIITDVNS

SEQ ID NO: 69041 - protein, 15 aa, unidentified
  source 1..15: note = methanogen bacteria
IPLASTGSWEALFEL

SEQ ID NO: 69042 - protein, 42 aa, unidentified
  source 1..42: note = methanogen bacteria
LEAGSLLDMVKEELMNQEYEGQTMWEYILSQGVTEQDLKDSF

SEQ ID NO: 69043 - protein, 21 aa, unidentified
  source 1..21: note = methanogen bacteria
PYIISNFGEFITTPIITNVPE

SEQ ID NO: 69044 - protein, 29 aa, unidentified
  source 1..29: note = methanogen bacteria
MSNIQIDLLYFINNGLQNPILDKIVPIIY

SEQ ID NO: 69045 - protein, 30 aa, unidentified
  source 1..30: note = methanogen bacteria
FYPSPRPFIALEGIRLTVHDNGFYSFPSGH

SEQ ID NO: 69046 - protein, 42 aa, unidentified
  source 1..42: note = methanogen bacteria
GTGGIYPIQLMGPLLQAISPYMPMTHGITLLRESALGLIWSN

SEQ ID NO: 69047 - protein, 75 aa, unidentified
  source 1..75: note = methanogen bacteria
VGFGESDLPNDGEVQYMNVTNNITAYENSSYDLQDENGTQISYYDFDENVTEGQNITAFNVSSSANIYWFLRISL

SEQ ID NO: 69048 - protein, 22 aa, unidentified
  source 1..22: note = methanogen bacteria
GPAIMAEIGQYIMTPIITDIHS

SEQ ID NO: 69049 - protein, 30 aa, unidentified
  source 1..30: note = methanogen bacteria
IGNDDEDSKDSTDFAGKELEVADNLDNGIV

SEQ ID NO: 69050 - protein, 20 aa, unidentified
  source 1..20: note = methanogen bacteria
AGRIVLDGAPAAVTDADLAR

SEQ ID NO: 69051 - protein, 10 aa, unidentified
  source 1..10: note = methanogen bacteria
YGGAESGAAP

SEQ ID NO: 69052 - protein, 16 aa, unidentified
  source 1..16: note = methanogen bacteria
NAGTDRLVDHVVSGEN

SEQ ID NO: 69053 - protein, 21 aa, unidentified
  source 1..21: note = methanogen bacteria
PFILPEIGSYLITPIVTDVSN

SEQ ID NO: 69054 - protein, 29 aa, unidentified
  source 1..29: note = methanogen bacteria
LECWQKLLDFEYCSFLYCFYHFLLNFVQV

SEQ ID NO: 69055 - protein, 16 aa, unidentified
  source 1..16: note = methanogen bacteria
SSRSDKIVDNVISGES

SEQ ID NO: 69056 - protein, 13 aa, unidentified
  source 1..13: note = methanogen bacteria
GTLTGDFAVLAET

SEQ ID NO: 69057 - protein, 20 aa, unidentified
  source 1..20: note = methanogen bacteria
GGKTVYDYIQEYTKVIAMLI

SEQ ID NO: 69058 - protein, 14 aa, unidentified
  source 1..14: note = methanogen bacteria
VDLGHTVSVVATLD

SEQ ID NO: 69059 - protein, 18 aa, unidentified
  source 1..18: note = methanogen bacteria
YYSNTRNLTMNYCLKTTP

SEQ ID NO: 69060 - protein, 12 aa, unidentified
  source 1..12: note = methanogen bacteria
TLTGDLAVLGET

SEQ ID NO: 69061 - protein, 20 aa, unidentified
  source 1..20: note = methanogen bacteria
GGKTVYDYIQEYTKVIAMLI

SEQ ID NO: 69062 - protein, 25 aa, unidentified
  source 1..25: note = methanogen bacteria
MMNSIYGILDMIFAPFISLDPNPNN

SEQ ID NO: 69063 - protein, 40 aa, unidentified
  source 1..40: note = methanogen bacteria
QEPHIAQTVVMLPKIAYYCLLVPLWHMLYQPLPSTPTGAI

SEQ ID NO: 69064 - protein, 20 aa, unidentified
  source 1..20: note = methanogen bacteria
PFILPSIGPYLITPIVTDVS

SEQ ID NO: 69065 - protein, 30 aa, unidentified
  source 1..30: note = methanogen bacteria
MFGNVNVDLFYFFNHNFQNPIFDAVMPIVT

SEQ ID NO: 69066 - protein, 29 aa, unidentified
  source 1..29: note = methanogen bacteria
IMEPRPFVTLDNVRLLIVETDPLSFPSGH

SEQ ID NO: 69067 - protein, 13 aa, unidentified
  source 1..13: note = methanogen bacteria
YGIISYSPDFQIT

SEQ ID NO: 69068 - protein, 14 aa, unidentified
  source 1..14: note = methanogen bacteria
SFNPLGEQSTFNFS

SEQ ID NO: 69069 - protein, 22 aa, unidentified
  source 1..22: note = methanogen bacteria
NAIYGWNFIMQIATGGYEVLNT

SEQ ID NO: 69070 - protein, 12 aa, unidentified
  source 1..12: note = methanogen bacteria
FRGSKGTNHFTI

SEQ ID NO: 69071 - protein, 11 aa, unidentified
  source 1..11: note = methanogen bacteria
MTAFVPPTWFE

SEQ ID NO: 69072 - protein, 12 aa, unidentified
  source 1..12: note = methanogen bacteria
LSGIEDGLAGSA

SEQ ID NO: 69073 - protein, 15 aa, unidentified
  source 1..15: note = methanogen bacteria
LPQLEQPSLAAIWKL

SEQ ID NO: 69074 - protein, 27 aa, unidentified
  source 1..27: note = methanogen bacteria
MFSEINVDLFYFFNHNFQNPIFDAIMP

SEQ ID NO: 69075 - protein, 29 aa, unidentified
  source 1..29: note = methanogen bacteria
ICEPRPFVTLDNVRLLITETDPLSFPSGH

SEQ ID NO: 69076 - protein, 30 aa, unidentified
  source 1..30: note = methanogen bacteria
MFANVNVDLFYFFNHNFQNPIFDAIMPVVT

SEQ ID NO: 69077 - protein, 29 aa, unidentified
  source 1..29: note = methanogen bacteria
IREPRPFLTLDNVHLLITENDPLSFPSGH

SEQ ID NO: 69078 - protein, 14 aa, unidentified
  source 1..14: note = methanogen bacteria
IPMAATGSWESLFQ

SEQ ID NO: 69079 - protein, 10 aa, unidentified
  source 1..10: note = methanogen bacteria
VSTISDFIQS

SEQ ID NO: 69080 - protein, 15 aa, unidentified
  source 1..15: note = methanogen bacteria
LPQPETASIAALWTI

SEQ ID NO: 69081 - protein, 14 aa, unidentified
  source 1..14: note = methanogen bacteria
FGIIGYSASFQITG

SEQ ID NO: 69082 - protein, 13 aa, unidentified
  source 1..13: note = methanogen bacteria
LAPLNSVYASWVG

SEQ ID NO: 69083 - protein, 10 aa, unidentified
  source 1..10: note = methanogen bacteria
SFLLTFLSPE

SEQ ID NO: 69084 - protein, 11 aa, unidentified
  source 1..11: note = methanogen bacteria
FQTPTDLHREP

SEQ ID NO: 69085 - protein, 15 aa, unidentified
  source 1..15: note = methanogen bacteria
GAALTGVKEQNADLL

SEQ ID NO: 69086 - protein, 24 aa, unidentified
  source 1..24: note = methanogen bacteria
MEEIDILYDLHDALGGGMMDSFSL

SEQ ID NO: 69087 - protein, 29 aa, unidentified
  source 1..29: note = methanogen bacteria
GVGRVRPVTEYDIDALIVSYNTSSFPSGH

SEQ ID NO: 69088 - protein, 25 aa, unidentified
  source 1..25: note = methanogen bacteria
MSVNVDMFYFFNHNFQNPIFDAVMP

SEQ ID NO: 69089 - protein, 29 aa, unidentified
  source 1..29: note = methanogen bacteria
ICEPRPFVTLDNVHLLIAEDDPLSFPSGH

SEQ ID NO: 69090 - protein, 22 aa, unidentified
  source 1..22: note = methanogen bacteria
SYNYIPGDLYTGVAGGYAAMES

SEQ ID NO: 69091 - protein, 20 aa, unidentified
  source 1..20: note = methanogen bacteria
PNVLGGGYSMMHLIEFTLPP

SEQ ID NO: 69092 - protein, 10 aa, unidentified
  source 1..10: note = methanogen bacteria
ISTISDIITS

SEQ ID NO: 69093 - protein, 28 aa, unidentified
  source 1..28: note = methanogen bacteria
MNINIDLFYIFNHNLQNPLFDSVMPVVT

SEQ ID NO: 69094 - protein, 29 aa, unidentified
  source 1..29: note = methanogen bacteria
VNEPRPFVSLGNVRLLIEEADPLSFPSGH

SEQ ID NO: 69095 - protein, 10 aa, unidentified
  source 1..10: note = methanogen bacteria
DAFSGAIEDY

SEQ ID NO: 69096 - protein, 28 aa, unidentified
  source 1..28: note = methanogen bacteria
MNINVYLFYIFNHNLQNPLFDSVMPVVT

SEQ ID NO: 69097 - protein, 29 aa, unidentified
  source 1..29: note = methanogen bacteria
VNEPRPFVSLDNLRLLIEEADPLSFPSGH

SEQ ID NO: 69098 - protein, 38 aa, unidentified
  source 1..38: note = methanogen bacteria
VESRFGNFENYIHIIDTTLTVESRFGNFENYIHIIDTT

SEQ ID NO: 69099 - protein, 98 aa, unidentified
  source 1..98: note = methanogen bacteria
MFNTSHAKQGTEIKITSDKEQVEGEELSFKLSEQNGTSVSKEIVNVTIKDKKGKVVVDEVVKTNSKGKAKLDLNLKKGKYKVNVAYGGNENYTGTNAT

SEQ ID NO: 69100 - protein, 14 aa, unidentified
  source 1..14: note = methanogen bacteria
SSALSGVKNQNVNL

SEQ ID NO: 69101 - protein, 10 aa, unidentified
  source 1..10: note = methanogen bacteria
FFGPLTTPTQ

SEQ ID NO: 69102 - protein, 20 aa, unidentified
  source 1..20: note = methanogen bacteria
LHGYYPKFIWNVFIGEPSIT

SEQ ID NO: 69103 - protein, 19 aa, unidentified
  source 1..19: note = methanogen bacteria
SYPLWHYFNLDIRNSAFQD

SEQ ID NO: 69104 - protein, 21 aa, unidentified
  source 1..21: note = methanogen bacteria
FRCYSYFSLLNVYGRTILFLK

SEQ ID NO: 69105 - protein, 23 aa, unidentified
  source 1..23: note = methanogen bacteria
TGQLDTTMLTNYTQLFNGNFTRL

SEQ ID NO: 69106 - protein, 52 aa, unidentified
  source 1..52: note = methanogen bacteria
MFMTGQIDINLLLNPFNMTQMNNMSQMNNMSQIYNTQMNMTGSNNLSSLFGF

SEQ ID NO: 69107 - protein, 33 aa, unidentified
  source 1..33: note = methanogen bacteria
GMPVFDSVCNTFSIISTGGMSVKNANMGFYNDD

SEQ ID NO: 69108 - protein, 56 aa, unidentified
  source 1..56: note = methanogen bacteria
VYCSDGYSVCCCFGNYHNRCKHPKLNSYGRMAAVHNIYYNGAYAYRGFYRVYCRCN

SEQ ID NO: 69109 - protein, 15 aa, unidentified
  source 1..15: note = methanogen bacteria
TATGRSPWRSCCSIR

SEQ ID NO: 69110 - protein, 14 aa, unidentified
  source 1..14: note = methanogen bacteria
SETFADRYGVSPSA

SEQ ID NO: 69111 - protein, 14 aa, unidentified
  source 1..14: note = methanogen bacteria
YERRGSPPAALSPP

SEQ ID NO: 69112 - protein, 23 aa, unidentified
  source 1..23: note = methanogen bacteria
AARSIFLQDIVAYQQANGPFLFT

SEQ ID NO: 69113 - protein, 17 aa, unidentified
  source 1..17: note = methanogen bacteria
GVPPTIMSLGFLSNNHV

SEQ ID NO: 69114 - protein, 21 aa, unidentified
  source 1..21: note = methanogen bacteria
GSIDIRIHDGNFLSICSCIYK

SEQ ID NO: 69115 - protein, 13 aa, unidentified
  source 1..13: note = methanogen bacteria
LVSQFLIKEGVPV

SEQ ID NO: 69116 - protein, 55 aa, unidentified
  source 1..55: note = methanogen bacteria
NTTGKPICDLGIVKIVNSTNCNIGDLVEWNITIMNHGPSAASNVIVKDVLRRHFH

SEQ ID NO: 69117 - protein, 15 aa, unidentified
  source 1..15: note = methanogen bacteria
AFSIFSITGMENEIF

SEQ ID NO: 69118 - protein, 10 aa, unidentified
  source 1..10: note = methanogen bacteria
AGLIEYTPNT

SEQ ID NO: 69119 - protein, 12 aa, unidentified
  source 1..12: note = methanogen bacteria
YLPAYIPNFNWQ

SEQ ID NO: 69120 - protein, 12 aa, unidentified
  source 1..12: note = methanogen bacteria
KLPSVTGSCSHP

SEQ ID NO: 69121 - protein, 21 aa, unidentified
  source 1..21: note = methanogen bacteria
LAFPAPDFVGQIKSLQTKIIR

SEQ ID NO: 69122 - protein, 46 aa, unidentified
  source 1..46: note = methanogen bacteria
SGNFIPIYLVKGSVVPTTTIIPYGPISITYPLFLNFINSTLVVCEN

SEQ ID NO: 69123 - protein, 24 aa, unidentified
  source 1..24: note = methanogen bacteria
HVSPDNPFIFSWSIEFMPVRIGYF

SEQ ID NO: 69124 - protein, 60 aa, unidentified
  source 1..60: note = methanogen bacteria
WTIVVVNHGPSAAKDVKVYDILPDGLKLVKVNPSVGTYTDGIWTIGDLSVNNTVSLILLK

SEQ ID NO: 69125 - protein, 21 aa, unidentified
  source 1..21: note = methanogen bacteria
PYILSNFGQFITTPIITNVSE

SEQ ID NO: 69126 - protein, 35 aa, unidentified
  source 1..35: note = methanogen bacteria
LSDSNADTVMDALDDAGYLDNGEYMGFGRDDFRNI

SEQ ID NO: 69127 - protein, 73 aa, unidentified
  source 1..73: note = methanogen bacteria
FTDISDSRFIKNKSESGGSIDNYLGWINVKATRFKRNHVKKYGGAIFNGGMLNSLDDCIFEKNLAPLKGGAIY

SEQ ID NO: 69128 - protein, 17 aa, unidentified
  source 1..17: note = methanogen bacteria
GAENDEYGSDLSQCVFS

SEQ ID NO: 69129 - protein, 20 aa, unidentified
  source 1..20: note = methanogen bacteria
TEDGAAIFNNGKLILNECEF

SEQ ID NO: 69130 - protein, 17 aa, unidentified
  source 1..17: note = methanogen bacteria
LSNFGQFITTPIITNVS

SEQ ID NO: 69131 - protein, 11 aa, unidentified
  source 1..11: note = methanogen bacteria
TEYATAMGSTA

SEQ ID NO: 69132 - protein, 28 aa, unidentified
  source 1..28: note = methanogen bacteria
SEDFYMIHLDLQDVLQQQQSFQHWHLYS

SEQ ID NO: 69133 - protein, 35 aa, unidentified
  source 1..35: note = methanogen bacteria
LSESSADTMIDALEDAGLWENGEYMGLDRNDFVNI

SEQ ID NO: 69134 - protein, 67 aa, unidentified
  source 1..67: note = methanogen bacteria
LSPIDPVKAYLGQRIVSQEQLAIMGEYWGTNLTLGERVLGWLQTLASGSMGFSLIYRAPVTEVIAQK

SEQ ID NO: 69135 - protein, 18 aa, unidentified
  source 1..18: note = methanogen bacteria
CNNIKYCRNRFSYNVYAR

SEQ ID NO: 69136 - protein, 56 aa, unidentified
  source 1..56: note = methanogen bacteria
ATAGIADAVDIYVPDANQTQFEVGTGNYLEKLGNLNESSILSQDVKAKITNIILTD

SEQ ID NO: 69137 - protein, 27 aa, unidentified
  source 1..27: note = methanogen bacteria
LLTDYMPTTNITVETSAGSMMFNLVMG

SEQ ID NO: 69138 - protein, 21 aa, unidentified
  source 1..21: note = methanogen bacteria
MDLLTFINNGMQNPILDLVVP

SEQ ID NO: 69139 - protein, 31 aa, unidentified
  source 1..31: note = methanogen bacteria
YHVSPRPYSVLSNIRLVVPDNGLNSFPSGHM

SEQ ID NO: 69140 - protein, 10 aa, unidentified
  source 1..10: note = methanogen bacteria
MAFGLEGISL

SEQ ID NO: 69141 - protein, 22 aa, unidentified
  source 1..22: note = methanogen bacteria
MVSTIPGSEVLTSTLNMISQSL

SEQ ID NO: 69142 - protein, 17 aa, unidentified
  source 1..17: note = methanogen bacteria
PGLAALGAGDVNTLANA

SEQ ID NO: 69143 - protein, 28 aa, unidentified
  source 1..28: note = methanogen bacteria
MTDFFGMVLDVLNAIFNPILALDPNPQN

SEQ ID NO: 69144 - protein, 31 aa, unidentified
  source 1..31: note = methanogen bacteria
ASSISHLVLILPAPAYWLTLTPFWHFIGPSI

SEQ ID NO: 69145 - protein, 49 aa, unidentified
  source 1..49: note = methanogen bacteria
VDTYFSLPEQPGVKGAEIIGYSIKDRGGDLSGGFFQGNILCSPDASAGT

SEQ ID NO: 69146 - protein, 27 aa, unidentified
  source 1..27: note = methanogen bacteria
ANGTINMDTITHIGQMEYNNLTSLFRR

SEQ ID NO: 69147 - protein, 19 aa, unidentified
  source 1..19: note = methanogen bacteria
ALPGTQLLSEGEFITFLHS

SEQ ID NO: 69148 - protein, 25 aa, unidentified
  source 1..25: note = methanogen bacteria
MDILTFVNNEMQQPFFDAIVPIIYT

SEQ ID NO: 69149 - protein, 30 aa, unidentified
  source 1..30: note = methanogen bacteria
SYISPRPYLTLSNIRLVVRDNGLNSFPSGH

SEQ ID NO: 69150 - protein, 27 aa, unidentified
  source 1..27: note = methanogen bacteria
SAAVWDGGKDILSDILEFDTDSASSVR

SEQ ID NO: 69151 - protein, 99 aa, unidentified
  source 1..99: note = methanogen bacteria
LTGSNTKGTTNNLVEFNDNGLSFKHPKNWEVINGSDAEHIDAKFFRGGNNTTIEIYNVTAGSTSLKDITQQRITYAQGNGAYVTVVEPITIDGRNSSNV

SEQ ID NO: 69152 - protein, 23 aa, unidentified
  source 1..23: note = methanogen bacteria
TSSHKPDSLQAISHGLGLNPFEN

SEQ ID NO: 69153 - protein, 21 aa, unidentified
  source 1..21: note = methanogen bacteria
LRADALIKTFVNGYSFTNNFT

SEQ ID NO: 69154 - protein, 13 aa, unidentified
  source 1..13: note = methanogen bacteria
TGFTTGSFLPNSN

SEQ ID NO: 69155 - protein, 21 aa, unidentified
  source 1..21: note = methanogen bacteria
MSYLDFLLDPLISLDPTPSNP

SEQ ID NO: 69156 - protein, 37 aa, unidentified
  source 1..37: note = methanogen bacteria
GNHAISHVIINIASSQYYLLFIPIWNIFWTQSNPLTI

SEQ ID NO: 69157 - protein, 10 aa, unidentified
  source 1..10: note = methanogen bacteria
SDYLSGNEWP

SEQ ID NO: 69158 - protein, 23 aa, unidentified
  source 1..23: note = methanogen bacteria
MTSLNDPTWISTGVDTVDIDSSV

SEQ ID NO: 69159 - protein, 10 aa, unidentified
  source 1..10: note = methanogen bacteria
SGLDVLMTQM

SEQ ID NO: 69160 - protein, 89 aa, unidentified
  source 1..89: note = methanogen bacteria
MKGSNIWAFYVTGSGVTFKNLTIKNANSNSNGGAIYFSSSGTVENCNFIGNNATYFGGAIYFSSSGTTHEVRNCNFTGNNATGYGDAVY

SEQ ID NO: 69161 - protein, 10 aa, unidentified
  source 1..10: note = methanogen bacteria
TATRNGGAVY

SEQ ID NO: 69162 - protein, 20 aa, unidentified
  source 1..20: note = methanogen bacteria
NQGNVTNCNFIGNNATYYAG

SEQ ID NO: 69163 - protein, 13 aa, unidentified
  source 1..13: note = methanogen bacteria
VTDLSATISSTIK

SEQ ID NO: 69164 - protein, 19 aa, unidentified
  source 1..19: note = methanogen bacteria
AIPELQITNYSDFITFIST

SEQ ID NO: 69165 - protein, 52 aa, unidentified
  source 1..52: note = methanogen bacteria
ADWASETVTVSSSLLGNATSADSGTGLDVAGKKFFTEIDSNGNTVAVDDWHV

SEQ ID NO: 69166 - protein, 24 aa, unidentified
  source 1..24: note = methanogen bacteria
WDRFGTTEYSILGVKTAYDVSPEL

SEQ ID NO: 69167 - protein, 56 aa, unidentified
  source 1..56: note = methanogen bacteria
LNHYIMHMDEYFTMSITTLPLGDIVNVASWYVHPPLYYILGKVAVTIGAAIGMDSL

SEQ ID NO: 69168 - protein, 13 aa, unidentified
  source 1..13: note = methanogen bacteria
TDLAASIASSIKN

SEQ ID NO: 69169 - protein, 20 aa, unidentified
  source 1..20: note = methanogen bacteria
MQEIDILDWIHGTFGCIPMD

SEQ ID NO: 69170 - protein, 29 aa, unidentified
  source 1..29: note = methanogen bacteria
GFMRNRPLQDYAVDALITSFQTSSFPSGH

SEQ ID NO: 69171 - protein, 52 aa, unidentified
  source 1..52: note = methanogen bacteria
TDWASETVTVSSSLLGSATSTDSGTGLEVAGKEFFTEIDSDGNTVAVDDWHV

SEQ ID NO: 69172 - protein, 24 aa, unidentified
  source 1..24: note = methanogen bacteria
WDGFGTAEYSILGVKTAYDVSPEL

SEQ ID NO: 69173 - protein, 20 aa, unidentified
  source 1..20: note = methanogen bacteria
MQEIDILNWIYDTFRCTFLD

SEQ ID NO: 69174 - protein, 29 aa, unidentified
  source 1..29: note = methanogen bacteria
GFMRHRPFEDYAVHALVNSFHTSSFPSGH

SEQ ID NO: 69175 - protein, 34 aa, unidentified
  source 1..34: note = methanogen bacteria
TWINGLDATGWKLFSDSPDLYVLSGGTMAKAGSF

SEQ ID NO: 69176 - protein, 25 aa, unidentified
  source 1..25: note = methanogen bacteria
WDVLGGTVYMLDGSMFYGTSGCTAG

SEQ ID NO: 69177 - protein, 20 aa, unidentified
  source 1..20: note = methanogen bacteria
DKHDEKVDKLNKKPKTKKQP

SEQ ID NO: 69178 - protein, 12 aa, unidentified
  source 1..12: note = methanogen bacteria
DKDPYNLKERYY

SEQ ID NO: 69179 - protein, 12 aa, unidentified
  source 1..12: note = methanogen bacteria
AITNPTMAGNIN

SEQ ID NO: 69180 - protein, 23 aa, unidentified
  source 1..23: note = methanogen bacteria
NLLSGAIQNDISNPVQNLIYSTD

SEQ ID NO: 69181 - protein, 11 aa, unidentified
  source 1..11: note = methanogen bacteria
DLAPLAFLTAY

SEQ ID NO: 69182 - protein, 63 aa, unidentified
  source 1..63: note = methanogen bacteria
MQITVDHGFVGDEIINGSEWDMHRYAPDGNQINYELGIVYLTNWLHDVANSFFGGNYSIKEIA

SEQ ID NO: 69183 - protein, 13 aa, unidentified
  source 1..13: note = methanogen bacteria
FHCISNCMLCLRR

SEQ ID NO: 69184 - protein, 10 aa, unidentified
  source 1..10: note = methanogen bacteria
AGLGADALAG

SEQ ID NO: 69185 - protein, 16 aa, unidentified
  source 1..16: note = methanogen bacteria
ILIAMGVGGTIGYALE

SEQ ID NO: 69186 - protein, 20 aa, unidentified
  source 1..20: note = methanogen bacteria
MSYLDFLLDPLISMDPTPSN

SEQ ID NO: 69187 - protein, 37 aa, unidentified
  source 1..37: note = methanogen bacteria
GNHAISHVIINITSSQYFLLLIPIWNIFWTQSNPLTI

SEQ ID NO: 69188 - protein, 12 aa, unidentified
  source 1..12: note = methanogen bacteria
SPYISLEPNLTI

SEQ ID NO: 69189 - protein, 33 aa, unidentified
  source 1..33: note = methanogen bacteria
ITGIGIEDSLFESMSALTGSGITIYQDVEILPQ

SEQ ID NO: 69190 - protein, 41 aa, unidentified
  source 1..41: note = methanogen bacteria
GMPIFDSVCNTFTIISTGGMSIKNANIGFYQTKTISFTLLQ

SEQ ID NO: 69191 - protein, 12 aa, unidentified
  source 1..12: note = methanogen bacteria
GYMVSVNKINPS

SEQ ID NO: 69192 - protein, 10 aa, unidentified
  source 1..10: note = methanogen bacteria
VMGFLPIQED

SEQ ID NO: 69193 - protein, 12 aa, unidentified
  source 1..12: note = methanogen bacteria
FNVGYGPDRLVD

SEQ ID NO: 69194 - protein, 13 aa, unidentified
  source 1..13: note = methanogen bacteria
YLMSGAEIDVAGL

SEQ ID NO: 69195 - protein, 29 aa, unidentified
  source 1..29: note = methanogen bacteria
PYLYSYFHPVVDELSQKVQTGTIKLTFAD

SEQ ID NO: 69196 - protein, 12 aa, unidentified
  source 1..12: note = methanogen bacteria
YYVAIQDDLIRV

SEQ ID NO: 69197 - protein, 13 aa, unidentified
  source 1..13: note = methanogen bacteria
GGMIGNYVPSETG

SEQ ID NO: 69198 - protein, 12 aa, unidentified
  source 1..12: note = methanogen bacteria
LERTLDAGHSLH

SEQ ID NO: 69199 - protein, 12 aa, unidentified
  source 1..12: note = methanogen bacteria
SVTNPEYLHDIN

SEQ ID NO: 69200 - protein, 21 aa, unidentified
  source 1..21: note = methanogen bacteria
LSGAIQNDIANPVQELINSAN

SEQ ID NO: 69201 - protein, 10 aa, unidentified
  source 1..10: note = methanogen bacteria
LIIAAKPGST

SEQ ID NO: 69202 - protein, 24 aa, unidentified
  source 1..24: note = methanogen bacteria
TKNIVIDGKGHTIYPGYNPVFDFK

SEQ ID NO: 69203 - protein, 17 aa, unidentified
  source 1..17: note = methanogen bacteria
IEIKNIIFVRGMGSAIH

SEQ ID NO: 69204 - protein, 13 aa, unidentified
  source 1..13: note = methanogen bacteria
ISNCRFINCSSQI

SEQ ID NO: 69205 - protein, 12 aa, unidentified
  source 1..12: note = methanogen bacteria
GYLGAYKATETS

SEQ ID NO: 69206 - protein, 13 aa, unidentified
  source 1..13: note = methanogen bacteria
VPAIAQDFAMNNV

SEQ ID NO: 69207 - protein, 11 aa, unidentified
  source 1..11: note = methanogen bacteria
FLGAYTPTEMG

SEQ ID NO: 69208 - protein, 17 aa, unidentified
  source 1..17: note = methanogen bacteria
CIPFFNIFFKSHIIGNE

SEQ ID NO: 69209 - protein, 13 aa, unidentified
  source 1..13: note = methanogen bacteria
FNSMFDGISHVKI

SEQ ID NO: 69210 - protein, 14 aa, unidentified
  source 1..14: note = methanogen bacteria
SSLDIQQVSTFVMN

SEQ ID NO: 69211 - protein, 20 aa, unidentified
  source 1..20: note = methanogen bacteria
EMFGIVSPGTVDTEAMTSMT

SEQ ID NO: 69212 - protein, 43 aa, unidentified
  source 1..43: note = methanogen bacteria
AFTTYNDQDMNELGTNLFHWNGLKNFMAVFTGEGSLGVEIKNR

SEQ ID NO: 69213 - protein, 10 aa, unidentified
  source 1..10: note = methanogen bacteria
YSVDALSFIV

SEQ ID NO: 69214 - protein, 12 aa, unidentified
  source 1..12: note = methanogen bacteria
GYLGPYGAGETA

SEQ ID NO: 69215 - protein, 34 aa, unidentified
  source 1..34: note = methanogen bacteria
TGSFLYNIGGNLYGVVPQAIATIFSYPDVTHAGI

SEQ ID NO: 69216 - protein, 18 aa, unidentified
  source 1..18: note = methanogen bacteria
KAEVQEFEEKIRRDGGMV

SEQ ID NO: 69217 - protein, 18 aa, unidentified
  source 1..18: note = methanogen bacteria
QNLTDIMAYASAIDTLFR

SEQ ID NO: 69218 - protein, 23 aa, unidentified
  source 1..23: note = methanogen bacteria
ADPEDKLPEIVYWLMGSLASVTM

SEQ ID NO: 69219 - protein, 11 aa, unidentified
  source 1..11: note = methanogen bacteria
DYLVDMGESMA

SEQ ID NO: 69220 - protein, 76 aa, unidentified
  source 1..76: note = methanogen bacteria
IMGSDKWVNTTIDKIHADPISQGFIMSADKLEDIDLNYTPTSIVTEKHVNESYDGVKAANSMSGMTGSWDELTESM

SEQ ID NO: 69221 - protein, 16 aa, unidentified
  source 1..16: note = methanogen bacteria
MWESSGDSFYILPSIS

SEQ ID NO: 69222 - protein, 15 aa, unidentified
  source 1..15: note = methanogen bacteria
GFALFSVTGAPESVF

SEQ ID NO: 69223 - protein, 20 aa, unidentified
  source 1..20: note = methanogen bacteria
IFGQNMISSIVFGGYEVMNT

SEQ ID NO: 69224 - protein, 11 aa, unidentified
  source 1..11: note = methanogen bacteria
TVGIKGTNHFS

SEQ ID NO: 69225 - protein, 21 aa, unidentified
  source 1..21: note = methanogen bacteria
PTLLAMFGNLIITPIPVGVPN

SEQ ID NO: 69226 - protein, 12 aa, unidentified
  source 1..12: note = methanogen bacteria
YEILNSGWSLSS

SEQ ID NO: 69227 - protein, 26 aa, unidentified
  source 1..26: note = methanogen bacteria
CVDFGTPVLNIFIGYFIGTTTEYTAF

SEQ ID NO: 69228 - protein, 11 aa, unidentified
  source 1..11: note = methanogen bacteria
TLWGKELFSGR

SEQ ID NO: 69229 - protein, 27 aa, unidentified
  source 1..27: note = methanogen bacteria
SQPQLAAIYSASPSVAVNDMASVLVGP

SEQ ID NO: 69230 - protein, 27 aa, unidentified
  source 1..27: note = methanogen bacteria
APEGLRLPSMIANILNYCNSNYNDNIL

SEQ ID NO: 69231 - protein, 25 aa, unidentified
  source 1..25: note = methanogen bacteria
TGNIPTEAIVNYRQILMGNFSSIHG

SEQ ID NO: 69232 - protein, 10 aa, unidentified
  source 1..10: note = methanogen bacteria
SFNPQSNINI

SEQ ID NO: 69233 - protein, 25 aa, unidentified
  source 1..25: note = methanogen bacteria
LLIIVIDIKNYNVFKNFSFPFFQKI

SEQ ID NO: 69234 - protein, 24 aa, unidentified
  source 1..24: note = methanogen bacteria
FLINYMPSIEIPISVSQTTVATDL

SEQ ID NO: 69235 - protein, 25 aa, unidentified
  source 1..25: note = methanogen bacteria
TGNIPADALTQYRQLLSGNLTSINR

SEQ ID NO: 69236 - protein, 11 aa, unidentified
  source 1..11: note = methanogen bacteria
YGPAHHDATMQ

SEQ ID NO: 69237 - protein, 16 aa, unidentified
  source 1..16: note = methanogen bacteria
MTMGAENIIRMIIGIK

SEQ ID NO: 69238 - protein, 25 aa, unidentified
  source 1..25: note = methanogen bacteria
TGTISTDNLMQYSQMNLTNLTNRTL

SEQ ID NO: 69239 - protein, 25 aa, unidentified
  source 1..25: note = methanogen bacteria
TGNIPGDIIAQYRQILSGNITSLRL

SEQ ID NO: 69240 - protein, 25 aa, unidentified
  source 1..25: note = methanogen bacteria
TGNIPADALTQYRQMMSGNLTSLQR

SEQ ID NO: 69241 - protein, 15 aa, unidentified
  source 1..15: note = methanogen bacteria
SVNIDGCRSQFIVAS

SEQ ID NO: 69242 - protein, 10 aa, unidentified
  source 1..10: note = methanogen bacteria
DMAGVLQDLN

SEQ ID NO: 69243 - protein, 24 aa, unidentified
  source 1..24: note = methanogen bacteria
GNFPKDILTNYRQLFAGNFTQFQR

SEQ ID NO: 69244 - protein, 47 aa, unidentified
  source 1..47: note = methanogen bacteria
DTYFGLPEQPGVRGASIVGKDIEKRGGDIAGGFFQGNVLCSPDASAG

SEQ ID NO: 69245 - protein, 27 aa, unidentified
  source 1..27: note = methanogen bacteria
TFNDTLVNTYLEYTISTLGIPNSDSPY

SEQ ID NO: 69246 - protein, 25 aa, unidentified
  source 1..25: note = methanogen bacteria
TGVINTDTLMNYSQMNFANLTNVTL

SEQ ID NO: 69247 - protein, 10 aa, unidentified
  source 1..10: note = methanogen bacteria
FDPAFVSAII

SEQ ID NO: 69248 - protein, 23 aa, unidentified
  source 1..23: note = methanogen bacteria
TGNIPADAISQYKQILSGNFTRI

SEQ ID NO: 69249 - protein, 25 aa, unidentified
  source 1..25: note = methanogen bacteria
DGILNSISKLYDVVFRGSKGTNHFT

SEQ ID NO: 69250 - protein, 10 aa, unidentified
  source 1..10: note = methanogen bacteria
GLHSTSSTLE

SEQ ID NO: 69251 - protein, 15 aa, unidentified
  source 1..15: note = methanogen bacteria
MNIYSFIWNNINDIN

SEQ ID NO: 69252 - protein, 26 aa, unidentified
  source 1..26: note = methanogen bacteria
DILNQFNSFSVLNDFAFNCQALIYPK

SEQ ID NO: 69253 - protein, 27 aa, unidentified
  source 1..27: note = methanogen bacteria
SLFSESTREFLGGFIGSDFTDGTDTEA

SEQ ID NO: 69254 - protein, 25 aa, unidentified
  source 1..25: note = methanogen bacteria
TGSIPPEVLTDYKSLLIGNFTPFHR

SEQ ID NO: 69255 - protein, 23 aa, unidentified
  source 1..23: note = methanogen bacteria
TGNIPPEAIAQYKQVLAGNFSAL

SEQ ID NO: 69256 - protein, 24 aa, unidentified
  source 1..24: note = methanogen bacteria
TGNIPPDAIAQYKQLIAGNGTLRL

SEQ ID NO: 69257 - protein, 14 aa, unidentified
  source 1..14: note = methanogen bacteria
IEIPLTKDVAITIM

SEQ ID NO: 69258 - protein, 10 aa, unidentified
  source 1..10: note = methanogen bacteria
GQSIGLIFDM

SEQ ID NO: 69259 - protein, 23 aa, unidentified
  source 1..23: note = methanogen bacteria
TGHMPADAISQYQQMLGGNFTSI

SEQ ID NO: 69260 - protein, 52 aa, unidentified
  source 1..52: note = methanogen bacteria
ADWASETVTVSSSLLGSATSSDSGTGLDIAGKEFFTEIDSDGNTVAVDDWHV

SEQ ID NO: 69261 - protein, 24 aa, unidentified
  source 1..24: note = methanogen bacteria
WDRFGTADYTILGVKTSYDVSPEL

SEQ ID NO: 69262 - protein, 20 aa, unidentified
  source 1..20: note = methanogen bacteria
AVPTITEISSGAALNDYFIS

SEQ ID NO: 69263 - protein, 23 aa, unidentified
  source 1..23: note = methanogen bacteria
TGNIPADALTQYRQMLSGNITSP

SEQ ID NO: 69264 - protein, 27 aa, unidentified
  source 1..27: note = methanogen bacteria
SLFSDGMREFLGGFIGSDFTDGTDAEA

SEQ ID NO: 69265 - protein, 22 aa, unidentified
  source 1..22: note = methanogen bacteria
LGHENLSLSGFWYYLGLGVFEG

SEQ ID NO: 69266 - protein, 11 aa, unidentified
  source 1..11: note = methanogen bacteria
LFGRGWCGYAC

SEQ ID NO: 69267 - protein, 14 aa, unidentified
  source 1..14: note = methanogen bacteria
YVHYSFLKFLILIQ

SEQ ID NO: 69268 - protein, 23 aa, unidentified
  source 1..23: note = methanogen bacteria
TGNIPADAIAQYKQILSGNFTRI

SEQ ID NO: 69269 - protein, 23 aa, unidentified
  source 1..23: note = methanogen bacteria
TGNIPADAIAQYRQMLSGNFTGI

SEQ ID NO: 69270 - protein, 37 aa, unidentified
  source 1..37: note = methanogen bacteria
VLTGQMDLNVLLNPMNTTQLENLTQNASVNSTNLFGL

SEQ ID NO: 69271 - protein, 25 aa, unidentified
  source 1..25: note = methanogen bacteria
TGAIPPEVITDYKTLLMGNFTPLNR

SEQ ID NO: 69272 - protein, 24 aa, unidentified
  source 1..24: note = methanogen bacteria
GVINQETLIQYSKMNFANLTNPNV

SEQ ID NO: 69273 - protein, 23 aa, unidentified
  source 1..23: note = methanogen bacteria
TGNIPPEVFAQYKQLLAGNLTSI

SEQ ID NO: 69274 - protein, 14 aa, unidentified
  source 1..14: note = methanogen bacteria
LVNPHVPTIQGLIQ

SEQ ID NO: 69275 - protein, 13 aa, unidentified
  source 1..13: note = methanogen bacteria
DGVFREIPPTEQG

SEQ ID NO: 69276 - protein, 23 aa, unidentified
  source 1..23: note = methanogen bacteria
TGNIPIDIMTQYKQILSGNFSSI

SEQ ID NO: 69277 - protein, 11 aa, unidentified
  source 1..11: note = methanogen bacteria
TSIGCTMPEFN

SEQ ID NO: 69278 - protein, 14 aa, unidentified
  source 1..14: note = methanogen bacteria
KVLKRITENKNLVM

SEQ ID NO: 69279 - protein, 37 aa, unidentified; identical to SEQ ID NO: 69270
  source 1..37: note = methanogen bacteria

SEQ ID NO: 69280 - protein, 23 aa, unidentified
  source 1..23: note = methanogen bacteria
TGNIPTDIMAQYKQILAGNFSSI

SEQ ID NO: 69281 - protein, 13 aa, unidentified
  source 1..13: note = methanogen bacteria
LLNLPVYNLVPLG

SEQ ID NO: 69282 - protein, 11 aa, unidentified
  source 1..11: note = methanogen bacteria
GENFSWFRAIQ

SEQ ID NO: 69283 - protein, 12 aa, unidentified
  source 1..12: note = methanogen bacteria
SMVRGALDQYEA

SEQ ID NO: 69284 - protein, 25 aa, unidentified
  source 1..25: note = methanogen bacteria
TGKIPPEIITNYKTLLLGNFTPIQR

SEQ ID NO: 69285 - protein, 11 aa, unidentified
  source 1..11: note = methanogen bacteria
YHFQYVRGWNA

SEQ ID NO: 69286 - protein, 18 aa, unidentified
  source 1..18: note = methanogen bacteria
SSICRHDCTGISNNMCNM

SEQ ID NO: 69287 - protein, 14 aa, unidentified
  source 1..14: note = methanogen bacteria
GIRGIPFITTNPNT

SEQ ID NO: 69288 - protein, 23 aa, unidentified
  source 1..23: note = methanogen bacteria
LRPSNISPALIGQSLLPLSHNGY

SEQ ID NO: 69289 - protein, 12 aa, unidentified
  source 1..12: note = methanogen bacteria
IEFNGFIRSDEM

SEQ ID NO: 69290 - protein, 34 aa, unidentified
  source 1..34: note = methanogen bacteria
TGSYLYNVGGNLYGQVPQAIATLFSYPDLTHAGI

SEQ ID NO: 69291 - protein, 19 aa, unidentified
  source 1..19: note = methanogen bacteria
ASVFGLDAIRSLSGAGLNS

SEQ ID NO: 69292 - protein, 11 aa, unidentified
  source 1..11: note = methanogen bacteria
VNGAKGTYQFS

SEQ ID NO: 69293 - protein, 68 aa, unidentified
  source 1..68: note = methanogen bacteria
MIMGIGSEPDPGEVQYMNVTDNITVYENSSYDLHDENGTQISYYEFDENVTEGQNVTAFNASTATGIY

SEQ ID NO: 69294 - protein, 19 aa, unidentified
  source 1..19: note = methanogen bacteria
FYKNPSPFWPLNAGIASPG

SEQ ID NO: 69295 - protein, 31 aa, unidentified
  source 1..31: note = methanogen bacteria
FFDIPTFGRPLHTDFVSGFIAMCIGVFKDHL

SEQ ID NO: 69296 - protein, 24 aa, unidentified
  source 1..24: note = methanogen bacteria
SMGAIPPEIITQYRQLLAGNFTSL

SEQ ID NO: 69297 - protein, 35 aa, unidentified
  source 1..35: note = methanogen bacteria
AGSFLYNVGADFYNIVPAYVTAIFHYPDVTNAGIV

SEQ ID NO: 69298 - protein, 13 aa, unidentified
  source 1..13: note = methanogen bacteria
GLLGPMVNPIFSP

SEQ ID NO: 69299 - protein, 46 aa, unidentified
  source 1..46: note = methanogen bacteria
LTNTKNKKAVYGAKMNIKVFISKNKYYNYTGTTDANGLVKFKISYK

SEQ ID NO: 69300 - protein, 85 aa, unidentified
  source 1..85: note = methanogen bacteria
KGYSASAITRTIKVSKSPIKMAPTSLKVKKGTYFKVKVTSTKTKKVLSSVKVKVKVYTGKKYKTYTIKTNSKGIASLKISQSVGK

SEQ ID NO: 69301 - protein, 10 aa, unidentified
  source 1..10: note = methanogen bacteria
ALTKTLTVTK

SEQ ID NO: 69302 - protein, 24 aa, unidentified
  source 1..24: note = methanogen bacteria
ATGNLPADALTNYQQLILGNTTLP

SEQ ID NO: 69303 - protein, 35 aa, unidentified
  source 1..35: note = methanogen bacteria
LTGSFLYNVGGNLYGLVPPAMAAIFSYPDVTHAGI

SEQ ID NO: 69304 - protein, 29 aa, unidentified
  source 1..29: note = methanogen bacteria
LNSTAHLYWSLPMTNILDNTLYMSFFYEN

SEQ ID NO: 69305 - protein, 21 aa, unidentified
  source 1..21: note = methanogen bacteria
PVVGGFTWPPFNFSSFYHSPY

SEQ ID NO: 69306 - protein, 26 aa, unidentified
  source 1..26: note = methanogen bacteria
LSGTIPQDVLTQYQQLTDVNLTSLNL

SEQ ID NO: 69307 - protein, 68 aa, unidentified
  source 1..68: note = methanogen bacteria
MIMGVGSEPDPGEVQYMNVTDNITVYENSSYDLHDENGTQISYYEFDENVTSGQNVTAFNASTATGIY

SEQ ID NO: 69308 - protein, 10 aa, unidentified
  source 1..10: note = methanogen bacteria
PYVLYSSGGG

SEQ ID NO: 69309 - protein, 23 aa, unidentified
  source 1..23: note = methanogen bacteria
FFKSWGANPGFYFEHTLMQSSDS

SEQ ID NO: 69310 - protein, 35 aa, unidentified
  source 1..35: note = methanogen bacteria
LTGSFLYNIGGNLYGAVPQAIAAIFSYPDVTHAGI

SEQ ID NO: 69311 - protein, 13 aa, unidentified
  source 1..13: note = methanogen bacteria
KIININFLGMETP

SEQ ID NO: 69312 - protein, 19 aa, unidentified
  source 1..19: note = methanogen bacteria
LPSPANYTGDSALQFVFTQ

SEQ ID NO: 69313 - protein, 13 aa, unidentified
  source 1..13: note = methanogen bacteria
LDGLPFVADNLNT

SEQ ID NO: 69314 - protein, 23 aa, unidentified
  source 1..23: note = methanogen bacteria
LTPGTLKIPTIGASLLPISHDLY

SEQ ID NO: 69315 - protein, 24 aa, unidentified
  source 1..24: note = methanogen bacteria
GIITMDTIKQYSDLKLNNFTNLTL

SEQ ID NO: 69316 - protein, 10 aa, unidentified
  source 1..10: note = methanogen bacteria
NIFNKAPITN

SEQ ID NO: 69317 - protein, 28 aa, unidentified
  source 1..28: note = methanogen bacteria
MTDFFGMVLDVLNAIFNPILALDPNPQN

SEQ ID NO: 69318 - protein, 15 aa, unidentified
  source 1..15: note = methanogen bacteria
SSISHLVLILPAPAY

SEQ ID NO: 69319 - protein, 46 aa, unidentified
  source 1..46: note = methanogen bacteria
ILSGQMDPNIILNPFNTTNMTNMSQIYNSSAMNMTGSSNLSSLFGF

SEQ ID NO: 69320 - protein, 10 aa, unidentified
  source 1..10: note = methanogen bacteria
FNDPYLVTSF

SEQ ID NO: 69321 - protein, 13 aa, unidentified
  source 1..13: note = methanogen bacteria
VPAIAQDFAMNNV

SEQ ID NO: 69322 - protein, 15 aa, unidentified
  source 1..15: note = methanogen bacteria
DFWCITSDGGQCFIL

SEQ ID NO: 69323 - protein, 11 aa, unidentified
  source 1..11: note = methanogen bacteria
EYNDPYLVTSF

SEQ ID NO: 69324 - protein, 11 aa, unidentified
  source 1..11: note = methanogen bacteria
NLFNPIDKYFS

SEQ ID NO: 69325 - protein, 13 aa, unidentified
  source 1..13: note = methanogen bacteria
ISQLILDLNTSLS

SEQ ID NO: 69326 - protein, 10 aa, unidentified
  source 1..10: note = methanogen bacteria
CSNHHHIRFF

SEQ ID NO: 69327 - protein, 10 aa, unidentified
  source 1..10: note = methanogen bacteria
NTFNKTPITN

SEQ ID NO: 69328 - protein, 10 aa, unidentified
  source 1..10: note = methanogen bacteria
DEIISLSNYN

SEQ ID NO: 69329 - protein, 46 aa, unidentified
  source 1..46: note = methanogen bacteria
VDTYLGLPESPGVKGAENVGYSIKKRGGDLSGGFFQGNILCSPDAS

SEQ ID NO: 69330 - protein, 17 aa, unidentified
  source 1..17: note = methanogen bacteria
GMPTSEFIVYYVSQIDL

SEQ ID NO: 69331 - protein, 19 aa, unidentified
  source 1..19: note = methanogen bacteria
ALPQAHLITEGQFITFLNS

SEQ ID NO: 69332 - protein, 11 aa, unidentified
  source 1..11: note = methanogen bacteria
CNIFNFVKIIL

SEQ ID NO: 69333 - protein, 19 aa, unidentified
  source 1..19: note = methanogen bacteria
IITSEYDGLKVSNTIIIKD

SEQ ID NO: 69334 - protein, 17 aa, unidentified
  source 1..17: note = methanogen bacteria
NKIKPLLKSYMIYKLLL

SEQ ID NO: 69335 - protein, 46 aa, unidentified
  source 1..46: note = methanogen bacteria
AVDTFLGLPEAPGVKGAENVGYSIKNRKGDLAGGFFQGNILCSPDA

SEQ ID NO: 69336 - protein, 17 aa, unidentified
  source 1..17: note = methanogen bacteria
PGMPTSNFVLYYVSKIE

SEQ ID NO: 69337 - protein, 22 aa, unidentified
  source 1..22: note = methanogen bacteria
IGNPRSGIAVYMSYLIFEMGLN

SEQ ID NO: 69338 - protein, 45 aa, unidentified
  source 1..45: note = methanogen bacteria
VDTFLGLPEAPGVKGAETVGYSIKNRKGDLAGGFFQGNILCSPDA

SEQ ID NO: 69339 - protein, 12 aa, unidentified
  source 1..12: note = methanogen bacteria
SEVRDIQNYGYT

SEQ ID NO: 69340 - protein, 18 aa, unidentified
  source 1..18: note = methanogen bacteria
KKYYSERYFQTEAHVTDG

SEQ ID NO: 69341 - protein, 11 aa, unidentified
  source 1..11: note = methanogen bacteria
NLIPVYKFDSL

SEQ ID NO: 69342 - protein, 77 aa, unidentified
  source 1..77: note = methanogen bacteria
IYAPSQEELSQAKTTKLNELQDLYSGALTTSPSAFQIEDQIENAKNAGEVESINIVTPATKDWRSFHQKSINTNHDK

SEQ ID NO: 69343 - protein, 23 aa, unidentified
  source 1..23: note = methanogen bacteria
GLTSGLSDSSVNLAQYGLVMDAF

SEQ ID NO: 69344 - protein, 33 aa, unidentified
  source 1..33: note = methanogen bacteria
SSWENLGIIGQAVMFIIPFSHPMMAMDNLIFGN

SEQ ID NO: 69345 - protein, 81 aa, unidentified
  source 1..81: note = methanogen bacteria
AVIESMANSVTIEDLNITRYNHSSQYDSKVYTDIGYEVTYNQKSYGDHVTNLIFYSKKGKVLHNDSEYIYTVKESMLTIKI

SEQ ID NO: 69346 - protein, 17 aa, unidentified
  source 1..17: note = methanogen bacteria
PGMPTSKFVLHYVSQVE

SEQ ID NO: 69347 - protein, 77 aa, unidentified
  source 1..77: note = methanogen bacteria
KGHNLVVHEKTIELANLERDISIAHLSDIHFGSLRHRKIIRDIADRLNGLDCDLAIISGDLADGTSIVELDDFMALS

SEQ ID NO: 69348 - protein, 10 aa, unidentified
  source 1..10: note = methanogen bacteria
EIDALSFIIG

SEQ ID NO: 69349 - protein, 14 aa, unidentified
  source 1..14: note = methanogen bacteria
KLKDYQFHILSRNP

SEQ ID NO: 69350 - protein, 45 aa, unidentified
  source 1..45: note = methanogen bacteria
DTYFGLPEQPGVKGARIIGESVKERKGDIAGGFFQGNILCSPDAS

SEQ ID NO: 69351 - protein, 10 aa, unidentified
  source 1..10: note = methanogen bacteria
HIDALSFIVG

SEQ ID NO: 69352 - protein, 10 aa, unidentified
  source 1..10: note = methanogen bacteria
NWENAIVPNS

SEQ ID NO: 69353 - protein, 23 aa, unidentified
  source 1..23: note = methanogen bacteria
LRPNVLDGNVLSFIINGYLSDRW

SEQ ID NO: 69354 - protein, 10 aa, unidentified
  source 1..10: note = methanogen bacteria
KIDALSFLVA

SEQ ID NO: 69355 - protein, 42 aa, unidentified
  source 1..42: note = methanogen bacteria
FTGQMDPNIILNPFNTTNMTQMYNSSAMNMSGSSNLSSLFGF

SEQ ID NO: 69356 - protein, 10 aa, unidentified
  source 1..10: note = methanogen bacteria
LDMMTSLSGS

SEQ ID NO: 69357 - protein, 43 aa, unidentified
  source 1..43: note = methanogen bacteria
IFTGQMDPNIILNPFNTTNMTQMYNSSAMNMSGSRNLFSLFGF

SEQ ID NO: 69358 - protein, 11 aa, unidentified
  source 1..11: note = methanogen bacteria
VNALSINPNPF

SEQ ID NO: 69359 - protein, 11 aa, unidentified
  source 1..11: note = methanogen bacteria
FTMINWSICVC

SEQ ID NO: 69360 - protein, 21 aa, unidentified
  source 1..21: note = methanogen bacteria
TYFGLPEQPGVRGARIIGQDV

SEQ ID NO: 69361 - protein, 45 aa, unidentified
  source 1..45: note = methanogen bacteria
DTYFGLPEQPGVRGARIIGKDVEKRGGDIAGGFFQGNILCSPDAS

SEQ ID NO: 69362 - protein, 72 aa, unidentified
  source 1..72: note = methanogen bacteria
MYDGMNDLKEWEYNQINHYDSKLVIEENATDSQIDDVADEVNGDKLMESAIEIESDSAKKSGSLLRFASRIE

SEQ ID NO: 69363 - protein, 11 aa, unidentified
  source 1..11: note = methanogen bacteria
KIDALSFLVAY

SEQ ID NO: 69364 - protein, 11 aa, unidentified
  source 1..11: note = methanogen bacteria
NMIPVYKIDSM

SEQ ID NO: 69365 - protein, 10 aa, unidentified
  source 1..10: note = methanogen bacteria
NIDALSFLVS

SEQ ID NO: 69366 - protein, 17 aa, unidentified
  source 1..17: note = methanogen bacteria
DIAGGFFQGNVLCSPDA

SEQ ID NO: 69367 - protein, 38 aa, unidentified
  source 1..38: note = methanogen bacteria
MDIGESITRVGCEYFTGVETMLILGQTDRIAAVDFAPW

SEQ ID NO: 69368 - protein, 37 aa, unidentified
  source 1..37: note = methanogen bacteria
LDFYFSDEEKKNISNLGNMNAPDYDAVNKLNLDVLLI

SEQ ID NO: 69369 - protein, 31 aa, unidentified
  source 1..31: note = methanogen bacteria
ILKAGYIFGAVEKAEAYTEWILNYRDKMLEI

SEQ ID NO: 69370 - protein, 17 aa, unidentified
  source 1..17: note = methanogen bacteria
PGMPTSDFVLYYVSKIE

SEQ ID NO: 69371 - protein, 15 aa, unidentified
  source 1..15: note = methanogen bacteria
GGIPFIPNGIFNMTS

SEQ ID NO: 69372 - protein, 34 aa, unidentified
  source 1..34: note = methanogen bacteria
AACVYRPWILDSRVHPVKEALAGATGYSFPSGHM

SEQ ID NO: 69373 - protein, 30 aa, unidentified
  source 1..30: note = methanogen bacteria
HPDITLQNMYLNQLLGNFIETVGQNIVSCF

SEQ ID NO: 69374 - protein, 20 aa, unidentified
  source 1..20: note = methanogen bacteria
MFAITGGTVPEKLSYLHLSM

SEQ ID NO: 69375 - protein, 14 aa, unidentified
  source 1..14: note = methanogen bacteria
VNNHFIKDVILMDN

SEQ ID NO: 69376 - protein, 44 aa, unidentified
  source 1..44: note = methanogen bacteria
FKPSAGINLTTISQTSNGTLNQTMTDLVLNIIPENPLNALANSE

SEQ ID NO: 69377 - protein, 10 aa, unidentified
  source 1..10: note = methanogen bacteria
NIIPKYSISG

SEQ ID NO: 69378 - protein, 11 aa, unidentified
  source 1..11: note = methanogen bacteria
KGLIPFVIENK

SEQ ID NO: 69379 - protein, 17 aa, unidentified
  source 1..17: note = methanogen bacteria
ASPAINEAAGLVFGNPS

SEQ ID NO: 69380 - protein, 10 aa, unidentified
  source 1..10: note = methanogen bacteria
SGLGPHPLAA

SEQ ID NO: 69381 - protein, 16 aa, unidentified
  source 1..16: note = methanogen bacteria
LLIMGAGEVISETMTY

SEQ ID NO: 69382 - protein, 16 aa, unidentified
  source 1..16: note = methanogen bacteria
ALIDPSFALENLSREE

SEQ ID NO: 69383 - protein, 11 aa, unidentified
  source 1..11: note = methanogen bacteria
VAGLGADALAG

SEQ ID NO: 69384 - protein, 17 aa, unidentified
  source 1..17: note = methanogen bacteria
PVLTIMGAAHTLPYAHE

SEQ ID NO: 69385 - protein, 41 aa, unidentified
  source 1..41: note = methanogen bacteria
LTGQIDPNILLNPFNTTQMANMTNMSQNMSGSNNLSSLFGF

SEQ ID NO: 69386 - protein, 15 aa, unidentified
  source 1..15: note = methanogen bacteria
VSCRLNINDFFPLFS

SEQ ID NO: 69387 - protein, 68 aa, unidentified
  source 1..68: note = methanogen bacteria
GSSINELNLFGIKHNLIAGISRSMRSDEYLVNTMFAFSQYHNGFGYFSDIVRATPGVCSPSLNVVSKK

SEQ ID NO: 69388 - protein, 17 aa, unidentified
  source 1..17: note = methanogen bacteria
PGMPTSEFVLHYVSQIE

SEQ ID NO: 69389 - protein, 14 aa, unidentified
  source 1..14: note = methanogen bacteria
HFIQIMNTLTDDEW

SEQ ID NO: 69390 - protein, 17 aa, unidentified
  source 1..17: note = methanogen bacteria
PGMPTSEFVLYYVSKVE

SEQ ID NO: 69391 - protein, 17 aa, unidentified
  source 1..17: note = methanogen bacteria
PGMPTSDFVLYYVSKIE

SEQ ID NO: 69392 - protein, 36 aa, unidentified
  source 1..36: note = methanogen bacteria
YGGSFLYNVGTDFYSIIPKFIVNIFHYPDVTNAGAV

SEQ ID NO: 69393 - protein, 17 aa, unidentified
  source 1..17: note = methanogen bacteria
PVMPTSEFVLYYVSKVE

SEQ ID NO: 69394 - protein, 17 aa, unidentified
  source 1..17: note = methanogen bacteria
PGMPTSKFVLYYVSKIE

SEQ ID NO: 69395 - protein, 17 aa, unidentified
  source 1..17: note = methanogen bacteria
PGMPTSDFVLYYVSKVE

SEQ ID NO: 69396 - protein, 17 aa, unidentified
  source 1..17: note = methanogen bacteria
PGMPTSETLLYYVSHVE

SEQ ID NO: 69397 - protein, 17 aa, unidentified
  source 1..17: note = methanogen bacteria
PGMPTSEVVLYYVSKVE

SEQ ID NO: 69398 - protein, 40 aa, unidentified
  source 1..40: note = methanogen bacteria
GLGYKTPSGAGMIDGTSPSSFVDYVSGGIFGDLFNDIGGN

SEQ ID NO: 69399 - protein, 17 aa, unidentified
  source 1..17: note = methanogen bacteria
PGMPTSKFVLHYVSQVE

SEQ ID NO: 69400 - protein, 16 aa, unidentified
  source 1..16: note = methanogen bacteria
PLIVLFIKKGIFNIPS

SEQ ID NO: 69401 - protein, 17 aa, unidentified
  source 1..17: note = methanogen bacteria
PGMPTSEFVLYHVSQVE

SEQ ID NO: 69402 - protein, 17 aa, unidentified
  source 1..17: note = methanogen bacteria
PGMPTSATLIHYVSQVE

SEQ ID NO: 69403 - protein, 13 aa, unidentified
  source 1..13: note = methanogen bacteria
FQLSTFLTVLENH

SEQ ID NO: 69404 - protein, 12 aa, unidentified
  source 1..12: note = methanogen bacteria
LFELYGHYILST

SEQ ID NO: 69405 - protein, 17 aa, unidentified
  source 1..17: note = methanogen bacteria
PGMPTSEFVLYYVSHVE

SEQ ID NO: 69406 - protein, 10 aa, unidentified
  source 1..10: note = methanogen bacteria
TYFGLPEQPG

SEQ ID NO: 69407 - protein, 17 aa, unidentified
  source 1..17: note = methanogen bacteria
PGMPTSKFVLHYVSQIE

SEQ ID NO: 69408 - protein, 17 aa, unidentified
  source 1..17: note = methanogen bacteria
PGMPTSEFVLKYVSQVE

SEQ ID NO: 69409 - protein, 17 aa, unidentified
  source 1..17: note = methanogen bacteria
PGMPTSKFVLHYVSQIE

SEQ ID NO: 69410 - protein, 12 aa, unidentified
  source 1..12: note = methanogen bacteria
NLTHIMFFFAYQ

SEQ ID NO: 69411 - protein, 16 aa, unidentified
  source 1..16: note = methanogen bacteria
GMPTSDFVLYYVSKIE

SEQ ID NO: 69412 - protein, 17 aa, unidentified
  source 1..17: note = methanogen bacteria
PGMPTSKFVLHYVSQIE

SEQ ID NO: 69413 - protein, 17 aa, unidentified
  source 1..17: note = methanogen bacteria
PGMPTSKFVLHYVSKVE

SEQ ID NO: 69414 - protein, 17 aa, unidentified
  source 1..17: note = methanogen bacteria
PGMPTSKIVLYYVSKIE

SEQ ID NO: 69415 - protein, 17 aa, unidentified
  source 1..17: note = methanogen bacteria
PTMPTSEFVSYYVSKVE

SEQ ID NO: 69416 - protein, 17 aa, unidentified
  source 1..17: note = methanogen bacteria
PGVPTSEAVLYYVSKVE

SEQ ID NO: 69417 - protein, 17 aa, unidentified
  source 1..17: note = methanogen bacteria
PGVPTSETVLYYVSKVE

SEQ ID NO: 69418 - protein, 17 aa, unidentified
  source 1..17: note = methanogen bacteria
PGMPTSEVVSYYVSQVE

SEQ ID NO: 69419 - protein, 17 aa, unidentified
  source 1..17: note = methanogen bacteria
PGVPTSETVLHYVSKVE

SEQ ID NO: 69420 - protein, 10 aa, unidentified
  source 1..10: note = methanogen bacteria
INALSFLVGF

SEQ ID NO: 69421 - protein, 17 aa, unidentified
  source 1..17: note = methanogen bacteria
PSMPTSGVLLHYVSQVE

SEQ ID NO: 69422 - protein, 31 aa, unidentified
  source 1..31: note = methanogen bacteria
NWIAVDDAYLGYSGLQIGDLVDGGDYDDWQQ

SEQ ID NO: 69423 - protein, 23 aa, unidentified
  source 1..23: note = methanogen bacteria
ACWDLFDEHTVLLVTTDPCDAGA

SEQ ID NO: 69424 - protein, 56 aa, unidentified
  source 1..56: note = methanogen bacteria
VIGGIVDAIDIYAPQYSENDHIHQDIYNYFQKMGNLYELKSQESIVIAAADIIVQN

SEQ ID NO: 69425 - protein, 99 aa, unidentified
  source 1..99: note = methanogen bacteria
AYVHEPDNETITFSSDPSDDAVTSSAKTYFFQYTGEDADSVHWDFGDGTGADAFEVYKTYADAGTYNVLCTATNFGGTRVSGMPLTIEEKDFGFFTGYS

SEQ ID NO: 69426 - protein, 15 aa, unidentified
  source 1..15: note = methanogen bacteria
GPASRNLINNFKIIE

SEQ ID NO: 69427 - protein, 18 aa, unidentified
  source 1..18: note = methanogen bacteria
ALPELQIANYSDFYNTNP

SEQ ID NO: 69428 - protein, 47 aa, unidentified
  source 1..47: note = methanogen bacteria
LIYSGQMDINMILDPFNSTQLYNMTNMYNSSQNITASNNFSSLFGLR

SEQ ID NO: 69429 - protein, 17 aa, unidentified
  source 1..17: note = methanogen bacteria
PGMPTSDILLYYVSKVE

SEQ ID NO: 69430 - protein, 13 aa, unidentified
  source 1..13: note = methanogen bacteria
GIDKIIITLKNAN

SEQ ID NO: 69431 - protein, 10 aa, unidentified
  source 1..10: note = methanogen bacteria
SGSPNLAEIG

SEQ ID NO: 69432 - protein, 16 aa, unidentified
  source 1..16: note = methanogen bacteria
GPIEITPTKGVTVSVM

SEQ ID NO: 69433 - protein, 10 aa, unidentified
  source 1..10: note = methanogen bacteria
GQSIHLLLEM

SEQ ID NO: 69434 - protein, 17 aa, unidentified
  source 1..17: note = methanogen bacteria
PGMPTSEFVSYYVSKIE

SEQ ID NO: 69435 - protein, 17 aa, unidentified
  source 1..17: note = methanogen bacteria
PGMPTSEFVSYYVSKVE

SEQ ID NO: 69436 - protein, 13 aa, unidentified
  source 1..13: note = methanogen bacteria
EKIFFGGAITTPT

SEQ ID NO: 69437 - protein, 24 aa, unidentified
  source 1..24: note = methanogen bacteria
GYPKLKLQRIIWTISWERFLLKSL

SEQ ID NO: 69438 - protein, 17 aa, unidentified
  source 1..17: note = methanogen bacteria
PGMPTAELVSYYVSKIE

SEQ ID NO: 69439 - protein, 55 aa, unidentified
  source 1..55: note = methanogen bacteria
LNPDQLYVRPAPQVQVDEGLAIAPYDWISSISPYFGTSIYSSPGGLIDEVLYYTR

SEQ ID NO: 69440 - protein, 37 aa, unidentified
  source 1..37: note = methanogen bacteria
SWVAFDSGAGFSSNGTQLSKLADQFSLVGDYDDWHTN

SEQ ID NO: 69441 - protein, 19 aa, unidentified
  source 1..19: note = methanogen bacteria
CGWDFIDDMSDSLKTQVGA

SEQ ID NO: 69442 - protein, 17 aa, unidentified
  source 1..17: note = methanogen bacteria
PTMPTSEFVSYYVSKVE

SEQ ID NO: 69443 - protein, 10 aa, unidentified
  source 1..10: note = methanogen bacteria
IALSNAYSIF

SEQ ID NO: 69444 - protein, 17 aa, unidentified
  source 1..17: note = methanogen bacteria
PTMPTSEFVSYYVSKVE

SEQ ID NO: 69445 - protein, 17 aa, unidentified
  source 1..17: note = methanogen bacteria
PGVPTSETVLYYVSKIE

SEQ ID NO: 69446 - protein, 10 aa, unidentified
  source 1..10: note = methanogen bacteria
YPLRSYSNVF

SEQ ID NO: 69447 - protein, 20 aa, unidentified
  source 1..20: note = methanogen bacteria
GAEKMVMTLIQCRFDYSLHW

SEQ ID NO: 69448 - protein, 10 aa, unidentified
  source 1..10: note = methanogen bacteria
NPNLISSFNG

SEQ ID NO: 69449 - protein, 12 aa, unidentified
  source 1..12: note = methanogen bacteria
FNQNIMGSLTGL

SEQ ID NO: 69450 - protein, 19 aa, unidentified
  source 1..19: note = methanogen bacteria
KMSNALSWLYGSFASMTWE

SEQ ID NO: 69451 - protein, 13 aa, unidentified
  source 1..13: note = methanogen bacteria
KIININFLGMETP

SEQ ID NO: 69452 - protein, 19 aa, unidentified
  source 1..19: note = methanogen bacteria
LPSPANYTGDSALQFVFTQ

SEQ ID NO: 69453 - protein, 10 aa, unidentified
  source 1..10: note = methanogen bacteria
VSWAEKGAPA

SEQ ID NO: 69454 - protein, 20 aa, unidentified
  source 1..20: note = methanogen bacteria
FLPSPANYTGDSALQFVFTQ

SEQ ID NO: 69455 - protein, 35 aa, unidentified
  source 1..35: note = methanogen bacteria
SGSFLYNLGTNIYDLVPASTANIFNFPDALHAGII

SEQ ID NO: 69456 - protein, 43 aa, unidentified
  source 1..43: note = methanogen bacteria
VSTYDGLSLGEVYSLIWNHLTGNNAYEPRSRLWWADRFVWNTT

SEQ ID NO: 69457 - protein, 10 aa, unidentified
  source 1..10: note = methanogen bacteria
SASLNALSGT

SEQ ID NO: 69458 - protein, 16 aa, unidentified
  source 1..16: note = methanogen bacteria
MSYENQILKIILNFFD

SEQ ID NO: 69459 - protein, 16 aa, unidentified
  source 1..16: note = methanogen bacteria
LYSVDQADSYILIWDY

SEQ ID NO: 69460 - protein, 55 aa, unidentified
  source 1..55: note = methanogen bacteria
FNDHLGIYCSDVYVYLLNALYYAGTNIYSTKSIYLSPVVCFLTSLIFDLGYVDKT

SEQ ID NO: 69461 - protein, 28 aa, unidentified
  source 1..28: note = methanogen bacteria
MTDFFGMVLDVLNAIFNPILALDPNPQN

SEQ ID NO: 69462 - protein, 23 aa, unidentified
  source 1..23: note = methanogen bacteria
ASSISHLVLILPAPAYWLTVLVG

SEQ ID NO: 69463 - protein, 75 aa, unidentified
  source 1..75: note = methanogen bacteria
IFMSFEAENNATNITNNTTDAPHVENVTVEMTSNLNKSKDVTFDESDAVDFNENKSAEILGVEDNPYYNKVEHLY

SEQ ID NO: 69464 - protein, 28 aa, unidentified
  source 1..28: note = methanogen bacteria
SSYLDDDSLVVDYNNALNAVDSVVDSDN

SEQ ID NO: 69465 - protein, 10 aa, unidentified
  source 1..10: note = methanogen bacteria
YIDALSFLVG

SEQ ID NO: 69466 - protein, 36 aa, unidentified
  source 1..36: note = methanogen bacteria
MGFRSYTTGTPMVQLITEGTGLIFIVFPMIFNIMGT

SEQ ID NO: 69467 - protein, 33 aa, unidentified
  source 1..33: note = methanogen bacteria
SLDIHFVDALFENMSAWTGSGMTFFVNVEILPR

SEQ ID NO: 69468 - protein, 11 aa, unidentified
  source 1..11: note = methanogen bacteria
AINAVSFLVAL

SEQ ID NO: 69469 - protein, 11 aa, unidentified
  source 1..11: note = methanogen bacteria
NQIKLIPQINN

SEQ ID NO: 69470 - protein, 10 aa, unidentified
  source 1..10: note = methanogen bacteria
AGLGPDALAA

SEQ ID NO: 69471 - protein, 21 aa, unidentified
  source 1..21: note = methanogen bacteria
LQFMGAGNMQWITVISYSDSC

SEQ ID NO: 69472 - protein, 22 aa, unidentified
  source 1..22: note = methanogen bacteria
AKTAKGLGICMALFGVETILPV

SEQ ID NO: 69473 - protein, 12 aa, unidentified
  source 1..12: note = methanogen bacteria
HIITVYKINELN

SEQ ID NO: 69474 - protein, 10 aa, unidentified
  source 1..10: note = methanogen bacteria
NIIPKYSVPG

SEQ ID NO: 69475 - protein, 35 aa, unidentified
  source 1..35: note = methanogen bacteria
GGFYLYNVGTDILNVVPQTIQSVLHYPDVTNAGII

SEQ ID NO: 69476 - protein, 93 aa, unidentified
  source 1..93: note = methanogen bacteria
PMNLNDNQLYVRPEIQEQINENNSLAPYDRGGIPLIEDAYVKAQYPNNSQNLGKITSYLTPLALLVKDNTIYFGTSICASPGGILDEILYYTR

SEQ ID NO: 69477 - protein, 34 aa, unidentified
  source 1..34: note = methanogen bacteria
SYMAYTSSMNRYNNYYTGYSNYGYNDYYNSYYDY

SEQ ID NO: 69478 - protein, 12 aa, unidentified
  source 1..12: note = methanogen bacteria
YHLIPIYKINEL

SEQ ID NO: 69479 - protein, 12 aa, unidentified
  source 1..12: note = methanogen bacteria
GPKSRALLFNLR

SEQ ID NO: 69480 - protein, 10 aa, unidentified
  source 1..10: note = methanogen bacteria
NIIPKYSVPG

SEQ ID NO: 69481 - protein, 35 aa, unidentified
  source 1..35: note = methanogen bacteria
GGFYLYNVGTDVLNIVPAAIQNVFHYPDVTNAGII

SEQ ID NO: 69482 - protein, 12 aa, unidentified
  source 1..12: note = methanogen bacteria
NQTSLFPKFNYF

SEQ ID NO: 69483 - protein, 12 aa, unidentified
  source 1..12: note = methanogen bacteria
TSINLISKFNCC

SEQ ID NO: 69484 - protein, 34 aa, unidentified
  source 1..34: note = methanogen bacteria
GGFFLYNMGTDLLNVVPATIQNVFHYPDITNAGI

SEQ ID NO: 69485 - protein, 18 aa, unidentified
  source 1..18: note = methanogen bacteria
RFKTTIFGPLGGSLPFSS

SEQ ID NO: 69486 - protein, 12 aa, unidentified
  source 1..12: note = methanogen bacteria
YFLQAVSQIYTY

SEQ ID NO: 69487 - protein, 31 aa, unidentified
  source 1..31: note = methanogen bacteria
AWLDPNIPVDDFSGWDVFNNKDHEFDEVDYT

SEQ ID NO: 69488 - protein, 19 aa, unidentified
  source 1..19: note = methanogen bacteria
WSQNLPYGTHFSDVADMGI

SEQ ID NO: 69489 - protein, 35 aa, unidentified
  source 1..35: note = methanogen bacteria
GGFFLYNVGTDLFNVVPAAIQNVLHYPDVTNAGII

SEQ ID NO: 69490 - protein, 12 aa, unidentified
  source 1..12: note = methanogen bacteria
FNLFNPIDKYFS

SEQ ID NO: 69491 - protein, 34 aa, unidentified
  source 1..34: note = methanogen bacteria
GGFYLYNFGTDLLNVVPAAIQSVFHYPDVTNAGI

SEQ ID NO: 69492 - protein, 13 aa, unidentified
  source 1..13: note = methanogen bacteria
YSVPTKFYTFDRY

SEQ ID NO: 69493 - protein, 10 aa, unidentified
  source 1..10: note = methanogen bacteria
QFHVYAMMPI

SEQ ID NO: 69494 - protein, 35 aa, unidentified
  source 1..35: note = methanogen bacteria
GGFFLYNAGTDLLNVVPSAIQNVLHYPDVTNAGII

SEQ ID NO: 69495 - protein, 12 aa, unidentified
  source 1..12: note = methanogen bacteria
HYNPVAVNWIGT

SEQ ID NO: 69496 - protein, 25 aa, unidentified
  source 1..25: note = methanogen bacteria
RNCGSRNNRYCSIPAWNHIRSSRIT

SEQ ID NO: 69497 - protein, 35 aa, unidentified
  source 1..35: note = methanogen bacteria
GGFYLYNFGTDLLNVVPQAIQTAFHYPDVTNAGII

SEQ ID NO: 69498 - protein, 34 aa, unidentified
  source 1..34: note = methanogen bacteria
GGFFLYNVGTDILGIVPQTIQTILHYPDVTNAGI

SEQ ID NO: 69499 - protein, 12 aa, unidentified
  source 1..12: note = methanogen bacteria
VVLEVLTKIPAD

SEQ ID NO: 69500 - protein, 36 aa, unidentified
  source 1..36: note = methanogen bacteria
LGGFFLYNFGTDLLNVVPQNIQTIFHYPDVTNAGII

SEQ ID NO: 69501 - protein, 35 aa, unidentified
  source 1..35: note = methanogen bacteria
GGFFLYNVGTDLFNIVPSSIQTILHYPDVTNAGII

SEQ ID NO: 69502 - protein, 35 aa, unidentified
  source 1..35: note = methanogen bacteria
GGFYLYNVGTDLLNVVPAALQNVLHYPDVTNAGII

SEQ ID NO: 69503 - protein, 31 aa, unidentified
  source 1..31: note = methanogen bacteria
TWLSVDTGFGTETASGWKVYTDAKDSDMKYT

SEQ ID NO: 69504 - protein, 22 aa, unidentified
  source 1..22: note = methanogen bacteria
FYTQSWTVFGTTVKLTDIYKIG

SEQ ID NO: 69505 - protein, 36 aa, unidentified
  source 1..36: note = methanogen bacteria
AGGFFLYNVGTDLLNVIPASIQTIFHYPDVTNAGII

SEQ ID NO: 69506 - protein, 36 aa, unidentified
  source 1..36: note = methanogen bacteria
AGGFFLYNVGADIFNIIPASIQTVFHYPDTTNAGII

SEQ ID NO: 69507 - protein, 10 aa, unidentified
  source 1..10: note = methanogen bacteria
PVLLKTIDFG

SEQ ID NO: 69508 - protein, 38 aa, unidentified
  source 1..38: note = methanogen bacteria
ESDSVSDETLSVENEEIGNSLESNDVSDETSSVENEEN

SEQ ID NO: 69509 - protein, 90 aa, unidentified
  source 1..90: note = methanogen bacteria
FIGNSNSNGSQNITLIKENAYGFTFVNDGVPYYNYYLDGVFTNLEGDFQGYDMKARFIDENGSLVKEYRDDYMKYAFSDSKKSQTSTLAS

SEQ ID NO: 69510 - protein, 10 aa, unidentified
  source 1..10: note = methanogen bacteria
AGLGADPLAA

SEQ ID NO: 69511 - protein, 18 aa, unidentified
  source 1..18: note = methanogen bacteria
DMLLLFGAGSVLDYAMDY

SEQ ID NO: 69512 - protein, 99 aa, unidentified
  source 1..99: note = methanogen bacteria
YAITTHYNPFASHDNYQEDVKSDSNSVDSSDDSNAQTSESKAQATESKSWESIGHYSGSGSGSKSIKVPAGKIKVKLSAYPIKNYATNHLYVSGSNGQS

SEQ ID NO: 69513 - protein, 11 aa, unidentified
  source 1..11: note = methanogen bacteria
YNMIPAFKSNG

SEQ ID NO: 69514 - protein, 74 aa, unidentified
  source 1..74: note = methanogen bacteria
QTDANNNFPANDAFEDGVNLENAKSQFFKGINDVPKEGFENATQVNVKTDKFKSLNSIVDMTRENIILDGLLNS

SEQ ID NO: 69515 - protein, 17 aa, unidentified
  source 1..17: note = methanogen bacteria
PGLAALGSGDVTTLSNA

SEQ ID NO: 69516 - protein, 33 aa, unidentified; identical to SEQ ID NO: 58440
  source 1..33: note = methanogen bacteria

SEQ ID NO: 69517 - protein, 11 aa, unidentified
  source 1..11: note = methanogen bacteria
FMRDGDFYSQL

SEQ ID NO: 69518 - protein, 11 aa, unidentified
  source 1..11: note = methanogen bacteria
AKGPLNVSFNG

SEQ ID NO: 69519 - protein, 10 aa, unidentified
  source 1..10: note = methanogen bacteria
QWMPINLGIG

SEQ ID NO: 69520 - protein, 12 aa, unidentified
  source 1..12: note = methanogen bacteria
SLFMSSFNQNFH

SEQ ID NO: 69521 - protein, 12 aa, unidentified
  source 1..12: note = methanogen bacteria
AGALLGKADLFP

SEQ ID NO: 69522 - protein, 33 aa, unidentified
  source 1..33: note = methanogen bacteria
VDSNINNIHTAVWFIIVSMTSTGYGDIIPATTS

SEQ ID NO: 69523 - protein, 34 aa, unidentified
  source 1..34: note = methanogen bacteria
GKFSRRYAFQSKTSSTARMATSIMESSGSAVVSF

SEQ ID NO: 69524 - protein, 25 aa, unidentified
  source 1..25: note = methanogen bacteria
WDVLGGTVYMLDGSMFYGTSGCTAG

SEQ ID NO: 69525 - protein, 36 aa, unidentified
  source 1..36: note = methanogen bacteria
AGGFFLYNVGTDILNVVPASIQAIFHYPDVTNAGII

SEQ ID NO: 69526 - protein, 23 aa, unidentified
  source 1..23: note = methanogen bacteria
WHYQPTITYFIDTAFGVQDYSRP

SEQ ID NO: 69527 - protein, 36 aa, unidentified
  source 1..36: note = methanogen bacteria
AGGFFLYNVGTDLNNVVPAFIQTIFHYPDVSNAGII

SEQ ID NO: 69528 - protein, 11 aa, unidentified
  source 1..11: note = methanogen bacteria
VSGLGADALAG

SEQ ID NO: 69529 - protein, 17 aa, unidentified
  source 1..17: note = methanogen bacteria
ILNSMGAGSTIGYAADY

SEQ ID NO: 69530 - protein, 11 aa, unidentified
  source 1..11: note = methanogen bacteria
MNNSYENKSTN

SEQ ID NO: 69531 - protein, 11 aa, unidentified
  source 1..11: note = methanogen bacteria
KVNYILNNMDN

SEQ ID NO: 69532 - protein, 27 aa, unidentified
  source 1..27: note = methanogen bacteria
TWLSIGDATASGWKVYTDAKDSDMKYT

SEQ ID NO: 69533 - protein, 22 aa, unidentified
  source 1..22: note = methanogen bacteria
FYTQSWTAYGVTIKLTDIYKIG

SEQ ID NO: 69534 - protein, 35 aa, unidentified
  source 1..35: note = methanogen bacteria
AGSFLYNIGVDLSNIVPANIQCIFNYPDITYAGII

SEQ ID NO: 69535 - protein, 17 aa, unidentified
  source 1..17: note = methanogen bacteria
PWCPLAEPIIYYTSKVD

SEQ ID NO: 69536 - protein, 30 aa, unidentified
  source 1..30: note = methanogen bacteria
YIAYQSSYQYYNNYYDSYSSYNDYNNYYDY

SEQ ID NO: 69537 - protein, 16 aa, unidentified
  source 1..16: note = methanogen bacteria
EVYASFSVIDLETPIF

SEQ ID NO: 69538 - protein, 15 aa, unidentified
  source 1..15: note = methanogen bacteria
GYFGQPTGFFVSETG

SEQ ID NO: 69539 - protein, 11 aa, unidentified
  source 1..11: note = methanogen bacteria
YPWGFFNVDNY

SEQ ID NO: 69540 - protein, 31 aa, unidentified
  source 1..31: note = methanogen bacteria
NVFGNAIATVQEIRLQIFNVFFHGKFRRYRS

SEQ ID NO: 69541 - protein, 10 aa, unidentified
  source 1..10: note = methanogen bacteria
AGLGAEPLAA

SEQ ID NO: 69542 - protein, 15 aa, unidentified
  source 1..15: note = methanogen bacteria
LNIMGASSVLNYAMQ

SEQ ID NO: 69543 - protein, 15 aa, unidentified
  source 1..15: note = methanogen bacteria
GYFGQPTGFFVSENG

SEQ ID NO: 69544 - protein, 24 aa, unidentified
  source 1..24: note = methanogen bacteria
TLPGASIGLAELFHPDLTLLLHYD

SEQ ID NO: 69545 - protein, 29 aa, unidentified
  source 1..29: note = methanogen bacteria
GYMSLSLEFPFPILYLRHNLDFCCISSSV

SEQ ID NO: 69546 - protein, 22 aa, unidentified
  source 1..22: note = methanogen bacteria
SGLGSTPVASIPYALNLIWKID

SEQ ID NO: 69547 - protein, 10 aa, unidentified
  source 1..10: note = methanogen bacteria
IAFIPMADNL

SEQ ID NO: 69548 - protein, 22 aa, unidentified
  source 1..22: note = methanogen bacteria
PGMLENQTLANFLHIKEMFYHI

SEQ ID NO: 69549 - protein, 18 aa, unidentified
  source 1..18: note = methanogen bacteria
PWCPISGPIIYYTSKVDL

SEQ ID NO: 69550 - protein, 20 aa, unidentified
  source 1..20: note = methanogen bacteria
AFPETINEQTMLLNFIPING

SEQ ID NO: 69551 - protein, 46 aa, unidentified
  source 1..46: note = methanogen bacteria
EVIALGRLDVEPGEEVRVATPKAKAEVDDLLKEVRSYWYSNNFRWF

SEQ ID NO: 69552 - protein, 28 aa, unidentified
  source 1..28: note = methanogen bacteria
MADPMGVIYQGLNAIFNPILALDPNPTN

SEQ ID NO: 69553 - protein, 24 aa, unidentified
  source 1..24: note = methanogen bacteria
SAISSLVIILPPSVYWLTLTPLWH

SEQ ID NO: 69554 - protein, 12 aa, unidentified
  source 1..12: note = methanogen bacteria
ALGQIVDINLNP

SEQ ID NO: 69555 - protein, 30 aa, unidentified
  source 1..30: note = methanogen bacteria
FSYMAYRSRMSYYNNYYRSPSYGRSSYYGY

SEQ ID NO: 69556 - protein, 11 aa, unidentified
  source 1..11: note = methanogen bacteria
LAPYDDAWSGE

SEQ ID NO: 69557 - protein, 37 aa, unidentified; identical to SEQ ID NO: 69440
  source 1..37: note = methanogen bacteria

SEQ ID NO: 69558 - protein, 19 aa, unidentified
  source 1..19: note = methanogen bacteria
CGWDFIDDMSDSLKTQVGA

SEQ ID NO: 69559 - protein, 36 aa, unidentified
  source 1..36: note = methanogen bacteria
VGGYHIEFVETYRILADHIRGDVSDPTKDLIVWDTR

SEQ ID NO: 69560 - protein, 29 aa, unidentified
  source 1..29: note = methanogen bacteria
SYMAYTSRMSYYSSYPSYGRSSYYNRYGY

SEQ ID NO: 69561 - protein, 15 aa, unidentified
  source 1..15: note = methanogen bacteria
PLMANVFLKKPETLV

SEQ ID NO: 69562 - protein, 13 aa, unidentified
  source 1..13: note = methanogen bacteria
NFGRFKRCIPGCI

SEQ ID NO: 69563 - protein, 13 aa, unidentified
  source 1..13: note = methanogen bacteria
YFGINYYNMFSIY

SEQ ID NO: 69564 - protein, 11 aa, unidentified
  source 1..11: note = methanogen bacteria
MLEIINPSMVS

SEQ ID NO: 69565 - protein, 99 aa, unidentified
  source 1..99: note = methanogen bacteria
SSFGATSVDDATDSGGTGKPNMTDSSGDQEYYLIPVAGLQKVTVNGVDMSSEISGNAIGVHSKVMDQGDIQIKTQSHEIIIKTPPGMSPQEAVRSPENQ

SEQ ID NO: 69566 - protein, 12 aa, unidentified
  source 1..12: note = methanogen bacteria
AIGAGLDNVVAA

SEQ ID NO: 69567 - protein, 14 aa, unidentified
  source 1..14: note = methanogen bacteria
ILEGNVFNISPIEF

SEQ ID NO: 69568 - protein, 29 aa, unidentified
  source 1..29: note = methanogen bacteria
TWLDVNTNPDISATGIDLFSNDDLDDWQS

SEQ ID NO: 69569 - protein, 13 aa, unidentified
  source 1..13: note = methanogen bacteria
TWDEIDDPVQVGG

SEQ ID NO: 69570 - protein, 10 aa, unidentified
  source 1..10: note = methanogen bacteria
ARNSAGGTLA

SEQ ID NO: 69571 - protein, 10 aa, unidentified
  source 1..10: note = methanogen bacteria
AGPENVSFSG

SEQ ID NO: 69572 - protein, 10 aa, unidentified
  source 1..10: note = methanogen bacteria
QWMPISLGIG

SEQ ID NO: 69573 - protein, 11 aa, unidentified
  source 1..11: note = methanogen bacteria
MLEIINPSMVS

SEQ ID NO: 69574 - protein, 96 aa, unidentified
  source 1..96: note = methanogen bacteria
VLNTSPKTATSLTMLSSSNLNSFGEYAVQLKDVNGNPMSGQFIKIEVKNNTYTLKTDSNGTARMNLTLGDGSYEIKSYFKGDNKYGESHSSDIVIK

SEQ ID NO: 69575 - protein, 33 aa, unidentified
  source 1..33: note = methanogen bacteria
ADRIVAGIMSLNSDIGNINILSTSKGTWNDLIG

SEQ ID NO: 69576 - protein, 13 aa, unidentified
  source 1..13: note = methanogen bacteria
DMGLDLELFGVNG

SEQ ID NO: 69577 - protein, 96 aa, unidentified
  source 1..96: note = methanogen bacteria
FINHSSKTDTTLSMISNSNLDASNEYTVQLKDVNNRVLADKFITVKFNNESYTLVTDKNGTASINLTVIKGSFEVKSYFKGDSKYNDAHSSDIVIK

SEQ ID NO: 69578 - protein, 20 aa, unidentified
  source 1..20: note = methanogen bacteria
ITVPHNLYGDGLNPHMGLIF

SEQ ID NO: 69579 - protein, 15 aa, unidentified
  source 1..15: note = methanogen bacteria
YYLIQFQEHILITNT

SEQ ID NO: 69580 - protein, 11 aa, unidentified
  source 1..11: note = methanogen bacteria
LIESGGAQGNS

SEQ ID NO: 69581 - protein, 10 aa, unidentified
  source 1..10: note = methanogen bacteria
MGLSGLEPDL

SEQ ID NO: 69582 - protein, 11 aa, unidentified
  source 1..11: note = methanogen bacteria
VMGLQGLEPDL

SEQ ID NO: 69583 - protein, 16 aa, unidentified
  source 1..16: note = methanogen bacteria
TAIFDGINSGNMDLNH

SEQ ID NO: 69584 - protein, 13 aa, unidentified
  source 1..13: note = methanogen bacteria
DMGLDLELFGVDG

SEQ ID NO: 69585 - protein, 96 aa, unidentified
  source 1..96: note = methanogen bacteria
FFEHTSKTDTSLTLMSNSKLDSSNEYSVQLRDSSKNPLAFKFISVKFGNDTYMLQTDRNGIASINLTVKDGSHEVKSYYKGDSKYNEAHSSDILVK

SEQ ID NO: 69586 - protein, 79 aa, unidentified
  source 1..79: note = methanogen bacteria
RVVYQRDTTYINKVQVDSVYKRDSVLVREKGDTVYIYKERIREKYKLIRDTVRLVKVDSVAVERIKEVKVEKPLSAWKS

SEQ ID NO: 69587 - protein, 22 aa, unidentified
  source 1..22: note = methanogen bacteria
ESGLFPTTFLNVYLSLQSIANN

SEQ ID NO: 69588 - protein, 24 aa, unidentified
  source 1..24: note = methanogen bacteria
WYYPGFCRFGVFGKRFCRFGKCCD

SEQ ID NO: 69589 - protein, 11 aa, unidentified
  source 1..11: note = methanogen bacteria
DGKLGYIPDES

SEQ ID NO: 69590 - protein, 10 aa, unidentified
  source 1..10: note = methanogen bacteria
MGLQGLEWDL

SEQ ID NO: 69591 - protein, 48 aa, unidentified
  source 1..48: note = methanogen bacteria
MGFNGDDIKYAKVLSNQTLVDYLHYRYYNWSSRLIIDGILVILARLDM

SEQ ID NO: 69592 - protein, 31 aa, unidentified
  source 1..31: note = methanogen bacteria
FGFSVSGTPTPSLLKFSQAGQNMIEGGIFGP

SEQ ID NO: 69593 - protein, 11 aa, unidentified
  source 1..11: note = methanogen bacteria
YPLKIHSNVFI

SEQ ID NO: 69594 - protein, 11 aa, unidentified
  source 1..11: note = methanogen bacteria
MNSCLERFLFY

SEQ ID NO: 69595 - protein, 14 aa, unidentified
  source 1..14: note = methanogen bacteria
VGPSNVGVEISKIN

SEQ ID NO: 69596 - protein, 11 aa, unidentified
  source 1..11: note = methanogen bacteria
LWFDDYTLFPN

SEQ ID NO: 69597 - protein, 10 aa, unidentified
  source 1..10: note = methanogen bacteria
NIDALSFLLG

SEQ ID NO: 69598 - protein, 10 aa, unidentified
  source 1..10: note = methanogen bacteria
AGPGNVSFSG

SEQ ID NO: 69599 - protein, 10 aa, unidentified
  source 1..10: note = methanogen bacteria
QWMPINLGIG

SEQ ID NO: 69600 - protein, 13 aa, unidentified
  source 1..13: note = methanogen bacteria
DMGLDLELLGVDG

SEQ ID NO: 69601 - protein, 16 aa, unidentified
  source 1..16: note = methanogen bacteria
IGSNQILPNKYPALIT

SEQ ID NO: 69602 - protein, 13 aa, unidentified
  source 1..13: note = methanogen bacteria
VFITIMHSLTIRE

SEQ ID NO: 69603 - protein, 95 aa, unidentified
  source 1..95: note = methanogen bacteria
FTGSSKVETSLSMVSQSNFDSSTEYVVLLSDADNKPLADKFVNVEFNNDTYTLRTDSEGLAKINLTLSEGNHEVNSYFEGDEQYKESHTSNIIVI

SEQ ID NO: 69604 - protein, 12 aa, unidentified
  source 1..12: note = methanogen bacteria
YNIFRGIPLTET

SEQ ID NO: 69605 - protein, 10 aa, unidentified
  source 1..10: note = methanogen bacteria
NITALSVLFA

SEQ ID NO: 69606 - protein, 10 aa, unidentified
  source 1..10: note = methanogen bacteria
YINALSFITG

SEQ ID NO: 69607 - protein, 10 aa, unidentified
  source 1..10: note = methanogen bacteria
NFSAVSFLLG

SEQ ID NO: 69608 - protein, 12 aa, unidentified
  source 1..12: note = methanogen bacteria
GGITNGLTNSFP

SEQ ID NO: 69609 - protein, 10 aa, unidentified
  source 1..10: note = methanogen bacteria
NIAALSFVFA

SEQ ID NO: 69610 - protein, 15 aa, unidentified
  source 1..15: note = methanogen bacteria
GTALTGVKEQKIDLL

SEQ ID NO: 69611 - protein, 31 aa, unidentified
  source 1..31: note = methanogen bacteria
VHEPRPFISLDNVRLLITEDDLNSFPSGHTT

SEQ ID NO: 69612 - protein, 10 aa, unidentified
  source 1..10: note = methanogen bacteria
GLNQKLFGVD

SEQ ID NO: 69613 - protein, 10 aa, unidentified
  source 1..10: note = methanogen bacteria
GLNQHLLGVD

SEQ ID NO: 69614 - protein, 14 aa, unidentified
  source 1..14: note = methanogen bacteria
VGPSNMSAGLSKIN

SEQ ID NO: 69615 - protein, 99 aa, unidentified
  source 1..99: note = methanogen bacteria
VGGVFNNGENTNTADHSASQVSTPVNNSTNSINNSSQSSSDNNGSSATETVFWASSQSDIFHKPSCEWAQKISDNHKIVYHSREEAISDGKRPCNVCNP

SEQ ID NO: 69616 - protein, 35 aa, unidentified
  source 1..35: note = methanogen bacteria
NKCPTEAIRVITKTGMSCPALVETDDEPSFVSCIR

SEQ ID NO: 69617 - protein, 30 aa, unidentified
  source 1..30: note = methanogen bacteria
SMCANDALKVEKYVVTIDGEEVERDRIAFN

SEQ ID NO: 69618 - protein, 23 aa, unidentified
  source 1..23: note = methanogen bacteria
DQCGDCIEACPYDMIHKTDNPKL

SEQ ID NO: 69619 - protein, 11 aa, unidentified
  source 1..11: note = methanogen bacteria
FFINYFNMFQI

SEQ ID NO: 69620 - protein, 64 aa, unidentified
  source 1..64: note = methanogen bacteria
AVIESMANSVTIEDLNITRYNHSSQYDSKVYTDIGYEVTYNQKSYGDHVTNLIFYSKKGKVLHN

SEQ ID NO: 69621 - protein, 19 aa, unidentified
  source 1..19: note = methanogen bacteria
PDILSLFGEYILTPIPVGV

SEQ ID NO: 69622 - protein, 24 aa, unidentified
  source 1..24: note = methanogen bacteria
SYMAYRSRMRFYNSFYNWPNSYYY

SEQ ID NO: 69623 - protein, 18 aa, unidentified
  source 1..18: note = methanogen bacteria
KPVVVDLIGDTAIASLSS

SEQ ID NO: 69624 - protein, 12 aa, unidentified
  source 1..12: note = methanogen bacteria
ALTLETLEIAPS

SEQ ID NO: 69625 - protein, 25 aa, unidentified
  source 1..25: note = methanogen bacteria
GPASRNLLNNFKIIEFLDSLQKQDW

SEQ ID NO: 69626 - protein, 100 aa, unidentified
  source 1..100: note = methanogen bacteria
KISSETVSVEHTDSPWKVLIKVKINAQKDNIKYSNIIEKNVSIEGLRDPLPLAKLTIASGILTYDDQIHYKNAIAGYMVIHDFKSPESYIEATAPLYIKK

SEQ ID NO: 69627 - protein, 23 aa, unidentified
  source 1..23: note = methanogen bacteria
IDDCLDKGYFHESADGSCYLCRL

SEQ ID NO: 69628 - protein, 10 aa, unidentified
  source 1..10: note = methanogen bacteria
FINYLNIFQI

SEQ ID NO: 69629 - protein, 12 aa, unidentified
  source 1..12: note = methanogen bacteria
SRIVVDLNTDVS

SEQ ID NO: 69630 - protein, 12 aa, unidentified
  source 1..12: note = methanogen bacteria
QAGPQNISFSGT

SEQ ID NO: 69631 - protein, 10 aa, unidentified
  source 1..10: note = methanogen bacteria
KWMPIDLGIG

SEQ ID NO: 69632 - protein, 23 aa, unidentified
  source 1..23: note = methanogen bacteria
FKYDLFSSNDVITLTFNGVNYNL

SEQ ID NO: 69633 - protein, 23 aa, unidentified
  source 1..23: note = methanogen bacteria
TTTIFIGINNIIHHTGSIDFDTL

SEQ ID NO: 69634 - protein, 84 aa, unidentified
  source 1..84: note = methanogen bacteria
SGMLSGDTSTANDTKHNDTVNPIVEKGDSSGSNATEYWASAKAEKFHLPTCEWAEKISDDNKIIYQTRDDAIEDGKVPCGACNP

SEQ ID NO: 69635 - protein, 36 aa, unidentified
  source 1..36: note = methanogen bacteria
VSNIGAGDNYGSITKAFSQSNKSISFSDVKGDAIGL

SEQ ID NO: 69636 - protein, 15 aa, unidentified
  source 1..15: note = methanogen bacteria
IGVPFGADMYFALVS

SEQ ID NO: 69637 - protein, 16 aa, unidentified
  source 1..16: note = methanogen bacteria
FKSLGVNPNSSAMAEG

SEQ ID NO: 69638 - protein, 51 aa, unidentified
  source 1..51: note = methanogen bacteria
MCASIHSASRIKIIEYDSSFYSIVCQHCESAPCIKICPTDAITDEGVDKEK

SEQ ID NO: 69639 - protein, 21 aa, unidentified
  source 1..21: note = methanogen bacteria
DREEGPACIKACTKRAITVAD

SEQ ID NO: 69640 - protein, 14 aa, unidentified
  source 1..14: note = methanogen bacteria
VGPSNIAFELSKIN

SEQ ID NO: 69641 - protein, 71 aa, unidentified
  source 1..71: note = methanogen bacteria
SMIMGPGDSNEPAPGEVQYMNVTNNISEYENSSYDLTDENGTQISYYDFKENVTEGQNVTAFNASSSANIY

SEQ ID NO: 69642 - protein, 12 aa, unidentified
  source 1..12: note = methanogen bacteria
KLPSVTGSCSHP

SEQ ID NO: 69643 - protein, 22 aa, unidentified
  source 1..22: note = methanogen bacteria
LHSIPQESYLSFLIPSKSIGNG

SEQ ID NO: 69644 - protein, 18 aa, unidentified
  source 1..18: note = methanogen bacteria
THNQASLHSIGTAYLSDL

SEQ ID NO: 69645 - protein, 14 aa, unidentified
  source 1..14: note = methanogen bacteria
TYSTPDSIYKLDRY

SEQ ID NO: 69646 - protein, 14 aa, unidentified
  source 1..14: note = methanogen bacteria
ARFGNPNLDFYSPS

SEQ ID NO: 69647 - protein, 30 aa, unidentified
  source 1..30: note = methanogen bacteria
VLNPYDVVTNLYLSGQFSTTPGASEVSACF

SEQ ID NO: 69648 - protein, 28 aa, unidentified
  source 1..28: note = methanogen bacteria
PLIFGPDAFPANELLNINYNGVQFALKL

SEQ ID NO: 69649 - protein, 11 aa, unidentified
  source 1..11: note = methanogen bacteria
FFINYLNMFQI

SEQ ID NO: 69650 - protein, 12 aa, unidentified
  source 1..12: note = methanogen bacteria
QYCGIDLVLQPL

SEQ ID NO: 69651 - protein, 13 aa, unidentified
  source 1..13: note = methanogen bacteria
IFGGPQPGISHPS

SEQ ID NO: 69652 - protein, 11 aa, unidentified
  source 1..11: note = methanogen bacteria
GRLFVAQSPDA

SEQ ID NO: 69653 - protein, 14 aa, unidentified
  source 1..14: note = methanogen bacteria
ARFGDPNLNFYSPS

SEQ ID NO: 69654 - protein, 13 aa, unidentified
  source 1..13: note = methanogen bacteria
HYANEITDLIYTY

SEQ ID NO: 69655 - protein, 11 aa, unidentified
  source 1..11: note = methanogen bacteria
VSGLGADALAG

SEQ ID NO: 69656 - protein, 24 aa, unidentified
  source 1..24: note = methanogen bacteria
IMNASNNSFRIRFHYSFKCIIWYF

SEQ ID NO: 69657 - protein, 11 aa, unidentified
  source 1..11: note = methanogen bacteria
LFGDLKGIITP

SEQ ID NO: 69658 - protein, 14 aa, unidentified
  source 1..14: note = methanogen bacteria
EGILRGYLSIIHGN

SEQ ID NO: 69659 - protein, 13 aa, unidentified
  source 1..13: note = methanogen bacteria
FKPAEFAFSLSDI

SEQ ID NO: 69660 - protein, 65 aa, unidentified
  source 1..65: note = methanogen bacteria
SLAIDGPSNNNVTDDNGVTYVNVTEQMTSNLNSTPTDYYDGVEHVDYNSPEIKAKYNLTNSSVSY

SEQ ID NO: 69661 - protein, 65 aa, unidentified
  source 1..65: note = methanogen bacteria
SMAIGGSDNNTVVDDGVTFVNVTDEMTSNLNGSGKVFVDDGVYNIDYNNAEDVIEYNLTNNSKSY

SEQ ID NO: 69662 - protein, 12 aa, unidentified
  source 1..12: note = methanogen bacteria
MYGGPRYGILNP

SEQ ID NO: 69663 - protein, 14 aa, unidentified
  source 1..14: note = methanogen bacteria
ARPENAIFELSKIN

SEQ ID NO: 69664 - protein, 26 aa, unidentified
  source 1..26: note = methanogen bacteria
FFGDVLSVTDSFVLAFSGIRINLNFN

SEQ ID NO: 69665 - protein, 14 aa, unidentified
  source 1..14: note = methanogen bacteria
TRPENAVFELSKIN

SEQ ID NO: 69666 - protein, 27 aa, unidentified
  source 1..27: note = methanogen bacteria
IFGPNAFPPTESLALNLGGVNYEILLS

SEQ ID NO: 69667 - protein, 10 aa, unidentified
  source 1..10: note = methanogen bacteria
TQINIHASFA

SEQ ID NO: 69668 - protein, 17 aa, unidentified
  source 1..17: note = methanogen bacteria
LYSVNPADSYLLAMDYL

SEQ ID NO: 69669 - protein, 12 aa, unidentified
  source 1..12: note = methanogen bacteria
ANPFHFAFTMDF

SEQ ID NO: 69670 - protein, 21 aa, unidentified
  source 1..21: note = methanogen bacteria
GHAGFNAADALTFVFNGAQFD

SEQ ID NO: 69671 - protein, 14 aa, unidentified
  source 1..14: note = methanogen bacteria
SRPENVAFEISKIN

SEQ ID NO: 69672 - protein, 25 aa, unidentified
  source 1..25: note = methanogen bacteria
FGDVLSVTDSFVLAFSGIRINLNFN

SEQ ID NO: 69673 - protein, 18 aa, unidentified
  source 1..18: note = methanogen bacteria
PWSPISQQVIYYTSQIDI

SEQ ID NO: 69674 - protein, 98 aa, unidentified
  source 1..98: note = methanogen bacteria
AHPGHGTEYVEEVSSSGSSSPQSVSPSTSGGDSSQSSGSSSGGSSGGGSSQSSGYNVAGSSDASTNDNLNHNSTNQSAVNNSSSNLVVNEDSQLFSIT

SEQ ID NO: 69675 - protein, 11 aa, unidentified
  source 1..11: note = methanogen bacteria
AGPENISFSGT

SEQ ID NO: 69676 - protein, 10 aa, unidentified
  source 1..10: note = methanogen bacteria
GWMTITMGIG

SEQ ID NO: 69677 - protein, 27 aa, unidentified
  source 1..27: note = methanogen bacteria
FGPNVFPAAENVTLNLSGSVFNVPLGR

SEQ ID NO: 69678 - protein, 11 aa, unidentified
  source 1..11: note = methanogen bacteria
KTLKIEFIMLP

SEQ ID NO: 69679 - protein, 18 aa, unidentified
  source 1..18: note = methanogen bacteria
ILPSNSPSADAFATILGT

SEQ ID NO: 69680 - protein, 21 aa, unidentified
  source 1..21: note = methanogen bacteria
LEQVGISPSGVADMAVNFMIY

SEQ ID NO: 69681 - protein, 11 aa, unidentified
  source 1..11: note = methanogen bacteria
KTLKIGLIMLP

SEQ ID NO: 69682 - protein, 18 aa, unidentified
  source 1..18: note = methanogen bacteria
MLPSNSPSADAFATILGT

SEQ ID NO: 69683 - protein, 14 aa, unidentified
  source 1..14: note = methanogen bacteria
PHSFDWVLEEFMGI

SEQ ID NO: 69684 - protein, 96 aa, unidentified
  source 1..96: note = methanogen bacteria
LNTAIEHSNENNEIMSSNQYHYIMNDYIRNIPTLEREALEELSDDVIKNKRPSLDSKGDLKEIVDEKLTDYNRKYYEDYDIIINSSLIAIEIHLRM

SEQ ID NO: 69685 - protein, 36 aa, unidentified
  source 1..36: note = methanogen bacteria
DFYWLHDQIAGFLSPVGFLKTLYLFYMAKAICSAPY

SEQ ID NO: 69686 - protein, 12 aa, unidentified
  source 1..12: note = methanogen bacteria
QAGPQNISFSGT

SEQ ID NO: 69687 - protein, 10 aa, unidentified
  source 1..10: note = methanogen bacteria
KWMPLDFGIG

SEQ ID NO: 69688 - protein, 31 aa, unidentified
  source 1..31: note = methanogen bacteria
GHNPLDSLFFTFSMQGNVGLEIGQMSQNLEF

SEQ ID NO: 69689 - protein, 13 aa, unidentified
  source 1..13: note = methanogen bacteria
MKSRPVMGLIGVG

SEQ ID NO: 69690 - protein, 15 aa, unidentified
  source 1..15: note = methanogen bacteria
ATSATNLGSSLEIVD

SEQ ID NO: 69691 - protein, 14 aa, unidentified
  source 1..14: note = methanogen bacteria
VASAFHASYNPTFS

SEQ ID NO: 69692 - protein, 22 aa, unidentified
  source 1..22: note = methanogen bacteria
IAVPAVSNITSHAAVNSYIMNY

SEQ ID NO: 69693 - protein, 81 aa, unidentified
  source 1..81: note = methanogen bacteria
RGFLYSNTSNDYTNESVFDQISPDQFFSISNGGGDDSYVETAGASSAEANPKNSSVAVTNDSGSYGVNFSRDGFSVSTRGD

SEQ ID NO: 69694 - protein, 11 aa, unidentified
  source 1..11: note = methanogen bacteria
EAGPQNISFSG

SEQ ID NO: 69695 - protein, 19 aa, unidentified
  source 1..19: note = methanogen bacteria
MKHILIIIGAKEALDYALD

SEQ ID NO: 69696 - protein, 91 aa, unidentified
  source 1..91: note = methanogen bacteria
TGMFNGHTSSPTATNDSSSHDNTSTQTVKPSIDNDSSSSAKTEYWASAKAEKFHTPDCEWAQKISEANKIVYHSRDDAVADGKVPCTACNP

SEQ ID NO: 69697 - protein, 17 aa, unidentified
  source 1..17: note = methanogen bacteria
SYMSYVNSMSYYNSYYY

SEQ ID NO: 69698 - protein, 10 aa, unidentified
  source 1..10: note = methanogen bacteria
AGPGNVSFSG

SEQ ID NO: 69699 - protein, 10 aa, unidentified
  source 1..10: note = methanogen bacteria
QWMPISLGIG

SEQ ID NO: 69700 - protein, 10 aa, unidentified
  source 1..10: note = methanogen bacteria
AGPEKVSFSG

SEQ ID NO: 69701 - protein, 10 aa, unidentified
  source 1..10: note = methanogen bacteria
QWMPISLGIG

SEQ ID NO: 69702 - protein, 11 aa, unidentified
  source 1..11: note = methanogen bacteria
LSLLNVSIALA

SEQ ID NO: 69703 - protein, 13 aa, unidentified
  source 1..13: note = methanogen bacteria
YQTGPQNISFSGT

SEQ ID NO: 69704 - protein, 10 aa, unidentified
  source 1..10: note = methanogen bacteria
KWMPIDLGIG

SEQ ID NO: 69705 - protein, 92 aa, unidentified
  source 1..92: note = methanogen bacteria
ATGMFNDHTSSPAVTNDSSSSDNASTQTVKPSIDNDSSSSAKTEYWASAKAEKFHTPDCEWAQKISDANKIVYHSRDDAVADGKVPCTACNP

SEQ ID NO: 69706 - protein, 17 aa, unidentified
  source 1..17: note = methanogen bacteria
TYVAYVGSMSRYSYYYY

SEQ ID NO: 69707 - protein, 91 aa, unidentified
  source 1..91: note = methanogen bacteria
TGMFNGHASGSTASHDSSVNDNSPKETVKPVSDNNSSASANTEYWASAKAEKFHTPDCEWAQKISESNKIVYHSRSDAIADGKVPCTACNP

SEQ ID NO: 69708 - protein, 25 aa, unidentified
  source 1..25: note = methanogen bacteria
FGNVLGVTDSMIFVFNGARFDFSFN

SEQ ID NO: 69709 - protein, 17 aa, unidentified
  source 1..17: note = methanogen bacteria
SQKSLRNLTIGKYKISH

SEQ ID NO: 69710 - protein, 13 aa, unidentified
  source 1..13: note = methanogen bacteria
LQDGPQNVSFNGT

SEQ ID NO: 69711 - protein, 10 aa, unidentified
  source 1..10: note = methanogen bacteria
QWMPVNLGIG

SEQ ID NO: 69712 - protein, 12 aa, unidentified
  source 1..12: note = methanogen bacteria
SQIVADLNTDVS

SEQ ID NO: 69713 - protein, 13 aa, unidentified
  source 1..13: note = methanogen bacteria
LQDGPQNVSFSGT

SEQ ID NO: 69714 - protein, 10 aa, unidentified
  source 1..10: note = methanogen bacteria
QWMPVNLGIS

SEQ ID NO: 69715 - protein, 14 aa, unidentified
  source 1..14: note = methanogen bacteria
VKPENAVAELSKIN

SEQ ID NO: 69716 - protein, 13 aa, unidentified
  source 1..13: note = methanogen bacteria
FQRGPQNISFDGT

SEQ ID NO: 69717 - protein, 10 aa, unidentified
  source 1..10: note = methanogen bacteria
QWMPINLGIG

SEQ ID NO: 69718 - protein, 14 aa, unidentified
  source 1..14: note = methanogen bacteria
VKPENVLTELSRVN

SEQ ID NO: 69719 - protein, 20 aa, unidentified
  source 1..20: note = methanogen bacteria
ETGGIDELVKSIIPYMQDSK

SEQ ID NO: 69720 - protein, 12 aa, unidentified
  source 1..12: note = methanogen bacteria
QVGPQNISFSGT

SEQ ID NO: 69721 - protein, 10 aa, unidentified
  source 1..10: note = methanogen bacteria
KWMPIDLGIG

SEQ ID NO: 69722 - protein, 29 aa, unidentified
  source 1..29: note = methanogen bacteria
MKLNIVDSLYYTVITIATVGYGDIYPLTP

SEQ ID NO: 69723 - protein, 18 aa, unidentified
  source 1..18: note = methanogen bacteria
IPKLGNLFSTADISLSVA

SEQ ID NO: 69724 - protein, 20 aa, unidentified
  source 1..20: note = methanogen bacteria
ENFDKLSDIGSFSAINHALN

SEQ ID NO: 69725 - protein, 34 aa, unidentified
  source 1..34: note = methanogen bacteria
SFGMWDEILGGKPHQTLLGMVRPIRSDHRFQEPA

SEQ ID NO: 69726 - protein, 14 aa, unidentified
  source 1..14: note = methanogen bacteria
NTDIANTTLELSKL

SEQ ID NO: 69727 - protein, 11 aa, unidentified
  source 1..11: note = methanogen bacteria
ERGPQNIQFDG

SEQ ID NO: 69728 - protein, 10 aa, unidentified
  source 1..10: note = methanogen bacteria
QWMPVNLGIG

SEQ ID NO: 69729 - protein, 12 aa, unidentified
  source 1..12: note = methanogen bacteria
QAGPQNINFSGT

SEQ ID NO: 69730 - protein, 10 aa, unidentified
  source 1..10: note = methanogen bacteria
HWMPITLGIG

SEQ ID NO: 69731 - protein, 100 aa, unidentified
  source 1..100: note = methanogen bacteria
SNFSATDVQTDAADDVKDTGGKPNVTDVSGDQEYYVVPVAHLNKVTVNGQDRSDAISGSAVGVQANVIDQGQVTIKPGEIVIETPPGVPPEVAVQRPEVN

SEQ ID NO: 69732 - protein, 14 aa, unidentified
  source 1..14: note = methanogen bacteria
VKPSNVVFELSKIN

SEQ ID NO: 69733 - protein, 13 aa, unidentified
  source 1..13: note = methanogen bacteria
MDSSAINQLLAND

SEQ ID NO: 69734 - protein, 22 aa, unidentified
  source 1..22: note = methanogen bacteria
FNYNLFLPGDYINFAFNGFEFK

SEQ ID NO: 69735 - protein, 14 aa, unidentified
  source 1..14: note = methanogen bacteria
AGPSNIGVEISKIN

SEQ ID NO: 69736 - protein, 14 aa, unidentified
  source 1..14: note = methanogen bacteria
VGPSNVGVEMSKIN

SEQ ID NO: 69737 - protein, 12 aa, unidentified
  source 1..12: note = methanogen bacteria
LERGPQNIQFTG

SEQ ID NO: 69738 - protein, 10 aa, unidentified
  source 1..10: note = methanogen bacteria
QWMPTDMGIG

SEQ ID NO: 69739 - protein, 17 aa, unidentified
  source 1..17: note = methanogen bacteria
PGLSALRTGDITTLAQS

SEQ ID NO: 69740 - protein, 26 aa, unidentified
  source 1..26: note = methanogen bacteria
FFKGWGADPNTSLQQPCSNLQNLSLE

SEQ ID NO: 69741 - protein, 14 aa, unidentified
  source 1..14: note = methanogen bacteria
VKPSNVMFELSKVN

SEQ ID NO: 69742 - protein, 12 aa, unidentified
  source 1..12: note = methanogen bacteria
QAGPQNISFSGT

SEQ ID NO: 69743 - protein, 10 aa, unidentified
  source 1..10: note = methanogen bacteria
KWMPVDLGIG

SEQ ID NO: 69744 - protein, 75 aa, unidentified
  source 1..75: note = methanogen bacteria
AAFNSTNHSSTSGRGYSSVDDFINNNLRPSGDEEVEYSYYPSREYDVSYNEDNASDFWGTIFGESQRLSGENHSL

SEQ ID NO: 69745 - protein, 14 aa, unidentified
  source 1..14: note = methanogen bacteria
VGPSNISVGLSKIN

SEQ ID NO: 69746 - protein, 10 aa, unidentified
  source 1..10: note = methanogen bacteria
DVGPTLFDIP

SEQ ID NO: 69747 - protein, 14 aa, unidentified
  source 1..14: note = methanogen bacteria
VKPSNVVFELSKVN

SEQ ID NO: 69748 - protein, 14 aa, unidentified
  source 1..14: note = methanogen bacteria
VKPENVASEISKVN

SEQ ID NO: 69749 - protein, 12 aa, unidentified
  source 1..12: note = methanogen bacteria
QAGPQNITFKGT

SEQ ID NO: 69750 - protein, 10 aa, unidentified
  source 1..10: note = methanogen bacteria
KWMPLDFGIG

SEQ ID NO: 69751 - protein, 10 aa, unidentified
  source 1..10: note = methanogen bacteria
ARDLNNKLKN

SEQ ID NO: 69752 - protein, 79 aa, unidentified
  source 1..79: note = methanogen bacteria
SMIYDTNYWALVIRNIDSGNGLYGLDGYFYTPVWGYLLALEEWFNDSFLNLGESAVRVSEIVYFENGNHQTTAMITSVA

SEQ ID NO: 69753 - protein, 12 aa, unidentified
  source 1..12: note = methanogen bacteria
QRGPQNVHFDGV

SEQ ID NO: 69754 - protein, 10 aa, unidentified
  source 1..10: note = methanogen bacteria
QWMPVNLGIG

SEQ ID NO: 69755 - protein, 90 aa, unidentified
  source 1..90: note = methanogen bacteria
MSKEKVNITIKNSKGKIVVNKTVKTNAKGQAKVDLNLKKGKYNVRATYDGNENYTGNSTARNLTIKEKVVQAALQSSNSASSSQNSEREE

SEQ ID NO: 69756 - protein, 44 aa, unidentified
  source 1..44: note = methanogen bacteria
WNPGEHEVGRRSIGNGLERVGYDDGYFRVVDQDGNIVTHGWGNL

SEQ ID NO: 69757 - protein, 12 aa, unidentified
  source 1..12: note = methanogen bacteria
QGGPHNVHFSGE

SEQ ID NO: 69758 - protein, 10 aa, unidentified
  source 1..10: note = methanogen bacteria
QWMPINMGLG

SEQ ID NO: 69759 - protein, 13 aa, unidentified
  source 1..13: note = methanogen bacteria
LERGPQNLQFSGT

SEQ ID NO: 69760 - protein, 10 aa, unidentified
  source 1..10: note = methanogen bacteria
QWMPVNLGIG

SEQ ID NO: 69761 - protein, 15 aa, unidentified
  source 1..15: note = methanogen bacteria
PWLAYNYLGKPAAMV

SEQ ID NO: 69762 - protein, 13 aa, unidentified
  source 1..13: note = methanogen bacteria
FQSGPQNVVFSGY

SEQ ID NO: 69763 - protein, 10 aa, unidentified
  source 1..10: note = methanogen bacteria
GWLPLTFGIG

SEQ ID NO: 69764 - protein, 13 aa, unidentified
  source 1..13: note = methanogen bacteria
FQSGPQNVAFSGY

SEQ ID NO: 69765 - protein, 10 aa, unidentified
  source 1..10: note = methanogen bacteria
GWLPLTFGIG

SEQ ID NO: 69766 - protein, 10 aa, unidentified
  source 1..10: note = methanogen bacteria
EAREINQKLE

SEQ ID NO: 69767 - protein, 11 aa, unidentified
  source 1..11: note = methanogen bacteria
AAGPENVSFSG

SEQ ID NO: 69768 - protein, 10 aa, unidentified
  source 1..10: note = methanogen bacteria
QWMPISLGIG

SEQ ID NO: 69769 - protein, 99 aa, unidentified
  source 1..99: note = methanogen bacteria
SNFSATDVQADTADDIEDVSGKPNVTDVSGDQEYYVMPVANLHKVTVNGQDRSDAIVGSAVGVQAKVIDQGQVTIKPGEIVIQTPPGVPAEVAVQRPEL

SEQ ID NO: 69770 - protein, 34 aa, unidentified
  source 1..34: note = methanogen bacteria
GQMDLNVLLNPMNTTQLENLTQNASANSTNIFGL

SEQ ID NO: 69771 - protein, 39 aa, unidentified
  source 1..39: note = methanogen bacteria
FFPLDSLLNMVNSISLPLLDVVTGTNDPLIFIGEFYSTD

SEQ ID NO: 69772 - protein, 14 aa, unidentified
  source 1..14: note = methanogen bacteria
YMIVGAGNVHTIYD

SEQ ID NO: 69773 - protein, 18 aa, unidentified
  source 1..18: note = methanogen bacteria
VPRFSSVLGTADLSISLS

SEQ ID NO: 69774 - protein, 10 aa, unidentified
  source 1..10: note = methanogen bacteria
SNPNNVNFSG

SEQ ID NO: 69775 - protein, 11 aa, unidentified
  source 1..11: note = methanogen bacteria
HWMPINLGINP

SEQ ID NO: 69776 - protein, 21 aa, unidentified
  source 1..21: note = methanogen bacteria
VMFQWYDYLSMQYKNLIVGID

SEQ ID NO: 69777 - protein, 14 aa, unidentified
  source 1..14: note = methanogen bacteria
ISNTISEDVSLLTG

SEQ ID NO: 69778 - protein, 10 aa, unidentified
  source 1..10: note = methanogen bacteria
LEYGLGEVTY

SEQ ID NO: 69779 - protein, 26 aa, unidentified
  source 1..26: note = methanogen bacteria
FGSHVLDYFDFIPLSLGGFQFDLILG

SEQ ID NO: 69780 - protein, 12 aa, unidentified
  source 1..12: note = methanogen bacteria
VNTTAGANILSI

SEQ ID NO: 69781 - protein, 22 aa, unidentified
  source 1..22: note = methanogen bacteria
FGSGVLSSFDHLVMIFNGVHFS

SEQ ID NO: 69782 - protein, 29 aa, unidentified
  source 1..29: note = methanogen bacteria
LKNDTLGMNLITAGSMSDGRLKKQKSPLS

SEQ ID NO: 69783 - protein, 13 aa, unidentified
  source 1..13: note = methanogen bacteria
DGVFKEIPPTEQG

SEQ ID NO: 69784 - protein, 65 aa, unidentified
  source 1..65: note = methanogen bacteria
SLSFNEGHTEKPEFENVTEEMTSDLNQTDQVYYDRSVDEIDYNENDTSILNVNQQYEFNQSQYQQ

SEQ ID NO: 69785 - protein, 12 aa, unidentified
  source 1..12: note = methanogen bacteria
FFVNPVSKYQVY

SEQ ID NO: 69786 - protein, 14 aa, unidentified
  source 1..14: note = methanogen bacteria
IINLINYNGDKLLE

SEQ ID NO: 69787 - protein, 77 aa, unidentified
  source 1..77: note = methanogen bacteria
KVVGYKTVRKYGFIPHYGWKLMPVVSKGEVHFSQWKYVKGVYYTLGWYKVKEPIYKVYYISDEALTSAPLKNVKKTA

SEQ ID NO: 69788 - protein, 13 aa, unidentified
  source 1..13: note = methanogen bacteria
LQSGPQVVSFSGY

SEQ ID NO: 69789 - protein, 10 aa, unidentified
  source 1..10: note = methanogen bacteria
TWMPLNLGIS

SEQ ID NO: 69790 - protein, 10 aa, unidentified
  source 1..10: note = methanogen bacteria
EAKDINQKLE

SEQ ID NO: 69791 - protein, 99 aa, unidentified
  source 1..99: note = methanogen bacteria
SNFSATDVQADTAEDIEDAGGKPNVTDVSGDQEYYVMPVANLHKVTVNGQDRSDAIAGSAVGVQANVIDQGQVTIKPGEIVIETPPGVSADVAVQRPEL

SEQ ID NO: 69792 - protein, 100 aa, unidentified
  source 1..100: note = methanogen bacteria
SQNPMDQPQNYTPDQISAKPNSQSGNSDYYLLPLNGLHKVTVNGVDYSDDIRNGAVAVHTRVMDEGQITMDSSTGTITIQAPEDLQDIAVKAPSSSSSST

SEQ ID NO: 69793 - protein, 10 aa, unidentified
  source 1..10: note = methanogen bacteria
SIVNNKITLA

SEQ ID NO: 69794 - protein, 14 aa, unidentified
  source 1..14: note = methanogen bacteria
TKPDNVSFEMAKIN

SEQ ID NO: 69795 - protein, 14 aa, unidentified
  source 1..14: note = methanogen bacteria
VENNFIEDVILMDN

SEQ ID NO: 69796 - protein, 24 aa, unidentified
  source 1..24: note = methanogen bacteria
IKPGVGINIAAISQTSNSFKCFSQ

SEQ ID NO: 69797 - protein, 100 aa, unidentified
  source 1..100: note = methanogen bacteria
MIVVNNSDSDDAVEESSDSGSSSSNSGSSSSSSDAVTYSQAQSMYPDTSSNVISNAFDEADANKDGLLTGSEINEFKRLAKLAINTASESDSTTYNEHGS

SEQ ID NO: 69798 - protein, 19 aa, unidentified
  source 1..19: note = methanogen bacteria
YCKAEGLDSRTVKGSTEYN

SEQ ID NO: 69799 - protein, 100 aa, unidentified
  source 1..100: note = methanogen bacteria
SSFAGTATDANSHQTSDATGKPNVTDTSGNSEYYIIPVDGLQHVIVNGKDMSYLIQDDAIAIHARVIDQGQITVNNKDKSIEITTPSGMSPNQAVRKPNQ

SEQ ID NO: 69800 - protein, 12 aa, unidentified
  source 1..12: note = methanogen bacteria
QETLYMDFYLEN

SEQ ID NO: 69801 - protein, 18 aa, unidentified
  source 1..18: note = methanogen bacteria
TASIWSIFKVKSYYNSPY

SEQ ID NO: 69802 - protein, 10 aa, unidentified
  source 1..10: note = methanogen bacteria
NNDNNRDIQY

SEQ ID NO: 69803 - protein, 100 aa, unidentified
  source 1..100: note = methanogen bacteria
SNFSATDVQTDAADDVKDTGGKPNVTDVSGDQEYYVMPVANLHKVTVNGQDRSDAIAGSAVGVQANVIDEGQVTIKPGEIVIETPPGVPPEVAVQRPELN

SEQ ID NO: 69804 - protein, 10 aa, unidentified
  source 1..10: note = methanogen bacteria
SQISVHASFA

SEQ ID NO: 69805 - protein, 21 aa, unidentified
  source 1..21: note = methanogen bacteria
LYSVDQTDSYILIWDYIAPKF

SEQ ID NO: 69806 - protein, 13 aa, unidentified
  source 1..13: note = methanogen bacteria
SYMSYVSRMSYYY

SEQ ID NO: 69807 - protein, 15 aa, unidentified
  source 1..15: note = methanogen bacteria
INNHQIYGNGLNPHI

SEQ ID NO: 69808 - protein, 12 aa, unidentified
  source 1..12: note = methanogen bacteria
VLWDFGVFAPQI

SEQ ID NO: 69809 - protein, 16 aa, unidentified
  source 1..16: note = methanogen bacteria
QGTLGTFSGFFSTETG

SEQ ID NO: 69810 - protein, 18 aa, unidentified
  source 1..18: note = methanogen bacteria
MPGIHAEISNGFSVVFQT

SEQ ID NO: 69811 - protein, 16 aa, unidentified
  source 1..16: note = methanogen bacteria
QGYMGQFSGFFLTENG

SEQ ID NO: 69812 - protein, 98 aa, unidentified
  source 1..98: note = methanogen bacteria
NFSATDVQTDDSNPASEATGKPNVTDVSGDQEYYVVPVAGLHKVVVNGKDRSDAIAGSAVGVQAKVMDQGEVNIKPGLIEITTPPGVPPEVAVQRPAL

SEQ ID NO: 69813 - protein, 99 aa, unidentified
  source 1..99: note = methanogen bacteria
SNFSATDVQTDDSDVASEATGKPNVTDVSGDQEYYIVPVANLHKVTVNGQDRSDAISGGAVGVQAKVIDQGQVSIKPGEIVITTPPDISVEKAVQRPEV

SEQ ID NO: 69814 - protein, 16 aa, unidentified
  source 1..16: note = methanogen bacteria
IGTFGEFNGFFTTETG

SEQ ID NO: 69815 - protein, 10 aa, unidentified
  source 1..10: note = methanogen bacteria
MDMNIPAIPD

SEQ ID NO: 69816 - protein, 99 aa, unidentified
  source 1..99: note = methanogen bacteria
TSNFAAVDSPSNTATDSGGTGKPNVTDTSGNAEYYIVPVANLHKVTVNGVDRSDAISGSAVGVQAKVMDEGQISIKPGEIIIVTPNGISPQDAVQRPKT

SEQ ID NO: 69817 - protein, 99 aa, unidentified
  source 1..99: note = methanogen bacteria
SNFSATDVQTDDSNVADSATGKPNVTDVSGDQEYYVVPVANLHKVTVNGQDRSDAIAGGAVGVQAKVIDEGQVTIKPGEVVITTPPGVPPEVAVHRPEL

SEQ ID NO: 69818 - protein, 99 aa, unidentified
  source 1..99: note = methanogen bacteria
SNFSATEVQTDDSDVASDATGKPNVTDVSGDQEYYVVPVANLHKVTVNGQDRSDAISGGAVGVQAKVIDQGEVSIKPGEVVITTPPDVPVDKAVHRPEL

SEQ ID NO: 69819 - protein, 99 aa, unidentified
  source 1..99: note = methanogen bacteria
SNFSATDVQTDDADVVEDASGKPNVTDVSGDAEYYVMPVANLHKVTVNGQDRSDAIAGSAVGVQARVIDEGQVTIKPGEIVITTPPGISVDMAVQRPEL

SEQ ID NO: 69820 - protein, 99 aa, unidentified
  source 1..99: note = methanogen bacteria
SNFSATDVQADTAEDVDQGSGKPNVTDVSGDQEYYVMPVANLHKVTVNGQDRSDSIAGSAVGVQARVIDEGQVTIKPGEIVIQTPPGISVDQAVQRPEV

SEQ ID NO: 69821 - protein, 16 aa, unidentified
  source 1..16: note = methanogen bacteria
QGYMGTFSGFFVSNTG

SEQ ID NO: 69822 - protein, 99 aa, unidentified
  source 1..99: note = methanogen bacteria
SNFSATDVQADTADDLDQGTGKPNVTDVSGDQEYYVVPVANLHKVTVNGQDRSDAIAGSAVGVQARVIDEGQVIIKPGEIVIETPPGISVDQAVQRPEV

SEQ ID NO: 69823 - protein, 19 aa, unidentified
  source 1..19: note = methanogen bacteria
LPSPVWYTGDSSLAFVFTQ

SEQ ID NO: 69824 - protein, 15 aa, unidentified
  source 1..15: note = methanogen bacteria
GAFDSITNNGLGANN

SEQ ID NO: 69825 - protein, 99 aa, unidentified
  source 1..99: note = methanogen bacteria
SNFSATDVQADTTSDVKDTGGKPNVTDVSGTEEYYIVPVANLHKVTVNGQDRSDAISGGAVGVHAKVIDNGQVSIKPGEIIINTPPDVSVNDAVRRPEI

SEQ ID NO: 69826 - protein, 26 aa, unidentified
  source 1..26: note = methanogen bacteria
SFFSDGMASFLQDCIGIRFEGHTSVQ

SEQ ID NO: 69827 - protein, 11 aa, unidentified
  source 1..11: note = methanogen bacteria
MKENELPYYGV

SEQ ID NO: 69828 - protein, 99 aa, unidentified
  source 1..99: note = methanogen bacteria
SNFSATDVQTDTADQVEDASGKPNVTDVSGDQEYYVMPVANLHKVTVNGQDRSDSIAGSAVGVQANVIDQGQVVIKPGEIVITTPPGVPPEKAVQRPEL

SEQ ID NO: 69829 - protein, 99 aa, unidentified
  source 1..99: note = methanogen bacteria
SNFSATDVQTDDAAVTDGATGKPNVTDVSGDSQYYVVPVANLHKVTVNGQDRSDAISGGAVGVAARVIDGGQIQIKPGEIIITTPPGVSVQDAVQRPNI

SEQ ID NO: 69830 - protein, 12 aa, unidentified
  source 1..12: note = methanogen bacteria
SYIASTFGLSDA

SEQ ID NO: 69831 - protein, 99 aa, unidentified
  source 1..99: note = methanogen bacteria
SNFSADVQTDATDDVTQNASGKPNVTDVSGDQEYYVVPVAGLHKVTVNGQDRSDAIAGSAVGVQAKVVDQGEIKIKPGLVEITTPPGVPPEVAVQRPEI

SEQ ID NO: 69832 - protein, 98 aa, unidentified
  source 1..98: note = methanogen bacteria
SNFSADVQTDATDAAEEASGKPNVTDVSGDQEYYVVPVAGLNKVTVNGQDRSDAIAGGAVGVQAKVIDQGEIKIKPGLIEITTPPGVPPEVAVKRPEL

SEQ ID NO: 69833 - protein, 16 aa, unidentified
  source 1..16: note = methanogen bacteria
IGTLGEFSGYFSTQVG

SEQ ID NO: 69834 - protein, 19 aa, unidentified
  source 1..19: note = methanogen bacteria
SSQKSLKDLKIGNYKISHL

SEQ ID NO: 69835 - protein, 10 aa, unidentified
  source 1..10: note = methanogen bacteria
MSMNIPTIPD

SEQ ID NO: 69836 - protein, 97 aa, unidentified
  source 1..97: note = methanogen bacteria
SNFSAVDTPTQATDSGATGKPNVTDVSGDAEYYVVPVANLHKVTVNGVDRSDAIAGGAVGVQAKVIDEGQISIKPGEIIITTPNGISPDKAVQRPRM

SEQ ID NO: 69837 - protein, 19 aa, unidentified
  source 1..19: note = methanogen bacteria
DAWGEGIIDLLTGFENTSK

SEQ ID NO: 69838 - protein, 18 aa, unidentified
  source 1..18: note = methanogen bacteria
FEGYLGTFKEGFFTTETG

SEQ ID NO: 69839 - protein, 15 aa, unidentified
  source 1..15: note = methanogen bacteria
KANNKKTFKGKLAVK

SEQ ID NO: 69840 - protein, 97 aa, unidentified
  source 1..97: note = methanogen bacteria
SNFSAVDSPTQATDGGATGKPNVTDTSGNAEYYIVPVANLHKVTVNGVDKSNAISGSAVGVQARVMDEGQVTIKPGEIVIVTPDGISPDKAVQRPKT

SEQ ID NO: 69841 - protein, 15 aa, unidentified
  source 1..15: note = methanogen bacteria
GYLGAFDGYFLTENG

SEQ ID NO: 69842 - protein, 18 aa, unidentified
  source 1..18: note = methanogen bacteria
MNVVDFVMIMSTLDYDEW

SEQ ID NO: 69843 - protein, 23 aa, unidentified
  source 1..23: note = methanogen bacteria
FARTPRPLRSGMNCTVGEGYTTL

SEQ ID NO: 69844 - protein, 11 aa, unidentified
  source 1..11: note = methanogen bacteria
MDVSSFLTNMP

SEQ ID NO: 69845 - protein, 13 aa, unidentified
  source 1..13: note = methanogen bacteria
GYLGEFTGFFESI

SEQ ID NO: 69846 - protein, 36 aa, unidentified
  source 1..36: note = methanogen bacteria
FIKDIPTSFVNANQMPSLEHLFGTDWMGRDMFQRTI

SEQ ID NO: 69847 - protein, 20 aa, unidentified
  source 1..20: note = methanogen bacteria
RCCHGCRFNSLDSSCKGFKI

SEQ ID NO: 69848 - protein, 16 aa, unidentified
  source 1..16: note = methanogen bacteria
QGTFGEFSGFFSTPTG

SEQ ID NO: 69849 - protein, 97 aa, unidentified
  source 1..97: note = methanogen bacteria
SNFSAVDAPMDATDSGATGKPNVTDTSGNAEYYIVPVANLHKVTVNGVDRSDAISGGAVGVQAKVMDEGQISIKPGEIIINTPNGISPDQAVQRPKV

SEQ ID NO: 69850 - protein, 97 aa, unidentified
  source 1..97: note = methanogen bacteria
SQHPVEKMPDEYTQDQISAKPTSQQGDSEYYLLPLNGLKKVTVNGQDRSSDIRQGSIAVHTRVMDEGQILMDSSTGTITITAPDDLVDVAVKAPVIG

SEQ ID NO: 69851 - protein, 10 aa, unidentified
  source 1..10: note = methanogen bacteria
MEMTIPTIPD

SEQ ID NO: 69852 - protein, 14 aa, unidentified
  source 1..14: note = methanogen bacteria
GYMGQFDGFFLTQN

SEQ ID NO: 69853 - protein, 59 aa, unidentified
  source 1..59: note = methanogen bacteria
SLSFDNDDSSQPHYENVTKEMTENVSANEVTYDKAVDGKDYNENGTSQLDMQYIQSKEK

SEQ ID NO: 69854 - protein, 11 aa, unidentified
  source 1..11: note = methanogen bacteria
GPQMGIEPLFT

SEQ ID NO: 69855 - protein, 17 aa, unidentified
  source 1..17: note = methanogen bacteria
FSYMAYVNSMRYYNYYY

SEQ ID NO: 69856 - protein, 53 aa, unidentified
  source 1..53: note = methanogen bacteria
VMGGISTAVDTYAPDYSGDEHFHQEVYDYFQKLETIEGQDSIVVDTADIIIQN

SEQ ID NO: 69857 - protein, 12 aa, unidentified
  source 1..12: note = methanogen bacteria
FINPYGTFQPYN

SEQ ID NO: 69858 - protein, 66 aa, unidentified
  source 1..66: note = methanogen bacteria
LSFDDGTEDVKNETHYENVTVEMTTNLNKSKGVVFDESDRVDFNQNKTSQILDVEKNPYYNNTNPD

SEQ ID NO: 69859 - protein, 97 aa, unidentified
  source 1..97: note = methanogen bacteria
SSFGAAAVNGNDTGTGTGKPNMTDSTGDAEYYMIPVAGLQKVTVNGVDMSSEIRGNAIGVHANVLDQGDVQIKTKEHAIIIQAPPGMTPQQAVHSPE

SEQ ID NO: 69860 - protein, 83 aa, unidentified
  source 1..83: note = methanogen bacteria
SGMFSSDNSTTDVEAQSETVDPISEDDDTTTEPTEYWASAKAEKFHLPTCEWAEKISEDNKIIYQSREDAIADGKVPCGACNP

SEQ ID NO: 69861 - protein, 96 aa, unidentified
  source 1..96: note = methanogen bacteria
TFGAAAVTGDDTGTGTGKPNMTDTTGDAEYYLLPVAGLQKVVVNGVDMSSEIRGNAIGVHARVLDQGDVQIKTSEHAIYIQAPSGMSPQEAVHSPE

SEQ ID NO: 69862 - protein, 29 aa, unidentified
  source 1..29: note = methanogen bacteria
LVAGADSITDAILDQADISRDDAEGALEI

SEQ ID NO: 69863 - protein, 30 aa, unidentified
  source 1..30: note = methanogen bacteria
LLVAGADSITDAILDQADISRDDAEGALEI

SEQ ID NO: 69864 - protein, 12 aa, unidentified
  source 1..12: note = methanogen bacteria
KMPSVTGSCSHP

SEQ ID NO: 69865 - protein, 11 aa, unidentified
  source 1..11: note = methanogen bacteria
FMNPYSVYTVY

SEQ ID NO: 69866 - protein, 10 aa, unidentified
  source 1..10: note = methanogen bacteria
LGYSLPKSLQ

SEQ ID NO: 69867 - protein, 20 aa, unidentified
  source 1..20: note = methanogen bacteria
WAPAPEFFTNSEAYAIVLGS

SEQ ID NO: 69868 - protein, 60 aa, unidentified
  source 1..60: note = methanogen bacteria
VSLSFDDGNDGQPHFENVTEEMTKNITANEVIYDKEVDGIDYNENGSSLIDTQYIKENET

SEQ ID NO: 69869 - protein, 13 aa, unidentified
  source 1..13: note = methanogen bacteria
LIMNPYDSSAVYQ

SEQ ID NO: 69870 - protein, 93 aa, unidentified
  source 1..93: note = methanogen bacteria
GISMGFNGDNQTNITQNNTTHLPVDVTHNISLYENRSIDNFDESGLNQDTVVEYTASNNTDDTYYSDYDDSSYQEYQTDDYSYQDSGSDYYQY

SEQ ID NO: 69871 - protein, 14 aa, unidentified
  source 1..14: note = methanogen bacteria
GYMGQFDGFFLTET

SEQ ID NO: 69872 - protein, 11 aa, unidentified
  source 1..11: note = methanogen bacteria
LFVNPYNMYTI

SEQ ID NO: 69873 - protein, 14 aa, unidentified
  source 1..14: note = methanogen bacteria
GYMGKFDGFFATET

SEQ ID NO: 69874 - protein, 13 aa, unidentified
  source 1..13: note = methanogen bacteria
VPKIFNPVLADYT

SEQ ID NO: 69875 - protein, 23 aa, unidentified
  source 1..23: note = methanogen bacteria
NAIYGWNFIMQIANGGYEVLNTE

SEQ ID NO: 69876 - protein, 24 aa, unidentified
  source 1..24: note = methanogen bacteria
GIPFFNTFFKSHIMGNEVCITIHI

SEQ ID NO: 69877 - protein, 11 aa, unidentified
  source 1..11: note = methanogen bacteria
VASLGESAISG

SEQ ID NO: 69878 - protein, 20 aa, unidentified
  source 1..20: note = methanogen bacteria
TLINVVFGQIEADVWHNAEL

SEQ ID NO: 69879 - protein, 11 aa, unidentified
  source 1..11: note = methanogen bacteria
AGPENISFSGT

SEQ ID NO: 69880 - protein, 12 aa, unidentified
  source 1..12: note = methanogen bacteria
IINPYGSFQIYT

SEQ ID NO: 69881 - protein, 60 aa, unidentified
  source 1..60: note = methanogen bacteria
VSLSFEDNHVDEGPHFVNVTKEMTSDLNDTEDVYYDKSADAIDYNQNQTQFDIPHGNTTQ

SEQ ID NO: 69882 - protein, 30 aa, unidentified
  source 1..30: note = methanogen bacteria
NICLKYGLENPTVNIDSSIGPDQIPVIVYV

SEQ ID NO: 69883 - protein, 28 aa, unidentified
  source 1..28: note = methanogen bacteria
NKEVTYEYIDGYIYETKGITTWVDISDI

SEQ ID NO: 69884 - protein, 12 aa, unidentified
  source 1..12: note = methanogen bacteria
FINPYGQFQVYM

SEQ ID NO: 69885 - protein, 11 aa, unidentified
  source 1..11: note = methanogen bacteria
RTLEISFIALP

SEQ ID NO: 69886 - protein, 16 aa, unidentified
  source 1..16: note = methanogen bacteria
FKQSQCPCICSSSLNN

SEQ ID NO: 69887 - protein, 74 aa, unidentified
  source 1..74: note = methanogen bacteria
WNMQSVLFNDQLTQEQKEKVMEAMNQEVTEVQEGQILNETPDTSNQTGQGYTEMGKVYKDPSTGKLIMVQNKTN

SEQ ID NO: 69888 - protein, 12 aa, unidentified
  source 1..12: note = methanogen bacteria
CFGYKSVSGIYP

SEQ ID NO: 69889 - protein, 16 aa, unidentified
  source 1..16: note = methanogen bacteria
LNFCNIDAPVYKEAVD

SEQ ID NO: 69890 - protein, 13 aa, unidentified
  source 1..13: note = methanogen bacteria
LTINPTEISSVYA

SEQ ID NO: 69891 - protein, 17 aa, unidentified
  source 1..17: note = methanogen bacteria
SRESWKSIKIGNFSMSH

SEQ ID NO: 69892 - protein, 11 aa, unidentified
  source 1..11: note = methanogen bacteria
LIESGGAQGNS

SEQ ID NO: 69893 - protein, 17 aa, unidentified
  source 1..17: note = methanogen bacteria
SRESWKSIKVGNFSMSH

SEQ ID NO: 69894 - protein, 12 aa, unidentified
  source 1..12: note = methanogen bacteria
IINPADVGSVYR

SEQ ID NO: 69895 - protein, 17 aa, unidentified
  source 1..17: note = methanogen bacteria
SINSLKNLTIGKYKISH

SEQ ID NO: 69896 - protein, 67 aa, unidentified
  source 1..67: note = methanogen bacteria
MHNYKSKNNKINYNYIVNEKHNLVGTGNIDADYNWWGKNKLFKVSKSFKIKKFVVMYLNAPHKLSIP

SEQ ID NO: 69897 - protein, 51 aa, unidentified
  source 1..51: note = methanogen bacteria
TRHYFNDYIKTNKSNIKHNNLKTKIKAIKKRNSYELKIVCDGQTLVKNYYY

SEQ ID NO: 69898 - protein, 60 aa, unidentified
  source 1..60: note = methanogen bacteria
FWNLDSGSQDDGPHWINVTEEMTTNLNETEPVYYDASVDDVDYNSNQTLTELNVTTEPSY

SEQ ID NO: 69899 - protein, 17 aa, unidentified
  source 1..17: note = methanogen bacteria
SLKSFKSLRIGNHEISH

SEQ ID NO: 69900 - protein, 21 aa, unidentified
  source 1..21: note = methanogen bacteria
ELEDMLLDLPNTMNMLISHNH

SEQ ID NO: 69901 - protein, 10 aa, unidentified
  source 1..10: note = methanogen bacteria
IGSKNIYSVY

SEQ ID NO: 69902 - protein, 10 aa, unidentified
  source 1..10: note = methanogen bacteria
VPTIAFTPFN

SEQ ID NO: 69903 - protein, 18 aa, unidentified
  source 1..18: note = methanogen bacteria
SSQKSLRNLTIGKYKMSH

SEQ ID NO: 69904 - protein, 11 aa, unidentified
  source 1..11: note = methanogen bacteria
ILGPKNVYSVY

SEQ ID NO: 69905 - protein, 95 aa, unidentified
  source 1..95: note = methanogen bacteria
SNFSATDMPSDATDVGTGKPNVTDVSGDSEYYIVPVANLHKVTVNGVDRSDAISNSAIGVQARVIDEGQVSIKPGEIIITTPNGVSVQDAVRSPA

SEQ ID NO: 69906 - protein, 17 aa, unidentified
  source 1..17: note = methanogen bacteria
SQKSLKHMTIGGYKMSH

SEQ ID NO: 69907 - protein, 12 aa, unidentified
  source 1..12: note = methanogen bacteria
GLLGPKNVYQAY

SEQ ID NO: 69908 - protein, 10 aa, unidentified
  source 1..10: note = methanogen bacteria
NLINPKDANQ

SEQ ID NO: 69909 - protein, 14 aa, unidentified
  source 1..14: note = methanogen bacteria
SLIVGPVDIMGVYG

SEQ ID NO: 69910 - protein, 16 aa, unidentified
  source 1..16: note = methanogen bacteria
IKTLRDIKIGNYDMSH

SEQ ID NO: 69911 - protein, 10 aa, unidentified
  source 1..10: note = methanogen bacteria
TRGPMLFDMP

SEQ ID NO: 69912 - protein, 14 aa, unidentified
  source 1..14: note = methanogen bacteria
YSIMGPKNVYQVYQ

SEQ ID NO: 69913 - protein, 18 aa, unidentified
  source 1..18: note = methanogen bacteria
ASQKSLKDLKIGNRKISS

SEQ ID NO: 69914 - protein, 12 aa, unidentified
  source 1..12: note = methanogen bacteria
RLVGPKNVYSVY

SEQ ID NO: 69915 - protein, 13 aa, unidentified
  source 1..13: note = methanogen bacteria
FNMVGAKNVYSVY

SEQ ID NO: 69916 - protein, 10 aa, unidentified
  source 1..10: note = methanogen bacteria
FYSTTYNISS

SEQ ID NO: 69917 - protein, 13 aa, unidentified
  source 1..13: note = methanogen bacteria
YGLVGAKNVYGVY

SEQ ID NO: 69918 - protein, 29 aa, unidentified
  source 1..29: note = methanogen bacteria
MKLNILDSLYYTVITIATVGYGDIHPLTP

SEQ ID NO: 69919 - protein, 13 aa, unidentified
  source 1..13: note = methanogen bacteria
YGILGPKNVYQIY

SEQ ID NO: 69920 - protein, 13 aa, unidentified
  source 1..13: note = methanogen bacteria
FGNIYGLGNITLG

SEQ ID NO: 69921 - protein, 19 aa, unidentified
  source 1..19: note = methanogen bacteria
AFPDNNPTKLLNMIPIGNL

SEQ ID NO: 69922 - protein, 22 aa, unidentified
  source 1..22: note = methanogen bacteria
KLPSVTGSCSHPCGNGLGAALF

SEQ ID NO: 69923 - protein, 32 aa, unidentified
  source 1..32: note = methanogen bacteria
FDTSFNSILDTVWFIVVTASTVGYGDMTPNTP

SEQ ID NO: 69924 - protein, 17 aa, unidentified
  source 1..17: note = methanogen bacteria
SYSHSLESLQRCSFVEW

SEQ ID NO: 69925 - protein, 12 aa, unidentified
  source 1..12: note = methanogen bacteria
IVGAGNVHTIYD

SEQ ID NO: 69926 - protein, 23 aa, unidentified
  source 1..23: note = methanogen bacteria
MAYGWNTIFQLMTQGYEALNSEA

SEQ ID NO: 69927 - protein, 70 aa, unidentified
  source 1..70: note = methanogen bacteria
MGLSDNSLYVSKEKLQEITGKDHLTQILIKTNENVNDTKIADEIEDKYGEDLLTFTTEEQVQMMSQITSI

SEQ ID NO: 69928 - protein, 92 aa, unidentified
  source 1..92: note = methanogen bacteria
SMQSADINDSDSGKPVQSESSGPSEYYLIPVAGLTHVTVNGVDRSHLIKNSSITVHTTVIDAGEIIIQPKKGTIIITTPKGIDIEKAVKMPA

SEQ ID NO: 69929 - protein, 16 aa, unidentified
  source 1..16: note = methanogen bacteria
FNGTLGTLTGFFATEL

SEQ ID NO: 69930 - protein, 14 aa, unidentified
  source 1..14: note = methanogen bacteria
ILHVMKITKAAQFS

SEQ ID NO: 69931 - protein, 11 aa, unidentified
  source 1..11: note = methanogen bacteria
GLHSTSSTVEL

SEQ ID NO: 69932 - protein, 53 aa, unidentified
  source 1..53: note = methanogen bacteria
VMGGISTAVDTYAPDYSGDEQFHQAVYDYFQKLDTIEGQDSIVVNTADIIIQN

SEQ ID NO: 69933 - protein, 75 aa, unidentified
  source 1..75: note = methanogen bacteria
FLLNQTQTVKVDNVEFEIPADYVSEPLRTDVNYDGNIKSSAMGWSNKDNYIEIGGCGFGRNTYQDVRIYRLLFGI

SEQ ID NO: 69934 - protein, 29 aa, unidentified
  source 1..29: note = methanogen bacteria
GYKANGITYIFLQNMEVNSFLGQSSYPLP

SEQ ID NO: 69935 - protein, 29 aa, unidentified
  source 1..29: note = methanogen bacteria
NQLSQVHAISGIAQINLNTFINSLGYIAY

SEQ ID NO: 69936 - protein, 11 aa, unidentified
  source 1..11: note = methanogen bacteria
FMLKYLLPAKQ

SEQ ID NO: 69937 - protein, 13 aa, unidentified
  source 1..13: note = methanogen bacteria
FILSNGFAYGIFS

SEQ ID NO: 69938 - protein, 16 aa, unidentified
  source 1..16: note = methanogen bacteria
VYYAEGGLYAIAVIQY

SEQ ID NO: 69939 - protein, 20 aa, unidentified
  source 1..20: note = methanogen bacteria
TIYFASFSNFYGLSNLSLSS

SEQ ID NO: 69940 - protein, 30 aa, unidentified
  source 1..30: note = methanogen bacteria
GYKEGGVVPIFLPGMDSNWFALNSAYPLPQ

SEQ ID NO: 69941 - protein, 18 aa, unidentified
  source 1..18: note = methanogen bacteria
SFAAYGNSYGLGNINISP

SEQ ID NO: 69942 - protein, 30 aa, unidentified
  source 1..30: note = methanogen bacteria
GYKSGGVIPILLPGMNIKWFANNSAYPLPQ

SEQ ID NO: 69943 - protein, 30 aa, unidentified
  source 1..30: note = methanogen bacteria
GYKAGGIVPILTPDMDPTWFASHASYPLPY

SEQ ID NO: 69944 - protein, 18 aa, unidentified
  source 1..18: note = methanogen bacteria
LGRENLLLSGFWYYLFLG

SEQ ID NO: 69945 - protein, 27 aa, unidentified
  source 1..27: note = methanogen bacteria
TTIGGSFLGIFGGLTGFTISGISSIFL

SEQ ID NO: 69946 - protein, 60 aa, unidentified
  source 1..60: note = methanogen bacteria
MGTFNHQNPSNTNSSFDDFINNNLASSSEDSEEVEYYYPSTDYDVPKNNNDSKLQDISKL

SEQ ID NO: 69947 - protein, 18 aa, unidentified
  source 1..18: note = methanogen bacteria
EKAWESSSEKFFAVPSIS

SEQ ID NO: 69948 - protein, 19 aa, unidentified
  source 1..19: note = methanogen bacteria
FFASYGNALGLANVSIGPF

SEQ ID NO: 69949 - protein, 27 aa, unidentified
  source 1..27: note = methanogen bacteria
MFDLMLNAISFASYGNFYGLSNIAISS

SEQ ID NO: 69950 - protein, 19 aa, unidentified
  source 1..19: note = methanogen bacteria
QFGIVGGDLVGESTVTVMT

SEQ ID NO: 69951 - protein, 30 aa, unidentified
  source 1..30: note = methanogen bacteria
GYKAGGIVPILMPNMNTTWFASNASYPLPY

SEQ ID NO: 69952 - protein, 62 aa, unidentified
  source 1..62: note = methanogen bacteria
VSLSFDDGNSTKENVSHVQNVTKEMTTDLNQTNTVSFDKKYDGVDYNNKSSVATTKHNKSVN

SEQ ID NO: 69953 - protein, 27 aa, unidentified
  source 1..27: note = methanogen bacteria
MFNLMDSTIFFASYGNFLGLGNISIGA

SEQ ID NO: 69954 - protein, 20 aa, unidentified
  source 1..20: note = methanogen bacteria
DTIYFASYSNFYGLGSVSIS

SEQ ID NO: 69955 - protein, 100 aa, unidentified
  source 1..100: note = methanogen bacteria
AFVAADAALEHEKGKGFDWTYIGGIGQDYEIELTSDPNVFMESEGYKGLSFTVIDTFRDSSVCELIYGVSEGNHISERRMYQVTDGDVMTPVIVEVRLFR

SEQ ID NO: 69956 - protein, 19 aa, unidentified
  source 1..19: note = methanogen bacteria
QPIVVDLIGDTAIASLSSG

SEQ ID NO: 69957 - protein, 50 aa, unidentified
  source 1..50: note = methanogen bacteria
IKVGIVYWDVYLYLNNALMYAGLSEGYKQQLSPMLPFMTSILYRYVHIGD

SEQ ID NO: 69958 - protein, 15 aa, unidentified
  source 1..15: note = methanogen bacteria
LAGGNITHNQISVNS

SEQ ID NO: 69959 - protein, 19 aa, unidentified
  source 1..19: note = methanogen bacteria
ELIPGFYYQIYNSAEPYSL

SEQ ID NO: 69960 - protein, 12 aa, unidentified
  source 1..12: note = methanogen bacteria
TNYNMHEINPST

SEQ ID NO: 69961 - protein, 30 aa, unidentified
  source 1..30: note = methanogen bacteria
GYKAGGVVPILMPGMDTSWFASNAAYPLPF

SEQ ID NO: 69962 - protein, 30 aa, unidentified; identical to SEQ ID NO: 69961
  source 1..30: note = methanogen bacteria

SEQ ID NO: 69963 - protein, 93 aa, unidentified
  source 1..93: note = methanogen bacteria
VTGGIINTDNTDNNTTLENNSTNATINLTDNTSGLNNGNGTADVNVEGGDLNNNDTYYEMVNGEKRYMSEEEYAEKYPDIYQQRKNGNFENVA

SEQ ID NO: 69964 - protein, 14 aa, unidentified
  source 1..14: note = methanogen bacteria
FGNIYGLSNITLSL

SEQ ID NO: 69965 - protein, 17 aa, unidentified
  source 1..17: note = methanogen bacteria
IPWFGGMTGGLDVLLGS

SEQ ID NO: 69966 - protein, 13 aa, unidentified
  source 1..13: note = methanogen bacteria
LSYQGISFGIVDL

SEQ ID NO: 69967 - protein, 30 aa, unidentified
  source 1..30: note = methanogen bacteria
GYKAGGIVPILMPGMDTTWFASNAAYPLPF

SEQ ID NO: 69968 - protein, 30 aa, unidentified
  source 1..30: note = methanogen bacteria
GYKPGGVVPILMPGMDTSWFASNAAYPLPF

SEQ ID NO: 69969 - protein, 30 aa, unidentified
  source 1..30: note = methanogen bacteria
LHLVKPYILPSPIDVCHSAIHSLSSGSLIE

SEQ ID NO: 69970 - protein, 30 aa, unidentified
  source 1..30: note = methanogen bacteria
GYKPGGVVPILMPGMDTSWFATNAAYPLPF

SEQ ID NO: 69971 - protein, 15 aa, unidentified
  source 1..15: note = methanogen bacteria
YPLSNFDFQFMFLSG

SEQ ID NO: 69972 - protein, 23 aa, unidentified
  source 1..23: note = methanogen bacteria
QHNVYRIMQNQEVVISEEIIQED

SEQ ID NO: 69973 - protein, 30 aa, unidentified; identical to SEQ ID NO: 69961
  source 1..30: note = methanogen bacteria

SEQ ID NO: 69974 - protein, 22 aa, unidentified
  source 1..22: note = methanogen bacteria
DTIYFASYSNFFGLSNISLSSM

SEQ ID NO: 69975 - protein, 30 aa, unidentified
  source 1..30: note = methanogen bacteria
GYKADGIVPILMPGMDPAWFAANAAAPLPF

SEQ ID NO: 69976 - protein, 25 aa, unidentified
  source 1..25: note = methanogen bacteria
SQKEIIIFIFDYFKKLFIIGWNWIV

SEQ ID NO: 69977 - protein, 22 aa, unidentified
  source 1..22: note = methanogen bacteria
DTIYFASYSNFYGLGNISLSSM

SEQ ID NO: 69978 - protein, 15 aa, unidentified
  source 1..15: note = methanogen bacteria
TSYGSYGLSNLNISS

SEQ ID NO: 69979 - protein, 30 aa, unidentified
  source 1..30: note = methanogen bacteria
GYKSGGIVPILMPGMDASWFSSNSAYPLPF

SEQ ID NO: 69980 - protein, 30 aa, unidentified
  source 1..30: note = methanogen bacteria
GYKAGGVVPILMPGMDTSWFAANAAYPLPF

SEQ ID NO: 69981 - protein, 30 aa, unidentified; identical to SEQ ID NO: 69961
  source 1..30: note = methanogen bacteria

SEQ ID NO: 69982 - protein, 28 aa, unidentified
  source 1..28: note = methanogen bacteria
MFDLVYSTVSFASYGNAFGLSNVALSSF

SEQ ID NO: 69983 - protein, 30 aa, unidentified
  source 1..30: note = methanogen bacteria
GYRPGGVVPILMPGMDTSWFAANAAYPLPF

SEQ ID NO: 69984 - protein, 100 aa, unidentified
  source 1..100: note = methanogen bacteria
LLGLPMDTFSEVPLANSSVVSDLMNPEPSSLNEVGIDDSSYSTETTYYTGSASKSKSSSSNNEEKYESESTNSGSSSDSGSGSSSGSGSGSSSGSGSGSS

SEQ ID NO: 69985 - protein, 98 aa, unidentified
  source 1..98: note = methanogen bacteria
QDDTEGNIPGVDMAALWSLNGGFHWIYPGSSFDEQVLIIINDQAAEHIFGADLLENIRQHDWVEGNSRADAVTMSITTVNPLPIIPDILMGNIRFHII

SEQ ID NO: 69986 - protein, 30 aa, unidentified
  source 1..30: note = methanogen bacteria
GYKAGGIVPILMPDMNTTWFASNAAYPLPF

SEQ ID NO: 69987 - protein, 22 aa, unidentified
  source 1..22: note = methanogen bacteria
NTIFFASYSNIYGLSNIALAPF

SEQ ID NO: 69988 - protein, 14 aa, unidentified
  source 1..14: note = methanogen bacteria
LPKAGKLIIGKYST

SEQ ID NO: 69989 - protein, 13 aa, unidentified
  source 1..13: note = methanogen bacteria
LPNNMPPFVQDYP

SEQ ID NO: 69990 - protein, 24 aa, unidentified
  source 1..24: note = methanogen bacteria
YNTLFFASYSNVFGLGNVTLGSFD

SEQ ID NO: 69991 - protein, 10 aa, unidentified
  source 1..10: note = methanogen bacteria
PFFTKSLPEV

SEQ ID NO: 69992 - protein, 13 aa, unidentified
  source 1..13: note = methanogen bacteria
GTSYRNLIFMNYS

SEQ ID NO: 69993 - protein, 12 aa, unidentified
  source 1..12: note = methanogen bacteria
HNKNILFSNFLD

SEQ ID NO: 69994 - protein, 12 aa, unidentified
  source 1..12: note = methanogen bacteria
PHRHNMIFIDYQ

SEQ ID NO: 69995 - protein, 14 aa, unidentified
  source 1..14: note = methanogen bacteria
SYGNYFGLSNITIG

SEQ ID NO: 69996 - protein, 13 aa, unidentified
  source 1..13: note = methanogen bacteria
PVEYIEGHEPPTE

SEQ ID NO: 69997 - protein, 18 aa, unidentified
  source 1..18: note = methanogen bacteria
IFFASYSNFYGLGNITLG

SEQ ID NO: 69998 - protein, 13 aa, unidentified
  source 1..13: note = methanogen bacteria
DSFHAKNLIFTDY

SEQ ID NO: 69999 - protein, 74 aa, unidentified
  source 1..74: note = methanogen bacteria
SWNMQSIVFNDDLTQEQRQEMMQDMQQVTELDQGQELNETPDVSNSSGKGYTEMGKVYEDPSTGKMIMIRNQSS

SEQ ID NO: 70000 - protein, 13 aa, unidentified
  source 1..13: note = methanogen bacteria
VPTIAQEFGMNNL

SEQ ID NO: 70001 - protein, 21 aa, unidentified
  source 1..21: note = methanogen bacteria
MALNIPGGEFLTGSLDVISQS

SEQ ID NO: 70002 - protein, 10 aa, unidentified
  source 1..10: note = methanogen bacteria
PIFTDNLPHI

SEQ ID NO: 70003 - protein, 12 aa, unidentified
  source 1..12: note = methanogen bacteria
IPHSTALIIEDY

SEQ ID NO: 70004 - protein, 12 aa, unidentified
  source 1..12: note = methanogen bacteria
PHRPNMIFIDYE

SEQ ID NO: 70005 - protein, 13 aa, unidentified
  source 1..13: note = methanogen bacteria
LPNSQSLIIGNYP

SEQ ID NO: 70006 - protein, 12 aa, unidentified
  source 1..12: note = methanogen bacteria
MPNTPNILFDNF

SEQ ID NO: 70007 - protein, 11 aa, unidentified
  source 1..11: note = methanogen bacteria
VAPTIGVSSLN

SEQ ID NO: 70008 - protein, 19 aa, unidentified
  source 1..19: note = methanogen bacteria
PNIAGALSKTTSPITMGSP

SEQ ID NO: 70009 - protein, 13 aa, unidentified
  source 1..13: note = methanogen bacteria
PKHESVLITNVPT

SEQ ID NO: 70010 - protein, 13 aa, unidentified
  source 1..13: note = methanogen bacteria
PQIAQYFNVDITQ

SEQ ID NO: 70011 - protein, 11 aa, unidentified
  source 1..11: note = methanogen bacteria
PNVPNPMFENY

SEQ ID NO: 70012 - protein, 11 aa, unidentified
  source 1..11: note = methanogen bacteria
PRNSNILINDY

SEQ ID NO: 70013 - protein, 12 aa, unidentified
  source 1..12: note = methanogen bacteria
PHNKNILVNDYP

SEQ ID NO: 70014 - protein, 11 aa, unidentified
  source 1..11: note = methanogen bacteria
PNVPNPMFENY

SEQ ID NO: 70015 - protein, 13 aa, unidentified
  source 1..13: note = methanogen bacteria
PVEYIDGHEPPSE

SEQ ID NO: 70016 - protein, 12 aa, unidentified
  source 1..12: note = methanogen bacteria
LPNVHTPTIGNY

SEQ ID NO: 70017 - protein, 11 aa, unidentified
  source 1..11: note = methanogen bacteria
LGFPSVIFENY

SEQ ID NO: 70018 - protein, 20 aa, unidentified
  source 1..20: note = methanogen bacteria
SSSSADPLAYRILEKFRDVR

SEQ ID NO: 70019 - protein, 12 aa, unidentified
  source 1..12: note = methanogen bacteria
LNFRNDFMSDYP

SEQ ID NO: 70020 - protein, 38 aa, unidentified
  source 1..38: note = methanogen bacteria
LEPPCPWKSNFNIECAGCGGTRMIKSLINLDFYQAFRF

SEQ ID NO: 70021 - protein, 11 aa, unidentified
  source 1..11: note = methanogen bacteria
PGFDFLKSTKL

SEQ ID NO: 70022 - protein, 30 aa, unidentified
  source 1..30: note = methanogen bacteria
GYKSDGVVPIFLPGMVKDVFVQNSAYPLPA

SEQ ID NO: 70023 - protein, 11 aa, unidentified
  source 1..11: note = methanogen bacteria
PQNKDILVENY

SEQ ID NO: 70024 - protein, 10 aa, unidentified
  source 1..10: note = methanogen bacteria
SQISVHASFA

SEQ ID NO: 70025 - protein, 27 aa, unidentified
  source 1..27: note = methanogen bacteria
IIQCRPGRLIYFNLGLCESLVKDVLLR

SEQ ID NO: 70026 - protein, 11 aa, unidentified
  source 1..11: note = methanogen bacteria
PNAGKLIIGDY

SEQ ID NO: 70027 - protein, 13 aa, unidentified
  source 1..13: note = methanogen bacteria
LPNAHNSLVANYP

SEQ ID NO: 70028 - protein, 23 aa, unidentified
  source 1..23: note = methanogen bacteria
STFGTTPISSISYSLALCTNMDI

SEQ ID NO: 70029 - protein, 10 aa, unidentified
  source 1..10: note = methanogen bacteria
VYSLNIPDNL

SEQ ID NO: 70030 - protein, 12 aa, unidentified
  source 1..12: note = methanogen bacteria
IPNARLIFPYYH

SEQ ID NO: 70031 - protein, 31 aa, unidentified
  source 1..31: note = methanogen bacteria
FGTSYNLFDYFYFVVVTLATVGYGDIIPLTF

SEQ ID NO: 70032 - protein, 11 aa, unidentified
  source 1..11: note = methanogen bacteria
SPSRFFIPNFP

SEQ ID NO: 70033 - protein, 98 aa, unidentified
  source 1..98: note = methanogen bacteria
AAFCAAEMDAEEGTGERPSFDWPGDGLSPEMTASALRGCAETQMERGGWNGVRIDGPDGTCFELGRESGDVSVSREVLRVCPSEKEIVPAVYEAFIWF

SEQ ID NO: 70034 - protein, 11 aa, unidentified
  source 1..11: note = methanogen bacteria
FPERFLIPNYP

SEQ ID NO: 70035 - protein, 17 aa, unidentified
  source 1..17: note = methanogen bacteria
QPRVEELVGDTTFMWFS

SEQ ID NO: 70036 - protein, 12 aa, unidentified
  source 1..12: note = methanogen bacteria
MGSVIIIGPFRT

SEQ ID NO: 70037 - protein, 18 aa, unidentified
  source 1..18: note = methanogen bacteria
APRLSDPLAGFFGFGRGL

SEQ ID NO: 70038 - protein, 19 aa, unidentified
  source 1..19: note = methanogen bacteria
NCPNNAIRVHDNVPLFCMH

SEQ ID NO: 70039 - protein, 99 aa, unidentified
  source 1..99: note = methanogen bacteria
GCIGDSSDDSSSEATVSEDTSSEAAVSEDTDDSESDDESYQSSSSSDRSNPYWASTIRDKFHRSSCEWAQEIDDVNLVTYPNRDAAIADGKVPCKVCEP

SEQ ID NO: 70040 - protein, 30 aa, unidentified
  source 1..30: note = methanogen bacteria
GYKSGGIVPILAPNMDVSWFTANASYPLPY

SEQ ID NO: 70041 - protein, 62 aa, unidentified
  source 1..62: note = methanogen bacteria
DNACVNVLRRGMGFDILGTSSIAGITEAEAEVRKNCNWSVSSFPHTSLQNQTSFYPLRHHLP

SEQ ID NO: 70042 - protein, 10 aa, unidentified
  source 1..10: note = methanogen bacteria
LRHQPITNDV

SEQ ID NO: 70043 - protein, 11 aa, unidentified
  source 1..11: note = methanogen bacteria
FLESWGMQGNS

SEQ ID NO: 70044 - protein, 98 aa, unidentified
  source 1..98: note = methanogen bacteria
TFGAASVTGDDTGTGTGKPNMTDTTGDAEYYLLPVAGLQKVVVNGVDMSSEIRGNAVGVHARVLDEGDVQIKTSEHAIYIQAPSGMTPQEAVHMPEWF

SEQ ID NO: 70045 - protein, 12 aa, unidentified
  source 1..12: note = methanogen bacteria
HYIDISTYLTRI

SEQ ID NO: 70046 - protein, 15 aa, unidentified
  source 1..15: note = methanogen bacteria
IPNNTITIITNHASH

SEQ ID NO: 70047 - protein, 27 aa, unidentified
  source 1..27: note = methanogen bacteria
VTVGSSLTGVLGGLTGFTISGIASLFE

SEQ ID NO: 70048 - protein, 33 aa, unidentified
  source 1..33: note = methanogen bacteria
YGFKELVNPGISLIYNAIGTKLAPNMVTLVVFD

SEQ ID NO: 70049 - protein, 11 aa, unidentified
  source 1..11: note = methanogen bacteria
DLEGDGAMDSL

SEQ ID NO: 70050 - protein, 11 aa, unidentified
  source 1..11: note = methanogen bacteria
VKPSGNYLKYI

SEQ ID NO: 70051 - protein, 97 aa, unidentified
  source 1..97: note = methanogen bacteria
YLKTTAAKPTEIRITSNETLNKGDSLTIQLTDLNKTAISENVSIVIKNTDGAVVVTGTVSTNSKGLANFDLDLEKGEYTVNVTFNGNNNFTGSNATQ

SEQ ID NO: 70052 - protein, 25 aa, unidentified
  source 1..25: note = methanogen bacteria
ATVGGSFMGVLGGLSGFTISGVASL

SEQ ID NO: 70053 - protein, 17 aa, unidentified
  source 1..17: note = methanogen bacteria
DYAFSFFSITGMENEIF

SEQ ID NO: 70054 - protein, 26 aa, unidentified
  source 1..26: note = methanogen bacteria
ITIGGTSLMGLLGGLVGFTFTGVGSL

SEQ ID NO: 70055 - protein, 25 aa, unidentified
  source 1..25: note = methanogen bacteria
TATVGGSLAGIFGGLTGFTLSGFSS

SEQ ID NO: 70056 - protein, 29 aa, unidentified
  source 1..29: note = methanogen bacteria
MFDLVHLTVNSLATANVYGLANITISYFD

SEQ ID NO: 70057 - protein, 27 aa, unidentified
  source 1..27: note = methanogen bacteria
SATLGGSLFGLFGGITGFTTSGISSLG

SEQ ID NO: 70058 - protein, 18 aa, unidentified
  source 1..18: note = methanogen bacteria
IQPIVEDEVGDTTFMTLS

SEQ ID NO: 70059 - protein, 11 aa, unidentified
  source 1..11: note = methanogen bacteria
GLGAEVSQFDD

SEQ ID NO: 70060 - protein, 15 aa, unidentified
  source 1..15: note = methanogen bacteria
LFYINQNQTYLLAFD

SEQ ID NO: 70061 - protein, 25 aa, unidentified
  source 1..25: note = methanogen bacteria
VTVGGTALMGPLGGLSGFTVSGVSS

SEQ ID NO: 70062 - protein, 99 aa, unidentified
  source 1..99: note = methanogen bacteria
FMGSNNNQEDTVVANDTSSDVSDVSQGKVSEVKNATVSSNSNEPKKYEDWQKDYDTGMVDEDGNPIYRSVVSTSGGQNDPEVYESYWSENGPINETKIG

SEQ ID NO: 70063 - protein, 26 aa, unidentified
  source 1..26: note = methanogen bacteria
VTVGGSALMGPLGGLAGFTVSGITGF

SEQ ID NO: 70064 - protein, 28 aa, unidentified
  source 1..28: note = methanogen bacteria
SATLGGSLFGLFGGITGFTIAGISSLFA

SEQ ID NO: 70065 - protein, 27 aa, unidentified
  source 1..27: note = methanogen bacteria
VTVGGTALMGPLGGLTGFTISGISSLF

SEQ ID NO: 70066 - protein, 12 aa, unidentified
  source 1..12: note = methanogen bacteria
MIEIYWLQRLGN

SEQ ID NO: 70067 - protein, 55 aa, unidentified
  source 1..55: note = methanogen bacteria
PTQHDIMAIYGLGGTIDYIKSNDKAKELPDKVVDALTRYVDSIEKEKGENNDTNH

SEQ ID NO: 70068 - protein, 11 aa, unidentified
  source 1..11: note = methanogen bacteria
YGLANITLGYF

SEQ ID NO: 70069 - protein, 15 aa, unidentified
  source 1..15: note = methanogen bacteria
VYYTYGGLYAIAVVQ

SEQ ID NO: 70070 - protein, 89 aa, unidentified
  source 1..89: note = methanogen bacteria
AGTSPEKLDGQKTFYLNGTEMTADAYSFRGMVYVVTDDTQSAETLGLYGVIPGQTEYVCNVWIDTGDVFYEVTSVVTAKDVTDNFNTRR

SEQ ID NO: 70071 - protein, 100 aa, unidentified
  source 1..100: note = methanogen bacteria
VLNSGSNNAPAVNNSTTNASQNISVEQVNTEEVASSDSSGSSRSSTHVIIGEDGCYYRVDDSGNILESLGPSKKYYPNGYGGKDPVSYPNAEPANRYIKK

SEQ ID NO: 70072 - protein, 71 aa, unidentified
  source 1..71: note = methanogen bacteria
SWNMQSIVFNDDLTQEQRQEMMQDMQQVTELDQGQELNETPDVSNSSGKGYTEMGKVYRDSDTGKLIMVEG

SEQ ID NO: 70073 - protein, 100 aa, unidentified
  source 1..100: note = methanogen bacteria
VFNNNHSSNNSPANANNSVNSNISSESHVEQVNTEDAESQSNTNSNTHLVMGEDGYYYTCDDDGNILESVGPSKKYYPDDPSAVDHPEAESYYPYMQHQL

SEQ ID NO: 70074 - protein, 30 aa, unidentified
  source 1..30: note = methanogen bacteria
GYKAGGVVPIFMPGMNASWFAANSAYPLPQ

SEQ ID NO: 70075 - protein, 25 aa, unidentified
  source 1..25: note = methanogen bacteria
VATFGGSFAGLFGGLTGFTISGITS

SEQ ID NO: 70076 - protein, 98 aa, unidentified
  source 1..98: note = methanogen bacteria
LILDNNSSLPDPNSNQSVNITNNTPVNQAPTLKVVEKNTNNNTNISNNTTNPDAGTVLEIKDLGNGEIRYKIADGNGGYTYKTVKESNNNNQNNSKNK

SEQ ID NO: 70077 - protein, 14 aa, unidentified
  source 1..14: note = methanogen bacteria
NAVGLPMNFIEYML

SEQ ID NO: 70078 - protein, 100 aa, unidentified
  source 1..100: note = methanogen bacteria
FQFNNNVSTFIIINETQVAENGTFAGMLMDAYSYGVSNQTVCIQTPDHNIINATTDEKGEFKVVNAEYGSGDVHCYSNFTFAGNGKYQPCIYEGNVSVTR

SEQ ID NO: 70079 - protein, 28 aa, unidentified
  source 1..28: note = methanogen bacteria
TATVGGSMAGIAGGLTGFTVSGAVSLID

SEQ ID NO: 70080 - protein, 24 aa, unidentified
  source 1..24: note = methanogen bacteria
ATFGGSFAGLFGGLTGFTISGVTS

SEQ ID NO: 70081 - protein, 100 aa, unidentified
  source 1..100: note = methanogen bacteria
YQFNNNVPTFMVINETEVHENSSFAGVLMDAYSYGVANQTVTYQTPNHEIKNVTTNENGEFKVDNVQSGSGDANYYSSFTFAGNGKYQACSYEGNVSVIK

SEQ ID NO: 70082 - protein, 95 aa, unidentified
  source 1..95: note = methanogen bacteria
TFGAAATGDDTGTGTGKPNMTDTTGDAEYYLIPVAGLQKVTVNGIDMSSEIRGNAIGVHARVLDQGDVQIKTSEHAIIIKTPVGMNPYEAVHKPE

SEQ ID NO: 70083 - protein, 27 aa, unidentified
  source 1..27: note = methanogen bacteria
VTIGGSTTGILGGLTGFTFSGVVSLIE

SEQ ID NO: 70084 - protein, 88 aa, unidentified
  source 1..88: note = methanogen bacteria
GESMGLEVNVNEFYDDTNLADGWIYSSYINDLFLYQVDCLGATNQMERQLVVDSIADFSNDPEITLHFVENNTISKFYLVEGKTFGHQ

SEQ ID NO: 70085 - protein, 23 aa, unidentified
  source 1..23: note = methanogen bacteria
TFGGSYMGLFGGLNGFTVSGTIS

SEQ ID NO: 70086 - protein, 99 aa, unidentified
  source 1..99: note = methanogen bacteria
IFLQDRNNLENQSGTLTIKNKTVSYDNCGKCVKVIDGNTIQVYGIGAVQLSQIDLKDSDSAKKFVEEKCLGKTVYLNIDNETPKGYCIYRFRRYQSGIT

SEQ ID NO: 70087 - protein, 23 aa, unidentified
  source 1..23: note = methanogen bacteria
TTTIYDGINRMISHTGTIDFNSL

SEQ ID NO: 70088 - protein, 13 aa, unidentified
  source 1..13: note = methanogen bacteria
RYSCVGAVGIPGW

SEQ ID NO: 70089 - protein, 24 aa, unidentified
  source 1..24: note = methanogen bacteria
YFIQAYKTSVSMGLDMMDLSVVSP

SEQ ID NO: 70090 - protein, 24 aa, unidentified
  source 1..24: note = methanogen bacteria
ATFGGSLAGPFGGLTGFTISGITG

SEQ ID NO: 70091 - protein, 24 aa, unidentified
  source 1..24: note = methanogen bacteria
TTIGGSFMGVFGGLTGFTTSGIIS

SEQ ID NO: 70092 - protein, 25 aa, unidentified
  source 1..25: note = methanogen bacteria
TTIGGSFMGAFGGLTGFTTSGIVSI

SEQ ID NO: 70093 - protein, 28 aa, unidentified
  source 1..28: note = methanogen bacteria
NIKFLGLSLQPILGGFNGFTVSGNKSYL

SEQ ID NO: 70094 - protein, 24 aa, unidentified
  source 1..24: note = methanogen bacteria
TTIGGSFMGAFGGLTGFTTSGIVS

SEQ ID NO: 70095 - protein, 94 aa, unidentified
  source 1..94: note = methanogen bacteria
IFNNNASTNNVNNSISNNTSSNINVEKINTEEVSSQSNSNTHLVIAEDGHYYTCDDNGKILEKLGPSKKYYPNDPSAVEYPDAESYYPYKQRQL

SEQ ID NO: 70096 - protein, 13 aa, unidentified
  source 1..13: note = methanogen bacteria
SKEEIYSETYLDL

SEQ ID NO: 70097 - protein, 30 aa, unidentified
  source 1..30: note = methanogen bacteria
GYKAGGVVPIYLPGMTADWFAANSAYPLPQ

SEQ ID NO: 70098 - protein, 16 aa, unidentified
  source 1..16: note = methanogen bacteria
TPIKDPTSELIARTSP

SEQ ID NO: 70099 - protein, 24 aa, unidentified
  source 1..24: note = methanogen bacteria
ATFGGSLFGIFGGLTGFTVSGVAS

SEQ ID NO: 70100 - protein, 24 aa, unidentified
  source 1..24: note = methanogen bacteria
VTIGGSITGIFGGLTGFTVSGVAS

SEQ ID NO: 70101 - protein, 20 aa, unidentified
  source 1..20: note = methanogen bacteria
IYEGAHRIYLWGSYFITLEA

SEQ ID NO: 70102 - protein, 24 aa, unidentified
  source 1..24: note = methanogen bacteria
ATFGGSIAGIFGGLAGFTISGVAS

SEQ ID NO: 70103 - protein, 24 aa, unidentified
  source 1..24: note = methanogen bacteria
ATIGGSFAGIFGGLTGFTVSGATS

SEQ ID NO: 70104 - protein, 16 aa, unidentified
  source 1..16: note = methanogen bacteria
MYMSYGPIYFTYMLYS

SEQ ID NO: 70105 - protein, 20 aa, unidentified
  source 1..20: note = methanogen bacteria
NPAYTIPEFTTQGLYLTGKS

SEQ ID NO: 70106 - protein, 31 aa, unidentified
  source 1..31: note = methanogen bacteria
FHGQPQLAVIYGATPAVAVNERQQNYWVLLV

SEQ ID NO: 70107 - protein, 99 aa, unidentified
  source 1..99: note = methanogen bacteria
YQFNNDVSTFIIINETEVQNNTSFSGLLMDSYSYGVANQTISYQTPNHEIINVTTDNNGEFNVSAVKSGSDEGNCYSNFTFAGNGKYQACSYEGNVSVK

SEQ ID NO: 70108 - protein, 24 aa, unidentified
  source 1..24: note = methanogen bacteria
ATFGGGFFGLTGGLTGFTLSGFTS

SEQ ID NO: 70109 - protein, 27 aa, unidentified
  source 1..27: note = methanogen bacteria
ATFGGSFLGAFGGLTGFTISGIASLFT

SEQ ID NO: 70110 - protein, 20 aa, unidentified
  source 1..20: note = methanogen bacteria
ATFGGAFAGIFGGLTGFASI

SEQ ID NO: 70111 - protein, 27 aa, unidentified
  source 1..27: note = methanogen bacteria
ITFGGSLYGIFGGLTGFTVSGISSVFI

SEQ ID NO: 70112 - protein, 17 aa, unidentified
  source 1..17: note = methanogen bacteria
NAVNPGVYGFANITIGY

SEQ ID NO: 70113 - protein, 26 aa, unidentified
  source 1..26: note = methanogen bacteria
VTFGGSFTGLFGGLTGFTVSGVSSLF

SEQ ID NO: 70114 - protein, 93 aa, unidentified
  source 1..93: note = methanogen bacteria
YLISPPSFAGSDDKVTIDIGQDGYMVATINESLQYKSEKIPDGEVNNSKTIIKWKDARNISFVDVMGKKSYAIVSCLPYIVFNIILKTRWYME

SEQ ID NO: 70115 - protein, 17 aa, unidentified
  source 1..17: note = methanogen bacteria
PDITVPLAGLFGFGRGI

SEQ ID NO: 70116 - protein, 28 aa, unidentified
  source 1..28: note = methanogen bacteria
SATVGGSFLGLFGGLTGFTVSGISSLFA

SEQ ID NO: 70117 - protein, 18 aa, unidentified
  source 1..18: note = methanogen bacteria
LQYFLNSGNLIPFLGDYY

SEQ ID NO: 70118 - protein, 22 aa, unidentified
  source 1..22: note = methanogen bacteria
SGLGSAPVSSIPYAMNLIGNIE

SEQ ID NO: 70119 - protein, 19 aa, unidentified
  source 1..19: note = methanogen bacteria
MYFILWGSYSEHSQAFPFR

SEQ ID NO: 70120 - protein, 12 aa, unidentified
  source 1..12: note = methanogen bacteria
GINLAGTLLSLG

SEQ ID NO: 70121 - protein, 11 aa, unidentified
  source 1..11: note = methanogen bacteria
PRLFSPEGVDA

SEQ ID NO: 70122 - protein, 93 aa, unidentified
  source 1..93: note = methanogen bacteria
TLTTIESNKNIENSVSSRLTLDHVANLISQVNANGEGYSYYKITVEKNKLTIQSWNRKGEKLVMPLKIDSKYELYSGNDYLISKNDEGKIVIR

SEQ ID NO: 70123 - protein, 16 aa, unidentified
  source 1..16: note = methanogen bacteria
VVLSDGGMPATGVFFA

SEQ ID NO: 70124 - protein, 30 aa, unidentified
  source 1..30: note = methanogen bacteria
GFKAGGVVPIFLPGMTADWFAANAAYPLPQ

SEQ ID NO: 70125 - protein, 35 aa, unidentified
  source 1..35: note = methanogen bacteria
GESVGLEVNVNDFYLKNARIPQLLQVVDELHYWVY

SEQ ID NO: 70126 - protein, 16 aa, unidentified
  source 1..16: note = methanogen bacteria
IIAWGMKNCFGFEKLL

SEQ ID NO: 70127 - protein, 30 aa, unidentified
  source 1..30: note = methanogen bacteria
STILDLFSFSLNFPEFDLEELLLNIPETYT

SEQ ID NO: 70128 - protein, 63 aa, unidentified
  source 1..63: note = methanogen bacteria
AVSDADVEITWSDSQFSYYSTDGSTVTVSANGTWLSSEITVPSKVSHSSEYTVTAIGNAKNSS

SEQ ID NO: 70129 - protein, 95 aa, unidentified
  source 1..95: note = methanogen bacteria
FVTPEQLTINKIDNSKIDNYVEISGTISSYTITKSNTKIIKITDNTGSINVVIFPSTEINMELNEGESIQLTGKVTSYNGQLELILDDPTKIHRN

SEQ ID NO: 70130 - protein, 11 aa, unidentified
  source 1..11: note = methanogen bacteria
SQLILDLNTSL

SEQ ID NO: 70131 - protein, 13 aa, unidentified
  source 1..13: note = methanogen bacteria
ELQQQSDQCLEGL

SEQ ID NO: 70132 - protein, 97 aa, unidentified
  source 1..97: note = methanogen bacteria
YFGLSNNNTNIRNNSVNDSMVNNTTNITNNTVDSLADNSDKGLVYSPQKGEYVDPSGQYEKDSRGNTVHTYQGSDGVIYEEYYDGDGNPISSEEYYI

SEQ ID NO: 70133 - protein, 14 aa, unidentified
  source 1..14: note = methanogen bacteria
LMYVSYGMTYVNYV

SEQ ID NO: 70134 - protein, 96 aa, unidentified
  source 1..96: note = methanogen bacteria
GYVNPERLDINQIDKSKIDNQIEVDATIASVTQTKTNTKIVKLSDDTGNITLVIFPSVGYEDNLTKNQKVKVIAKVSQYNNDMELILEESKNLIIS

SEQ ID NO: 70135 - protein, 22 aa, unidentified
  source 1..22: note = methanogen bacteria
ASARAVEIHTFDVFYEGIFQIY

SEQ ID NO: 70136 - protein, 21 aa, unidentified
  source 1..21: note = methanogen bacteria
MVSTIPGSEVLTSTLNMISQS

SEQ ID NO: 70137 - protein, 14 aa, unidentified
  source 1..14: note = methanogen bacteria
VGIDKVIEALKIAK

SEQ ID NO: 70138 - protein, 61 aa, unidentified
  source 1..61: note = methanogen bacteria
MALSGEPIVGNSTESYENVTVEMTSNISNGSTDHYVKEPHVDFNSAEDINKYNLTKNDLSY

SEQ ID NO: 70139 - protein, 97 aa, unidentified
  source 1..97: note = methanogen bacteria
LIVDETHHQTENNKINNTTTGTISNNSTNISTNITNNTTISDINNTNDSNVNPGDIIQKKVFTVKENEKGQNEGMEPGTYIIYYTANDGPLKIEKIK

SEQ ID NO: 70140 - protein, 98 aa, unidentified
  source 1..98: note = methanogen bacteria
AYSGMNMQKNVSDNAQSNSTNTGELKNNTTGNNNNTTVGDNSVLNKSDLNKTNKTYKIYDPQSDGYVTVVGEKFDNGVNRWYTYDKDGVRYYNTRISH

SEQ ID NO: 70141 - protein, 31 aa, unidentified
  source 1..31: note = methanogen bacteria
FGFSVSGTPTPSLLKFSQAGQNMIAGGIFGP

SEQ ID NO: 70142 - protein, 22 aa, unidentified
  source 1..22: note = methanogen bacteria
DTWNSTVGAVSKILGVDSDTSA

SEQ ID NO: 70143 - protein, 22 aa, unidentified
  source 1..22: note = methanogen bacteria
SLRRSMRERKVDREYERYWRRY

SEQ ID NO: 70144 - protein, 10 aa, unidentified
  source 1..10: note = methanogen bacteria
LRHQPITNDV

SEQ ID NO: 70145 - protein, 74 aa, unidentified
  source 1..74: note = methanogen bacteria
ATDTISEDIISDADDTPLEITDNDVYTAKESSFSNLSDEIENTGTSLDLNQDYAFNNETDNKNGIVIGKDNFVL

SEQ ID NO: 70146 - protein, 30 aa, unidentified
  source 1..30: note = methanogen bacteria
GYKAGGVVPIFLPGMSADWFAANSAYPLPQ

SEQ ID NO: 70147 - protein, 22 aa, unidentified
  source 1..22: note = methanogen bacteria
LIGGYDSSSSGRYESSSSASSG

SEQ ID NO: 70148 - protein, 35 aa, unidentified
  source 1..35: note = methanogen bacteria
VTESMANSVTIEDLNITRYMRSHTIKKAMETMSQI

SEQ ID NO: 70149 - protein, 13 aa, unidentified
  source 1..13: note = methanogen bacteria
GLWELGLLSPHVG

SEQ ID NO: 70150 - protein, 17 aa, unidentified
  source 1..17: note = methanogen bacteria
PDVSTLIAMKFGMGRGL

SEQ ID NO: 70151 - protein, 17 aa, unidentified
  source 1..17: note = methanogen bacteria
LNSDTGAYALAQRGASI

SEQ ID NO: 70152 - protein, 10 aa, unidentified
  source 1..10: note = methanogen bacteria
PYVLYSNGGG

SEQ ID NO: 70153 - protein, 17 aa, unidentified
  source 1..17: note = methanogen bacteria
LNSDMGALALAERGTNL

SEQ ID NO: 70154 - protein, 81 aa, unidentified
  source 1..81: note = methanogen bacteria
MKETYNTHTASQVLYLTSPYLNGNWIKNPEKYDAPTNPEQYPTFAKNSYSSYDYFKIDSIIKPYTNENGKHWTTSNMTVQK

SEQ ID NO: 70155 - protein, 10 aa, unidentified
  source 1..10: note = methanogen bacteria
SRCMPPAYWD

SEQ ID NO: 70156 - protein, 16 aa, unidentified
  source 1..16: note = methanogen bacteria
LNNNEGALALAQRGTS

SEQ ID NO: 70157 - protein, 16 aa, unidentified
  source 1..16: note = methanogen bacteria
LANSVTNIQINPNPID

SEQ ID NO: 70158 - protein, 97 aa, unidentified
  source 1..97: note = methanogen bacteria
TIELQQAKNEKPAVNNTTVTVESINNETVQDLNNQQSDSNNKASEKSSQSANKESESGMPEETRKIYAARERAAQDGIPMYEYTQSPELVEKYQSMV

SEQ ID NO: 70159 - protein, 92 aa, unidentified
  source 1..92: note = methanogen bacteria
MVIQNDDGGSAELTQKVSDKVSQSVDESSSSGSKIVDGLEKVSNGQAGDGSYIYEEASSDGNFRQYDENGKLIGSTYEEDQAQLGNPNGELE

SEQ ID NO: 70160 - protein, 18 aa, unidentified
  source 1..18: note = methanogen bacteria
PQQTTIIAHFFGLKRGLD

SEQ ID NO: 70161 - protein, 16 aa, unidentified
  source 1..16: note = methanogen bacteria
HPDRTFSYNGHYFPVC

SEQ ID NO: 70162 - protein, 10 aa, unidentified
  source 1..10: note = methanogen bacteria
TPSMDGRISL

SEQ ID NO: 70163 - protein, 71 aa, unidentified
  source 1..71: note = methanogen bacteria
SWNMQSVVFNENMDEEQKQKVMRAINEVSQIDQGQELEDTPDLSKSSGNGYTEMGKVYQDKDTGKLIMVEG

SEQ ID NO: 70164 - protein, 14 aa, unidentified
  source 1..14: note = methanogen bacteria
VGMEDSSGDAYIGP

SEQ ID NO: 70165 - protein, 94 aa, unidentified
  source 1..94: note = methanogen bacteria
VYLNVDEGNKVTTNQTNNASKNITVDRVNTEEVKQQPQKEVYAYRSDGSPLYSYEETRDYIAQKYGPDMIWHVQDNKYISLDTPGYTSDGKRLY

SEQ ID NO: 70166 - protein, 10 aa, unidentified
  source 1..10: note = methanogen bacteria
LLAGNEIQLG

SEQ ID NO: 70167 - protein, 10 aa, unidentified
  source 1..10: note = methanogen bacteria
MMTYNMNSTF

SEQ ID NO: 70168 - protein, 16 aa, unidentified
  source 1..16: note = methanogen bacteria
LANGNITHNQLSVNSF

SEQ ID NO: 70169 - protein, 22 aa, unidentified
  source 1..22: note = methanogen bacteria
ALTKSYPMDYDSAGKLIVDPAI

SEQ ID NO: 70170 - protein, 10 aa, unidentified
  source 1..10: note = methanogen bacteria
NRMTSKGISN

SEQ ID NO: 70171 - protein, 28 aa, unidentified
  source 1..28: note = methanogen bacteria
AQSTAGDYTAGTNALTTVAEEIAKYVPI

SEQ ID NO: 70172 - protein, 10 aa, unidentified
  source 1..10: note = methanogen bacteria
IYTFPAHVEN

SEQ ID NO: 70173 - protein, 11 aa, unidentified
  source 1..11: note = methanogen bacteria
SDGELHDDLGS

SEQ ID NO: 70174 - protein, 17 aa, unidentified
  source 1..17: note = methanogen bacteria
PRMSDPLAGYFGFSRGL

SEQ ID NO: 70175 - protein, 33 aa, unidentified
  source 1..33: note = methanogen bacteria
YGFKNLIQPGISMVYNAVGTQIEPNMVTLVVFD

SEQ ID NO: 70176 - protein, 16 aa, unidentified
  source 1..16: note = methanogen bacteria
GHEKGVLEEVTKARTG

SEQ ID NO: 70177 - protein, 17 aa, unidentified
  source 1..17: note = methanogen bacteria
GNVIIDNGKLSNLLHFG

SEQ ID NO: 70178 - protein, 95 aa, unidentified
  source 1..95: note = methanogen bacteria
AFSLGGNHQESAKNATDNLTKNTVNKTDNATNDTKVVGDNSTFKGANNTTNKTYKVYNPQSDSYVTVIGEKFDNDVHRWYTYDKDGVRYYNTRIS

SEQ ID NO: 70179 - protein, 17 aa, unidentified
  source 1..17: note = methanogen bacteria
GNVIVDNGKLPNLLNFH

SEQ ID NO: 70180 - protein, 14 aa, unidentified
  source 1..14: note = methanogen bacteria
VGPSNVTVELSRIN

SEQ ID NO: 70181 - protein, 94 aa, unidentified
  source 1..94: note = methanogen bacteria
IQLQSAKNVTPAVVNNTTNNTTVNTTVEHINNDTALQSNSNNQASHSDSQASQSGMPEDRQKIYAARQKAADDGIPMYEYIHSPELVEKYQNMV

SEQ ID NO: 70182 - protein, 31 aa, unidentified
  source 1..31: note = methanogen bacteria
MIVEGVSPIDSIDMVSNAFTSNGYAILGSTT

SEQ ID NO: 70183 - protein, 15 aa, unidentified
  source 1..15: note = methanogen bacteria
VVGIMADFHVSSTLA

SEQ ID NO: 70184 - protein, 90 aa, unidentified
  source 1..90: note = methanogen bacteria
GKGMKKKVIGYKIVWKYGWKQKYGWVLRPVVRGGHVHFSQWQYVKAYHPVWGKWKTKVPIYKYYYVNDAALTSAKIKKTKKWVKTYNYMT

SEQ ID NO: 70185 - protein, 14 aa, unidentified
  source 1..14: note = methanogen bacteria
VGPSNVGVEISKIN

SEQ ID NO: 70186 - protein, 16 aa, unidentified
  source 1..16: note = methanogen bacteria
LAIYNLSPETAALASQ

SEQ ID NO: 70187 - protein, 10 aa, unidentified
  source 1..10: note = methanogen bacteria
DFKNPWACLQ

SEQ ID NO: 70188 - protein, 17 aa, unidentified
  source 1..17: note = methanogen bacteria
PSTTSIFAKIFGITRGL

SEQ ID NO: 70189 - protein, 90 aa, unidentified
  source 1..90: note = methanogen bacteria
TDLPGPVKSTAGAYDVFLFQPTVGGEVEAGTYQIALESSNKYYTPYLISASGERTVLDYTYDGQYYSFTLEGESYVSLMAENSSLIPNAQ

SEQ ID NO: 70190 - protein, 94 aa, unidentified
  source 1..94: note = methanogen bacteria
LMNMGNFSISHQDNGTNTTNTHPNVSTNTDNSHPTQSTDSGSSSSSSQSSGSSSSSSGSSSSGSGSSSSGSGSSSQDSFTPGQAPGTANKGDFD

SEQ ID NO: 70191 - protein, 11 aa, unidentified
  source 1..11: note = methanogen bacteria
LIESGGAQGNS

SEQ ID NO: 70192 - protein, 72 aa, unidentified
  source 1..72: note = methanogen bacteria
SWNMQDVVFNQDMTQEQKEETMQAMQQVAQVTQGKELNETPDSSNSSGEGYVEQGKVYRDPKSGKLVMVTEG

SEQ ID NO: 70193 - protein, 33 aa, unidentified
  source 1..33: note = methanogen bacteria
YGFKNLIQPGISLVYNAVGTQLEPNMVTLVVFD

SEQ ID NO: 70194 - protein, 18 aa, unidentified
  source 1..18: note = methanogen bacteria
TGNVILDNGKLPSLINVE

SEQ ID NO: 70195 - protein, 74 aa, unidentified
  source 1..74: note = methanogen bacteria
WNMQSVLFNENLTPEQKEQVMEAMNQEVTEVQEGQVLNETPDTSNQTGQGYTEMGKVYKDPSTGKMIMVQNKTN

SEQ ID NO: 70196 - protein, 13 aa, unidentified
  source 1..13: note = methanogen bacteria
PYFGVIAALFAFI

SEQ ID NO: 70197 - protein, 74 aa, unidentified
  source 1..74: note = methanogen bacteria
WNMQSVLFNENLTPEQKEQVMEAMNQEVTEVQEGQVLNETPDTSNQTGQGYTEMGKVYEDPSTGKMIMVRNQSS

SEQ ID NO: 70198 - protein, 10 aa, unidentified
  source 1..10: note = methanogen bacteria
LRHQPLTNDV

SEQ ID NO: 70199 - protein, 17 aa, unidentified
  source 1..17: note = methanogen bacteria
PDSSMVFARVFGITRGL

SEQ ID NO: 70200 - protein, 17 aa, unidentified
  source 1..17: note = methanogen bacteria
PTASERFARLFGITRGL

SEQ ID NO: 70201 - protein, 17 aa, unidentified
  source 1..17: note = methanogen bacteria
PTFSEKFASLFGITRGL

SEQ ID NO: 70202 - protein, 10 aa, unidentified
  source 1..10: note = methanogen bacteria
FLRHQPITND

SEQ ID NO: 70203 - protein, 74 aa, unidentified
  source 1..74: note = methanogen bacteria
WNMQSVLFNENLTPEQKEQVMDAMNQEVTEVQEGQILNETPDTSNQTGQGYTEMGKVYKDPSTGKLIMVQNKTN

SEQ ID NO: 70204 - protein, 93 aa, unidentified
  source 1..93: note = methanogen bacteria
SDVNDTAIASDESDIDTLEVISNDENPVLTEETQDSSDDGTYTALQKKITLAGDGSTINLTRDYQYNDDFKLTTGVFINKDITINGNGHTIDG

SEQ ID NO: 70205 - protein, 70 aa, unidentified
  source 1..70: note = methanogen bacteria
GWNLQSVVFSDMTQEEKQDVMESISNITKVTQGEKLNSTPDTSDQSGEGYVEQGKVYKDSKTGELIMVES

SEQ ID NO: 70206 - protein, 30 aa, unidentified
  source 1..30: note = methanogen bacteria
MHVINKDNFIYHYLIILISDDFWGNGDLML

SEQ ID NO: 70207 - protein, 17 aa, unidentified
  source 1..17: note = methanogen bacteria
PTYSERFASLFGITRGL

SEQ ID NO: 70208 - protein, 10 aa, unidentified
  source 1..10: note = methanogen bacteria
LRHQPITNDV

SEQ ID NO: 70209 - protein, 17 aa, unidentified
  source 1..17: note = methanogen bacteria
PSYSERFAKLFGITRGL

SEQ ID NO: 70210 - protein, 22 aa, unidentified
  source 1..22: note = methanogen bacteria
MDIFGPIVGGFEMIIEMLQSGG

SEQ ID NO: 70211 - protein, 15 aa, unidentified
  source 1..15: note = methanogen bacteria
ATLSLVHGDISISIS

SEQ ID NO: 70212 - protein, 17 aa, unidentified
  source 1..17: note = methanogen bacteria
PRASEQFARLFGITRGL

SEQ ID NO: 70213 - protein, 10 aa, unidentified
  source 1..10: note = methanogen bacteria
LRHQPITNDV

SEQ ID NO: 70214 - protein, 30 aa, unidentified
  source 1..30: note = methanogen bacteria
NDRIMNSGFFDGIEQLLGTDAEGISHVFIH

SEQ ID NO: 70215 - protein, 10 aa, unidentified
  source 1..10: note = methanogen bacteria
FRGNVLTNDD

SEQ ID NO: 70216 - protein, 17 aa, unidentified
  source 1..17: note = methanogen bacteria
PNASEHFAELFGITRGL

SEQ ID NO: 70217 - protein, 21 aa, unidentified
  source 1..21: note = methanogen bacteria
AVPTITEISSGVALGEYFINY

SEQ ID NO: 70218 - protein, 12 aa, unidentified
  source 1..12: note = methanogen bacteria
PDIAAELNFSAE

SEQ ID NO: 70219 - protein, 17 aa, unidentified
  source 1..17: note = methanogen bacteria
PLASERFARLFGITRGL

SEQ ID NO: 70220 - protein, 91 aa, unidentified
  source 1..91: note = methanogen bacteria
SQVAKEDSNLSIADKKINVGDSLVVKLTDSSGKAIANQTVNVKLTDKDGTVMDEDITTDSKGKAKFKMEENGKYSVECKFDGNGQYASSST

SEQ ID NO: 70221 - protein, 17 aa, unidentified
  source 1..17: note = methanogen bacteria
PNLSNQFAKLVGITRGL

SEQ ID NO: 70222 - protein, 17 aa, unidentified
  source 1..17: note = methanogen bacteria
PEFSNSFARIFGITRGL

SEQ ID NO: 70223 - protein, 17 aa, unidentified
  source 1..17: note = methanogen bacteria
PELSNNFARLVGITRGL

SEQ ID NO: 70224 - protein, 17 aa, unidentified
  source 1..17: note = methanogen bacteria
PEVSMTFARIFGITRGL

SEQ ID NO: 70225 - protein, 17 aa, unidentified
  source 1..17: note = methanogen bacteria
PDSSLVFARAFGITRGL

SEQ ID NO: 70226 - protein, 17 aa, unidentified
  source 1..17: note = methanogen bacteria
PNSSNQFAKLVGITRGL

SEQ ID NO: 70227 - protein, 11 aa, unidentified
  source 1..11: note = methanogen bacteria
KLAKKLFVDKT

SEQ ID NO: 70228 - protein, 24 aa, unidentified
  source 1..24: note = methanogen bacteria
EQVFAYPGIGQATVAAGLRSDVPL

SEQ ID NO: 70229 - protein, 17 aa, unidentified
  source 1..17: note = methanogen bacteria
PNLSNEFARLVGITRGL

SEQ ID NO: 70230 - protein, 16 aa, unidentified
  source 1..16: note = methanogen bacteria
AKGYVWHYSVLKQYCL

SEQ ID NO: 70231 - protein, 92 aa, unidentified
  source 1..92: note = methanogen bacteria
CATDNINGTVEDGSNINFEPNNTSTFDELNSDIQNLHPGDVYKLNNDYSFSGKNTDTSFDHVINIDKDNVTINGNGHAKMQEAHHNTFQYLM

SEQ ID NO: 70232 - protein, 14 aa, unidentified
  source 1..14: note = methanogen bacteria
LQPLFFNHQNQCPV

SEQ ID NO: 70233 - protein, 17 aa, unidentified
  source 1..17: note = methanogen bacteria
PQSSMIFARIFGITRGL

SEQ ID NO: 70234 - protein, 17 aa, unidentified
  source 1..17: note = methanogen bacteria
PDASSIFARFFGISRGL

SEQ ID NO: 70235 - protein, 74 aa, unidentified
  source 1..74: note = methanogen bacteria
SWNMQNVIFNDSLTQEQREEVMQNIQNVTEITEGQELNETPDTSNVSGKGYTEMGKVYQDPSTGKMIMVQNQSS

SEQ ID NO: 70236 - protein, 17 aa, unidentified
  source 1..17: note = methanogen bacteria
PNISITFARLFGITRGL

SEQ ID NO: 70237 - protein, 19 aa, unidentified
  source 1..19: note = methanogen bacteria
VYVFLISVNDIQLFEGIST

SEQ ID NO: 70238 - protein, 12 aa, unidentified
  source 1..12: note = methanogen bacteria
FNLLAKSTVIYG

SEQ ID NO: 70239 - protein, 14 aa, unidentified
  source 1..14: note = methanogen bacteria
GNVIMDNGKLPFFN

SEQ ID NO: 70240 - protein, 10 aa, unidentified
  source 1..10: note = methanogen bacteria
TRMKNRGWSS

SEQ ID NO: 70241 - protein, 92 aa, unidentified
  source 1..92: note = methanogen bacteria
ENFTDLQHQITEKDFVSLNDDIILNQQTFNEENTFMDGISIKNKQISIEGNNHTIFAKDSNFNQAKLFNIINSNVTLSNMLISHFNFKKCYF

SEQ ID NO: 70242 - protein, 22 aa, unidentified
  source 1..22: note = methanogen bacteria
SVYEGFMESFAHVTELVSVAPV

SEQ ID NO: 70243 - protein, 17 aa, unidentified
  source 1..17: note = methanogen bacteria
PNFSNAFAKLFGITRGL

SEQ ID NO: 70244 - protein, 71 aa, unidentified
  source 1..71: note = methanogen bacteria
SWNMQNIVFNENMDEQQKQRVKNAIQEVSQLDQGQQLNETPDISKSSGEGFTEMGKVYRDSQSGKLIMVEG

SEQ ID NO: 70245 - protein, 18 aa, unidentified
  source 1..18: note = methanogen bacteria
PEISIHLASIFGLGRGLD

SEQ ID NO: 70246 - protein, 97 aa, unidentified
  source 1..97: note = methanogen bacteria
SNFSATDVQTDAADVNSGTGKPNVTDVSGNAEYYVMPVANLHRVTVNGVDRSDAISNSAVGVLAKVIDEGQISIKPGEIIITTPSGISPEDAVRRPG

SEQ ID NO: 70247 - protein, 10 aa, unidentified
  source 1..10: note = methanogen bacteria
NHLKWKGYNH

SEQ ID NO: 70248 - protein, 24 aa, unidentified
  source 1..24: note = methanogen bacteria
MFLARGFVDLGNVVTNIYDGIFRV

SEQ ID NO: 70249 - protein, 93 aa, unidentified
  source 1..93: note = methanogen bacteria
AAENLTDDAMGDDSKEILETVQEDITADGSSDVLETAQNDIYTASDDSFTNLTDEIAVKDVVDLTHDYKFNNETDDVTAVQLTETTNQDYSTL

SEQ ID NO: 70250 - protein, 21 aa, unidentified
  source 1..21: note = methanogen bacteria
MIQILDCQGAMGTVTNAVDTV

SEQ ID NO: 70251 - protein, 37 aa, unidentified
  source 1..37: note = methanogen bacteria
SLAFDVVGGIVTGNEDIDRVNSNNGNFFECWDNMRNS

SEQ ID NO: 70252 - protein, 17 aa, unidentified
  source 1..17: note = methanogen bacteria
PDITTNIANIFGIRRGL

SEQ ID NO: 70253 - protein, 13 aa, unidentified
  source 1..13: note = methanogen bacteria
FFKSAPHGTYYMH

SEQ ID NO: 70254 - protein, 65 aa, unidentified
  source 1..65: note = methanogen bacteria
ALQVNPDMMAKTHESQAKQATSQVSTGEDFTSNASAGSSLEQSGYAEVGKVYRDPDTGKLVMVQE

SEQ ID NO: 70255 - protein, 71 aa, unidentified
  source 1..71: note = methanogen bacteria
SWNMQAIVFNEDVTPEQRQDAINAMKQVTEVDQGQQLNETPDVSNSSGEGYAEMGKVYKDPKTGKMIMIES

SEQ ID NO: 70256 - protein, 88 aa, unidentified
  source 1..88: note = methanogen bacteria
ADLNCTGDIGDVLKDGGDIKSFYDLNGDITAENSSFNMQSDYTFDNQTDMNYTNGIRIVKADFTINGIEREKDETIVAVYHFLIKKIF

SEQ ID NO: 70257 - protein, 10 aa, unidentified
  source 1..10: note = methanogen bacteria
TRMKNRGWSS

SEQ ID NO: 70258 - protein, 82 aa, unidentified
  source 1..82: note = methanogen bacteria
MFSIAFGDNKNFAGTVSVTLPYALRDGEDAGRIYVAFVNPETNKLESMSGTWSDGYVTFATDHFSDYAVMHSEPSDDSGSST

SEQ ID NO: 70259 - protein, 10 aa, unidentified
  source 1..10: note = methanogen bacteria
TEHPLFNEWN

SEQ ID NO: 70260 - protein, 14 aa, unidentified
  source 1..14: note = methanogen bacteria
TMSPEALASYLPGY

SEQ ID NO: 70261 - protein, 22 aa, unidentified
  source 1..22: note = methanogen bacteria
MEILPVDFSKEMFYVLRMHLPV

SEQ ID NO: 70262 - protein, 89 aa, unidentified
  source 1..89: note = methanogen bacteria
VIGQQGTAHKANVTNASNTVNNTSSVNVEKINTENTANSNQESSKSSDWIDSDGAHHFYENGKEYVGSREGQHMDIDTHNYVKEHGMGD

SEQ ID NO: 70263 - protein, 42 aa, unidentified
  source 1..42: note = methanogen bacteria
GTGGIYLVEIMSQLFNVANPFIPMTYAITLVREAQWGLIWSN

SEQ ID NO: 70264 - protein, 10 aa, unidentified
  source 1..10: note = methanogen bacteria
TEHPLFEGFN

SEQ ID NO: 70265 - protein, 13 aa, unidentified
  source 1..13: note = methanogen bacteria
PIFLKGTSIHILD

SEQ ID NO: 70266 - protein, 71 aa, unidentified
  source 1..71: note = methanogen bacteria
SWNMQSVVFSDMSQQEKQQTMEAMKKAVELNQGKELNNTPNSTSGSGEGYVELGQVYKDPETGKLIMIQDG

SEQ ID NO: 70267 - protein, 10 aa, unidentified
  source 1..10: note = methanogen bacteria
FLESGGHAGN

SEQ ID NO: 70268 - protein, 11 aa, unidentified
  source 1..11: note = methanogen bacteria
KTFEFFIFIFP

SEQ ID NO: 70269 - protein, 22 aa, unidentified
  source 1..22: note = methanogen bacteria
NMPSPQFFEHHKAYAIVLGSST

SEQ ID NO: 70270 - protein, 71 aa, unidentified
  source 1..71: note = methanogen bacteria
SWNMQSIVFNEDMTQQEKQQVMQTIKSVSEVNQGQQLNETPDSSNSSGQGYTEMGKVYKDPSTGKLIMVEG

SEQ ID NO: 70271 - protein, 71 aa, unidentified
  source 1..71: note = methanogen bacteria
SWNMQSIVFNEDMTQQEKQQVMQTIKSVSEVNQGHELNDTPDTSNSSGQGYTEMGKVYKDPKTGKLIMVEG

SEQ ID NO: 70272 - protein, 71 aa, unidentified
  source 1..71: note = methanogen bacteria
SWNMQAIVFNDSVTPEQRQDAINAMKQVTEIDQGQQLNETPDVSSSSGEGYSELGKVYKDSNTGKLIMIEN

SEQ ID NO: 70273 - protein, 71 aa, unidentified
  source 1..71: note = methanogen bacteria
SWNMQAIVFNDDVTPDQKQDAINAMKQVTEIDQGQQLNETPDVSSSSGEGYSELGKVYKDPKTGKLIMIEN

SEQ ID NO: 70274 - protein, 71 aa, unidentified
  source 1..71: note = methanogen bacteria
SWNMQNIVFNENMDEQQKQKVKNAITEVSQIDQGEELKDSPDISNSSGNGFTEMGKVYRDSDTGKLIMVEG

SEQ ID NO: 70275 - protein, 70 aa, unidentified
  source 1..70: note = methanogen bacteria
WNMQAIVFNDDISPDQRQDAINAMKQVTEIDQGKQLNETPDVSSSSGEGYSELGKVYKDPKTGKLIMIEN

SEQ ID NO: 70276 - protein, 71 aa, unidentified
  source 1..71: note = methanogen bacteria
SWNMQAIVFNDSVTPQERQDAINAMKQVTEIDQGQHLNQTPDVSNSSGEGYAELGKVYKDSNTGKLIMIEN

SEQ ID NO: 70277 - protein, 71 aa, unidentified
  source 1..71: note = methanogen bacteria
SWNMQAIVFNESMTPQEKQQVMQTIKSVSEVNQGQELNQTPDTSNSSGQGYTEMGKVYKDPSTGKLIMVEG

SEQ ID NO: 70278 - protein, 12 aa, unidentified
  source 1..12: note = methanogen bacteria
GSIIPSNSVIFR

SEQ ID NO: 70279 - protein, 71 aa, unidentified
  source 1..71: note = methanogen bacteria
SWNMQAIVFNEDMTPEQKQQVMQSIKSVSEVNQGQQLNETPDTSNSSGQGYTEMGKVYKDPSTGKLIMVEG

SEQ ID NO: 70280 - protein, 71 aa, unidentified
  source 1..71: note = methanogen bacteria
SWNMQSVVFNDDMTQDQKQEVMNAMKQVSEVTQGQELNETPDTSNSSGQGYTEMGKVYKDPATGRLIMVEG

SEQ ID NO: 70281 - protein, 70 aa, unidentified
  source 1..70: note = methanogen bacteria
WNMQSIVFNENMDEQQKQKVKDAITEVSQIDQGEELKDSPDISKSSGDGFTEMGKVYRDSDTGKLIMVEG

SEQ ID NO: 70282 - protein, 71 aa, unidentified
  source 1..71: note = methanogen bacteria
SWNMQAIVFNEDINPEQRQDAINAMKQVTEIDQGKQLNETPDVSSSSGEGYAELGKVYKDSNTGKLIMIEN

SEQ ID NO: 70283 - protein, 70 aa, unidentified
  source 1..70: note = methanogen bacteria
SWNMQSVIFQDTSQDPSQAVQQSPTNITEVTEGQELNETPESSESSGQGYMEMGKVYKDPSTGKLIMVEG

SEQ ID NO: 70284 - protein, 26 aa, unidentified
  source 1..26: note = methanogen bacteria
HGEIVPWFPFLTAMSDPEDTAAMLTE

SEQ ID NO: 70285 - protein, 24 aa, unidentified
  source 1..24: note = methanogen bacteria
MALMEFIDSIWCGLCDFASYVWGN

SEQ ID NO: 70286 - protein, 70 aa, unidentified
  source 1..70: note = methanogen bacteria
SWNMQSVIFQDTSQDQSQAVQSSHPNVTEVSEGQELNDTPESSQSSGQGYMEMGKVYKDPATGKLIMVEG

SEQ ID NO: 70287 - protein, 70 aa, unidentified
  source 1..70: note = methanogen bacteria
SWNMQSVVFQESNQNPQNVINENSPDVTEVSEGQVLNETPDTSDSSGQGYMEMGKVYKDPSTGKLVMVEG

SEQ ID NO: 70288 - protein, 14 aa, unidentified
  source 1..14: note = methanogen bacteria
TIGAENMVGLIIGM

SEQ ID NO: 70289 - protein, 88 aa, unidentified
  source 1..88: note = methanogen bacteria
ADLNNSTSDLTQDNSDFQNLTNTMEPDREKSESGISTDYFQNNNISNKDDSTVYIILDNDADKENVYLGDYVTWIVSVYNLNGNTAKC

SEQ ID NO: 70290 - protein, 89 aa, unidentified
  source 1..89: note = methanogen bacteria
AYFTLQSQYKTISMSGITMEVPTSNATVNNVSANYNTYDDQENNLSVKTWAYRDMNDVNGTAQAVLEIGTQYGSNLANNVTYDNVSVAN

SEQ ID NO: 70291 - protein, 70 aa, unidentified
  source 1..70: note = methanogen bacteria
SWNMQSIVFSDMSPEERQNVMETINQVSEVTQGQQLNETPDTSNSSGQGYTEMGRVYKDPATGRLIMVEG

SEQ ID NO: 70292 - protein, 70 aa, unidentified
  source 1..70: note = methanogen bacteria
SWNMQSVVFSDTSNQQSQAVQSPNVNVTEVSEGQELNETPDSSQNSGQGYMEMGRVYKDPSTGKLIMVEE

SEQ ID NO: 70293 - protein, 25 aa, unidentified
  source 1..25: note = methanogen bacteria
HGEIVPWFPFLTAMSDPADTSAMLT

SEQ ID NO: 70294 - protein, 70 aa, unidentified
  source 1..70: note = methanogen bacteria
SWNMQSIIFSDMSQDEKDSIMEAMKDAKPIDKGQEIDTPPEISQSSGQGYTEMGKVYKDPTTGKLIMVEQ

SEQ ID NO: 70295 - protein, 10 aa, unidentified
  source 1..10: note = methanogen bacteria
RKYNYTSNNA

SEQ ID NO: 70296 - protein, 69 aa, unidentified
  source 1..69: note = methanogen bacteria
SWNMQSVVFQDNQNQEKAIQESSPDVTEVSEGQTLNETPESSNSSGQGYMEMGKVYKDPSTGKLIMVEG

SEQ ID NO: 70297 - protein, 76 aa, unidentified
  source 1..76: note = methanogen bacteria
MVDVLIVESSVAKNGYDASAIAASINKAINNGLLMGVDHVEPKDLNVKQGSKAVGVYFNALPGDRSSPSWDLPIDG

SEQ ID NO: 70298 - protein, 69 aa, unidentified
  source 1..69: note = methanogen bacteria
SWNMQSVVFQDNQESQKALDESSPDVTEVSEGQVLNETPDTSDSSGSGYMEMGKVYKDPSTGKLIMVEE

SEQ ID NO: 70299 - protein, 17 aa, unidentified
  source 1..17: note = methanogen bacteria
WCIIHRQYCEIDSQNLL

SEQ ID NO: 70300 - protein, 70 aa, unidentified
  source 1..70: note = methanogen bacteria
GWNLQSVIFSDMTPEERQSTMESISEITDVKQGEQLNSTPDTSDKSGEGYVEQGKVYRDSKTGNLIMVES

SEQ ID NO: 70301 - protein, 69 aa, unidentified
  source 1..69: note = methanogen bacteria
SWNMQSVVFQENQNPQQQISENSPDVTEVAEGQALNETPDTSNSSGQGYMEMGKVYKDPSTGKLIMVEG

SEQ ID NO: 70302 - protein, 45 aa, unidentified
  source 1..45: note = methanogen bacteria
ADGGFGGSDDAGGESADKYGYEAWTGDILTIITGDPDYELPGETE

SEQ ID NO: 70303 - protein, 14 aa, unidentified
  source 1..14: note = methanogen bacteria
RSFFIKGHQFPVCA

SEQ ID NO: 70304 - protein, 15 aa, unidentified
  source 1..15: note = methanogen bacteria
QGYMGQFDGFFLTQN

SEQ ID NO: 70305 - protein, 13 aa, unidentified
  source 1..13: note = methanogen bacteria
VKDPFIKNTILMD

SEQ ID NO: 70306 - protein, 12 aa, unidentified
  source 1..12: note = methanogen bacteria
KNFVDLKFFDEN

SEQ ID NO: 70307 - protein, 69 aa, unidentified
  source 1..69: note = methanogen bacteria
WNLQSVIFSDMSPEDRQAAMESIKDITNVTQGEKLNETPDTSNSSGEGYVEQGKVYKDSKTGNLIMVEG

SEQ ID NO: 70308 - protein, 69 aa, unidentified
  source 1..69: note = methanogen bacteria
WNLQSVIFSDMSPEDRQQAMQSISEITNVTQGEQLNETPDTSNSSGEGYVEQGKVYKDSKTGNLIMIEE

SEQ ID NO: 70309 - protein, 34 aa, unidentified
  source 1..34: note = methanogen bacteria
IYGFKNLIQPGISLVYNAIGTQLAPNMVTLVVFD

SEQ ID NO: 70310 - protein, 10 aa, unidentified
  source 1..10: note = methanogen bacteria
MNEIIAFLSE

SEQ ID NO: 70311 - protein, 61 aa, unidentified
  source 1..61: note = methanogen bacteria
VSLSFEENTVDEGPHYENVTKEMTSNLNSTEDVYFDKTTDGVDYNQNETSQLDVKYQYSDN

SEQ ID NO: 70312 - protein, 69 aa, unidentified
  source 1..69: note = methanogen bacteria
SWNMQSVVFQDSQDQQKAIEESSPDVTEVAEGQVLNETPDTSDSSGQGYMEMGKVYKDPSTGKLIMVEG

SEQ ID NO: 70313 - protein, 69 aa, unidentified
  source 1..69: note = methanogen bacteria
WNLQSVIFSDMSPDQRQQAMESISEITNVTQGEQLNETPDTSEMSGEGYVEQGKVYKDSKTGNLIMVEE

SEQ ID NO: 70314 - protein, 69 aa, unidentified
  source 1..69: note = methanogen bacteria
SWNMQGVVFSDMTQEEKQNVMEQMSQVSEVDQGQQLNETPDVSNKSGKGYTEMGKVYQDSNGKLIMVEE

SEQ ID NO: 70315 - protein, 69 aa, unidentified
  source 1..69: note = methanogen bacteria
SWNMQSVVFQDSQDQQKAIEESSPDVTEVAEGQVLNETPDTSDSSGQGYMEMGTVYKDPTTGKLIMVED

SEQ ID NO: 70316 - protein, 76 aa, unidentified
  source 1..76: note = methanogen bacteria
FNAQITLTNGASTYKGITNYEGVCTISKVLVGDYQIRVICDGYEMYTGNVSISKTTGQIPITLVQKEMPTYLGMTL

SEQ ID NO: 70317 - protein, 85 aa, unidentified
  source 1..85: note = methanogen bacteria
HLTAIYTWEGITACSVRVFCEDCDYLAGIEHPEIESKVKIPPTETEMGTTEYYVSGTVEGYDYYSGKDVQDIPVVVPGNGSDNLI

SEQ ID NO: 70318 - protein, 10 aa, unidentified
  source 1..10: note = methanogen bacteria
STGLSDGPVP

SEQ ID NO: 70319 - protein, 68 aa, unidentified
  source 1..68: note = methanogen bacteria
SWNMQSVVFQDSQQQQQIEQTSPDVTEVSEGQVLNETPDTSNSSGSGYMEMGKVYKDPATGKLIMVEG

SEQ ID NO: 70320 - protein, 81 aa, unidentified
  source 1..81: note = methanogen bacteria
AQDTNNITDLNNNGAIGNNPIIDDGNGSLEIQNANNLTAVGTFDNLQVEIDKAPEGSVLNLTRDYNGAYGSRIQFNKNLTI

SEQ ID NO: 70321 - protein, 65 aa, unidentified
  source 1..65: note = methanogen bacteria
SWNMQAMIDPSENVHEQMQQKMTEVDQGQQLNDTPDTSNSSGQGYTEMGKVYKDPSTGKLIMVEG

SEQ ID NO: 70322 - protein, 68 aa, unidentified
  source 1..68: note = methanogen bacteria
SWNMQSVVFQDNPQQSAIQDSSPDVTEVEEGQVLNDTPDTSNSSGQGYMEMGKVYKDPSSGKLIMVEN

SEQ ID NO: 70323 - protein, 13 aa, unidentified
  source 1..13: note = methanogen bacteria
NFALDPATGIIGS

SEQ ID NO: 70324 - protein, 22 aa, unidentified
  source 1..22: note = methanogen bacteria
PMIQVIPEMNFALDPVTGVIGS

SEQ ID NO: 70325 - protein, 14 aa, unidentified
  source 1..14: note = methanogen bacteria
TMTPEGLAAYLPQE

SEQ ID NO: 70326 - protein, 100 aa, unidentified
  source 1..100: note = methanogen bacteria
ALNRSVLVGEQVTFEIVVQNLGQIDLNNVVVREDSFNGLVYDSFIDYTGLWTKNNDLSWTLNVPLVAGEYAGFFVTFNTTAEGKFVNVVVADSKELRNSK

SEQ ID NO: 70327 - protein, 11 aa, unidentified
  source 1..11: note = methanogen bacteria
VAGLGADQLAA

SEQ ID NO: 70328 - protein, 65 aa, unidentified
  source 1..65: note = methanogen bacteria
SWNMQAMLDPDHNIQEQMQQKMTEVDQGQELNETPDTSNSSGQGYTEMGTVYKDPATGKLIMVEG

SEQ ID NO: 70329 - protein, 45 aa, unidentified
  source 1..45: note = methanogen bacteria
VNGDFGGSDDAGGGVADDYGYEAWTGDILTIITGDPNYELPGETE

SEQ ID NO: 70330 - protein, 18 aa, unidentified
  source 1..18: note = methanogen bacteria
PNITTVFALRFGLGRGLD

SEQ ID NO: 70331 - protein, 67 aa, unidentified
  source 1..67: note = methanogen bacteria
SWNMQSVVFQDSQQQPIEQSSPDVTEVSEGQALNETPDTSNSSGQGYMEMGKVYKDPSTGKLIMVEG

SEQ ID NO: 70332 - protein, 12 aa, unidentified
  source 1..12: note = methanogen bacteria
MNVNLDPISGVL

SEQ ID NO: 70333 - protein, 23 aa, unidentified
  source 1..23: note = methanogen bacteria
LSMDDINAEIDKVCAAADELSNS

SEQ ID NO: 70334 - protein, 84 aa, unidentified
  source 1..84: note = methanogen bacteria
ASDINHTPSDPTTFNDTTPINEYQPLTDNFDDSNNTNENLQPGTFEELKYDIENLKSGDTYDINKDYYFNDNGENIHSNNRVIE

SEQ ID NO: 70335 - protein, 15 aa, unidentified
  source 1..15: note = methanogen bacteria
TMQPESLAAYLPHGY

SEQ ID NO: 70336 - protein, 52 aa, unidentified
  source 1..52: note = methanogen bacteria
YMTDWNGLGHINDEMSSIDYGSHDSSTTDSIYDDSTGELRDDTLNYKIFEEY

SEQ ID NO: 70337 - protein, 11 aa, unidentified
  source 1..11: note = methanogen bacteria
FRLDGSSFQLW

SEQ ID NO: 70338 - protein, 70 aa, unidentified
  source 1..70: note = methanogen bacteria
LLTTIDYSNDIIDSIDSKNEMSKITEAIDFCYASGKGSKKIVLVDFNQNANMKLYNDGKKGICINQSKFV

SEQ ID NO: 70339 - protein, 34 aa, unidentified
  source 1..34: note = methanogen bacteria
LYGFKHLIQPGISLIYNAVGTQLAPNMVTLVVFD

SEQ ID NO: 70340 - protein, 23 aa, unidentified
  source 1..23: note = methanogen bacteria
KTLMDTPTVSLIVPGVEEWKKSI

SEQ ID NO: 70341 - protein, 14 aa, unidentified
  source 1..14: note = methanogen bacteria
TMTPEALAAYLPQE

SEQ ID NO: 70342 - protein, 67 aa, unidentified
  source 1..67: note = methanogen bacteria
SWNMQAMVDPTESIQEKMQQQQQTTEVSQGHELNDTPDTSNSSGQGYTEMGRVYKDPSTGKLIMVEG

SEQ ID NO: 70343 - protein, 20 aa, unidentified
  source 1..20: note = methanogen bacteria
MAILEDIWNGFCDFVNYLWC

SEQ ID NO: 70344 - protein, 67 aa, unidentified
  source 1..67: note = methanogen bacteria
SWNMQSVVFQNQEQQTFDESSPDVTEVSEGQVLNETPDSSNSSGQGYMEMGKVYKDPSTGKLIMVEG

SEQ ID NO: 70345 - protein, 13 aa, unidentified
  source 1..13: note = methanogen bacteria
ATFGGSFAGLFGG

SEQ ID NO: 70346 - protein, 21 aa, unidentified
  source 1..21: note = methanogen bacteria
LSNFDFQFMFLSYFCKNTPTS

SEQ ID NO: 70347 - protein, 15 aa, unidentified
  source 1..15: note = methanogen bacteria
MGIFIKNVNGDYLLE

SEQ ID NO: 70348 - protein, 66 aa, unidentified
  source 1..66: note = methanogen bacteria
SWNMQAMIDPSQNIQEQMQQQKTTQVDQGQQLNDTPDTSNSSGQGYTEMGKVYKDPATGKLIMVEG

SEQ ID NO: 70349 - protein, 66 aa, unidentified
  source 1..66: note = methanogen bacteria
SWNMQAMIDPNQNIQEQMQQQTMTEVDQGQQLNETPDTSNSSGQGYTEMGKVYKDPSTGKLIMVEG

SEQ ID NO: 70350 - protein, 13 aa, unidentified
  source 1..13: note = methanogen bacteria
VKPENVANELSHV

SEQ ID NO: 70351 - protein, 21 aa, unidentified
  source 1..21: note = methanogen bacteria
MGILTEIWDWLVDFGVFIWGN

SEQ ID NO: 70352 - protein, 66 aa, unidentified
  source 1..66: note = methanogen bacteria
SWNMQAMIDPEHNVQEQMQQKTMTEVDQGHQLNETPDTSNSSGQGYTEMGKVYKDPATGKLIMVEG

SEQ ID NO: 70353 - protein, 66 aa, unidentified
  source 1..66: note = methanogen bacteria
SWNMQAMIDPTQNIQEQMQQQKTTEVDQGQQLNETPDTSNSSGQGYTEMGKVYKDPATGKLIMVEG

SEQ ID NO: 70354 - protein, 14 aa, unidentified
  source 1..14: note = methanogen bacteria
FEVIFTHTITTSLE

SEQ ID NO: 70355 - protein, 10 aa, unidentified
  source 1..10: note = methanogen bacteria
MIYLISETSL

SEQ ID NO: 70356 - protein, 66 aa, unidentified
  source 1..66: note = methanogen bacteria
SWNMQAMIDPTTSIHDQMQQKETVEVDQGQQLNETPDTSNSSGQGYTEMGKVYKDPATGKLIMVEG

SEQ ID NO: 70357 - protein, 21 aa, unidentified
  source 1..21: note = methanogen bacteria
INTLEIQPHISFQMLSFSFFI

SEQ ID NO: 70358 - protein, 24 aa, unidentified
  source 1..24: note = methanogen bacteria
VLTVLLLSILAVSAAPSPEMMSWV

SEQ ID NO: 70359 - protein, 17 aa, unidentified
  source 1..17: note = methanogen bacteria
NPALHKIWFLHWNSWSS

SEQ ID NO: 70360 - protein, 11 aa, unidentified
  source 1..11: note = methanogen bacteria
FLENYGQVHIS

SEQ ID NO: 70361 - protein, 12 aa, unidentified
  source 1..12: note = methanogen bacteria
IFIKSVGQAQMS

SEQ ID NO: 70362 - protein, 10 aa, unidentified
  source 1..10: note = methanogen bacteria
PYVLYSNGGG

SEQ ID NO: 70363 - protein, 11 aa, unidentified
  source 1..11: note = methanogen bacteria
FIESFGKAHTP

SEQ ID NO: 70364 - protein, 11 aa, unidentified
  source 1..11: note = methanogen bacteria
LIESGGSEGYS

SEQ ID NO: 70365 - protein, 11 aa, unidentified
  source 1..11: note = methanogen bacteria
FLKEAGSVHTP

SEQ ID NO: 70366 - protein, 12 aa, unidentified
  source 1..12: note = methanogen bacteria
EGGEGEFLEIGL

SEQ ID NO: 70367 - protein, 37 aa, unidentified
  source 1..37: note = methanogen bacteria
IFSSGTSNNVQPNITITFDQVYASDFESDGKPTIHIM

SEQ ID NO: 70368 - protein, 12 aa, unidentified
  source 1..12: note = methanogen bacteria
FIFLLNFSHAHA

SEQ ID NO: 70369 - protein, 12 aa, unidentified
  source 1..12: note = methanogen bacteria
IFLESFGHAHTP

SEQ ID NO: 70370 - protein, 84 aa, unidentified
  source 1..84: note = methanogen bacteria
SELSDDNLTEIDEDMESTFHNTTFEDLSQKINDTPENQTLTLTDDYQYDGGDIHGIVISKSITIDGAGHTIDANHSSRIFNVTA

SEQ ID NO: 70371 - protein, 41 aa, unidentified
  source 1..41: note = methanogen bacteria
ASGDPDGLEKSAEDAGVGEDVESAVIESPFPDYTYEPLDKI

SEQ ID NO: 70372 - protein, 10 aa, unidentified
  source 1..10: note = methanogen bacteria
YSKAGISLSL

SEQ ID NO: 70373 - protein, 14 aa, unidentified
  source 1..14: note = methanogen bacteria
FLIFIESLGHAHTP

SEQ ID NO: 70374 - protein, 11 aa, unidentified
  source 1..11: note = methanogen bacteria
FLKEAGSAHTP

SEQ ID NO: 70375 - protein, 10 aa, unidentified
  source 1..10: note = methanogen bacteria
ILKDIGNANA

SEQ ID NO: 70376 - protein, 10 aa, unidentified
  source 1..10: note = methanogen bacteria
LEQFPKAHTP

SEQ ID NO: 70377 - protein, 11 aa, unidentified
  source 1..11: note = methanogen bacteria
FLESLGSFHTP

SEQ ID NO: 70378 - protein, 11 aa, unidentified
  source 1..11: note = methanogen bacteria
VITHFNQGHIH

SEQ ID NO: 70379 - protein, 12 aa, unidentified
  source 1..12: note = methanogen bacteria
EGGEGEFLEIGL

SEQ ID NO: 70380 - protein, 10 aa, unidentified
  source 1..10: note = methanogen bacteria
FLENLKIAHA

SEQ ID NO: 70381 - protein, 76 aa, unidentified
  source 1..76: note = methanogen bacteria
AKYSFDIQDVEAFERSAWESGTPVTNGKNWRVKKYDKTIAAVNGKETIYVRIEKSSNTIHGHPISESEYNKLLKEH

SEQ ID NO: 70382 - protein, 12 aa, unidentified
  source 1..12: note = methanogen bacteria
LIFIESFGQAHI

SEQ ID NO: 70383 - protein, 10 aa, unidentified
  source 1..10: note = methanogen bacteria
YPFSIHSQIV

SEQ ID NO: 70384 - protein, 65 aa, unidentified
  source 1..65: note = methanogen bacteria
ALQINPDMMAKTQESQAQKAASQVSTGEDFNNNNSASSSLEESGYSEVGKVYRDPDTGKLVMVQD

SEQ ID NO: 70385 - protein, 65 aa, unidentified
  source 1..65: note = methanogen bacteria
SWNMQAMIDPENSIQEQMQQKTTEVDQGQQLNETPDSSNSSGQGYTEMGKVYKDPATGKLIMVEG

SEQ ID NO: 70386 - protein, 11 aa, unidentified
  source 1..11: note = methanogen bacteria
FIESFGQVHTS

SEQ ID NO: 70387 - protein, 65 aa, unidentified
  source 1..65: note = methanogen bacteria
ALQVNPDMMAKTQESQAQQAASDVSTGETFTSNSTAGSSLEQSGYSEVGKVYRDPDTGKLVMVQG

SEQ ID NO: 70388 - protein, 26 aa, unidentified
  source 1..26: note = methanogen bacteria
FPWGGTDPQMSVLGISCRCNYCRSGR

SEQ ID NO: 70389 - protein, 35 aa, unidentified
  source 1..35: note = methanogen bacteria
FHLHDMINPGVSNIYNALGTQIAPNMVTVVIFDFR

SEQ ID NO: 70390 - protein, 17 aa, unidentified
  source 1..17: note = methanogen bacteria
PKISDPLAGFFGFKRGL

SEQ ID NO: 70391 - protein, 30 aa, unidentified
  source 1..30: note = methanogen bacteria
YRSYFSNNASGLNATQDISSIRANMTNIPW

SEQ ID NO: 70392 - protein, 11 aa, unidentified
  source 1..11: note = methanogen bacteria
FLASVGKAHTP

SEQ ID NO: 70393 - protein, 65 aa, unidentified
  source 1..65: note = methanogen bacteria
SWNMQAMIDPSENIQEQMQQKTTEIDQGTQLDDAPDTSNSSGQGYTEMGKVYKDPSTGKLIMVEG

SEQ ID NO: 70394 - protein, 10 aa, unidentified
  source 1..10: note = methanogen bacteria
TIGSSMHLSS

SEQ ID NO: 70395 - protein, 34 aa, unidentified; identical to SEQ ID NO: 70309
  source 1..34: note = methanogen bacteria

SEQ ID NO: 70396 - protein, 18 aa, unidentified
  source 1..18: note = methanogen bacteria
APRFSDPLAGFFGFGRGL

SEQ ID NO: 70397 - protein, 13 aa, unidentified
  source 1..13: note = methanogen bacteria
LAYDPVNGVLGSS

SEQ ID NO: 70398 - protein, 22 aa, unidentified
  source 1..22: note = methanogen bacteria
LLSMDDVGEGVAKVEAAADELM

SEQ ID NO: 70399 - protein, 10 aa, unidentified
  source 1..10: note = methanogen bacteria
FLAACLWEDS

SEQ ID NO: 70400 - protein, 17 aa, unidentified
  source 1..17: note = methanogen bacteria
PAMPTSHFVLYYVSQIE

SEQ ID NO: 70401 - protein, 81 aa, unidentified
  source 1..81: note = methanogen bacteria
LFNPFNAKEPTKLKITSDNEQYEGGKLSVKLTDLNNTPISKEIVNVTITNKKGKVVVDDIVKTDSKGMEMKITLVIIQHRN

SEQ ID NO: 70402 - protein, 18 aa, unidentified
  source 1..18: note = methanogen bacteria
ENSNLVLEFSSKDFINLF

SEQ ID NO: 70403 - protein, 18 aa, unidentified
  source 1..18: note = methanogen bacteria
MCNADMKMILKIVIEVLN

SEQ ID NO: 70404 - protein, 33 aa, unidentified
  source 1..33: note = methanogen bacteria
PFILGAVDKILPMDYDDSWYECYNYVKNSQEDE

SEQ ID NO: 70405 - protein, 10 aa, unidentified
  source 1..10: note = methanogen bacteria
EYASSMGSSA

SEQ ID NO: 70406 - protein, 65 aa, unidentified
  source 1..65: note = methanogen bacteria
MGYDKWIKVKVDMIHADPISQGFVMSADKLKDLNLKNTVASIVTAEYVDKNYTRIKTSGDSFYIL

SEQ ID NO: 70407 - protein, 20 aa, unidentified
  source 1..20: note = methanogen bacteria
GSIAKFLCASQSALIPDVTS

SEQ ID NO: 70408 - protein, 22 aa, unidentified
  source 1..22: note = methanogen bacteria
MVLESTVPFLASAAPNLFGVLY

SEQ ID NO: 70409 - protein, 19 aa, unidentified
  source 1..19: note = methanogen bacteria
MLWHVMMTCILGNGDWMFE

SEQ ID NO: 70410 - protein, 34 aa, unidentified
  source 1..34: note = methanogen bacteria
MLVEPGISGYGDAVWYCFVACTSIGFGDLVEATF

SEQ ID NO: 70411 - protein, 11 aa, unidentified
  source 1..11: note = methanogen bacteria
MLILKNIIFVI

SEQ ID NO: 70412 - protein, 21 aa, unidentified
  source 1..21: note = methanogen bacteria
TPADQEKVLNLVGKKKTIIVE

SEQ ID NO: 70413 - protein, 48 aa, unidentified
  source 1..48: note = methanogen bacteria
YATSWDNMNDEPTSIPYNGTDGMNAESNTNDDGTLKTNSLNYGVFEAY

SEQ ID NO: 70414 - protein, 76 aa, unidentified
  source 1..76: note = methanogen bacteria
EDTSWTDVNSESELIEALNGGTKNIRIVSDITMTGDLNIPAGVRVLIPYAAGDTSGLKVGGETFRIAGSSYVHLTV

SEQ ID NO: 70415 - protein, 19 aa, unidentified
  source 1..19: note = methanogen bacteria
YRSYMETSDRSLKAKDDII

SEQ ID NO: 70416 - protein, 28 aa, unidentified
  source 1..28: note = methanogen bacteria
YMSNITQKTQTTLTNLLKEERDYLINKI

SEQ ID NO: 70417 - protein, 58 aa, unidentified
  source 1..58: note = methanogen bacteria
LAVNPDMITQTQSTKDVSTADTFSQNYTNASGMEDSGYSEVGKVYQDPTTGELVMVSS

SEQ ID NO: 70418 - protein, 15 aa, unidentified
  source 1..15: note = methanogen bacteria
LPQPATASLASILAL

SEQ ID NO: 70419 - protein, 10 aa, unidentified
  source 1..10: note = methanogen bacteria
DSISNYFCSQ

SEQ ID NO: 70420 - protein, 20 aa, unidentified
  source 1..20: note = methanogen bacteria
MAMAIPGGDFLTTGLNLISQ

SEQ ID NO: 70421 - protein, 47 aa, unidentified
  source 1..47: note = methanogen bacteria
YATSWDGMDEPTPIPYNGEAGMNAPSNTNDDGTLKENSLNYGVFEAY

SEQ ID NO: 70422 - protein, 19 aa, unidentified
  source 1..19: note = methanogen bacteria
LPGAQLLTEGDFITFIKLV

SEQ ID NO: 70423 - protein, 20 aa, unidentified
  source 1..20: note = methanogen bacteria
MIQILSCSPSMDTLIGAVKL

SEQ ID NO: 70424 - protein, 25 aa, unidentified
  source 1..25: note = methanogen bacteria
LAFDLVASIVTNDGTDLHNDNLKNG

SEQ ID NO: 70425 - protein, 62 aa, unidentified
  source 1..62: note = methanogen bacteria
STGLQDIVFENHQNQSQQTVEIEQGQEVTDTMEQINESSSGYTKTGTVYTDPKTGKKYMTST

SEQ ID NO: 70426 - protein, 18 aa, unidentified
  source 1..18: note = methanogen bacteria
YDLIFKSDDSSNIIFRGI

SEQ ID NO: 70427 - protein, 46 aa, unidentified
  source 1..46: note = methanogen bacteria
ASGDPDGLEKSAEDSGLDEDFSVEDIKGIPEAVLPDYAFANDPDNQ

SEQ ID NO: 70428 - protein, 35 aa, unidentified
  source 1..35: note = methanogen bacteria
FHISNIINPGVSNIYNALGTQIAPNMVTVVIFDFR

SEQ ID NO: 70429 - protein, 98 aa, unidentified
  source 1..98: note = methanogen bacteria
DSLKIKSDMSKIALAIKTVYGEGQGSRQTVNIYSTYPFKVNVGSDYLSCNVHLKDSTNKHIEVPSKSNLKSTSISLKKGTNIVTVEWPVGGENMLIST

SEQ ID NO: 70430 - protein, 20 aa, unidentified
  source 1..20: note = methanogen bacteria
AWSDVEPFCDVAAWDVFYDA

SEQ ID NO: 70431 - protein, 46 aa, unidentified
  source 1..46: note = methanogen bacteria
VNEWDDSPLGFDDEPQSIPYDDVVIDNGGTDTVDDSSLNYGVLETY

SEQ ID NO: 70432 - protein, 20 aa, unidentified
  source 1..20: note = methanogen bacteria
FDGPVEAIKNVEGWDILYNT

SEQ ID NO: 70433 - protein, 41 aa, unidentified
  source 1..41: note = methanogen bacteria
NGLGEDQGYFGGADDAGSDAVSETGYKPWFESFWEPPSGEI

SEQ ID NO: 70434 - protein, 42 aa, unidentified
  source 1..42: note = methanogen bacteria
FSGHGEDDGYFGGSDDAASEQIEASNYEPWFSSIWEPPSGEI

SEQ ID NO: 70435 - protein, 35 aa, unidentified
  source 1..35: note = methanogen bacteria
CYMSMQSGTAVSDFVTQGTGLVFIVYPTVFNVFGQ

SEQ ID NO: 70436 - protein, 15 aa, unidentified
  source 1..15: note = methanogen bacteria
GMPTSEFVLKYVSQV

SEQ ID NO: 70437 - protein, 42 aa, unidentified
  source 1..42: note = methanogen bacteria
YNGHGEDDGYFGGSDDAASEQIEATHFEPWFSSIWEPPSGEI

SEQ ID NO: 70438 - protein, 50 aa, unidentified
  source 1..50: note = methanogen bacteria
FPAGVDYGSQESFIGMIGTAIAPVFAPLFPYYSVWLQRRLSYPHSVHYSE

SEQ ID NO: 70439 - protein, 42 aa, unidentified
  source 1..42: note = methanogen bacteria
FSGHGEDDGYFGGADDAAGEAIEESGFTPWFSSIWEPPSGEI

SEQ ID NO: 70440 - protein, 44 aa, unidentified
  source 1..44: note = methanogen bacteria
SGHGEDDGYFGGSDDAGGEAIEQNNPGYHVWAQPLWEPPSGEIE

SEQ ID NO: 70441 - protein, 42 aa, unidentified
  source 1..42: note = methanogen bacteria
YHGHGEDDGYFGGADDAAGEQIEKTGFEPWFSSIWEPPSGEI

SEQ ID NO: 70442 - protein, 46 aa, unidentified
  source 1..46: note = methanogen bacteria
ASGDPDGLEKSAEDAGLPEGFSIEKIGGIPEAIFPDYAVASAPDNQ

SEQ ID NO: 70443 - protein, 63 aa, unidentified
  source 1..63: note = methanogen bacteria
MAVQTNPEIIHSSQEQSQSQGEQVSSGQEVNNSSSGGSSQNGYSEVGKVYKDPETGKLVMVSS

SEQ ID NO: 70444 - protein, 21 aa, unidentified
  source 1..21: note = methanogen bacteria
INWSGISPFNGIDGWNIVYNA

SEQ ID NO: 70445 - protein, 21 aa, unidentified
  source 1..21: note = methanogen bacteria
MNIDTTLFGGFIKGFGQLFSN

SEQ ID NO: 70446 - protein, 79 aa, unidentified
  source 1..79: note = methanogen bacteria
NDSNVTNDNDWSYDKNEYPKNEYRLDELPVSHKSAYEVRQFFEDSDSDNDGVLKDREINTFDYKIKHSQYTFNGPYGYS

SEQ ID NO: 70447 - protein, 47 aa, unidentified
  source 1..47: note = methanogen bacteria
ASGDPDGLEKSAEDSGLAEDFSVEEIKGIPDAIFPDYAFASNPDNQG

SEQ ID NO: 70448 - protein, 46 aa, unidentified
  source 1..46: note = methanogen bacteria
ASGDPDGLEKSAEDAGLDENFTVEEVNGVPEAALPDYAFANDPENQ

SEQ ID NO: 70449 - protein, 47 aa, unidentified
  source 1..47: note = methanogen bacteria
ASGDPDGLEKSAEDSGLAEDFSIEEINGIPDAIFPDYAFADNPDSQP

SEQ ID NO: 70450 - protein, 60 aa, unidentified
  source 1..60: note = methanogen bacteria
SWNMQAMIDPDQNIHEQMQQKMTEVDQGQQLNETPDTSNYTEMGKVYKDPATGKLIMVEE

SEQ ID NO: 70451 - protein, 47 aa, unidentified
  source 1..47: note = methanogen bacteria
ASGDPDGLEKSAEDSGLAEDFSVEEIKGIPEAAFPDYAFADNPDNQG

SEQ ID NO: 70452 - protein, 35 aa, unidentified
  source 1..35: note = methanogen bacteria
FHVSKIITPGVSNIYNSLGTKIAPNMVTAVIFDFR

SEQ ID NO: 70453 - protein, 46 aa, unidentified
  source 1..46: note = methanogen bacteria
ASGDPDGLEKSAEDSGLPEDFSIEEIKGIPDAIFPDYAFANAPDNQ

SEQ ID NO: 70454 - protein, 77 aa, unidentified
  source 1..77: note = methanogen bacteria
FWDSGEGEGGVAGIARDVKETENGFVFSLEDASGEETRCFFKDRPEPGAAYRVEGSMSDDGTMLFVSSLELLLPARE

SEQ ID NO: 70455 - protein, 47 aa, unidentified
  source 1..47: note = methanogen bacteria
ASGDPDGLEKSAEDSGLAEDFSVEEIKGIPEAPLPDYAFASNPDNQG

SEQ ID NO: 70456 - protein, 23 aa, unidentified
  source 1..23: note = methanogen bacteria
ADSSWTWGSNTLGDFGISATAAA

SEQ ID NO: 70457 - protein, 35 aa, unidentified
  source 1..35: note = methanogen bacteria
FHVSKMITPGVSNIYNALGTKIAPNMVTAVIFDFR

SEQ ID NO: 70458 - protein, 46 aa, unidentified
  source 1..46: note = methanogen bacteria
ASGDPDGLEKSAEDSGLEEDFAVEEINGIPEAALPDYAFASDPENQ

SEQ ID NO: 70459 - protein, 47 aa, unidentified
  source 1..47: note = methanogen bacteria
ASGDPDGLEKSAEDSGIPEDFSIEEINGIPDAIFPDYAFASAPDNQP

SEQ ID NO: 70460 - protein, 11 aa, unidentified
  source 1..11: note = methanogen bacteria
NATAGADILSI

SEQ ID NO: 70461 - protein, 11 aa, unidentified
  source 1..11: note = methanogen bacteria
NVGLDLFGIAS

SEQ ID NO: 70462 - protein, 15 aa, unidentified
  source 1..15: note = methanogen bacteria
GFVFAAPGAVNTYAD

SEQ ID NO: 70463 - protein, 46 aa, unidentified
  source 1..46: note = methanogen bacteria
ASGDPDGLEKSAEDSGVAEDFSVEEINGIPDAIFPDYAFANDPDNQ

SEQ ID NO: 70464 - protein, 35 aa, unidentified
  source 1..35: note = methanogen bacteria
FHLSHVINPGVSYIYNNIGTQIAPNMVTAVIFDFR

SEQ ID NO: 70465 - protein, 46 aa, unidentified
  source 1..46: note = methanogen bacteria
ASGDPDGLEKSAEDSGLPEDFSVEEINGIPEAIFPDYAFANDPDNQ

SEQ ID NO: 70466 - protein, 67 aa, unidentified
  source 1..67: note = methanogen bacteria
ADSIEVPADDSLGPVYLDRADSIIVTLPAIGGMTGTAFPEPLVAAGSVPDTVKNDAVNPATGGGIRG

SEQ ID NO: 70467 - protein, 46 aa, unidentified
  source 1..46: note = methanogen bacteria
ASGDPDGLEKSAEDSGLPEDFSVEEIKGIPGAIFPDYAFASNPDNQ

SEQ ID NO: 70468 - protein, 46 aa, unidentified
  source 1..46: note = methanogen bacteria
ASGDPDGLEKSAEDAGLKEDYSVEEIKGIPESTFPDYAFANDPENQ

SEQ ID NO: 70469 - protein, 66 aa, unidentified
  source 1..66: note = methanogen bacteria
ASIEVPSGDNNPIRTDISDKILISLPQISIQTETSHPEPLVAAGSVSDEIVKNGTLKAAPGGDIDG

SEQ ID NO: 70470 - protein, 46 aa, unidentified
  source 1..46: note = methanogen bacteria
ASGDPDGLEKSAEDAGVPEDFSIEEIKGIPDAIFPDYAFASNPDNQ

SEQ ID NO: 70471 - protein, 46 aa, unidentified
  source 1..46: note = methanogen bacteria
ASGDPDGLEKSAEDAKLPEDFSVEEIKGIPDAIFPDYAFANAPDNQ

SEQ ID NO: 70472 - protein, 55 aa, unidentified
  source 1..55: note = methanogen bacteria
TNGLTNSFENSLHAGGADFSISSKETGDSVFSQINYLVVNVKELQLLEHLQTIHQ

SEQ ID NO: 70473 - protein, 75 aa, unidentified
  source 1..75: note = methanogen bacteria
AHPGHGSEYAEEVTSSDAGSSSHVSGSGGGSPSSGGSSSGSSGSHVSGSGGGSPSSGGSSSGSSGSYVSGSGGSS

SEQ ID NO: 70474 - protein, 14 aa, unidentified
  source 1..14: note = methanogen bacteria
QSAVSAVFDDDDSL

SEQ ID NO: 70475 - protein, 94 aa, unidentified
  source 1..94: note = methanogen bacteria
ILMVYRTSDANGYVKMNINLPPGTYIITAEYKGLKASNTIKVLSVLETKDLVMKYRDGSKFEAKILDGQGKPYAGQTVKFNINVKLQVMMVLLA

SEQ ID NO: 70476 - protein, 60 aa, unidentified
  source 1..60: note = methanogen bacteria
ALSVNPDMISEQTSTQDVSTADTFTQNYTDAGGLEDSGYSEVGKVYEDPNTGELVMVSGE

SEQ ID NO: 70477 - protein, 11 aa, unidentified
  source 1..11: note = methanogen bacteria
MSGEIFGYTYG

SEQ ID NO: 70478 - protein, 46 aa, unidentified
  source 1..46: note = methanogen bacteria
YNGHGEEDGYFGGSDDAGGDAIVENNPDYDYEWFTSIWEPPSGEIE

SEQ ID NO: 70479 - protein, 59 aa, unidentified
  source 1..59: note = methanogen bacteria
ALSANPEMITQSQTTQDVSTADTFTQNYSDAGGLEDSGYSEVGKVYQDPTTGELVMVSG

SEQ ID NO: 70480 - protein, 10 aa, unidentified
  source 1..10: note = methanogen bacteria
TILSKTGMPK

SEQ ID NO: 70481 - protein, 59 aa, unidentified
  source 1..59: note = methanogen bacteria
ALSVNPDMITQSQSTEDVSTADTFSQNYTSAGGLEDSGYNEVGKVYEDPTTGELVMVSG

SEQ ID NO: 70482 - protein, 45 aa, unidentified
  source 1..45: note = methanogen bacteria
FNGHGEDDGYFGGADDAAGEAINESQGGKYEPWASAIWEPPSGEI

SEQ ID NO: 70483 - protein, 59 aa, unidentified
  source 1..59: note = methanogen bacteria
ALSANPDLISDSPNTKDVSTADTFNETYSDAGGIEDSGYNEVGKVYEDPTTGKLVMVSG

SEQ ID NO: 70484 - protein, 71 aa, unidentified
  source 1..71: note = methanogen bacteria
VSVILGGSSDTSEEGDVQYVNVTKNITKYEDSGDVIQTEDGSYVASSDYVDNVTEGENVTAFNSSNSGNLY

SEQ ID NO: 70485 - protein, 15 aa, unidentified
  source 1..15: note = methanogen bacteria
LDVNNQYSDVYNRYA

SEQ ID NO: 70486 - protein, 60 aa, unidentified
  source 1..60: note = methanogen bacteria
PDRFTVHINVNDLEKLNITYVSTDQNLEKFTNNNVTFKEICHIDDYKIYKISYNSIESSP

SEQ ID NO: 70487 - protein, 46 aa, unidentified
  source 1..46: note = methanogen bacteria
ASGDPDGLEKSAEDAGVPEDFSIEEINGIPEAIFPDYAFASAPDNQ

SEQ ID NO: 70488 - protein, 59 aa, unidentified
  source 1..59: note = methanogen bacteria
ALSANPDMITQSQSTQDVSTADTFTQNYTDAGGLEDSGYSEVGKVYQDPTTGELVMVSG

SEQ ID NO: 70489 - protein, 59 aa, unidentified
  source 1..59: note = methanogen bacteria
ALSANPELISNSPNTKDVSTADTFNQTFSNASGMEDSGFNEVGKVYEDPNTGELVMVSG

SEQ ID NO: 70490 - protein, 47 aa, unidentified
  source 1..47: note = methanogen bacteria
ASGDPDGLEKSAEDSGLAEDFAIEEINGIPDAIFPDYAFADNPDSQP

SEQ ID NO: 70491 - protein, 46 aa, unidentified
  source 1..46: note = methanogen bacteria
ASGDPDGLEKSAEDSGLAEDFSIEQINGIPDAIFPDYAFASSPDNQ

SEQ ID NO: 70492 - protein, 59 aa, unidentified
  source 1..59: note = methanogen bacteria
ALSANPELISNSPNTKDVSTADTFNQTYSDAGGIEDSGFNEVGKVYEDPNTGELVMVSG

SEQ ID NO: 70493 - protein, 59 aa, unidentified
  source 1..59: note = methanogen bacteria
ALSANPDMITQSQSTQDVSTAETFSQNYTDAGGLEDSGYSEVGKVYEDPATGELVMVSG

SEQ ID NO: 70494 - protein, 59 aa, unidentified
  source 1..59: note = methanogen bacteria
ALSANPELISNSHNTKDVSTADTFNQTYSDAGGIEDGGYNEVGKVYEDPATGKLVMVSG

SEQ ID NO: 70495 - protein, 59 aa, unidentified
  source 1..59: note = methanogen bacteria
ALSANPDMITQTQSTKDVSTADTFSQNYTNAGGLEDSGYNEVGKVYEDPTTGELVMVSG

SEQ ID NO: 70496 - protein, 74 aa, unidentified
  source 1..74: note = methanogen bacteria
GYKFYKETTDRTPISTKINEIREKSNYVKIDDLPDYYTNAVISVEDRRFYKHGAVDYIGILRAIFFNIKNKTLQ

SEQ ID NO: 70497 - protein, 47 aa, unidentified
  source 1..47: note = methanogen bacteria
ASGDPDGLEKSAEDSGLAEDFSIEEIKGIPDAIFPDYAFASSPDDQG

SEQ ID NO: 70498 - protein, 59 aa, unidentified
  source 1..59: note = methanogen bacteria
ALSANPDMITKTQSTQDVSTADTFSQNYTNAGGLEDSGYSEVGKVYQDPTTGELVMVSG

SEQ ID NO: 70499 - protein, 43 aa, unidentified
  source 1..43: note = methanogen bacteria
YGTLDLSVRDVFNLFWDHLSGRTYDRIQENDEWFSDRILWEYR

SEQ ID NO: 70500 - protein, 42 aa, unidentified
  source 1..42: note = methanogen bacteria
SVFDSGESDAEAADDADAYQADSVYASSDCDDDDDDNKCIEA

SEQ ID NO: 70501 - protein, 73 aa, unidentified
  source 1..73: note = methanogen bacteria
ENSTENTVSSNASQSSSNTTSTGNASTNGKTKIWSEQSNSYIYQESSSDGNIRQYDANGKLIGSTYDEDQAKL

SEQ ID NO: 70502 - protein, 42 aa, unidentified
  source 1..42: note = methanogen bacteria
YNGHGEDDGYFGGADDAAGKAVEKTGFEPWMSSIWEPPSGEI

SEQ ID NO: 70503 - protein, 45 aa, unidentified
  source 1..45: note = methanogen bacteria
YHGHGEDDGYFGGADDAAGDAINESQGGKYEPWASSIWEPPSGEI

SEQ ID NO: 70504 - protein, 14 aa, unidentified
  source 1..14: note = methanogen bacteria
KLIEHFIGAGDALP

SEQ ID NO: 70505 - protein, 75 aa, unidentified
  source 1..75: note = methanogen bacteria
MSMGDGQLVFDGLLTSGVEGNLGSTHDNAFNPDLGYYLTNMGNFISSSNTTFVTNTPSLNQPTLLSGLVFLKSLE

SEQ ID NO: 70506 - protein, 42 aa, unidentified
  source 1..42: note = methanogen bacteria
ASGDPDGLEKSAEDSAVSEDVETTVVESPFPDYTYEPLDKLG

SEQ ID NO: 70507 - protein, 42 aa, unidentified
  source 1..42: note = methanogen bacteria
ASGDPDGLEKSAEDAAVGEDVEAPVMESPFPDYTYEPLDKLG

SEQ ID NO: 70508 - protein, 13 aa, unidentified
  source 1..13: note = methanogen bacteria
GLVFKCNKEGLTL

SEQ ID NO: 70509 - protein, 72 aa, unidentified
  source 1..72: note = methanogen bacteria
EAYSTTIYDNWCDYEIIGPGAVELKKVGGALTELSIPEKVSDGTEEYTVTRIAAEACQDNGLIHKVTVPSTV

SEQ ID NO: 70510 - protein, 41 aa, unidentified
  source 1..41: note = methanogen bacteria
ASGNPDGLEKTAEDADVGEDVESPILESPFPDYTYEPLDKI

SEQ ID NO: 70511 - protein, 75 aa, unidentified
  source 1..75: note = methanogen bacteria
ADDISDEIISDGGQDTLKIMQDDIYTTGESSFSNLTDEIENAGTTLDLTKDYTFNNETDNNTGILISKDNFVLNG

SEQ ID NO: 70512 - protein, 17 aa, unidentified
  source 1..17: note = methanogen bacteria
HVQMFAEDFILNLLGVF

SEQ ID NO: 70513 - protein, 49 aa, unidentified
  source 1..49: note = methanogen bacteria
GYGLTSSSTNTNNVVSGDALVADLRGTGDGTASLGGGEFAHNVTLKYQT

SEQ ID NO: 70514 - protein, 43 aa, unidentified
  source 1..43: note = methanogen bacteria
IASGDPDGLEKSAEDSSVAEDVESPVLEAPFPDYTYEPLDKLG

SEQ ID NO: 70515 - protein, 36 aa, unidentified
  source 1..36: note = methanogen bacteria
GRYPIAPIDVIKTILSPIIPSLAVSPSVSTIVFQIR

SEQ ID NO: 70516 - protein, 45 aa, unidentified
  source 1..45: note = methanogen bacteria
YHGLGEDDGKFGGADDQGADAIGELDHNYKPWFSSIWEPPSGEIE

SEQ ID NO: 70517 - protein, 42 aa, unidentified
  source 1..42: note = methanogen bacteria
SGLGEDQGYFGGSDDKGSDGVSETGYEPWFNSFWEPPSGEIE

SEQ ID NO: 70518 - protein, 42 aa, unidentified
  source 1..42: note = methanogen bacteria
FNGHGEKDGYFGGADDAAGEAIEATGFEPWASAIWEPPSGEI

SEQ ID NO: 70519 - protein, 96 aa, unidentified
  source 1..96: note = methanogen bacteria
MSFNGLVYDSWYDNTGLWTKNRDLTWTMNSPLFLGEISSFYVVFNTTKTGVFTNIVSVDSKETGKKSAKDNIEVIKPDFAVEKIALNRSFKQCCCS

SEQ ID NO: 70520 - protein, 36 aa, unidentified
  source 1..36: note = methanogen bacteria
VFHLSNMINPGVSNIYNALGTQIAPNLVTVVIFDFR

SEQ ID NO: 70521 - protein, 96 aa, unidentified
  source 1..96: note = methanogen bacteria
MAPQEYTSFTVVFNAAIAGNVTNVVIAGSNMTGNVTNSCDAEIVNKTEPTPGSTPEPTPKHDEPVTQYADKHATGNPIILLLLVIMGTIPIRIRKK

SEQ ID NO: 70522 - protein, 54 aa, unidentified
  source 1..54: note = methanogen bacteria
SWNMQAIVFNEDVTPEQRQDAINAMKQVTEVDQGQQLNETPDLQGSENRQDDND

SEQ ID NO: 70523 - protein, 14 aa, unidentified
  source 1..14: note = methanogen bacteria
MPKNSIGMLESDYM

SEQ ID NO: 70524 - protein, 72 aa, unidentified
  source 1..72: note = methanogen bacteria
ADIQDDNMTILSSGGNHFITSDLSNDDIQSQFDNANDGDTFEFTDPEYQDISLVVDKKLNIISKKDSVVYVS

SEQ ID NO: 70525 - protein, 42 aa, unidentified
  source 1..42: note = methanogen bacteria
FNGHGEDDGYFGGADDAAGEAIEESGFEPWFSSIWEPPSGEI

SEQ ID NO: 70526 - protein, 40 aa, unidentified
  source 1..40: note = methanogen bacteria
FINHSSKTDTTLSMISNSNLDASNEYTVQLKDVLIMNLIL

SEQ ID NO: 70527 - protein, 42 aa, unidentified
  source 1..42: note = methanogen bacteria
FNGHGEDDGYFGGADDAAGEAIEETGFKPWFSSIWEPPSGEI

SEQ ID NO: 70528 - protein, 42 aa, unidentified
  source 1..42: note = methanogen bacteria
FNGHGEDDGYFGGADDAAGEAIEETGFEPWFSSIWEPPSGEI

SEQ ID NO: 70529 - protein, 35 aa, unidentified
  source 1..35: note = methanogen bacteria
YHIADMINPGVSYIYNAVGTQIAPNMVTAVIFDFR

SEQ ID NO: 70530 - protein, 42 aa, unidentified
  source 1..42: note = methanogen bacteria
ASGDPDGLEKSAEDSKVPETLEGSTFHFESPMPDYTIGETSV

SEQ ID NO: 70531 - protein, 18 aa, unidentified
  source 1..18: note = methanogen bacteria
MTSNAFTSNGYAVLGQSI

SEQ ID NO: 70532 - protein, 42 aa, unidentified
  source 1..42: note = methanogen bacteria
FNGHGEDDGYFGGSDDAASEAIEATHFEPWFSSIWEPPSGEI

SEQ ID NO: 70533 - protein, 95 aa, unidentified
  source 1..95: note = methanogen bacteria
MLNIDLIEAGESYVFTITLKPMTNGTLTNVVNVTSNENKTVKNSTISVNVLPVVNLTVVKTVDVTVIYVNDEVTFTVNVTNNGPSNATGVKVTDF

SEQ ID NO: 70534 - protein, 34 aa, unidentified
  source 1..34: note = methanogen bacteria
HLSSMIQPGVSNIYNALGTQIAPNLVTVVIFDFR

SEQ ID NO: 70535 - protein, 42 aa, unidentified
  source 1..42: note = methanogen bacteria
ASGDPDGLEKSAEDANVSEDKATVVITPPFPDYTFEPFESIG

SEQ ID NO: 70536 - protein, 32 aa, unidentified
  source 1..32: note = methanogen bacteria
MVVEDKNPLDAFVMTSNAFTSNGYVVLGQSIA

SEQ ID NO: 70537 - protein, 66 aa, unidentified
  source 1..66: note = methanogen bacteria
MTEGVLIDRNVTINGNGFTIDAKGKSRIFEVTAGFINITDVTLKNGNADNGGALYFSNAISNSNIN

SEQ ID NO: 70538 - protein, 18 aa, unidentified
  source 1..18: note = methanogen bacteria
ITSSYNDSSIANKITIKC

SEQ ID NO: 70539 - protein, 95 aa, unidentified
  source 1..95: note = methanogen bacteria
MSYNITVLPVLTADDINMTYKDGTQFMAKLVDGKGHPLENAGITFNINGVFYTRYTNSSGIACLNINLMAGEYIITSQYENAVISNKITISAKED

SEQ ID NO: 70540 - protein, 42 aa, unidentified
  source 1..42: note = methanogen bacteria
ASGNPDGLEKSAEDANVSEEKATVAVEPPFPDYTFEPLESLG

SEQ ID NO: 70541 - protein, 42 aa, unidentified
  source 1..42: note = methanogen bacteria
FNGHGEDDGYFGGSDDAASEVIEGTGFQPWFSSIWEPPSGEI

SEQ ID NO: 70542 - protein, 42 aa, unidentified
  source 1..42: note = methanogen bacteria
AGHGEDDGYFGGSDDQGSDGVSETGYKPWFESFWEPPSGEIE

SEQ ID NO: 70543 - protein, 95 aa, unidentified
  source 1..95: note = methanogen bacteria
MINETEVAQNGSFSGMLVDAYGQGVANKTITYHKPGYQMGTLVDVTTTEDGSFTINNAQYLDNASDGNYYGDFTFAGDGKYKECRYEGNVTVVAK

SEQ ID NO: 70544 - protein, 34 aa, unidentified
  source 1..34: note = methanogen bacteria
HLSSMIQPGVSYIYNALGTQIAPNMVTVVIFDFR

SEQ ID NO: 70545 - protein, 42 aa, unidentified
  source 1..42: note = methanogen bacteria
FNGHGEDDGYFGGSDDAASEAIESTNFKPWFSSIWEPPSGEI

SEQ ID NO: 70546 - protein, 95 aa, unidentified
  source 1..95: note = methanogen bacteria
MSYNITVLPVLTADEIDMAYKDGTQFRAKLVDGKGNSLENAGITFNINGVFYTRYTNSSGIASLNINLMPGEYIITSQYGSAVISNKITISLKKD

SEQ ID NO: 70547 - protein, 33 aa, unidentified
  source 1..33: note = methanogen bacteria
YQFSYMIFPGINYIYQGVGVSIAPNLVTNIVFD

SEQ ID NO: 70548 - protein, 95 aa, unidentified
  source 1..95: note = methanogen bacteria
MINETEVAQNGSFSGMLVDAYGQGVANKTITYHKPGNQMGTLVDVKTNDGGSFTIEKAQYLANASGENYYGNFTFAGDGKYAGCSYEGNVTVVAN

SEQ ID NO: 70549 - protein, 42 aa, unidentified
  source 1..42: note = methanogen bacteria
YNGHGEDDGYFGGADDAAGEAIEESGFEPWFSSIWEPPSGEI

SEQ ID NO: 70550 - protein, 34 aa, unidentified
  source 1..34: note = methanogen bacteria
FHLSKVISPGVSNIYNVLGTKIAPNLVTVVIFDF

SEQ ID NO: 70551 - protein, 42 aa, unidentified
  source 1..42: note = methanogen bacteria
FSGHGEDDGYFGGSDDAASEAIEATNFKPWFASIWEPPSGEI

SEQ ID NO: 70552 - protein, 42 aa, unidentified
  source 1..42: note = methanogen bacteria
FNGHGEDDGYFGGADDAAGEAIEESGFKPWASSIWEPPSGEI

SEQ ID NO: 70553 - protein, 35 aa, unidentified
  source 1..35: note = methanogen bacteria
FDISALINPGVSNIYNALGTQIAPNMVTVVIFDFR

SEQ ID NO: 70554 - protein, 42 aa, unidentified
  source 1..42: note = methanogen bacteria
ASGDPDGLEKSAEDASVPENKTTEVVASPFPDYTYEPLEVIG

SEQ ID NO: 70555 - protein, 12 aa, unidentified
  source 1..12: note = methanogen bacteria
SNGSISVIGQNQ

SEQ ID NO: 70556 - protein, 42 aa, unidentified
  source 1..42: note = methanogen bacteria
ASGDPDGLEKSAEDANVAEDVATEVFASPFPDYTYEPLASIG

SEQ ID NO: 70557 - protein, 42 aa, unidentified
  source 1..42: note = methanogen bacteria
ASGDPDGLEASAEHINPESLEAEQVINPIMPDYTIEGFDENP

SEQ ID NO: 70558 - protein, 66 aa, unidentified
  source 1..66: note = methanogen bacteria
MTEDVLIDRNVTINGNGFTIDANGKSRIFGVTAGFINVTDVTLKNGNADNGGALYFSNAISNSNIN

SEQ ID NO: 70559 - protein, 19 aa, unidentified
  source 1..19: note = methanogen bacteria
IITLSYNDSSIANKITIKC

SEQ ID NO: 70560 - protein, 35 aa, unidentified
  source 1..35: note = methanogen bacteria
YHISDMIYPGVSLIYNTLGTKIAPNMVTVVIFDFR

SEQ ID NO: 70561 - protein, 42 aa, unidentified
  source 1..42: note = methanogen bacteria
ASENPDGLEKSAEDANVSEEKAIVVIVPPFPDYTFEPLESIG

SEQ ID NO: 70562 - protein, 19 aa, unidentified
  source 1..19: note = methanogen bacteria
RIDNKLRLAIVHYADNPQF

SEQ ID NO: 70563 - protein, 31 aa, unidentified
  source 1..31: note = methanogen bacteria
SVGAFSRTQQLIWYLSNYDSSPYSFDYLEKD

SEQ ID NO: 70564 - protein, 11 aa, unidentified
  source 1..11: note = methanogen bacteria
FLKSVGPAHTP

SEQ ID NO: 70565 - protein, 34 aa, unidentified
  source 1..34: note = methanogen bacteria
YNIKAVIQPGISQVYNFLGTQIEPNMVTLIVFDW

SEQ ID NO: 70566 - protein, 34 aa, unidentified
  source 1..34: note = methanogen bacteria
FDIKQIIDPGISKVYSALGPQIEPNMVTLVVFDW

SEQ ID NO: 70567 - protein, 15 aa, unidentified
  source 1..15: note = methanogen bacteria
AGGAIGHNFASVTGF

SEQ ID NO: 70568 - protein, 11 aa, unidentified
  source 1..11: note = methanogen bacteria
SHIVVDLNTDV

SEQ ID NO: 70569 - protein, 73 aa, unidentified
  source 1..73: note = methanogen bacteria
AAENITNDAIGDDSKEILETVQKDITTDDSTDILKTTQNDIYTASDDSFTNLTDEIARNDVVELTHNYTFNSE

SEQ ID NO: 70570 - protein, 16 aa, unidentified
  source 1..16: note = methanogen bacteria
LMLYKLNLSPNVETFR

SEQ ID NO: 70571 - protein, 13 aa, unidentified
  source 1..13: note = methanogen bacteria
QSKGVQLQQLYLQ

SEQ ID NO: 70572 - protein, 14 aa, unidentified
  source 1..14: note = methanogen bacteria
TVQFRLLSNGIMMN

SEQ ID NO: 70573 - protein, 34 aa, unidentified
  source 1..34: note = methanogen bacteria
FHLSKMITPGVSNIYNALGTQIAPNMVTVVIFDF

SEQ ID NO: 70574 - protein, 17 aa, unidentified
  source 1..17: note = methanogen bacteria
LTWSNVGESILGLSIRY

SEQ ID NO: 70575 - protein, 41 aa, unidentified
  source 1..41: note = methanogen bacteria
SGLGEDEGYFGGADGAGADAITETGYEPWFESFWEPPSGEI

SEQ ID NO: 70576 - protein, 72 aa, unidentified
  source 1..72: note = methanogen bacteria
AEGNFTALQNEINSSGDSIDIKNDYVYDNATDYSYNEGISVKAILPLTVTSTQLTEPIKPEFLKSMEKTLRF

SEQ ID NO: 70577 - protein, 18 aa, unidentified
  source 1..18: note = methanogen bacteria
MTAIFGPQPDGTLAGDGV

SEQ ID NO: 70578 - protein, 65 aa, unidentified
  source 1..65: note = methanogen bacteria
FGFGFIDQNTMEQSQYEDNQNQASSVNNSHLSNIDNVSVDSDNSSYNISGVDENGTPVRINIVHG

SEQ ID NO: 70579 - protein, 19 aa, unidentified
  source 1..19: note = methanogen bacteria
NDPTWISGVDIDSVSLTPS

SEQ ID NO: 70580 - protein, 10 aa, unidentified
  source 1..10: note = methanogen bacteria
LPGIFRSLKL

SEQ ID NO: 70581 - protein, 11 aa, unidentified
  source 1..11: note = methanogen bacteria
NVFSSFIGGLI

SEQ ID NO: 70582 - protein, 12 aa, unidentified
  source 1..12: note = methanogen bacteria
PDIAADLNFSAE

SEQ ID NO: 70583 - protein, 72 aa, unidentified
  source 1..72: note = methanogen bacteria
QHLNVVVSGSMEPAFYRGDIVMVQKASFLGIQEFNVNDIQKGDVVVYDAKWYNQPVIHRSFPLVKGFMIIIR

SEQ ID NO: 70584 - protein, 64 aa, unidentified
  source 1..64: note = methanogen bacteria
GFGFIDQNTMEQSQYTDNQNQASSVNNTHMNNINNVSVDSDNSSYNISGVDENGTPVRINIVHG

SEQ ID NO: 70585 - protein, 40 aa, unidentified
  source 1..40: note = methanogen bacteria
VFDSGESDAETAADADAYPADSVYASDCDDDDDDNKCIEA

SEQ ID NO: 70586 - protein, 10 aa, unidentified
  source 1..10: note = methanogen bacteria
EKILSNTDLK

SEQ ID NO: 70587 - protein, 93 aa, unidentified
  source 1..93: note = methanogen bacteria
VVVLDDVPDVQYSDRIVVTGRLIKVTGEGIVNATVYLSINGVNYHVKTDVNGYYSYLYTANKVGLNNITARFNGNSVYNYDDISNSFIVVKQD

SEQ ID NO: 70588 - protein, 35 aa, unidentified
  source 1..35: note = methanogen bacteria
FHISDMIYPGVSFIYNTLGTQIAPNMVTVVIFDFR

SEQ ID NO: 70589 - protein, 72 aa, unidentified
  source 1..72: note = methanogen bacteria
AIHIFMSQNPLVKEGEKTVNDMLNRSVRVVTPVDSVIATSPTMTTVIYMIAPDKLKAVNFEWTQDELKYVPK

SEQ ID NO: 70590 - protein, 87 aa, unidentified
  source 1..87: note = methanogen bacteria
AIHLIGPNHNPSGDYSTFNVLKVNSTINMDDETEYVYDNVTINYTVDNLTDILVTVVDLESGDIYNFTTTNSSINLDLDAGSYQITL

SEQ ID NO: 70591 - protein, 66 aa, unidentified
  source 1..66: note = methanogen bacteria
AEEDLENLTTKNTPEPIIITENNFQEYFDDKNSLNSSFENKTVVLEGEFDDLGVVNIDAYISLLMM

SEQ ID NO: 70592 - protein, 35 aa, unidentified
  source 1..35: note = methanogen bacteria
YHISDMINPGVSHIYNLLGTQIAPNMVTVVIFDFR

SEQ ID NO: 70593 - protein, 23 aa, unidentified
  source 1..23: note = methanogen bacteria
SGLGSTPVASIPYALNLILNIDL

SEQ ID NO: 70594 - protein, 29 aa, unidentified
  source 1..29: note = methanogen bacteria
YRSYFSNTASGLNATEDINSIRNNMTSLY

SEQ ID NO: 70595 - protein, 35 aa, unidentified
  source 1..35: note = methanogen bacteria
FHLSSMINPGVSYIYNALGTQIAPNLVTVVIFDFR

SEQ ID NO: 70596 - protein, 34 aa, unidentified
  source 1..34: note = methanogen bacteria
DDAQAETQQADADSGDSIFLAESDDSDSQTDDVY

SEQ ID NO: 70597 - protein, 33 aa, unidentified
  source 1..33: note = methanogen bacteria
HISNMINPGVSNIYNALGTQIAPNMVTVVIFDF

SEQ ID NO: 70598 - protein, 35 aa, unidentified
  source 1..35: note = methanogen bacteria
FHLSSSIVLGVSNIYNTMGTQIAPNMVTVVIFDFR

SEQ ID NO: 70599 - protein, 64 aa, unidentified
  source 1..64: note = methanogen bacteria
ASGNATQKIASVETDSSSDVILSKSIGDEILTDTDNGTFRELQDKIDAADEGGTVYLENDYVNI

SEQ ID NO: 70600 - protein, 34 aa, unidentified
  source 1..34: note = methanogen bacteria
FVGLSKSINEGINLIYIWVGTEIAPNLVTNVVFD

SEQ ID NO: 70601 - protein, 79 aa, unidentified
  source 1..79: note = methanogen bacteria
IGVTIGLPSGTYDANVTVDNTTVNAVVTVLSTVKGSDVAKMYKNDTQYYATFLDTEGKFLADRTTVISTSMECSTSAKY

SEQ ID NO: 70602 - protein, 13 aa, unidentified
  source 1..13: note = methanogen bacteria
FGEGDSFEMLFAN

SEQ ID NO: 70603 - protein, 91 aa, unidentified
  source 1..91: note = methanogen bacteria
MDRNLKHLAIACIKAYTLKDDEVMSGNKNIATEYAGGSYFSVKVTTADGHVVVGDSVKFKIDDKSSTVKTDSNGIAKIKISQIPKKYIITT

SEQ ID NO: 70604 - protein, 15 aa, unidentified
  source 1..15: note = methanogen bacteria
PVMGNVQLQQYFFQV

SEQ ID NO: 70605 - protein, 11 aa, unidentified
  source 1..11: note = methanogen bacteria
ISSSQAEFTHP

SEQ ID NO: 70606 - protein, 11 aa, unidentified
  source 1..11: note = methanogen bacteria
LGQFPVYNDVP

SEQ ID NO: 70607 - protein, 11 aa, unidentified
  source 1..11: note = methanogen bacteria
DIGQFATYPDL

SEQ ID NO: 70608 - protein, 38 aa, unidentified
  source 1..38: note = methanogen bacteria
MQGDWVGYADVEMDQDMISISVSDDEISVDLVKEGEIL

SEQ ID NO: 70609 - protein, 10 aa, unidentified
  source 1..10: note = methanogen bacteria
SYLFDQSVKA

SEQ ID NO: 70610 - protein, 65 aa, unidentified
  source 1..65: note = methanogen bacteria
TPFGIQLQDMQVEIDEDLLKQIADATGGRYFRATDNTKLAEIYAEINKMEKARTTVDSFPVYKEL

SEQ ID NO: 70611 - protein, 75 aa, unidentified
  source 1..75: note = methanogen bacteria
AETDYYTVDVVNPTGDIDLGNISVKVIDNETSLDKITYHIDPSYNEMELINDLKVPLNNSCEYYTVSWNVHSYFE

SEQ ID NO: 70612 - protein, 30 aa, unidentified
  source 1..30: note = methanogen bacteria
MVATFGTLAGMEEDDEEGITNLVHDTFTPL

SEQ ID NO: 70613 - protein, 90 aa, unidentified
  source 1..90: note = methanogen bacteria
MKTEPYAVTLTNIIDRNYNPSGDYASFNVLKVNSSIILDNKTEYVYGNVAISYDVDNLTNVTVTVVDLESGEVDNFTITNSTISLIHLLK

SEQ ID NO: 70614 - protein, 90 aa, unidentified
  source 1..90: note = methanogen bacteria
MSYNITVLPVLFANDLEMRFQDGSTFNALVLNGQGTPLANAAVTFNINGVFYTRYTNSSGIAILNINLMAGKYIITSEFDGMKIPLKNII

SEQ ID NO: 70615 - protein, 15 aa, unidentified
  source 1..15: note = methanogen bacteria
LPQPATASIQSILAL

SEQ ID NO: 70616 - protein, 90 aa, unidentified
  source 1..90: note = methanogen bacteria
MGGAIGAGRTQLSGYVDIDNCIFESNKANGATFINCNGGAIYCLGYVVIKNCTLKNNYAYDYGGAVYAEYILVNYNTSSKSIDILYWQCG

SEQ ID NO: 70617 - protein, 90 aa, unidentified
  source 1..90: note = methanogen bacteria
MYLTASKVTVKKTARKFVLQAKLKINGKLVKGKKITFKFKGKTYRAKTNSKGIAKVIIKKNVVKKLKKGKTYAVKVSYLKDSVKSSVKVK

SEQ ID NO: 70618 - protein, 32 aa, unidentified
  source 1..32: note = methanogen bacteria
YKVYVMDLGGEIKSKEVNEFNAKLEEISEIFT

SEQ ID NO: 70619 - protein, 90 aa, unidentified
  source 1..90: note = methanogen bacteria
VNATMAGNLTNVIFANSAENKTIVNKTSNNITVIPNVILSLTEVTNVTEAVVGDSIKYTITIHNSGLSDATDIKVWDILPANVKYDLDHK

SEQ ID NO: 70620 - protein, 68 aa, unidentified
  source 1..68: note = methanogen bacteria
SSYNTTLKEESEIDHNTYYVSNNVSEVNNSSQSTVDAKTIISKINYEGYGLTGNLPINLINNISYTLN

SEQ ID NO: 70621 - protein, 12 aa, unidentified
  source 1..12: note = methanogen bacteria
MDINWTVRINNP

SEQ ID NO: 70622 - protein, 22 aa, unidentified
  source 1..22: note = methanogen bacteria
INDPTTQGINDSARAMKYVFPN

SEQ ID NO: 70623 - protein, 11 aa, unidentified
  source 1..11: note = methanogen bacteria
LMSNYLNLTIE

SEQ ID NO: 70624 - protein, 12 aa, unidentified
  source 1..12: note = methanogen bacteria
ALISKYLGADEM

SEQ ID NO: 70625 - protein, 89 aa, unidentified
  source 1..89: note = methanogen bacteria
MSVTNKSYAASAKTKALTATFKTAKGNPIAGKKVTFSLDGKKYTATTNANGVATVNVSLNKKGTYNFTVKYGGDSTYAAINKTAKLTIK

SEQ ID NO: 70626 - protein, 12 aa, unidentified
  source 1..12: note = methanogen bacteria
DVTSTLQTMDYR

SEQ ID NO: 70627 - protein, 68 aa, unidentified
  source 1..68: note = methanogen bacteria
MDKNFANARKLTVGDEISFERNCIEITKVIRRLDYSLEYVYNSPVATTVPNHKTVSFAYMSHNTLPSD

SEQ ID NO: 70628 - protein, 12 aa, unidentified
  source 1..12: note = methanogen bacteria
KFDGTPETYSNF

SEQ ID NO: 70629 - protein, 17 aa, unidentified
  source 1..17: note = methanogen bacteria
ASPLINEASGLLFGNPG

SEQ ID NO: 70630 - protein, 61 aa, unidentified
  source 1..61: note = methanogen bacteria
TFSFGEHDKNATAENNNTTHFENVTVQMTSNLNNKNNSVEYDYVADTVDYNANYSMNVGYD

SEQ ID NO: 70631 - protein, 67 aa, unidentified
  source 1..67: note = methanogen bacteria
ASDNQTSADNLQINDINANVIDEEINQHTNDMNVIKENTSEKESIISDNLLSSSNTNDKLSAPKEGT

SEQ ID NO: 70632 - protein, 66 aa, unidentified
  source 1..66: note = methanogen bacteria
SWNMQAMIDPTQNVQEQMQQQKMTEVDQGQQLNETPDTSNSSGQGYTEMGKVYKDPATGKMIMVEG

SEQ ID NO: 70633 - protein, 14 aa, unidentified
  source 1..14: note = methanogen bacteria
CPNNVLMLADDVMS

SEQ ID NO: 70634 - protein, 14 aa, unidentified
  source 1..14: note = methanogen bacteria
MTADVVIDIAREVV

SEQ ID NO: 70635 - protein, 21 aa, unidentified
  source 1..21: note = methanogen bacteria
MLNSMSSLFVDLVKSIPQYIK

SEQ ID NO: 70636 - protein, 23 aa, unidentified
  source 1..23: note = methanogen bacteria
IPFIEIPINWITMLVAGFGGIIG

SEQ ID NO: 70637 - protein, 11 aa, unidentified
  source 1..11: note = methanogen bacteria
VSNVNSSNDIA

SEQ ID NO: 70638 - protein, 22 aa, unidentified
  source 1..22: note = methanogen bacteria
GGRALMGTLGGLNGFTVYGIST

SEQ ID NO: 70639 - protein, 10 aa, unidentified
  source 1..10: note = methanogen bacteria
GMPLDAETNN

SEQ ID NO: 70640 - protein, 29 aa, unidentified
  source 1..29: note = methanogen bacteria
YRSYFSNNASGLNATEDISSIRKNVTSIY

SEQ ID NO: 70641 - protein, 10 aa, unidentified
  source 1..10: note = methanogen bacteria
GMPLDAEVNN

SEQ ID NO: 70642 - protein, 11 aa, unidentified
  source 1..11: note = methanogen bacteria
FGMPLDAEVDN

SEQ ID NO: 70643 - protein, 18 aa, unidentified
  source 1..18: note = methanogen bacteria
MYDGMNDLKEWEFIMTPN

SEQ ID NO: 70644 - protein, 10 aa, unidentified
  source 1..10: note = methanogen bacteria
GLSSISSTVT

SEQ ID NO: 70645 - protein, 46 aa, unidentified
  source 1..46: note = methanogen bacteria
ALDNDTIVQSDDSNNFNQGYNKSMLLISDNGGTNILDSAGRIVQFS

SEQ ID NO: 70646 - protein, 87 aa, unidentified
  source 1..87: note = methanogen bacteria
MTKLNVTKIWNDANNQDGIRPSSITVVLSNDTSKVAEYVLNDSNNWKHTFTDLPVYNNGQQINYTIEEVTIVDNYKSEVTKNTAYNW

SEQ ID NO: 70647 - protein, 19 aa, unidentified
  source 1..19: note = methanogen bacteria
MVSNAFTSNGYAVLGNTDV

SEQ ID NO: 70648 - protein, 41 aa, unidentified
  source 1..41: note = methanogen bacteria
SNDSKESSNAGQSAQSSKQSSSEPDYNSDEYVKKWDQSQQG

SEQ ID NO: 70649 - protein, 17 aa, unidentified
  source 1..17: note = methanogen bacteria
GEDGHQYKRMYNPDTGE

SEQ ID NO: 70650 - protein, 39 aa, unidentified
  source 1..39: note = methanogen bacteria
DCKGSDCEKCVIACPNNVLIKEGDDTVVRNPLTCKHCKV

SEQ ID NO: 70651 - protein, 10 aa, unidentified
  source 1..10: note = methanogen bacteria
ICPNDCITVN

SEQ ID NO: 70652 - protein, 21 aa, unidentified
  source 1..21: note = methanogen bacteria
INNYANNGASVYSLLSIIDIN

SEQ ID NO: 70653 - protein, 10 aa, unidentified
  source 1..10: note = methanogen bacteria
TLGDLYPRSF

SEQ ID NO: 70654 - protein, 13 aa, unidentified
  source 1..13: note = methanogen bacteria
SDIKAVIDTATDG

SEQ ID NO: 70655 - protein, 28 aa, unidentified
  source 1..28: note = methanogen bacteria
YTNVYPLSMKKSLYIINGTLDAQNFNFT

SEQ ID NO: 70656 - protein, 30 aa, unidentified
  source 1..30: note = methanogen bacteria
YRSYFASSASGLNATKDINSIRDNMTSLQI

SEQ ID NO: 70657 - protein, 58 aa, unidentified
  source 1..58: note = methanogen bacteria
SDATSRTIINRDLALALDGELDVSCDLGFVFASRDSFDCQFDSSYVEAHEFFKNNLSV

SEQ ID NO: 70658 - protein, 49 aa, unidentified
  source 1..49: note = methanogen bacteria
SEDNKLTLGMLNQRFNKDFRNGHLLVYIDGKLVFNGTTTDNLLQIIFDL

SEQ ID NO: 70659 - protein, 26 aa, unidentified
  source 1..26: note = methanogen bacteria
AGNHEITVEFSDNDGNTNTYTENITI

SEQ ID NO: 70660 - protein, 30 aa, unidentified
  source 1..30: note = methanogen bacteria
YRSYFASSTSGLNATKDINSIRDNMTSLQI

SEQ ID NO: 70661 - protein, 14 aa, unidentified
  source 1..14: note = methanogen bacteria
ESVLRDYLSIIHGN

SEQ ID NO: 70662 - protein, 19 aa, unidentified
  source 1..19: note = methanogen bacteria
LGGALGMAAMSSSASGFLL

SEQ ID NO: 70663 - protein, 13 aa, unidentified
  source 1..13: note = methanogen bacteria
AVIAAVFGTADDL

SEQ ID NO: 70664 - protein, 10 aa, unidentified
  source 1..10: note = methanogen bacteria
LDVSKPTLAN

SEQ ID NO: 70665 - protein, 26 aa, unidentified
  source 1..26: note = methanogen bacteria
GQPQLAVIYGAAPSLAVNEMANALVG

SEQ ID NO: 70666 - protein, 73 aa, unidentified
  source 1..73: note = methanogen bacteria
VCSVRDLNRSFKDGFKFEAKLMDGQVKAFANQIITFNINGVFYDRTTDNEDIARLNINLMAGKYNYYFNVFQR

SEQ ID NO: 70667 - protein, 58 aa, unidentified
  source 1..58: note = methanogen bacteria
ANDNVTSDDSPVDIENEEILIQNAVYFNSSVENDGIGTQENPYKYLSWHCLIFYGLLF

SEQ ID NO: 70668 - protein, 85 aa, unidentified
  source 1..85: note = methanogen bacteria
TKTVKIWWKKFTLTASLKNGKKALKGKKISFKFKGKTYSAKTNSKGLAKVTIKRKVIRQLKRGKSYKVSIVYLRNTITRIVKVKR

SEQ ID NO: 70669 - protein, 60 aa, unidentified
  source 1..60: note = methanogen bacteria
YLNSNSPNDTNIPPEDTITVNDSITDIANPDENGTVWLEENGTLTEAKVTESTGNGSASS

SEQ ID NO: 70670 - protein, 35 aa, unidentified
  source 1..35: note = methanogen bacteria
VQYFGGHNPSLIGSMLPASLNGTLRCIPCSADLFH

SEQ ID NO: 70671 - protein, 14 aa, unidentified
  source 1..14: note = methanogen bacteria
NVMSVVSTMFAGLI

SEQ ID NO: 70672 - protein, 35 aa, unidentified
  source 1..35: note = methanogen bacteria
GESVGLEVNSDNFYNETNLADGWIYSMNINDLFLY

SEQ ID NO: 70673 - protein, 13 aa, unidentified
  source 1..13: note = methanogen bacteria
MVAMFQTLLSSLL

SEQ ID NO: 70674 - protein, 15 aa, unidentified
  source 1..15: note = methanogen bacteria
LPQPETATIAGILAL

SEQ ID NO: 70675 - protein, 84 aa, unidentified
  source 1..84: note = methanogen bacteria
MIKTIYYDSNGSQITSTVRKLSDFKGDEKYSFASTLGSYFTDNYVDIDHISVQIIKDNEVLNEFNSTMNKNKLTSIPNSNNSSK

SEQ ID NO: 70676 - protein, 29 aa, unidentified
  source 1..29: note = methanogen bacteria
YRSYFSNNASGLNATQDISSIRSNVTSIY

SEQ ID NO: 70677 - protein, 84 aa, unidentified
  source 1..84: note = methanogen bacteria
MIVKVTVPEDAKGNVTVKIGNTTKVVDVTGGENTIAIPGVGEGTHDVEVVYSGDDKYDSKTITKTITVFKSINNDEQMSRGWEH

SEQ ID NO: 70678 - protein, 28 aa, unidentified
  source 1..28: note = methanogen bacteria
KLSATYPTFIDALFGLKNPGMLLNALLH

SEQ ID NO: 70679 - protein, 84 aa, unidentified
  source 1..84: note = methanogen bacteria
PTLYASDLEMSYKDGSTFNATVLDGQGNPLKDAIVKFNINGIFYNHKTDSNGIAMLNITLMSSKYIITSEYDGLKVSNTITIKD

SEQ ID NO: 70680 - protein, 13 aa, unidentified
  source 1..13: note = methanogen bacteria
LISMFQTLLASLL

SEQ ID NO: 70681 - protein, 10 aa, unidentified
  source 1..10: note = methanogen bacteria
AFPTPSFGQA

SEQ ID NO: 70682 - protein, 10 aa, unidentified
  source 1..10: note = methanogen bacteria
QSFHSMIADY

SEQ ID NO: 70683 - protein, 15 aa, unidentified
  source 1..15: note = methanogen bacteria
LPQPATASLASLWAL

SEQ ID NO: 70684 - protein, 10 aa, unidentified
  source 1..10: note = methanogen bacteria
ADIAHAVTPI

SEQ ID NO: 70685 - protein, 28 aa, unidentified
  source 1..28: note = methanogen bacteria
IACPNNVLAKDGDDTVVGNAFACKHCRV

SEQ ID NO: 70686 - protein, 10 aa, unidentified
  source 1..10: note = methanogen bacteria
ICPNDCITVN

SEQ ID NO: 70687 - protein, 10 aa, unidentified
  source 1..10: note = methanogen bacteria
SGNYPFYTDL

SEQ ID NO: 70688 - protein, 13 aa, unidentified
  source 1..13: note = methanogen bacteria
LASLMTSLISGLI

SEQ ID NO: 70689 - protein, 10 aa, unidentified
  source 1..10: note = methanogen bacteria
SGNYPFYTDL

SEQ ID NO: 70690 - protein, 13 aa, unidentified
  source 1..13: note = methanogen bacteria
AIALVQTLLAGIL

SEQ ID NO: 70691 - protein, 34 aa, unidentified
  source 1..34: note = methanogen bacteria
HMYNTYMKDLSGEISSKEVREFNGELNALEKYFK

SEQ ID NO: 70692 - protein, 52 aa, unidentified
  source 1..52: note = methanogen bacteria
MHSQNGTSEFAGFKTIVLDKYVPIKTGDNFKVVFKNNAVPYQAFSRQHYVPG

SEQ ID NO: 70693 - protein, 18 aa, unidentified
  source 1..18: note = methanogen bacteria
QSWNDISLKNKTVCLKVY

SEQ ID NO: 70694 - protein, 23 aa, unidentified
  source 1..23: note = methanogen bacteria
QLQTSLNLSAEILSLCHNLLELD

SEQ ID NO: 70695 - protein, 10 aa, unidentified
  source 1..10: note = methanogen bacteria
SGNYPFYTDL

SEQ ID NO: 70696 - protein, 62 aa, unidentified
  source 1..62: note = methanogen bacteria
AEGNFTALQDEINLSTGSIDINQDYVYDNGTDYELKKGIVLNKNDFTINGNKQPGFNQCQWN

SEQ ID NO: 70697 - protein, 10 aa, unidentified
  source 1..10: note = methanogen bacteria
SGNFPFYSDL

SEQ ID NO: 70698 - protein, 49 aa, unidentified
  source 1..49: note = methanogen bacteria
NLSDGLNERMISEEEFSSLETIAIESSDYLLNNPGNPENWEDDRTCNKE

SEQ ID NO: 70699 - protein, 10 aa, unidentified
  source 1..10: note = methanogen bacteria
GNFPYYDDVT

SEQ ID NO: 70700 - protein, 23 aa, unidentified
  source 1..23: note = methanogen bacteria
YATPLGGIGFYVANMITFGAYDY

SEQ ID NO: 70701 - protein, 30 aa, unidentified
  source 1..30: note = methanogen bacteria
FRSLGELTITSSTSPIYMPVQFLEVIWGQG

SEQ ID NO: 70702 - protein, 10 aa, unidentified
  source 1..10: note = methanogen bacteria
GNFPFYTDLP

SEQ ID NO: 70703 - protein, 10 aa, unidentified
  source 1..10: note = methanogen bacteria
SGNYPFYTDL

SEQ ID NO: 70704 - protein, 14 aa, unidentified
  source 1..14: note = methanogen bacteria
KLIEQFIGTGDALP

SEQ ID NO: 70705 - protein, 10 aa, unidentified
  source 1..10: note = methanogen bacteria
SGNYPFYTDL

SEQ ID NO: 70706 - protein, 10 aa, unidentified
  source 1..10: note = methanogen bacteria
SGNYPFYTDL

SEQ ID NO: 70707 - protein, 53 aa, unidentified
  source 1..53: note = methanogen bacteria
AKTDTKITVTSNSTLYDGDYFSISLNDANGTPITNQTVKMGIIDAKVVKILKK

SEQ ID NO: 70708 - protein, 30 aa, unidentified
  source 1..30: note = methanogen bacteria
IYRSYFSNNTSGLNATQDISSIRENVSSIY

SEQ ID NO: 70709 - protein, 10 aa, unidentified
  source 1..10: note = methanogen bacteria
SESLGITENT

SEQ ID NO: 70710 - protein, 12 aa, unidentified
  source 1..12: note = methanogen bacteria
VSAMSTIMAGLI

SEQ ID NO: 70711 - protein, 10 aa, unidentified
  source 1..10: note = methanogen bacteria
SGNFPFYTGP

SEQ ID NO: 70712 - protein, 14 aa, unidentified
  source 1..14: note = methanogen bacteria
KLIEKFIGTGDALP

SEQ ID NO: 70713 - protein, 10 aa, unidentified
  source 1..10: note = methanogen bacteria
SGNYPFYTDL

SEQ ID NO: 70714 - protein, 25 aa, unidentified
  source 1..25: note = methanogen bacteria
ISKYFSIYNDEMSSNVDQMLNFLYY

SEQ ID NO: 70715 - protein, 13 aa, unidentified
  source 1..13: note = methanogen bacteria
IVEVMGKGNALPS

SEQ ID NO: 70716 - protein, 22 aa, unidentified
  source 1..22: note = methanogen bacteria
LPGINVPINLLTLIISGFGGVV

SEQ ID NO: 70717 - protein, 16 aa, unidentified
  source 1..16: note = methanogen bacteria
QTLIQDFVGESGSAVS

SEQ ID NO: 70718 - protein, 32 aa, unidentified
  source 1..32: note = methanogen bacteria
YKVYVMDLGGEIQSKEVNEFNAKLEEISEIFM

SEQ ID NO: 70719 - protein, 13 aa, unidentified
  source 1..13: note = methanogen bacteria
IEQFVGKGNALTS

SEQ ID NO: 70720 - protein, 15 aa, unidentified
  source 1..15: note = methanogen bacteria
KLIETYVGTGSALSS

SEQ ID NO: 70721 - protein, 11 aa, unidentified
  source 1..11: note = methanogen bacteria
DADYSDNYCNM

SEQ ID NO: 70722 - protein, 14 aa, unidentified
  source 1..14: note = methanogen bacteria
KLIEQFIGSGDALP

SEQ ID NO: 70723 - protein, 63 aa, unidentified
  source 1..63: note = methanogen bacteria
VSLSFDDGSGGGQDHFENVTEEMTKNVNNSSVVFDIETDGIDYNENGSSQLNSQYLKSNEEET

SEQ ID NO: 70724 - protein, 12 aa, unidentified
  source 1..12: note = methanogen bacteria
NDNGYFIDYSSM

SEQ ID NO: 70725 - protein, 46 aa, unidentified
  source 1..46: note = methanogen bacteria
GESVGLEVNVNDYYDETNLADGWIYSNYINDLFVYQVDVLGATTDM

SEQ ID NO: 70726 - protein, 23 aa, unidentified
  source 1..23: note = methanogen bacteria
LGIGTTGQVLKVSSSGIPAWEND

SEQ ID NO: 70727 - protein, 16 aa, unidentified
  source 1..16: note = methanogen bacteria
QKLIEEVVGKGSALSS

SEQ ID NO: 70728 - protein, 20 aa, unidentified
  source 1..20: note = methanogen bacteria
IPGISIPITLLTILVSGFGG

SEQ ID NO: 70729 - protein, 13 aa, unidentified
  source 1..13: note = methanogen bacteria
ALIEHFIGAGDAL

SEQ ID NO: 70730 - protein, 10 aa, unidentified
  source 1..10: note = methanogen bacteria
LGVIPALIAA

SEQ ID NO: 70731 - protein, 58 aa, unidentified
  source 1..58: note = methanogen bacteria
AADDNANGIISVDDNDELILDEAIDDDVSSANNNYDEELILETPADDLVKQQLQVLRR

SEQ ID NO: 70732 - protein, 13 aa, unidentified
  source 1..13: note = methanogen bacteria
IQQFVGTGSALTS

SEQ ID NO: 70733 - protein, 46 aa, unidentified
  source 1..46: note = methanogen bacteria
VFTYPFDIEHWGVILQNTESGNGLFGLTGYFYTPAWGYILGFEDLI

SEQ ID NO: 70734 - protein, 16 aa, unidentified
  source 1..16: note = methanogen bacteria
QALIAEIVGQGEALSS

SEQ ID NO: 70735 - protein, 25 aa, unidentified
  source 1..25: note = methanogen bacteria
SQINVEAFFCNWCFNTDNHFDFFTW

SEQ ID NO: 70736 - protein, 10 aa, unidentified
  source 1..10: note = methanogen bacteria
NFPFYTDLPL

SEQ ID NO: 70737 - protein, 71 aa, unidentified
  source 1..71: note = methanogen bacteria
AGSNMTSNATSKAYSNNTTVVSTPSLTVREISNTPNVVVGDPVSFTVIVTNDGDCVLGDVMFMFQTFSLKD

SEQ ID NO: 70738 - protein, 16 aa, unidentified
  source 1..16: note = methanogen bacteria
QALISQFFEAGSALTG

SEQ ID NO: 70739 - protein, 15 aa, unidentified
  source 1..15: note = methanogen bacteria
ELINTFLDKGSALTG

SEQ ID NO: 70740 - protein, 16 aa, unidentified
  source 1..16: note = methanogen bacteria
QALISQFFEAGSALTG

SEQ ID NO: 70741 - protein, 80 aa, unidentified
  source 1..80: note = methanogen bacteria
AKVIYSGDKKYDSNSTWTEIVVEGDENHNGSDDHVSNSQYSDKHSSGGISLADYPTANPIWILLLILVTVCTTQIRRFKK

SEQ ID NO: 70742 - protein, 10 aa, unidentified
  source 1..10: note = methanogen bacteria
EYATTMGSTA

SEQ ID NO: 70743 - protein, 15 aa, unidentified
  source 1..15: note = methanogen bacteria
KLIESFIGTGDALPS

SEQ ID NO: 70744 - protein, 16 aa, unidentified
  source 1..16: note = methanogen bacteria
QKLIESVMGAGDALSG

SEQ ID NO: 70745 - protein, 15 aa, unidentified
  source 1..15: note = methanogen bacteria
QKLIETFIGTGDALP

SEQ ID NO: 70746 - protein, 15 aa, unidentified
  source 1..15: note = methanogen bacteria
KLIESFVGTGDAIPS

SEQ ID NO: 70747 - protein, 15 aa, unidentified
  source 1..15: note = methanogen bacteria
KLIESFIGSGDALPS

SEQ ID NO: 70748 - protein, 14 aa, unidentified
  source 1..14: note = methanogen bacteria
AFKILGGAITLDYS

SEQ ID NO: 70749 - protein, 15 aa, unidentified
  source 1..15: note = methanogen bacteria
KLIETFIGNGDALPS

SEQ ID NO: 70750 - protein, 16 aa, unidentified
  source 1..16: note = methanogen bacteria
QALIEETIGTGSALSS

SEQ ID NO: 70751 - protein, 67 aa, unidentified
  source 1..67: note = methanogen bacteria
QAIVFNEDISPDQRQDAINAMKQVTEIDQGKQLNDTPDVSSSSGEGYSELGKVYKDSNTGKLIMIEN

SEQ ID NO: 70752 - protein, 49 aa, unidentified
  source 1..49: note = methanogen bacteria
DYSESSSETEIQTWDDYGSFKYTVKGSSTYAYVSASVNIGLYSENNYSF

SEQ ID NO: 70753 - protein, 24 aa, unidentified
  source 1..24: note = methanogen bacteria
KPMLEIMQAGDAMEYAMTYGTHQY

SEQ ID NO: 70754 - protein, 19 aa, unidentified
  source 1..19: note = methanogen bacteria
MLPSNSPSADAFATILGTT

SEQ ID NO: 70755 - protein, 22 aa, unidentified
  source 1..22: note = methanogen bacteria
SKTGMPIYSNGKIATGKFKETN

SEQ ID NO: 70756 - protein, 14 aa, unidentified
  source 1..14: note = methanogen bacteria
AFIESFIGAGDAIP

SEQ ID NO: 70757 - protein, 80 aa, unidentified
  source 1..80: note = methanogen bacteria
MSKNTQVHDELPDGLQYLYHTLTKGVFNPDTGIWSIGDLNVEDGKVFLYITCKALTSGEKINKANLTSDTSNLNNESYEE

SEQ ID NO: 70758 - protein, 24 aa, unidentified
  source 1..24: note = methanogen bacteria
ACPNNVLIKEGDDTVARSPMTCKH

SEQ ID NO: 70759 - protein, 10 aa, unidentified
  source 1..10: note = methanogen bacteria
LGIIPAIIAA

SEQ ID NO: 70760 - protein, 16 aa, unidentified
  source 1..16: note = methanogen bacteria
QKLIETIVGTGDALSG

SEQ ID NO: 70761 - protein, 18 aa, unidentified
  source 1..18: note = methanogen bacteria
NELLMVAPNFANAKNLET

SEQ ID NO: 70762 - protein, 16 aa, unidentified
  source 1..16: note = methanogen bacteria
QGLIENFIGTGDALPS

SEQ ID NO: 70763 - protein, 11 aa, unidentified
  source 1..11: note = methanogen bacteria
INDAGGISDNQ

SEQ ID NO: 70764 - protein, 15 aa, unidentified
  source 1..15: note = methanogen bacteria
IPLASTGSWEALFEL

SEQ ID NO: 70765 - protein, 25 aa, unidentified
  source 1..25: note = methanogen bacteria
PNNVLIKEGEDTIVRSPLTCKHCKV

SEQ ID NO: 70766 - protein, 10 aa, unidentified
  source 1..10: note = methanogen bacteria
FQLFQQYSVL

SEQ ID NO: 70767 - protein, 10 aa, unidentified
  source 1..10: note = methanogen bacteria
WNQRLIFNID

SEQ ID NO: 70768 - protein, 55 aa, unidentified
  source 1..55: note = methanogen bacteria
ASDVNDTVIASEDGLAIELSQADSDEGISAVENEEIISEGNAGTFSELQSNITEK

SEQ ID NO: 70769 - protein, 20 aa, unidentified
  source 1..20: note = methanogen bacteria
YDTIFFASYGNIYGLGNITL

SEQ ID NO: 70770 - protein, 13 aa, unidentified
  source 1..13: note = methanogen bacteria
LLPSKPYRYSFDV

SEQ ID NO: 70771 - protein, 48 aa, unidentified
  source 1..48: note = methanogen bacteria
GFKNDIFAGFVVNSVKKWLEMKFLDFLNGYGMELHHFSLHGLFHTQSL

SEQ ID NO: 70772 - protein, 16 aa, unidentified
  source 1..16: note = methanogen bacteria
QKLIESVMGAGDALSG

SEQ ID NO: 70773 - protein, 23 aa, unidentified
  source 1..23: note = methanogen bacteria
MEGVQYIMNNDEMLARLGISSRL

SEQ ID NO: 70774 - protein, 10 aa, unidentified
  source 1..10: note = methanogen bacteria
SVVAAQAPII

SEQ ID NO: 70775 - protein, 17 aa, unidentified
  source 1..17: note = methanogen bacteria
APKLSDPLAGFFGFGRG

SEQ ID NO: 70776 - protein, 33 aa, unidentified
  source 1..33: note = methanogen bacteria
MYKSYLLDLGNEIDSNEMNSLNSSFNDISSKFQ

SEQ ID NO: 70777 - protein, 62 aa, unidentified
  source 1..62: note = methanogen bacteria
SDSKFIVTCNSTLHDGDSFSIKLTDMNNTPISNQVVNIMIIDATGGENYQQVTTDESGNGML

SEQ ID NO: 70778 - protein, 14 aa, unidentified
  source 1..14: note = methanogen bacteria
ALSLVYGDLSISIS

SEQ ID NO: 70779 - protein, 13 aa, unidentified
  source 1..13: note = methanogen bacteria
WLGFKNEALAFVA

SEQ ID NO: 70780 - protein, 47 aa, unidentified
  source 1..47: note = methanogen bacteria
MLSLFAYICTFYNFNIVIKMIGNNDTTIQVDLRKKSSMKDEIMYSNL

SEQ ID NO: 70781 - protein, 13 aa, unidentified
  source 1..13: note = methanogen bacteria
SVISVVAAQAPVI

SEQ ID NO: 70782 - protein, 10 aa, unidentified
  source 1..10: note = methanogen bacteria
LGLIPEIYLK

SEQ ID NO: 70783 - protein, 10 aa, unidentified
  source 1..10: note = methanogen bacteria
YHATIGINID

SEQ ID NO: 70784 - protein, 11 aa, unidentified
  source 1..11: note = methanogen bacteria
RTLEISFIALP

SEQ ID NO: 70785 - protein, 16 aa, unidentified
  source 1..16: note = methanogen bacteria
GDFTTFMSNYIGFRRG

SEQ ID NO: 70786 - protein, 28 aa, unidentified
  source 1..28: note = methanogen bacteria
YIYRINSSINNQFNETITKSRDFMLGKI

SEQ ID NO: 70787 - protein, 35 aa, unidentified
  source 1..35: note = methanogen bacteria
SWNMQAIVFNYDITPEQKQDAINARKHVTEIDRGQ

SEQ ID NO: 70788 - protein, 28 aa, unidentified
  source 1..28: note = methanogen bacteria
YVYRINSSINIQFNETMTKSRDFMLGNI

SEQ ID NO: 70789 - protein, 30 aa, unidentified
  source 1..30: note = methanogen bacteria
SSLYAYLDPVVDQVENQVRSGEITITFQSI

SEQ ID NO: 70790 - protein, 11 aa, unidentified
  source 1..11: note = methanogen bacteria
GLEMTTSTIST

SEQ ID NO: 70791 - protein, 45 aa, unidentified
  source 1..45: note = methanogen bacteria
MQKLKNPKWRGNMIKHSNQHPCDLRKKNSFTDPMNFINYNINFYD

SEQ ID NO: 70792 - protein, 14 aa, unidentified
  source 1..14: note = methanogen bacteria
AVSAAPNPNIMFGI

SEQ ID NO: 70793 - protein, 11 aa, unidentified
  source 1..11: note = methanogen bacteria
GLTFFFFGTTA

SEQ ID NO: 70794 - protein, 19 aa, unidentified
  source 1..19: note = methanogen bacteria
PSHHIPEFTTQGLYLTDKA

SEQ ID NO: 70795 - protein, 28 aa, unidentified
  source 1..28: note = methanogen bacteria
YMSHITEETQTNVKNLLQKERDFLINKI

SEQ ID NO: 70796 - protein, 75 aa, unidentified
  source 1..75: note = methanogen bacteria
MTLTAASIFNISADNVVLENVSLINGNDINGSAIYAEGNNIIIKNSILLNNTDVVIYATKSLTANYNWWGNTADT

SEQ ID NO: 70797 - protein, 29 aa, unidentified
  source 1..29: note = methanogen bacteria
SYMSNITNKTQNNLKGLLKEERDYIINKI

SEQ ID NO: 70798 - protein, 13 aa, unidentified
  source 1..13: note = methanogen bacteria
TGFNANLSPNYSF

SEQ ID NO: 70799 - protein, 11 aa, unidentified
  source 1..11: note = methanogen bacteria
GVSMLGMAAMS

SEQ ID NO: 70800 - protein, 29 aa, unidentified
  source 1..29: note = methanogen bacteria
SYMSHITEQSQTNIKNLLQKERDFIINKI

SEQ ID NO: 70801 - protein, 10 aa, unidentified
  source 1..10: note = methanogen bacteria
LLIGGSQLSS

SEQ ID NO: 70802 - protein, 10 aa, unidentified
  source 1..10: note = methanogen bacteria
MAHYSAYSGR

SEQ ID NO: 70803 - protein, 12 aa, unidentified
  source 1..12: note = methanogen bacteria
FAINLFEIVKFS

SEQ ID NO: 70804 - protein, 38 aa, unidentified
  source 1..38: note = methanogen bacteria
SNIGAGDNYGSITKAFSQSNKSISFSDVKEFYFQYFPC

SEQ ID NO: 70805 - protein, 29 aa, unidentified
  source 1..29: note = methanogen bacteria
SYMSHITEQTQTNVKNLLQKERDFLINKI

SEQ ID NO: 70806 - protein, 11 aa, unidentified
  source 1..11: note = methanogen bacteria
GISLLAIGASQ

SEQ ID NO: 70807 - protein, 22 aa, unidentified
  source 1..22: note = methanogen bacteria
HILVYIDGILVLNATTTDDLTQ

SEQ ID NO: 70808 - protein, 25 aa, unidentified
  source 1..25: note = methanogen bacteria
GEHEIKVVFTDGNGNTNTYTENITI

SEQ ID NO: 70809 - protein, 10 aa, unidentified
  source 1..10: note = methanogen bacteria
LHIIPGIIFA

SEQ ID NO: 70810 - protein, 27 aa, unidentified
  source 1..27: note = methanogen bacteria
GQNWAPFVPWVCPYLIASGEIAQYGVG

SEQ ID NO: 70811 - protein, 74 aa, unidentified
  source 1..74: note = methanogen bacteria
DGSKFSATLVDSKGNPRSGVNITFNINGVFYNRTTDENGTARLNINLMPGEYIITSQYGSSMTSNKITIAAKEE

SEQ ID NO: 70812 - protein, 11 aa, unidentified
  source 1..11: note = methanogen bacteria
ELKIIPMIIFA

SEQ ID NO: 70813 - protein, 29 aa, unidentified
  source 1..29: note = methanogen bacteria
TYIHSINSSINNQFNETMTKSRDFMLGNI

SEQ ID NO: 70814 - protein, 10 aa, unidentified
  source 1..10: note = methanogen bacteria
LGVIPTIVFA

SEQ ID NO: 70815 - protein, 13 aa, unidentified
  source 1..13: note = methanogen bacteria
QALISQFFEAGSA

SEQ ID NO: 70816 - protein, 29 aa, unidentified
  source 1..29: note = methanogen bacteria
SYMSNIANTTQDTIQNLLKTEKDFLINKI

SEQ ID NO: 70817 - protein, 10 aa, unidentified
  source 1..10: note = methanogen bacteria
KVLSFGDIVL

SEQ ID NO: 70818 - protein, 51 aa, unidentified
  source 1..51: note = methanogen bacteria
AHPGHGSEYHIEEVSSSNSAPSSSGSGSSGSGSSGSSSSGSGSSGSGSSGS

SEQ ID NO: 70819 - protein, 74 aa, unidentified
  source 1..74: note = methanogen bacteria
MTSNWAPYVLLEDTRVHYVQNISFISFDGKTWKDAYDLGYITCLKVYTVADDTKIINNENITVDYGCCRCRCCS

SEQ ID NO: 70820 - protein, 74 aa, unidentified
  source 1..74: note = methanogen bacteria
MEGGNIARIIVPGLNESTVAAVNYLGDDKYNPANTTVEIVVSKKNLTISASAEPIFVGDNATVVVTGFPVTSYG

SEQ ID NO: 70821 - protein, 74 aa, unidentified
  source 1..74: note = methanogen bacteria
MKNGGAVYLDNIKQGECDNTTFSNSHFENNTAGVNGGAIDWHDGATNGRIVDSSFVNNSAKAKVPTVWLMIVTL

SEQ ID NO: 70822 - protein, 10 aa, unidentified
  source 1..10: note = methanogen bacteria
LKLIPVIIFA

SEQ ID NO: 70823 - protein, 20 aa, unidentified
  source 1..20: note = methanogen bacteria
FKIFRLKLLFFKKTIPLFFI

SEQ ID NO: 70824 - protein, 10 aa, unidentified
  source 1..10: note = methanogen bacteria
LKLIPVIIFA

SEQ ID NO: 70825 - protein, 33 aa, unidentified
  source 1..33: note = methanogen bacteria
MYKSYLVDLGNEIDSNEINTLNTSFSDIASKFE

SEQ ID NO: 70826 - protein, 30 aa, unidentified
  source 1..30: note = methanogen bacteria
NTTVGEPVFCSSCIDCFWCRYTPLCNLYKK

SEQ ID NO: 70827 - protein, 10 aa, unidentified
  source 1..10: note = methanogen bacteria
SVAAANAPII

SEQ ID NO: 70828 - protein, 33 aa, unidentified
  source 1..33: note = methanogen bacteria
MYKSYLSDLGTEIGSNEMKSLNSSFSDIASRFE

SEQ ID NO: 70829 - protein, 34 aa, unidentified
  source 1..34: note = methanogen bacteria
GCDPAVFWARRAHLRDIAAQLFPPDWSYLSAIVA

SEQ ID NO: 70830 - protein, 53 aa, unidentified
  source 1..53: note = methanogen bacteria
AYSSGLLDTFTATGQTYESNGITFQYPDSWTEANCVSDGAIGAVVDSNNSNIS

SEQ ID NO: 70831 - protein, 65 aa, unidentified
  source 1..65: note = methanogen bacteria
FAGVGGESVGLEVNSNDYYNDTNLADGWIYSVNLDDKFLDDVNSLNPVTQTERQLVVDSVADFSN

SEQ ID NO: 70832 - protein, 15 aa, unidentified
  source 1..15: note = methanogen bacteria
IPLAPTGTWGALFEL

SEQ ID NO: 70833 - protein, 45 aa, unidentified
  source 1..45: note = methanogen bacteria
MYKNYMSDLSGQIDSKEVKEFNNELRHLERYFKKINRFCLININH

SEQ ID NO: 70834 - protein, 33 aa, unidentified
  source 1..33: note = methanogen bacteria
IYRSYMETSDRSLKAKDDIIDVRNTILDNRTHV

SEQ ID NO: 70835 - protein, 10 aa, unidentified
  source 1..10: note = methanogen bacteria
LKVIPTIFFA

SEQ ID NO: 70836 - protein, 17 aa, unidentified
  source 1..17: note = methanogen bacteria
VCREFYHKAIYLNGGNE

SEQ ID NO: 70837 - protein, 72 aa, unidentified
  source 1..72: note = methanogen bacteria
MDGLQFKARLIDNLGKPFPKWDVRFNINGVLYNRPTDSYDLAKLKINLPSGEYIITSSYNGANIANKITISP

SEQ ID NO: 70838 - protein, 32 aa, unidentified
  source 1..32: note = methanogen bacteria
SYITNIINTTQNSYSLLINLKFCLNIRSKIQN

SEQ ID NO: 70839 - protein, 72 aa, unidentified
  source 1..72: note = methanogen bacteria
MKTTEYESAYFGLTDSENEGVWKNVDGSEPKFINWSDGEPNNERGIENYAMFYYKSPEYKWNDGDFSLDYSQ

SEQ ID NO: 70840 - protein, 10 aa, unidentified
  source 1..10: note = methanogen bacteria
LKVIPAIFFA

SEQ ID NO: 70841 - protein, 49 aa, unidentified
  source 1..49: note = methanogen bacteria
ASDVNDTVIAFEDTSQNELYDCNESVTDNLKASEENNIDCSAQHYNTFF

SEQ ID NO: 70842 - protein, 10 aa, unidentified
  source 1..10: note = methanogen bacteria
GSGLLADASA

SEQ ID NO: 70843 - protein, 49 aa, unidentified
  source 1..49: note = methanogen bacteria
AADDNANGIISVDDNEELILDEAIDDDVSSANNNYDEELILETPADDLV

SEQ ID NO: 70844 - protein, 11 aa, unidentified
  source 1..11: note = methanogen bacteria
ELSIIPVIFLA

SEQ ID NO: 70845 - protein, 11 aa, unidentified
  source 1..11: note = methanogen bacteria
SIVDEIAYSNI

SEQ ID NO: 70846 - protein, 10 aa, unidentified
  source 1..10: note = methanogen bacteria
VVTAQNPYLL

SEQ ID NO: 70847 - protein, 10 aa, unidentified
  source 1..10: note = methanogen bacteria
LQIIPMIFFA

SEQ ID NO: 70848 - protein, 33 aa, unidentified
  source 1..33: note = methanogen bacteria
IYRSYMETSDKSLKAKDDIIDVRNTILDNRTHV

SEQ ID NO: 70849 - protein, 11 aa, unidentified
  source 1..11: note = methanogen bacteria
ELKLIPVILFA

SEQ ID NO: 70850 - protein, 11 aa, unidentified
  source 1..11: note = methanogen bacteria
VTDSFLKDTIL

SEQ ID NO: 70851 - protein, 42 aa, unidentified
  source 1..42: note = methanogen bacteria
IDLVARVLAKYYLNPKGTLIYGGEEAEATYYHGSTISAVNTS

SEQ ID NO: 70852 - protein, 21 aa, unidentified
  source 1..21: note = methanogen bacteria
ATDKNWGNAIYKYIISLYNRL

SEQ ID NO: 70853 - protein, 32 aa, unidentified
  source 1..32: note = methanogen bacteria
YKSYIFGLGDEINSGEVEALNESFSEISSKFD

SEQ ID NO: 70854 - protein, 28 aa, unidentified
  source 1..28: note = methanogen bacteria
YMSNITQKTQTTLNNLLKEERDYLINKI

SEQ ID NO: 70855 - protein, 32 aa, unidentified
  source 1..32: note = methanogen bacteria
YKSYIIELGDEINSGEVEALNGSFSEISSKFD

SEQ ID NO: 70856 - protein, 28 aa, unidentified
  source 1..28: note = methanogen bacteria
YMSNITEKTQRTMNNLLKEERDYLINKI

SEQ ID NO: 70857 - protein, 28 aa, unidentified
  source 1..28: note = methanogen bacteria
YLSNITQKTQTSINGLLKKERDHILNKI

SEQ ID NO: 70858 - protein, 29 aa, unidentified
  source 1..29: note = methanogen bacteria
SYMSHITEQTQTNIRNLLQKERDFLINKI

SEQ ID NO: 70859 - protein, 32 aa, unidentified
  source 1..32: note = methanogen bacteria
YKSYVIELGDEINSGEVEALNGSFSEISSKFD

SEQ ID NO: 70860 - protein, 47 aa, unidentified
  source 1..47: note = methanogen bacteria
ASANTTESTLLSVDESYVGNDVALGSSNEESIENDDENSKLIKRRGD

SEQ ID NO: 70861 - protein, 45 aa, unidentified
  source 1..45: note = methanogen bacteria
SEDMSESRLNETDDVSYIWIADDDGNVKLIQTTDNHFEGSASAPG

SEQ ID NO: 70862 - protein, 14 aa, unidentified
  source 1..14: note = methanogen bacteria
NLILASQGVVKGAN

SEQ ID NO: 70863 - protein, 11 aa, unidentified
  source 1..11: note = methanogen bacteria
YGMYIAALKGE

SEQ ID NO: 70864 - protein, 10 aa, unidentified
  source 1..10: note = methanogen bacteria
LKVIPMIIFA

SEQ ID NO: 70865 - protein, 52 aa, unidentified
  source 1..52: note = methanogen bacteria
VLNNPVVFEIVVRNTGDIKLSDVKVSENPHDGLKYISWYDNSALWRYNGDLT

SEQ ID NO: 70866 - protein, 50 aa, unidentified
  source 1..50: note = methanogen bacteria
SYITLSDDTPESELNETDDITYIWMEDDNGNVKLIQTTENHFEGSASAPG

SEQ ID NO: 70867 - protein, 29 aa, unidentified
  source 1..29: note = methanogen bacteria
SYMSNITKKTETNIENILKKERDYIINKI

SEQ ID NO: 70868 - protein, 29 aa, unidentified
  source 1..29: note = methanogen bacteria
SYISNITDKTQQNLNSLLKEERDFLLNKI

SEQ ID NO: 70869 - protein, 10 aa, unidentified
  source 1..10: note = methanogen bacteria
SFGPRVFDMP

SEQ ID NO: 70870 - protein, 17 aa, unidentified
  source 1..17: note = methanogen bacteria
DCWPYCADGFKSRSIIC

SEQ ID NO: 70871 - protein, 12 aa, unidentified
  source 1..12: note = methanogen bacteria
RWSSASYCKIRC

SEQ ID NO: 70872 - protein, 12 aa, unidentified
  source 1..12: note = methanogen bacteria
MIVGFSMAGKSG

SEQ ID NO: 70873 - protein, 70 aa, unidentified
  source 1..70: note = methanogen bacteria
MAFDDFIKNHENETKTILEIHMNATVFINNNTDEAAGLLSADIVKDVEVENNALKGFPLISDLNDTFKKM

SEQ ID NO: 70874 - protein, 29 aa, unidentified
  source 1..29: note = methanogen bacteria
YIYRINSQINDSFNQTLDKGRLYLLNKLN

SEQ ID NO: 70875 - protein, 21 aa, unidentified
  source 1..21: note = methanogen bacteria
AIYGWNFIIFLQEHPDLLGRG

SEQ ID NO: 70876 - protein, 70 aa, unidentified
  source 1..70: note = methanogen bacteria
SSSSSDSSSSNSNNGPSVVSTHDEENYQAGDGSHYKQVEYSDGNFRQYDYNGKLIGSSYDSDQKYLPSME

SEQ ID NO: 70877 - protein, 29 aa, unidentified
  source 1..29: note = methanogen bacteria
NYISNISSTAQENFKELLKQERDFLINKI

SEQ ID NO: 70878 - protein, 10 aa, unidentified
  source 1..10: note = methanogen bacteria
LGLIPAIIAA

SEQ ID NO: 70879 - protein, 43 aa, unidentified
  source 1..43: note = methanogen bacteria
AANNGVNTNDIINDETKSQLVDLRDSELQSMEDYKQAYGSDVT

SEQ ID NO: 70880 - protein, 24 aa, unidentified
  source 1..24: note = methanogen bacteria
GLINVDRKTKKITLNFTQRNELEF

SEQ ID NO: 70881 - protein, 18 aa, unidentified
  source 1..18: note = methanogen bacteria
SEYNVVSKSVKTKSVVGK

SEQ ID NO: 70882 - protein, 69 aa, unidentified
  source 1..69: note = methanogen bacteria
MNEILNGGNTVIDLTDNYKYRDGDEAFVNGIVINKSITINGNGITIDGSNTARIFQISADNVIINNITF

SEQ ID NO: 70883 - protein, 29 aa, unidentified
  source 1..29: note = methanogen bacteria
SYITNIINTTQNSFDGLIKQERDFLINKI

SEQ ID NO: 70884 - protein, 10 aa, unidentified
  source 1..10: note = methanogen bacteria
LGIIPAIITA

SEQ ID NO: 70885 - protein, 33 aa, unidentified
  source 1..33: note = methanogen bacteria
IYRSYMETSDVSLKAKDDIIDVRNTILDNRTHV

SEQ ID NO: 70886 - protein, 42 aa, unidentified
  source 1..42: note = methanogen bacteria
SYIEPKEIVVNEITRNTISARQWLLQELLIQLKCLQVAKAAF

SEQ ID NO: 70887 - protein, 10 aa, unidentified
  source 1..10: note = methanogen bacteria
IAGIGANAIA

SEQ ID NO: 70888 - protein, 22 aa, unidentified
  source 1..22: note = methanogen bacteria
TTVQVDLRKKSSIKDELAYSNL

SEQ ID NO: 70889 - protein, 11 aa, unidentified
  source 1..11: note = methanogen bacteria
ISVAAAQAPVI

SEQ ID NO: 70890 - protein, 69 aa, unidentified
  source 1..69: note = methanogen bacteria
MNVTYNGDNNFNPSSAVANFTVGAIDSAVTVNLTNITYGDNETIKFNVTDGATGTVNITVTGLVLMLLI

SEQ ID NO: 70891 - protein, 69 aa, unidentified
  source 1..69: note = methanogen bacteria
MNNTAAKNGGAVYLDNIQGSKCDNTTFTNSRFENNSAAVNGGAIDWHDGATNGKIEDSSFVNNSAKANG

SEQ ID NO: 70892 - protein, 10 aa, unidentified
  source 1..10: note = methanogen bacteria
LDYQNLLFTN

SEQ ID NO: 70893 - protein, 39 aa, unidentified
  source 1..39: note = methanogen bacteria
GEYIDLEDNINDYYEETNLADGWIYSPYLNDCFWNKLII

SEQ ID NO: 70894 - protein, 56 aa, unidentified
  source 1..56: note = methanogen bacteria
MELKRIVLDSDTELDPTNERREYLNGIKLDVDDLTIDGNGYAIDALKSARIFYCTG

SEQ ID NO: 70895 - protein, 30 aa, unidentified
  source 1..30: note = methanogen bacteria
MASVDSAFVTEGLSREEMYFLLLISILNQI

SEQ ID NO: 70896 - protein, 55 aa, unidentified
  source 1..55: note = methanogen bacteria
DDIFNVTLNTNDLKDLNVSYIVSDEDISEFSTENVEFDEIYKNDKLRIHKVDYAS

SEQ ID NO: 70897 - protein, 33 aa, unidentified; identical to SEQ ID NO: 70834
  source 1..33: note = methanogen bacteria

SEQ ID NO: 70898 - protein, 28 aa, unidentified
  source 1..28: note = methanogen bacteria
YRSYISSSSNLTAESDTNSIRQTLNSSI

SEQ ID NO: 70899 - protein, 33 aa, unidentified
  source 1..33: note = methanogen bacteria
IYRSYMETSDTSLKAKDDIMDVRNTILDNRTHV

SEQ ID NO: 70900 - protein, 27 aa, unidentified
  source 1..27: note = methanogen bacteria
IQLIYGHGYDALHPFIHFDLDSLFIIH

SEQ ID NO: 70901 - protein, 33 aa, unidentified
  source 1..33: note = methanogen bacteria
IYRTYMETSDTSLKAKDDIMDVRNTILDNRTHV

SEQ ID NO: 70902 - protein, 33 aa, unidentified
  source 1..33: note = methanogen bacteria
IYRSYMDTSDRSLKAKDDIIDVRNTILDNRTHV

SEQ ID NO: 70903 - protein, 28 aa, unidentified
  source 1..28: note = methanogen bacteria
IYKINLEINDLFNQTLVKGRLFLFNKLK

SEQ ID NO: 70904 - protein, 33 aa, unidentified
  source 1..33: note = methanogen bacteria
IYRSYMNTSDVSLKAKDDIIDVRNTILDNRTHV

SEQ ID NO: 70905 - protein, 68 aa, unidentified
  source 1..68: note = methanogen bacteria
MEYQGMEFEELEEGYKLKRGKDEKTVTVPESIDGKPVVSIGAKAFKDFSAVTAVGDLTVYYCGVVLVT

SEQ ID NO: 70906 - protein, 68 aa, unidentified
  source 1..68: note = methanogen bacteria
MPKENLTISASADPITVGEDAVIVVTGFKDATGNVAVSVNGKTYTAVLMVKLILLQLMVIKFLLLFRV

SEQ ID NO: 70907 - protein, 68 aa, unidentified
  source 1..68: note = methanogen bacteria
MFDGESLDANFDNGTLVDRIAGLEPGDSLEYTVTYSNDSDVTVDYYMLAKTLKTLEESKDVAENGGKH

SEQ ID NO: 70908 - protein, 46 aa, unidentified
  source 1..46: note = methanogen bacteria
YNGLGEDQGYFGGADDAGSDGSKVSGNLHLVKLKVCSLQFKLLSVL

SEQ ID NO: 70909 - protein, 33 aa, unidentified
  source 1..33: note = methanogen bacteria
IYRTYMDTSNTSLSAKDDIMDVRNTILDNRTHV

SEQ ID NO: 70910 - protein, 33 aa, unidentified; identical to SEQ ID NO: 70904
  source 1..33: note = methanogen bacteria

SEQ ID NO: 70911 - protein, 33 aa, unidentified
  source 1..33: note = methanogen bacteria
IYRSYMETSDTSLKAKDDIIDVRNTILDNRTHV

SEQ ID NO: 70912 - protein, 17 aa, unidentified
  source 1..17: note = methanogen bacteria
TEFAFSILEDKSPTLLN

SEQ ID NO: 70913 - protein, 33 aa, unidentified; identical to SEQ ID NO: 70902
  source 1..33: note = methanogen bacteria

SEQ ID NO: 70914 - protein, 11 aa, unidentified
  source 1..11: note = methanogen bacteria
LMSNYLNLTIE

SEQ ID NO: 70915 - protein, 27 aa, unidentified
  source 1..27: note = methanogen bacteria
YRNYFQTSTLSSTADVDQLRSNLTSRG

SEQ ID NO: 70916 - protein, 10 aa, unidentified
  source 1..10: note = methanogen bacteria
SKLSAQGFYA

SEQ ID NO: 70917 - protein, 31 aa, unidentified
  source 1..31: note = methanogen bacteria
FYSDYTDSVGSSVTSDSEDLAQNITNLKDKF

SEQ ID NO: 70918 - protein, 66 aa, unidentified
  source 1..66: note = methanogen bacteria
MANWLVKGKIITFKFNGKTYKVKTNAKGIAQKALNKNVIKKLKKGKTYIVKVSYFKDNIKTTVKVR

SEQ ID NO: 70919 - protein, 29 aa, unidentified
  source 1..29: note = methanogen bacteria
YIYKINLEINDMFNQTLAKGRLFLFNKLD

SEQ ID NO: 70920 - protein, 36 aa, unidentified
  source 1..36: note = methanogen bacteria
KVCIGLQTYKSDSNPVPVSVTKLAKQVNAAYDNGGD

SEQ ID NO: 70921 - protein, 40 aa, unidentified
  source 1..40: note = methanogen bacteria
AKIETPDTYDEDGYPIDGGLMDRHLGVIDPCKTGYSCRLR

SEQ ID NO: 70922 - protein, 11 aa, unidentified
  source 1..11: note = methanogen bacteria
ADKGPKIWDIS

SEQ ID NO: 70923 - protein, 10 aa, unidentified
  source 1..10: note = methanogen bacteria
LGLIPLIVFA

SEQ ID NO: 70924 - protein, 11 aa, unidentified
  source 1..11: note = methanogen bacteria
VKPSGNYLKYI

SEQ ID NO: 70925 - protein, 65 aa, unidentified
  source 1..65: note = methanogen bacteria
APGKCMGGDTFTNRQEVLPSGEHYIECDINTLDADSRGAERIVYSSDDFDVYYTSDHYETFEKLN

SEQ ID NO: 70926 - protein, 42 aa, unidentified
  source 1..42: note = methanogen bacteria
AENSTDIRSVDCQKILQTSQNGMYATDEASFNDLADEIENTG

SEQ ID NO: 70927 - protein, 37 aa, unidentified
  source 1..37: note = methanogen bacteria
YSQNTMSSSLNIESEFNHRLILDNVANTISSKVAHYR

SEQ ID NO: 70928 - protein, 10 aa, unidentified
  source 1..10: note = methanogen bacteria
AGLGADALAA

SEQ ID NO: 70929 - protein, 13 aa, unidentified
  source 1..13: note = methanogen bacteria
ELKQKDPVRFNQL

SEQ ID NO: 70930 - protein, 34 aa, unidentified
  source 1..34: note = methanogen bacteria
IYQNYLVSLSDELNNNEVNDLINKIDKINDYVKK

SEQ ID NO: 70931 - protein, 64 aa, unidentified
  source 1..64: note = methanogen bacteria
MEIICKVENTGRFVNIANVTGNEFDYDLSNNRANASVLINPACDMEVVKTVNESNPNYSLEYCC

SEQ ID NO: 70932 - protein, 64 aa, unidentified
  source 1..64: note = methanogen bacteria
MGPMRLDVVDVGTCECKDLSENGETLNDKRETQTDTQNTVNIRAWSLVLLVSSVVLFSIFLGSL

SEQ ID NO: 70933 - protein, 11 aa, unidentified
  source 1..11: note = methanogen bacteria
KTFDFFSFVLP

SEQ ID NO: 70934 - protein, 33 aa, unidentified
  source 1..33: note = methanogen bacteria
MYKRYISDLSGEIQSREVAEFKNKLGEISEIFT

SEQ ID NO: 70935 - protein, 12 aa, unidentified
  source 1..12: note = methanogen bacteria
MVFAKAFGVTRG

SEQ ID NO: 70936 - protein, 17 aa, unidentified
  source 1..17: note = methanogen bacteria
ETILRDYLSMIHGNVLY

SEQ ID NO: 70937 - protein, 10 aa, unidentified
  source 1..10: note = methanogen bacteria
MVQETVTGTL

SEQ ID NO: 70938 - protein, 31 aa, unidentified
  source 1..31: note = methanogen bacteria
MIKHTNNTCDLRRKTDLRDPLTFNNLRINIK

SEQ ID NO: 70939 - protein, 14 aa, unidentified
  source 1..14: note = methanogen bacteria
AVSAAPNPELMLWV

SEQ ID NO: 70940 - protein, 11 aa, unidentified
  source 1..11: note = methanogen bacteria
CSFGNVDYGKT

SEQ ID NO: 70941 - protein, 11 aa, unidentified
  source 1..11: note = methanogen bacteria
ADPSPDMMAWV

SEQ ID NO: 70942 - protein, 29 aa, unidentified
  source 1..29: note = methanogen bacteria
YVYKINTEINDLYNQTLNKGRLCLFNKLK

SEQ ID NO: 70943 - protein, 32 aa, unidentified
  source 1..32: note = methanogen bacteria
MIKHNNPTCDLRRKTSIVDPMTFHNLRIDFKD

SEQ ID NO: 70944 - protein, 17 aa, unidentified
  source 1..17: note = methanogen bacteria
SILAVSAAPGPEMMSWV

SEQ ID NO: 70945 - protein, 27 aa, unidentified
  source 1..27: note = methanogen bacteria
PVGLDTDQIYTRPAPQSQMDAGQLLKC

SEQ ID NO: 70946 - protein, 33 aa, unidentified
  source 1..33: note = methanogen bacteria
MYKDYLSDFTSEINNTEVENLKNKIDNIKTYLK

SEQ ID NO: 70947 - protein, 62 aa, unidentified
  source 1..62: note = methanogen bacteria
MDDKGWATKYNATTDENGRATVQLFALENGNYTVHSVYNGTIFLSKSKSISDLNIDDGYDKY

SEQ ID NO: 70948 - protein, 28 aa, unidentified
  source 1..28: note = methanogen bacteria
NQTWSPFVPWICPYLIASGEIAKYTTDI

SEQ ID NO: 70949 - protein, 10 aa, unidentified
  source 1..10: note = methanogen bacteria
SFGPMVFDMP

SEQ ID NO: 70950 - protein, 23 aa, unidentified
  source 1..23: note = methanogen bacteria
PIFETNDDAFMLLLLKKYYTYSQ

SEQ ID NO: 70951 - protein, 61 aa, unidentified
  source 1..61: note = methanogen bacteria
MKGKVITFKFKGKTYMVKTNSKGIAQKTLKKKVIKKFKKGKKYTVKVAYGKDSIRTTVKVR

SEQ ID NO: 70952 - protein, 33 aa, unidentified
  source 1..33: note = methanogen bacteria
MYNDYLSDLSGEIASKEVKEFNGELNTLKNHFK

SEQ ID NO: 70953 - protein, 19 aa, unidentified
  source 1..19: note = methanogen bacteria
ADSISDYIQIISRSRWMKG

SEQ ID NO: 70954 - protein, 16 aa, unidentified
  source 1..16: note = methanogen bacteria
FAKEWPVHSLKFIASA

SEQ ID NO: 70955 - protein, 33 aa, unidentified
  source 1..33: note = methanogen bacteria
MYNNYVSDLSGEISSKEVKEFNSQLNSLERYFE

SEQ ID NO: 70956 - protein, 33 aa, unidentified
  source 1..33: note = methanogen bacteria
MYNTYVSDLSGEIESREFRQFNSQLHSLGNYFR

SEQ ID NO: 70957 - protein, 28 aa, unidentified
  source 1..28: note = methanogen bacteria
YMSNITEKTQTTITDLLKKERDFLINKI

SEQ ID NO: 70958 - protein, 29 aa, unidentified
  source 1..29: note = methanogen bacteria
SYMSNITEKTQNQIKTLLKIERDFLINKI

SEQ ID NO: 70959 - protein, 10 aa, unidentified
  source 1..10: note = methanogen bacteria
TTLGAEVLSI

SEQ ID NO: 70960 - protein, 33 aa, unidentified
  source 1..33: note = methanogen bacteria
MYKTYIADLSGEIQSNEVNEFKSKLSEISEIFT

SEQ ID NO: 70961 - protein, 33 aa, unidentified
  source 1..33: note = methanogen bacteria
MYNNYISDLSGEVQSKEVKEFNEELKILGKYFK

SEQ ID NO: 70962 - protein, 33 aa, unidentified
  source 1..33: note = methanogen bacteria
MYNRYIGDLSGQINSKEVNEFKNQLNVLGTYFK

SEQ ID NO: 70963 - protein, 33 aa, unidentified
  source 1..33: note = methanogen bacteria
MYNNYMDDLSSEISSKEVNEFNNQLNNLGKYFK

SEQ ID NO: 70964 - protein, 29 aa, unidentified
  source 1..29: note = methanogen bacteria
SYISNITQKTQKNMQNLLKTERDFIINKI

SEQ ID NO: 70965 - protein, 33 aa, unidentified
  source 1..33: note = methanogen bacteria
MYNNYISDLSGEVQSKEFKEFNDELKTLGKYFK

SEQ ID NO: 70966 - protein, 33 aa, unidentified
  source 1..33: note = methanogen bacteria
LYNNYMSDLSGEISSREVSEFNNELKALGKLFK

SEQ ID NO: 70967 - protein, 17 aa, unidentified
  source 1..17: note = methanogen bacteria
YNPLPNGRTSPAWNLPI

SEQ ID NO: 70968 - protein, 33 aa, unidentified
  source 1..33: note = methanogen bacteria
MYNNYMSDLSGEISSREVSQFNNQLNGLGKYFK

SEQ ID NO: 70969 - protein, 29 aa, unidentified
  source 1..29: note = methanogen bacteria
IYSNYFSNGNTFSAHDDAQQIRQNLTTSK

SEQ ID NO: 70970 - protein, 12 aa, unidentified
  source 1..12: note = methanogen bacteria
VNALLTVAPNFS

SEQ ID NO: 70971 - protein, 29 aa, unidentified
  source 1..29: note = methanogen bacteria
SYISNITNTTQENFKKILEKERDFLINMI

SEQ ID NO: 70972 - protein, 34 aa, unidentified
  source 1..34: note = methanogen bacteria
HMYNSYMADLTEEVNSKEVKEFNNGLMNIEKYFK

SEQ ID NO: 70973 - protein, 25 aa, unidentified
  source 1..25: note = methanogen bacteria
MNKTVYLDVDNAKNKDADNYTLAIV

SEQ ID NO: 70974 - protein, 18 aa, unidentified
  source 1..18: note = methanogen bacteria
AEVMYIPPSEFEKGLGIV

SEQ ID NO: 70975 - protein, 33 aa, unidentified
  source 1..33: note = methanogen bacteria
MYKNYMNDLTGEISSKELNEFNSQLNTLGRYFK

SEQ ID NO: 70976 - protein, 29 aa, unidentified
  source 1..29: note = methanogen bacteria
GYMSHITDQMQTNIKNLLNEERDFLINKI

SEQ ID NO: 70977 - protein, 33 aa, unidentified
  source 1..33: note = methanogen bacteria
MYKNYINDLGGEIQSRETAELNNKLEEISELFT

SEQ ID NO: 70978 - protein, 33 aa, unidentified
  source 1..33: note = methanogen bacteria
MYNKYMKDLSGEIASKEVREFNGELNALGKYFK

SEQ ID NO: 70979 - protein, 33 aa, unidentified
  source 1..33: note = methanogen bacteria
MYRNYIADLSGEIESGEVREFNYKLQNISRLFS

SEQ ID NO: 70980 - protein, 40 aa, unidentified
  source 1..40: note = methanogen bacteria
VHFIPVGGAPAAMATATGVGTGTAMLAAGHVNDGYHHAYW

SEQ ID NO: 70981 - protein, 28 aa, unidentified
  source 1..28: note = methanogen bacteria
YMSNITGKIQTNMDNLLKKERDFLINKI

SEQ ID NO: 70982 - protein, 33 aa, unidentified
  source 1..33: note = methanogen bacteria
MYKSYMADLGGQINSKEVKEFNGELNDLGKYFK

SEQ ID NO: 70983 - protein, 14 aa, unidentified
  source 1..14: note = methanogen bacteria
TDSFLVNPTSAVTQ

SEQ ID NO: 70984 - protein, 29 aa, unidentified
  source 1..29: note = methanogen bacteria
SYISKISQEIQTNTHSFLKTERDYIINKI

SEQ ID NO: 70985 - protein, 32 aa, unidentified
  source 1..32: note = methanogen bacteria
MYNNYVSDLSDEIASKEVNEFNRELKILEKYF

SEQ ID NO: 70986 - protein, 28 aa, unidentified
  source 1..28: note = methanogen bacteria
YITNIINTTQNSFKTLITQERDFLINKI

SEQ ID NO: 70987 - protein, 29 aa, unidentified
  source 1..29: note = methanogen bacteria
SYMSNMTQKMQTNIHNFLKVERDYLINKI

SEQ ID NO: 70988 - protein, 10 aa, unidentified
  source 1..10: note = methanogen bacteria
VVAAQNPFII

SEQ ID NO: 70989 - protein, 29 aa, unidentified
  source 1..29: note = methanogen bacteria
MFGNNDTTIQVDLRKKSSIKDEIMYSNID

SEQ ID NO: 70990 - protein, 20 aa, unidentified
  source 1..20: note = methanogen bacteria
IAALLLSVISVVAAQNPYII

SEQ ID NO: 70991 - protein, 18 aa, unidentified
  source 1..18: note = methanogen bacteria
ISSMKMSLPSRGRMQSMP

SEQ ID NO: 70992 - protein, 12 aa, unidentified
  source 1..12: note = methanogen bacteria
PSIANEFGMNNV

SEQ ID NO: 70993 - protein, 59 aa, unidentified
  source 1..59: note = methanogen bacteria
GKIIKFKFNGKTYKAKTNKKGIAQKILTKKVIKKLKKGKKYTVQVTYKKDTIKTTVKIK

SEQ ID NO: 70994 - protein, 14 aa, unidentified
  source 1..14: note = methanogen bacteria
TNGLTNSFENSIWW

SEQ ID NO: 70995 - protein, 29 aa, unidentified
  source 1..29: note = methanogen bacteria
SYITKITNTTQNSFKGLIKQERDYLINKI

SEQ ID NO: 70996 - protein, 28 aa, unidentified
  source 1..28: note = methanogen bacteria
YTTNIINDITNHTQEVIKTGRDNILSKL

SEQ ID NO: 70997 - protein, 10 aa, unidentified
  source 1..10: note = methanogen bacteria
PYVLYSNGGG

SEQ ID NO: 70998 - protein, 22 aa, unidentified
  source 1..22: note = methanogen bacteria
MTENENKFPDYVTFPRTFENYK

SEQ ID NO: 70999 - protein, 29 aa, unidentified
  source 1..29: note = methanogen bacteria
MLGNKDTTIQVDLRKKSSIRDEIIYSGLD

SEQ ID NO: 71000 - protein, 16 aa, unidentified
  source 1..16: note = methanogen bacteria
LLLSVISVVAAQSPIV

SEQ ID NO: 71001 - protein, 22 aa, unidentified
  source 1..22: note = methanogen bacteria
KVGDEQITIANQTVWYNGDIGY

SEQ ID NO: 71002 - protein, 29 aa, unidentified
  source 1..29: note = methanogen bacteria
SYITNITNTTQESFKTLITQERDFLINKI

SEQ ID NO: 71003 - protein, 16 aa, unidentified
  source 1..16: note = methanogen bacteria
YDTQICTDAINNNHRV

SEQ ID NO: 71004 - protein, 30 aa, unidentified
  source 1..30: note = methanogen bacteria
MSDFNIDLFYFINHNLSNPFSDILMPNLTH

SEQ ID NO: 71005 - protein, 37 aa, unidentified
  source 1..37: note = methanogen bacteria
THLFLSPSTVESKGSKNVTDMINRSVEIPASVRLMMS

SEQ ID NO: 71006 - protein, 12 aa, unidentified
  source 1..12: note = methanogen bacteria
SSIKDELLFSDY

SEQ ID NO: 71007 - protein, 10 aa, unidentified
  source 1..10: note = methanogen bacteria
SVVAAQAPIV

SEQ ID NO: 71008 - protein, 26 aa, unidentified
  source 1..26: note = methanogen bacteria
YQSYFQPQEFNTTSDISTVRSSAFEK

SEQ ID NO: 71009 - protein, 20 aa, unidentified
  source 1..20: note = methanogen bacteria
QGGILAAAVPFSIHMNLHGC

SEQ ID NO: 71010 - protein, 18 aa, unidentified
  source 1..18: note = methanogen bacteria
MALQANPDMMAKTQESQA

SEQ ID NO: 71011 - protein, 28 aa, unidentified
  source 1..28: note = methanogen bacteria
YTTNYLNTITNHTKTVIINSRNNFLSQI

SEQ ID NO: 71012 - protein, 30 aa, unidentified
  source 1..30: note = methanogen bacteria
GYQYSSVKDIQDIPATGHHDDPSTHRYDRF

SEQ ID NO: 71013 - protein, 24 aa, unidentified
  source 1..24: note = methanogen bacteria
DRSLKAKDDIIDVRNTILDNRTHV

SEQ ID NO: 71014 - protein, 57 aa, unidentified
  source 1..57: note = methanogen bacteria
MSELDNDASKENIKLGEYVTWIFEAKNKGPNIAKNVKVYIKLVDGLKFIKYNVNKGI

SEQ ID NO: 71015 - protein, 31 aa, unidentified
  source 1..31: note = methanogen bacteria
VFHAANDPGMDPYDVTFTATAEGPPKEMKLQ

SEQ ID NO: 71016 - protein, 28 aa, unidentified
  source 1..28: note = methanogen bacteria
IYIISSDAIMNYTLFSRYFNLHLSLLDV

SEQ ID NO: 71017 - protein, 56 aa, unidentified
  source 1..56: note = methanogen bacteria
ITFKFRGKTYKVKTNKNGIAQKTLKKNVIKKLKKGKTYTVKLIYLKDTIKTTVKVK

SEQ ID NO: 71018 - protein, 13 aa, unidentified
  source 1..13: note = methanogen bacteria
MPDLIDGSENVSV

SEQ ID NO: 71019 - protein, 31 aa, unidentified
  source 1..31: note = methanogen bacteria
YFGLTNQNNTNTTNVNNTTNTTNSTMLLLRN

SEQ ID NO: 71020 - protein, 21 aa, unidentified
  source 1..21: note = methanogen bacteria
LDDYREIGLDSRAFGQVRESE

SEQ ID NO: 71021 - protein, 27 aa, unidentified
  source 1..27: note = methanogen bacteria
DAYATARALNEGMEVEDKLDFHNLDWW

SEQ ID NO: 71022 - protein, 54 aa, unidentified
  source 1..54: note = methanogen bacteria
MNEILNGRNTVIYLTDNYKYSYGDEAFVHGILIKKSITINGNGITIDGSNTARI

SEQ ID NO: 71023 - protein, 22 aa, unidentified
  source 1..22: note = methanogen bacteria
MKVSKDDNCQIDENCSDGTCAP

SEQ ID NO: 71024 - protein, 23 aa, unidentified
  source 1..23: note = methanogen bacteria
MKVSKDDNCQIDGNCSNGTCAPV

SEQ ID NO: 71025 - protein, 54 aa, unidentified
  source 1..54: note = methanogen bacteria
ALMQIGDVESVEFNEVWGQGHTQAERSGSANGNFINWVNKCMSNESDFFLIDFF

SEQ ID NO: 71026 - protein, 24 aa, unidentified
  source 1..24: note = methanogen bacteria
ADYSESSSETEIQTWDDYEASNIL

SEQ ID NO: 71027 - protein, 16 aa, unidentified
  source 1..16: note = methanogen bacteria
MSEHNTPEYITFPRTF

SEQ ID NO: 71028 - protein, 16 aa, unidentified
  source 1..16: note = methanogen bacteria
IFYIGGNGFIEPLRLV

SEQ ID NO: 71029 - protein, 53 aa, unidentified
  source 1..53: note = methanogen bacteria
MKIEEIDAIKFKNDQATEVKENVVKDETITLTINGNISRKRNLQWDTCSTRTW

SEQ ID NO: 71030 - protein, 13 aa, unidentified
  source 1..13: note = methanogen bacteria
TSNFSATDVQTDA

SEQ ID NO: 71031 - protein, 30 aa, unidentified
  source 1..30: note = methanogen bacteria
ASEIGDTIASENANTIELSADNEAILETLH

SEQ ID NO: 71032 - protein, 13 aa, unidentified
  source 1..13: note = methanogen bacteria
LSLVHGDISISIS

SEQ ID NO: 71033 - protein, 14 aa, unidentified
  source 1..14: note = methanogen bacteria
GSSVVSFGPMVFDM

SEQ ID NO: 71034 - protein, 10 aa, unidentified
  source 1..10: note = methanogen bacteria
MSKINVDAFY

SEQ ID NO: 71035 - protein, 45 aa, unidentified
  source 1..45: note = methanogen bacteria
ENVTMDNTMSIQDTVNNVNDSDTIYLTPGTYIESGIKIDKNITLQ

SEQ ID NO: 71036 - protein, 16 aa, unidentified
  source 1..16: note = methanogen bacteria
GLGVEHEFYYDQGSMS

SEQ ID NO: 71037 - protein, 19 aa, unidentified
  source 1..19: note = methanogen bacteria
MITFKKFKENATIEDIVNI

SEQ ID NO: 71038 - protein, 51 aa, unidentified
  source 1..51: note = methanogen bacteria
SVTFNINGVFYNKPTDSSGTAKLNINLMPGEYIITSMYNGMAIANTITIKD

SEQ ID NO: 71039 - protein, 16 aa, unidentified
  source 1..16: note = methanogen bacteria
SQLVDDLHTIYYYIKF

SEQ ID NO: 71040 - protein, 11 aa, unidentified
  source 1..11: note = methanogen bacteria
ATASSFDSQQH

SEQ ID NO: 71041 - protein, 12 aa, unidentified
  source 1..12: note = methanogen bacteria
ECLKQEYFFQQP

SEQ ID NO: 71042 - protein, 24 aa, unidentified
  source 1..24: note = methanogen bacteria
FTPTIEVKEVDIKDINRGMIDATF

SEQ ID NO: 71043 - protein, 14 aa, unidentified
  source 1..14: note = methanogen bacteria
SQLVIDLKTSGHSW

SEQ ID NO: 71044 - protein, 12 aa, unidentified
  source 1..12: note = methanogen bacteria
RKIYLTYYMLWF

SEQ ID NO: 71045 - protein, 25 aa, unidentified
  source 1..25: note = methanogen bacteria
RHEISVEFSGSDGKTHTFSETVVIE

SEQ ID NO: 71046 - protein, 36 aa, unidentified
  source 1..36: note = methanogen bacteria
SSDKYTPTVSLPVSGKTIVVDAGHGIPDEGIHLLTL

SEQ ID NO: 71047 - protein, 21 aa, unidentified
  source 1..21: note = methanogen bacteria
MADINWDAYAKPFADGIIPGS

SEQ ID NO: 71048 - protein, 14 aa, unidentified
  source 1..14: note = methanogen bacteria
PYYMDDFAVSSEKI

SEQ ID NO: 71049 - protein, 20 aa, unidentified
  source 1..20: note = methanogen bacteria
MSVNWDAYSAFFNDGIIPAS

SEQ ID NO: 71050 - protein, 12 aa, unidentified
  source 1..12: note = methanogen bacteria
SIVYADLSISIS

SEQ ID NO: 71051 - protein, 12 aa, unidentified
  source 1..12: note = methanogen bacteria
MSDLIDEITEMT

SEQ ID NO: 71052 - protein, 11 aa, unidentified
  source 1..11: note = methanogen bacteria
SRIVVDLNADV

SEQ ID NO: 71053 - protein, 28 aa, unidentified
  source 1..28: note = methanogen bacteria
SEEETPLNSIVIVSNAFTSNGYKMYKFW

SEQ ID NO: 71054 - protein, 16 aa, unidentified
  source 1..16: note = methanogen bacteria
MSNWDAYAGHFADGIP

SEQ ID NO: 71055 - protein, 16 aa, unidentified
  source 1..16: note = methanogen bacteria
MNDWSGYTDYFADGIP

SEQ ID NO: 71056 - protein, 11 aa, unidentified
  source 1..11: note = methanogen bacteria
MRKIHKYTPKS

SEQ ID NO: 71057 - protein, 21 aa, unidentified
  source 1..21: note = methanogen bacteria
GALIISQGFYSKTAIQQLSEN

SEQ ID NO: 71058 - protein, 40 aa, unidentified
  source 1..40: note = methanogen bacteria
MNGQWKWTQWDNGEEGATYHKYPVSNDVEIQKVEVQLNIK

SEQ ID NO: 71059 - protein, 10 aa, unidentified
  source 1..10: note = methanogen bacteria
LPQPETATIA

SEQ ID NO: 71060 - protein, 16 aa, unidentified
  source 1..16: note = methanogen bacteria
LTQPASPTFGAFLALN

SEQ ID NO: 71061 - protein, 10 aa, unidentified
  source 1..10: note = methanogen bacteria
MMMVLGIEDP

SEQ ID NO: 71062 - protein, 26 aa, unidentified
  source 1..26: note = methanogen bacteria
FSDLQKKIDGADEGSTILLENNYAYD

SEQ ID NO: 71063 - protein, 15 aa, unidentified
  source 1..15: note = methanogen bacteria
ISSAPTNVDNSVRFG

SEQ ID NO: 71064 - protein, 10 aa, unidentified
  source 1..10: note = methanogen bacteria
MMVILGIEDP

SEQ ID NO: 71065 - protein, 10 aa, unidentified
  source 1..10: note = methanogen bacteria
MIEILGLSDP

SEQ ID NO: 71066 - protein, 14 aa, unidentified
  source 1..14: note = methanogen bacteria
WEDLRKEYSDIVGE

SEQ ID NO: 71067 - protein, 16 aa, unidentified
  source 1..16: note = methanogen bacteria
AGWIDMTAIFAPYAGW

SEQ ID NO: 71068 - DNA, 30 bp, synthetic construct
  source 1..30: mol_type = other DNA
tacctgaatcgggaggaagagaacgctaag

SEQ ID NO: 71069 - protein, 10 aa, unidentified
  source 1..10: note = methanogen bacteria
YLNREEENAK

SEQ ID NO: 71070 - protein, 64 aa, Methanobrevibacter gottschalkii; identical to SEQ ID NO: 10252

SEQ ID NO: 71071 - protein, 304 aa, Methanobrevibacter gottschalkii; identical to SEQ ID NO: 10256

SEQ ID NO: 71072 - protein, 491 aa, Methanobrevibacter gottschalkii; identical to SEQ ID NO: 10263

SEQ ID NO: 71073 - protein, 92 aa, Methanobrevibacter gottschalkii; identical to SEQ ID NO: 10267

SEQ ID NO: 71074 - protein, 143 aa, Methanobrevibacter gottschalkii; identical to SEQ ID NO: 10268

SEQ ID NO: 71075 - protein, 291 aa, Methanobrevibacter gottschalkii; identical to SEQ ID NO: 10270

SEQ ID NO: 71076 - protein, 536 aa, Methanobrevibacter gottschalkii; identical to SEQ ID NO: 10271

SEQ ID NO: 71077 - protein, 37 aa, Methanobrevibacter gottschalkii; identical to SEQ ID NO: 10272

SEQ ID NO: 71078 - protein, 144 aa, Methanobrevibacter gottschalkii; identical to SEQ ID NO: 10274

SEQ ID NO: 71079 - protein, 358 aa, Methanobrevibacter gottschalkii; identical to SEQ ID NO: 10275

SEQ ID NO: 71080 - protein, 337 aa, Methanobrevibacter gottschalkii; identical to SEQ ID NO: 10276

SEQ ID NO: 71081 - protein, 267 aa, Methanobrevibacter gottschalkii; identical to SEQ ID NO: 10277

SEQ ID NO: 71082 - protein, 686 aa, Methanobrevibacter gottschalkii; identical to SEQ ID NO: 10279

SEQ ID NO: 71083 - protein, 485 aa, Methanobrevibacter gottschalkii; identical to SEQ ID NO: 10280

SEQ ID NO: 71084 - protein, 954 aa, Methanobrevibacter gottschalkii; identical to SEQ ID NO: 10281

SEQ ID NO: 71085 - protein, 1472 aa, Methanobrevibacter gottschalkii; identical to SEQ ID NO: 10282

SEQ ID NO: 71086 - protein, 182 aa, Methanobrevibacter gottschalkii; identical to SEQ ID NO: 10283

SEQ ID NO: 71087 - protein, 450 aa, Methanobrevibacter gottschalkii; identical to SEQ ID NO: 10284

SEQ ID NO: 71088 - protein, 125 aa, Methanobrevibacter gottschalkii; identical to SEQ ID NO: 10291

SEQ ID NO: 71089 - protein, 267 aa, Methanobrevibacter gottschalkii; identical to SEQ ID NO: 10295

SEQ ID NO: 71090 - protein, 224 aa, Methanobrevibacter gottschalkii; identical to SEQ ID NO: 10296

SEQ ID NO: 71091 - protein, 454 aa, Methanobrevibacter gottschalkii; identical to SEQ ID NO: 10302

SEQ ID NO: 71092 - protein, 611 aa, Methanobrevibacter gottschalkii; identical to SEQ ID NO: 10303

SEQ ID NO: 71093 - protein, 196 aa, Methanobrevibacter gottschalkii; identical to SEQ ID NO: 10306

SEQ ID NO: 71094 - protein, 225 aa, Methanobrevibacter gottschalkii; identical to SEQ ID NO: 10308

SEQ ID NO: 71095 - protein, 287 aa, Methanobrevibacter gottschalkii; identical to SEQ ID NO: 10309

SEQ ID NO: 71096 - protein, 356 aa, Methanobrevibacter gottschalkii; identical to SEQ ID NO: 10322

SEQ ID NO: 71097 - protein, 476 aa, Methanobrevibacter gottschalkii; identical to SEQ ID NO: 10323

SEQ ID NO: 71098 - protein, 146 aa, Methanobrevibacter gottschalkii; identical to SEQ ID NO: 10324

SEQ ID NO: 71099 - protein, 419 aa, Methanobrevibacter gottschalkii; identical to SEQ ID NO: 10325

SEQ ID NO: 71100 - protein, 319 aa, Methanobrevibacter gottschalkii; identical to SEQ ID NO: 10329

SEQ ID NO: 71101 - protein, 46 aa, Methanobrevibacter gottschalkii; identical to SEQ ID NO: 10331

SEQ ID NO: 71102 - protein, 67 aa, Methanobrevibacter gottschalkii; identical to SEQ ID NO: 10333

SEQ ID NO: 71103 - protein, 250 aa, Methanobrevibacter gottschalkii; identical to SEQ ID NO: 10334

SEQ ID NO: 71104 - protein, 1346 aa, Methanobrevibacter gottschalkii; identical to SEQ ID NO: 10336

SEQ ID NO: 71105 - protein, 266 aa, Methanobrevibacter gottschalkii; identical to SEQ ID NO: 10337

SEQ ID NO: 71106 - protein, 1415 aa, Methanobrevibacter gottschalkii; identical to SEQ ID NO: 10341

SEQ ID NO: 71107 - protein, 382 aa, Methanobrevibacter gottschalkii; identical to SEQ ID NO: 10342

SEQ ID NO: 71108 - protein, 227 aa, Methanobrevibacter gottschalkii; identical to SEQ ID NO: 10343

SEQ ID NO: 71109 - protein, 63 aa, Methanobrevibacter gottschalkii; identical to SEQ ID NO: 10347

SEQ ID NO: 71110 - protein, 282 aa, Methanobrevibacter gottschalkii; identical to SEQ ID NO: 10349

SEQ ID NO: 71111 - protein, 67 aa, Methanobrevibacter gottschalkii; identical to SEQ ID NO: 10350

SEQ ID NO: 71112 - protein, 269 aa, Methanobrevibacter gottschalkii; identical to SEQ ID NO: 10352

SEQ ID NO: 71113 - protein, 352 aa, Methanobrevibacter gottschalkii; identical to SEQ ID NO: 10353

SEQ ID NO: 71114 - protein, 343 aa, Methanobrevibacter gottschalkii; identical to SEQ ID NO: 10354

SEQ ID NO: 71115 - protein, 295 aa, Methanobrevibacter gottschalkii; identical to SEQ ID NO: 10355

SEQ ID NO: 71116 - protein, 484 aa, Methanobrevibacter gottschalkii; identical to SEQ ID NO: 10357

SEQ ID NO: 71117 - protein, 247 aa, Methanobrevibacter gottschalkii; identical to SEQ ID NO: 10363

SEQ ID NO: 71118 - protein, 203 aa, Methanobrevibacter gottschalkii; identical to SEQ ID NO: 10365

SEQ ID NO: 71119 - protein, 269 aa, Methanobrevibacter gottschalkii; identical to SEQ ID NO: 10367

SEQ ID NO: 71120 - protein, 74 aa, Methanobrevibacter gottschalkii; identical to SEQ ID NO: 10368

SEQ ID NO: 71121 - protein, 762 aa, Methanobrevibacter gottschalkii; identical to SEQ ID NO: 10369

SEQ ID NO: 71122 - protein, 48 aa, Methanobrevibacter gottschalkii; identical to SEQ ID NO: 10370

SEQ ID NO: 71123 - protein, 77 aa, Methanobrevibacter gottschalkii; identical to SEQ ID NO: 10373

SEQ ID NO: 71124 - protein, 580 aa, Methanobrevibacter gottschalkii; identical to SEQ ID NO: 10376

SEQ ID NO: 71125 - protein, 384 aa, Methanobrevibacter gottschalkii; identical to SEQ ID NO: 10378

SEQ ID NO: 71126 - protein, 161 aa, Methanobrevibacter gottschalkii; identical to SEQ ID NO: 10380

SEQ ID NO: 71127 - protein, 666 aa, Methanobrevibacter gottschalkii; identical to SEQ ID NO: 10381

SEQ ID NO: 71128 - protein, 116 aa, Methanobrevibacter gottschalkii; identical to SEQ ID NO: 10383

SEQ ID NO: 71129 - protein, 109 aa, Methanobrevibacter gottschalkii; identical to SEQ ID NO: 10384

SEQ ID NO: 71130 - protein, 112 aa, Methanobrevibacter gottschalkii; identical to SEQ ID NO: 10385

SEQ ID NO: 71131 - protein, 169 aa, Methanobrevibacter gottschalkii; identical to SEQ ID NO: 10386

SEQ ID NO: 71132 - protein, 162 aa, Methanobrevibacter gottschalkii; identical to SEQ ID NO: 10391

SEQ ID NO: 71133 - protein, 298 aa, Methanobrevibacter gottschalkii; identical to SEQ ID NO: 10392

SEQ ID NO: 71134 - protein, 310 aa, Methanobrevibacter gottschalkii; identical to SEQ ID NO: 10394

SEQ ID NO: 71135 - protein, 226 aa, Methanobrevibacter gottschalkii; identical to SEQ ID NO: 10399

SEQ ID NO: 71136 - protein, 240 aa, Methanobrevibacter gottschalkii; identical to SEQ ID NO: 10403

SEQ ID NO: 71137 - protein, 193 aa, Methanobrevibacter gottschalkii; identical to SEQ ID NO: 10405

SEQ ID NO: 71138 - protein, 190 aa, Methanobrevibacter gottschalkii; identical to SEQ ID NO: 10406

SEQ ID NO: 71139 - protein, 315 aa, Methanobrevibacter gottschalkii; identical to SEQ ID NO: 10407

SEQ ID NO: 71140 - protein, 60 aa, Methanobrevibacter gottschalkii; identical to SEQ ID NO: 10408

SEQ ID NO: 71141 - protein, 308 aa, Methanobrevibacter gottschalkii; identical to SEQ ID NO: 10409

SEQ ID NO: 71142 - protein, 213 aa, Methanobrevibacter gottschalkii; identical to SEQ ID NO: 10411

SEQ ID NO: 71143 - protein, 506 aa, Methanobrevibacter gottschalkii; identical to SEQ ID NO: 10422

SEQ ID NO: 71144 - protein, 251 aa, Methanobrevibacter gottschalkii; identical to SEQ ID NO: 10425

SEQ ID NO: 71145 - protein, 230 aa, Methanobrevibacter gottschalkii; identical to SEQ ID NO: 10432

SEQ ID NO: 71146 - protein, 122 aa, Methanobrevibacter gottschalkii; identical to SEQ ID NO: 10438

SEQ ID NO: 71147 - protein, 135 aa, Methanobrevibacter gottschalkii; identical to SEQ ID NO: 10439

SEQ ID NO: 71148 - protein, 139 aa, Methanobrevibacter gottschalkii; identical to SEQ ID NO: 10443

SEQ ID NO: 71149 - protein, 311 aa, Methanobrevibacter gottschalkii; identical to SEQ ID NO: 10457

SEQ ID NO: 71150 - protein, 185 aa, Methanobrevibacter gottschalkii; identical to SEQ ID NO: 10459

SEQ ID NO: 71151 - protein, 48 aa, Methanobrevibacter gottschalkii; identical to SEQ ID NO: 10460

SEQ ID NO: 71152 - protein, 143 aa, Methanobrevibacter gottschalkii; identical to SEQ ID NO: 10462

SEQ ID NO: 71153 - protein, 249 aa, Methanobrevibacter gottschalkii; identical to SEQ ID NO: 10463

SEQ ID NO: 71154 - protein, 250 aa, Methanobrevibacter gottschalkii; identical to SEQ ID NO: 10465

SEQ ID NO: 71155 - protein, 129 aa, Methanobrevibacter gottschalkii; identical to SEQ ID NO: 10474

SEQ ID NO: 71156 - protein, 165 aa, Methanobrevibacter gottschalkii; identical to SEQ ID NO: 10475

SEQ ID NO: 71157 - protein, 82 aa, Methanobrevibacter gottschalkii; identical to SEQ ID NO: 10476

SEQ ID NO: 71158 - protein, 89 aa, Methanobrevibacter gottschalkii; identical to SEQ ID NO: 10477

SEQ ID NO: 71159 - protein, 86 aa, Methanobrevibacter gottschalkii; identical to SEQ ID NO: 10478

SEQ ID NO: 71160 - protein, 197 aa, Methanobrevibacter gottschalkii; identical to SEQ ID NO: 10479

SEQ ID NO: 71161 - protein, 231 aa, Methanobrevibacter gottschalkii; identical to SEQ ID NO: 10480

SEQ ID NO: 71162 - protein, 223 aa, Methanobrevibacter gottschalkii; identical to SEQ ID NO: 10481

SEQ ID NO: 71163 - protein, 76 aa, Methanobrevibacter gottschalkii; identical to SEQ ID NO: 10482

SEQ ID NO: 71164 - protein, 290 aa, Methanobrevibacter gottschalkii; identical to SEQ ID NO: 10483

SEQ ID NO: 71165 - protein, 84 aa, Methanobrevibacter gottschalkii; identical to SEQ ID NO: 10484

SEQ ID NO: 71166 - protein, 101 aa, Methanobrevibacter gottschalkii; identical to SEQ ID NO: 10485

SEQ ID NO: 71167 - protein, 149 aa, Methanobrevibacter gottschalkii; identical to SEQ ID NO: 10487

SEQ ID NO: 71168 - protein, 211 aa, Methanobrevibacter gottschalkii; identical to SEQ ID NO: 10495

SEQ ID NO: 71169 - protein, 213 aa, Methanobrevibacter gottschalkii; identical to SEQ ID NO: 10496

SEQ ID NO: 71170 - protein, 121 aa, Methanobrevibacter gottschalkii; identical to SEQ ID NO: 10497

SEQ ID NO: 71171 - protein, 523 aa, Methanobrevibacter gottschalkii; identical to SEQ ID NO: 10498

SEQ ID NO: 71172 - protein, 429 aa, Methanobrevibacter gottschalkii; identical to SEQ ID NO: 10499

SEQ ID NO: 71173 - protein, 330 aa, Methanobrevibacter gottschalkii; identical to SEQ ID NO: 10501

SEQ ID NO: 71174 - protein, 330 aa, Methanobrevibacter gottschalkii; identical to SEQ ID NO: 10502

SEQ ID NO: 71175 - protein, 329 aa, Methanobrevibacter gottschalkii; identical to SEQ ID NO: 10503

SEQ ID NO: 71176 - protein, 330 aa, Methanobrevibacter gottschalkii; identical to SEQ ID NO: 10504

SEQ ID NO: 71177 - protein, 319 aa, Methanobrevibacter gottschalkii; identical to SEQ ID NO: 10505

SEQ ID NO: 71178 - protein, 424 aa, Methanobrevibacter gottschalkii; identical to SEQ ID NO: 10508

SEQ ID NO: 71179 - protein, 73 aa, Methanobrevibacter gottschalkii; identical to SEQ ID NO: 10510

SEQ ID NO: 71180 - protein, 232 aa, Methanobrevibacter gottschalkii; identical to SEQ ID NO: 10512

SEQ ID NO: 71181 - protein, 139 aa, Methanobrevibacter gottschalkii; identical to SEQ ID NO: 10513

SEQ ID NO: 71182 - protein, 592 aa, Methanobrevibacter gottschalkii; identical to SEQ ID NO: 10514

SEQ ID NO: 71183 - protein, 216 aa, Methanobrevibacter gottschalkii; identical to SEQ ID NO: 10515

SEQ ID NO: 71184 - protein, 213 aa, Methanobrevibacter gottschalkii; identical to SEQ ID NO: 10516

SEQ ID NO: 71185 - protein, 99 aa, Methanobrevibacter gottschalkii; identical to SEQ ID NO: 10517

SEQ ID NO: 71186 - protein, 125 aa, Methanobrevibacter gottschalkii; identical to SEQ ID NO: 10522

SEQ ID NO: 71187 - protein, 115 aa, Methanobrevibacter gottschalkii; identical to SEQ ID NO: 10524

SEQ ID NO: 71188 - protein, 310 aa, Methanobrevibacter gottschalkii; identical to SEQ ID NO: 10525

SEQ ID NO: 71189 - protein, 709 aa, Methanobrevibacter gottschalkii; identical to SEQ ID NO: 10527

SEQ ID NO: 71190 - protein, 249 aa, Methanobrevibacter gottschalkii; identical to SEQ ID NO: 10528

SEQ ID NO: 71191 - protein, 250 aa, Methanobrevibacter gottschalkii; identical to SEQ ID NO: 10529

SEQ ID NO: 71192 - protein, 123 aa, Methanobrevibacter gottschalkii; identical to SEQ ID NO: 10530

SEQ ID NO: 71193 - protein, 244 aa, Methanobrevibacter gottschalkii; identical to SEQ ID NO: 10532

SEQ ID NO: 71194 - protein, 73 aa, Methanobrevibacter gottschalkii; identical to SEQ ID NO: 10538

SEQ ID NO: 71195 - protein, 994 aa, Methanobrevibacter gottschalkii; identical to SEQ ID NO: 10539

SEQ ID NO: 71196 - protein, 571 aa, Methanobrevibacter gottschalkii; identical to SEQ ID NO: 10540

SEQ ID NO: 71197 - protein, 134 aa, Methanobrevibacter gottschalkii; identical to SEQ ID NO: 10541

SEQ ID NO: 71198 - protein, 118 aa, Methanobrevibacter gottschalkii; identical to SEQ ID NO: 10543

SEQ ID NO: 71199 - protein, 209 aa, Methanobrevibacter gottschalkii; identical to SEQ ID NO: 10545

SEQ ID NO: 71200 - protein, 315 aa, Methanobrevibacter gottschalkii; identical to SEQ ID NO: 10550

SEQ ID NO: 71201 - protein, 69 aa, Methanobrevibacter gottschalkii; identical to SEQ ID NO: 10554

SEQ ID NO: 71202 - protein, 123 aa, Methanobrevibacter gottschalkii; identical to SEQ ID NO: 10557

SEQ ID NO: 71203 - protein, 172 aa, Methanobrevibacter gottschalkii; identical to SEQ ID NO: 10559

SEQ ID NO: 71204 - protein, 203 aa, Methanobrevibacter gottschalkii; identical to SEQ ID NO: 10564

SEQ ID NO: 71205 - protein, 118 aa, Methanobrevibacter gottschalkii; identical to SEQ ID NO: 10566

SEQ ID NO: 71206 - protein, 253 aa, Methanobrevibacter gottschalkii; identical to SEQ ID NO: 10573

SEQ ID NO: 71207 - protein, 182 aa, Methanobrevibacter gottschalkii; identical to SEQ ID NO: 10575

SEQ ID NO: 71208 - protein, 95 aa, Methanobrevibacter gottschalkii; identical to SEQ ID NO: 10577

SEQ ID NO: 71209 - protein, 405 aa, Methanobrevibacter gottschalkii; identical to SEQ ID NO: 10578

SEQ ID NO: 71210 - protein, 112 aa, Methanobrevibacter gottschalkii; identical to SEQ ID NO: 10579

SEQ ID NO: 71211 - protein, 203 aa, Methanobrevibacter gottschalkii; identical to SEQ ID NO: 10580

SEQ ID NO: 71212 - protein, 400 aa, Methanobrevibacter gottschalkii; identical to SEQ ID NO: 10584

SEQ ID NO: 71213 - protein, 212 aa, Methanobrevibacter gottschalkii; identical to SEQ ID NO: 10586

SEQ ID NO: 71214 - protein, 1312 aa, Methanobrevibacter gottschalkii; identical to SEQ ID NO: 10591

SEQ ID NO: 71215 - protein, 58 aa, Methanobrevibacter gottschalkii; identical to SEQ ID NO: 10606

SEQ ID NO: 71216 - protein, 104 aa, Methanobrevibacter gottschalkii; identical to SEQ ID NO: 10608

SEQ ID NO: 71217 - protein, 682 aa, Methanobrevibacter gottschalkii; identical to SEQ ID NO: 10613

SEQ ID NO: 71218 - protein, 1099 aa, Methanobrevibacter gottschalkii; identical to SEQ ID NO: 10614

SEQ ID NO: 71219 - protein, 1864 aa, Methanobrevibacter gottschalkii; identical to SEQ ID NO: 10616

SEQ ID NO: 71220 - protein, 2193 aa, Methanobrevibacter gottschalkii; identical to SEQ ID NO: 10617

SEQ ID NO: 71221 - protein, 1911 aa, Methanobrevibacter gottschalkii; identical to SEQ ID NO: 10618

SEQ ID NO: 71222 - protein, 1703 aa, Methanobrevibacter gottschalkii; identical to SEQ ID NO: 10623

SEQ ID NO: 71223 - protein, 235 aa, Methanobrevibacter gottschalkii; identical to SEQ ID NO: 10624

SEQ ID NO: 71224 - protein, 214 aa, Methanobrevibacter gottschalkii; identical to SEQ ID NO: 10625

SEQ ID NO: 71225 - protein, 111 aa, Methanobrevibacter gottschalkii; identical to SEQ ID NO: 10626

SEQ ID NO: 71226 - protein, 846 aa, Methanobrevibacter gottschalkii; identical to SEQ ID NO: 10627

SEQ ID NO: 71227 - protein, 601 aa, Methanobrevibacter gottschalkii; identical to SEQ ID NO: 10629

SEQ ID NO: 71228 - protein, 568 aa, Methanobrevibacter gottschalkii; identical to SEQ ID NO: 10630

SEQ ID NO: 71229 - protein, 214 aa, Methanobrevibacter gottschalkii; identical to SEQ ID NO: 10631

SEQ ID NO: 71230 - protein, 116 aa, Methanobrevibacter gottschalkii; identical to SEQ ID NO: 10632

SEQ ID NO: 71231 - protein, 123 aa, Methanobrevibacter gottschalkii; identical to SEQ ID NO: 10633

SEQ ID NO: 71232 - protein, 744 aa, Methanobrevibacter gottschalkii; identical to SEQ ID NO: 10637

SEQ ID NO: 71233 - protein, 1855 aa, Methanobrevibacter gottschalkii; identical to SEQ ID NO: 10638

SEQ ID NO: 71234 - protein, 862 aa, Methanobrevibacter gottschalkii; identical to SEQ ID NO: 10639

SEQ ID NO: 71235 - protein, 1525 aa, Methanobrevibacter gottschalkii; identical to SEQ ID NO: 10640

SEQ ID NO: 71236 - protein, 161 aa, Methanobrevibacter gottschalkii; identical to SEQ ID NO: 10641

SEQ ID NO: 71237 - protein, 326 aa, Methanobrevibacter gottschalkii; identical to SEQ ID NO: 10647

SEQ ID NO: 71238 - protein, 330 aa, Methanobrevibacter gottschalkii; identical to SEQ ID NO: 10648

SEQ ID NO: 71239 - protein, 236 aa, Methanobrevibacter gottschalkii; identical to SEQ ID NO: 10651

SEQ ID NO: 71240 - protein, 214 aa, Methanobrevibacter gottschalkii; identical to SEQ ID NO: 10652

SEQ ID NO: 71241 - protein, 107 aa, Methanobrevibacter gottschalkii; identical to SEQ ID NO: 10653

SEQ ID NO: 71242 - protein, 271 aa, Methanobrevibacter gottschalkii; identical to SEQ ID NO: 10655

SEQ ID NO: 71243 - protein, 287 aa, Methanobrevibacter gottschalkii; identical to SEQ ID NO: 10656

SEQ ID NO: 71244 - protein, 283 aa, Methanobrevibacter gottschalkii; identical to SEQ ID NO: 10657

SEQ ID NO: 71245 - protein, 250 aa, Methanobrevibacter gottschalkii; identical to SEQ ID NO: 10658

SEQ ID NO: 71246 - protein, 432 aa, Methanobrevibacter gottschalkii; identical to SEQ ID NO: 10660

SEQ ID NO: 71247 - protein, 518 aa, Methanobrevibacter gottschalkii; identical to SEQ ID NO: 10663

SEQ ID NO: 71248 - protein, 237 aa, Methanobrevibacter gottschalkii; identical to SEQ ID NO: 10665

SEQ ID NO: 71249 - protein, 281 aa, Methanobrevibacter gottschalkii; identical to SEQ ID NO: 10667

SEQ ID NO: 71250 - protein, 469 aa, Methanobrevibacter gottschalkii; identical to SEQ ID NO: 10670

SEQ ID NO: 71251 - protein, 1218 aa, Methanobrevibacter gottschalkii; identical to SEQ ID NO: 10671

SEQ ID NO: 71252 - protein, 51 aa, Methanobrevibacter gottschalkii; identical to SEQ ID NO: 10675

SEQ ID NO: 71253 - protein, 1202 aa, Methanobrevibacter gottschalkii; identical to SEQ ID NO: 10677

SEQ ID NO: 71254 - protein, 376 aa, Methanobrevibacter gottschalkii; identical to SEQ ID NO: 10683

SEQ ID NO: 71255 - protein, 1609 aa, Methanobrevibacter gottschalkii; identical to SEQ ID NO: 10697

SEQ ID NO: 71256 - protein, 580 aa, Methanobrevibacter gottschalkii; identical to SEQ ID NO: 10701

SEQ ID NO: 71257 - protein, 168 aa, Methanobrevibacter gottschalkii; identical to SEQ ID NO: 10703

SEQ ID NO: 71258 - protein, 98 aa, Methanobrevibacter gottschalkii; identical to SEQ ID NO: 10706

SEQ ID NO: 71259 - protein, 188 aa, Methanobrevibacter gottschalkii; identical to SEQ ID NO: 10717

SEQ ID NO: 71260 - protein, 461 aa, Methanobrevibacter gottschalkii; identical to SEQ ID NO: 10718

SEQ ID NO: 71261 - protein, 228 aa, Methanobrevibacter gottschalkii; identical to SEQ ID NO: 10721

SEQ ID NO: 71262 - protein, 984 aa, Methanobrevibacter gottschalkii; identical to SEQ ID NO: 10723

SEQ ID NO: 71263 - protein, 549 aa, Methanobrevibacter gottschalkii; identical to SEQ ID NO: 10727

SEQ ID NO: 71264 - protein, 445 aa, Methanobrevibacter gottschalkii; identical to SEQ ID NO: 10728

SEQ ID NO: 71265 - protein, 1061 aa, Methanobrevibacter gottschalkii; identical to SEQ ID NO: 10731

SEQ ID NO: 71266 - protein, 191 aa, Methanobrevibacter gottschalkii; identical to SEQ ID NO: 10734

SEQ ID NO: 71267 - protein, 118 aa, Methanobrevibacter gottschalkii; identical to SEQ ID NO: 10735

SEQ ID NO: 71268 - protein, 73 aa, Methanobrevibacter gottschalkii; identical to SEQ ID NO: 10736

SEQ ID NO: 71269 - protein, 342 aa, Methanobrevibacter gottschalkii; identical to SEQ ID NO: 10737

SEQ ID NO: 71270 - protein, 503 aa, Methanobrevibacter gottschalkii; identical to SEQ ID NO: 10738

SEQ ID NO: 71271 - protein, 78 aa, Methanobrevibacter gottschalkii; identical to SEQ ID NO: 10743

SEQ ID NO: 71272 - protein, 114 aa, Methanobrevibacter gottschalkii; identical to SEQ ID NO: 10744

SEQ ID NO: 71273 - protein, 171 aa, Methanobrevibacter gottschalkii; identical to SEQ ID NO: 10745

SEQ ID NO: 71274 - protein, 158 aa, Methanobrevibacter gottschalkii; identical to SEQ ID NO: 10746

SEQ ID NO: 71275 - protein, 183 aa, Methanobrevibacter gottschalkii; identical to SEQ ID NO: 10748

SEQ ID NO: 71276 - protein, 85 aa, Methanobrevibacter gottschalkii; identical to SEQ ID NO: 10752

SEQ ID NO: 71277 - protein, 184 aa, Methanobrevibacter gottschalkii; identical to SEQ ID NO: 10753

SEQ ID NO: 71278 - protein, 114 aa, Methanobrevibacter gottschalkii; identical to SEQ ID NO: 10754

SEQ ID NO: 71279 - protein, 64 aa, Methanobrevibacter gottschalkii; identical to SEQ ID NO: 10756

SEQ ID NO: 71280 - protein, 887 aa, Methanobrevibacter gottschalkii; identical to SEQ ID NO: 10758

SEQ ID NO: 71281 - protein, 131 aa, Methanobrevibacter gottschalkii; identical to SEQ ID NO: 10760

SEQ ID NO: 71282 - protein, 182 aa, Methanobrevibacter gottschalkii; identical to SEQ ID NO: 10762

SEQ ID NO: 71283 - protein, 117 aa, Methanobrevibacter gottschalkii; identical to SEQ ID NO: 10763

SEQ ID NO: 71284 - protein, 202 aa, Methanobrevibacter gottschalkii; identical to SEQ ID NO: 10764

SEQ ID NO: 71285 - protein, 117 aa, Methanobrevibacter gottschalkii; identical to SEQ ID NO: 10770

SEQ ID NO: 71286 - protein, 387 aa, Methanobrevibacter gottschalkii; identical to SEQ ID NO: 10778

SEQ ID NO: 71287 - protein, 78 aa, Methanobrevibacter gottschalkii; identical to SEQ ID NO: 10784

SEQ ID NO: 71288 - protein, 555 aa, Methanobrevibacter gottschalkii; identical to SEQ ID NO: 10789

SEQ ID NO: 71289 - protein, 63 aa, Methanobrevibacter gottschalkii; identical to SEQ ID NO: 10790

SEQ ID NO: 71290 - protein, 49 aa, Methanobrevibacter gottschalkii; identical to SEQ ID NO: 10791

SEQ ID NO: 71291 - protein, 83 aa, Methanobrevibacter gottschalkii; identical to SEQ ID NO: 10792

SEQ ID NO: 71292 - protein, 89 aa, Methanobrevibacter gottschalkii; identical to SEQ ID NO: 10793

SEQ ID NO: 71293 - protein, 200 aa, Methanobrevibacter gottschalkii; identical to SEQ ID NO: 10795

SEQ ID NO: 71294 - protein, 127 aa, Methanobrevibacter gottschalkii; identical to SEQ ID NO: 10797

SEQ ID NO: 71295 - protein, 189 aa, Methanobrevibacter gottschalkii; identical to SEQ ID NO: 10799

SEQ ID NO: 71296 - protein, 242 aa, Methanobrevibacter gottschalkii; identical to SEQ ID NO: 10802

SEQ ID NO: 71297 - protein, 164 aa, Methanobrevibacter gottschalkii; identical to SEQ ID NO: 10803

SEQ ID NO: 71298 - protein, 312 aa, Methanobrevibacter gottschalkii; identical to SEQ ID NO: 10804

SEQ ID NO: 71299 - protein, 308 aa, Methanobrevibacter gottschalkii; identical to SEQ ID NO: 10805

SEQ ID NO: 71300 - protein, 272 aa, Methanobrevibacter gottschalkii; identical to SEQ ID NO: 10810

SEQ ID NO: 71301 - protein, 88 aa, Methanobrevibacter gottschalkii; identical to SEQ ID NO: 10816

SEQ ID NO: 71302 - protein, 115 aa, Methanobrevibacter gottschalkii; identical to SEQ ID NO: 10818

SEQ ID NO: 71303 - protein, 34 aa, Methanobrevibacter gottschalkii; identical to SEQ ID NO: 10827

SEQ ID NO: 71304 - protein, 185 aa, Methanobrevibacter gottschalkii; identical to SEQ ID NO: 10830

SEQ ID NO: 71305 - protein, 596 aa, Methanobrevibacter gottschalkii; identical to SEQ ID NO: 10839

SEQ ID NO: 71306 - protein, 581 aa, Methanobrevibacter gottschalkii; identical to SEQ ID NO: 10840

SEQ ID NO: 71307 - protein, 193 aa, Methanobrevibacter gottschalkii; identical to SEQ ID NO: 10841

SEQ ID NO: 71308 - protein, 240 aa, Methanobrevibacter gottschalkii; identical to SEQ ID NO: 10842

SEQ ID NO: 71309 - protein, 477 aa, Methanobrevibacter gottschalkii; identical to SEQ ID NO: 10843

SEQ ID NO: 71310 - protein, 234 aa, Methanobrevibacter gottschalkii; identical to SEQ ID NO: 10844

SEQ ID NO: 71311 - protein, 756 aa, Methanobrevibacter gottschalkii; identical to SEQ ID NO: 10845

SEQ ID NO: 71312 - protein, 752 aa, Methanobrevibacter gottschalkii; identical to SEQ ID NO: 10847

SEQ ID NO: 71313 - protein, 238 aa, Methanobrevibacter gottschalkii; identical to SEQ ID NO: 10848

SEQ ID NO: 71314 - protein, 784 aa, Methanobrevibacter gottschalkii; identical to SEQ ID NO: 10850

SEQ ID NO: 71315 - protein, 456 aa, Methanobrevibacter gottschalkii; identical to SEQ ID NO: 10851

SEQ ID NO: 71316 - protein, 204 aa, Methanobrevibacter gottschalkii; identical to SEQ ID NO: 10852

SEQ ID NO: 71317 - protein, 319 aa, Methanobrevibacter gottschalkii; identical to SEQ ID NO: 10853

SEQ ID NO: 71318 - protein, 284 aa, Methanobrevibacter gottschalkii; identical to SEQ ID NO: 10854

SEQ ID NO: 71319 - protein, 331 aa, Methanobrevibacter gottschalkii; identical to SEQ ID NO: 10855

SEQ ID NO: 71320 - protein, 542 aa, Methanobrevibacter gottschalkii; identical to SEQ ID NO: 10856

SEQ ID NO: 71321 - protein, 539 aa, Methanobrevibacter gottschalkii; identical to SEQ ID NO: 10857

SEQ ID NO: 71322 - protein, 204 aa, Methanobrevibacter gottschalkii; identical to SEQ ID NO: 10858

SEQ ID NO: 71323 - protein, 319 aa, Methanobrevibacter gottschalkii; identical to SEQ ID NO: 10859

SEQ ID NO: 71324 - protein, 230 aa, Methanobrevibacter gottschalkii; identical to SEQ ID NO: 10861

SEQ ID NO: 71325 - protein, 538 aa, Methanobrevibacter gottschalkii; identical to SEQ ID NO: 10862

SEQ ID NO: 71326 - protein, 329 aa, Methanobrevibacter gottschalkii; identical to SEQ ID NO: 10863

SEQ ID NO: 71327 - protein, 283 aa, Methanobrevibacter gottschalkii; identical to SEQ ID NO: 10864

SEQ ID NO: 71328 - protein, 230 aa, Methanobrevibacter gottschalkii; identical to SEQ ID NO: 10865

SEQ ID NO: 71329 - protein, 362 aa, Methanobrevibacter gottschalkii; identical to SEQ ID NO: 10868

SEQ ID NO: 71330 - protein, 188 aa, Methanobrevibacter gottschalkii; identical to SEQ ID NO: 10870

SEQ ID NO: 71331 - protein, 161 aa, Methanobrevibacter gottschalkii; identical to SEQ ID NO: 10872

SEQ ID NO: 71332 - protein, 425 aa, Methanobrevibacter gottschalkii; identical to SEQ ID NO: 10874

SEQ ID NO: 71333 - protein, 358 aa, Methanobrevibacter gottschalkii; identical to SEQ ID NO: 10882

SEQ ID NO: 71334 - protein, 423 aa, Methanobrevibacter gottschalkii; identical to SEQ ID NO: 10885

SEQ ID NO: 71335 - protein, 246 aa, Methanobrevibacter gottschalkii; identical to SEQ ID NO: 10905

SEQ ID NO: 71336 - protein, 515 aa, Methanobrevibacter gottschalkii; identical to SEQ ID NO: 10906

SEQ ID NO: 71337 - protein, 186 aa, Methanobrevibacter gottschalkii; identical to SEQ ID NO: 10910

SEQ ID NO: 71338 - protein, 148 aa, Methanobrevibacter gottschalkii; identical to SEQ ID NO: 10914

SEQ ID NO: 71339 - protein, 311 aa, Methanobrevibacter gottschalkii; identical to SEQ ID NO: 10918

SEQ ID NO: 71340 - protein, 88 aa, Methanobrevibacter gottschalkii; identical to SEQ ID NO: 10927

SEQ ID NO: 71341 - protein, 128 aa, Methanobrevibacter gottschalkii; identical to SEQ ID NO: 10931

SEQ ID NO: 71342 - protein, 302 aa, Methanobrevibacter gottschalkii; identical to SEQ ID NO: 10932

SEQ ID NO: 71343 - protein, 958 aa, Methanobrevibacter gottschalkii; identical to SEQ ID NO: 10935

SEQ ID NO: 71344 - protein, 60 aa, Methanobrevibacter gottschalkii; identical to SEQ ID NO: 10939

SEQ ID NO: 71345 - protein, 68 aa, Methanobrevibacter gottschalkii; identical to SEQ ID NO: 10940

SEQ ID NO: 71346 - protein, 382 aa, Methanobrevibacter gottschalkii; identical to SEQ ID NO: 10941

SEQ ID NO: 71347 - protein, 239 aa, Methanobrevibacter gottschalkii; identical to SEQ ID NO: 10942

SEQ ID NO: 71348 - protein, 90 aa, Methanobrevibacter gottschalkii; identical to SEQ ID NO: 10944

SEQ ID NO: 71349 - protein, 606 aa, Methanobrevibacter gottschalkii; identical to SEQ ID NO: 10945

SEQ ID NO: 71350 - protein, 92 aa, Methanobrevibacter gottschalkii; identical to SEQ ID NO: 10961

SEQ ID NO: 71351 - protein, 453 aa, Methanobrevibacter gottschalkii; identical to SEQ ID NO: 10976

SEQ ID NO: 71352 - protein, 192 aa, Methanobrevibacter gottschalkii; identical to SEQ ID NO: 10978

SEQ ID NO: 71353 - protein, 588 aa, Methanobrevibacter gottschalkii; identical to SEQ ID NO: 10983

SEQ ID NO: 71354 - protein, 185 aa, Methanobrevibacter gottschalkii; identical to SEQ ID NO: 10984

SEQ ID NO: 71355 - protein, 140 aa, Methanobrevibacter gottschalkii; identical to SEQ ID NO: 10990

SEQ ID NO: 71356 - protein, 56 aa, Methanobrevibacter gottschalkii; identical to SEQ ID NO: 10992

SEQ ID NO: 71357 - protein, 551 aa, Methanobrevibacter gottschalkii; identical to SEQ ID NO: 11010

SEQ ID NO: 71358 - protein, 443 aa, Methanobrevibacter gottschalkii; identical to SEQ ID NO: 11013

SEQ ID NO: 71359 - protein, 261 aa, Methanobrevibacter gottschalkii; identical to SEQ ID NO: 11015

SEQ ID NO: 71360 - protein, 260 aa, Methanobrevibacter gottschalkii; identical to SEQ ID NO: 11016

SEQ ID NO: 71361 - protein, 334 aa, Methanobrevibacter gottschalkii; identical to SEQ ID NO: 11021

SEQ ID NO: 71362 - protein, 491 aa, Methanobrevibacter gottschalkii; identical to SEQ ID NO: 11024

SEQ ID NO: 71363 - protein, 194 aa, Methanobrevibacter gottschalkii; identical to SEQ ID NO: 11028

SEQ ID NO: 71364 - protein, 312 aa, Methanobrevibacter gottschalkii; identical to SEQ ID NO: 11032

SEQ ID NO: 71365 - protein, 348 aa, Methanobrevibacter gottschalkii; identical to SEQ ID NO: 11034

SEQ ID NO: 71366 - protein, 698 aa, Methanobrevibacter gottschalkii; identical to SEQ ID NO: 11037

SEQ ID NO: 71367 - protein, 875 aa, Methanobrevibacter gottschalkii; identical to SEQ ID NO: 11041

SEQ ID NO: 71368 - protein, 159 aa, Methanobrevibacter gottschalkii; identical to SEQ ID NO: 11042

SEQ ID NO: 71369 - protein, 76 aa, Methanobrevibacter gottschalkii; identical to SEQ ID NO: 11052

SEQ ID NO: 71370 - protein, 459 aa, Methanobrevibacter gottschalkii; identical to SEQ ID NO: 11054

SEQ ID NO: 71371 - protein, 131 aa, Methanobrevibacter gottschalkii; identical to SEQ ID NO: 11056

SEQ ID NO: 71372 - protein, 149 aa, Methanobrevibacter gottschalkii; identical to SEQ ID NO: 11057

SEQ ID NO: 71373 - protein, 367 aa, Methanobrevibacter gottschalkii; identical to SEQ ID NO: 11065

SEQ ID NO: 71374 - protein, 155 aa, Methanobrevibacter gottschalkii; identical to SEQ ID NO: 11069

SEQ ID NO: 71375 - protein, 231 aa, Methanobrevibacter gottschalkii; identical to SEQ ID NO: 11071

SEQ ID NO: 71376 - protein, 355 aa, Methanobrevibacter gottschalkii; identical to SEQ ID NO: 11072

SEQ ID NO: 71377 - protein, 332 aa, Methanobrevibacter gottschalkii; identical to SEQ ID NO: 11073

SEQ ID NO: 71378 - protein, 243 aa, Methanobrevibacter gottschalkii; identical to SEQ ID NO: 11077

SEQ ID NO: 71379 - protein, 334 aa, Methanobrevibacter gottschalkii; identical to SEQ ID NO: 11078

SEQ ID NO: 71380 - protein, 256 aa, Methanobrevibacter gottschalkii; identical to SEQ ID NO: 11079

SEQ ID NO: 71381 - protein, 495 aa, Methanobrevibacter gottschalkii; identical to SEQ ID NO: 11083

SEQ ID NO: 71382 - protein, 122 aa, Methanobrevibacter gottschalkii; identical to SEQ ID NO: 11084

SEQ ID NO: 71383 - protein, 631 aa, Methanobrevibacter gottschalkii; identical to SEQ ID NO: 11091

SEQ ID NO: 71384 - protein, 475 aa, Methanobrevibacter gottschalkii; identical to SEQ ID NO: 11095

SEQ ID NO: 71385 - protein, 345 aa, Methanobrevibacter gottschalkii; identical to SEQ ID NO: 11096

SEQ ID NO: 71386 - protein, 396 aa, Methanobrevibacter gottschalkii; identical to SEQ ID NO: 11100

SEQ ID NO: 71387 - protein, 305 aa, Methanobrevibacter gottschalkii; identical to SEQ ID NO: 11101

SEQ ID NO: 71388 - protein, 151 aa, Methanobrevibacter gottschalkii; identical to SEQ ID NO: 11105

SEQ ID NO: 71389 - protein, 395 aa, Methanobrevibacter gottschalkii; identical to SEQ ID NO: 11109

SEQ ID NO: 71390 - protein, 659 aa, Methanobrevibacter gottschalkii; identical to SEQ ID NO: 11111

SEQ ID NO: 71391 - protein, 122 aa, Methanobrevibacter gottschalkii; identical to SEQ ID NO: 11115

SEQ ID NO: 71392 - protein, 170 aa, Methanobrevibacter gottschalkii; identical to SEQ ID NO: 11116

SEQ ID NO: 71393 - protein, 402 aa, Methanobrevibacter gottschalkii; identical to SEQ ID NO: 11121

SEQ ID NO: 71394 - protein, 112 aa, Methanobrevibacter gottschalkii; identical to SEQ ID NO: 11122

SEQ ID NO: 71395 - protein, 257 aa, Methanobrevibacter gottschalkii; identical to SEQ ID NO: 11124

SEQ ID NO: 71396 - protein, 282 aa, Methanobrevibacter gottschalkii; identical to SEQ ID NO: 11126

SEQ ID NO: 71397 - protein, 682 aa, Methanobrevibacter gottschalkii; identical to SEQ ID NO: 11134

SEQ ID NO: 71398 - protein, 159 aa, Methanobrevibacter gottschalkii; identical to SEQ ID NO: 11137

SEQ ID NO: 71399 - protein, 81 aa, Methanobrevibacter gottschalkii; identical to SEQ ID NO: 11138

SEQ ID NO: 71400 - protein, 221 aa, Methanobrevibacter gottschalkii; identical to SEQ ID NO: 11140

SEQ ID NO: 71401 - protein, 95 aa, Methanobrevibacter gottschalkii; identical to SEQ ID NO: 11141

SEQ ID NO: 71402 - protein, 229 aa, Methanobrevibacter gottschalkii; identical to SEQ ID NO: 11142

SEQ ID NO: 71403 - protein, 280 aa, Methanobrevibacter gottschalkii; identical to SEQ ID NO: 11143

SEQ ID NO: 71404 - protein, 115 aa, Methanobrevibacter gottschalkii; identical to SEQ ID NO: 11146

SEQ ID NO: 71405 - protein, 223 aa, Methanobrevibacter gottschalkii; identical to SEQ ID NO: 11147

SEQ ID NO: 71406 - protein, 59 aa, Methanobrevibacter gottschalkii; identical to SEQ ID NO: 11158

SEQ ID NO: 71407 - protein, 282 aa, Methanobrevibacter gottschalkii; identical to SEQ ID NO: 11159

SEQ ID NO: 71408 - protein, 179 aa, Methanobrevibacter gottschalkii; identical to SEQ ID NO: 11165

SEQ ID NO: 71409 - protein, 567 aa, Methanobrevibacter gottschalkii; identical to SEQ ID NO: 11167

SEQ ID NO: 71410 - protein, 297 aa, Methanobrevibacter gottschalkii; identical to SEQ ID NO: 11172

SEQ ID NO: 71411 - protein, 415 aa, Methanobrevibacter gottschalkii; identical to SEQ ID NO: 11174

SEQ ID NO: 71412 - protein, 179 aa, Methanobrevibacter gottschalkii; identical to SEQ ID NO: 11177

SEQ ID NO: 71413 - protein, 60 aa, Methanobrevibacter gottschalkii; identical to SEQ ID NO: 11181

SEQ ID NO: 71414 - protein, 285 aa, Methanobrevibacter gottschalkii; identical to SEQ ID NO: 11182

SEQ ID NO: 71415 - protein, 202 aa, Methanobrevibacter gottschalkii; identical to SEQ ID NO: 11183

SEQ ID NO: 71416 - protein, 151 aa, Methanobrevibacter gottschalkii; identical to SEQ ID NO: 11184

SEQ ID NO: 71417 - protein, 318 aa, Methanobrevibacter gottschalkii; identical to SEQ ID NO: 11185

SEQ ID NO: 71418 - protein, 294 aa, Methanobrevibacter gottschalkii; identical to SEQ ID NO: 11186

SEQ ID NO: 71419 - protein, 374 aa, Methanobrevibacter gottschalkii; identical to SEQ ID NO: 11190

SEQ ID NO: 71420 - protein, 39 aa, Methanobrevibacter gottschalkii; identical to SEQ ID NO: 11196

SEQ ID NO: 71421 - protein, 139 aa, Methanobrevibacter gottschalkii; identical to SEQ ID NO: 11199

SEQ ID NO: 71422 - protein, 76 aa, Methanobrevibacter gottschalkii; identical to SEQ ID NO: 11203

SEQ ID NO: 71423 - protein, 463 aa, Methanobrevibacter gottschalkii; identical to SEQ ID NO: 11205

SEQ ID NO: 71424 - protein, 135 aa, Methanobrevibacter gottschalkii; identical to SEQ ID NO: 11209

SEQ ID NO: 71425 - protein, 207 aa, Methanobrevibacter gottschalkii; identical to SEQ ID NO: 11214

SEQ ID NO: 71426 - protein, 104 aa, Methanobrevibacter gottschalkii; identical to SEQ ID NO: 11215

SEQ ID NO: 71427 - protein, 78 aa, Methanobrevibacter gottschalkii; identical to SEQ ID NO: 11216

SEQ ID NO: 71428 - protein, 243 aa, Methanobrevibacter gottschalkii; identical to SEQ ID NO: 11217

SEQ ID NO: 71429 - protein, 274 aa, Methanobrevibacter gottschalkii; identical to SEQ ID NO: 11218

SEQ ID NO: 71430 - protein, 210 aa, Methanobrevibacter gottschalkii; identical to SEQ ID NO: 11219

SEQ ID NO: 71431 - protein, 71 aa, Methanobrevibacter gottschalkii; identical to SEQ ID NO: 11222

SEQ ID NO: 71432 - protein, 211 aa, Methanobrevibacter gottschalkii; identical to SEQ ID NO: 11226

SEQ ID NO: 71433 - protein, 451 aa, Methanobrevibacter gottschalkii; identical to SEQ ID NO: 11227

SEQ ID NO: 71434 - protein, 135 aa, Methanobrevibacter gottschalkii; identical to SEQ ID NO: 11228

SEQ ID NO: 71435 - protein, 257 aa, Methanobrevibacter gottschalkii; identical to SEQ ID NO: 11229

SEQ ID NO: 71436 - protein, 147 aa, Methanobrevibacter gottschalkii; identical to SEQ ID NO: 11230

SEQ ID NO: 71437 - protein, 288 aa, Methanobrevibacter gottschalkii; identical to SEQ ID NO: 11232

SEQ ID NO: 71438 - protein, 142 aa, Methanobrevibacter gottschalkii; identical to SEQ ID NO: 11233

SEQ ID NO: 71439 - protein, 267 aa, Methanobrevibacter gottschalkii; identical to SEQ ID NO: 11234

SEQ ID NO: 71440 - protein, 127 aa, Methanobrevibacter gottschalkii; identical to SEQ ID NO: 11238

SEQ ID NO: 71441 - protein, 343 aa, Methanobrevibacter gottschalkii; identical to SEQ ID NO: 11242

SEQ ID NO: 71442 - protein, 236 aa, Methanobrevibacter gottschalkii; identical to SEQ ID NO: 11247

SEQ ID NO: 71443 - protein, 224 aa, Methanobrevibacter gottschalkii; identical to SEQ ID NO: 11248

SEQ ID NO: 71444 - protein, 357 aa, Methanobrevibacter gottschalkii; identical to SEQ ID NO: 11252

SEQ ID NO: 71445 - protein, 426 aa, Methanobrevibacter gottschalkii; identical to SEQ ID NO: 11257

SEQ ID NO: 71446 - protein, 395 aa, Methanobrevibacter gottschalkii; identical to SEQ ID NO: 11258

SEQ ID NO: 71447 - protein, 217 aa, Methanobrevibacter gottschalkii; identical to SEQ ID NO: 11259

SEQ ID NO: 71448 - protein, 411 aa, Methanobrevibacter gottschalkii; identical to SEQ ID NO: 11261

SEQ ID NO: 71449 - protein, 360 aa, Methanobrevibacter gottschalkii; identical to SEQ ID NO: 11268

SEQ ID NO: 71450 - protein, 143 aa, Methanobrevibacter gottschalkii; identical to SEQ ID NO: 11272

SEQ ID NO: 71451 - protein, 243 aa, Methanobrevibacter gottschalkii; identical to SEQ ID NO: 11273

SEQ ID NO: 71452 - protein, 342 aa, Methanobrevibacter gottschalkii; identical to SEQ ID NO: 11274

SEQ ID NO: 71453 - protein, 131 aa, Methanobrevibacter gottschalkii; identical to SEQ ID NO: 11276

SEQ ID NO: 71454 - protein, 165 aa, Methanobrevibacter gottschalkii; identical to SEQ ID NO: 11277

SEQ ID NO: 71455 - protein, 238 aa, Methanobrevibacter gottschalkii; identical to SEQ ID NO: 11283

SEQ ID NO: 71456 - protein, 189 aa, Methanobrevibacter gottschalkii; identical to SEQ ID NO: 11290

SEQ ID NO: 71457 - protein, 194 aa, Methanobrevibacter gottschalkii; identical to SEQ ID NO: 11293

SEQ ID NO: 71458 - protein, 209 aa, Methanobrevibacter gottschalkii; identical to SEQ ID NO: 11299

SEQ ID NO: 71459 - protein, 908 aa, Methanobrevibacter gottschalkii; identical to SEQ ID NO: 11301

SEQ ID NO: 71460 - protein, 337 aa, Methanobrevibacter gottschalkii; identical to SEQ ID NO: 11305

SEQ ID NO: 71461 - protein, 1348 aa, Methanobrevibacter gottschalkii; identical to SEQ ID NO: 11311

SEQ ID NO: 71462 - protein, 262 aa, Methanobrevibacter gottschalkii; identical to SEQ ID NO: 11312

SEQ ID NO: 71463 - protein, 168 aa, Methanobrevibacter gottschalkii; identical to SEQ ID NO: 11317

SEQ ID NO: 71464 - protein, 352 aa, Methanobrevibacter gottschalkii; identical to SEQ ID NO: 11322

SEQ ID NO: 71465 - protein, 172 aa, Methanobrevibacter gottschalkii; identical to SEQ ID NO: 11323

SEQ ID NO: 71466 - protein, 296 aa, Methanobrevibacter gottschalkii; identical to SEQ ID NO: 11324

SEQ ID NO: 71467 - protein, 101 aa, Methanobrevibacter gottschalkii; identical to SEQ ID NO: 11326

SEQ ID NO: 71468 - protein, 112 aa, Methanobrevibacter gottschalkii; identical to SEQ ID NO: 11328

SEQ ID NO: 71469 - protein, 363 aa, Methanobrevibacter gottschalkii; identical to SEQ ID NO: 11329

SEQ ID NO: 71470 - protein, 895 aa, Methanobrevibacter gottschalkii; identical to SEQ ID NO: 11331

SEQ ID NO: 71471 - protein, 400 aa, Methanobrevibacter gottschalkii; identical to SEQ ID NO: 11335

SEQ ID NO: 71472 - protein, 128 aa, Methanobrevibacter gottschalkii; identical to SEQ ID NO: 11338

SEQ ID NO: 71473 - protein, 356 aa, Methanobrevibacter gottschalkii; identical to SEQ ID NO: 11341

SEQ ID NO: 71474 - protein, 272 aa, Methanobrevibacter gottschalkii; identical to SEQ ID NO: 11342

SEQ ID NO: 71475 - protein, 216 aa, Methanobrevibacter gottschalkii; identical to SEQ ID NO: 11343

SEQ ID NO: 71476 - protein, 227 aa, Methanobrevibacter gottschalkii; identical to SEQ ID NO: 11344

SEQ ID NO: 71477 - protein, 240 aa, Methanobrevibacter gottschalkii; identical to SEQ ID NO: 11346

SEQ ID NO: 71478 - protein, 90 aa, Methanobrevibacter gottschalkii; identical to SEQ ID NO: 11347

SEQ ID NO: 71479 - protein, 565 aa, Methanobrevibacter gottschalkii; identical to SEQ ID NO: 11350

SEQ ID NO: 71480 - protein, 284 aa, Methanobrevibacter gottschalkii; identical to SEQ ID NO: 11351

SEQ ID NO: 71481 - protein, 461 aa, Methanobrevibacter gottschalkii; identical to SEQ ID NO: 11355

SEQ ID NO: 71482 - protein, 216 aa, Methanobrevibacter gottschalkii; identical to SEQ ID NO: 11357

SEQ ID NO: 71483 - protein, 159 aa, Methanobrevibacter gottschalkii; identical to SEQ ID NO: 11358

SEQ ID NO: 71484 - protein, 54 aa, Methanobrevibacter gottschalkii; identical to SEQ ID NO: 11360

SEQ ID NO: 71485 - protein, 856 aa, Methanobrevibacter gottschalkii; identical to SEQ ID NO: 11363

SEQ ID NO: 71486 - protein, 145 aa, Methanobrevibacter gottschalkii; identical to SEQ ID NO: 11365

SEQ ID NO: 71487 - protein, 288 aa, Methanobrevibacter gottschalkii; identical to SEQ ID NO: 11366

SEQ ID NO: 71488 - protein, 177 aa, Methanobrevibacter gottschalkii; identical to SEQ ID NO: 11367

SEQ ID NO: 71489 - protein, 641 aa, Methanobrevibacter gottschalkii; identical to SEQ ID NO: 11368

SEQ ID NO: 71490 - protein, 256 aa, Methanobrevibacter gottschalkii; identical to SEQ ID NO: 11371

SEQ ID NO: 71491 - protein, 369 aa, Methanobrevibacter gottschalkii; identical to SEQ ID NO: 11372

SEQ ID NO: 71492 - protein, 172 aa, Methanobrevibacter gottschalkii; identical to SEQ ID NO: 11385

SEQ ID NO: 71493 - protein, 809 aa, Methanobrevibacter gottschalkii; identical to SEQ ID NO: 11388

SEQ ID NO: 71494 - protein, 96 aa, Methanobrevibacter gottschalkii; identical to SEQ ID NO: 11405

SEQ ID NO: 71495 - protein, 310 aa, Methanobrevibacter gottschalkii; identical to SEQ ID NO: 11410

SEQ ID NO: 71496 - protein, 260 aa, Methanobrevibacter gottschalkii; identical to SEQ ID NO: 11421

SEQ ID NO: 71497 - protein, 332 aa, Methanobrevibacter gottschalkii; identical to SEQ ID NO: 11426

SEQ ID NO: 71498 - protein, 71 aa, Methanobrevibacter gottschalkii; identical to SEQ ID NO: 11428

SEQ ID NO: 71499 - protein, 281 aa, Methanobrevibacter gottschalkii; identical to SEQ ID NO: 11431

SEQ ID NO: 71500 - protein, 525 aa, Methanobrevibacter gottschalkii; identical to SEQ ID NO: 11432

SEQ ID NO: 71501 - protein, 524 aa, Methanobrevibacter gottschalkii; identical to SEQ ID NO: 11433

SEQ ID NO: 71502 - protein, 514 aa, Methanobrevibacter gottschalkii; identical to SEQ ID NO: 11434

SEQ ID NO: 71503 - protein, 312 aa, Methanobrevibacter gottschalkii; identical to SEQ ID NO: 11447

SEQ ID NO: 71504 - protein, 567 aa, Methanobrevibacter gottschalkii; identical to SEQ ID NO: 11449

SEQ ID NO: 71505 - protein, 622 aa, Methanobrevibacter gottschalkii; identical to SEQ ID NO: 11452

SEQ ID NO: 71506 - protein, 355 aa, Methanobrevibacter gottschalkii; identical to SEQ ID NO: 11457

SEQ ID NO: 71507 - protein, 374 aa, Methanobrevibacter gottschalkii; identical to SEQ ID NO: 11458

SEQ ID NO: 71508 - protein, 533 aa, Methanobrevibacter gottschalkii; identical to SEQ ID NO: 11463

SEQ ID NO: 71509 - protein, 208 aa, Methanobrevibacter gottschalkii; identical to SEQ ID NO: 11468

SEQ ID NO: 71510 - protein, 136 aa, Methanobrevibacter gottschalkii; identical to SEQ ID NO: 11469

SEQ ID NO: 71511 - protein, 279 aa, Methanobrevibacter gottschalkii; identical to SEQ ID NO: 11470

SEQ ID NO: 71512 - protein, 231 aa, Methanobrevibacter gottschalkii; identical to SEQ ID NO: 11474

SEQ ID NO: 71513 - protein, 389 aa, Methanobrevibacter gottschalkii; identical to SEQ ID NO: 11475

SEQ ID NO: 71514 - protein, 239 aa, Methanobrevibacter gottschalkii; identical to SEQ ID NO: 11476

SEQ ID NO: 71515 - protein, 75 aa, Methanobrevibacter gottschalkii; identical to SEQ ID NO: 11481

SEQ ID NO: 71516 - protein, 378 aa, Methanobrevibacter gottschalkii; identical to SEQ ID NO: 11482

SEQ ID NO: 71517 - protein, 411 aa, Methanobrevibacter gottschalkii; identical to SEQ ID NO: 11485

SEQ ID NO: 71518 - protein, 310 aa, Methanobrevibacter gottschalkii; identical to SEQ ID NO: 11494

SEQ ID NO: 71519 - protein, 79 aa, Methanobrevibacter gottschalkii; identical to SEQ ID NO: 11495

SEQ ID NO: 71520 - protein, 68 aa, Methanobrevibacter gottschalkii; identical to SEQ ID NO: 11496

SEQ ID NO: 71521 - protein, 238 aa, Methanobrevibacter gottschalkii; identical to SEQ ID NO: 11497

SEQ ID NO: 71522 - protein, 109 aa, Methanobrevibacter gottschalkii; identical to SEQ ID NO: 11498

SEQ ID NO: 71523 - protein, 271 aa, Methanobrevibacter gottschalkii; identical to SEQ ID NO: 11499

SEQ ID NO: 71524 - protein, 233 aa, Methanobrevibacter gottschalkii; identical to SEQ ID NO: 11500

SEQ ID NO: 71525 - protein, 292 aa, Methanobrevibacter gottschalkii; identical to SEQ ID NO: 11501

SEQ ID NO: 71526 - protein, 443 aa, Methanobrevibacter gottschalkii; identical to SEQ ID NO: 11506

SEQ ID NO: 71527 - protein, 390 aa, Methanobrevibacter gottschalkii; identical to SEQ ID NO: 11511

SEQ ID NO: 71528 - protein, 439 aa, Methanobrevibacter gottschalkii; identical to SEQ ID NO: 11513

SEQ ID NO: 71529 - protein, 314 aa, Methanobrevibacter gottschalkii; identical to SEQ ID NO: 11514

SEQ ID NO: 71530 - protein, 388 aa, Methanobrevibacter gottschalkii; identical to SEQ ID NO: 11518

SEQ ID NO: 71531 - protein, 789 aa, Methanobrevibacter gottschalkii; identical to SEQ ID NO: 11528

SEQ ID NO: 71532 - protein, 340 aa, Methanobrevibacter gottschalkii; identical to SEQ ID NO: 11530

SEQ ID NO: 71533 - protein, 182 aa, Methanobrevibacter gottschalkii; identical to SEQ ID NO: 11536

SEQ ID NO: 71534 - protein, 241 aa, Methanobrevibacter gottschalkii; identical to SEQ ID NO: 11537

SEQ ID NO: 71535 - protein, 198 aa, Methanobrevibacter gottschalkii; identical to SEQ ID NO: 11542

SEQ ID NO: 71536 - protein, 492 aa, Methanobrevibacter gottschalkii; identical to SEQ ID NO: 11544

SEQ ID NO: 71537 - protein, 332 aa, Methanobrevibacter gottschalkii; identical to SEQ ID NO: 11549

SEQ ID NO: 71538 - protein, 148 aa, Methanobrevibacter gottschalkii; identical to SEQ ID NO: 11551

SEQ ID NO: 71539 - protein, 163 aa, Methanobrevibacter gottschalkii; identical to SEQ ID NO: 11552

SEQ ID NO: 71540 - protein, 83 aa, Methanobrevibacter gottschalkii; identical to SEQ ID NO: 11554

SEQ ID NO: 71541 - protein, 158 aa, Methanobrevibacter gottschalkii; identical to SEQ ID NO: 11555

SEQ ID NO: 71542 - protein, 93 aa, Methanobrevibacter gottschalkii; identical to SEQ ID NO: 11556

SEQ ID NO: 71543 - protein, 111 aa, Methanobrevibacter gottschalkii; identical to SEQ ID NO: 11557

SEQ ID NO: 71544 - protein, 484 aa, Methanobrevibacter gottschalkii; identical to SEQ ID NO: 11558

SEQ ID NO: 71545 - protein, 128 aa, Methanobrevibacter gottschalkii; identical to SEQ ID NO: 11559

SEQ ID NO: 71546 - protein, 77 aa, Methanobrevibacter gottschalkii; identical to SEQ ID NO: 11560

SEQ ID NO: 71547 - protein, 140 aa, Methanobrevibacter gottschalkii; identical to SEQ ID NO: 11561

SEQ ID NO: 71548 - protein, 88 aa, Methanobrevibacter gottschalkii; identical to SEQ ID NO: 11562

SEQ ID NO: 71549 - protein, 104 aa, Methanobrevibacter gottschalkii; identical to SEQ ID NO: 11563

SEQ ID NO: 71550 - protein, 321 aa, Methanobrevibacter gottschalkii; identical to SEQ ID NO: 11564

SEQ ID NO: 71551 - protein, 234 aa, Methanobrevibacter gottschalkii; identical to SEQ ID NO: 11565

SEQ ID NO: 71552 - protein, 377 aa, Methanobrevibacter gottschalkii; identical to SEQ ID NO: 11572

SEQ ID NO: 71553 - protein, 353 aa, Methanobrevibacter gottschalkii; identical to SEQ ID NO: 11574

SEQ ID NO: 71554 - protein, 477 aa, Methanobrevibacter gottschalkii; identical to SEQ ID NO: 11575

SEQ ID NO: 71555 - protein, 219 aa, Methanobrevibacter gottschalkii; identical to SEQ ID NO: 11576

SEQ ID NO: 71556 - protein, 268 aa, Methanobrevibacter gottschalkii; identical to SEQ ID NO: 11581

SEQ ID NO: 71557 - protein, 255 aa, Methanobrevibacter gottschalkii; identical to SEQ ID NO: 11583

SEQ ID NO: 71558 - protein, 474 aa, Methanobrevibacter gottschalkii; identical to SEQ ID NO: 11584

SEQ ID NO: 71559 - protein, 166 aa, Methanobrevibacter gottschalkii; identical to SEQ ID NO: 11585

SEQ ID NO: 71560 - protein, 1162 aa, Methanobrevibacter gottschalkii; identical to SEQ ID NO: 11594

SEQ ID NO: 71561 - protein, 1354 aa, Methanobrevibacter gottschalkii; identical to SEQ ID NO: 11595

SEQ ID NO: 71562 - protein, 1604 aa, Methanobrevibacter gottschalkii; identical to SEQ ID NO: 11596

SEQ ID NO: 71563 - protein, 280 aa, Methanobrevibacter gottschalkii; identical to SEQ ID NO: 11597

SEQ ID NO: 71564 - protein, 176 aa, Methanobrevibacter gottschalkii; identical to SEQ ID NO: 11599

SEQ ID NO: 71565 - protein, 136 aa, Methanobrevibacter gottschalkii; identical to SEQ ID NO: 11600

SEQ ID NO: 71566 - protein, 189 aa, Methanobrevibacter gottschalkii; identical to SEQ ID NO: 11604

SEQ ID NO: 71567 - protein, 404 aa, Methanobrevibacter gottschalkii; identical to SEQ ID NO: 11605

SEQ ID NO: 71568 - protein, 175 aa, Methanobrevibacter gottschalkii; identical to SEQ ID NO: 11606

SEQ ID NO: 71569 - protein, 133 aa, Methanobrevibacter gottschalkii; identical to SEQ ID NO: 11622

SEQ ID NO: 71570 - protein, 258 aa, Methanobrevibacter gottschalkii; identical to SEQ ID NO: 11623

SEQ ID NO: 71571 - protein, 830 aa, Methanobrevibacter gottschalkii; identical to SEQ ID NO: 11626

SEQ ID NO: 71572 - protein, 145 aa, Methanobrevibacter gottschalkii; identical to SEQ ID NO: 11631

SEQ ID NO: 71573 - protein, 133 aa, Methanobrevibacter gottschalkii; identical to SEQ ID NO: 11635

SEQ ID NO: 71574 - protein, 161 aa, Methanobrevibacter gottschalkii; identical to SEQ ID NO: 11636

SEQ ID NO: 71575 - protein, 301 aa, Methanobrevibacter gottschalkii; identical to SEQ ID NO: 11637

SEQ ID NO: 71576 - protein, 135 aa, Methanobrevibacter gottschalkii; identical to SEQ ID NO: 11638

SEQ ID NO: 71577 - protein, 71 aa, Methanobrevibacter gottschalkii; identical to SEQ ID NO: 11639

SEQ ID NO: 71578 - protein, 706 aa, Methanobrevibacter gottschalkii; identical to SEQ ID NO: 11643

SEQ ID NO: 71579 - protein, 283 aa, Methanobrevibacter gottschalkii; identical to SEQ ID NO: 11644

SEQ ID NO: 71580 - protein, 936 aa, Methanobrevibacter gottschalkii; identical to SEQ ID NO: 11646

SEQ ID NO: 71581 - protein, 109 aa, Methanobrevibacter gottschalkii; identical to SEQ ID NO: 11647

SEQ ID NO: 71582 - protein, 318 aa, Methanobrevibacter gottschalkii; identical to SEQ ID NO: 11652

SEQ ID NO: 71583 - protein, 481 aa, Methanobrevibacter gottschalkii; identical to SEQ ID NO: 11654

SEQ ID NO: 71584 - protein, 461 aa, Methanobrevibacter gottschalkii; identical to SEQ ID NO: 11663

SEQ ID NO: 71585 - protein, 277 aa, Methanobrevibacter gottschalkii; identical to SEQ ID NO: 11671

SEQ ID NO: 71586 - protein, 518 aa, Methanobrevibacter gottschalkii; identical to SEQ ID NO: 11677

SEQ ID NO: 71587 - protein, 194 aa, Methanobrevibacter gottschalkii; identical to SEQ ID NO: 11678

SEQ ID NO: 71588 - protein, 112 aa, Methanobrevibacter gottschalkii; identical to SEQ ID NO: 11679

SEQ ID NO: 71589 - protein, 213 aa, Methanobrevibacter gottschalkii; identical to SEQ ID NO: 11680

SEQ ID NO: 71590 - protein, 227 aa, Methanobrevibacter gottschalkii; identical to SEQ ID NO: 11681

SEQ ID NO: 71591 - protein, 171 aa, Methanobrevibacter gottschalkii; identical to SEQ ID NO: 11682

SEQ ID NO: 71592 - protein, 976 aa, Methanobrevibacter gottschalkii; identical to SEQ ID NO: 11683

SEQ ID NO: 71593 - protein, 207 aa, Methanobrevibacter gottschalkii; identical to SEQ ID NO: 11684

SEQ ID NO: 71594 - protein, 160 aa, Methanobrevibacter gottschalkii; identical to SEQ ID NO: 11685

SEQ ID NO: 71595 - protein, 353 aa, Methanobrevibacter gottschalkii; identical to SEQ ID NO: 11691

SEQ ID NO: 71596 - protein, 300 aa, Methanobrevibacter gottschalkii; identical to SEQ ID NO: 11692

SEQ ID NO: 71597 - protein, 110 aa, Methanobrevibacter gottschalkii; identical to SEQ ID NO: 11701

SEQ ID NO: 71598 - protein, 277 aa, Methanobrevibacter gottschalkii; identical to SEQ ID NO: 11703

SEQ ID NO: 71599 - protein, 454 aa, Methanobrevibacter gottschalkii; identical to SEQ ID NO: 11705

SEQ ID NO: 71600 - protein, 141 aa, Methanobrevibacter gottschalkii; identical to SEQ ID NO: 11709

SEQ ID NO: 71601 - protein, 370 aa, Methanobrevibacter gottschalkii; identical to SEQ ID NO: 11716

SEQ ID NO: 71602 - protein, 280 aa, Methanobrevibacter gottschalkii; identical to SEQ ID NO: 11718

SEQ ID NO: 71603 - protein, 513 aa, Methanobrevibacter gottschalkii; identical to SEQ ID NO: 11723

SEQ ID NO: 71604 - protein, 401 aa, Methanobrevibacter gottschalkii; identical to SEQ ID NO: 11724

SEQ ID NO: 71605 - protein, 384 aa, Methanobrevibacter gottschalkii; identical to SEQ ID NO: 11725

SEQ ID NO: 71606 - protein, 348 aa, Methanobrevibacter gottschalkii; identical to SEQ ID NO: 11726

SEQ ID NO: 71607 - protein, 135 aa, Methanobrevibacter gottschalkii; identical to SEQ ID NO: 11727

SEQ ID NO: 71608 - protein, 264 aa, Methanobrevibacter gottschalkii; identical to SEQ ID NO: 11729

SEQ ID NO: 71609 - protein, 547 aa, Methanobrevibacter gottschalkii; identical to SEQ ID NO: 11734

SEQ ID NO: 71610 - protein, 434 aa, Methanobrevibacter gottschalkii; identical to SEQ ID NO: 11735

SEQ ID NO: 71611 - protein, 164 aa, Methanobrevibacter gottschalkii; identical to SEQ ID NO: 11738

SEQ ID NO: 71612 - protein, 344 aa, Methanobrevibacter gottschalkii; identical to SEQ ID NO: 11742

SEQ ID NO: 71613 - protein, 58 aa, Methanobrevibacter gottschalkii; identical to SEQ ID NO: 11745

SEQ ID NO: 71614 - protein, 166 aa, Methanobrevibacter gottschalkii; identical to SEQ ID NO: 11748

SEQ ID NO: 71615 - protein, 200 aa, Methanobrevibacter gottschalkii; identical to SEQ ID NO: 11750

SEQ ID NO: 71616 - protein, 423 aa, Methanobrevibacter gottschalkii; identical to SEQ ID NO: 11751

SEQ ID NO: 71617 - protein, 288 aa, Methanobrevibacter gottschalkii; identical to SEQ ID NO: 11752

SEQ ID NO: 71618 - protein, 312 aa, Methanobrevibacter gottschalkii; identical to SEQ ID NO: 11753

SEQ ID NO: 71619 - protein, 141 aa, Methanobrevibacter gottschalkii; identical to SEQ ID NO: 11757

SEQ ID NO: 71620 - protein, 565 aa, Methanobrevibacter gottschalkii; identical to SEQ ID NO: 11763

SEQ ID NO: 71621 - protein, 33 aa, Methanobrevibacter gottschalkii; identical to SEQ ID NO: 11766

SEQ ID NO: 71622 - protein, 414 aa, Methanobrevibacter gottschalkii; identical to SEQ ID NO: 11769

SEQ ID NO: 71623 - protein, 149 aa, Methanobrevibacter gottschalkii; identical to SEQ ID NO: 11773

SEQ ID NO: 71624 - protein, 288 aa, Methanobrevibacter gottschalkii; identical to SEQ ID NO: 11775

SEQ ID NO: 71625 - protein, 335 aa, Methanobrevibacter gottschalkii; identical to SEQ ID NO: 11777

SEQ ID NO: 71626 - protein, 105 aa, Methanobrevibacter gottschalkii; identical to SEQ ID NO: 11778

SEQ ID NO: 71627 - protein, 92 aa, Methanobrevibacter gottschalkii; identical to SEQ ID NO: 11779

SEQ ID NO: 71628 - protein, 359 aa, Methanobrevibacter gottschalkii; identical to SEQ ID NO: 11780

SEQ ID NO: 71629 - protein, 319 aa, Methanobrevibacter gottschalkii; identical to SEQ ID NO: 11781

SEQ ID NO: 71630 - protein, 319 aa, Methanobrevibacter gottschalkii; identical to SEQ ID NO: 11782

SEQ ID NO: 71631 - protein, 285 aa, Methanobrevibacter gottschalkii; identical to SEQ ID NO: 11783

SEQ ID NO: 71632 - protein, 467 aa, Methanobrevibacter gottschalkii; identical to SEQ ID NO: 11784

SEQ ID NO: 71633 - protein, 301 aa, Methanobrevibacter gottschalkii; identical to SEQ ID NO: 11787

SEQ ID NO: 71634 - protein, 376 aa, Methanobrevibacter gottschalkii; identical to SEQ ID NO: 11798

SEQ ID NO: 71635 - protein, 234 aa, Methanobrevibacter gottschalkii; identical to SEQ ID NO: 11801

SEQ ID NO: 71636 - protein, 320 aa, Methanobrevibacter gottschalkii; identical to SEQ ID NO: 11803

SEQ ID NO: 71637 - protein, 103 aa, Methanobrevibacter gottschalkii; identical to SEQ ID NO: 11804

SEQ ID NO: 71638 - protein, 53 aa, Methanobrevibacter gottschalkii; identical to SEQ ID NO: 11813

SEQ ID NO: 71639 - protein, 304 aa, Methanobrevibacter gottschalkii; identical to SEQ ID NO: 11815

SEQ ID NO: 71640 - protein, 458 aa, Methanobrevibacter gottschalkii; identical to SEQ ID NO: 11817

SEQ ID NO: 71641 - protein, 267 aa, Methanobrevibacter gottschalkii; identical to SEQ ID NO: 11839

SEQ ID NO: 71642 - protein, 365 aa, Methanobrevibacter gottschalkii; identical to SEQ ID NO: 11845

SEQ ID NO: 71643 - protein, 76 aa, Methanobrevibacter gottschalkii; identical to SEQ ID NO: 11846

SEQ ID NO: 71644 - protein, 189 aa, Methanobrevibacter gottschalkii; identical to SEQ ID NO: 11847

SEQ ID NO: 71645 - protein, 560 aa, Methanobrevibacter gottschalkii; identical to SEQ ID NO: 11853

SEQ ID NO: 71646 - protein, 181 aa, Methanobrevibacter gottschalkii; identical to SEQ ID NO: 11865

SEQ ID NO: 71647 - protein, 892 aa, Methanobrevibacter gottschalkii; identical to SEQ ID NO: 11869

SEQ ID NO: 71648 - protein, 148 aa, Methanobrevibacter gottschalkii; identical to SEQ ID NO: 11874

SEQ ID NO: 71649 - protein, 193 aa, Methanobrevibacter gottschalkii; identical to SEQ ID NO: 11879

SEQ ID NO: 71650 - protein, 58 aa, Methanobrevibacter gottschalkii; identical to SEQ ID NO: 11887

SEQ ID NO: 71651 - protein, 313 aa, Methanobrevibacter gottschalkii; identical to SEQ ID NO: 11890

SEQ ID NO: 71652 - protein, 224 aa, Methanobrevibacter gottschalkii; identical to SEQ ID NO: 11899

SEQ ID NO: 71653 - protein, 2074 aa, Methanobrevibacter gottschalkii; identical to SEQ ID NO: 11902

SEQ ID NO: 71654 - protein, 1903 aa, Methanobrevibacter gottschalkii; identical to SEQ ID NO: 11903

SEQ ID NO: 71655 - protein, 1753 aa, Methanobrevibacter gottschalkii; identical to SEQ ID NO: 11904

SEQ ID NO: 71656 - protein, 163 aa, Methanobrevibacter gottschalkii; identical to SEQ ID NO: 11905

SEQ ID NO: 71657 - protein, 360 aa, Methanobrevibacter gottschalkii; identical to SEQ ID NO: 11908

SEQ ID NO: 71658 - protein, 579 aa, Methanobrevibacter gottschalkii; identical to SEQ ID NO: 11909

SEQ ID NO: 71659 - protein, 513 aa, Methanobrevibacter gottschalkii; identical to SEQ ID NO: 11910

SEQ ID NO: 71660 - protein, 484 aa, Methanobrevibacter gottschalkii; identical to SEQ ID NO: 11912

SEQ ID NO: 71661 - protein, 73 aa, Methanobrevibacter gottschalkii; identical to SEQ ID NO: 11913

SEQ ID NO: 71662 - protein, 243 aa, Methanobrevibacter gottschalkii; identical to SEQ ID NO: 11914

SEQ ID NO: 71663 - protein, 144 aa, Methanobrevibacter gottschalkii; identical to SEQ ID NO: 11915

SEQ ID NO: 71664 - protein, 208 aa, Methanobrevibacter gottschalkii; identical to SEQ ID NO: 11916

SEQ ID NO: 71665 - protein, 158 aa, Methanobrevibacter gottschalkii; identical to SEQ ID NO: 11917

SEQ ID NO: 71666 - protein, 185 aa, Methanobrevibacter gottschalkii; identical to SEQ ID NO: 11928

SEQ ID NO: 71667 - protein, 224 aa, Methanobrevibacter gottschalkii; identical to SEQ ID NO: 11931

SEQ ID NO: 71668 - protein, 216 aa, Methanobrevibacter gottschalkii; identical to SEQ ID NO: 11932

SEQ ID NO: 71669 - protein, 59 aa, Methanobrevibacter gottschalkii; identical to SEQ ID NO: 11935

SEQ ID NO: 71670 - protein, 106 aa, Methanobrevibacter gottschalkii; identical to SEQ ID NO: 11937

SEQ ID NO: 71671 - protein, 69 aa, Methanobrevibacter gottschalkii; identical to SEQ ID NO: 11943

SEQ ID NO: 71672 - protein, 231 aa, Methanobrevibacter gottschalkii; identical to SEQ ID NO: 11944

SEQ ID NO: 71673 - protein, 132 aa, Methanobrevibacter gottschalkii; identical to SEQ ID NO: 11954

SEQ ID NO: 71674 - protein, 1490 aa, Methanobrevibacter gottschalkii; identical to SEQ ID NO: 11961

SEQ ID NO: 71675 - protein, 107 aa, Methanobrevibacter gottschalkii; identical to SEQ ID NO: 11962

SEQ ID NO: 71676 - protein, 110 aa, Methanobrevibacter gottschalkii; identical to SEQ ID NO: 11963

SEQ ID NO: 71677 - protein, 320 aa, Methanobrevibacter gottschalkii; identical to SEQ ID NO: 11967

SEQ ID NO: 71678 - protein, 302 aa, Methanobrevibacter gottschalkii; identical to SEQ ID NO: 11973

SEQ ID NO: 71679 - protein, 628 aa, Methanobrevibacter gottschalkii; identical to SEQ ID NO: 11976

SEQ ID NO: 71680 - protein, 189 aa, Methanobrevibacter gottschalkii; identical to SEQ ID NO: 11978

SEQ ID NO: 71681 - protein, 59 aa, Methanobrevibacter gottschalkii; identical to SEQ ID NO: 11980

SEQ ID NO: 71682 - protein, 1018 aa, Methanobrevibacter gottschalkii; identical to SEQ ID NO: 11987

SEQ ID NO: 71683 - protein, 369 aa, Methanobrevibacter gottschalkii; identical to SEQ ID NO: 11991

SEQ ID NO: 71684 - protein, 232 aa, Methanobrevibacter gottschalkii; identical to SEQ ID NO: 11992

SEQ ID NO: 71685 - protein, 189 aa, Methanobrevibacter gottschalkii; identical to SEQ ID NO: 11994

SEQ ID NO: 71686 - protein, 592 aa, Methanobrevibacter gottschalkii; identical to SEQ ID NO: 12000

SEQ ID NO: 71687 - protein, 220 aa, Methanobrevibacter gottschalkii; identical to SEQ ID NO: 12002

SEQ ID NO: 71688 - protein, 89 aa, Methanobrevibacter gottschalkii; identical to SEQ ID NO: 12004

SEQ ID NO: 71689 - protein, 242 aa, Methanobrevibacter gottschalkii; identical to SEQ ID NO: 12005

SEQ ID NO: 71690 - protein, 304 aa, Methanobrevibacter gottschalkii; identical to SEQ ID NO: 12007

SEQ ID NO: 71691 - protein, 472 aa, Methanobrevibacter gottschalkii; identical to SEQ ID NO: 12008

SEQ ID NO: 71692 - protein, 417 aa, Methanobrevibacter gottschalkii; identical to SEQ ID NO: 12010

SEQ ID NO: 71693 - protein, 165 aa, Methanobrevibacter gottschalkii; identical to SEQ ID NO: 12012

SEQ ID NO: 71694 - protein, 672 aa, Methanobrevibacter gottschalkii; identical to SEQ ID NO: 12013

SEQ ID NO: 71695 - protein, 280 aa, Methanobrevibacter gottschalkii; identical to SEQ ID NO: 12016

SEQ ID NO: 71696 - protein, 276 aa, Methanobrevibacter gottschalkii; identical to SEQ ID NO: 12017

SEQ ID NO: 71697 - protein, 101 aa, Methanobrevibacter gottschalkii; identical to SEQ ID NO: 12018

SEQ ID NO: 71698 - protein, 212 aa, Methanobrevibacter gottschalkii; identical to SEQ ID NO: 12019

SEQ ID NO: 71699 - protein, 424 aa, Methanobrevibacter gottschalkii; identical to SEQ ID NO: 12020

SEQ ID NO: 71700 - protein, 257 aa, Methanobrevibacter gottschalkii; identical to SEQ ID NO: 12021

SEQ ID NO: 71701 - protein, 299 aa, Methanobrevibacter gottschalkii; identical to SEQ ID NO: 12031

SEQ ID NO: 71702 - protein, 166 aa, Methanobrevibacter gottschalkii; identical to SEQ ID NO: 12035

SEQ ID NO: 71703 - protein, 534 aa, Methanobrevibacter gottschalkii; identical to SEQ ID NO: 12040

SEQ ID NO: 71704 - protein, 134 aa, Methanobrevibacter gottschalkii; identical to SEQ ID NO: 12041

SEQ ID NO: 71705 - protein, 160 aa, Methanobrevibacter gottschalkii; identical to SEQ ID NO: 12049

SEQ ID NO: 71706 - protein, 64 aa, Methanobrevibacter gottschalkii; identical to SEQ ID NO: 10252

SEQ ID NO: 71707 - DNA, 194 bp, Methanobrevibacter gottschalkii; identical to SEQ ID NO: 6652
  source 1..194: mol_type = genomic DNA

SEQ ID NO: 71708 - DNA, 915 bp, Methanobrevibacter gottschalkii; identical to SEQ ID NO: 6656
  source 1..915: mol_type = genomic DNA

SEQ ID NO: 71709 - DNA, 1476 bp, Methanobrevibacter gottschalkii; identical to SEQ ID NO: 6663
  source 1..1476: mol_type = genomic DNA

SEQ ID NO: 71710 - DNA, 279 bp, Methanobrevibacter gottschalkii; identical to SEQ ID NO: 6667
  source 1..279: mol_type = genomic DNA

SEQ ID NO: 71711 - DNA, 432 bp, Methanobrevibacter gottschalkii; identical to SEQ ID NO: 6668
  source 1..432: mol_type = genomic DNA

SEQ ID NO: 71712 - DNA, 876 bp, Methanobrevibacter gottschalkii; identical to SEQ ID NO: 6670
  source 1..876: mol_type = genomic DNA

SEQ ID NO: 71713 - DNA, 1611 bp, Methanobrevibacter gottschalkii; identical to SEQ ID NO: 6671
  source 1..1611: mol_type = genomic DNA

SEQ ID NO: 71714 - DNA, 114 bp, Methanobrevibacter gottschalkii; identical to SEQ ID NO: 6672
  source 1..114: mol_type = genomic DNA

SEQ ID NO: 71715 - DNA, 435 bp, Methanobrevibacter gottschalkii; identical to SEQ ID NO: 6674
  source 1..435: mol_type = genomic DNA

SEQ ID NO: 71716 - DNA, 1077 bp, Methanobrevibacter gottschalkii; identical to SEQ ID NO: 6675
  source 1..1077: mol_type = genomic DNA

SEQ ID NO: 71717 - DNA, 1014 bp, Methanobrevibacter gottschalkii; identical to SEQ ID NO: 6676
  source 1..1014: mol_type = genomic DNA

SEQ ID NO: 71718 - DNA, 804 bp, Methanobrevibacter gottschalkii; identical to SEQ ID NO: 6677
  source 1..804: mol_type = genomic DNA

SEQ ID NO: 71719 - DNA, 2061 bp, Methanobrevibacter gottschalkii; identical to SEQ ID NO: 6679
  source 1..2061: mol_type = genomic DNA

SEQ ID NO: 71720 - DNA, 1458 bp, Methanobrevibacter gottschalkii; identical to SEQ ID NO: 6680
  source 1..1458: mol_type = genomic DNA

SEQ ID NO: 71721 - DNA, 2865 bp, Methanobrevibacter gottschalkii; identical to SEQ ID NO: 6681
  source 1..2865: mol_type = genomic DNA

SEQ ID NO: 71722 - DNA, 4419 bp, Methanobrevibacter gottschalkii; identical to SEQ ID NO: 6682
  source 1..4419: mol_type = genomic DNA

SEQ ID NO: 71723 - DNA, 549 bp, Methanobrevibacter gottschalkii; identical to SEQ ID NO: 6683
  source 1..549: mol_type = genomic DNA

SEQ ID NO: 71724 - DNA, 1353 bp, Methanobrevibacter gottschalkii; identical to SEQ ID NO: 6684
  source 1..1353: mol_type = genomic DNA

SEQ ID NO: 71725 - DNA, 378 bp, Methanobrevibacter gottschalkii; identical to SEQ ID NO: 6691
  source 1..378: mol_type = genomic DNA

SEQ ID NO: 71726 - DNA, 804 bp, Methanobrevibacter gottschalkii; identical to SEQ ID NO: 6695
  source 1..804: mol_type = genomic DNA

SEQ ID NO: 71727 - DNA, 675 bp, Methanobrevibacter gottschalkii; identical to SEQ ID NO: 6696
  source 1..675: mol_type = genomic DNA

SEQ ID NO: 71728 - DNA, 1365 bp, Methanobrevibacter gottschalkii; identical to SEQ ID NO: 6702
  source 1..1365: mol_type = genomic DNA

SEQ ID NO: 71729 - DNA, 1836 bp, Methanobrevibacter gottschalkii; identical to SEQ ID NO: 6703
  source 1..1836: mol_type = genomic DNA

SEQ ID NO: 71730 - DNA, 591 bp, Methanobrevibacter gottschalkii; identical to SEQ ID NO: 6706
  source 1..591: mol_type = genomic DNA

SEQ ID NO: 71731 - DNA, 678 bp, Methanobrevibacter gottschalkii; identical to SEQ ID NO: 6708
  source 1..678: mol_type = genomic DNA

SEQ ID NO: 71732 - DNA, 864 bp, Methanobrevibacter gottschalkii; identical to SEQ ID NO: 6709
  source 1..864: mol_type = genomic DNA

SEQ ID NO: 71733 - DNA, 1071 bp, Methanobrevibacter gottschalkii; identical to SEQ ID NO: 6722
  source 1..1071: mol_type = genomic DNA

SEQ ID NO: 71734 - DNA, 1431 bp, Methanobrevibacter gottschalkii; identical to SEQ ID NO: 6723
  source 1..1431: mol_type = genomic DNA

SEQ ID NO: 71735 - DNA, 441 bp, Methanobrevibacter gottschalkii; identical to SEQ ID NO: 6724
  source 1..441: mol_type = genomic DNA

SEQ ID NO: 71736 - DNA, 1260 bp, Methanobrevibacter gottschalkii; identical to SEQ ID NO: 6725
  source 1..1260: mol_type = genomic DNA

SEQ ID NO: 71737 - DNA, 960 bp, Methanobrevibacter gottschalkii; identical to SEQ ID NO: 6729
  source 1..960: mol_type = genomic DNA

SEQ ID NO: 71738 - DNA, 141 bp, Methanobrevibacter gottschalkii; identical to SEQ ID NO: 6731
  source 1..141: mol_type = genomic DNA

SEQ ID NO: 71739 - DNA, 204 bp, Methanobrevibacter gottschalkii; identical to SEQ ID NO: 6733
  source 1..204: mol_type = genomic DNA

SEQ ID NO: 71740 - DNA, 753 bp, Methanobrevibacter gottschalkii; identical to SEQ ID NO: 6734
  source 1..753: mol_type = genomic DNA

SEQ ID NO: 71741 - DNA, 4041 bp, Methanobrevibacter gottschalkii; identical to SEQ ID NO: 6736
  source 1..4041: mol_type = genomic DNA

SEQ ID NO: 71742 - DNA, 801 bp, Methanobrevibacter gottschalkii; identical to SEQ ID NO: 6737
  source 1..801: mol_type = genomic DNA

SEQ ID NO: 71743 - DNA, 4248 bp, Methanobrevibacter gottschalkii; identical to SEQ ID NO: 6741
  source 1..4248: mol_type = genomic DNA

SEQ ID NO: 71744 - DNA, 1149 bp, Methanobrevibacter gottschalkii; identical to SEQ ID NO: 6742
  source 1..1149: mol_type = genomic DNA

SEQ ID NO: 71745 - DNA, 684 bp, Methanobrevibacter gottschalkii; identical to SEQ ID NO: 6743
  source 1..684: mol_type = genomic DNA

SEQ ID NO: 71746 - DNA, 192 bp, Methanobrevibacter gottschalkii; identical to SEQ ID NO: 6747
  source 1..192: mol_type = genomic DNA

SEQ ID NO: 71747 - DNA, 849 bp, Methanobrevibacter gottschalkii; identical to SEQ ID NO: 6749
  source 1..849: mol_type = genomic DNA

SEQ ID NO: 71748 - DNA, 204 bp, Methanobrevibacter gottschalkii; identical to SEQ ID NO: 6750
  source 1..204: mol_type = genomic DNA

SEQ ID NO: 71749 - DNA, 810 bp, Methanobrevibacter gottschalkii; identical to SEQ ID NO: 6752
  source 1..810: mol_type = genomic DNA

SEQ ID NO: 71750 - DNA, 1059 bp, Methanobrevibacter gottschalkii; identical to SEQ ID NO: 6753
  source 1..1059: mol_type = genomic DNA

SEQ ID NO: 71751 - DNA, 1032 bp, Methanobrevibacter gottschalkii; identical to SEQ ID NO: 6754
  source 1..1032: mol_type = genomic DNA

SEQ ID NO: 71752 - DNA, 888 bp, Methanobrevibacter gottschalkii; identical to SEQ ID NO: 6755
  source 1..888: mol_type = genomic DNA

SEQ ID NO: 71753 - DNA, 1455 bp, Methanobrevibacter gottschalkii; identical to SEQ ID NO: 6757
  source 1..1455: mol_type = genomic DNA

SEQ ID NO: 71754 - DNA, 744 bp, Methanobrevibacter gottschalkii; identical to SEQ ID NO: 6763
  source 1..744: mol_type = genomic DNA

SEQ ID NO: 71755 - DNA, 612 bp, Methanobrevibacter gottschalkii; identical to SEQ ID NO: 6765
  source 1..612: mol_type = genomic DNA

SEQ ID NO: 71756 - DNA, 810 bp, Methanobrevibacter gottschalkii; identical to SEQ ID NO: 6767
  source 1..810: mol_type = genomic DNA

SEQ ID NO: 71757 - DNA, 225 bp, Methanobrevibacter gottschalkii; identical to SEQ ID NO: 6768
  source 1..225: mol_type = genomic DNA

SEQ ID NO: 71758 - DNA, 2289 bp, Methanobrevibacter gottschalkii; identical to SEQ ID NO: 6769
  source 1..2289: mol_type = genomic DNA

SEQ ID NO: 71759 - DNA, 147 bp, Methanobrevibacter gottschalkii; identical to SEQ ID NO: 6770
  source 1..147: mol_type = genomic DNA

SEQ ID NO: 71760 - DNA, 234 bp, Methanobrevibacter gottschalkii; identical to SEQ ID NO: 6773
  source 1..234: mol_type = genomic DNA

SEQ ID NO: 71761 - DNA, 1743 bp, Methanobrevibacter gottschalkii; identical to SEQ ID NO: 6776
  source 1..1743: mol_type = genomic DNA

SEQ ID NO: 71762 - DNA, 1155 bp, Methanobrevibacter gottschalkii; identical to SEQ ID NO: 6778
  source 1..1155: mol_type = genomic DNA

SEQ ID NO: 71763 - DNA, 486 bp, Methanobrevibacter gottschalkii; identical to SEQ ID NO: 6780
  source 1..486: mol_type = genomic DNA

SEQ ID NO: 71764 - DNA, 2001 bp, Methanobrevibacter gottschalkii; identical to SEQ ID NO: 6781
  source 1..2001: mol_type = genomic DNA

SEQ ID NO: 71765 - DNA, 351 bp, Methanobrevibacter gottschalkii; identical to SEQ ID NO: 6783
  source 1..351: mol_type = genomic DNA

SEQ ID NO: 71766 - DNA, 330 bp, Methanobrevibacter gottschalkii; identical to SEQ ID NO: 6784
  source 1..330: mol_type = genomic DNA

SEQ ID NO: 71767 - DNA, 339 bp, Methanobrevibacter gottschalkii; identical to SEQ ID NO: 6785
  source 1..339: mol_type = genomic DNA

SEQ ID NO: 71768 - DNA, 510 bp, Methanobrevibacter gottschalkii; identical to SEQ ID NO: 6786
  source 1..510: mol_type = genomic DNA

SEQ ID NO: 71769 - DNA, 489 bp, Methanobrevibacter gottschalkii; identical to SEQ ID NO: 6791
  source 1..489: mol_type = genomic DNA

SEQ ID NO: 71770 - DNA, 897 bp, Methanobrevibacter gottschalkii; identical to SEQ ID NO: 6792
  source 1..897: mol_type = genomic DNA

SEQ ID NO: 71771 - DNA, 933 bp, Methanobrevibacter gottschalkii; identical to SEQ ID NO: 6794
  source 1..933: mol_type = genomic DNA

SEQ ID NO: 71772 - DNA, 681 bp, Methanobrevibacter gottschalkii; identical to SEQ ID NO: 6799
  source 1..681: mol_type = genomic DNA

SEQ ID NO: 71773 - DNA, 723 bp, Methanobrevibacter gottschalkii; identical to SEQ ID NO: 6803
  source 1..723: mol_type = genomic DNA

SEQ ID NO: 71774 - DNA, 582 bp, Methanobrevibacter gottschalkii; identical to SEQ ID NO: 6805
  source 1..582: mol_type = genomic DNA

SEQ ID NO: 71775 - DNA, 573 bp, Methanobrevibacter gottschalkii; identical to SEQ ID NO: 6806
  source 1..573: mol_type = genomic DNA

SEQ ID NO: 71776 - DNA, 948 bp, Methanobrevibacter gottschalkii; identical to SEQ ID NO: 6807
  source 1..948: mol_type = genomic DNA

SEQ ID NO: 71777 - DNA, 183 bp, Methanobrevibacter gottschalkii; identical to SEQ ID NO: 6808
  source 1..183: mol_type = genomic DNA

SEQ ID NO: 71778 - DNA, 927 bp, Methanobrevibacter gottschalkii; identical to SEQ ID NO: 6809
  source 1..927: mol_type = genomic DNA

SEQ ID NO: 71779 - DNA, 642 bp, Methanobrevibacter gottschalkii; identical to SEQ ID NO: 6811
  source 1..642: mol_type = genomic DNA

SEQ ID NO: 71780 - DNA, 1521 bp, Methanobrevibacter gottschalkii; identical to SEQ ID NO: 6822
  source 1..1521: mol_type = genomic DNA

SEQ ID NO: 71781 - DNA, 756 bp, Methanobrevibacter gottschalkii; identical to SEQ ID NO: 6825
  source 1..756: mol_type = genomic DNA

SEQ ID NO: 71782 - DNA, 693 bp, Methanobrevibacter gottschalkii; identical to SEQ ID NO: 6832
  source 1..693: mol_type = genomic DNA

SEQ ID NO: 71783 - DNA, 369 bp, Methanobrevibacter gottschalkii; identical to SEQ ID NO: 6838
  source 1..369: mol_type = genomic DNA

SEQ ID NO: 71784 - DNA, 408 bp, Methanobrevibacter gottschalkii; identical to SEQ ID NO: 6839
  source 1..408: mol_type = genomic DNA

SEQ ID NO: 71785 - DNA, 420 bp, Methanobrevibacter gottschalkii; identical to SEQ ID NO: 6843
  source 1..420: mol_type = genomic DNA

SEQ ID NO: 71786 - DNA, 936 bp, Methanobrevibacter gottschalkii; identical to SEQ ID NO: 6857
  source 1..936: mol_type = genomic DNA

SEQ ID NO: 71787 - DNA, 558 bp, Methanobrevibacter gottschalkii; identical to SEQ ID NO: 6859
  source 1..558: mol_type = genomic DNA

SEQ ID NO: 71788 - DNA, 147 bp, Methanobrevibacter gottschalkii; identical to SEQ ID NO: 6860
  source 1..147: mol_type = genomic DNA

SEQ ID NO: 71789 - DNA, 432 bp, Methanobrevibacter gottschalkii; identical to SEQ ID NO: 6862
  source 1..432: mol_type = genomic DNA

SEQ ID NO: 71790 - DNA, 750 bp, Methanobrevibacter gottschalkii; identical to SEQ ID NO: 6863
  source 1..750: mol_type = genomic DNA

SEQ ID NO: 71791 - DNA, 753 bp, Methanobrevibacter gottschalkii; identical to SEQ ID NO: 6865
  source 1..753: mol_type = genomic DNA

SEQ ID NO: 71792 - DNA, 390 bp, Methanobrevibacter gottschalkii; identical to SEQ ID NO: 6874
  source 1..390: mol_type = genomic DNA

SEQ ID NO: 71793 - DNA, 498 bp, Methanobrevibacter gottschalkii; identical to SEQ ID NO: 6875
  source 1..498: mol_type = genomic DNA

SEQ ID NO: 71794 - DNA, 249 bp, Methanobrevibacter gottschalkii; identical to SEQ ID NO: 6876
  source 1..249: mol_type = genomic DNA

SEQ ID NO: 71795 - DNA, 270 bp, Methanobrevibacter gottschalkii; identical to SEQ ID NO: 6877
  source 1..270: mol_type = genomic DNA

SEQ ID NO: 71796 - DNA, 261 bp, Methanobrevibacter gottschalkii; identical to SEQ ID NO: 6878
  source 1..261: mol_type = genomic DNA

SEQ ID NO: 71797 - DNA, 594 bp, Methanobrevibacter gottschalkii; identical to SEQ ID NO: 6879
  source 1..594: mol_type = genomic DNA

SEQ ID NO: 71798 - DNA, 696 bp, Methanobrevibacter gottschalkii; identical to SEQ ID NO: 6880
  source 1..696: mol_type = genomic DNA

SEQ ID NO: 71799 - DNA, 672 bp, Methanobrevibacter gottschalkii; identical to SEQ ID NO: 6881
  source 1..672: mol_type = genomic DNA

SEQ ID NO: 71800 - DNA, 231 bp, Methanobrevibacter gottschalkii; identical to SEQ ID NO: 6882
  source 1..231: mol_type = genomic DNA

SEQ ID NO: 71801 - DNA, 873 bp, Methanobrevibacter gottschalkii; identical to SEQ ID NO: 6883
  source 1..873: mol_type = genomic DNA

SEQ ID NO: 71802 - DNA, 255 bp, Methanobrevibacter gottschalkii; identical to SEQ ID NO: 6884
  source 1..255: mol_type = genomic DNA

SEQ ID NO: 71803 - DNA, 306 bp, Methanobrevibacter gottschalkii; identical to SEQ ID NO: 6885
  source 1..306: mol_type = genomic DNA

SEQ ID NO: 71804 - DNA, 450 bp, Methanobrevibacter gottschalkii; identical to SEQ ID NO: 6887
  source 1..450: mol_type = genomic DNA

SEQ ID NO: 71805 - DNA, 636 bp, Methanobrevibacter gottschalkii; identical to SEQ ID NO: 6895
  source 1..636: mol_type = genomic DNA

SEQ ID NO: 71806 - DNA, 642 bp, Methanobrevibacter gottschalkii; identical to SEQ ID NO: 6896
  source 1..642: mol_type = genomic DNA

SEQ ID NO: 71807 - DNA, 366 bp, Methanobrevibacter gottschalkii; identical to SEQ ID NO: 6897
  source 1..366: mol_type = genomic DNA

SEQ ID NO: 71808 - DNA, 1572 bp, Methanobrevibacter gottschalkii; identical to SEQ ID NO: 6898
  source 1..1572: mol_type = genomic DNA

SEQ ID NO: 71809 - DNA, 1290 bp, Methanobrevibacter gottschalkii; identical to SEQ ID NO: 6899
  source 1..1290: mol_type = genomic DNA

SEQ ID NO: 71810 - DNA, 993 bp, Methanobrevibacter gottschalkii; identical to SEQ ID NO: 6901
  source 1..993: mol_type = genomic DNA

SEQ ID NO: 71811 - DNA, 993 bp, Methanobrevibacter gottschalkii; identical to SEQ ID NO: 6902
  source 1..993: mol_type = genomic DNA

SEQ ID NO: 71812 - DNA, 990 bp, Methanobrevibacter gottschalkii; identical to SEQ ID NO: 6903
  source 1..990: mol_type = genomic DNA

SEQ ID NO: 71813 - DNA, 993 bp, Methanobrevibacter gottschalkii; identical to SEQ ID NO: 6904
  source 1..993: mol_type = genomic DNA

SEQ ID NO: 71814 - DNA, 960 bp, Methanobrevibacter gottschalkii; identical to SEQ ID NO: 6905
  source 1..960: mol_type = genomic DNA

SEQ ID NO: 71815 - DNA, 1275 bp, Methanobrevibacter gottschalkii; identical to SEQ ID NO: 6908
  source 1..1275: mol_type = genomic DNA

SEQ ID NO: 71816 - DNA, 222 bp, Methanobrevibacter gottschalkii; identical to SEQ ID NO: 6910
  source 1..222: mol_type = genomic DNA

SEQ ID NO: 71817 - DNA, 699 bp, Methanobrevibacter gottschalkii; identical to SEQ ID NO: 6912
  source 1..699: mol_type = genomic DNA

SEQ ID NO: 71818 - DNA, 420 bp, Methanobrevibacter gottschalkii; identical to SEQ ID NO: 6913
  source 1..420: mol_type = genomic DNA

SEQ ID NO: 71819 - DNA, 1779 bp, Methanobrevibacter gottschalkii; identical to SEQ ID NO: 6914
  source 1..1779: mol_type = genomic DNA

SEQ ID NO: 71820 - DNA, 651 bp, Methanobrevibacter gottschalkii; identical to SEQ ID NO: 6915
  source 1..651: mol_type = genomic DNA

SEQ ID NO: 71821 - DNA, 642 bp, Methanobrevibacter gottschalkii; identical to SEQ ID NO: 6916
  source 1..642: mol_type = genomic DNA

SEQ ID NO: 71822 - DNA, 300 bp, Methanobrevibacter gottschalkii; identical to SEQ ID NO: 6917
  source 1..300: mol_type = genomic DNA

SEQ ID NO: 71823 - DNA, 378 bp, Methanobrevibacter gottschalkii; identical to SEQ ID NO: 6922
  source 1..378: mol_type = genomic DNA

SEQ ID NO: 71824 - DNA, 348 bp, Methanobrevibacter gottschalkii; identical to SEQ ID NO: 6924
  source 1..348: mol_type = genomic DNA

SEQ ID NO: 71825 - DNA, 933 bp, Methanobrevibacter gottschalkii; identical to SEQ ID NO: 6925
  source 1..933: mol_type = genomic DNA

SEQ ID NO: 71826 - DNA, 2130 bp, Methanobrevibacter gottschalkii; identical to SEQ ID NO: 6927
  source 1..2130: mol_type = genomic DNA

SEQ ID NO: 71827 - DNA, 750 bp, Methanobrevibacter gottschalkii; identical to SEQ ID NO: 6928
  source 1..750: mol_type = genomic DNA

SEQ ID NO: 71828 - DNA, 753 bp, Methanobrevibacter gottschalkii; identical to SEQ ID NO: 6929
  source 1..753: mol_type = genomic DNA

SEQ ID NO: 71829 - DNA, 372 bp, Methanobrevibacter gottschalkii; identical to SEQ ID NO: 6930
  source 1..372: mol_type = genomic DNA

SEQ ID NO: 71830 - DNA, 735 bp, Methanobrevibacter gottschalkii; identical to SEQ ID NO: 6932
  source 1..735: mol_type = genomic DNA

SEQ ID NO: 71831 - DNA, 222 bp, Methanobrevibacter gottschalkii; identical to SEQ ID NO: 6938
  source 1..222: mol_type = genomic DNA

SEQ ID NO: 71832 - DNA, 2985 bp, Methanobrevibacter gottschalkii; identical to SEQ ID NO: 6939
  source 1..2985: mol_type = genomic DNA

SEQ ID NO: 71833 - DNA, 1716 bp, Methanobrevibacter gottschalkii; identical to SEQ ID NO: 6940
  source 1..1716: mol_type = genomic DNA

SEQ ID NO: 71834 - DNA, 405 bp, Methanobrevibacter gottschalkii; identical to SEQ ID NO: 6941
  source 1..405: mol_type = genomic DNA

SEQ ID NO: 71835 - DNA, 357 bp, Methanobrevibacter gottschalkii; identical to SEQ ID NO: 6943
  source 1..357: mol_type = genomic DNA

SEQ ID NO: 71836 - DNA, 630 bp, Methanobrevibacter gottschalkii; identical to SEQ ID NO: 6945
  source 1..630: mol_type = genomic DNA

SEQ ID NO: 71837 - DNA, 948 bp, Methanobrevibacter gottschalkii; identical to SEQ ID NO: 6950
  source 1..948: mol_type = genomic DNA

SEQ ID NO: 71838 - DNA, 210 bp, Methanobrevibacter gottschalkii; identical to SEQ ID NO: 6954
  source 1..210: mol_type = genomic DNA

SEQ ID NO: 71839 - DNA, 372 bp, Methanobrevibacter gottschalkii; identical to SEQ ID NO: 6957
  source 1..372: mol_type = genomic DNA

SEQ ID NO: 71840 - DNA, 519 bp, Methanobrevibacter gottschalkii; identical to SEQ ID NO: 6959
  source 1..519: mol_type = genomic DNA

SEQ ID NO: 71841 - DNA, 612 bp, Methanobrevibacter gottschalkii; identical to SEQ ID NO: 6964
  source 1..612: mol_type = genomic DNA

SEQ ID NO: 71842 - DNA, 357 bp, Methanobrevibacter gottschalkii; identical to SEQ ID NO: 6966
  source 1..357: mol_type = genomic DNA

SEQ ID NO: 71843 - DNA, 762 bp, Methanobrevibacter gottschalkii; identical to SEQ ID NO: 6973
  source 1..762: mol_type = genomic DNA

SEQ ID NO: 71844 - DNA, 549 bp, Methanobrevibacter gottschalkii; identical to SEQ ID NO: 6975
  source 1..549: mol_type = genomic DNA

SEQ ID NO: 71845 - DNA, 288 bp, Methanobrevibacter gottschalkii; identical to SEQ ID NO: 6977
  source 1..288: mol_type = genomic DNA

SEQ ID NO: 71846 - DNA, 1218 bp, Methanobrevibacter gottschalkii; identical to SEQ ID NO: 6978
  source 1..1218: mol_type = genomic DNA

SEQ ID NO: 71847 - DNA, 339 bp, Methanobrevibacter gottschalkii; identical to SEQ ID NO: 6979
  source 1..339: mol_type = genomic DNA

SEQ ID NO: 71848 - DNA, 612 bp, Methanobrevibacter gottschalkii; identical to SEQ ID NO: 6980
  source 1..612: mol_type = genomic DNA

SEQ ID NO: 71849 - DNA, 1203 bp, Methanobrevibacter gottschalkii; identical to SEQ ID NO: 6984
  source 1..1203: mol_type = genomic DNA

SEQ ID NO: 71850 - DNA, 639 bp, Methanobrevibacter gottschalkii; identical to SEQ ID NO: 6986
  source 1..639: mol_type = genomic DNA

SEQ ID NO: 71851 - DNA, 3939 bp, Methanobrevibacter gottschalkii; identical to SEQ ID NO: 6991
  source 1..3939: mol_type = genomic DNA

SEQ ID NO: 71852 - DNA, 177 bp, Methanobrevibacter gottschalkii; identical to SEQ ID NO: 7006
  source 1..177: mol_type = genomic DNA

SEQ ID NO: 71853 - DNA, 315 bp, Methanobrevibacter gottschalkii; identical to SEQ ID NO: 7008
  source 1..315: mol_type = genomic DNA

SEQ ID NO: 71854 - DNA, 2049 bp, Methanobrevibacter gottschalkii; identical to SEQ ID NO: 7013
  source 1..2049: mol_type = genomic DNA

SEQ ID NO: 71855 - DNA, 3300 bp, Methanobrevibacter gottschalkii; identical to SEQ ID NO: 7014
  source 1..3300: mol_type = genomic DNA

SEQ ID NO: 71856 - DNA, 5595 bp, Methanobrevibacter gottschalkii; identical to SEQ ID NO: 7016
  source 1..5595: mol_type = genomic DNA

SEQ ID NO: 71857 - DNA, 6582 bp, Methanobrevibacter gottschalkii; identical to SEQ ID NO: 7017
  source 1..6582: mol_type = genomic DNA

SEQ ID NO: 71858 - DNA, 5736 bp, Methanobrevibacter gottschalkii; identical to SEQ ID NO: 7018
  source 1..5736: mol_type = genomic DNA

SEQ ID NO: 71859 - DNA, 5112 bp, Methanobrevibacter gottschalkii; identical to SEQ ID NO: 7023
  source 1..5112: mol_type = genomic DNA

SEQ ID NO: 71860 - DNA, 708 bp, Methanobrevibacter gottschalkii; identical to SEQ ID NO: 7024
  source 1..708: mol_type = genomic DNA

SEQ ID NO: 71861 - DNA, 645 bp, Methanobrevibacter gottschalkii; identical to SEQ ID NO: 7025
  source 1..645: mol_type = genomic DNA

SEQ ID NO: 71862 - DNA, 336 bp, Methanobrevibacter gottschalkii; identical to SEQ ID NO: 7026
  source 1..336: mol_type = genomic DNA

SEQ ID NO: 71863 - DNA, 2541 bp, Methanobrevibacter gottschalkii; identical to SEQ ID NO: 7027
  source 1..2541: mol_type = genomic DNA

SEQ ID NO: 71864 - DNA, 1806 bp, Methanobrevibacter gottschalkii; identical to SEQ ID NO: 7029
  source 1..1806: mol_type = genomic DNA

SEQ ID NO: 71865 - DNA, 1707 bp, Methanobrevibacter gottschalkii; identical to SEQ ID NO: 7030
  source 1..1707: mol_type = genomic DNA

SEQ ID NO: 71866 - DNA, 645 bp, Methanobrevibacter gottschalkii; identical to SEQ ID NO: 7031
  source 1..645: mol_type = genomic DNA

SEQ ID NO: 71867 - DNA, 351 bp, Methanobrevibacter gottschalkii; identical to SEQ ID NO: 7032
  source 1..351: mol_type = genomic DNA

SEQ ID NO: 71868 - DNA, 372 bp, Methanobrevibacter gottschalkii; identical to SEQ ID NO: 7033
  source 1..372: mol_type = genomic DNA

SEQ ID NO: 71869 - DNA, 2235 bp, Methanobrevibacter gottschalkii; identical to SEQ ID NO: 7037
  source 1..2235: mol_type = genomic DNA

SEQ ID NO: 71870 - DNA, 5568 bp, Methanobrevibacter gottschalkii; identical to SEQ ID NO: 7038
  source 1..5568: mol_type = genomic DNA

SEQ ID NO: 71871 - DNA, 2589 bp, Methanobrevibacter gottschalkii; identical to SEQ ID NO: 7039
  source 1..2589: mol_type = genomic DNA

SEQ ID NO: 71872 - DNA, 4578 bp, Methanobrevibacter gottschalkii; identical to SEQ ID NO: 7040
  source 1..4578: mol_type = genomic DNA

SEQ ID NO: 71873 - DNA, 486 bp, Methanobrevibacter gottschalkii; identical to SEQ ID NO: 7041
  source 1..486: mol_type = genomic DNA

SEQ ID NO: 71874 - DNA, 981 bp, Methanobrevibacter gottschalkii; identical to SEQ ID NO: 7047
  source 1..981: mol_type = genomic DNA

SEQ ID NO: 71875 - DNA, 993 bp, Methanobrevibacter gottschalkii; identical to SEQ ID NO: 7048
  source 1..993: mol_type = genomic DNA

SEQ ID NO: 71876 - DNA, 711 bp, Methanobrevibacter gottschalkii; identical to SEQ ID NO: 7051
  source 1..711: mol_type = genomic DNA

SEQ ID NO: 71877 - DNA, 645 bp, Methanobrevibacter gottschalkii; identical to SEQ ID NO: 7052
  source 1..645: mol_type = genomic DNA

SEQ ID NO: 71878 - DNA, 324 bp, Methanobrevibacter gottschalkii; identical to SEQ ID NO: 7053
  source 1..324: mol_type = genomic DNA

SEQ ID NO: 71879 - DNA, 816 bp, Methanobrevibacter gottschalkii; identical to SEQ ID NO: 7055
  source 1..816: mol_type = genomic DNA

SEQ ID NO: 71880 - DNA, 864 bp, Methanobrevibacter gottschalkii; identical to SEQ ID NO: 7056
  source 1..864: mol_type = genomic DNA

SEQ ID NO: 71881 - DNA, 852 bp, Methanobrevibacter gottschalkii; identical to SEQ ID NO: 7057
  source 1..852: mol_type = genomic DNA

SEQ ID NO: 71882 - DNA, 753 bp, Methanobrevibacter gottschalkii; identical to SEQ ID NO: 7058
  source 1..753: mol_type = genomic DNA

SEQ ID NO: 71883 - DNA, 1299 bp, Methanobrevibacter gottschalkii; identical to SEQ ID NO: 7060
  source 1..1299: mol_type = genomic DNA

SEQ ID NO: 71884 - DNA, 1557 bp, Methanobrevibacter gottschalkii; identical to SEQ ID NO: 7063
  source 1..1557: mol_type = genomic DNA

SEQ ID NO: 71885 - DNA, 714 bp, Methanobrevibacter gottschalkii; identical to SEQ ID NO: 7065
  source 1..714: mol_type = genomic DNA

SEQ ID NO: 71886 - DNA, 846 bp, Methanobrevibacter gottschalkii; identical to SEQ ID NO: 7067
  source 1..846: mol_type = genomic DNA

SEQ ID NO: 71887 - DNA, 1410 bp, Methanobrevibacter gottschalkii; identical to SEQ ID NO: 7070
  source 1..1410: mol_type = genomic DNA

SEQ ID NO: 71888 - DNA, 3657 bp, Methanobrevibacter gottschalkii; identical to SEQ ID NO: 7071
  source 1..3657: mol_type = genomic DNA

SEQ ID NO: 71889 - DNA, 156 bp, Methanobrevibacter gottschalkii; identical to SEQ ID NO: 7075
  source 1..156: mol_type = genomic DNA

SEQ ID NO: 71890 - DNA, 3609 bp, Methanobrevibacter gottschalkii; identical to SEQ ID NO: 7077
  source 1..3609: mol_type = genomic DNA

SEQ ID NO: 71891 - DNA, 1131 bp, Methanobrevibacter gottschalkii; identical to SEQ ID NO: 7083
  source 1..1131: mol_type = genomic DNA

SEQ ID NO: 71892 - DNA, 4830 bp, Methanobrevibacter gottschalkii; identical to SEQ ID NO: 7097
  source 1..4830: mol_type = genomic DNA

SEQ ID NO: 71893 - DNA, 1743 bp, Methanobrevibacter gottschalkii; identical to SEQ ID NO: 7101
  source 1..1743: mol_type = genomic DNA

SEQ ID NO: 71894 - DNA, 507 bp, Methanobrevibacter gottschalkii; identical to SEQ ID NO: 7103
  source 1..507: mol_type = genomic DNA

SEQ ID NO: 71895 - DNA, 297 bp, Methanobrevibacter gottschalkii; identical to SEQ ID NO: 7106
  source 1..297: mol_type = genomic DNA

SEQ ID NO: 71896 - DNA, 567 bp, Methanobrevibacter gottschalkii; identical to SEQ ID NO: 7117
  source 1..567: mol_type = genomic DNA

SEQ ID NO: 71897 - DNA, 1386 bp, Methanobrevibacter gottschalkii; identical to SEQ ID NO: 7118
  source 1..1386: mol_type = genomic DNA

SEQ ID NO: 71898 - DNA, 687 bp, Methanobrevibacter gottschalkii; identical to SEQ ID NO: 7121
  source 1..687: mol_type = genomic DNA

SEQ ID NO: 71899 - DNA, 2955 bp, Methanobrevibacter gottschalkii; identical to SEQ ID NO: 7123
  source 1..2955: mol_type = genomic DNA

SEQ ID NO: 71900 - DNA, 1650 bp, Methanobrevibacter gottschalkii; identical to SEQ ID NO: 7127
  source 1..1650: mol_type = genomic DNA

SEQ ID NO: 71901 - DNA, 1338 bp, Methanobrevibacter gottschalkii; identical to SEQ ID NO: 7128
  source 1..1338: mol_type = genomic DNA

SEQ ID NO: 71902 - DNA, 3186 bp, Methanobrevibacter gottschalkii; identical to SEQ ID NO: 7131
  source 1..3186: mol_type = genomic DNA

SEQ ID NO: 71903 - DNA, 576 bp, Methanobrevibacter gottschalkii; identical to SEQ ID NO: 7134
  source 1..576: mol_type = genomic DNA

SEQ ID NO: 71904 - DNA, 357 bp, Methanobrevibacter gottschalkii; identical to SEQ ID NO: 7135
  source 1..357: mol_type = genomic DNA

SEQ ID NO: 71905 - DNA, 222 bp, Methanobrevibacter gottschalkii; identical to SEQ ID NO: 7136
  source 1..222: mol_type = genomic DNA

SEQ ID NO: 71906 - DNA, 1029 bp, Methanobrevibacter gottschalkii; identical to SEQ ID NO: 7137
  source 1..1029: mol_type = genomic DNA

SEQ ID NO: 71907 - DNA, 1512 bp, Methanobrevibacter gottschalkii; identical to SEQ ID NO: 7138
  source 1..1512: mol_type = genomic DNA

SEQ ID NO: 71908 - DNA, 237 bp, Methanobrevibacter gottschalkii; identical to SEQ ID NO: 7143
  source 1..237: mol_type = genomic DNA

SEQ ID NO: 71909 - DNA, 345 bp, Methanobrevibacter gottschalkii; identical to SEQ ID NO: 7144
  source 1..345: mol_type = genomic DNA

SEQ ID NO: 71910 - DNA, 516 bp, Methanobrevibacter gottschalkii; identical to SEQ ID NO: 7145
  source 1..516: mol_type = genomic DNA

SEQ ID NO: 71911 - DNA, 477 bp, Methanobrevibacter gottschalkii; identical to SEQ ID NO: 7146
  source 1..477: mol_type = genomic DNA

SEQ ID NO: 71912 - DNA, 552 bp, Methanobrevibacter gottschalkii; identical to SEQ ID NO: 7148
  source 1..552: mol_type = genomic DNA

SEQ ID NO: 71913 - DNA, 258 bp, Methanobrevibacter gottschalkii; identical to SEQ ID NO: 7152
  source 1..258: mol_type = genomic DNA

SEQ ID NO: 71914 - DNA, 555 bp, Methanobrevibacter gottschalkii; identical to SEQ ID NO: 7153
  source 1..555: mol_type = genomic DNA

SEQ ID NO: 71915 - DNA, 342 bp, Methanobrevibacter gottschalkii; identical to SEQ ID NO: 7154
  source 1..342: mol_type = genomic DNA

SEQ ID NO: 71916 - DNA, 195 bp, Methanobrevibacter gottschalkii; identical to SEQ ID NO: 7156
  source 1..195: mol_type = genomic DNA

SEQ ID NO: 71917 - DNA, 2664 bp, Methanobrevibacter gottschalkii; identical to SEQ ID NO: 7158
  source 1..2664: mol_type = genomic DNA

SEQ ID NO: 71918 - DNA, 396 bp, Methanobrevibacter gottschalkii; identical to SEQ ID NO: 7160
  source 1..396: mol_type = genomic DNA

SEQ ID NO: 71919 - DNA, 549 bp, Methanobrevibacter gottschalkii; identical to SEQ ID NO: 7162
  source 1..549: mol_type = genomic DNA

SEQ ID NO: 71920 - DNA, 354 bp, Methanobrevibacter gottschalkii; identical to SEQ ID NO: 7163
  source 1..354: mol_type = genomic DNA

SEQ ID NO: 71921 - DNA, 609 bp, Methanobrevibacter gottschalkii; identical to SEQ ID NO: 7164
  source 1..609: mol_type = genomic DNA

SEQ ID NO: 71922 - DNA, 354 bp, Methanobrevibacter gottschalkii; identical to SEQ ID NO: 7170
  source 1..354: mol_type = genomic DNA

SEQ ID NO: 71923 - DNA, 1164 bp, Methanobrevibacter gottschalkii; identical to SEQ ID NO: 7178
  source 1..1164: mol_type = genomic DNA

SEQ ID NO: 71924 - DNA, 237 bp, Methanobrevibacter gottschalkii; identical to SEQ ID NO: 7184
  source 1..237: mol_type = genomic DNA

SEQ ID NO: 71925 - DNA, 1668 bp, Methanobrevibacter gottschalkii; identical to SEQ ID NO: 7189
  source 1..1668: mol_type = genomic DNA

SEQ ID NO: 71926 - DNA, 192 bp, Methanobrevibacter gottschalkii; identical to SEQ ID NO: 7190
  source 1..192: mol_type = genomic DNA

SEQ ID NO: 71927 - DNA, 150 bp, Methanobrevibacter gottschalkii; identical to SEQ ID NO: 7191
  source 1..150: mol_type = genomic DNA

SEQ ID NO: 71928 - DNA, 252 bp, Methanobrevibacter gottschalkii; identical to SEQ ID NO: 7192
  source 1..252: mol_type = genomic DNA

SEQ ID NO: 71929 - DNA, 270 bp, Methanobrevibacter gottschalkii; identical to SEQ ID NO: 7193
  source 1..270: mol_type = genomic DNA

SEQ ID NO: 71930 - DNA, 603 bp, Methanobrevibacter gottschalkii; identical to SEQ ID NO: 7195
  source 1..603: mol_type = genomic DNA

SEQ ID NO: 71931 - DNA, 384 bp, Methanobrevibacter gottschalkii; identical to SEQ ID NO: 7197
  source 1..384: mol_type = genomic DNA

SEQ ID NO: 71932 - DNA, 570 bp, Methanobrevibacter gottschalkii; identical to SEQ ID NO: 7199
  source 1..570: mol_type = genomic DNA

SEQ ID NO: 71933 - DNA, 729 bp, Methanobrevibacter gottschalkii; identical to SEQ ID NO: 7202
  source 1..729: mol_type = genomic DNA

SEQ ID NO: 71934 - DNA, 495 bp, Methanobrevibacter gottschalkii; identical to SEQ ID NO: 7203
  source 1..495: mol_type = genomic DNA

SEQ ID NO: 71935 - DNA, 939 bp, Methanobrevibacter gottschalkii; identical to SEQ ID NO: 7204
  source 1..939: mol_type = genomic DNA

SEQ ID NO: 71936 - DNA, 927 bp, Methanobrevibacter gottschalkii; identical to SEQ ID NO: 7205
  source 1..927: mol_type = genomic DNA

SEQ ID NO: 71937 - DNA, 819 bp, Methanobrevibacter gottschalkii; identical to SEQ ID NO: 7210
  source 1..819: mol_type = genomic DNA

SEQ ID NO: 71938 - DNA, 267 bp, Methanobrevibacter gottschalkii; identical to SEQ ID NO: 7216
  source 1..267: mol_type = genomic DNA

SEQ ID NO: 71939 - DNA, 348 bp, Methanobrevibacter gottschalkii; identical to SEQ ID NO: 7218
  source 1..348: mol_type = genomic DNA

SEQ ID NO: 71940 - DNA, 105 bp, Methanobrevibacter gottschalkii; identical to SEQ ID NO: 7227
  source 1..105: mol_type = genomic DNA

SEQ ID NO: 71941 - DNA, 558 bp, Methanobrevibacter gottschalkii; identical to SEQ ID NO: 7230
  source 1..558: mol_type = genomic DNA

SEQ ID NO: 71942 - DNA, 1791 bp, Methanobrevibacter gottschalkii; identical to SEQ ID NO: 7239
  source 1..1791: mol_type = genomic DNA

SEQ ID NO: 71943 - DNA, 1746 bp, Methanobrevibacter gottschalkii; identical to SEQ ID NO: 7240
  source 1..1746: mol_type = genomic DNA

SEQ ID NO: 71944 - DNA, 582 bp, Methanobrevibacter gottschalkii; identical to SEQ ID NO: 7241
  source 1..582: mol_type = genomic DNA

SEQ ID NO: 71945 - DNA, 723 bp, Methanobrevibacter gottschalkii; identical to SEQ ID NO: 7242
  source 1..723: mol_type = genomic DNA

SEQ ID NO: 71946 - DNA, 1434 bp, Methanobrevibacter gottschalkii; identical to SEQ ID NO: 7243
  source 1..1434: mol_type = genomic DNA

SEQ ID NO: 71947 - DNA, 705 bp, Methanobrevibacter gottschalkii; identical to SEQ ID NO: 7244
  source 1..705: mol_type = genomic DNA

SEQ ID NO: 71948 - DNA, 2271 bp, Methanobrevibacter gottschalkii; identical to SEQ ID NO: 7245
  source 1..2271: mol_type = genomic DNA

SEQ ID NO: 71949 - DNA, 2259 bp, Methanobrevibacter gottschalkii; identical to SEQ ID NO: 7247
  source 1..2259: mol_type = genomic DNA

SEQ ID NO: 71950 - DNA, 717 bp, Methanobrevibacter gottschalkii; identical to SEQ ID NO: 7248
  source 1..717: mol_type = genomic DNA

SEQ ID NO: 71951 - DNA, 2355 bp, Methanobrevibacter gottschalkii; identical to SEQ ID NO: 7250
  source 1..2355: mol_type = genomic DNA

SEQ ID NO: 71952 - DNA, 1371 bp, Methanobrevibacter gottschalkii; identical to SEQ ID NO: 7251
  source 1..1371: mol_type = genomic DNA

SEQ ID NO: 71953 - DNA, 615 bp, Methanobrevibacter gottschalkii; identical to SEQ ID NO: 7252
  source 1..615: mol_type = genomic DNA

SEQ ID NO: 71954 - DNA, 960 bp, Methanobrevibacter gottschalkii; identical to SEQ ID NO: 7253
  source 1..960: mol_type = genomic DNA

SEQ ID NO: 71955 - DNA, 855 bp, Methanobrevibacter gottschalkii; identical to SEQ ID NO: 7254
  source 1..855: mol_type = genomic DNA

SEQ ID NO: 71956 - DNA, 996 bp, Methanobrevibacter gottschalkii; identical to SEQ ID NO: 7255
  source 1..996: mol_type = genomic DNA

SEQ ID NO: 71957 - DNA, 1629 bp, Methanobrevibacter gottschalkii; identical to SEQ ID NO: 7256
  source 1..1629: mol_type = genomic DNA

SEQ ID NO: 71958 - DNA, 1620 bp, Methanobrevibacter gottschalkii; identical to SEQ ID NO: 7257
  source 1..1620: mol_type = genomic DNA

SEQ ID NO: 71959 - DNA, 615 bp, Methanobrevibacter gottschalkii; identical to SEQ ID NO: 7258
  source 1..615: mol_type = genomic DNA

SEQ ID NO: 71960 - DNA, 960 bp, Methanobrevibacter gottschalkii; identical to SEQ ID NO: 7259
  source 1..960: mol_type = genomic DNA

SEQ ID NO: 71961 - DNA, 693 bp, Methanobrevibacter gottschalkii; identical to SEQ ID NO: 7261
  source 1..693: mol_type = genomic DNA

SEQ ID NO: 71962 - DNA, 1617 bp, Methanobrevibacter gottschalkii; identical to SEQ ID NO: 7262
  source 1..1617: mol_type = genomic DNA

SEQ ID NO: 71963 - DNA, 990 bp, Methanobrevibacter gottschalkii; identical to SEQ ID NO: 7263
  source 1..990: mol_type = genomic DNA

SEQ ID NO: 71964 - DNA, 852 bp, Methanobrevibacter gottschalkii; identical to SEQ ID NO: 7264
  source 1..852: mol_type = genomic DNA

SEQ ID NO: 71965 - DNA, 693 bp, Methanobrevibacter gottschalkii; identical to SEQ ID NO: 7265
  source 1..693: mol_type = genomic DNA

SEQ ID NO: 71966 - DNA, 1089 bp, Methanobrevibacter gottschalkii; identical to SEQ ID NO: 7268
  source 1..1089: mol_type = genomic DNA

SEQ ID NO: 71967 - DNA, 567 bp, Methanobrevibacter gottschalkii; identical to SEQ ID NO: 7270
  source 1..567: mol_type = genomic DNA

SEQ ID NO: 71968 - DNA, 486 bp, Methanobrevibacter gottschalkii; identical to SEQ ID NO: 7272
  source 1..486: mol_type = genomic DNA

SEQ ID NO: 71969 - DNA, 1278 bp, Methanobrevibacter gottschalkii; identical to SEQ ID NO: 7274
  source 1..1278: mol_type = genomic DNA

SEQ ID NO: 71970 - DNA, 1077 bp, Methanobrevibacter gottschalkii; identical to SEQ ID NO: 7282
  source 1..1077: mol_type = genomic DNA

SEQ ID NO: 71971 - DNA, 1272 bp, Methanobrevibacter gottschalkii; identical to SEQ ID NO: 7285
  source 1..1272: mol_type = genomic DNA

SEQ ID NO: 71972 - DNA, 741 bp, Methanobrevibacter gottschalkii; identical to SEQ ID NO: 7305
  source 1..741: mol_type = genomic DNA

SEQ ID NO: 71973 - DNA, 1548 bp, Methanobrevibacter gottschalkii; identical to SEQ ID NO: 7306
  source 1..1548: mol_type = genomic DNA

SEQ ID NO: 71974 - DNA, 561 bp, Methanobrevibacter gottschalkii; identical to SEQ ID NO: 7310
  source 1..561: mol_type = genomic DNA

SEQ ID NO: 71975 - DNA, 447 bp, Methanobrevibacter gottschalkii; identical to SEQ ID NO: 7314
  source 1..447: mol_type = genomic DNA

SEQ ID NO: 71976 - DNA, 936 bp, Methanobrevibacter gottschalkii; identical to SEQ ID NO: 7318
  source 1..936: mol_type = genomic DNA

SEQ ID NO: 71977 - DNA, 267 bp, Methanobrevibacter gottschalkii; identical to SEQ ID NO: 7327
  source 1..267: mol_type = genomic DNA

SEQ ID NO: 71978 - DNA, 387 bp, Methanobrevibacter gottschalkii; identical to SEQ ID NO: 7331
  source 1..387: mol_type = genomic DNA

SEQ ID NO: 71979 - DNA, 909 bp, Methanobrevibacter gottschalkii; identical to SEQ ID NO: 7332
  source 1..909: mol_type = genomic DNA

SEQ ID NO: 71980 - DNA, 2877 bp, Methanobrevibacter gottschalkii; identical to SEQ ID NO: 7335
  source 1..2877: mol_type = genomic DNA

SEQ ID NO: 71981 - DNA, 183 bp, Methanobrevibacter gottschalkii; identical to SEQ ID NO: 7339
  source 1..183: mol_type = genomic DNA

SEQ ID NO: 71982 - DNA, 207 bp, Methanobrevibacter gottschalkii; identical to SEQ ID NO: 7340
  source 1..207: mol_type = genomic DNA

SEQ ID NO: 71983 - DNA, 1149 bp, Methanobrevibacter gottschalkii; identical to SEQ ID NO: 7341
  source 1..1149: mol_type = genomic DNA

SEQ ID NO: 71984 - DNA, 720 bp, Methanobrevibacter gottschalkii; identical to SEQ ID NO: 7342
  source 1..720: mol_type = genomic DNA

SEQ ID NO: 71985 - DNA, 273 bp, Methanobrevibacter gottschalkii; identical to SEQ ID NO: 7344
  source 1..273: mol_type = genomic DNA

SEQ ID NO: 71986 - DNA, 1821 bp, Methanobrevibacter gottschalkii; identical to SEQ ID NO: 7345
  source 1..1821: mol_type = genomic DNA

SEQ ID NO: 71987 - DNA, 279 bp, Methanobrevibacter gottschalkii; identical to SEQ ID NO: 7361
  source 1..279: mol_type = genomic DNA

SEQ ID NO: 71988 - DNA, 1362 bp, Methanobrevibacter gottschalkii; identical to SEQ ID NO: 7376
  source 1..1362: mol_type = genomic DNA

SEQ ID NO: 71989 - DNA, 579 bp, Methanobrevibacter gottschalkii; identical to SEQ ID NO: 7378
  source 1..579: mol_type = genomic DNA

SEQ ID NO: 71990 - DNA, 1767 bp, Methanobrevibacter gottschalkii; identical to SEQ ID NO: 7383
  source 1..1767: mol_type = genomic DNA

SEQ ID NO: 71991 - DNA, 558 bp, Methanobrevibacter gottschalkii; identical to SEQ ID NO: 7384
  source 1..558: mol_type = genomic DNA

SEQ ID NO: 71992 - DNA, 423 bp, Methanobrevibacter gottschalkii; identical to SEQ ID NO: 7390
  source 1..423: mol_type = genomic DNA

SEQ ID NO: 71993 - DNA, 171 bp, Methanobrevibacter gottschalkii; identical to SEQ ID NO: 7392
  source 1..171: mol_type = genomic DNA

SEQ ID NO: 71994 - DNA, 1656 bp, Methanobrevibacter gottschalkii; identical to SEQ ID NO: 7410
  source 1..1656: mol_type = genomic DNA

SEQ ID NO: 71995 - DNA, 1332 bp, Methanobrevibacter gottschalkii; identical to SEQ ID NO: 7413
  source 1..1332: mol_type = genomic DNA

SEQ ID NO: 71996 - DNA, 786 bp, Methanobrevibacter gottschalkii; identical to SEQ ID NO: 7415
  source 1..786: mol_type = genomic DNA

SEQ ID NO: 71997 - DNA, 783 bp, Methanobrevibacter gottschalkii; identical to SEQ ID NO: 7416
  source 1..783: mol_type = genomic DNA

SEQ ID NO: 71998 - DNA, 1005 bp, Methanobrevibacter gottschalkii; identical to SEQ ID NO: 7421
  source 1..1005: mol_type = genomic DNA

SEQ ID NO: 71999 - DNA, 1476 bp, Methanobrevibacter gottschalkii; identical to SEQ ID NO: 7424
  source 1..1476: mol_type = genomic DNA

SEQ ID NO: 72000 - DNA, 585 bp, Methanobrevibacter gottschalkii; identical to SEQ ID NO: 7428
  source 1..585: mol_type = genomic DNA

SEQ ID NO: 72001 - DNA, 939 bp, Methanobrevibacter gottschalkii; identical to SEQ ID NO: 7432
  source 1..939: mol_type = genomic DNA

SEQ ID NO: 72002 - DNA, 1047 bp, Methanobrevibacter gottschalkii; identical to SEQ ID NO: 7434
  source 1..1047: mol_type = genomic DNA

SEQ ID NO: 72003 - DNA, 2097 bp, Methanobrevibacter gottschalkii; identical to SEQ ID NO: 7437
  source 1..2097: mol_type = genomic DNA

SEQ ID NO: 72004 - DNA, 2628 bp, Methanobrevibacter gottschalkii; identical to SEQ ID NO: 7441
  source 1..2628: mol_type = genomic DNA

SEQ ID NO: 72005 - DNA, 480 bp, Methanobrevibacter gottschalkii; identical to SEQ ID NO: 7442
  source 1..480: mol_type = genomic DNA

SEQ ID NO: 72006 - DNA, 231 bp, Methanobrevibacter gottschalkii; identical to SEQ ID NO: 7452
  source 1..231: mol_type = genomic DNA

SEQ ID NO: 72007 - DNA, 1380 bp, Methanobrevibacter gottschalkii; identical to SEQ ID NO: 7454
  source 1..1380: mol_type = genomic DNA

SEQ ID NO: 72008 - DNA, 396 bp, Methanobrevibacter gottschalkii; identical to SEQ ID NO: 7456
  source 1..396: mol_type = genomic DNA

SEQ ID NO: 72009 - DNA, 450 bp, Methanobrevibacter gottschalkii; identical to SEQ ID NO: 7457
  source 1..450: mol_type = genomic DNA

SEQ ID NO: 72010 - DNA, 1104 bp, Methanobrevibacter gottschalkii; identical to SEQ ID NO: 7465
  source 1..1104: mol_type = genomic DNA

SEQ ID NO: 72011 - DNA, 468 bp, Methanobrevibacter gottschalkii; identical to SEQ ID NO: 7469
  source 1..468: mol_type = genomic DNA

SEQ ID NO: 72012 - DNA, 696 bp, Methanobrevibacter gottschalkii; identical to SEQ ID NO: 7471
  source 1..696: mol_type = genomic DNA

SEQ ID NO: 72013 - DNA, 1068 bp, Methanobrevibacter gottschalkii; identical to SEQ ID NO: 7472
  source 1..1068: mol_type = genomic DNA

SEQ ID NO: 72014 - DNA, 999 bp, Methanobrevibacter gottschalkii; identical to SEQ ID NO: 7473
  source 1..999: mol_type = genomic DNA

SEQ ID NO: 72015 - DNA, 732 bp, Methanobrevibacter gottschalkii; identical to SEQ ID NO: 7477
  source 1..732: mol_type = genomic DNA

SEQ ID NO: 72016 - DNA, 1005 bp, Methanobrevibacter gottschalkii; identical to SEQ ID NO: 7478
  source 1..1005: mol_type = genomic DNA

SEQ ID NO: 72017 - DNA, 771 bp, Methanobrevibacter gottschalkii; identical to SEQ ID NO: 7479
  source 1..771: mol_type = genomic DNA

SEQ ID NO: 72018 - DNA, 1488 bp, Methanobrevibacter gottschalkii; identical to SEQ ID NO: 7483
  source 1..1488: mol_type = genomic DNA

SEQ ID NO: 72019 - DNA, 369 bp, Methanobrevibacter gottschalkii; identical to SEQ ID NO: 7484
  source 1..369: mol_type = genomic DNA

SEQ ID NO: 72020 - DNA, 1896 bp, Methanobrevibacter gottschalkii; identical to SEQ ID NO: 7491
  source 1..1896: mol_type = genomic DNA

SEQ ID NO: 72021 - DNA, 1428 bp, Methanobrevibacter gottschalkii; identical to SEQ ID NO: 7495
  source 1..1428: mol_type = genomic DNA

SEQ ID NO: 72022 - DNA, 1038 bp, Methanobrevibacter gottschalkii; identical to SEQ ID NO: 7496
  source 1..1038: mol_type = genomic DNA

SEQ ID NO: 72023 - DNA, 1191 bp, Methanobrevibacter gottschalkii; identical to SEQ ID NO: 7500
  source 1..1191: mol_type = genomic DNA

SEQ ID NO: 72024 - DNA, 918 bp, Methanobrevibacter gottschalkii; identical to SEQ ID NO: 7501
  source 1..918: mol_type = genomic DNA

SEQ ID NO: 72025 - DNA, 456 bp, Methanobrevibacter gottschalkii; identical to SEQ ID NO: 7505
  source 1..456: mol_type = genomic DNA

SEQ ID NO: 72026 - DNA, 1188 bp, Methanobrevibacter gottschalkii; identical to SEQ ID NO: 7509
  source 1..1188: mol_type = genomic DNA

SEQ ID NO: 72027 - DNA, 1980 bp, Methanobrevibacter gottschalkii; identical to SEQ ID NO: 7511
  source 1..1980: mol_type = genomic DNA

SEQ ID NO: 72028 - DNA, 369 bp, Methanobrevibacter gottschalkii; identical to SEQ ID NO: 7515
  source 1..369: mol_type = genomic DNA

SEQ ID NO: 72029 - DNA, 513 bp, Methanobrevibacter gottschalkii; identical to SEQ ID NO: 7516
  source 1..513: mol_type = genomic DNA

SEQ ID NO: 72030 - DNA, 1209 bp, Methanobrevibacter gottschalkii; identical to SEQ ID NO: 7521
  source 1..1209: mol_type = genomic DNA

SEQ ID NO: 72031 - DNA, 339 bp, Methanobrevibacter gottschalkii; identical to SEQ ID NO: 7522
  source 1..339: mol_type = genomic DNA

SEQ ID NO: 72032 - DNA, 774 bp, Methanobrevibacter gottschalkii; identical to SEQ ID NO: 7524
  source 1..774: mol_type = genomic DNA

SEQ ID NO: 72033 - DNA, 849 bp, Methanobrevibacter gottschalkii; identical to SEQ ID NO: 7526
  source 1..849: mol_type = genomic DNA

SEQ ID NO: 72034 - DNA, 2049 bp, Methanobrevibacter gottschalkii; identical to SEQ ID NO: 7534
  source 1..2049: mol_type = genomic DNA

SEQ ID NO: 72035 - DNA, 480 bp, Methanobrevibacter gottschalkii; identical to SEQ ID NO: 7537
  source 1..480: mol_type = genomic DNA

SEQ ID NO: 72036 - DNA, 246 bp, Methanobrevibacter gottschalkii; identical to SEQ ID NO: 7538
  source 1..246: mol_type = genomic DNA

SEQ ID NO: 72037 - DNA, 666 bp, Methanobrevibacter gottschalkii; identical to SEQ ID NO: 7540
  source 1..666: mol_type = genomic DNA

SEQ ID NO: 72038 - DNA, 288 bp, Methanobrevibacter gottschalkii; identical to SEQ ID NO: 7541
  source 1..288: mol_type = genomic DNA

SEQ ID NO: 72039 - DNA, 690 bp, Methanobrevibacter gottschalkii; identical to SEQ ID NO: 7542
  source 1..690: mol_type = genomic DNA

SEQ ID NO: 72040 - DNA, 843 bp, Methanobrevibacter gottschalkii; identical to SEQ ID NO: 7543
  source 1..843: mol_type = genomic DNA

SEQ ID NO: 72041 - DNA, 348 bp, Methanobrevibacter gottschalkii; identical to SEQ ID NO: 7546
  source 1..348: mol_type = genomic DNA

SEQ ID NO: 72042 - DNA, 672 bp, Methanobrevibacter gottschalkii; identical to SEQ ID NO: 7547
  source 1..672: mol_type = genomic DNA

SEQ ID NO: 72043 - DNA, 180 bp, Methanobrevibacter gottschalkii; identical to SEQ ID NO: 7558
  source 1..180: mol_type = genomic DNA

SEQ ID NO: 72044 - DNA, 849 bp, Methanobrevibacter gottschalkii; identical to SEQ ID NO: 7559
  source 1..849: mol_type = genomic DNA

SEQ ID NO: 72045 - DNA, 540 bp, Methanobrevibacter gottschalkii; identical to SEQ ID NO: 7565
  source 1..540: mol_type = genomic DNA

SEQ ID NO: 72046 - DNA, 1704 bp, Methanobrevibacter gottschalkii; identical to SEQ ID NO: 7567
  source 1..1704: mol_type = genomic DNA

SEQ ID NO: 72047 - DNA, 894 bp, Methanobrevibacter gottschalkii; identical to SEQ ID NO: 7572
  source 1..894: mol_type = genomic DNA

SEQ ID NO: 72048 - DNA, 1248 bp, Methanobrevibacter gottschalkii; identical to SEQ ID NO: 7574
  source 1..1248: mol_type = genomic DNA

SEQ ID NO: 72049 - DNA, 540 bp, Methanobrevibacter gottschalkii; identical to SEQ ID NO: 7577
  source 1..540: mol_type = genomic DNA

SEQ ID NO: 72050 - DNA, 183 bp, Methanobrevibacter gottschalkii; identical to SEQ ID NO: 7581
  source 1..183: mol_type = genomic DNA

SEQ ID NO: 72051 - DNA, 858 bp, Methanobrevibacter gottschalkii; identical to SEQ ID NO: 7582
  source 1..858: mol_type = genomic DNA

SEQ ID NO: 72052 - DNA, 609 bp, Methanobrevibacter gottschalkii; identical to SEQ ID NO: 7583
  source 1..609: mol_type = genomic DNA

SEQ ID NO: 72053 - DNA, 456 bp, Methanobrevibacter gottschalkii; identical to SEQ ID NO: 7584
  source 1..456: mol_type = genomic DNA

SEQ ID NO: 72054 - DNA, 957 bp, Methanobrevibacter gottschalkii; identical to SEQ ID NO: 7585
  source 1..957: mol_type = genomic DNA

SEQ ID NO: 72055 - DNA, 885 bp, Methanobrevibacter gottschalkii; identical to SEQ ID NO: 7586
  source 1..885: mol_type = genomic DNA

SEQ ID NO: 72056 - DNA, 1125 bp, Methanobrevibacter gottschalkii; identical to SEQ ID NO: 7590
  source 1..1125: mol_type = genomic DNA

SEQ ID NO: 72057 - DNA, 120 bp, Methanobrevibacter gottschalkii; identical to SEQ ID NO: 7596
  source 1..120: mol_type = genomic DNA

SEQ ID NO: 72058 - DNA, 420 bp, Methanobrevibacter gottschalkii; identical to SEQ ID NO: 7599
  source 1..420: mol_type = genomic DNA

SEQ ID NO: 72059 - DNA, 231 bp, Methanobrevibacter gottschalkii; identical to SEQ ID NO: 7603
  source 1..231: mol_type = genomic DNA

SEQ ID NO: 72060 - DNA, 1392 bp, Methanobrevibacter gottschalkii; identical to SEQ ID NO: 7605
  source 1..1392: mol_type = genomic DNA

SEQ ID NO: 72061 - DNA, 408 bp, Methanobrevibacter gottschalkii; identical to SEQ ID NO: 7609
  source 1..408: mol_type = genomic DNA

SEQ ID NO: 72062 - DNA, 624 bp, Methanobrevibacter gottschalkii; identical to SEQ ID NO: 7614
  source 1..624: mol_type = genomic DNA

SEQ ID NO: 72063 - DNA, 315 bp, Methanobrevibacter gottschalkii; identical to SEQ ID NO: 7615
  source 1..315: mol_type = genomic DNA

SEQ ID NO: 72064 - DNA, 237 bp, Methanobrevibacter gottschalkii; identical to SEQ ID NO: 7616
  source 1..237: mol_type = genomic DNA

SEQ ID NO: 72065 - DNA, 732 bp, Methanobrevibacter gottschalkii; identical to SEQ ID NO: 7617
  source 1..732: mol_type = genomic DNA

SEQ ID NO: 72066 - DNA, 825 bp, Methanobrevibacter gottschalkii; identical to SEQ ID NO: 7618
  source 1..825: mol_type = genomic DNA

SEQ ID NO: 72067 - DNA, 633 bp, Methanobrevibacter gottschalkii; identical to SEQ ID NO: 7619
  source 1..633: mol_type = genomic DNA

SEQ ID NO: 72068 - DNA, 216 bp, Methanobrevibacter gottschalkii; identical to SEQ ID NO: 7622
  source 1..216: mol_type = genomic DNA

SEQ ID NO: 72069 - DNA, 636 bp, Methanobrevibacter gottschalkii; identical to SEQ ID NO: 7626
  source 1..636: mol_type = genomic DNA

SEQ ID NO: 72070 - DNA, 1356 bp, Methanobrevibacter gottschalkii; identical to SEQ ID NO: 7627
  source 1..1356: mol_type = genomic DNA

SEQ ID NO: 72071 - DNA, 408 bp, Methanobrevibacter gottschalkii; identical to SEQ ID NO: 7628
  source 1..408: mol_type = genomic DNA

SEQ ID NO: 72072 - DNA, 774 bp, Methanobrevibacter gottschalkii; identical to SEQ ID NO: 7629
  source 1..774: mol_type = genomic DNA

SEQ ID NO: 72073 - DNA, 444 bp, Methanobrevibacter gottschalkii; identical to SEQ ID NO: 7630
  source 1..444: mol_type = genomic DNA

SEQ ID NO: 72074 - DNA, 867 bp, Methanobrevibacter gottschalkii; identical to SEQ ID NO: 7632
  source 1..867: mol_type = genomic DNA

SEQ ID NO: 72075 - DNA, 429 bp, Methanobrevibacter gottschalkii; identical to SEQ ID NO: 7633
  source 1..429: mol_type = genomic DNA

SEQ ID NO: 72076 - DNA, 804 bp, Methanobrevibacter gottschalkii; identical to SEQ ID NO: 7634
  source 1..804: mol_type = genomic DNA

SEQ ID NO: 72077 - DNA, 384 bp, Methanobrevibacter gottschalkii; identical to SEQ ID NO: 7638
  source 1..384: mol_type = genomic DNA

SEQ ID NO: 72078 - DNA, 1032 bp, Methanobrevibacter gottschalkii; identical to SEQ ID NO: 7642
  source 1..1032: mol_type = genomic DNA

SEQ ID NO: 72079 - DNA, 711 bp, Methanobrevibacter gottschalkii; identical to SEQ ID NO: 7647
  source 1..711: mol_type = genomic DNA

SEQ ID NO: 72080 - DNA, 675 bp, Methanobrevibacter gottschalkii; identical to SEQ ID NO: 7648
  source 1..675: mol_type = genomic DNA

SEQ ID NO: 72081 - DNA, 1074 bp, Methanobrevibacter gottschalkii; identical to SEQ ID NO: 7652
  source 1..1074: mol_type = genomic DNA

SEQ ID NO: 72082 - DNA, 1281 bp, Methanobrevibacter gottschalkii; identical to SEQ ID NO: 7657
  source 1..1281: mol_type = genomic DNA

SEQ ID NO: 72083 - DNA, 1188 bp, Methanobrevibacter gottschalkii; identical to SEQ ID NO: 7658
  source 1..1188: mol_type = genomic DNA

SEQ ID NO: 72084 - DNA, 654 bp, Methanobrevibacter gottschalkii; identical to SEQ ID NO: 7659
  source 1..654: mol_type = genomic DNA

SEQ ID NO: 72085 - DNA, 1236 bp, Methanobrevibacter gottschalkii; identical to SEQ ID NO: 7661
  source 1..1236: mol_type = genomic DNA

SEQ ID NO: 72086 - DNA, 1083 bp, Methanobrevibacter gottschalkii; identical to SEQ ID NO: 7668
  source 1..1083: mol_type = genomic DNA

SEQ ID NO: 72087 - DNA, 432 bp, Methanobrevibacter gottschalkii; identical to SEQ ID NO: 7672
  source 1..432: mol_type = genomic DNA

SEQ ID NO: 72088 - DNA, 732 bp, Methanobrevibacter gottschalkii; identical to SEQ ID NO: 7673
  source 1..732: mol_type = genomic DNA

SEQ ID NO: 72089 - DNA, 1029 bp, Methanobrevibacter gottschalkii; identical to SEQ ID NO: 7674
  source 1..1029: mol_type = genomic DNA

SEQ ID NO: 72090 - DNA, 396 bp, Methanobrevibacter gottschalkii; identical to SEQ ID NO: 7676
  source 1..396: mol_type = genomic DNA

SEQ ID NO: 72091 - DNA, 498 bp, Methanobrevibacter gottschalkii; identical to SEQ ID NO: 7677
  source 1..498: mol_type = genomic DNA

SEQ ID NO: 72092 - DNA, 717 bp, Methanobrevibacter gottschalkii; identical to SEQ ID NO: 7683
  source 1..717: mol_type = genomic DNA

SEQ ID NO: 72093 - DNA, 570 bp, Methanobrevibacter gottschalkii; identical to SEQ ID NO: 7690
  source 1..570: mol_type = genomic DNA

SEQ ID NO: 72094 - DNA, 585 bp, Methanobrevibacter gottschalkii; identical to SEQ ID NO: 7693
  source 1..585: mol_type = genomic DNA

SEQ ID NO: 72095 - DNA, 630 bp, Methanobrevibacter gottschalkii; identical to SEQ ID NO: 7699
  source 1..630: mol_type = genomic DNA

SEQ ID NO: 72096 - DNA, 2727 bp, Methanobrevibacter gottschalkii; identical to SEQ ID NO: 7701
  source 1..2727: mol_type = genomic DNA

SEQ ID NO: 72097 - DNA, 1014 bp, Methanobrevibacter gottschalkii; identical to SEQ ID NO: 7705
  source 1..1014: mol_type = genomic DNA

SEQ ID NO: 72098 - DNA, 4047 bp, Methanobrevibacter gottschalkii; identical to SEQ ID NO: 7711
  source 1..4047: mol_type = genomic DNA

SEQ ID NO: 72099 - DNA, 789 bp, Methanobrevibacter gottschalkii; identical to SEQ ID NO: 7712
  source 1..789: mol_type = genomic DNA

SEQ ID NO: 72100 - DNA, 507 bp, Methanobrevibacter gottschalkii; identical to SEQ ID NO: 7717
  source 1..507: mol_type = genomic DNA

SEQ ID NO: 72101 - DNA, 1059 bp, Methanobrevibacter gottschalkii; identical to SEQ ID NO: 7722
  source 1..1059: mol_type = genomic DNA

SEQ ID NO: 72102 - DNA, 519 bp, Methanobrevibacter gottschalkii; identical to SEQ ID NO: 7723
  source 1..519: mol_type = genomic DNA

SEQ ID NO: 72103 - DNA, 891 bp, Methanobrevibacter gottschalkii; identical to SEQ ID NO: 7724
  source 1..891: mol_type = genomic DNA

SEQ ID NO: 72104 - DNA, 306 bp, Methanobrevibacter gottschalkii; identical to SEQ ID NO: 7726
  source 1..306: mol_type = genomic DNA

SEQ ID NO: 72105 - DNA, 339 bp, Methanobrevibacter gottschalkii; identical to SEQ ID NO: 7728
  source 1..339: mol_type = genomic DNA

SEQ ID NO: 72106 - DNA, 1092 bp, Methanobrevibacter gottschalkii; identical to SEQ ID NO: 7729
  source 1..1092: mol_type = genomic DNA

SEQ ID NO: 72107 - DNA, 2688 bp, Methanobrevibacter gottschalkii; identical to SEQ ID NO: 7731
  source 1..2688: mol_type = genomic DNA

SEQ ID NO: 72108 - DNA, 1203 bp, Methanobrevibacter gottschalkii; identical to SEQ ID NO: 7735
  source 1..1203: mol_type = genomic DNA

SEQ ID NO: 72109 - DNA, 387 bp, Methanobrevibacter gottschalkii; identical to SEQ ID NO: 7738
  source 1..387: mol_type = genomic DNA

SEQ ID NO: 72110 - DNA, 1071 bp, Methanobrevibacter gottschalkii; identical to SEQ ID NO: 7741
  source 1..1071: mol_type = genomic DNA

SEQ ID NO: 72111 - DNA, 819 bp, Methanobrevibacter gottschalkii; identical to SEQ ID NO: 7742
  source 1..819: mol_type = genomic DNA

SEQ ID NO: 72112 - DNA, 651 bp, Methanobrevibacter gottschalkii; identical to SEQ ID NO: 7743
  source 1..651: mol_type = genomic DNA

SEQ ID NO: 72113 - DNA, 684 bp, Methanobrevibacter gottschalkii; identical to SEQ ID NO: 7744
  source 1..684: mol_type = genomic DNA

SEQ ID NO: 72114 - DNA, 723 bp, Methanobrevibacter gottschalkii; identical to SEQ ID NO: 7746
  source 1..723: mol_type = genomic DNA

SEQ ID NO: 72115 - DNA, 273 bp, Methanobrevibacter gottschalkii; identical to SEQ ID NO: 7747
  source 1..273: mol_type = genomic DNA

SEQ ID NO: 72116 - DNA, 1698 bp, Methanobrevibacter gottschalkii; identical to SEQ ID NO: 7750
  source 1..1698: mol_type = genomic DNA

SEQ ID NO: 72117 - DNA, 855 bp, Methanobrevibacter gottschalkii; identical to SEQ ID NO: 7751
  source 1..855: mol_type = genomic DNA

SEQ ID NO: 72118 - DNA, 1386 bp, Methanobrevibacter gottschalkii; identical to SEQ ID NO: 7755
  source 1..1386: mol_type = genomic DNA

SEQ ID NO: 72119 - DNA, 651 bp, Methanobrevibacter gottschalkii; identical to SEQ ID NO: 7757
  source 1..651: mol_type = genomic DNA

SEQ ID NO: 72120 - DNA, 480 bp, Methanobrevibacter gottschalkii; identical to SEQ ID NO: 7758
  source 1..480: mol_type = genomic DNA

SEQ ID NO: 72121 - DNA, 165 bp, Methanobrevibacter gottschalkii; identical to SEQ ID NO: 7760
  source 1..165: mol_type = genomic DNA

SEQ ID NO: 72122 - DNA, 2571 bp, Methanobrevibacter gottschalkii; identical to SEQ ID NO: 7763
  source 1..2571: mol_type = genomic DNA

SEQ ID NO: 72123 - DNA, 438 bp, Methanobrevibacter gottschalkii; identical to SEQ ID NO: 7765
  source 1..438: mol_type = genomic DNA

SEQ ID NO: 72124 - DNA, 867 bp, Methanobrevibacter gottschalkii; identical to SEQ ID NO: 7766
  source 1..867: mol_type = genomic DNA

SEQ ID NO: 72125 - DNA, 534 bp, Methanobrevibacter gottschalkii; identical to SEQ ID NO: 7767
  source 1..534: mol_type = genomic DNA

SEQ ID NO: 72126 - DNA, 1926 bp, Methanobrevibacter gottschalkii; identical to SEQ ID NO: 7768
  source 1..1926: mol_type = genomic DNA

SEQ ID NO: 72127 - DNA, 771 bp, Methanobrevibacter gottschalkii; identical to SEQ ID NO: 7771
  source 1..771: mol_type = genomic DNA

SEQ ID NO: 72128 - DNA, 1110 bp, Methanobrevibacter gottschalkii; identical to SEQ ID NO: 7772
  source 1..1110: mol_type = genomic DNA

SEQ ID NO: 72129 - DNA, 519 bp, Methanobrevibacter gottschalkii; identical to SEQ ID NO: 7785
  source 1..519: mol_type = genomic DNA

SEQ ID NO: 72130 - DNA, 2430 bp, Methanobrevibacter gottschalkii; identical to SEQ ID NO: 7788
  source 1..2430: mol_type = genomic DNA

SEQ ID NO: 72131 - DNA, 291 bp, Methanobrevibacter gottschalkii; identical to SEQ ID NO: 7805
  source 1..291: mol_type = genomic DNA

SEQ ID NO: 72132 - DNA, 933 bp, Methanobrevibacter gottschalkii; identical to SEQ ID NO: 7810
  source 1..933: mol_type = genomic DNA

SEQ ID NO: 72133 - DNA, 783 bp, Methanobrevibacter gottschalkii; identical to SEQ ID NO: 7821
  source 1..783: mol_type = genomic DNA

SEQ ID NO: 72134 - DNA, 999 bp, Methanobrevibacter gottschalkii; identical to SEQ ID NO: 7826
  source 1..999: mol_type = genomic DNA

SEQ ID NO: 72135 - DNA, 216 bp, Methanobrevibacter gottschalkii; identical to SEQ ID NO: 7828
  source 1..216: mol_type = genomic DNA

SEQ ID NO: 72136 - DNA, 846 bp, Methanobrevibacter gottschalkii; identical to SEQ ID NO: 7831
  source 1..846: mol_type = genomic DNA

SEQ ID NO: 72137 - DNA, 1578 bp, Methanobrevibacter gottschalkii; identical to SEQ ID NO: 7832
  source 1..1578: mol_type = genomic DNA

SEQ ID NO: 72138 - DNA, 1575 bp, Methanobrevibacter gottschalkii; identical to SEQ ID NO: 7833
  source 1..1575: mol_type = genomic DNA

SEQ ID NO: 72139 - DNA, 1545 bp, Methanobrevibacter gottschalkii; identical to SEQ ID NO: 7834
  source 1..1545: mol_type = genomic DNA

SEQ ID NO: 72140 - DNA, 939 bp, Methanobrevibacter gottschalkii; identical to SEQ ID NO: 7847
  source 1..939: mol_type = genomic DNA

SEQ ID NO: 72141 - DNA, 1704 bp, Methanobrevibacter gottschalkii; identical to SEQ ID NO: 7849
  source 1..1704: mol_type = genomic DNA

SEQ ID NO: 72142 - DNA, 1869 bp, Methanobrevibacter gottschalkii; identical to SEQ ID NO: 7852
  source 1..1869: mol_type = genomic DNA

SEQ ID NO: 72143 - DNA, 1068 bp, Methanobrevibacter gottschalkii; identical to SEQ ID NO: 7857
  source 1..1068: mol_type = genomic DNA

SEQ ID NO: 72144 - DNA, 1125 bp, Methanobrevibacter gottschalkii; identical to SEQ ID NO: 7858
  source 1..1125: mol_type = genomic DNA

SEQ ID NO: 72145 - DNA, 1602 bp, Methanobrevibacter gottschalkii; identical to SEQ ID NO: 7863
  source 1..1602: mol_type = genomic DNA

SEQ ID NO: 72146 - DNA, 627 bp, Methanobrevibacter gottschalkii; identical to SEQ ID NO: 7868
  source 1..627: mol_type = genomic DNA

SEQ ID NO: 72147 - DNA, 411 bp, Methanobrevibacter gottschalkii; identical to SEQ ID NO: 7869
  source 1..411: mol_type = genomic DNA

SEQ ID NO: 72148 - DNA, 840 bp, Methanobrevibacter gottschalkii; identical to SEQ ID NO: 7870
  source 1..840: mol_type = genomic DNA

SEQ ID NO: 72149 - DNA, 696 bp, Methanobrevibacter gottschalkii; identical to SEQ ID NO: 7874
  source 1..696: mol_type = genomic DNA

SEQ ID NO: 72150 - DNA, 1170 bp, Methanobrevibacter gottschalkii; identical to SEQ ID NO: 7875
  source 1..1170: mol_type = genomic DNA

SEQ ID NO: 72151 - DNA, 720 bp, Methanobrevibacter gottschalkii; identical to SEQ ID NO: 7876
  source 1..720: mol_type = genomic DNA

SEQ ID NO: 72152 - DNA, 228 bp, Methanobrevibacter gottschalkii; identical to SEQ ID NO: 7881
  source 1..228: mol_type = genomic DNA

SEQ ID NO: 72153 - DNA, 1137 bp, Methanobrevibacter gottschalkii; identical to SEQ ID NO: 7882
  source 1..1137: mol_type = genomic DNA

SEQ ID NO: 72154 - DNA, 1236 bp, Methanobrevibacter gottschalkii; identical to SEQ ID NO: 7885
  source 1..1236: mol_type = genomic DNA

SEQ ID NO: 72155 - DNA, 933 bp, Methanobrevibacter gottschalkii; identical to SEQ ID NO: 7894
  source 1..933: mol_type = genomic DNA

SEQ ID NO: 72156 - DNA, 240 bp, Methanobrevibacter gottschalkii; identical to SEQ ID NO: 7895
  source 1..240: mol_type = genomic DNA

SEQ ID NO: 72157 - DNA, 207 bp, Methanobrevibacter gottschalkii; identical to SEQ ID NO: 7896
  source 1..207: mol_type = genomic DNA

SEQ ID NO: 72158 - DNA, 717 bp, Methanobrevibacter gottschalkii; identical to SEQ ID NO: 7897
  source 1..717: mol_type = genomic DNA

SEQ ID NO: 72159 - DNA, 330 bp, Methanobrevibacter gottschalkii; identical to SEQ ID NO: 7898
  source 1..330: mol_type = genomic DNA

SEQ ID NO: 72160 - DNA, 816 bp, Methanobrevibacter gottschalkii; identical to SEQ ID NO: 7899
  source 1..816: mol_type = genomic DNA

SEQ ID NO: 72161 - DNA, 702 bp, Methanobrevibacter gottschalkii; identical to SEQ ID NO: 7900
  source 1..702: mol_type = genomic DNA

SEQ ID NO: 72162 - DNA, 879 bp, Methanobrevibacter gottschalkii; identical to SEQ ID NO: 7901
  source 1..879: mol_type = genomic DNA

SEQ ID NO: 72163 - DNA, 1332 bp, Methanobrevibacter gottschalkii; identical to SEQ ID NO: 7906
  source 1..1332: mol_type = genomic DNA

SEQ ID NO: 72164 - DNA, 1173 bp, Methanobrevibacter gottschalkii; identical to SEQ ID NO: 7911
  source 1..1173: mol_type = genomic DNA

SEQ ID NO: 72165 - DNA, 1320 bp, Methanobrevibacter gottschalkii; identical to SEQ ID NO: 7913
  source 1..1320: mol_type = genomic DNA

SEQ ID NO: 72166 - DNA, 945 bp, Methanobrevibacter gottschalkii; identical to SEQ ID NO: 7914
  source 1..945: mol_type = genomic DNA

SEQ ID NO: 72167 - DNA, 1167 bp, Methanobrevibacter gottschalkii; identical to SEQ ID NO: 7918
  source 1..1167: mol_type = genomic DNA

SEQ ID NO: 72168 - DNA, 2370 bp, Methanobrevibacter gottschalkii; identical to SEQ ID NO: 7928
  source 1..2370: mol_type = genomic DNA

SEQ ID NO: 72169 - DNA, 1023 bp, Methanobrevibacter gottschalkii; identical to SEQ ID NO: 7930
  source 1..1023: mol_type = genomic DNA

SEQ ID NO: 72170 - DNA, 549 bp, Methanobrevibacter gottschalkii; identical to SEQ ID NO: 7936
  source 1..549: mol_type = genomic DNA

SEQ ID NO: 72171 - DNA, 726 bp, Methanobrevibacter gottschalkii; identical to SEQ ID NO: 7937
  source 1..726: mol_type = genomic DNA

SEQ ID NO: 72172 - DNA, 597 bp, Methanobrevibacter gottschalkii; identical to SEQ ID NO: 7942
  source 1..597: mol_type = genomic DNA

SEQ ID NO: 72173 - DNA, 1479 bp, Methanobrevibacter gottschalkii; identical to SEQ ID NO: 7944
  source 1..1479: mol_type = genomic DNA

SEQ ID NO: 72174 - DNA, 999 bp, Methanobrevibacter gottschalkii; identical to SEQ ID NO: 7949
  source 1..999: mol_type = genomic DNA

SEQ ID NO: 72175 - DNA, 447 bp, Methanobrevibacter gottschalkii; identical to SEQ ID NO: 7951
  source 1..447: mol_type = genomic DNA

SEQ ID NO: 72176 - DNA, 492 bp, Methanobrevibacter gottschalkii; identical to SEQ ID NO: 7952
  source 1..492: mol_type = genomic DNA

SEQ ID NO: 72177 - DNA, 252 bp, Methanobrevibacter gottschalkii; identical to SEQ ID NO: 7954
  source 1..252: mol_type = genomic DNA

SEQ ID NO: 72178 - DNA, 477 bp, Methanobrevibacter gottschalkii; identical to SEQ ID NO: 7955
  source 1..477: mol_type = genomic DNA

SEQ ID NO: 72179 - DNA, 282 bp, Methanobrevibacter gottschalkii; identical to SEQ ID NO: 7956
  source 1..282: mol_type = genomic DNA

SEQ ID NO: 72180 - DNA, 336 bp, Methanobrevibacter gottschalkii; identical to SEQ ID NO: 7957
  source 1..336: mol_type = genomic DNA

SEQ ID NO: 72181 - DNA, 1455 bp, Methanobrevibacter gottschalkii; identical to SEQ ID NO: 7958
  source 1..1455: mol_type = genomic DNA

SEQ ID NO: 72182 - DNA, 387 bp, Methanobrevibacter gottschalkii; identical to SEQ ID NO: 7959
  source 1..387: mol_type = genomic DNA

SEQ ID NO: 72183 - DNA, 234 bp, Methanobrevibacter gottschalkii; identical to SEQ ID NO: 7960
  source 1..234: mol_type = genomic DNA

SEQ ID NO: 72184 - DNA, 423 bp, Methanobrevibacter gottschalkii; identical to SEQ ID NO: 7961
  source 1..423: mol_type = genomic DNA

SEQ ID NO: 72185 - DNA, 267 bp, Methanobrevibacter gottschalkii; identical to SEQ ID NO: 7962
  source 1..267: mol_type = genomic DNA

SEQ ID NO: 72186 - DNA, 315 bp, Methanobrevibacter gottschalkii; identical to SEQ ID NO: 7963
  source 1..315: mol_type = genomic DNA

SEQ ID NO: 72187 - DNA, 966 bp, Methanobrevibacter gottschalkii; identical to SEQ ID NO: 7964
  source 1..966: mol_type = genomic DNA

SEQ ID NO: 72188 - DNA, 705 bp, Methanobrevibacter gottschalkii; identical to SEQ ID NO: 7965
  source 1..705: mol_type = genomic DNA

SEQ ID NO: 72189 - DNA, 1134 bp, Methanobrevibacter gottschalkii; identical to SEQ ID NO: 7972
  source 1..1134: mol_type = genomic DNA

SEQ ID NO: 72190 - DNA, 1062 bp, Methanobrevibacter gottschalkii; identical to SEQ ID NO: 7974
  source 1..1062: mol_type = genomic DNA

SEQ ID NO: 72191 - DNA, 1434 bp, Methanobrevibacter gottschalkii; identical to SEQ ID NO: 7975
  source 1..1434: mol_type = genomic DNA

SEQ ID NO: 72192 - DNA, 660 bp, Methanobrevibacter gottschalkii; identical to SEQ ID NO: 7976
  source 1..660: mol_type = genomic DNA

SEQ ID NO: 72193 - DNA, 807 bp, Methanobrevibacter gottschalkii; identical to SEQ ID NO: 7981
  source 1..807: mol_type = genomic DNA

SEQ ID NO: 72194 - DNA, 768 bp, Methanobrevibacter gottschalkii; identical to SEQ ID NO: 7983
  source 1..768: mol_type = genomic DNA

SEQ ID NO: 72195 - DNA, 1425 bp, Methanobrevibacter gottschalkii; identical to SEQ ID NO: 7984
  source 1..1425: mol_type = genomic DNA

SEQ ID NO: 72196 - DNA, 501 bp, Methanobrevibacter gottschalkii; identical to SEQ ID NO: 7985
  source 1..501: mol_type = genomic DNA

SEQ ID NO: 72197 - DNA, 3489 bp, Methanobrevibacter gottschalkii; identical to SEQ ID NO: 7994
  source 1..3489: mol_type = genomic DNA

SEQ ID NO: 72198 - DNA, 4065 bp, Methanobrevibacter gottschalkii; identical to SEQ ID NO: 7995
  source 1..4065: mol_type = genomic DNA

SEQ ID NO: 72199 - DNA, 4815 bp, Methanobrevibacter gottschalkii; identical to SEQ ID NO: 7996
  source 1..4815: mol_type = genomic DNA

SEQ ID NO: 72200 - DNA, 843 bp, Methanobrevibacter gottschalkii; identical to SEQ ID NO: 7997
  source 1..843: mol_type = genomic DNA

SEQ ID NO: 72201 - DNA, 531 bp, Methanobrevibacter gottschalkii; identical to SEQ ID NO: 7999
  source 1..531: mol_type = genomic DNA

SEQ ID NO: 72202 - DNA, 411 bp, Methanobrevibacter gottschalkii; identical to SEQ ID NO: 8000
  source 1..411: mol_type = genomic DNA

SEQ ID NO: 72203 - DNA, 570 bp, Methanobrevibacter gottschalkii; identical to SEQ ID NO: 8004
  source 1..570: mol_type = genomic DNA

SEQ ID NO: 72204 - DNA, 1215 bp, Methanobrevibacter gottschalkii; identical to SEQ ID NO: 8005
  source 1..1215: mol_type = genomic DNA

SEQ ID NO: 72205 - DNA, 528 bp, Methanobrevibacter gottschalkii; identical to SEQ ID NO: 8006
  source 1..528: mol_type = genomic DNA

SEQ ID NO: 72206 - DNA, 402 bp, Methanobrevibacter gottschalkii; identical to SEQ ID NO: 8022
  source 1..402: mol_type = genomic DNA

SEQ ID NO: 72207 - DNA, 777 bp, Methanobrevibacter gottschalkii; identical to SEQ ID NO: 8023
  source 1..777: mol_type = genomic DNA

SEQ ID NO: 72208 - DNA, 2493 bp, Methanobrevibacter gottschalkii; identical to SEQ ID NO: 8026
  source 1..2493: mol_type = genomic DNA

SEQ ID NO: 72209 - DNA, 438 bp, Methanobrevibacter gottschalkii; identical to SEQ ID NO: 8031
  source 1..438: mol_type = genomic DNA

SEQ ID NO: 72210 - DNA, 402 bp, Methanobrevibacter gottschalkii; identical to SEQ ID NO: 8035
  source 1..402: mol_type = genomic DNA

SEQ ID NO: 72211 - DNA, 486 bp, Methanobrevibacter gottschalkii; identical to SEQ ID NO: 8036
  source 1..486: mol_type = genomic DNA

SEQ ID NO: 72212 - DNA, 906 bp, Methanobrevibacter gottschalkii; identical to SEQ ID NO: 8037
  source 1..906: mol_type = genomic DNA

SEQ ID NO: 72213 - DNA, 408 bp, Methanobrevibacter gottschalkii; identical to SEQ ID NO: 8038
  source 1..408: mol_type = genomic DNA

SEQ ID NO: 72214 - DNA, 216 bp, Methanobrevibacter gottschalkii; identical to SEQ ID NO: 8039
  source 1..216: mol_type = genomic DNA

SEQ ID NO: 72215 - DNA, 2121 bp, Methanobrevibacter gottschalkii; identical to SEQ ID NO: 8043
  source 1..2121: mol_type = genomic DNA

SEQ ID NO: 72216 - DNA, 852 bp, Methanobrevibacter gottschalkii; identical to SEQ ID NO: 8044
  source 1..852: mol_type = genomic DNA

SEQ ID NO: 72217 - DNA, 2811 bp, Methanobrevibacter gottschalkii; identical to SEQ ID NO: 8046
  source 1..2811: mol_type = genomic DNA

SEQ ID NO: 72218 - DNA, 330 bp, Methanobrevibacter gottschalkii; identical to SEQ ID NO: 8047
  source 1..330: mol_type = genomic DNA

SEQ ID NO: 72219 - DNA, 957 bp, Methanobrevibacter gottschalkii; identical to SEQ ID NO: 8052
  source 1..957: mol_type = genomic DNA

SEQ ID NO: 72220 - DNA, 1446 bp, Methanobrevibacter gottschalkii; identical to SEQ ID NO: 8054
  source 1..1446: mol_type = genomic DNA

SEQ ID NO: 72221 - DNA, 1386 bp, Methanobrevibacter gottschalkii; identical to SEQ ID NO: 8063
  source 1..1386: mol_type = genomic DNA

SEQ ID NO: 72222 - DNA, 834 bp, Methanobrevibacter gottschalkii; identical to SEQ ID NO: 8071
  source 1..834: mol_type = genomic DNA

SEQ ID NO: 72223 - DNA, 1557 bp, Methanobrevibacter gottschalkii; identical to SEQ ID NO: 8077
  source 1..1557: mol_type = genomic DNA

SEQ ID NO: 72224 - DNA, 585 bp, Methanobrevibacter gottschalkii; identical to SEQ ID NO: 8078
  source 1..585: mol_type = genomic DNA

SEQ ID NO: 72225 - DNA, 339 bp, Methanobrevibacter gottschalkii; identical to SEQ ID NO: 8079
  source 1..339: mol_type = genomic DNA

SEQ ID NO: 72226 - DNA, 642 bp, Methanobrevibacter gottschalkii; identical to SEQ ID NO: 8080
  source 1..642: mol_type = genomic DNA

SEQ ID NO: 72227 - DNA, 684 bp, Methanobrevibacter gottschalkii; identical to SEQ ID NO: 8081
  source 1..684: mol_type = genomic DNA

SEQ ID NO: 72228 - DNA, 516 bp, Methanobrevibacter gottschalkii; identical to SEQ ID NO: 8082
  source 1..516: mol_type = genomic DNA

SEQ ID NO: 72229 - DNA, 2931 bp, Methanobrevibacter gottschalkii; identical to SEQ ID NO: 8083
  source 1..2931: mol_type = genomic DNA

SEQ ID NO: 72230 - DNA, 624 bp, Methanobrevibacter gottschalkii; identical to SEQ ID NO: 8084
  source 1..624: mol_type = genomic DNA

SEQ ID NO: 72231 - DNA, 483 bp, Methanobrevibacter gottschalkii; identical to SEQ ID NO: 8085
  source 1..483: mol_type = genomic DNA

SEQ ID NO: 72232 - DNA, 1062 bp, Methanobrevibacter gottschalkii; identical to SEQ ID NO: 8091
  source 1..1062: mol_type = genomic DNA

SEQ ID NO: 72233 - DNA, 903 bp, Methanobrevibacter gottschalkii; identical to SEQ ID NO: 8092
  source 1..903: mol_type = genomic DNA

SEQ ID NO: 72234 - DNA, 333 bp, Methanobrevibacter gottschalkii; identical to SEQ ID NO: 8101
  source 1..333: mol_type = genomic DNA

SEQ ID NO: 72235 - DNA, 834 bp, Methanobrevibacter gottschalkii; identical to SEQ ID NO: 8103
  source 1..834: mol_type = genomic DNA

SEQ ID NO: 72236 - DNA, 1365 bp, Methanobrevibacter gottschalkii; identical to SEQ ID NO: 8105
  source 1..1365: mol_type = genomic DNA

SEQ ID NO: 72237 - DNA, 426 bp, Methanobrevibacter gottschalkii; identical to SEQ ID NO: 8109
  source 1..426: mol_type = genomic DNA

SEQ ID NO: 72238 - DNA, 1113 bp, Methanobrevibacter gottschalkii; identical to SEQ ID NO: 8116
  source 1..1113: mol_type = genomic DNA

SEQ ID NO: 72239 - DNA, 843 bp, Methanobrevibacter gottschalkii; identical to SEQ ID NO: 8118
  source 1..843: mol_type = genomic DNA

SEQ ID NO: 72240 - DNA, 1542 bp, Methanobrevibacter gottschalkii; identical to SEQ ID NO: 8123
  source 1..1542: mol_type = genomic DNA

SEQ ID NO: 72241 - DNA, 1206 bp, Methanobrevibacter gottschalkii; identical to SEQ ID NO: 8124
  source 1..1206: mol_type = genomic DNA

SEQ ID NO: 72242 - DNA, 1155 bp, Methanobrevibacter gottschalkii; identical to SEQ ID NO: 8125
  source 1..1155: mol_type = genomic DNA

SEQ ID NO: 72243 - DNA, 1047 bp, Methanobrevibacter gottschalkii; identical to SEQ ID NO: 8126
  source 1..1047: mol_type = genomic DNA

SEQ ID NO: 72244 - DNA, 408 bp, Methanobrevibacter gottschalkii; identical to SEQ ID NO: 8127
  source 1..408: mol_type = genomic DNA

SEQ ID NO: 72245 - DNA, 795 bp, Methanobrevibacter gottschalkii; identical to SEQ ID NO: 8129
  source 1..795: mol_type = genomic DNA

SEQ ID NO: 72246 - DNA, 1644 bp, Methanobrevibacter gottschalkii; identical to SEQ ID NO: 8134
  source 1..1644: mol_type = genomic DNA

SEQ ID NO: 72247 - DNA, 1305 bp, Methanobrevibacter gottschalkii; identical to SEQ ID NO: 8135
  source 1..1305: mol_type = genomic DNA

SEQ ID NO: 72248 - DNA, 495 bp, Methanobrevibacter gottschalkii; identical to SEQ ID NO: 8138
  source 1..495: mol_type = genomic DNA

SEQ ID NO: 72249 - DNA, 1035 bp, Methanobrevibacter gottschalkii; identical to SEQ ID NO: 8142
  source 1..1035: mol_type = genomic DNA

SEQ ID NO: 72250 - DNA, 177 bp, Methanobrevibacter gottschalkii; identical to SEQ ID NO: 8145
  source 1..177: mol_type = genomic DNA

SEQ ID NO: 72251 - DNA, 501 bp, Methanobrevibacter gottschalkii; identical to SEQ ID NO: 8148
  source 1..501: mol_type = genomic DNA

SEQ ID NO: 72252 - DNA, 603 bp, Methanobrevibacter gottschalkii; identical to SEQ ID NO: 8150
  source 1..603: mol_type = genomic DNA

SEQ ID NO: 72253 - DNA, 1272 bp, Methanobrevibacter gottschalkii; identical to SEQ ID NO: 8151
  source 1..1272: mol_type = genomic DNA

SEQ ID NO: 72254 - DNA, 867 bp, Methanobrevibacter gottschalkii; identical to SEQ ID NO: 8152
  source 1..867: mol_type = genomic DNA

SEQ ID NO: 72255 - DNA, 939 bp, Methanobrevibacter gottschalkii; identical to SEQ ID NO: 8153
  source 1..939: mol_type = genomic DNA

SEQ ID NO: 72256 - DNA, 426 bp, Methanobrevibacter gottschalkii; identical to SEQ ID NO: 8157
  source 1..426: mol_type = genomic DNA

SEQ ID NO: 72257 - DNA, 1698 bp, Methanobrevibacter gottschalkii; identical to SEQ ID NO: 8163
  source 1..1698: mol_type = genomic DNA

SEQ ID NO: 72258 - DNA, 102 bp, Methanobrevibacter gottschalkii; identical to SEQ ID NO: 8166
  source 1..102: mol_type = genomic DNA

SEQ ID NO: 72259 - DNA, 1245 bp, Methanobrevibacter gottschalkii; identical to SEQ ID NO: 8169
  source 1..1245: mol_type = genomic DNA

SEQ ID NO: 72260 - DNA, 450 bp, Methanobrevibacter gottschalkii; identical to SEQ ID NO: 8173
  source 1..450: mol_type = genomic DNA

SEQ ID NO: 72261 - DNA, 867 bp, Methanobrevibacter gottschalkii; identical to SEQ ID NO: 8175
  source 1..867: mol_type = genomic DNA

SEQ ID NO: 72262 - DNA, 1008 bp, Methanobrevibacter gottschalkii; identical to SEQ ID NO: 8177
  source 1..1008: mol_type = genomic DNA

SEQ ID NO: 72263 - DNA, 318 bp, Methanobrevibacter gottschalkii; identical to SEQ ID NO: 8178
  source 1..318: mol_type = genomic DNA

SEQ ID NO: 72264 - DNA, 279 bp, Methanobrevibacter gottschalkii; identical to SEQ ID NO: 8179
  source 1..279: mol_type = genomic DNA

SEQ ID NO: 72265 - DNA, 1080 bp, Methanobrevibacter gottschalkii; identical to SEQ ID NO: 8180
  source 1..1080: mol_type = genomic DNA

SEQ ID NO: 72266 - DNA, 960 bp, Methanobrevibacter gottschalkii; identical to SEQ ID NO: 8181
  source 1..960: mol_type = genomic DNA

SEQ ID NO: 72267 - DNA, 960 bp, Methanobrevibacter gottschalkii; identical to SEQ ID NO: 8182
  source 1..960: mol_type = genomic DNA

SEQ ID NO: 72268 - DNA, 858 bp, Methanobrevibacter gottschalkii; identical to SEQ ID NO: 8183
  source 1..858: mol_type = genomic DNA

SEQ ID NO: 72269 - DNA, 1404 bp, Methanobrevibacter gottschalkii; identical to SEQ ID NO: 8184
  source 1..1404: mol_type = genomic DNA

SEQ ID NO: 72270 - DNA, 906 bp, Methanobrevibacter gottschalkii; identical to SEQ ID NO: 8187
  source 1..906: mol_type = genomic DNA

SEQ ID NO: 72271 - DNA, 1131 bp, Methanobrevibacter gottschalkii; identical to SEQ ID NO: 8198
  source 1..1131: mol_type = genomic DNA

SEQ ID NO: 72272 - DNA, 705 bp, Methanobrevibacter gottschalkii; identical to SEQ ID NO: 8201
  source 1..705: mol_type = genomic DNA

SEQ ID NO: 72273 - DNA, 963 bp, Methanobrevibacter gottschalkii; identical to SEQ ID NO: 8203
  source 1..963: mol_type = genomic DNA

SEQ ID NO: 72274 - DNA, 312 bp, Methanobrevibacter gottschalkii; identical to SEQ ID NO: 8204
  source 1..312: mol_type = genomic DNA

SEQ ID NO: 72275 - DNA, 162 bp, Methanobrevibacter gottschalkii; identical to SEQ ID NO: 8213
  source 1..162: mol_type = genomic DNA

SEQ ID NO: 72276 - DNA, 915 bp, Methanobrevibacter gottschalkii; identical to SEQ ID NO: 8215
  source 1..915: mol_type = genomic DNA

SEQ ID NO: 72277 - DNA, 1377 bp, Methanobrevibacter gottschalkii; identical to SEQ ID NO: 8217
  source 1..1377: mol_type = genomic DNA

SEQ ID NO: 72278 - DNA, 804 bp, Methanobrevibacter gottschalkii; identical to SEQ ID NO: 8239
  source 1..804: mol_type = genomic DNA

SEQ ID NO: 72279 - DNA, 1098 bp, Methanobrevibacter gottschalkii; identical to SEQ ID NO: 8245
  source 1..1098: mol_type = genomic DNA

SEQ ID NO: 72280 - DNA, 231 bp, Methanobrevibacter gottschalkii; identical to SEQ ID NO: 8246
  source 1..231: mol_type = genomic DNA

SEQ ID NO: 72281 - DNA, 570 bp, Methanobrevibacter gottschalkii; identical to SEQ ID NO: 8247
  source 1..570: mol_type = genomic DNA

SEQ ID NO: 72282 - DNA, 1683 bp, Methanobrevibacter gottschalkii; identical to SEQ ID NO: 8253
  source 1..1683: mol_type = genomic DNA

SEQ ID NO: 72283 - DNA, 546 bp, Methanobrevibacter gottschalkii; identical to SEQ ID NO: 8265
  source 1..546: mol_type = genomic DNA

SEQ ID NO: 72284 - DNA, 2679 bp, Methanobrevibacter gottschalkii; identical to SEQ ID NO: 8269
  source 1..2679: mol_type = genomic DNA

SEQ ID NO: 72285 - DNA, 447 bp, Methanobrevibacter gottschalkii; identical to SEQ ID NO: 8274
  source 1..447: mol_type = genomic DNA

SEQ ID NO: 72286 - DNA, 582 bp, Methanobrevibacter gottschalkii; identical to SEQ ID NO: 8279
  source 1..582: mol_type = genomic DNA

SEQ ID NO: 72287 - DNA, 177 bp, Methanobrevibacter gottschalkii; identical to SEQ ID NO: 8287
  source 1..177: mol_type = genomic DNA

SEQ ID NO: 72288 - DNA, 942 bp, Methanobrevibacter gottschalkii; identical to SEQ ID NO: 8290
  source 1..942: mol_type = genomic DNA

SEQ ID NO: 72289 - DNA, 675 bp, Methanobrevibacter gottschalkii; identical to SEQ ID NO: 8299
  source 1..675: mol_type = genomic DNA

SEQ ID NO: 72290 - DNA, 6225 bp, Methanobrevibacter gottschalkii; identical to SEQ ID NO: 8302
  source 1..6225: mol_type = genomic DNA

SEQ ID NO: 72291 - DNA, 5712 bp, Methanobrevibacter gottschalkii; identical to SEQ ID NO: 8303
  source 1..5712: mol_type = genomic DNA

SEQ ID NO: 72292 - DNA, 5262 bp, Methanobrevibacter gottschalkii; identical to SEQ ID NO: 8304
  source 1..5262: mol_type = genomic DNA

SEQ ID NO: 72293 - DNA, 492 bp, Methanobrevibacter gottschalkii; identical to SEQ ID NO: 8305
  source 1..492: mol_type = genomic DNA

SEQ ID NO: 72294 - DNA, 1083 bp, Methanobrevibacter gottschalkii; identical to SEQ ID NO: 8308
  source 1..1083: mol_type = genomic DNA

SEQ ID NO: 72295 - DNA, 1740 bp, Methanobrevibacter gottschalkii; identical to SEQ ID NO: 8309
  source 1..1740: mol_type = genomic DNA

SEQ ID NO: 72296 - DNA, 1542 bp, Methanobrevibacter gottschalkii; identical to SEQ ID NO: 8310
  source 1..1542: mol_type = genomic DNA

SEQ ID NO: 72297 - DNA, 1455 bp, Methanobrevibacter gottschalkii; identical to SEQ ID NO: 8312
  source 1..1455: mol_type = genomic DNA

SEQ ID NO: 72298 - DNA, 222 bp, Methanobrevibacter gottschalkii; identical to SEQ ID NO: 8313
  source 1..222: mol_type = genomic DNA

SEQ ID NO: 72299 - DNA, 732 bp, Methanobrevibacter gottschalkii; identical to SEQ ID NO: 8314
  source 1..732: mol_type = genomic DNA

SEQ ID NO: 72300 - DNA, 435 bp, Methanobrevibacter gottschalkii; identical to SEQ ID NO: 8315
  source 1..435: mol_type = genomic DNA

SEQ ID NO: 72301 - DNA, 627 bp, Methanobrevibacter gottschalkii; identical to SEQ ID NO: 8316
  source 1..627: mol_type = genomic DNA

SEQ ID NO: 72302 - DNA, 477 bp, Methanobrevibacter gottschalkii; identical to SEQ ID NO: 8317
  source 1..477: mol_type = genomic DNA

SEQ ID NO: 72303 - DNA, 558 bp, Methanobrevibacter gottschalkii; identical to SEQ ID NO: 8328
  source 1..558: mol_type = genomic DNA

SEQ ID NO: 72304 - DNA, 675 bp, Methanobrevibacter gottschalkii; identical to SEQ ID NO: 8331
  source 1..675: mol_type = genomic DNA

SEQ ID NO: 72305 - DNA, 651 bp, Methanobrevibacter gottschalkii; identical to SEQ ID NO: 8332
  source 1..651: mol_type = genomic DNA

SEQ ID NO: 72306 - DNA, 180 bp, Methanobrevibacter gottschalkii; identical to SEQ ID NO: 8335
  source 1..180: mol_type = genomic DNA

SEQ ID NO: 72307 - DNA, 321 bp, Methanobrevibacter gottschalkii; identical to SEQ ID NO: 8337
  source 1..321: mol_type = genomic DNA

SEQ ID NO: 72308 - DNA, 210 bp, Methanobrevibacter gottschalkii; identical to SEQ ID NO: 8343
  source 1..210: mol_type = genomic DNA

SEQ ID NO: 72309 - DNA, 696 bp, Methanobrevibacter gottschalkii; identical to SEQ ID NO: 8344
  source 1..696: mol_type = genomic DNA

SEQ ID NO: 72310 - DNA, 399 bp, Methanobrevibacter gottschalkii; identical to SEQ ID NO: 8354
  source 1..399: mol_type = genomic DNA

SEQ ID NO: 72311 - DNA, 4473 bp, Methanobrevibacter gottschalkii; identical to SEQ ID NO: 8361
  source 1..4473: mol_type = genomic DNA

SEQ ID NO: 72312 - DNA, 324 bp, Methanobrevibacter gottschalkii; identical to SEQ ID NO: 8362
  source 1..324: mol_type = genomic DNA

SEQ ID NO: 72313 - DNA, 333 bp, Methanobrevibacter gottschalkii; identical to SEQ ID NO: 8363
  source 1..333: mol_type = genomic DNA

SEQ ID NO: 72314 - DNA, 963 bp, Methanobrevibacter gottschalkii; identical to SEQ ID NO: 8367
  source 1..963: mol_type = genomic DNA

SEQ ID NO: 72315 - DNA, 909 bp, Methanobrevibacter gottschalkii; identical to SEQ ID NO: 8373
  source 1..909: mol_type = genomic DNA

SEQ ID NO: 72316 - DNA, 1887 bp, Methanobrevibacter gottschalkii; identical to SEQ ID NO: 8376
  source 1..1887: mol_type = genomic DNA

SEQ ID NO: 72317 - DNA, 570 bp, Methanobrevibacter gottschalkii; identical to SEQ ID NO: 8378
  source 1..570: mol_type = genomic DNA

SEQ ID NO: 72318 - DNA, 180 bp, Methanobrevibacter gottschalkii; identical to SEQ ID NO: 8380
  source 1..180: mol_type = genomic DNA

SEQ ID NO: 72319 - DNA, 3057 bp, Methanobrevibacter gottschalkii; identical to SEQ ID NO: 8387
  source 1..3057: mol_type = genomic DNA

SEQ ID NO: 72320 - DNA, 1110 bp, Methanobrevibacter gottschalkii; identical to SEQ ID NO: 8391
  source 1..1110: mol_type = genomic DNA

SEQ ID NO: 72321 - DNA, 699 bp, Methanobrevibacter gottschalkii; identical to SEQ ID NO: 8392
  source 1..699: mol_type = genomic DNA

SEQ ID NO: 72322 - DNA, 570 bp, Methanobrevibacter gottschalkii; identical to SEQ ID NO: 8394
  source 1..570: mol_type = genomic DNA

SEQ ID NO: 72323 - DNA, 1779 bp, Methanobrevibacter gottschalkii; identical to SEQ ID NO: 8400
  source 1..1779: mol_type = genomic DNA

SEQ ID NO: 72324 - DNA, 663 bp, Methanobrevibacter gottschalkii; identical to SEQ ID NO: 8402
  source 1..663: mol_type = genomic DNA

SEQ ID NO: 72325 - DNA, 270 bp, Methanobrevibacter gottschalkii; identical to SEQ ID NO: 8404
  source 1..270: mol_type = genomic DNA

SEQ ID NO: 72326 - DNA, 729 bp, Methanobrevibacter gottschalkii; identical to SEQ ID NO: 8405
  source 1..729: mol_type = genomic DNA

SEQ ID NO: 72327 - DNA, 915 bp, Methanobrevibacter gottschalkii; identical to SEQ ID NO: 8407
  source 1..915: mol_type = genomic DNA

SEQ ID NO: 72328 - DNA, 1419 bp, Methanobrevibacter gottschalkii; identical to SEQ ID NO: 8408
  source 1..1419: mol_type = genomic DNA

SEQ ID NO: 72329 - DNA, 1254 bp, Methanobrevibacter gottschalkii; identical to SEQ ID NO: 8410
  source 1..1254: mol_type = genomic DNA

SEQ ID NO: 72330 - DNA, 498 bp, Methanobrevibacter gottschalkii; identical to SEQ ID NO: 8412
  source 1..498: mol_type = genomic DNA

SEQ ID NO: 72331 - DNA, 2019 bp, Methanobrevibacter gottschalkii; identical to SEQ ID NO: 8413
  source 1..2019: mol_type = genomic DNA

SEQ ID NO: 72332 - DNA, 843 bp, Methanobrevibacter gottschalkii; identical to SEQ ID NO: 8416
  source 1..843: mol_type = genomic DNA

SEQ ID NO: 72333 - DNA, 831 bp, Methanobrevibacter gottschalkii; identical to SEQ ID NO: 8417
  source 1..831: mol_type = genomic DNA

SEQ ID NO: 72334 - DNA, 306 bp, Methanobrevibacter gottschalkii; identical to SEQ ID NO: 8418
  source 1..306: mol_type = genomic DNA

SEQ ID NO: 72335 - DNA, 639 bp, Methanobrevibacter gottschalkii; identical to SEQ ID NO: 8419
  source 1..639: mol_type = genomic DNA

SEQ ID NO: 72336 - DNA, 1275 bp, Methanobrevibacter gottschalkii; identical to SEQ ID NO: 8420
  source 1..1275: mol_type = genomic DNA

SEQ ID NO: 72337 - DNA, 774 bp, Methanobrevibacter gottschalkii; identical to SEQ ID NO: 8421
  source 1..774: mol_type = genomic DNA

SEQ ID NO: 72338 - DNA, 900 bp, Methanobrevibacter gottschalkii; identical to SEQ ID NO: 8431
  source 1..900: mol_type = genomic DNA

SEQ ID NO: 72339 - DNA, 501 bp, Methanobrevibacter gottschalkii; identical to SEQ ID NO: 8435
  source 1..501: mol_type = genomic DNA

SEQ ID NO: 72340 - DNA, 1605 bp, Methanobrevibacter gottschalkii; identical to SEQ ID NO: 8440
  source 1..1605: mol_type = genomic DNA

SEQ ID NO: 72341 - DNA, 405 bp, Methanobrevibacter gottschalkii; identical to SEQ ID NO: 8441
  source 1..405: mol_type = genomic DNA

SEQ ID NO: 72342 - DNA, 483 bp, Methanobrevibacter gottschalkii; identical to SEQ ID NO: 8449
  source 1..483: mol_type = genomic DNA

SEQ ID NO: 72343 - DNA, 194 bp, Methanobrevibacter gottschalkii; identical to SEQ ID NO: 6652
  source 1..194: mol_type = genomic DNA

SEQ ID NO: 72344 - DNA, 192 bp, synthetic construct
  source 1..192: mol_type = other DNA
ctcaccgtcccagaaacgtcggaaattctggcgtcattcggcttcaaaaacctgaacaagcaggtgtttacttttaaaattatatttatcagcatgttatttggtctggacatcccgttcatcttgagtgagcttgaatctaaagagaaactgcgcaaatattttaatattagcgaagtttggtccgccgat

SEQ ID NO: 72345 - DNA, 915 bp, synthetic construct
  source 1..915: mol_type = other DNA
atgctcattaaaaagatcccgattccgattgccggtcttgcccttgcgttactgtcattgggcaatctattgcaggacatgaaccctaatgtcaagtatttatttggagctatgggtgccattatcattgttctgaccattcttaaggcgattttttacccggaagacgttaaagatgattttaaaaaccctgtgattgcaagcagttccgggacgttctcaatgtcgctgatgctgtcttctacctatgctctggaatttatgccaaacatttcatatatcgtatggattattggtatcagcctgcatattttgctgatgatttactttacgtatcatttcatcatccgtaattttaatatcactgatgtttacccatcctactggattgtttacgttggcgtctccatggctgcaattaccgcgcccctgcacggccacaaagaaatcgggttcatattcttagtcataagttttatctccatgctcatcacgttgccgctgatgatttatcggtatgtcaaatattcggagatgcccgatgccaataaaccaactacctgtattttcacggcgcttatgagcattctgctggttggctatatcaacagcgccccggcaattagcacggcctttatcatctgcctgtattgtatcgcatgcttattctacatattttcattctacaaactggtggagtaccgcactctgaagttctatccgagttttgcggcgttcacctttccgtttgtgatcagtgcgctggcaaccaaagacatcgtgaaaattgtgggttcgaacacactcctgtcttcggtgcaaaccgtggaaacattgatagcggtaattgtggtcttctatgtactgtttgagtactgcgaatttttaaaaaatagcaaaaaaagccgcaactaa

SEQ ID NO: 72346 - DNA, 1476 bp, synthetic construct
  source 1..1476: mol_type = other DNA
atgatcaaggtatacgtttcacggtttaatcgtgggattgacaccgaaccacacctggagtgttatgacattaatgaaacgcctaacatgaaggtgcttgatgcgctgcaagccattaatgaaaagtatgatgccgacattagctttcgcagctcatgtcgagccggccagtgcggttcctgtggaattttgttcaacggcaacggcgcgctggcgtgtcaaaaagagatcaaagatggagcgatcattgagccactgaaattcccggtcatcaaagatctgatcgtcgatacgtccagcatcgaggcaaaggtaaaagatctggaactgtcgcttcagtgcagtcatgaatgtagcgagctggactccagcataaccaaaaaagatactgcggatacgaaaaaagtccgcaattgcattgagtgttattcgtgctactcaacgtgtccggtggtcaatattgccacagaagaatttgggggaccgtacttaatgagatatatcaataaattcgacaccgatccgcgtgacaactttgatcgtctgaaagaggccctggatgaaggcctgtataattgtacctcttgcggcaaatgcttgtctgtttgcccgaaaaacattaacaccttcggtgatgcgatcgaaaagatgcgtgctattgcggttgcaaacggtagcggtcctctcccgaagcatgttgcgttcaaagaaaacattctgaaaaccgggcgctctgtaaaaacggacaaaccaacatttattgaagaaaccaaaaacaaaacaggttcaaagatagccttttttactgggtgcatggtggattacaaattcccggaagtgggccataaactggttaagatcttaaaagaaaatggcattgacattgacgtgcccgaaggccaggtgtgttgcggttctccgcttctgcgtactggtcagacagacattgtacaggatctggtggataaaaacaaagaagtcttcaaagattatgataccattattaccgtgtgctcgggctgcggcgctactctgaaaaataaccatccagagtttggtagcaaactaaacgtgatggacattagtgagttcttggtagataaactcgatgaaagtaaacttaaagacgttaatatgacggtgacgtatcatgatccctgccacttagcccgcagtcagggcatcaaggatgcgccgcgcgagattatcgagaagatccccggggtcgaatttaaggaaatgctctatccgtgccaatgctgtggtgcgggtggcggcatcaaatccggaaaaccggaaatagcaatggaattggcaaagtcgaaagcagaaatggtgaaagataccggtgctgatgcagttgttaccatatgtcctttttgcgaattgaatattcaggacgggctgaatgaaatcggctacgacaacatcaaatgtatccacattttagagctgttagataaagcttacgaataa

SEQ ID NO: 72347 - DNA, 279 bp, synthetic construct
  source 1..279: mol_type = other DNA
atggcgtataaaattgacaacgcaatcatcaagaaagatcggaatggcaaggtaactctgatcgatccggagaacgtttttggtgatgaagatgccttcattgccgtgaaaagtgatgatttaattacgattcagctgttgatcaatgcaatcatgaaaaacgactttaaatcgtggaaagaacttggggcgattccggaaaccgaaccaattaaaagcctgttcgtccgcctcggctactcccgtgaagacatagctaatatgctgaaagagttttaa

SEQ ID NO: 72348 - DNA, 432 bp, synthetic construct
  source 1..432: mol_type = other DNA
atggccgtaaaacagatttctgtgttcgtggagaataaagaaggccggatcaaaaaagctattaacacgctggccgaagaaaacattaacatccgtgcgctttcgatcgctgacacaaccaagtacgggattctgcgccttatcgtttccgataacgagaaagccatcgctgcgctggaaaaagatggttttattgtcaaggaaaacgaagtcatactgctagcagttccggataaaccaaacggtttaaattcaacgctcgccatattcgacgaaaaaggcattaatttagaatatctgtatgcatttgtaagtagcaaaactgatgcggcgattgtggttatgcgcctggagaatatggaaaaggcgatcgaagcattgcaagatagcaatgtgaaaatcctgaagaccgaggacattaaagatttgtaa

SEQ ID NO: 72349 - DNA, 876 bp, synthetic construct
  source 1..876: mol_type = other DNA
ttgataagcatttttcatctgttctttaaaaaaactatctacagttcgctcattctcaatctgattggtgacatcctgaatttcaagttcaaagagtgcaaaacagagttcgatggcggcaacttcgaagaagcactcgatatccttggcgaaatcgaaaacgatgatgaggattacaaatttgcgttgatgcttaaatataactgtctgatgggtctgggttgctatggcgacgctttaacgattataaacatgctgattcacgaaaacccgtatatgtctttattttggtttgataaggttaaatgccactacttcctgaaagatctgaccaatgccgctggtgcgttatatcatgtcgaacatatcattgatctgaaggatgttgtggaaattattgactttgtgaaactctgtaatatgatcggagagcacgtaattgccttgaaatactgtaatattgtattggatacggatgaaaaccagattgacgccctgcttgaaaaatcactgatctcaaacatcattgacgacaagaacatgatgaacgaatgtggtgacaaacttttcgagctgagtggcgataatctgtctctgttgatggtgagctttgcactaaaactgttttccgggatgtaccgtgacagctttaatattattctgaacataaattgcatggactccaaaatggggctgatcctgaagaaaatcatttataaccagatgctttgcgatttaaatattcaaattgtgatggaaagcaacgcggaactgaccatcgatgagtttatcttactgctattcgattatcggtattatggagttgaatcgggcgaagtcaaaaatgtccgctacatgatcgtgaaacaggattaa

SEQ ID NO: 72350 - DNA, 1611 bp, synthetic construct
  source 1..1611: mol_type = other DNA
atgaacgtcatgatcctcgccatcgtatttataatctacatcttttcactggtgtttgtagggtactatgcgtacaaaaaaactaattcctcggaagactttatgattgctggtaaagacacccacccattcatcatggccatgagctacggggcgacatttatttcgacagcggctattgtggggtttggcggtgttgctagtgagtatggtatgagtgtgctgtggttagccttcctgaacatcatcattggggtatttatcgcattcgtgtttttaggcaaacgaacgcgtcgcatgggccatgcccttaattccttaacttttcccgaatttctcgggaaacgttttaacagcaacttcatccattatttcagcggcctggttattttctgcgcaatgccgctttacgcggccgtggtactgattggagctgcacgcttcttagagtctagcctactgattgatttcagcattgcgttgcttatactgtcaatcattatcaccttctatgtgttgttcgggggtattcgtggtgtgatgtatacggacgctctgcaaggaagcattatggttgtggctatggtgtttttgctggtgtttgtttattggttactgggcggcatcgatattgcaaatacggccctgaccaatatggtcaatttatatcctgccaatgcaattgcgaccgggggtacgggatggacggcatttccggaatttgggacgccgttctggtggagcctggtgtcttcaaccctcatcggtgtcggtattggcgtgcttgcccagccgagcctcattgtccgtttcatgacagttaaatcagataaagaactgaaccgctctgttctgatcggcggtattttcattgcgatcatgccgaccacggcctatattgtgggctcgctttcaaatgtgtacttctatgacaagctgggtaaaattgcagtagatgttgttggcggcaacattgataaggttattcctacctttattacaatggcattgccggagtggtttgtatacattttcctgctgtcgctaattgctgcggcgatgtcaaccatttcttcgcaattgcacactcagggtacggcgtttggtgtcgatatctatggtaccctgcggaacaaatccaaacagaagttagatcaggtgagtatctccagagtcggtattctgattgctattatttccgcgttagtgatggcattttccctgccgggcagtgtggttgcgctcggcacaagcctgttctttgaaatctgtgcggcggcatttttgccggtctttttgggagcactttactggaaaggaatcactcgcctcggcgccatttcgggcatcatatctggaaccctggtcagcctgttctggctgatgtttgtcttcaaaaagactgccctgggcctgggcatctgcaaatttgtctttggtgttgaaaccctgctgccggttgccccatggccatttatcgacgtaatgttgatagcggttcccattagcgcgatattcaccatcgtggtaagtctgcttaccaaacctctggaacaggaggtcatcgacaaggcctttgaaaacatagatgaaaaaggcagtgatgcgtaa

SEQ ID NO: 72351 - DNA, 114 bp, synthetic construct
  source 1..114: mol_type = other DNA
atgatgattttgggcatagaagacccgatgatctggggcgtgtatgtcgggattatcctgagcaccttactgtgcgttgtgtacggtattgtaaactggaataacggtgattaa

SEQ ID NO: 72352 - DNA, 435 bp, synthetic construct
  source 1..435: mol_type = other DNA
atgaacatctccaaccggagcgtaaagatgtcaaatatcgagaaagttgatgaaattttatcgaaggccgaagtcttttatctggcaacagtatatggcgaaaaaccaaaagtgcgcccgcttggtttccatttgctgattgacggcaaaatttactttggtgtgggcacttttaaagaagtttataaacagatagagagtaatcaaaacgtcgaaatcgcggcgtgggatggcgaacactttctgcgttactacggagtcgctgacctcacgaaaaacgatgcaattgttgaaaaagccttcgaactgatgccggaaatcgctgaaatgtatgaggcgaatgggtgggagatgggtgtgttctacctgaatgatgcgaccgccgagattcgcaacatgatgaatgtggaagagacctatgaatttaagtattaa

SEQ ID NO: 72353 - DNA, 1077 bp, synthetic construct
  source 1..1077: mol_type = other DNA
atgttaattattctgatcgtgctcggtgttgccacccacctctttctgaccccttcgagtgtggaaacagaaggctcgaaaaacatcactgacatgctgaatcgtacggtggaagtcccaaacggcgttaacaatgttatagcgacgtctccgcctatgacgactgtactgtatatgctttcacctgaaaagttaaaagcagtgaacttccagtggaccgaggatgagctgaaatacgtgccatctgaatacgccaatctgcccgtagttggtggctggtatggtacacaggacgggagctatgaagaatttatcgctgcggaacccgatattgtgattgaatcaattgatgaaggaggggacggcgatgccttcaccgtccaggaacgccaggacaaatttggcaagatcccagttcttgccgtcaaggacactacaaatgttgaaaaaattggagactccatcagcttcatgggtgaggtgattggtacggaagacaaagccaaccaactaaatgagtttaacacgaaatatttggatatcgtacatgataaatcctctaaactcgtggacagcaacaaaaaaaccgtctattacgcagcgagcagtgacggcctgcaaacctacccgagcggtgcgtcgcatggccaattgattgatctgatcggggggaaaaatgttgctgattcactgaatcagggtaacaccacctccggcgtacaagtgtccattgagcaggtcattaagttggacccggatgtgataatcaccaatgatatgcacttctataataaagtgtataacgattcaagttgggcgcacctgaaagcggttaaaaacaagaaggtgtatgtatcgccgcagtctccgtttaaatggtttgataaaccggttggcgcaaacatgattattggtgtcccgtggactgctaaggtaatctatccggaagattacaaagatatcaacatggtggatgtcacgaaagagttctacagtaatttttaccattttgatctgaatgataatcaggcaaaagagattttacttgatagcggactgaaagaaagcaacctgtaa

SEQ ID NO: 72354 - DNA, 1014 bp, synthetic construct
  source 1..1014: mol_type = other DNA
atggataatgactcaaaggatgtgatcagtatcatccttctgatcttcctcccgatcattctgtttttcaccagctttttgttgggccgctatcctattagcccaatagacgtgatcaataccatcctctgcccaatcttcccgcagttggaagtttccccaacgatcaccaccattgtctttgaaattcgcctgccgcgcattatcgcggctattgtagttggggcggcactggcgatggccggagcggcatttcagagtatttttaaaaaccctcttgtctctccggacttactgggcgtgtcgaatggtgcaggctttggggcggcgctggcaattctgatcagcggcgcaggtgttgtgacccaaatatttgcattcgcgttcggaatcatttcggtctcagtcacttatctgattagccgggcatacaaagcaggtggcattttaatcctggtattatctggcgttgcgatctccgcctttttcagcgccctgatttccgcgattaaatttatcgccgacccggatgataaattgcccgagattgtgtactggctgatgggaagtctggcgtcgattacgatggatcagttaataatgattattattccgatcattgtgggcatgatcattcttttaacgcttcgctggcacatgaacttactggcgatgggtgatgaagaggctcaaagcttgggcctgaatccaacacgtgtccgactattgattatcgccggctgtactctgctaacgtctgcggccgtttctgtaagtggtatcattggttggattggtctggttattccgcatatggctcgtatgatagtgggtccggataacaagatcctgatccccgcttcactgagctttggcgccagcttcctgcttctgattgataacatctcccgtgccataatttcaattgaaatcccgattgggatactcacagctattatcggtgtgcctattttcctgtacctcctgaaacgtgggtattcggaatgggcctaa

SEQ ID NO: 72355 - DNA, 804 bp, synthetic construct
  source 1..804: mol_type = other DNA
atgggcatcactaacaatttttatgaggtcaaaaacattagcttttcgtatgatggcaacgaaatattcagcgacattagcttttccattgaaaagggagacgtcctgtgtattctggggccgaacggtaccggcaaaacaacgctcataaaatgtcttaatggcttacatgaaatcggttctggtgaaatcctaatcaaagggaaaaacatcaaaaaactgtcctttaaggagatcagccgcaacattgggtacatcccgcagaaccacgcacctagcttcccctttaaagtgattgatgtggtgcttatgggccgggcaccatatctgaatctgattgatgcgccgcgtaaaaaagacatgggcattgccctcaattcgctgaagaccctgggtattgacaacctcaaagataaagaatacacgaacctgagcggtggtgagatgcagctggtattcttggctcgcatactgtgccaacagccggatattctgatcttggatgaaccaacctctcatctggatttcggcaatcaaattaaacttttggagattattgataatttggcggcctccggcctgtcaatcatcatgtcttcgcatttcccggatcacgcgtttttaagttcaaataaggttgctatcatgaaagacggttgctttatcgattttggaagtccgaatgacgttgtaactgaagaaaacctgaaaaaagcctactcaattgatgtcaagttaattgaactggaaaataaacgtaaggtgtgcgttcctcttaaaaccaacttcgagctgagtttataa

SEQ ID NO: 72356 - DNA, 2061 bp, synthetic construct
  source 1..2061: mol_type = other DNA
atgcgtaagtgtttcgtgattatactggtgctctgcctgctgttctcattaaacatttgctttgctcaggatatatctaatagcaccgattttacctttcagaatagtaatttcgactacttggaaaaaactgatagtgttaacttgattagtacgtcagacaaaattagcacacacattgacgtggtcagtaacacgacatttgatggtacggtggactactttaaaattaaattgtcggatgaaaataacaaatccgtgccgaacgcgaaagtgatcttcaccgtgaacggggttagctatgataaaaatactgattcacaggggatctcgtcacttcaaattaacttggcggatggtagctataaagtcattagcaagttcgttggagactcgaattacaaaagctcctcaaagtccacaacaatcacgattgataatactcgcattgtagaagatggcctgaacaatgcggaaattcagaatatcatcgacgatgctaaagaaggtaacgtgatcttgttcaaaggaaacagttattccaatatcaatttagtgattaataagcgtctcaccctaatttctactgttaacacagtcctgaagtccagttccagcagcccgaccatcaccattaaaggcaaagaagcaagctactcaattgtgaaaggctttaaaattcaaggcaatggtgacggtgtggtagtggacggctcgaactacgtccgcattttaaacaacgacattaccgcggacggggtaggcatcacggcctttaacgttaaatacatcaatatcaccggtaacaatatcgttaaaaacgggaaatgtggaatcattctttactccacagagaaaagctacatcatcaacaacgtcattaacaataacaatgcaaacggcatcgtactgaccaaatctgatattacctatatcgacagcaacacgatctcaaacaatgctcgttatggtattctgctgaccaacaaattcaatggtaattcttataaaaacgggccggagaatgtgtatattactaaaaacacgatcaataataacaaatgggatgggatctctgtaaataatgcagaagataacattaacatcaaaggcaacaccattgttggcaacgacgaaagcggtatctcggtgaatgttgtcggttcctacaaaattcagtctaacattataacgaatagttatacgggtgtgcggttcgacgaggatcatgtgcagaagaaaaaccaggaaattacctataatgccatctacggcaatgcgcatgttcaaattgaagcgaaatcatataatggtgtaaacccgcttagcgtaggcgataactggtacaccgatgacggcctgttatgccctaaaatcaagaccaataatctgaaatttacggtcacccagattggaaaaaatcagttccaggcaacttttgttgattcgaacggcaacattgccagcctgctcccggatcgcgagctgaagtataagaccaatgatggtaaaatcgccacggttatgattaagggcggcatcggcacctttacggtcacggcttctgatgcagatattattaagtctactgtggatcgcacaagcagaaaaaacgtgtatgattcgaacagccccactaaaacgccccaaaacggtcaatcgccaacctacgattatcctaacatagattatggtggcggccagggcaatggcaacggtcaaggtggcaacgcaaacaatgggaatgggagctcacaaaaatcgagtgacgattcgggaaacagctccaatagtaaaaaaatggaaccgaatagtaatccagtcaatcaggccaacgatgtctctcaaagttatgacacttcgcagagcatggcgcgcgcggacgcgtctgagattagtgggggagccaactccggctcacagagcatcgccaaacagattatcattgaagatgatgaattttttatagttaagggtctgtccctgatagtactgctgatcttactgaccatcggattttattatcgtgatgacataaatgagatgcgatctaaactttaa

SEQ ID NO: 72357 - DNA, 1458 bp, synthetic construct
  source 1..1458: mol_type = other DNA
gtgagcatcaatgataacctgggcgacgcaagctcagatttagaaaatgaaatcattaattcaaaaaacggcgacataatattgataaaacctggcacatataatatccacaacatcaccattaccaacaaaactatcaccctccagggcattggaaatccaagtgatattatcattgatggcggtaaacagtcaagtatttttttgatcaacaatattacgacctgcgtgacgtttaagaacctgaccttcattaacggtctgtcctacaactttggtggtgcaatctgcattaacacgggtagcgtttatatcgataactgccagttcatcaacaacacggcgctcaacaataccaatgcgggtgccatttccaactacgggaacgaagacaacaaagcctacctccttgtcaacaacaccctgttcatgaataatcatgcggaccatgatggcggggcggtcacgacttgttacgctaattctgacatgtataattgtgtgtttatcaataatacggccgttcgcgacggtggagcggtgcgggttagcgtttatgggtatggccacgtcgaggactgtatttttatgtacaatcacgctgatgagtggggcggtgcatactacagttggtcagggacgtctaaaatcaaccgctgcatctttatgaacaatactgcaggcacaaatggtggagcggtcatggtgagcggcaatctggaccttgaaaactcaattattgtaaacaacagtggtggaaaaactgggggtagcttctatattcaggagccaatgtatcaggccaaaacctatattaatgtgaacaataatttaattacaaataattcttcgccgaaaggtcaagagatctatgtaaaatggcgacattcgcaaaacttatatccggactttaacgataacgattgggggagcgaagatcctaacgactacaagatcaacgacccggataatgttacggcgcgtagtaaagtgaaaacgaccactgataagtcgaatctgctggatgaattgaacttcaacgccctgaacaaatactatgatctgattaaagattacttcccggaaaactatctggaaaatatcaaaaaacaggcggaaagcaaagctaaccagaataaagaaaacaataagaacaatactccgaataacaaagacgaacatggccttaaagattccaacaacaccaaaaatagccttaacgattctaaaataatcctgtccaataaaacaaccgaaaatatcgaaacagagaattatttgatttcgtctaattcgaccacccccattggcgatgatgagaaggcatatgaattaaatgagaccaagagtgtttccaagtcccaatcgccgcgtctgctatacctggtgatttgtctggtaattacgatcattgccctgtttattggctatggcaaagaaaacagcaaggataaataa

SEQ ID NO: 72358 - DNA, 2865 bp, synthetic construct
  source 1..2865: mol_type = other DNA
ttgattggtgtggtctgcgcggaggataacaatgtaaccgagaacgccacgaatgaagattttcaggcgatccagattttgattgacaatgcgaatcctggggattcgatatatctggaaaataaaacttatcagggcagtggatcgccgataattgttaacaaatctgtgaacgtttatggggtagatagctctaagactattttggatgcaagcaacaaatcaagtatttttctgatctcgaaggatgtgaaggttaatttcaacggtctcacgcttaccaatgggtataacgagactaagggcggagcgatctataatctgggcatcctcaacattaccaacagcaaaatctccagtaactacgcggaaagtggtgctatccgtaacgagggtaccggtaaactgacgatttccaacagcctgtttgacaaaaactgcggaagttttggggcagctattgacaattatgtcgggtacctgaacattgtggacaccaccttcacaaataacgattgtcttgagggcggcgcaatctataaccgctttggtgaatttctggtgtacaactgcacgtttatcaataactcggccgcgcggggtgggggcgtctataacaatcgaggcggcatgtatatttacaactccagattcatcgcaaataacgtttatgatttaggaggaggcatcaagagttggggctcttgtgaagtgtataatacagtattaatcaataacactgcaaaacaagggggaggcatttatgtatcggaatttacactgattgcggagaattgttttgtggaaaacaactctgcgcattggggtgggggcatcgctgtcgaagccaaagcgactgcaaaaattaaaaatgccacgattatcaacaacttggcggaccgtggtgccggtattgacataaatatgggctctattgatttacaggactccattgttaacaacaacgtggcaaaatatggtgcgggtggcatttactttgctctgttgtctagcacagtaaaaaacacgtatatctgcaacaacatcgctaatacatcaggcggcggctgttatatttacggctttcgcggtgtggtcgtaaacttcaccaacgtgattatcaataacaactcggcgagcaaggggggagccatctacagcacgggcacggcaaacatccaaaacagcattctgaactccaataacgcgtataaaggtggagcgatttacaatgagctgaatttaaccgtgaaagattcgcagttctttgaaaatacagcggatagttggggtggagcgatttataataacctcaactccttcatagataacgtggtgctcaattccaacgaagttaaacagtttggcggcgctatctacaatgaaaaactggtcaatgctaaaaatagccttttcgaatcaaataaagccctccaagccggcgccatttacagcaccaatgacctgatcatcgataactctcaatttatcaaaaactatgtgaaacgtaactactgtgtcctaatgcttagtaaaggtgatgtgaatattaccaattcactgttcaaattcaacaccaatgcggacgaagggggttgcatctttaactataatgcaaatctgctgattgatgcttcgcagtttattagcaatgatgcccgcagctatggtgccgcgattgataattctggcaatctgaccatcaaaaattcactgttttacaaaaacaaagcatatggtgccgccgcgattgacaattccggcaatctggtgataatcaaaagtaatttcactgataatgttgcgacgaacaatggtggtgcgatcgacagcaacggtaaattgattatcatcgggtccattttcaagaacaatctcgcgggcaacaacgggggcgcactgatccttcgcggcgacacgactgtaacccattcgattatctataataatcacgacaaaaacggttacgccattttcaacaaaggtgttgaaaatatatctctttccaacaattggtggggcagcaataatccggactttgaaaaactgctgaacatgggaacttctgatgactttaactggattattatgagtttttccagcaacaaccagttaattcagtacaaaaattctattctgaatatcaacttcgataacgttaaagataaaatgggtaatgtttataagattaactcaacagaattgctgccgattttcaaaatcgcattgtcaaattacggcgaggtcaccatatcgaatggatttaagagcatgaataaaaatatcccattaatcacaagcatctcagccaaaattgataatcaaagtattatcttaaaaattacgccaaccaacaaacgcatcattgataataagaacattgttgttgattataatggcaaagttacgtacaaagtgcgtgtcgtgggggttgatggcaaaatcgtcggcgccaatgtagcggtggtgatgaaaatcgcaggtaaaaaatacacggttaaaacaaacaaaaatggtttcgtaagcaagctgttcagtctgactcccggcaagtattcaattatcaccacctacaaaggcttcaccgttaaaaacagcataaccgtgaaaaaagtattatatgctaaaagcatcaccaagaagaagtcgaaaaagattacctactcggtctcactgaaaataagcaatggcaaaccgattgccggtaaaaagattacgtttaaaattaagagtaaaacctacacggctaaaaccaacaaaaaaggggtggcagtcgtcagctttaagaacctgaaagtgggtaaatattcagttattgtcaactacctgaactccaaggtgaaaaccactctaaaaataaaataa

SEQ ID NO: 72359 - DNA, 4419 bp, synthetic construct
  source 1..4419: mol_type = other DNA
atgaagatcaataagatcctggtactgctgtcgttcatcttggtggttctgatctgtaccaattcagtttcagctttttccgatgatagtaacctgaccgacgatctgtccagctttgcgagtgatttcgataaatccaacctcggtcagaacatcgaagtgaacctggataagcttagttttagtgaagatagcccgctgtcggacacgatcattgtggaagaagtggagaaggatcacaatgaaatggacgattcaaccatccagaaagccatcaataacgccaaggccggggataccatcatcatcaatgggacaagttatgtgcactgtcacttcattattgataaaaaactgacaattataagtaatgtgggaaccactatggaaccctgcggtagcgatgcggtatctggacaccgtggcattttctacatttctcctgaggcgagtgggactgtcatcagtggttttacgatccgcaatgacgtggcgaaggcggacgattacggcatcctcgtacgcggggcggatgatgttaaaatccagaactgtgttatttataataatggattgtctagcgacgcaatccgtgtggagaataccaagaacaccgtcattgaaaatgtctccatatcaaaagcctttaatgggattcgaattttagactctgaaaacgtcaacataagcgactcattcatcgacaacgccaaatactgcatcaacgtgattgactcgaacaaaattaacctggtgtctaacaatattactaataataaaattagcggcattgcaatctcaggttccagcaaaaatattaacatccttagcaataacattagcaaagggcatgtcggtattaacttaaccgtcgcgaatcatgtttatattatcagcaattatatcggcctttcggacaaatacggcgtctacaccaactgtaacatcacgaaaatggaaatcaaaggtaatttcatagaccggaatggtaactacaatattttcaacgatcatcgtgttaagaacctgtttgtaaacggcggggagaataaacaggtcatcaataacaactatatgatcggtggggacaaccaagatcgcccggtatggcaccaggtgtatgagtaccgtcctggaaagggtgataatacctacaacccggaaaccgacacgtatacgtacgtgggggaggataatggcgattactatggtcatcaaagtggcacctttatgggttacgtcttagcgattaatcaattcttgcagtgccccaacatatatttcacgttccccacgaatggtgtcactccatggaccaaaaccggaaactacaatctgtacttaagcgaaattacgcaggtgaaaaagggcgtatattcaatctccatagttgatgttgatggcaatttagcggaagagattagttctgtacctgtgacgttttatctgatgaaaaataacacggacaataatggtaaacagaaagctccgcaggaagatgatgtttctaaagttgtcatgatgaaaaacggtactgcaacggtgcggttctacccggatgagtttaaggaatctgacaacattctgcttgccagtttcccgggtatcggcaacaacatctacagcaatatgtacagcccatataaactgttcagcatcgatgacaagttcatcccgggaaacgtaacggagaccaaagtcacggtgagcaatctgaatacctacccgaactccaatgcaatctttaaagtaattctgatcgatctcacgggtaacgctattgcaaatgagctggtaaacttcaaaattaacggtaaatcttacggtgcgaccacagatgttaatggtgtagcgaaaatcaagatttcacagagcaaagaaggcacgtatacaatagcggtcaactacattggcgatgatatcgattatacctccagcagcgctcaagcgaaggtggccgtcaaaaaaatatcgacgaagattctatcttcaaatgtgtatatgatcccgaatattgcggaatactattcgatcacgctgaaagatgcctccggtcatggaatctcctaccagaaagtgacttttaaacttaacaagaaaatctacactgtaaaaacaaataaaaacggcgtggccaaacttaaactgaaattcacgaaaaaaaccacgtattacattcatgtgaattttgaaggcaacagtaaatacaaagcggtttccaaaaccaataagatcattgttaaatattcctctaaaattgcgaaactgaccgtgccgaaagtgaccattcttccgaaaacatacaaatattacaccattagcctaaaaaacacgaacggcaaaggaatcgccaaacaaaagatcactgttaagttgaatggtaaaacgtatattaaaaccaccaacggtaaagggaatgtcgcaattaaagtgaaattctcaaagcttggagcctataaagtatcggccatttacaaaggaagtaaaatttataaaaaaacgagctccaatggtaaaattgtcgtggccaagtccagcactaagtttacagcgcctaaagttaccattctcccttatgagaagaaagtatacacgaccaccttaaaaaccagtgcgggcaaagcgctgagcaaacagaagattaccattgttctgaacggcaagacctattcgaagaccactaacagtaaaggtcaagctagcattaacgttaaattctcatcagaaaacgtgtattctgttatcttgaaatactcgggcaacggctattataaatcgagcaaggcaacaggcaccataaccgtgtcaaaaatcagcacgcagctaataagttataataaaacctttgcgattgattcaacgaaaaacttcaccataagcctgaaagataaaagcggtaaaactctgtccaaccagaatatcacttttctgttcaataaccagaacctgaccaaaatcaccgacgaaaacggcatcgctagcgttaacttggatgcaaatgtcggctcgtttgaaatcatctcaaaatattgtggcaacaatcaatataagtctatctccaacaccaacatgattacaatttcgaacaaaaccaacgttgtctttgttgatgccagcttgcccaattctgaaattcagaaaattttcgatgactgcaaaaacggcagcaacgtggaatttctggggaacagctataacgacatcagcctgaatatcaacaaaccattaaatatctactcggaaaatagaattacgctgaatgcgaaatcaatgagtccggtatttaaagtgctggcaagcgatgtgaaaatttgcaacctgtccatcgtgggcaactcttatgacggcatcgagattaacaatgcggttaatgtcgtaatctttgagaataatattctgaatcgtttggatcaatcgaaaatcggcgaatatatgttgagcacaatttctcttccagggtatgggataaacgtgattgactcaaagaatgttgaaatttctaataactcaatcaacacctttgaaagtggcatctttgtgtcaaattcgaacaatctgagtattaactccaacgtgctgaaagaaaataattacgggatcaagtatggctttaacgtttccaactcgaacattacaaacaatatgatttcggaaagtattggcctgtataccaacctggttccggaaggcccgcgcggctatggtgtctttctgaacaactctgccgtcaatgtcacaattgctaaaaataatatttcgtggaatcatttagggatttccattgacgccaactattcaaccggtattctgatcacgagtaacttaatttcggataatgtactcgagggcattcgctttaacgagggttatgatttggctaagaacgctattgaaccggtggtgactgataacgcaatctatcgcaacggccgtggtcccagtatgatgattttaggtgagctcagcgcaaaccctgcaggaatttatggcccgggtgcatttaatgattcgctgaaactgaaattaggcgctaactggtacggcaaaaacctgattgtgacctgggataacgacactggggtggttggttatggcacaatgtgcccacgcattaataccacaggaattgcatttaaagagataacttgcgtgaatccaggcacttatagcattacattttataaaaatgatgaagtggcctccaaattgccggtctttaatatgtacgcgacgctcaatgacaacgttgaaattgtgtttgacgtcataaatggcgttggggtgttcacttttgacactcagaaattcacgactggtgaaaatgtaattaaagtgtcgagcggtagcctcaatgactctgataggatctttaaagttgaaatgtctaagacactcgatgatagtgaagttccgatttaa

SEQ ID NO: 72360 - DNA, 549 bp, synthetic construct
  source 1..549: mol_type = other DNA
atgacaatcaagcggtgcagttgggtgacggatgaagaaatctacattaagtatcatgatgaagaatggggtgtgccgacccacgacgaccaggaattatttgaaatgcttgttctggaatccttccaggccggcctgtcttggattaccatcctgaagaaacgcgagaatttccgtaaagcatttgataactttgactacatgaaaatttcggagtataaggaggataaagttaatgaactgaaagaaaataaaggcattattcgccacaaaggaaagatcaatgctgcgatcaacaacgcgaaaatattcatggagatccagaacgagtttgaaagcttcgactcttatatttggggcttcagcaatgggaaaataattaaggccgaatttaaaactgaatcggaattgtcaaaaaccatttcaaaagatctcaaaaaacgtggtatgaaatttgtaggtccaacgatcgtctacagctatctggagtccatcggcattattgataaccatcaaaaaagttgttttaaatttaacaaaactgattaa

SEQ ID NO: 72361 - DNA, 1353 bp, synthetic construct
  source 1..1353: mol_type = other DNA
atgaacaacgcgctcaaattgaaattgagcatgttttttctcatgatgttcgtcatgatcttttacatgttggtgttcggcaaagttaacattgtgattggtctgatggtggtggtggcagcgctgctgaatctgggtaatgacctctcctacaatccgaaattatcctttatcaaagtgttttcgctgctgatgatcctgggctttgcgagctaccttaacaaccctataacggcgtttggttgtattttaacctttttcatcgtgtttggaacaacatttactagctaccatttgttcggcactcacgtttacctgccgtttctgatgatctactttatgatggtagtcatcccggtaccactggaagcgttgccgatgcgtctgctgtctctggccatcggcgcgattttcattgtgggcttaaatcttaaggttaatgggaaaaaatattcgaagctgtctaaatttaccattagctcactgattaatgagctgcttgaggccattgatctgaaattggatggcaaggaagttagcatggatagttttaatgtcgcgaatggcttctatcggagtattttcagcaaattcgaatataaatatttcccaaaccaaaagcatgaatgtatcttaaatattctaaaatcgttccaatatatcgggtggagtctgtctaattatgaactgtcggtcaatgaactgacccacattaaacgcattctgaacgacatcaaaaattttaaatttagcgagattgaagaaattaccggtgaaactaaagagatgaacctcattcttctgaacctgaaaataatcgtcaacgaagccagtaaaaaaaacatcgaaaaagagaagaaaatcccaaacaagtatgtggtattcaatgtattaaagcacttaatcaagcgccagttttcttttaaatcagctaaattcacgtttgcctttaaaatggcggttgttttaaccctgtgggaagtgataacgctgatattcaattttccctacacgaaatggttatatttcgcatccatcccgctgatgcttccgtatattgacgatgttgcacatacggctaaaagtcgtatgggagggaccctcattggcgtgtccgcatttgcagtcatcatgattgctctccagtacatccccatctcgtcttatattgccatgattattgtcttgattgcctcactatttggtatggttttctcacttcagaacaaattgaaactgtcctcattcacaaccctgatgagcgttaccgtaagcctgatgtatatcaccccgcctaaggctattaaaaacacggtgggttactgctgcaacgattgctgtaacctttattaa

SEQ ID NO: 72362 - DNA, 378 bp, synthetic construct
  source 1..378: mol_type = other DNA
atgcggcgcaaaaaagatgataagcgcgttctgttttcgccgaacagtaaccgtccaaagcactctaataaacgaaaactgaatctgcctaatttccagcgtcagccgcaacgtagccgcaaacagagcaaatggggcaacgtcacggtctttcttatcattttagccctagtcgcgtttgtggtgggcgcaggaatgggggtatcactgagttttgacaacgatgatggtccccattggaaaaatgtgactgaagagatgaccaccaatttgaacgagactgacaatttcacgtacgatgaagaagtagatggtgttgacttcaacagcaatgaaacactcaccgaactgaacgttaccgtgaaaccgtcctattaa

SEQ ID NO: 72363 - DNA, 804 bp, synthetic construct
  source 1..804: mol_type = other DNA
atgaaatcgatgaaaacagtcgcggttgcgatcatagcaattgtagttattgtggcagtggggctgtatcttactggtagcgtgggcaccagcaacggagacctcaacggccaggatgtgcagctggccgccgcagccagtttgaaaaacgtttacgatgaaaaattaatcccgatgtttgaggaaaaatatccgggtgtaaaagtgactccgacctatgcgtcaagcggggatctgcagaagcagattgagaacggtctgaaagcagatgtgttcatgtcggcgggcaataaacagatggacgcgttgatcaacgaaagttatgttgataatgattccaatgtgaaatttctggaaaacaagctggttctaatcgtaagtgctgattcaaacgtgaatgtcagctcctttgaagatctgaaaaatgtcaatggcacgattgccatcggcgatcccgaatctgttccggccggccaatatgcgaacgaatcactgcataatctgggtatttgggacgacgttgagtccaagctctcgttggggaccgatgtcaccgcagtcttaaatcaggtagctcagggctctgctgattgcggtcttgtatacaccacggacgccaaaagcagcgacgaggttaaagtcatttgtgaagcgccggaagattcgctgaaagatattgtgtacccagtggcgccaatcaaagattctgaacacgctgacgccgcaaacaagtttatggagttcttacaaacgcctgaagcgcaaagtgtgttcgaagactacggatttacaattcatgagtaa

SEQ ID NO: 72364 - DNA, 675 bp, synthetic construct
  source 1..675: mol_type = other DNA
atgatggattggaccccgattctgatctcgatgaaaacggccagtctcagcatttttataaccttctttctgggtctgattgtggcttggggcatcgttaagatcaaaaaggactcaataaaaatcgtccttgatggcattttcacgctgccaatcgtacttccgccaactgttgtggggttctttctgttgtatatctttggtgtacgcggcccgattggtagttttctgatagacttttttgctgtgaagattgcgttttcatggtccgcaacggtgattgccgcagttgtcatgagcttccccctaatgtatcgttctgcccgcggcgcctttgagcaagtcgacagcaatctgttggatgctggtcgtaccttaggcatgtcggagtggaaaattttctggaaagtgttatttgcaaacgccctgcctggtatcatcagcggtggaattttggcctatgcgcgggggctgggcgaatttggcgcgacagcgatgattgctggtaacatcgcaggacagacccgcactctcccgatggcggtttactccgaagtggccgcgggcaatatgggggatgcgtttaactacgtaatcttcattattattattgcattcatcgcgattttcattatggatttcgtctctatccgtaaagaaaaacagtggaaataa

SEQ ID NO: 72365 - DNA, 1365 bp, synthetic construct
  source 1..1365: mol_type = other DNA
atggtgaataaaaatgtcgcgctgatgcgcggggaacctgaaatagctgtaaaaaaactcgctataccgattatgatcagcatgattctgactgcactgtacaacattattgatggtatttgggtcgctggtctgggcccaacggcgattgccggcattggctttgtaaccccgatcttcatggtgctcaacggagcgagcgttggcctgggcaacggcgcaaccagcagtattagccgtttcattggtgcgaaaaaccacgagatggccaataaatcggccacccactcattatttattttcttaatagcctccatcattctgaccattattttcatgatgatgcagaagccgctgcttgtgagttatggcgcgtcgggtcagacgctgaatgaagcgatcgcgtatgctaccccgctgtttctcggattgatcggcttcatgttttccaacggctgcagtggtatccttcgtggggagggggatatgaaacgtgccatgtacgtggtaatccttacagtcatcctgaatgcaatcctcgatccgttgtttatttacacgatcggactgggttcagccggcgcatccctggccacaatagccagttcgtcaattgcggcactggtgatgctgtactggattttagttaaaaaggacacttatgtgaatgtaactattaaaaaattcaagttagacatgaatttaacgaaagacattttgaaagttggtatcccctcaagccttgacatgctaatcatggcgattgcgatgtccatttatctaatcgtgatctctcaagttggtggcgattatggcatcgcaacgtttacatctggtcaacgcctgtacctgtttgccataatgccacttaccgctattggttcggccgttattgcagtgtctgggagtgcgttcggtgctaagaacggtgattatctctcccggacccatatttatggttcgaaatttggtttgatactgggcacgatcattactttgattctggtaattttcgcgacgcccctctctacgttattcgcatatactccggaaaccaccaacctggttccgggaattgcattatatctgcaggtggtctgtccaaccctgatcctgacaggcatcggtatcccgagcagctttttctatcaggggattgggaaaggcatttacagcctgatgtttaccatccttagagagatcatctttgtcgttcctttgatctttctgtttgtgtacattttccatctggatattctgggcatctggctgggcctgtgcatcggacgtgccattgcgagcaccttgaactacatctttgcgcgatatgaagtccgccgcattcgctcaaaatttgggaattaa

SEQ ID NO: 72366 - DNA, 1836 bp, synthetic construct
  source 1..1836: mol_type = other DNA
atgagtaagatcaactttgggaacattgtggaaatcatcaagcatgactttaaagcgagcttttcaaatcccatagtgaccattgtactcattgcaatcattattctaccttcactgtatgcgctcctgaacatccaagcctgctggaatccatatgagaacacgaacgaagtcgaatttgcgatagcgaacttggacaacggcagcacctttgaaggtacatatctgaatgttggaaacgaaattgtgaaagatttgaaaaacaacactaaattcgattggaagtttgtcactgaagacgaactgcggaaaggggttcacgatggggactattatgcaggcattatcatcccgaaaaatctgagtgaaaatatcgcctccattacctcggataatccgaaacaagcggaactggagtaccttgtgaatatcaagtcaaacccggtagcgaccaaattaacggacaccggggccaataccgtgtatacgacagttaacgccaaaattgtacagattatcaaccttgccgcttacggcaaactcggcgatctgaaggatggtctgagctcgggtgccggtcagctgtacagtggtggaagccagctgtctgccggggctgcgaaaatctcttccggtgccggccaagtatcctcgggagtgagtgatgttcaaaatggcgcgagccaggtgcagagtggtgcgaatcaagttcagcaagggtcatctgccattaacaatggtgcgagcgatgttaagcagggcagcgcaagcattaaacagagtgcgagtgacctggaaaagggctcacagcaaatccagagccaggtcgatccatctacgctgccggaacctatgaaacaatatgttgaaggcaacattaaacttgcaaacggcagcggcgagttagcgaaaggttcctcccagttagccgatggttcggtaaaacttgcggatagctcctcgaaattggctaatggtgcgagcaacgttgcgggtggtgccaaccaggtcgctggaggttctgttgagctggccaaaggctccctgagccttgcagcaggtgcgcagatgctgagcggttctgcctcacaggcattgttctcggcggctggcgcgctaagttcatcggccaatagcctgtcaagcattacgggcatcaacgaaactgagctgggcgattatttctactccccgattaaactggaccgccaggaagtcttctcagtcccggattacggctcaaatgtggctcctttctatatcgtcttatcgatgtgggttggggcgattattacgtgtgtcatgatcaccccgggcaccagtcaggggacaaaatacaaacccgtggaaatgtactttggtaaggttatcctgtttgtggtcatgagcatgctccaggcggcagttacgatcagcggggcttatatcctcggcatttatattagtaattccccattatttatattctctgcaatcctggtatcggtaatttttatgattctggtatattccatcatatctgcactgggtcaagtgggcaaaggaatcggagtgatacttctggtgctgcagatctctggaactggcggcatttacccgattgagattatgcaagacttcttccaaaccttgtatccgtacttgccaatgacatatgctattaccttgatccgtgaggcacagctgggtgtggtttggtctaattacctgccggcattagtggtgctcgtctcgattggcatagtgaccattattgtggctgcactgattaaacagaaagccgataaatccagcaaatactttgaagagcgcttaaaagaaagtggcctgttttaa

SEQ ID NO: 72367 - DNA, 591 bp, synthetic construct
  source 1..591: mol_type = other DNA
atgcgcaataaagtggctggaattgtcttcattgtcggtagtctgtattatgttctagcggaagccgtgagcgcaactttctttaacgcctctctgttcaacacgtactcttttcacaccatctccgagcttggcatcccgaatgtaaattcccctctgttctggctgatgaatagtgcgtttattctgattggattgaccctgattttcggtaacttttacaaatttaaagattttttagtgaaaaaccgcatcataatctatattctgacactcatgacctcaacgggcgtcattatggttggttggattcatgggggcaacccatttacgttagggtatcatatgctgggtgctatgatggcaattttcggcggcaatgttcttctgattgtgatcagccgttcgatgagcgaatatagcaaatttcagaagaccacattggttttgggcatatttgggttagcggtattttggatcatgtttttcaacatggaaagtatttacatgccggtgttcgaacgtctgtcagtgtacaccatgatcatctggtgttttctcactggttgctatattatctcgcgggagtaa

SEQ ID NO: 72368 - DNA, 678 bp, synthetic construct
  source 1..678: mol_type = other DNA
atgtcagaggataacgatctgaaaaactttcttataaaaaaaggtgcgagcaaagtaggcttcgccaatgttgatggcttagcggagggcttcatcgatttgccgtatgggattagcctcgtgctgaaaattccgaagaaagcgatgatttacatcgaaaatgaagattatgagtcgtattggtcttgttttcattcactcatcgaccgtttaacggaaatttccattaaaggtgaaaagtacatcaaaaaccacggatacgatgcatttgctcttacaatgagtcgtaatgagtgcgacatgaaacggctgttaagtatcctgccctataagaccatcgcgacgaaatcggggctgggttggattggtcgttccgcactgtttgtcactccggattatggctctgccgttgtcctgggcggcatattgactaacatgccactgaccttcggcacacagattaccgatagccagtgtgatgactgtgaaaattgccaaaaagcttgcccggtgggtgccattaatcctcagaaatggaacacgaaactgaatcgcaacgacattatcgacatcggaaaatgtcgcgaatatattgtggaacaatacaagaacggtctaggctgcaccaagtgcatgtatgaatgcaaattgaccaaaaaatacctggggcgcctgtaa

SEQ ID NO: 72369 - DNA, 864 bp, synthetic construct
  source 1..864: mol_type = other DNA
atgaaggatatcgatgtgctcattgaagcgctgccgtatattaaaaaatttcatgacaagaaaatattgattaaatacgggggtcatgccatggtggacgataaggcaaagtcctccacagctcgcgatactgttctgctgaaatatgttggcatgaaaccattgattgtacatggcggcggtccagaaatctcacggtccatgaataaactgggcaaacaggccaaattcatcaaggggttacgtgtcactgacgaggaaacgatggaaataatcgaaatggtgctggtcggtaaaatctcgaccgagatcgtatcagaactcatcaaacacgacggccaggcaataagtctgtctggcaaagatagcagcctaatctttgcgcacaaaaaaggcgccagtaaaattgacgaagagctggttgatttaggtctcgtcggggaggtcgactgcatcaacaccaacctgcttgaaatgtttttagataacgattacattcctgtaatttcgccggtgggtattgctgaagatggaaccagccttaatctgaatgcggatacggcagcgggggaagtggccagtgctattggtgcggaaaaactgattattttaacggatgttcccggcgttctgcgcgacccgagcgacccgaccagcttgatccaaaaaattaaagtggatgagatcccttctcttattgatgagggcattatctctggaggtatgattccgaaaatagaaacgtgcattaatgcgattaacaatggtgtgggatcgtgtcacatcattgatggccgtaaaaaacattcaatcctgctggaaatcttcaccacaaacggtatcggcaccatgatttataagtaa

SEQ ID NO: 72370 - DNA, 1071 bp, synthetic construct
  source 1..1071: mol_type = other DNA
atgaacaacacagatatgttaatcctctttctgatcaccctgtgtgctacgatattcttcacctggtacatcaaacgtatcttaatcaaagcccggattgctgacaacccgatagttagcgaacatcgtcataaaagcggcaccccgacaatgggggggatcgccttcttatttacaatctcccttatcattgcgttgtattatcaaaacaccccgatcttgctggtatcgtttataatgctggccgggggcattgtgggtttggtggatgatttaattgggctgaaagtgaaagaagttcagaaaatcgttgtcaatactagcagtgatgtgattacgctcggccgcttggatgttgaaccgaatgaagaggtacgtgtcgcgacccctaaagccaaagccgaagttgatgacctgcttaaggacgggaaagtagaagtggtgggcgaagttccaattaaaaccgaaccgggcgagctggagaaaattatatgtcagattgtcctgggactgttcttcgcgctgacgggcatcattacggcagtaggtggcttcaaattgggtgtgctggcgattccggtggttgtcatagcgattcttggttcgattaattctatcaatctcatcgatggtatggacggtctggcggcaggcattgtgggaattgcgtccattgcttgctgtgtatatggttatctgtttggacccgcatcaattattcctccattcctaattctttcaggtctatgcctgggcttcttagtgtttaacaagcatcctgcctccatctttatgggggatacgggaagctttgtgttgggtactggttacgccgcggcggtgctggtatgcgacattccgtactttggcgtgctcgcactgggcgtcccgatcattagcgttgtggtcagtttacttcaccgcgcacatattatcaagctgcccgtcgaaccactgcaccacactctgaatcattatggcatgtctgagacccgcatcatcgttagttattggggcattacctttctgctgtgcatcattggtattctggctaagatgtacgtcttttaa

SEQ ID NO: 72371 - DNA, 1431 bp, synthetic construct
  source 1..1431: mol_type = other DNA
atggatatccaggagctggtgcggttagtggagggcgaactggtcggtaacgtggattttttcagcattgatgggttttcgggtcgtttcacgtttttaaacgatgcacacaccggcgacattgttgtacgccattggattgatggtaacggcgtcgcgatggcgtttaagaagaatattgcgtgcctgatcacacaaacgccgaaagatgacgcgattgaaatggcagaaaaactgaattttccactggtgatcacaaataaaattgaactggctaatgccctagcgctgtcacatacgatcgacaaatactcccataatagcaccaatgtcgtcatcaccggtaccaacgggaagtcaacaacttctcatttaatttatcacatcctgaacaatgctggctttcacgtgctcaccaacactgatagtgagagcgaatttaacacgttaattgatccgatggtgtcgaaattaatctcggacgaagtcaaaaaaaatggtaaattggattacttggttatcgaagtaagcgaggtccaaggctggcttggaaaactcatgaaaaaccacgccgcactgatgagtgaagcgattaaaccacaggtgggcgtaatcacgaatattgccatggaccatattggtcttgtaaattccattgatgatgtgtttaacgaaataactgccgttccgaaggccatcggtgacggcatatgtattctgaaccacgatgatgaactcgtcagaaaactgaacgcaaaaaatcccttctacacctcaatgagcaaaatagatggcgataacgccgtatattttgacgacgggacgatctattacaatgacaatccgatcctgactattggggagttgcccttcaccggtaaacatttcatacagaatatcttgtccgcgattggcgcatgcatctcgctcaacctgccgattgaggacattgtggatggagttcgcagctataaggcacttaaccgtcgttttacaaaactgaacgatgaacctctgatttatgatgactttgcccataatccggatgggattaaagcgaccatctccgagaccctaaaactgcttcctgacaaccagaaactgtatgttgtttgtgcgatccgcggcagccgaggtgtggaaattaaccagctcaatgtggaagctatcgtggaatctatggatgatggcattgagttggtactgtctagtagtaatgatgtcgttaacaacctgaactgggtgaatgaaaatgaaaaagaagttttcttcaatgttttgaaccaaaataacatcgactacgtgcattttgacaatctgaaagattgcctgaacgaagtttataacaaagccgataagaaagatattattctgctgattggtgctcagggaatggatcacgcggagttccttttaaaggacatcatataa

SEQ ID NO: 72372 - DNA, 441 bp, synthetic construct
  source 1..441: mol_type = other DNA
atgtttataaagattcgtcgcgacaccttaatcattctgctattggcgttcattctcattctttgcgggcgtctgatcacctatgtggcgttcgcctcgagcgatgaaatcaacgatggtatcgctatttcgggcgttattatcaaaggcaatgacatagttccggtcgatacgatccgtagcaatgttatgcaggccggctttcgcgatgggagtgtaatctacggcgatattctgaaaacttccaaacgcgaggtgtccctgcaggatgctattcagacggcgcaagaatttgcaacacggagcaccgtgccaggtacatctgtccagccgattactgcagccgacgtgcaagtggataaaaacacgggtgtagtgaccgtcacggtaatcgaggatttctcatctgttgaactggacaacaaaaccagtggtggataa

SEQ ID NO: 72373 - DNA, 1260 bp, synthetic construct
  source 1..1260: mol_type = other DNA
ctgaataaattaaaactgagccttgtattttttgccgtcctcttattgacaatgagtagtgtagccgcgacctgtaatattatagttatcaccgatccctcgggtaatgatccgaatggtgcagcggctggcagtatgtcgtttgcggacaatatgttccagtcaacgttcttattgtctcgctctaaccattttgcggtcctttcgggcgggaccggcagctccgatacgcgtctggactctattgttgatgcagtggccagtttggagaacaacgcatcggcggcctccgcggcgtcactggctagccagttcaagggagcacgtctggtggttggcgggcctaacattggcgctgcggtgggcggctcatttaacgcatatgtcattacagtggacgactcaagtaacgatattaaagtcaccccttataacagtggcgtggccaccctgcagccgggccaaaaaggagctattattcacctgcgaaatacggcgggtaacccactgtatggtacggcggactctgtacgtaaagaaactgccatgaacattggtaagatgattagagacggttaccctgccacgactatccttgccgaagctatgggggaagtggcgaaagattcgggtgagaaatatggtgggggcggagtgaacctggtaagcggcatctcaacctccgacatgtttaccccaaaagaactgaatagcacaggttatccgatggatgaggagtactccaaggtctgcgatagctgcggctgggcaatggggtttcccgctgcggaagcctatgaaaaatgcccggtgtgtggtggcgatctccgcaccgtgtatgcataccaggccctgggtgatgcgctaactgttagctctaaagccgtgagcgtgtccgtctatggaagcgaccgtccaggtttagccgaaaccactaaagaaattgttgaagcatccgttagcaaatatggttacgatgcatcggcaatttcagggagcattaatcgcggcatcaataacgggctgctggtcggtgtggatcatgtggagccgaaggatatcaacgtaaagcagggttcaaaagcggttggcgtttactacaaatccctgccgagcgaacgctcttcgccggcgtgggatcttccgatcgacggaaatatcctgacaatactgggcagtatccaaacggctgttggcattatcttgatcctcttagtactgttccgcagccgtttgctgaaatctttccaaaatcggtaa

SEQ ID NO: 72374 - DNA, 960 bp, synthetic construct
  source 1..960: mol_type = other DNA
atgctgttcaataaaaatgagaacaaagcgaatgagcgaattatttataaaacaaagagcaatgtgatcctggggtgcaaaaaagctatctacgggcttgttctgttgatcattgtgttatccatcagcccaatcatgattaagttcattgcgaagatgcaagtgtatctcatttcgcagattcaactgcccttaactcgttatgccgctatcgcatttttcgtgattattctcattattgtaatctatattatctggcatattattggatggtactctcttgaatataccttaacagatagccgtattatggtcaaatcgggcgttatcagcaccaaaaagaattacatgccgtatgccaccattcaggatgtcacgacgtcgcaaagtattctggcacgcctgtttcatataggcaccgtatctgtgttcagcgcgtacgacaataaccgcctggagctgaaaaacatctcaaacccttctgaggttgaagaaataatctttagtaacatgcgcggttcgcgtacgttccagccgcagcagtcccgcccgataaattatcaccaacaggataattatctggataacggcagctatctgggtcgtaacgagatgtacgacgagtttgaacccatcacccctatcactcatgaaaaagacagctaccagggtcgggactatgaatattatccggaagaccgcggttttgaaaattccgatcagatacgtcacgaatatgaatacgaaccatacgatgacattgatcgtttcgttgaagaatttgaaccgcacaagaattatccgaacgaaatctacgatgatgagttggatgaggattactatgaatttggctcaaaaaaccattacgacgaaaaaagaaacgaggtgatcgacaacgattcaaacagtctatccagtgaaaaagtcattcggcgccattttgataaatttaaaaaataa

SEQ ID NO: 72375 - DNA, 141 bp, synthetic construct
  source 1..141: mol_type = other DNA
agcataaaacgcatcacgtacaccacttttgttgagaccaaagaggaattaatcaagctgtttaaaaaagaatattataagattattaataacgaatccttcttcaacaaatgggtgtcgaaatacattctgaaaagttaa

SEQ ID NO: 72376 - DNA, 204 bp, synthetic construct
  source 1..204: mol_type = other DNA
atgggttccgccgaggaagtgggcaaatatctgaaaaagctgtataaaaattataaagacgcgaaaagtaaaggcgaggtactgaagttcgttaaaagcaatattaaagaattattcgcactgtcgttgtactttgaatcaatcgaaaccgtcaacctactgattaacttatttctttacgaactcgagaaagataaggggtaa

SEQ ID NO: 72377 - DNA, 753 bp, synthetic construct
  source 1..753: mol_type = other DNA
ttgatcgagattcacgacaaactgggcactttggatgaattattggtgatcattgacgatctgctactggatgaacgctacgattacaatgaactgctagttcagaagggtaatatcctgagcattcagggcaaggataaaattgccatgaaatgtttcgataaggtgttgcaggatgattccaccaatctctgggcctattattttaaatgctacgtgctgaacaaatctgatgatctgagtaatttcgacaagctcttttcgatggttaaaagccagtctccagatgaatattatatatggctgttaatcggtgtactgttctcccgtaacgaccgttttgatgacgcattatactgtattgacgaaagtatcaatcggtatgacgggcaagaagatagctggctgtacaaaggactcatcttctacgaaatgggcaaatacgacgaggcgctgagcgccatcgatattgctctgaaaattaacccgaaagactcgtatctttatcttacgaaaagtgtcatcctgaacgctatggagaagtatgatggtgcaattttttatagcaacaaatgtctggaactggataaaaacaacgtactgtgcctctataatttatccctgtcgctttacaaccaaaataaatttgatgaatcactgaaatattgcgagtctgcgctgaaaatagacccgaactactgcttatcattgaatctttatgcggaaattctgcgccataaaaaaaaggtctaa

SEQ ID NO: 72378 - DNA, 4041 bp, synthetic construct
  source 1..4041: mol_type = other DNA
atgttacaagcaaaaaaaacaataaccgtaaccgtgaaaagcatccctaccagtctgaccgtaaatgatctgacctgcaattacggggaggataattcgtatctgtacgcgactctgaaagacaccaaaaataataaatttctaaatgggcagacaatcacgttcaaaattaacgataaaattatcaatgttgtgagcgataacaagggccgcgccaagatcaaaattgatgagaaaccgggcctgtacaacgtgattgtttcatttacgaaaagtccatacgccagtattagtaaaaagatcaatgttaacgtcatatcattcaaccccacggtgaactatgacgggggcttttacaataagtcatatctgaatctctcactgaacatcaataacgcgaaactgattaagtattgtctgaacaacgatagttggagtcagtctgataaatcagtctcatttattctgacaaacgggatctatgatttatattatagtaatggcagcgggagtattttccatgaacattacttgattgacaacaattgccctgtggtgtggagcaacttcggcagcgacctgtacgattcttcgattatcgtaaacttgtccagctgggataaccttgacgccaatccgaaaatttactattcgttagatgagtccaacttcaaactgtacgagaatctgctgaacatttcacgaaccaccttactcaaattctattcaattgatttcaatggtcataaaagcgagaccaagacttgtaactatattttcgaaaaaataggcaatctgaacagtggacgcggcttcaccaccatccagtccgccattgacgattcaaacacccacaacggcgacatcattaaaattagtgagggtctttacaacgaaccattaacggttaacaaattcgttacgatgattgggatcaatgctaccctgaccagtagggacccgtcccgtcctgttatcggcattaccggtggtggcagcaatagcgtgatttacggatttaagattaaagattcggagcatggtgtggtgatttatcacgcagataacgtgtctgtcattaataatcagttcatcaacgtggtcaaatctattgaaatagacgacgacaaaaataccctggtggcttataatagcattgattcagataaatttctgaacttcatgtccggtgttgccattcgtaaatccgataacctcatggtttttaataacaacatctcactcaattctgatacgggtgctggtggcatcgtggtgaccaacattacttcaaataatatcagcatcgttaacaatcgcataaccaacaaaaacaatttaaacggcatcggcttgtacgtgatctgtagcaacgtcagtattgattctaacaatgtttcgaatttcaacgcgggactgtatgttgtgtcaagcaattctcatgtaacgcacaatgaatttaaaaataataaccatggagtatttctgcgcgtcagcgttaacaacacgtatgcgttcaacaacattcacgataacatcctctgcgggtttgttttagataccagccttctctcgtacaatgactcctgctacttgaatagactgtgtgataactctcagtacgatttttactccgaagcaaacagcgattatgtaattaacgataactggtggggcgaaaacacccctaaaatctcgattaaccgttcgattcttgcgaacatttataatgccacgggcaatgtaattatgaactcgtggatggttgcacatttattttccagctcttataaaataaacgaaaataacaacattgagcgcgcgaaattttatgttgacctgacctataataacatcggcaacgacctgtcctataaaggttacattccaaataacctgaaatcttttattggagtatttaacggggatggcgcgaaaaaatccaatatttcctacctgcatgagggtaagtcttttgttgattttgaactgaacgatctttttaaaaaccatgaaaatatcacggtcatgtcaattttcgacaatgtaaaaatactaaactcttttaataaaaaggtgacaattgacataatgctattctcgtctgcctgggatttcgagaacaactattttgtaaacaagacctatcagattccgttcagcaataatgcgtcgtggattacattttgctggtcggaaacaggcctgtttactggcaaaatctatgtaatcgtgaacggtgaaatcctcgatgaaatcaatatccacaatcttttttaccaaaaattcaaaaataattattccacaaatgtttttgaagcgatcaagttgctggacactgtgtttgccagtacgaaagaaggtgtgtgggcaccgaatggttattacttcagctttgccaaagccgcgaatatcgactttcgcgattataattctgtttataaccgttttctgaactacattaaactgtattacgatctgacagactcggatctcaactttgtgaaaaactacaaaggttttttcattgattttattgatatgacgattgactttcacggcgatatgacccccgatatcaacttcgattacaatggcgttcacaaacttctgaagccgccgagcagttatgctcatcgtataagtaacatctattacacggatatcgaagatgaaaataacattagcattggttatgaaggtatgcgcagcttcgcaattgtcaaagataatctgaccaatgatgatttgcaattttggctgaaccaaaaagagctttacgctcccggcttgatgaaagccgcgtatggcactttcctgacttcgttgctggtgatttatgaaaacgaccgtgtggctgacgaaagcgcaattaaatttaatgtgacttggtcgcgtatcagtccggtctgtgtctcgctgtgcaatgactacaattgcctgtacgtgacgggggagtctgaccacggcatgggtcgggaggcgatcggcaatatcagtgacgtgtggaagtttaatttcgcaaccagcttcagtttcagcctggtggagcagctggtcggtaacaacatttggaacgacacgaccatcggtagcgttactcttggtctcattgaaagctactttaataatgaaacaatggaaattttcaccagcaacggctacatctttattaaatgtgagaacgacggtaacacgttgttgtttctggatttgaagacgggcattgtccgggactatttcagctattatggtctgcttgggacaatgccgtgctatcatgataacatcaccgaaaatgcctggaagtatggaaataatctactgaacaatatgggccgtgaatttaatgatttaaaaaatatttttggtattggcgtaatctccgccacgctgattggggaggtcgaatttattggcctggaaatgagtggtattggatcagctctgattgagggatctgaaatcggcctgttgttcggggaaatttcaatcgcgccaatcatgttaatatccttgccgatcatcatgtttttattcccggaacaggtgaatgaagtatggatgaactttgcaagcctgttcaatccatattataaggattaccctgatatccccatttatgaaaacacttacccggcaaatatcataaatccgccgaaactggtcctcgacgggaaatcatccgatgattacatcattagccagcttaaaaacaaccgaaattttaacaacaagtacaaacgctataattcgaacgttaacaaggacaatataaactttaaaatcaaaatcggaccgatcccgagcggcaaaggtccaaaggatatggataatcttggttccgcggaagaagtgggtaaatatttaaaagaactgtataagaattacaaagacgcgaaaagcaaaggtgaagtcctgaagtttgtcaaatcgaacattaaagaattattcgcgctgtctctgtattttgagtccatcgagactgtcaatctcttaataaacttgttcctgtatgaaatcgaaaaagataagggataa

SEQ ID NO: 72379 - DNA, 801 bp, synthetic construct
  source 1..801: mol_type = other DNA
gtgaagaagttttacaaagcagtgctactgttgacgttctgttttttcatttgtctggactgtgtttgtgccgtgtccgataatgtagtggaaaatgacactttaagtgtcgattgccaggtaggcgaattgtgctcggacacgatcgaggtgagctcagataactattatattgataataacgtcgtcaacagctccgacatcaactttacagatgtgtattccggtaatgttgtgaagaaagttaaatctaccgtgaaaacctcgattactgcgaaggacataacgaaatactttcaagatggcaccagtgtaaaagcttatctgaaaaattcaaacggtaaagtgctgtctggcaaaaagatcactgtaacgtattctggcaaaacttactcgcgcaccacggattccaaagggtgcgttagctgggatgtcaaaaaagggcctggaacctattcggtgaaattttctttcaaagcgagcggttataagagcagctccaaaacggcgaaagtgacagtaaaagcaatgccgacgaccctgacagccaataatcttgtctttacctatggtgataccaacaataaattaaaagcgaccctgaagaataagaaaggcaaatcaattgtcaacaaaaccgttgtttttaatttcagtggtaagaaatacattaagaaaacgaacagcaaaggagttgcgtgcctcaccattactgcaaaaccaaaaacctacccgacagccatctcattcacaaacgctaattacgttaccagcaaaaaaaacaacaacagtaacagttaa

SEQ ID NO: 72380 - DNA, 4248 bp, synthetic construct
  source 1..4248: mol_type = other DNA
atgctgaacaagattcagaagatcgtgattggcaagccgttcctcatcagcctgatcttcgtgtgcctaatcttcacttctcttggcgttagcattgagcattcctacgctgcagacctgaacgagagcgataaactggggtcgggtgtaaatgttgaagataaactagaaaattctcagaaaaacaaaagcatgtcggatacgaatcagaaccccgcattaaaagccaaaacttatagcgtcaacggcgggacatttcgggatattcaaaatgcgattgacaagagcagtgccggcgataccatcaaactgagcggtaaatttgtttcaaaaggggacgataccatttcgatgtcaaagaaactgacaatcacgtcaccatcccaggccattctcgatggtaaaaacagcacaacaattctgaagatatttacaggtgccacccagtctaaattatcgaatctgcgttttgtcaatggctactctgatagcaaaggcggcgcgattgtcatttcagcgaaatccatcgcattcgacaagtgcgttttcgaaaacaactatgccaatctgagttcgggcgcgatccatactccgtaccgtgcaatcgcgacccaaggtatgctgattaaaaattgtaatttcaccaacaacggggcaggcattgccgctggagcgctgggaatcttcggccatgattttctcattgagaactgtgcgtttagttcaaattacgttaaaggatatggcgaatgctacggcggggcgattcagataggcttggatacggaaccgtcttatggtaatgtacgaaattgccgtttcattaataataaagcgatctcctctactggcctcggtcacgcaggcgcaggatgtgtgcgtaatggttcgtcctattataactgcatttttattaacaacagtgcggactggggtgctgcgctgacctatcatgcctctggcaacctgaataattgcacgctgattaacaataccgccactaaatatggtggtgcggtagctatcatgatgaattacctgaacttcatgaacctgaacattaccaacagcatttttaaaggcaataaagcgcctctgggtggtgcggtgaaattggatgggctgaatataaaaattgaagaatccacatttgacgataactacgcatcggagtacggtggtgcggttaacatcaatgccacaaacgtgaaaatcatcaacagcaaatttaaccgtaatatcgcaaacattgatggtggtgctgtatttatcaaaggtaaggacacgaccgtgaagaatagtaaattcataagcaacgaggcaatacctgatgtgaagaagctgaacgacggattaggtggcgctatctatgtcaacagtacaaaagtgctggctcagaacaatgagtttaaactaaatactgcgcgtaatggcagtgcaatttactttgaccgcaacggtcttgaatttaaactggtaaataacaccttatatcagaatcaggcgtgggtttaccgcttaccgatttttgctcatgacatctattatggggagtcagaaaacatcaaatcagtgatctatggcgggaataacatcgcagatttcgataacttaaaagtatccaatgcaatttacaacgcagccagcaataataaaattgaaattgatggggaacacccagtgctgggcgccaccaccagcggtaagttatatcaggatgaccgtgaatacaacgtgcgcgtattgatgatggtacggcatgaggatggcaccattgtctacaataactcgctgaacacgaactatctcggtgccgtcagcggcaagctggataatctgaagcctggcaagtattatgtgaccgccaaacacttcgaagataattactacaaagcaattgccaataccaccgtattcaatgttcttccaaaaacggataataaaatcctgaaatcaagtaatggcaactcaattgcgtataaagacaccgtcatctggacattgaatattacaaacaatggtcccaacgacagcaccggtgttgtagtgtatgatgtccttccggaaggactgatttgggtaaatgatgacagcaacggcgcatacaatccgaaaacgggtgtgctgaccataggctctttaaaagtgggtgagacgatcgtgctgaatataatgactaaagtgaacgcgactggcaaaattgtcaacaaagcgaacgtaacggggaacgagtatgacattaacctggacaacaaccatgacgaaaaagaaatcaacgtaccgcctacggtggatttggccatcattaagaaggtcaacatcaccacgccgaactatggggactcggtgatctggaccttaaccgttagcaactccgggccggatgtggcccatgatgtgaaagtcaccgatattttttcagattccctcatttggattgaagatgactctcttggcaaatataacccgaaaacgggcatttggaatattggcacgctgaacaagggcaaaaccattgaactgaatattgtctcccaggtgaaccaaacgggaaacattaccaataatgtgagcgtgacaagccgtgaacacgatattgatctgtccaacaatgtggctaacaaaactatatttgtgattaaatcaggagatctgtcgattctgaaaaccgttaacgtaagtgacgctaattatggtgaaatagttaagtggactctcactgcgtataataacggccccaacaaagtgaatggggttaccgttcaggacattctgcctaaaggattaatgcttctgaactacacggccagtaaaggcttttacgatgatggcgtatgggtggtgtgctgtcttgaaaagggaaaaacggaaactttggagctgatctgtaaagtcaacagaaccggaaacattacaaacatcgcgaagatctccggcatagagtatgatccgaatctggacaataacctcgacaatgaatcgatcatcgtgccacctgcctcggacatttcagtcatcaaacaagtggatagtaaaaatccgtacttcggcgatatcatcacctggatcattgaagtgacaaacaaaggtccggatcgcgccaccaatattcgcgtcaccgatgaattgccggaaggtctgatattcaaagactatgttagcacgtgtggtgtgtaccaaaacggcgtgtggttcttagattacctcaatgcaggtgatagtgaatatctaaatattagttgccatgtcgggcaattgggcattattgtaaatgatgtgtctgccatcgcaaacgaatttgacattaacctgtcagataaccactataatgagtccattaatgtattgccagtcagcgatctttccatcgaaaaattcgtcaatgttagtaacgcgaattacaaggacttgatcaaatggacactgatcgtgtcaaacaatgggtttaacgacgccacggatgttgtggttgaagatatcctgccagattctctggaatttattagtgccaacggtgattacgaggagggtatttggtatgttggggatctgggtgtgggtaacagcaaaaccttagatatagttacccgcatcattaaaaccggcgacattactaatgtcgccgcggtctattgcagtgaagacgatcccgatttgagcaacaacgaagctgaggacacggtgcatgtggggccggccgctgacttgtcaattaccaaaaccgtttctaaacatgcgtatgagatcggacaaatccttacgtacaacatcaatgtcaacaacaacggtccggacgacgcggtcaatgttaaagttagcgaagaatttccgaaatcgttacacctgaaaagctttaagatgtccgcgggcgaatttaatgcttacagcaatgtttggagcatcgataagcttgcagctgggggcgaggagaaactgcgcatggaatttgaggcgctgagcgaaggcatcttcaaaaacactgcgtcggtggtaagtgatacttttgataatgatttgaataataatcacgattcggcgctggttaaaattattgcgaacacgtccgacaaaattataaatgacttaacggataattttacgaaaagtaatgttgttaaagcggaaaacatcaaacagccagtttattgtcttgaaaaacactctaccgcaaacttcatcgaactgctctcgatttctgtcatcgtttctatgatcttcggaggcggtgatatttttcgcaaaaggtaa

SEQ ID NO: 72381 - DNA, 1149 bp, synthetic construct
  source 1..1149: mol_type = other DNA
atgaaaaagcaaatcgcgatcatcttgatgattctgttaattgctgcaccgattgtgcagggggtgtgcgcgtcaaaaactgcattcattacctcagataatttaatcgatgaaaagactgatacaaatatgctcaattcgattaagaactatgttgaagagatatcgaacggtgaaattcaggtcatcgtcgataacgaagcgcccggccctggtgagggttggcgtagcataagcgtaacgtcggatgtgagcattgacatcgcagccagcgatgctggcaactacattcaactcgcctctgcagccacggcgggcaacaaacagattatctttatcaacactggtgattttgacctggataaccattctaattttttgcgccgtgcctgggatgacaattactctaacgaatccctggcgggagtgcgtgaccccggaaccctgcttaacaatgcggggattcagtacatccagctggcgaaggactatccggacaatattgataacaatggtctgctggataagtatgatgataaaatgaaccacgaaattgctgagaagatagtcaatattgtgaataactacgacaacagttcaaccaaagaattaagcgataatttgatcgttaaaaataaaatatccccgaaagggatggcggatgcgagtaaaatgctggtggagagtggcgataaagaaatgaacggcccgtacggttcctattctacaccgcaactgctttatcagaccagcacgtatctcaatggtgatggcattgacattcctaaagactataaaaaaccggacaacccactgggcatttcattcctgaccaaagacacgtacagtgtttacgattatttcaaaatggcaggaatcgttaaaaactacatggatgcgaatggcaaagcaccagattcgattgaatatgaaggggcccatattagctattatgatttaacctataactttgctaaaatcgtccagaatcataccgacgccaatcatatgggctttgaaagcgagtaccacttcgacaaagtaaacgattccatcctgctgcacatcctgccgtttgtactgatctttgttgtgttgttcctagcctatatgcttatgaaacggattaaacgctttaaacgcaagtaa

SEQ ID NO: 72382 - DNA, 684 bp, synthetic construct
  source 1..684: mol_type = other DNA
atgaaacgctatataagcgaactgatcggaacaatggtgctggtcttgttcgggtgcggcagcgctgctattgccggttccatgctgggtacggtgggtattgccttagcatttgggttatcaattgtggctatggcctacgtcattggagacatctcaggatgtcacatcaacccggctgtgtcgatcggtatgtggattgatggccggctggaaacgaaagatctggttatgtacatcgtcttccagtgcatcggtgccattattggaattggtctgcttgcgattatcattaactctgcgccggttctgggcggctatgaagccacaggcctggggcaaaatggctttggctctgcatccagtgtcggtctgaatgtttttggcgcgatcattgtggagataatcctgacctttgtctttgtattcaccgttcttggcgtgactaagaaagcagagaatggggcggttgcgggcatagtgatcggtctgacgcttgcctttgtacatatcatgggcatcccattgaccggcacttcggttaaccccgcacgtagtatcgcgcctgcactattcctcggtgggcaggccctcgaacaggtgtgggtatttattttagcgccgattattggtgcgattattgcgggtaccttgttcaaaggcctgaccagcgaggatgaataa

SEQ ID NO: 72383 - DNA, 192 bp, synthetic construct
  source 1..192: mol_type = other DNA
atggccgtcgagccgcacaaacattgcccgatttgtggcacgcccattcctctgaacgaacttgtgtgcagcccagactgtcaaaaagtttgggatgctcggttagcgcagaccaagcgcactcgtattatcttgtatataatcattgcaatcttcctgattatctgggcgattatgacctttatgaaataa

SEQ ID NO: 72384 - DNA, 849 bp, synthetic construct
  source 1..849: mol_type = other DNA
atgaaatttaaagtgccggaaaaaccagaaaatctgcaggagcgcctcatctgcatcattttcggcacgttcgttggcactgccgtctatgtactgttcctgtatttgaacatcgccattttgggctggaacctgggcttgatttttgcaccgctgcttgccggatatgcggaaacgatgcttgcagaacgaatgctgtccagcgataccggtgctatcagcgcctttatccttttcgcgggtacgaccttttattcgtttattctagtgaatccgaccctgggtgcaaactttatcacattcggagcgaccgcggtaatcctgcaggcggccttcccgacgttaatcaactacatcctgctggttatcataattggcgctatcttttacattctgcggtttgttaaaaagacacttacgcgcatttatctgaaaatcaaacatatcatctacaagtacattctgaaaaagccattcgaagtcaaacctaaagctattgaatattatgatgagctccgtaacaatcaagagattaatagcctgggggtcatttttatgaccagtactgatgtgccggacaagcatgttattaacttagggcagttccagtctaccgtgattttagaaaaagaacctgacctcttggatttaaaccccaaggaacgtgaaaatcacaccttgacaatcctgaaatcaggaaaagacaaatgtttaattggtctgactgacaaaataaaagcggcggggggtaatggcattattgatctggatattcaatacattaaaattggctttggtggtgagagttaccagatatccgcaatgggcatgggcgtgtatataaattaa

SEQ ID NO: 72385 - DNA, 204 bp, synthetic construct
  source 1..204: mol_type = other DNA
atggataaaaaaatgattgtcagcattattggatacatcgttgcactgcttatcccaattgtggggctggtatatggtgcgatcttgtttttctttaagaaagaagagccgacgtaccgcaaacatggccgtctgattatttatttcagtatcgtgatttttgttgctaccctgatagccaaattactcatcggcggtttctaa

SEQ ID NO: 72386 - DNA, 810 bp, synthetic construct
  source 1..810: mol_type = other DNA
atgttcacgatcgagtactttgtaggtttgattctgattgggatcttcgcaggtttcgcgtcaggccttctcggtgtgggtggaggatttctgataactccgcttcaatttttcctgttaaaatatattggcgttgcgccagacctggctatactcatctctttcggcaccagcctggccatcattattcccacgagcctgagtggggcttatcgtcacacgaaatcaatggataatatcctgaaaccaggcattaggctgggtatctttggggtcattggtggttttgtggggggtttcgtggcatcggcgctgcctagccgtaccttggagattatatttggtctgttactgctcttcatcgcgttcaacaacattgtgaatattaataaagaacgcgaaaaagcgcgcatcccgtttaactggaccagtattggcctcattggtttgcttgttggcttttcgtctggactgttaggcgtcgggggcggcatctttctgatcgctattctgacagcgcttctgggcttttccatgattgaagccattggcaccagcagcatctttattagtctaacagccatcgggggctttttatcttacatgattactggttggggcgtcagcacctttccgtattccatcggttatgtaaatatcattaacctggttttaattgcatgcttctcggtgcctatggcgtcatttggcgccaaaatggcacatcgggttccgcagaagaagctgaaaatcatattctccatcgtaattttgtacatggccttgaaaatgctgggagtgctgccgtaa

SEQ ID NO: 72387 - DNA, 1059 bp, synthetic construct
  source 1..1059: mol_type = other DNA
atgaaagttaacaaaactatcctggttggctttttattcctgttgattggcgccttcattttcgtatctgacctcctgaaccctcttatccgtccggtgacgcatttgtttctgatgggatcatcgaaaggcaaagacattatcttttttggtctgctagggttgctgctcattctgtcacaggtaataccgagaaaaatcgatgctacccgttatttgaaaatctcaattgtgatcggcttcgtgcttctggtgtttggcaaccttctggaagttgtgtttcgtctacaaatgggaatcaaacttaacacggtgttttgttctatgtcgagcacgatgagttctactagtattctgcacacgcatttgttaaagtccattttaggtgaagttctgactaaaataattggcccgttcattcagagcaacatcaataccggtgtggggctctatgcatacgtccccgatattagctttctggtggttctgatcattccaattctctttatcacacttattctcgccaatcaaaaacgcccatggttcaccaacttcctgattgcgttttttagcagttgcctgctgatcggcagcttcgatggaggtctgtgggccacgccctccctggtcggtctgttagggctgtggattgtttatcgaaatggctattacttaaacttgcacttaggcaaaatcatcaaagataaaaaactgttgaaggcgaatgaaaacatccagccgagctaccggaatattggtctgagtgaggcgaaatacctgttcaatcgctttctgcctatcctcattattctgattgttatagctcttcgctttaccgtcgcgttcgcgggtgcagagccggattattataccgtagagatcgtcaacatgacagataacgtggattttggggacattccgatcgaaaagataagcaatgaaacctatcatgtcgattccaattataatgaaatggaactgattaatgacttaaaggtaccgctgaacaactcctgcaagtactacaccgtgtcgtggaatgcatattcgtacctgtaa

SEQ ID NO: 72388 - DNA, 1032 bp, synthetic construct
  source 1..1032: mol_type = other DNA
atgctcaattcaatctttaaatattcttatggtgtcatcgtttgcctcatcatcgctattccgtccttaattttggggaatctgtttccagttattggcggtcctattattgcgattatcctgggaatgttgatcgctttcgcatggcatgaaaaggaaagctttgacgaaggcataagttttacctctaaatacgtcctgcagaccgccgtggttctgctgggctttggcctgaacttgaatataattctgaaaactggcatccagtcgcttccaattatcattgcaaccatttccgtcgctttaatcgtggcgtttattatgcaaaaaattctaaacatcgaggaaaagagcgccatactcatcggtgttggtagctcgatctgcgggggttcagcgattgcggcaaccgcacctgtcattaacgccgatgaagagcaggttgcccagagcatttctgtgatcttcttcttcaacgtgcttgcggcaattattttcccctttttgggcaaaataatcggtttcagcaccgtggacgggggaccgttcggtctcttcgcgggcacggccattaatgacacttcatctgtgactgcggccgctgctacctgggataacatgtggggcctggggagtcaaacgcttgataaagcaagcacggtgaaactgacacgcaccttagccattattccgatcactctggccctgtcggtgttcaccagtaaaaagtcagagtacgttggtggggaatttagcctgaagaaagcatttccgatgtttattttatatttcgtaattgcgtccgttatcacgacgctggccgtaagcctgggtgtggatgcgaatgtctttctgccgtttaaagaactgagtaaattctttatcatcttggcaatggcggctatcggcctgcacacagatattgtaaaactggtgaaatccggaacaaaaccgataatccttggcgcgacctgttggattgcgattattatcgtaagtatttcgatccagtttacgttaggcatcatttaa

SEQ ID NO: 72389 - DNA, 888 bp, synthetic construct
  source 1..888: mol_type = other DNA
atgaaaaagatctatttcattttaccgatcctcgccggcatcatgttcggaagcggtggcgtatttgtgcgtaccctgatggtcaatggtattgattccaccacgctgctgtttctgcgcttcagcatcgcaatcatccctatcatgatcgcgattctggtgactgataaaagtttgctgaaaatagacttaatcgacatttccctgtttctggtttgcggaatatgtattgtagggcttaatttgtgctacaacgagtcaatgggcaatattcccctgtcgttagctgcggttctcctgtcgcttgccccaatttatgtcattattattgcttatttcacctttaaagaaaaaattacccgcaagaagatcatttgtatggcactggccatctttggttgtattctaatgacgggtgtgttggaaacgagcttaagcaacattccattctacgggatcacggcgggtattggtgcgggtctattctgggcgatttatctcatggcctctaaaaaatcaattgaaaatggaaaacacacctttaccatcctgatttattccattacaattatttcgatgggcttgctgccgtttacaaactttggccagatcacaaacttcatttcaattaaccctattctggttatcatattcctcatcatgcattcgacgtttagctttgcccttccgtacattttcagcactgtgagtttagagcatatagattccggcatcgctagtatcctgctgtctggggccgaaccgtttgcagcacttatctttggcctgatattctactctgaaattccgacctttctgatgttttgcggcttcatcttgactatcattgcgatgatggcgctgagtcggaaagaagagatcaaataa

SEQ ID NO: 72390 - DNA, 1455 bp, synthetic construct
  source 1..1455: mol_type = other DNA
ttgttgagcaaaaaactgatactgattaccgtcctattagggctgttggcgatctcaacggtgtctgctgctgacaacacggaaagcgacatcatcggagccgatgggctcaacagcacaagcaatatccccatggatgcgccgcgcacctttactcagctgaacgaagcaataacgccgtacaccagtattgatctggagcatgactatcgctatgacaatgagacagattccgaatttgctaatggcgttccgatcaccaagaatatcactatcgatggtaaaggtcatacccttgatggaaattatctggcccgtattttcattatcaaagaagactgtacggcggtttttaagaacattaacttcattaacggtaaggcgagcaccaacggcggcgcgatttacggcgtttgtaatgcggaaaactgcaatttccttaacaacactgcggtaaaagacgggggagcgatccatctgagtaacgccaataactgcaattttattaacaactacgtactgaacggtcgtggtggcgccatgtataaaggttatgcaacaaactgcatatttacggacaactccgcagtgacaggcggcgcactctttgagaactctgccaccaaatgcaagttcaccaacaattttgcaaaagagaacggtggcgcgctgtatggaggctttgctgtgcaatgtaattttaataagaacagtgcaaagaacaatggtggcgcgctttacaaagggtcagcccactactgtaatttcagtgataactatgcggttaaccacggcggcggcatgtatggaggtgccggggaatactgcttctttaagaacaatgcagcgaaatcggggcatgatgcttaccgtagctccctcaaaaaaactaagacaacgatctatataaagcctaccacgactgcccattatggcgattatgtcgtgatcaccttaaaaaatattaaaaacaaagttgtgagtggtgtgaaggtatctgtgtttattaatggtaaaaaatatgctacaaaaattaccaacaaatatggtcagattaaaattgatacccgcaacggtttcgttattaaaaaatacacgattaagtcgaagtttgccgaagattccaattactacgcctcatcgaaaacagtgaaaatcactatcaagaagtctaccccaaaaatcacggcgaatagcaaaacgttcaaaaaatcaacgaaaatcaaaaaatacagcattaccctgaaaaccaaacagggcaaaatcatgaaaaataaaaaaattacattaaatgtcaatcaccggtactattatgcaaccaccaattataaaggcattgcaacgtttaaaattaccaaactgctgtacaaagggaaattcactgctaccactggctatgcgggttccaaatattacaatgccctgacgaaaaaatcgaccattattgtccgataa

SEQ ID NO: 72391 - DNA, 744 bp, synthetic construct
  source 1..744: mol_type = other DNA
atgtcaatcagtccaaaggatttattaaacaaaaacaagaatttgaacaaacggctggatattagtgaaatttgcttagacaatgtcacgattaatgatctgaaatttaacggggataactatgatgaatatattaatctccattcgctgctcgaaaatatctcgacctgccaggttagcgatgcgttcaacgggatcagccgccaatccggtgtgattcagaagatcaagccgattaataatcgccgtgtcttcggccgcatttttacagccgaaacgactagtggcgactggggtacgtctgcaatggcgatcgacgaggcggatgagggagacatactgttcttcaaagttgacagcgaagagatggcaatttggggtgagcttgctagcacctgtgctcgtgataacggcatcaaagcgaccgtgatttacggttcagcccgtgatctggatgccctgctgtatatggactaccccgtatttgcgtcaaactactgtccgaatgccgggctggcgctaggtctgggtagcctgaacgaatccctggacatagaaggctttaaagttaatcctggcgacttccttatcggcgatgaatgcggtattgtggtcatcccgcaagaattgtttgtaaaaaccatgtttgcttctctggatatcaaaatcaaagaatccctcatcattgataaaattgcattgggaaacactctgtcgcagattgtgggccttggcaaaaaataa

SEQ ID NO: 72392 - DNA, 612 bp, synthetic construct
  source 1..612: mol_type = other DNA
atgaatatcaatattgagaactactacagtactcggaaaaacgtgttcgaacgcatccaggatgctggtacggccaccaaagtcctcatgtcattgatgatggcatgctttaccggtatcatggcacagataattattcctttgccgtggactccagtgccggttacggctcagacctttgcggttctgtgttctggtctgttgctgggtaaaaaatatgggtgtctaagccaaattttatatgttgttctgggtgtcgcatttattccgtggtttggcgggatgaccggtggctttgaaacactgctcggatcgacgggcggcttcctgatcggctttattattgcgtcgtgcttcatcggcaccataaccgagaaatatgcggacgctcgtaacttcaaaaaaatggcggcggtaatcgggatcgcaaatttcagtcttatttacattccaggcctgctgggccttgccctgtggttaaacttaacgcaaggcacaagcgtgggtattgtggatcttctcatgatgggactggtcccgtttatcgccggagatattgtgaagatcctgggggcggccagcgtgtccaaagtatttctgcccaaggaataa

SEQ ID NO: 72393 - DNA, 810 bp, synthetic construct
  source 1..810: mol_type = other DNA
atgaaggagaaagtaaacctgtccggcgttagtgaaaccatgctcgtgccattatattcgagagccctggaaagcaaccgaaaaaaccctgcattctacgataaaacggcgattggtatcgttaaaaaccttgattacaattttaaagaacgctttaaagaatccaaaaataaaatgaacttttggggctgcgcggcgcgtaccattatattggacgatgaggttagtaaatatatcaaaaataatccggaatgtagcgttgtgaaccttgcatgcggtttggatgatcgctttagtcgcgtcgacaacggcaaaatcaattggtataatattgactttgagaatatcatttcgttacgtgataagctcatagataagaaggaccgcgtgaccgacattccgacttcagctcttgatttctgttggatcgataaaattgaaaacaaagataatgtcctgattatcgctgaaggtttcttaatgtacctgtctgaagaagatgtcaaaaacctgttctttaagattagcgagagctttggaaaagtggagctgctgctggaactgatgactcattggatggtaaaaaaccaaaagaaacacgacacggtgaaacagaccggcgccgtattccgttggggtatcaatgaaaccgaagactttgaaatgatttgccccatgtttaaaatgacgggggattataatctgacaaacgtgatgaaacgttattcaccgattttcatcacaatcgcctctccattcctgaaaccgcgcaataaccggattgggaagtttgagaaattgattctataa

SEQ ID NO: 72394 - DNA, 225 bp, synthetic construct
  source 1..225: mol_type = other DNA
atgttcaattcaaagtttctaatcctgattatcggcgtattaattattggtcttgcgctgtcctgctacttttattcgagcgataacttccacgagtcggatagcagcctgaatgaacgccatgatgatgtggtttacctctggatgttggacgataacggcaaactgaaactggtcccgactacggaaacctattctgaagggagtgccagtgacccagactaa

SEQ ID NO: 72395 - DNA, 2289 bp, synthetic construct
  source 1..2289: mol_type = other DNA
ttggagaacaaaatcaacgcaggctacggttccacaattaccctggagaatgattatgaatatgaggagtctggatatagttcggggatagaaattactcaggatatcacgattgatgggaaaggtcacaccatcgacgccaaaggccagacacgaattttcgatgtggaagcgggcaaggtgaccttgaaaaatattacttttaaaaatggaatgcagaacttctttttcggtggtggagccattctctggaagtcactggacggcatcattaccaattgcacctttatcaataactacgctccgtcgggtggcgcgattcgcctggaagcctgggacaacaccatctctgattgtacgttcatccgtaacaccgccaatcagggcggcgctattaatttgaacaccacgaattacgcgtccatttccaactgcgtgttcgtgaacaatgatatttacagcgtgcagggtgacgggtgtaaaatcaacaacaatattttcatgagttgttcaattggttttgacttcacccgcaattataatattgacaataattggtttgggaataatgcaagtaattatacgtataaacccaatgagttttgcaataattggctctttctgaatgcaaccaccgatcccaacacagtttcagtttcaaacactgcggacattatctttaaactttatgcctataactcaacttcaggcaacatctctaagtatgataacgcgccatttaaaaacctgaacctgaccatcacggcaacaaatggtaatattgataagaatattgcgaaattaggagaaactatcaaatatacggcttccagcgttggcacaggcaacgtatctgccaaggtggaaaacgtagaatataccattggactggacatcattccgattgaaacgaagcttatacttaattcgacggataccattattgatagcatcagcactgttggcatcaatgtgaccgatattaataataatcctctgagtggtgttgtgaaattaaccatcaaagataacaaaggtaacgagtacaacacgacagtaacagtgaaaacgggcattaccacttacatttatccggccgataaaaccaacatcagtaaaattgtaaatatcacgggtttttatctgggaaacgatacgttagggtatgttgactcgccggtcgcagaaaccaaatttcgggtggataaactgaacgcgaccgtcaaccttgtcgtcaacaattacaccatccgtaacttctccgtcaacattacagtgactggtaaaaatactgaccgcatcgtagaaaatggtagcttaattatctatgcgaatcgtgaaaaaattgacgagattaatattacagatggtaaagctgaaaatatactgctgaatatcaccaaaatcggcaattatgaactgagcgtggcctatagcggcaacaacgtcttcaatgaaaacaacacgttttcgaaaaatgtcacggctataaaaatcagtaccattatttccgcaaacaacattatcactacctataacactgataagtacctggaaattaccctgttagatagcgaaaagaatccactaaacaacgcaaccctgtctgttgacttgaacggggctaaaaaatacacaacttataaaaatggccaaataaaaatagcgctgggtagcttagtgccgaaaacatacacggcgaaagtcagctttgccggcaacgatatttatagtccgtattcgaccagctttaaggttgtcgttgaaaaggcgacaccgacgatcaccgcaaaaaccaaaatctttaaatttgaggacaaaaccaaaaaatacacgataactctcaagaacaacaagggcattgtaatgaaaaacacaaaggttactctgacgattaacggtaagacctacacggccacaaccaacacgaacggtgtggcaacgttcaaatttaataaattgaataaaaaaggcacctatactgcgtctatcacctattcgggggataagtattacaacaaactcatcaaaaaagcgaaaatcaaaataaaggcgcctgcctggaaaaccgtagcgaaaggtagcaaaaataaggcgatcgttaaaaagattcagaagaccctgaaaaacaatggctactaccttaagtacaacggcagatacctgaaaatcgatgggattttccaaaaatatacgcagattgccgtgaaacatttccaaaaagcaaacaaactgaaaaccacgggcaaagtggattacaaaacggctaaaaaactaaaaatcatttaa

SEQ ID NO: 72396 - DNA, 147 bp, synthetic construct
  source 1..147: mol_type = other DNA
atgaaagaaattaacattgtggaaatcattaaaaataaagataaattggaaaaacacgaaggctacctgccaataccgattcttcattggatcgacatcggtaaatgggagatctttctggagaaacatgataagaagttatattaa

SEQ ID NO: 72397 - DNA, 234 bp, synthetic construct
  source 1..234: mol_type = other DNA
ttgtttattttcaaaatcagctattacaacctgtttactgtgatcaatttttttacccgcaattttcttaaaaacggtgcaaacatgaaacggaatccaattgaccagttcatgaaagatccggataacaaggcgaaaatcttcatctggatgacccgtgccatgattataacgacgttcatgattacaattggcgttatcctgtttattttatatctgattggggtcatctaa

SEQ ID NO: 72398 - DNA, 1743 bp, synthetic construct
  source 1..1743: mol_type = other DNA
atgattatcgaaggcaatatcattaagattgctgggccggtgattgtcgcagatgggatgcgcggggcgcagatgctggagatggttcgggtaggcaacgaaaagctgattggagagattatcgagcttgaaggtgacaccgctacgatccaggtctatgaagaaacagccggtatccaacccggcgaagtggtggaatgtacggggggagcattatcggtggaactgggtccaggtgtcatgagttccatttttgatggtattcaacgcccgctgcgcatcatccgcgaagcgtctggcgattttattgcgcgcggcattgatgtcgattccataaataaagagaaaaagtgggaatttaaacccgttgcgaaagtcggcgatgtcttaaaagcgggcgatgtacttggcgaagtccaggaaacaagcgccgtgttgcataaaatcatggttcctccggcactagaaggtgaagttaccgaaatcgcagccgaaggcgagtacaccattctggaggacatcgcggaggttggtggccaaaaagtccaaatgctccaaaagtggccggtgaagaaaagccgtccgtatgtacgaaaacttgatccagatgtgcctttagtgacgggtcagcgcgcccaggataccttctttagcgtggcgaaaggtggcgcggccgctattccgggtcccttcggctcaggtaaaactgtgacacagcagcagttggcgaaatgggcagatgcggatatcgttgtatacattggatgcggcgaacgtggcaacgaaatgacggaggtcctgactgaatttccattcctggacgacccgaaaaccggtaatccactgatggaccggaccgttcttattgccaacacgtcaaacatgccagtggccgctcgtgaagcatgcgtgtacacaggcatcactatcgctgaatattatcgtgatcaaggttacgatgtagcgctcatggcggatagcacctcccgctgggcggaagcgatgagggagatttctggacgactggaagaaatgcctggggaggagggttatccggcatatctagcatcccgcctggcgcaattttacgagcgtgccggaagagtggaaaccattggttcggaaccgcatgtagcctctattagcgtggttggcgccgtatctccgccgggcggggacctgtcggaaccggttacgcagaacacactgcgtatctgtaaggtgttctgggccctggatgcaagcctggccgataaacgtcacttccctagcattgactggttacagagttattcactgtatgtggacagtatcgaaggctggtgggcggataatgtagcggccgactggcgggccacccgtgaccaagcgatgggtctgttgcagaaagaatcagagctgcaagaaatcgtgcagctggtgggcccggatgcgctgccggaaactgaccaggctaccctcgagaccacgcgtatgttgcgcgaagacttcctgcagcagaatgcctttgacgatgttgacacctattgtgcgcctactaaacagtaccaaatgttaaaaaccatcctcctgttttacaaggaatcgcttgccgctgttaaccgcggagcgccaattgcaacgatagccgctttgccggttaaagaagagattgggaaaatgaaatatataccccaggatgaatttgatgcaaaaattgcagatatacaggctgcagttgtcaaacagtgcagtgaggcttaa

SEQ ID NO: 72399 - DNA, 1155 bp, synthetic construct
  source 1..1155: mol_type = other DNA
atggccgaccagattgcgaccttgataagttccgtcggactgacacaagaaaccttcctggtgctctgcgtaatctcactgctggtggttggcgccgtagtcgtgatcatcacctcccgcccgattctggacatttacccgtatcttaatccgagcgcccgggtcagagctcgcaaaggtcgcttgtttgatgaaaaacagatttctgaaattgttgaaaccagcaatatcgaggaggtcgagaactacctcaagggtgtgcctgagtatgcggatgttctggacgaatacccccttgataaagcattagatgttgaacgtgctaacacgtacgagtttattgcacgcctggcgccgaaagacattaaggcgcctttcgccgtaatgtcgaaaaaagcagatattgacaatatcaaaagcctgctgaccgccaaggaggtcgggtacgatgcggatgaaaccaaagaactgttaattccttgtggtgcgctctataacgacctggaaagcttggcggatgctgaaaatgtaacggatattgttaccagtttggataacacagagtatgcggcagttttagaagatgctctgccgcagtacgaaaatacgaacatgatccttccactggaatccgccctcgataaatattacttgggcaaactgttacgttctacggatgtgccgtcggatgaaaacaagcaaatcctatatgcatatgttggaactcaggtggatgtcactaatcttaagctaattatacgtgctaaagaagacggcctggactatgatgccatcagcccgtatatactggacgaaggctaccagttacgtgaatggaaacttaaagatctgatggagagcccggacgtgacaaacgtagtgtcggggctggagggtaccaaatattcgagtgcgttaacggatgtggttcccgtgtacaacgaaactggctcagtggccgtctttgaaaaggcgttggacgtgtatgcgtccgaatattcaaaatctctggcaagcaaaaaaccactggggattggtccaattattggctatctcagtcaaaaggaaaatgaaatcaaaaacctgaaaattatcgcccgagcaaaacgcgaggttgatttcccgaatgcgaaaatcatggagatgctgatctaa

SEQ ID NO: 72400 - DNA, 486 bp, synthetic construct
  source 1..486: mol_type = other DNA
atggtagaaatcgctcttggtaccgcgttagcagcgattggtgctggagtagcaattggctttgccggtctggggagcggcttagggcagggtatggcggcggcgggcagcgtgggcgcagtggcagaagataacgatatgtttgcgcgtgggattattttcagtgcactgccagaaacgcaggcgatttacggttttttggttgcgatcctgctgctggtcttttcaggactactcgggggcggccaaggactgccgactgaagccgggattgttgcgataggcgtgggcgcatctattggttttgccggcctgggttccggaatgggccaaggcatggccgccgcctcgagtgtgggtgccatcgttgaggacaatgatatgtttgctcgcggtatcattttcagcgccctgccggagacccaggcgatctatggtttcttgatcgctatactccttatggtcttcggcggcatcctgggttaa

SEQ ID NO: 72401 - DNA, 2001 bp, synthetic construct
  source 1..2001: mol_type = other DNA
atgttcaagaccgcgcgcatgcgtaaaattcgcattgtgaccctggataagtatgtcgcacctacagtggatgctctccacgaatccgggcttatacaagtcagtgacatttctgaaagcattcagcaagatccagagctggcagagctggtcacgccttccaaagcgaccccgtacaccggtaagctgtcttcacttctcatgaaaaccaatgggatatctgaactactgggcaattcgatctccgaaggccatgggctgaaggacacgctgatgtcctttattagcccggacatgccagttcaaaaagaagtagaaaaattggacacgccggcgtttattgagaaagcggaagaaactttagccaaggtggaaagcaagaccagtgtgattgaaggcaaactggcggcactcgactcagaaaccagtgagctgaagagcaacaaaagtttggcaaaacgcttaagccattttgacatggatctggcgcttctgaaagattcaaagtatacttcgactactgtgggacggattaatgctgaatcgacgtccgaaatcaaaaatgaattaagtaacttgacggatgaactggaaatctttactgttccgatggatgatgatgacggcgaagtcattgccgtcgtgacattaaaagaatttagtgacgatgtttattcaaccctgcggaaattcgactttgagaaaattgaggtagctaatgtggaaggcacgccgcagcatatcatctcaagcgcggattcgcgtctgttgacgatcgaaagtgagcgtgcggctgtgaaaaaagaactgagggccgtcgctgagcagtgggatgatgagatattagcgctcaaagagcagctggaaaatgaaaaagataagaacgaaattctttcctcttttgtgcagacgaaagacgcttatgttcttgaggcatgggtaccggtaaaagataccgaggaagttgaacagttagttgaaaagagctcggagggccactgtgcctttgaaacaattgagattgaagggaccgatgatgaagatgttcccattctacaacagaacggctggtatgcaaaaccgttcgagtttctggttgatatgtacagccccgtgcgttacaacgaaatcgatcccacaatctttgtggcaattaccttcccgttcttcttcggcttctgcctgaccgacgccatctatgggctggttgtaagcgccattggcgtggtgatcattcgcggcctgggtaaagtgaaagaatcgatgcgctcatttggttggattttggtttgggccggtctatgggctgttattttaggcttgctgacgaatggttttattggggacttcccagaacgaatcgcaggattccgtctgccgacggtatttgctccagtcgaggccttcaaacaccctgatactattctgttaatagccatcggagtcggtcttctgtacacaaatgtgggatttctgctgggtgcgatcgacaacttgagatacggtaatgtgaaagaggctattggctctcagctctgctggtttgttttcgaagcgggtatcatcctcctcgcgctgggctatatgatgccggcaatcggcatggtgggcatggcgctgggtggcattttgattatcgccaccatcggaatgttggtctgggcgaatggcgcatatggtgtgatggatattttcggttacatgggcgatgttctgtcttacgcacgtctgctggccctgtgtttggcgaccggtggtattgccatgacagtaaacatcctggcgcagatgctgaacaacatggttccgcatgtgggtatcgtacttgcgatatttgtctttatctttggccatattgcaaactttgcgttccaggtgttaggtgcctttatcaatagcctgcgccttaactatgtcgaatttttcagccaattctttatgagcgggaaaggaaaattcgaagcgtttaaagccaaccgcacctttaccaaactgaaataa

SEQ ID NO: 72402 - DNA, 351 bp, synthetic construct
  source 1..351: mol_type = other DNA
atggcaaatattaaaatgttcaaattactaggcgtcctggtgagtctgttgctcatcatttgggggattttaccgttcctgcgtcatcaacccataaccactgatgtcattgcgacggccatcatccttattatgatagcggttgcttacatgattatcatgttcaacccgagctggaccaaggcggttttcttttttgaaggtattattattgcggtggcaggttatatgctgctggcatttccatacaacctggagtttgccctggtgggcgtaatcatcattgccattgcgatccttgcttatctgcagaaactgccgcctaaaatcctccgcttgttttatcggtaa

SEQ ID NO: 72403 - DNA, 330 bp, synthetic construct
  source 1..330: mol_type = other DNA
atggaacgtgcggtctggatcattcttaacaacaatttcagcctgacgctggacagcgaaattaaagatgagaaaatagtaaacaaacgcttctcaccgggcagcgatctgtggacctcagagctgccgcaattaagtttttccgacgaaaatattcagaaggattacgatgaatttatctctgacatcatctcgctcttctctgaaccttcggttgataaaatctttattgacgccaagattggtgaagagtccgaatatgtgaacgcaaaaaatccattggttattcggaaaatcgaagagtatagtgtggatgaaattattgggtaa

SEQ ID NO: 72404 - DNA, 339 bp, synthetic construct
  source 1..339: mol_type = other DNA
atgaaacttttcatcttgtctgcgaacgactcacgcgatatggatgacatatcgcaaaagctgagcttaaaaaaattcaagattacgcagacggagaacaattatattctgatgtgcaaaaaacgttacggtaatattttaatccatgcaatctgtctgattattgccttgagttatgtttggccggtactgatcgtcaatgtgatttactttacctattcctacctgtgggcttcgccaaacgtgctgatcaccactgagagtctcgacgatgaaggcaacccgctggaatttagcagcatggatgaaattcttaaaaaagccacagcgatcctataa

SEQ ID NO: 72405 - DNA, 510 bp, synthetic construct
  source 1..510: mol_type = other DNA
atggaatttatcgacgtgatcaatgaacgctacagtgtccgaggctacctggacaaagaggttgagcaagaaaaactggaatttgtgctgaaggcagccacgatagctccgacaggcgtgaacaaccagccgttcaaggtctatgtcattgattccaaaaaatataaagagaaattaagcaaaatttataaagctaaatggtttgttgaagcgccctatgtactggccgttgttgcattgcggaatgaagcctgggtacgtccatgggattcgaaaaacatcgcagatattgatgccactatcgtgatggaccatatgattctagcggcgaccgacgtagggcttggcacctgctacgtcggtgcgtttaagaaaaattatgcgcacaaattcttgggattaaatgaaaacgaagaagtggtgctcttcacgcctctgggttatggtaacgttgaaccgcgtgagaccccgcgcaaggatctgaatgattttgtggtgtacaaagattaa

SEQ ID NO: 72406 - DNA, 489 bp, synthetic construct
  source 1..489: mol_type = other DNA
atggtggacatcattgatggttccgaaaacatcagcgttcacggtattctgaactgggttctactgctgacgatattcagcatcattactgtggtaggaaattacattggatacaaacatcctattggcgacgctctgatcggcatgttccttttaagcttaatcacgctgattggcgtctggatggagcgctatttgccgttggatatttcgtcaattatttatatcagtatcattggtattgtccttgcgtttcccggcatgccaacctctaagaccctgctgtactatgtgtctcaggtcgaactcatatccattgtgacagtatttctggcatatgtgggtatcgggatgggtaaaagttgggatgaatttaaagccctggggccgaaagccgtaatcattactatcctggtcattgcgtcgacctatctgggcttagcattggtggcgcaggttatactcatgcttaccggcgttcaaatctaa

SEQ ID NO: 72407 - DNA, 897 bp, synthetic construct
  source 1..897: mol_type = other DNA
ttgtccatcatatcaaaacgtaacaatgatacggaagatattagacacatttatcgtgataaaacggatcgccgtatcttaaaaaagaacccatggaaagactatggcctgcacatctccgtacttattctggtggtcattgccgagctgattggacccatgaagattcctgtggccaaaggagtcgaaattagcataatgccgttgttatacacaatgattctaggcttaatcttttatcttgcaaaaccaatcacgtggattcaacgcaagcagtctcgcgtggctgaaggcgcaatgatgctgtttattggtgttctgatcgcgaaactggcagtgtctagtggccagtctattcatctgatttttgaaatgggtccggctctgatgctgcaggaattggggcatctggctacaattctgatcgcactgccgatcgcgctgctgcttggatttaaacgggaagcgatcggtatgacctcatcgattggccgtgaaccggaagttgccgtcgttgttgacaaatacggttttaatagcccggaaagccgcggtatcttcgcgcttttcattgttggcaccatcatcgggaccgtcttcattagtttcttaactagtatctgcgtgtcagtcataccgctccatccatatgccttcgcgatggccagcggtgtaggcagtgcgtcgatgaacgcggcgagcctcgctccgactgtggcggcctttccccaattagccacccagattgaggcatttgcgggcttcagcaatttgctctcgttttccgttggtatttacatcgtgatatttgtggcaatccctctgaccgaaaaactgtatgggattctggaaccgaaaatcgggcgagaccctattgtagatgaggaggagggctaa

SEQ ID NO: 72408 - DNA, 933 bp, synthetic construct
  source 1..933: mol_type = other DNA
atgttaacccgtggtaacttgctgcagcaaacggaaaaactcctgaaatcccagggtttcaaaaccagcgatatctatgaacacggttcatttgatattgtcgcgcggaaaaacttgttaatcctgcttctgaaaacatttttaaacattgacagcattaacgaacagaacgcgcatgaaatgaatcaattagcgaatatcttcctggcgtccccgatcattatcggcgagaaaagtcgtaatggtatcctggaagagggagtaatctatgaacgctacgacattccgaccattggctttgaaacgtttaagaatatgattctttacaatgaatatccggaaatactggcggatcgcggagggtattttgttaaaatcgatggcaatgtgatcaagcagtaccgtgaagagtacagtatgtcacttaaggatctggcaaacctggcccatgtatcgcgcgcaaccatgtataaatacgagaacggcattgtccgtgcaaatactgaaactgccatgattctggaagagatactgaacacgaaagttacccttgacattgatttgctcaaacaaccgcagaaagataaaattgagtatagtgatgatgttaaagacttatccaagctgggttatggcgtgctatcaacgaacaaaagccccttcgatgctgtggccaaaatgaaaactagcgacaaacactctccactgatggccaacgtcgaaaaaaacagaacggaaaagaccttgaaacgaatggctattccgctcaaagacctgagcctggttaccacatcggaacctgtgttcatcataaataacgataaaattaaagaatctattgggaagatcccagtgatcaagtcttgggagctgaaagagtttgaaaattcgaaagaattgctgaagatgattcgcgagcgcaaagaaaattaa

SEQ ID NO: 72409 - DNA, 681 bp, synthetic construct
  source 1..681: mol_type = other DNA
atgagctttatctctaagttattcgggaataatgatgacgaatttgaagaggtgcgtgtggatcgggaagttctgaactcggtcatttattacagcaagcaggcatatcccaatgaatttctggcctttttagatggcaaaattaaaaaccgtatcttgtacatcacgggtctgatcttcattcctggtgaaacctgcgagaccggggcggtgattcacagcgagatggttccaatgaataccaaatacttcggaagcgttcactcacacccgggtccaagtgccagtccgtccgatgcggatttgatgacgttctccaaaaacggctattttcatatgattgtttgtctcccgtactcgtacaacacatttaaagcatatgaccgccatggcgaatctattgattatatcgtgggtgactatgcttatctggtcaatgacgatctggacgaattttttgatgaggatgatgtactgactgataacgatgagtttaagccgggcttcttcgacgaagatgatgacgaatttttcaaaaaccttgatgaggaaaaggtgaatcattacgacgaatttgaaaaacgcaaccaaataaacaatcagctaccgaacaatgtaattaaaatcgaactgaataacgatggcaacgtcaaaaaaatttcacgccgtttcaaagactaa

SEQ ID NO: 72410 - DNA, 723 bp, synthetic construct
  source 1..723: mol_type = other DNA
atgtgggacactaccaaagattatcgcattctggtagcaagcaaagcccgtgaaaactacctcaacctgatcccaacggcttcttttcgaggaagctggaacaagaaacaggcgattgacttaggcaaacaaatgaatagcgatttccagtcattgatttactcgtacctggaaggcgaggagctggtaaactctccggatgttgcctcactcaaagagaaaggggaaaagatcattgaatatttgggtggtccggattggaataagaaattcctgagtaatgcgcctaaagaagatagagaaaaaacccaagagaatattgcgaaagtccgttttttcttggataccatcatcggcttaaaagaccggctgtcgttaggtccgattaacgatcccattattggggtggacatacgcgtgggcgaggtaatgagcgtgacgaagcatcctaagaatgacaaactgctgatctgcaacgtgaatctgggaaaacgtgcaatcaccgtcctgactaacgatttaaatgttaaagatgataacaaagttggtgtctccctgctcccaccgcagtcctttagtgacattgtgagcgaaggcatgtttctgggcatgaatgggaatatacttaaaagtgtggaaggtgagctgggtgaaatgccgaagggcatcccgatggaatcccttaacgaaacacgcaaccttgttgaaaactatctaaaataa

SEQ ID NO: 72411 - DNA, 582 bp, synthetic construct
  source 1..582: mol_type = other DNA
atggaaacgacccgttttgagaccttttttgatgcgatcatagcaattatcatcacagtgcttgttttaaaagtaccgcaaccggccaccccaacgattggtgctattctgaagttaaacaccatctttattgcatacctgatctcgtttctgactctgtacaacctctggtatgccaatcataacctgcttaaaattatcgatattattgacaattcggcggtgtggtcctatggcgcaatgacctttatcctgagcctgctgccctattttactctgtggcttgcgaatgacattaattcaatacctgccgaaacaatgttcggactcatcttcatttttactcatattttcaatcgcttggcgacgaaatcaatttatcgcagcaacccatacaacaaacagttgattgaattgaatttcgattcccacatccagagtatcccgttaattattctgatcatcggcttcatcctaacgtataccatttatgctccgggcatctacgttagctgcctgctggcggtcattttctggatttctctcagtaaaataaagcgggggtgtaataacggtaactaa

SEQ ID NO: 72412 - DNA, 573 bp, synthetic construct
  source 1..573: mol_type = other DNA
atggaaactgaacgctttgaagccctgtttgacgcaattttagcaattatcattaccatgattgtgttggaaattcccctggccagcaccggcagctgggaagctctgtttgatttaaaatacgagttcctgatttacgccgtcagttttatagtatgctttaacttttggaattacaacaataatatcttccatcttgtaaacaagatcgattataaagtgatttggacaatggcaattaccttatttgtgttttcgtttctgccgtatctcacctcttttgttggtgagaacttctacctgttcttgccgcagtttctgtacggtctgagctttatcatcacggcgatcctgtccatgattattgggaacttcctaaaacaagctgatcctggcaatattgccttgcatattgcgctcagtaaacactatccgatgtatgcgacgataatcactgtttcaattggaatgattatcggttatttcatctatccgccagcgatcattgcgtgttgcctgctttccatcctgggcgtctggttcataccacgtattatcttccacatgaaataa

SEQ ID NO: 72413 - DNA, 948 bp, synthetic construct
  source 1..948: mol_type = other DNA
atgaatttggtttttaaatttattgaaaagtattactgtttaattctgctctttctggttgtcatcgcgctgatttatccaatctcattcaactgggtgctgaatagctatggtaatcttaacatcctcaatctgcttctcagcattgttctgttcacgatggggacaacccttaaggtggacaatttcatcagtgtgtttaagaaccctaaagagattattattggcatttcgagccagtacatcatcatgcccttcctggcgtttgcgctggccagcattttttcccttgatgccgcactaaccgttggcgtaatcctggtgggcaccgttccggggggtacggcttcggatgtcataacctttctggctaaaggcgacgtggcgctgagcgtatctctgacggcaataagtacgtttctgtcaccgattgtaactcctctgatcactttggtgctgatcggcaaccagattgctttcaatccggtggatatgtttctgtcgattgttcagattgtaattgtgccggtcatattgggcctgttgctgaattacaaattccccagcttctgtaaaatcctcgaggaatatctgccgggaatttccgccattgtcgtctgcgtgattgtggccgggatcatgggtgcgaataaacaagcgattttaacatcatcgctggttatcatggtagtgatcataacccagtatttcttagccatggccttaggttgcttgatgggttacttatttggcatgaaacgcgaacatatcattaccatcgcgattgagcttgcttttcaaaactctggactgtccaccagtctggccaaaactcactttccaaacttattgatcgcaacggttccgggcgcactgtactctgtctggcagaactttgcaggttccattattgcgtatctcctaaacagttatttcatcgaagaataa

SEQ ID NO: 72414 - DNA, 183 bp, synthetic construct
  source 1..183: mol_type = other DNA
atggatgatagtgcacaaaccagcgcggagttcatcttactgtttggcgggatctttgtagtggtcctgctggttatttatatgtacaataattatatggacgatttgggtggcgaaattaagtccaaagaagtgaacgaatttaataaccagctcaacgcccttaaagtttacttcaaataa

SEQ ID NO: 72415 - DNA, 927 bp, synthetic construct
  source 1..927: mol_type = other DNA
atgaaatttaatataatcaataacttaacgttattcctggacaacaacgttccagagaaatatctgtttaaaatcaacgaatttttgctgagtgggtcgatttcgacagaagcgagtaaggtcctcagcatcattataattttcattcttgtgaccgaaattttcctagtaattgcgctgactctctttaatttgccattttcaatcctgatcttccccttcttcatcattccgataatttttacctacatcattgtccagcaagaaaaacgagctcaggaaattgagcatacggccccggatttcctgcgccaactttccagcatgcttcaggtgggcttaagctttgaaaatgctatggaagacatgtcccactattctagcggaccgctgtatgatgaaatccgtcgcgcaatcattgaaattcggatgggccagaactttgatgatgcatggcgtgcgatgtctaagcgtttaaaatcaaaagagctggagcgcatttttggcattatcttggacggtcgcaaaagtggcagcagtatttccacagtgctgctcgatgtttcaaacgacctgcgcgatttaatggcgctgaaacgtgagagaaaaagcgctgtgatgatgtcagtcatgtttctgctgatctcggcgattgttgcgactccgtttgccatgggtatggtaagcgtttattctaattttatgcagagctacggtatggaatcggaaatgattatttcggccccgttggtgggtgaaatgtaccttatcattcatagcttcttggtggggttcatcatcagtgttatcatgtatggtgaggtcaaaacgggcctgaagttttccctgcctctggtagccgcatctttcggcatattttacatcatttccaccttcggcggaaccctgtttatggggggtttttaa

SEQ ID NO: 72416 - DNA, 642 bp, synthetic construct
  source 1..642: mol_type = other DNA
atgtttaaattcacaagcagtgaaatccgtgatctgatcatcgcgtttatcgttatctcgctcagctttgcaatagtgaatggtggccggaatcccagcgctgtgctgagcattttgccgattgttatggttggtgtgggcgcaggtttcattctgcacgagcttgggcataaattcgtctcaatgaaatacggatattgggccgaatttaaattatggccgcagggcttgatctttgcgttagttagtagctttctggggttcgtctttgccgctccaggtgcggtatatacgtacgcgaattatatgactgatgagattaatggtaagatatccattgccggccctgtggtcaacattattctggccctaatcttcctggccatctgtgtcgcaatttatccgtctgcgtttaactccgaaacgtcagtattaatcttcattatttgctcggtggggtactccatcaacagttttcttgcggcattcaacctgataccgattggaaacctcgacggctctaaagtactgacctggaatgcgggcatctggacgattaccattgctattgccggcatcatgaccgtgatgtcgatgactatgggtgttgaaaccatcgtgcgcattattctgggcttttaa

SEQ ID NO: 72417 - DNA, 1521 bp, synthetic construct
  source 1..1521: mol_type = other DNA
atggatgcaaaatcggaggaaatctttaagaaacatctgaacaattctaaggaatatgtcaaattcaaaaaacttgttaacgaaacccgtgtgtacgatatcccgaaagaattaaccggtgaacttcgtgcataccagaagataggttactcgtggatcgtgcagaacatcaaatataactttggctgcatcttggcggatgacatgggtctggggaaaacgatacaagtgctgacggcgattcttcactttaaagagcagaagcactacgattatgagccctccttaattatcgtcccgcctaccttgctgtccaactgggaaaatgagattaaaaagttcacgccgaccctgtcctattatatttatcatggtgctaacagaaccttcccactggatgaatatgacattattctaacctcatatggcgtaattcgcctggacctggatatgttcttagataaaaaatggttcatctgtgtcattgatgaggcgcagaacattaagaacccgaacacccagcaaacgaaagcgatcaaatcggttccagcctttaataaaattgctcttacgggcaccccgattgagaataagctaactgattattggagcatctttgattttgtcaataaaggctacctgagcacactggacaatttcaaacgtgattacgtgtttcgcatcgagcggttggaagaaacgtcaactctggaaaattttaaaacaatcactaagccatttgtgctgcgccgtctgaaaactgatgacaacatcaaagacgagcttcccgacaagattgtgaatgacatctactgtagcctcaccaaaaaacaggtattactctataacgccataatggaaggaatttttgaagatttggaagggaaaaccggtatcgaacggaaaggaattattttaaatattataactggcctgaaacaggcctgcaatcacccggcgcaatatttgcgtagcgataatcctaaaattaatgaaagtggcaaaatggagttattgatcacgattttagaaaacattctcgatgtgaatgaaaaagttataatctttacccaatacgccaaaatgggtgagattattaaaaaactggtttctaagaaactcaaaaccgacgtgctcttcctgcatggcagcctgacccaggagaagcgaagcgacatcatttcaacgttccaggaggatgaagatcataaaattctggttgcgacccttaaaacgggcggggtgggactgaacctgacggccgcacagaacgttattcattacgacctgtggtggaacccggcaatcgaaaatcaagcaacagatcgtgtccaccgcattggtcaggaaaaagatgttatggtatatcgctttatcacaaaaggcacactggaagaagtaatcgatgagatgagtaaaaataagttgaacctggctgaaaaagcgattagtaacgacgaaactttcatcaccgaaatgagtgatgaagaactgaaggaaaaactgtctctgcgcctgtaa

SEQ ID NO: 72418 - DNA, 756 bp, synthetic construct
  source 1..756: mol_type = other DNA
atgaacatatcagtaaccctgaataatcctgcatggacgctgatttacattcttatcgtgatcatcgccacgtcttttttaacgcgcctaattgccttcttaatgaataaaatgaaacgtttccataacaacgaggctgcgatttatcttacccgcgatatcatcaactacatcatctattttattgcgctgatgattattttacagttttttggcatcaatctggcgggtacactcttgagcctgggcatcgcaggtatcgccttgagcttcgctgcgaaagatctgataagcaatctgttctcggggatcaccctgattattggcaaaagtattcaggtaggggataccattgaaataaacaacaaaaaaggcattgttgaacgcatcacccttcgtagcactattatttctgacgacagtggtgttaaaaagattattccaaactccacgctgacaaattacccgtacctgcacttcaagacgccggaaaaatatcgtgtcgacatccaaaccggattgtcactgaatattgatgtggaggaatttgaaaagtacattgtgaaaaagatactcgaatatgatggtatcctgaaaaacccgaaaccctccgtttattccaaaggcatcacttttgaggaaactcagctcaaagtgtcgttctgggtcaaggaatttaatagtaaagacaaatataaactgaccatcaccaacgaaattcggaaatttacaaaaatgggtgaaaaggatgagtaa

SEQ ID NO: 72419 - DNA, 693 bp, synthetic construct
  source 1..693: mol_type = other DNA
gtgaaaaaatgccccgagtgcggcaatcctagttacgatggggccccagtctgtggaaactgcggctataagttcccgaaagctaaaaacagcgtgccgaaaggcgaagatatctttaagaaagaacacaaaaaggaaccgtccaatgacgaaagtacactgactattatcaaacagaaaaagctaattattggaatcatcctggttataactttgattctgatttgtggcatctttctgacggggtcaaccaataaatcgagcccgattcagaatgttgacaccgagaaatatagcgcaggcagcttttcattcaaatacccaggtgattggcaggagttaaaccaaactgacgaggaacatccgggtgcgattttttataaagcagcgaacaacacgacggttgagtattacaatgtcagcagcagcgcctcatctttaaaagaaatcaaccagaatcggatcacccatgcgcaaagtgtaggtgcttcggtcaccctgttggaaaccataacactggatggtcgcaatgcgtcgaacattatcctggaaaacgcggatggtaactacacgcgctatgtgtccatgttttcaaacggcgaactctatgtattccgtctttcgggggattccgtgaactccattacctctgatgaaattaatagtgtgatcaattctgcagacattgcctaa

SEQ ID NO: 72420 - DNA, 369 bp, synthetic construct
  source 1..369: mol_type = other DNA
atgactaaatggaaagccgtgattataggtttcatcctggctgtaattgttaaatcatttttcgcccagtatgaatttattggactactgtttgttggcttcatcacgggttacatcgcacatgatggcgcacttagtggcctgtggaacgctgcggtggcgggcgcgctggggaccattgtgtgcgcaatcttgtttgtgctggtcgccaccttaggtggctctctgttcggtatttttggcggcttaacgggttttaccctctccggcattacaagcataaccattgtattgggttatctgatttactatagcatcgtcatggggattactggagcgcttggtgggatcatcgcgtcgaaaaagtaa

SEQ ID NO: 72421 - DNA, 408 bp, synthetic construct
  source 1..408: mol_type = other DNA
atgaacatgtttagtgagattaatatcaaggcgctggtattcggcgcggccattgctgcggcatgcattttgataggctaccagtattgggactggctgtatccgttctcggcgattggcttaatctatgccggttacggacagagcaacatcaaaattggcactgccatgggggcgctcgcctccacgccagtcgcaattctaaccttacagggctatctgggaacatttaaagaagggttctttactacggaaaatggcattcttgcggtgaccctgaccgttattgctgttggtgcatttatcggttttgtgggtgcctgggctaaacgtgatcgcatcaaagcactggaacagtacaatcaaaaacagaaaatcggtaaaaacaaaaacaagaaacaaaagtaa

SEQ ID NO: 72422 - DNA, 420 bp, synthetic construct
  source 1..420: mol_type = other DNA
atgcgcaaatctcgtttaagtctgtttaaatcgacaagcatgatgatttcggtcgttggcatcataatgatcatttcaaccattatcgtcgtggcatatgtggggtacagtattgtatcatccagcatcactaacgacatttcctctggcacgcagtatgatgagctggcagaacttaaagctgaatacagcaatttgagcgttaaattcgacaacatcaagtcaacctactatgccggtgatgcggatgacgtaaaggtttataatgatgccaaactagagctgagccgggccaattccgcgattgagaacgtgcaaagtgcgctggacgcagataaaccgtcgaatgatgtggatagtcgcattgtctttgcgaaagaaaaactggaatctgcggaaaaggcttataacagcctctaa

SEQ ID NO: 72423 - DNA, 936 bp, synthetic construct
  source 1..936: mol_type = other DNA
atgaataaaatgttgagcccgaaggagttcatcgaagattcaatacagaaaattaaggatcagatcggcgatgagaaggcgattattgcactgtctggcggcgtggatagttccgtgtgttccgtcctcgtgcaggaagctattggcgataatctgaccgccgtcttcgtggatcacggtctgctgcgcgagggggaagttgaacaagtgacgaatacttttaaagatcgcttgaatctgaaatttgttgacgctagcgatgaatttatggatgcgctggatggtatcgaagacccggaattaaagcgcaaaattatcggtaaaatttttgtcgatgtcttcgagagagaagccattaaaagcggtgccaaattcctggtgcagggcactattgcaccggactggattgagacgaaaggtgaaattaaatcccatcacaacctagccctgcccagtggcatgaaattgaaagtatgcgaaccgatccgtgacctgtataaagatgaagtacgcgagatcggggacgagctcaacatacctgcgagtacagtttaccgtcaaccatttccgggaccgggtcttggcgtgcgtgtggtcggagccctgacaaaagaaaatgtggaagtgtgccggaaagcaaacaagattgtttgtgatgaaatcgaagcggcaggtatcgataaagacgtatggcagtactttgccgtgttaacgaacaccaaggttaccggggtgaaaggcgaccaacgcgactttggatatttagttgtagttcgtgtagtgaacagcattgatgctatgactgcatcggtcgcggaacttccctgggaagttattcagacgatctcaaaacgaattacctcggagatctctgaagttacccatgtcgcgctgtcggtaagcgacaaaccacctgcgaccatcgagttctgctaa

SEQ ID NO: 72424 - DNA, 558 bp, synthetic construct
  source 1..558: mol_type = other DNA
atgaccatcctggtaattaacaacaaaggccagtataaccatcgtatcgcccgcagtctccagtatctgaagattccatcaaaattggtcagcaacaatctgtcgattgaagaaattgaggccgaaaatccgattggactgattttaggtggtggcccaagcatcgaagacgcgggtctgagcgaagaatacattaaatattttgacatacctattctgggcatctgccttggtcatcagcttattgcgaaagtttacggcggggaagtcacgacgtctgacacagaatcgtatgcacaagttaaaattgatatcaagaatgatgaaaacctgttcgagggcctagctccggagatcgatgtgtggtcctcccacaaggacgaagtgaaaaccattcccgatgagtttgaaatcttggcgagttctaacttatgcaatgtggaatcatttaaacataaagataaagatgtgtacggtatccaattccacccggaggtacatcacactccgaaaggggaggcaatatttaataatttctataagatctgtaaaaaataa

SEQ ID NO: 72425 - DNA, 147 bp, synthetic construct
  source 1..147: mol_type = other DNA
atggaactgaaagacttaatctttgtgattgcggcaattctcatcgctgtggttctgcttaaaatctttttctggctgctgccggtgattgtcgttctgataatcgccttctttatttatgtatacttgcaggatcgctataactaa

SEQ ID NO: 72426 - DNA, 432 bp, synthetic construct
  source 1..432: mol_type = other DNA
atgttttgtgaaaaatgtggtaaagaaattccggataacacacgcttttgcagtaattgcggaaaccaaattaaaaaaccaaacaacaagatcaccgaggagaagaatatgtaccttgccttgttcctatcaatttttttgatggggttaggcatctactatgcgggcaacaagaaaaaaggcattattctgtttattttcattctgatctccaaccgtatgcgcaaattccagatattcattataattgccatcattctctggatctatgcaatttatgaaacttacatcgacgtgaaacgggctaatggtgaggaaaatccgaatctgctggaagatatcaacaatttcaccacgtctaaacactttgttcatattatcgcgatcgcgctgttatttgcagtctcgtattttctgatcagcaaactgtaa

SEQ ID NO: 72427 - DNA, 750 bp, synthetic construct
  source 1..750: mol_type = other DNA
atgaagatgtgcaaccgttgcggcgcagaaaataaagataaaagtaatttttgcagcaactgcggtgctatattaaataatccgaaaccgacgcatagctacgacaaaaaactcattgaacggttcatggatgcgaacataattcttaaactgatcatcatcattgttgcagtgtttgtcttctttgttgctagcgcatggatcgggcatattttctttggaatgcctttggaattttataccgagggcgatgcgacttatcacttatctcagtttaataaattggacctggatggtgatggcaatctgaccttctatgaagtaaaagggctggcgtccgatatttcgcaggacaatctgtccgggatcttcgatgccgccgacaaaaacaacaacggtgtgctgaagggatctgaatttgatggctatcttcagttcattgacaaatattataaagaactaggcaagcagcagaaagcggaacgcaaaaactcagcgcagcaaaaaagtagttcttcgagcagcagctcgaacccatcattccaagacgagggccacgaaatctgcccggtgtgtggtggtaaccaatttacagaattttacaattcacagtatggtgaaatgaattggcaatgtgattactgtggcgaaattttccgcagtgatgatgagttttacattgattactgggagtccaatggcattaagtgtattctgcccgccctggagaacaacctcgacatcatctaa

SEQ ID NO: 72428 - DNA, 753 bp, synthetic construct
  source 1..753: mol_type = other DNA
atgacgaacaagatctgtttcgaatgtgggattgaacaggatgatgccttcaattactgcataaactgtggcgcgctgctttccaacgaaaatgacgactcattaagcaacagtaacgaatatcgtttgcccgaagatattgaaaaccagaatgatgaatatgataatctgaatgatgtaaaaacttgtccgaaatgcgggattgaacaggaaatttttgcgaagttctgccgcaattgtggggcgtcattttccagcgaaaataaggatgaaatcaccattcggtgtgagtattgcggtgctgagctgaatgacgaggcattctgtccggattgcggtaaagccacgggcatcaccatctgcacaaactgccgccaaaaaatcgtgaacgaggacttttgctcgatttgtggttatcagattaaccataaaattaaaatctgcgctaattgtggaagtaaaatcgatgccatggctaaagtctgcgcgcactgcggtgcaaaaattattaaaaaaaaccctctgatcgcactgggttttagctttgttttcccaggcctgggccaactatacaacaatcagaaccataaaggctttattctgattattgcgaacatcatttcttttatcttgtgctttatttttattggcatcatcttagtgattcttatctggatatatgccatgtacgacgcggccacctcggcaatcgcgataaataagggagaaattctggaggacaaactcttctaa

SEQ ID NO: 72429 - DNA, 390 bp, synthetic construct
  source 1..390: mol_type = other DNA
atgtttaacttaatcgatagtaccctcttttttgcgtcttatggcaacatttttggacttgctaatatcgcagttagcccgattgacatcatcctggcctatgtcgtggctattgtcatctccattattatggcgttcgttctgaaagttccactgctgccgagcaagccgtaccgctactcgttcgatgtgtgcgcggtatatccgactccaatcattgccattggtattttttcaatcttcttggtattgaattacacgtttatatataatggtctggtgctggccattataattggcatcctaagtgcattattcgtgaaatatctttttaacttcgtctttcccaaacctctgaatgaggacgaaggggatgaaattaacgaataa

SEQ ID NO: 72430 - DNA, 498 bp, synthetic construct
  source 1..498: mol_type = other DNA
atgaatgaggtaattggcatcatcattgccgcggtgctgtgctggctgaactttgttatcgtggacacgtattttggacttcccgagcagccgggtgttcgcggcgcggggatcattggtcaggatgtcgaaaaacgtgggggagacattgctggtggattcttccaaggcaacattacctgttctccggatgcctcggctggcacattattggcgagcattggttacctggtgttaggtatcccgggtggcataattgcggcattttttgtatttattgggaatcgcctgtgtgcagatcctggctatgcgggcacctgcggcagcctcactgccacttgcattatattcatctgttcatttctgggtatgacgccagaaatgttcattgtggggatggttattgcaatcttgaccgtgatgggcatcagtcagaccaaggcttccgtcatcctgggtaaagtcgccaaaaaattcaaccggcatgcgcgtgaataa

SEQ ID NO: 72431 - DNA, 249 bp, synthetic construct
  source 1..249: mol_type = other DNA
atgtatggggaaattattggtgtcatagtcatcttcgtggccctgcgcgcattagtgacgcgtaatcgcgccgaacggctgctgtacctaaacgttatcggctttggcgtaagcgcgattgtagcttttgtgatcaacactccgtttgccctcatcgttgcggcagcattcttcatctgctcgaccattagtgcgaatgcgattgcttataccctgaaacgtctggatgacgaaattcttttggagtaa

SEQ ID NO: 72432 - DNA, 270 bp, synthetic construct
  source 1..270: mol_type = other DNA
atggaatttttcgtctccattattgccattgcgctcatgattatcggggcatttggcatcatcttcatgaaaaaaccattggacaaagtcataatgtttagcgtgctggacgcgggttttgtactagtgattgtgctttttaaatatctggatgtggcgatgttcgccgcattagctgatccgctgtcgacgctggttttcattctggctatcgttaaaatcaacgaggttcgcaaaaagaagattatcagtggcggtaccgatgattaa

SEQ ID NO: 72433 - DNA, 261 bp, synthetic construct
  source 1..261: mol_type = other DNA
atgattagcgttccactgttcttttactttggcattttcttggcaattgtcggaagtatcgcgaccgcctggggtccgggtgttaaagatccgatcattcgcacgttcaatactgaagtagcttcgattggggtctgtctggtgctgttatgctataaccatgtgctggccctgctcaccctgcttgcgacaacggtgatcatctccctaatcttatttcgggcgattattcgtttggaagagatgggcgcaaacatataa

SEQ ID NO: 72434 - DNA, 594 bp, synthetic construct
  source 1..594: mol_type = other DNA
atgcgcattggcgtgctctggaacaagctggcggagccgaaaaatattccccgtttgttcgcatttagtctgggcataatcctgattttagggcttattgtcccaatggcgttaaacccggatcagctgtatgtgcgtcctgcgccgcaggagcaaattggtgacggcctgtcgattgcaccgtatgatcggggtggcgaagtcctgacccaaccgggacagattaacccccaatatccggataactcccgcgaactgggcatgataacggcttatatgtcgccgatctcacagtgggtaagctcaatctccccatactttggaacatccatttactcttcgcctggtgggctcattgacgaaatcctttactacacccgaggttttgacactatcctggaatctagcatcttgatgatgagcttcatcattgcgagttggctaagcattaattatacgatgaatcgcaagaatgacgaatctgaaatcaaaaaagatgttaaaaaagccattaaagattcaaccaaggtggcaaacgagatcagtgttagcgatgctaaagcccgcgccaaacagctgcgtcgtgataattaa

SEQ ID NO: 72435 - DNA, 696 bp, synthetic construct
  source 1..696: mol_type = other DNA
atggtatttataccgcagttcgttcccgcggccttcctgaatatgtacctgccggcgatttacgcgggtctcattgttggttttattggcagcatggcgatagcattgaaacgggaggaaattcatattctgatcctaacggatattgtgggtctggctatgatctttattgtgagtgctgttggtactgaccttgcagaagccctgatcttgccgggtctggtcgtggaacttgccgaaaccctggcgatttcagaaatcctgattacccgcgaaatgcgcatcattgagaataacccgcgtaaaaacctgtcgaatagctcgtccctcttcccgcagctctttgcgctgaacatggagatcctgaatacagcccctaacttcatcgcattagtgttgattgcttatggtatctttctgaccggctttactggcggggcagtggcgggtggaggaatcgtactgtatgccttgtctaaaaaggcccgaggccttccagtccttgtcttggatgggattgctggagtcagcgggattgcgtggtgtctgtggatcatcggctttttatttttctttgtgacgccacaatattggttattaagtctgttcctggcagcctgcggcctgctgttaaaagtagcgtccaaagttggcctaattggcctcctgatgcgtgaagatatagacaaggagtaa

SEQ ID NO: 72436 - DNA, 672 bp, synthetic construct
  source 1..672: mol_type = other DNA
atggattttgttacactcggtggcaatctgcttggcaccattcccctgggcgacattgtcctgtacctgaccccgtttaacctgttcctgtttgcagtcttacttggcttcacagtaatgatcggactaagcaaaccggaaacccagattgaagctacgatgcactatctgagcaatacggaggtgaaagttggagagaaagaatttaagcagcgtcgtttcttatcggtactgtgcggcattgcctcggccggcgcaatgattacgggggatctgttcaacttcaccctgttcatggccctggttggtatgttgaacattggtatagtgagcgctgtgcggcaaactagcgtgctgaactccgcgtttaattatggtctgatcgcgatgatgtgttccttaccattgtttggtggtgcctcaatcattctggcaagcaccggcacgttgtcccttgccgtgctgtctcagatgcctgtgagtccgatggttgtctttggggcgaccttgatgttactggggatcttaggtgaatcgggagtggcgccgttctttgcaagtaaagcggagatgttccgcactgcgggctctccatttattgttatcattcatcttagttcactgtttataatcgtacgcgctgtcgaaatcttgctcctggtgctctggtaa

SEQ ID NO: 72437 - DNA, 231 bp, synthetic construct
  source 1..231: mol_type = other DNA
atggtctccgatagtatggactcgcagaagagcctctgcattattctgttggtattatcaacgatcgcgattatagcgtgtcttgttgtgaacttcgaggcatggattgtttatactatcgccatctttggcatcccggtctgggtgctgtctctgggtctgctgaccatggctaaacctcgcccggaggatgccgaagaacgtgtgaaagaaccatttaccgggtactaa

SEQ ID NO: 72438 - DNA, 873 bp, synthetic construct
  source 1..873: mol_type = other DNA
atgaacctgatggccgatattctgattcaagttattatcgcgttcattgcaggaagtttgcttcttggtctgcaccgcaaaatcatggcccgcgtgcagaagcgtccaggcccgcctatcgttcagcatctgctccacagcctgaagtttttctttaaagagaccgcgttcccgaagacggttagcaaacttttttacataggcattgtcttcatactggctttaatatggattgttggcgtgatcgcgggtccagtagcgcacgattcgctgctgatcctatttggtgtgtatgcggtgtacaaaattgttgaacataactccggcagcagttcaggttccccgtatggcaaattaagttgtgtccgggcagtattgagcgcagccactgaacttccgttgtttgcggcaattatctttgtttatttggtcaccggttccatgaacattggggaaattatcacctatcagtcggtgaacggccccttagtatttacgattccgctggcagctctgatgttctttatgctgattattaccaaatcaccatactcgccgtttgccataacaaaagacaaagccctgattagcgggtttgagaccgaacatttcggctttctgcgtggcttcatgttattttcagaatctattgcgtggtatgtgatgctgtgggtattcctcactatcttcttcggtcctctaaatgctgttggatacgtgattggaatgatcgtcatcacttttattaccggctttattaatgcgacgacccccatcctctctccgaatcattctgtcatgacgcaaatcacgattggtgccatctgcttctttgggacaatcatcatgctgtttggtggggtggtgctgtaa

SEQ ID NO: 72439 - DNA, 255 bp, synthetic construct
  source 1..255: mol_type = other DNA
atgaatagcgaggatgtcatcgtgtatttcactgcccttgttgcaattggcatcgttgttgtaggtctcctgaccaccgtgttccattcttcggtgattgctccgatcgtaattattgggatcattttaagcatcttcgtgttgtgcacgcgttccaactttagtcacaaaatcgaaagtattgaaaaaatctgttttgtcataacactgattgcgattatttgctcatttatactgctgtaccgcccaatgtaa

SEQ ID NO: 72440 - DNA, 306 bp, synthetic construct
  source 1..306: mol_type = other DNA
atgcttgattatatgatatatattctggtgtttgctgtcggttccattcttggcctcctgtacagctacaaactgcatggcgaaccgtatgtggtagacacggagtttaatgtcctgctggcagtggtcagtgttgccggttggtgtttgggtttcttatcgggtaacatcattctgtcagcgattggcttcctcctggcgggatttgtgatggggggccgtccaggatatggtcggcgcgaaaccgcggttggcctaatcgtagcaatcgttgcctacttactgttgaaatgcgggatgctgtaa

SEQ ID NO: 72441 - DNA, 450 bp, synthetic construct
  source 1..450: mol_type = other DNA
atgctggacgccgttaaagatgcggtgcgtaaaagctcgattcacgtctgtatagtgaactgcggtggctgcaacggctgtgacgtggaggttgtcgcactcctatcaccacgctacgacttggaacagtacggtatctatgtccagaataacccgcgtgaagcggatgtcttacttctgacgggtgcggtaaccgaacagtggattcataatctgaaacgcgtttatgataaagctccggaaccgaaaatcgtagttgcggtggggaattgcccccaatccggcgatgtattcgcccaggagggaggccacgtgcatgcaccggcctctaactttatcccggttgatgcggccattcctggctgtccaccgcgccctagtgaaatcctggaagctattctgagcgtgggtccccaagctattgcagatcgtgggcgggaagagaagtaa

SEQ ID NO: 72442 - DNA, 636 bp, synthetic construct
  source 1..636: mol_type = other DNA
atgcgcgcgaaagagctgatggataaaaatttcgtatatctaaatgccaatgatagtgtcattgaagtttcaaaagtcatggaagagatccgacgttttacctgtccagtggtcaatgataacaaacagctgatcggatgggtgacttcctttgatattacgaaaggcttacgcgagggcaatgaaaaaatatcagatataatgagcggttatgaggaaattgggacggtgcatgccgatgacccggcacgtaaagcagtaattctgaccgcaaacaacaaattcgtgaccgtgcctgttgtcaacgacgataagcagatcattggtatggtgcgtgcgtgcgacatcgtcgaactcctgtcggagttatacgacattaaagtgtccaagttgtatgaagcgatgcagaatcaactgaaaggcgttacttgggaagaacttatggcggccagcgctcttgtgtctcaaaaaacaacgggtgttaagatttctccggaagcctacgaagaaaacattatgaacagtacctttggcgaggctatctggagcacaggtggtctggaaaagttctttgcgggactgatctcggttggggaattggtaatcgctcgtcgggttggcaaagcgcgccgctaa

SEQ ID NO: 72443 - DNA, 642 bp, synthetic construct
  source 1..642: mol_type = other DNA
atgaatctgaactttgactttacggagaagcgcgtcattattactgcgtttttctgcatggcgttcaccattgcaaatttaatcaccgttaaagtgatcaatattggctttctgggtatggaaaccccggccggggtgctgatctatccgttggtgtatattctgacaaacgtgatcgccgatgtgtatggcgagaaaatagcgcaacggaccatcattttaggtctctgtgttgatattctctttgtcttcatgaccacgttaatactgttcctgccgagcccagcgtactatacgggggattcaagccttgcgtttgtctttacccagactccgcgcattctggtcgcatcgtacatttcctacctgatcggcaacttcgttaatgcacgtatcacggcgaaagtaaacgaaggcaaagaatattcctcgaccaaaaacctgggtattcttgcgttcagtgagctaatcgataattttgtgtttatcggtctggcattcgttggcgtattcgccgttactgacattttgatcatgatcgtgtctcattggattctgagcttgatttggagtgccattgctcagccctttacaaagatgacggtaaaatgggctgaaaaaggaaaacctgccgaagcttaa

SEQ ID NO: 72444 - DNA, 366 bp, synthetic construct
  source 1..366: mol_type = other DNA
atggaactgaagtatatcatagtcttatttgatggcgaatttatgaagttcaaatcgaaattctttatttcattgttgatcatcttcgttcttagcattgtggccgtcccggcaagcgatgttaatagtaccgatttttctcagctgaacgacactgttctcgattccagctttaatgataatctaagtactgtggaaacgtccaacaactcgaaaacagtaaacaacaccaacaatggtgacatggtgcaaattattaaaaccaatccgaaaatcacggtgaaatcaacctacctgaaaagtaaagacaaactggagtttaatttcaaaaatgcgtctgggaacccactgaaatcgaagagctaa

SEQ ID NO: 72445 - DNA, 1572 bp, synthetic construct
  source 1..1572: mol_type = other DNA
atggtcttcatcggcaataaaaagtattcggtttacaccaattcgaaaggtgttgctaatctgaacatcaacttggtggcgaaaacttataaattgactatttcttttgaaggtgatgataattacaatgcggtgaataaaataatgtacctccgcatctcgaaactgtccactcgtatcacttgctataaaaacttcgtcgtgaaaggaaacaatctgtatttctatctgtttgattcttactataatccggtctcatgtaaaaagctgattgtcaagtacaaaggcaaaaccgttacgaaaacctcaaataaaaacggccgtattagctataagatcaaatccagcgggagtaaacactccctgcacgttaagttcaaaggggatggtcagtttaagtcatcttcaaagtatcataaattttacatcaccacgttttcaccgttgaaaatcggcaactcgaaacttctgaccaatggatacctgcgaatttatctgaacggcctcacgaaaagctcaattagcaaaaaaacaattgtaattaaagtggcgagcaaaaagttttcgaaaaaatcctcgtcggaagggattgttgttctgaaacccaacgtatgcgcgaaggcatatacggtgagtgcgaaattcggcaaatatgttgtttataaaaaaatgaaatgcatcgaaggcaatgtgaaagacccactgaaatataatatcccgaccaaaagcggtgtgccggatattgatgtaatgcctggaaattacgtcatgggcgacaataacgcacgctacaccctgacaaaaatacaatataatgaagtgataaaacgggacagttattgcctgtttttaaacaataaattatccaaatacacgttttttaaaaccaaaaacaatccgaatactaaccacattatccagcgtgaaaaatggaatgtgattgaacgtgcaatcaaccttaagattgtggggaagaataaagcgaattactggctatccgaaatttccgttttacttaagggcaaatcctataaatatcctgaagtacggaagacccagtctacaaactattattgtggacccaactcagccagtgtctgtacgcaggttttgaagaactactactgtgaaaaatatctcgccaagctgatgggtacaaaccgtcgcgagggtaccaaatgccagtggattattgacggtctgaacaagttagggtttaacgccacctacttctacaaagctagctttgacaacgccctcaatgagctgaaaaaaggcggtgctgcactggtattccatgccccgcgccattacgtgtctattttggacatcagttcggatggcaaaaaagtgttagtgagcaactcttatggcagttatgataacattccaaccaaatggacgaaaatcagttatatgaaaacgaagtttagcaaatgggaggagagcgtgatcgtcagaagtaactacaagctttctgatagcgtcaacgatagcgtaaattgcttctataacagtatgggtacaaactggtaccgccatagcaccagccaaaaaatgggtctggtgtaa

SEQ ID NO: 72446 - DNA, 1290 bp, synthetic construct
  source 1..1290: mol_type = other DNA
atggttgaagaaaatagcaatatgctacttggggtgcgggataagccgcccgcgctgcgatgggttctgcttgcgatacagcacgtatgtgcgatgttcggcgcgaccatcctcgttccgatcgtggtgaacaccactgccggggccgatgttctgagcattccggtagcactggtcacctctggtatcggtacactgatctatctggtttgcacgcgtggacgcagcccggtatacttgggcagctcgtttgccttcattgcgcctatggttgcagggtacgccctggctggcaagtcgagtgtattttcagctttgatgcttgtgggtctggtctatgtggctgtatcatgcatcattcgcatctcgggtaaagcgtggattaataaattattgccaccggtaattgttggccccatgatcatggtcatcggactcagccttgctccaactgcgattagtgaaatcggcctggatttagcagttgtcccatggaaaaacctggtcgtggccctgattgcctttttaacgacggcctttttggcggtgcgtggcaagggcattttgcgcgtcatcccttttctgattggtattatcgtgggttatattgccgcggcggcgctgggtatggtggacttcacacaggccctgacggccaatgtggtggagattccgaaattctacctgccatttatgaattataatctgaactttgcggcagtccttacgatcgtgccgatcgctttagtaacaatggtggagcatattggagaccacaaagtcctgagtgagatcattggccgtgatctaattgaagatcctggtctggaccgtaccttgctgggggatggtctggcaaccttccttgccgcgctgttgggcggtccggcaaacactacttatggtgaaaacacgagcgtggtaggcatgacccgcgttgcaagtgtgtacgttatcgctctggcggcgattatagcaattatatttgcattctccggccatctcacctcactgttaaccgccattccggcgcccgttctgggcggtatttctgtgctgctgtacgggtttatttgtgtgaatgggctcaaaattttaatccacaaccaagtggacttcaacaacaccaaaaatgtggttgtagctgcgaccatgctcgttctgggcctcggtggagccacattatccgtggtttatggcaacttgtctctggctatgtccggaatgtcgcttgcagcagtcatcggcgtcattttaaacctggtcataccggaggaaaaacatgaataa

SEQ ID NO: 72447 - DNA, 993 bp, synthetic construct
  source 1..993: mol_type = other DNA
atggttagcaaagagtttatcgaaaaagaatggattaaagcatataatgccctgaatcccttcttagatgtgaatggagcctatgaactccgtaaactactgtgtgatctgcggaataatgaaaagttcatattcatttccgacaacgttgactatacctgcattattgagctggatgaattaaaagacgacatcccgatttttaaatatgcctcagattgttttaagatttttggcatctttagtaaatctcagctgagcaaactgcactttgcctcagtgtatgatatcattgtgtacagctgcgttagcgaacttaaacgcgacctcagctacaacgagcgcaaaaagatttattactgcaacttaattcataaactcacgttgaaccaggatattagctctaacttcaatcagaacttcaaatataacaacgaactattcaatcaaatgaaaaaaatacgctggaatagttcggcaaacaagctgaaaaatatcatctaccgagatttgatgggtacactcaccttagaactgaacaccgattccggagtgacttcttcatttggcgaatgtgcggagtacttagcttgttgcaatgtatttaacgacaatcgtctggaagtcatgcctgatgacgtggttaagtcttggctgctgaccctgaacctgttcctgatggacctgcgtccatatattaaagattttaacagcgcgagtgatatgattgcggatactggcagtgagtttaaaccgattaacatctcggaaggtcaatcgaacaataaatcatcctcgataatccgcaaagtcctggcgggcgtgctgagcatcattattgtctttctgttgcttattgtaatgtccacgattttaatcttgatttttggcgatgcgctggacaatttcatcgggcttcttcgtccggtaggtatcatcggtctggcgttggctgcagctctggggaagaaaatctacgataaacttgtctaa

SEQ ID NO: 72448 - DNA, 993 bp, synthetic construct
  source 1..993: mol_type = other DNA
atgttcgaattttactatgaaaaggatattcaaaaaaactttggcgacttggataaatttgatgatgtgctcaatttatttgaacttaaaaatttaatcaatgatttcatcaacaacgaaaaatacgtcttcattattgagaacattgattttgaaatgtttgaaacgatggaaaaatctcgaaaatattcgacctttattaataatgcttttaacggtctgaagtcttttaaatattggattcagccgagcatcatgaactttaactcattcacgagcgtgtactcgatcattgtctatagttgcatcattgcttacggtcgcatgctttcgaatgacgagctggaatcaataatcttttccgattttccaattaaacttacattggtcatggacgatttctacaacataaataatgttcccctgctggataaggatttcttccggacaattcgtgacgtgaaactggataaatccgcaaaaaaactcgacaaatttatctatcacgggtttttacttaacctggccgagccgggcaatcattatgtagcggtagttgtggaattttcatattgtgcaagctatttttcccgctgttacgcatattcacgcaaaaacaaattcgttaccattaacgacattgcggacggatggatcttgacctttaaattattcctgaacgatatccgtggttatattgatgggctggagagcaatagtccgtgcgcgatcgtcccttcgctgaaaagccataaaaagatcaaagttgaagaagagaataatggtagtttcaacatcaagaagatcattgccatcttcctgtccatcttgttcttctgcttcctgattctggtggtggaagacattagctatattctaactggcagttactactattctggcgcgccgactacgcgttacgccatattcggctttattctgtttctgaccagcatgttttattctctggtaaaaaacattctcaaattttaa

SEQ ID NO: 72449 - DNA, 990 bp, synthetic construct
  source 1..990: mol_type = other DNA
atgtttgattacaatttcaaaaagagtattgaaaaaaactttaacgaactggaaaaattcaactacctgaaaaatttcaatgagcttaaaaatttactgctgactatctctgaaaatgaacgctatattttcatatcgaaaaacattgatttcaacgcgcagccgctgatggacaaaccgaaaaaccactcaaaatttatcattaatgcctataacggtctggagagctttaaatactggatcaaactttcaattatgaattataacttttttgtgggcgtttactctatcatcatgtatagctgctcatgctcgtatggccgccctatggacattatcgaatttgaacatgttctcaattcgaaccttccgtacaaactgactgtctatctggatgatttcgataaatacgatgatttttccagtctgagtgaggagtttttccgtacaattcgagatatgaaactagataaaaaggcgaacgaaattgaaaaaattatttaccggaagttctggtctaatttgacgatcaattatggcaccgagaatcgtgtggacgtccagtttgcatattgtgcgaattacctaagccgttgctatgcgtttaaccgcgggcgcaatgttgtctccgtggaagacatcgctgatgcatggattttaaccttaaaactctttctgaacgatctgcgtccatatattagaggtctcgaaagcaatagcccgtgtgctagtcttccgtctgtaaacagctacaagaacatcgaagtggacaatgataacggttcggttaacgtaaaaaagatctttgccatcttgctgtcaatattgttcttctccttaatcattatggtgtttcagtacaccgccaatttgctgacgggagactattactatcctaactccccacaagaccgctatgtgctggcaggcatttttctgttccccaccagcatgttttatgggataattaaaaagatcctgaaaatttaa

SEQ ID NO: 72450 - DNA, 993 bp, synthetic construct
  source 1..993: mol_type = other DNA
atggttcagtttccgcaaaagacgatcgacgaatggattaatgaagattatgaaaagcttgatgtattcatggacgctgatagcatggaggacctccgtgagctgattctgagctttaaatacgatgataaattcgcgtttctttcagaaaatattcattaccagaccgatatcaacaactactcagacaataataacctgtacctggatgcaaacgatgttctaggagactttggttttattttcagtaattctcacttatcatctgtgtgcatcgatagcctattctttgtgattgaatgctcttgcattggcgaacttcgtcgtgaattgtccaatattgagaaagaaaaagtgtattattcagacctgggttataaactgactctgggtcaggagaactttctgaaaatcaagaactatgaagtcatcaacaaaaccttcttcaaaaaactgagcaagattaaatggagtagcaattccaaaaacttggataaatacatcaagaacttttgggatactatcacactgcagtacgatacctattatcatattgtgagtagcttcagcgtctgtgccaactatttcgcttgttgtcgcgcactgacgagcgggcgactggaggtgtcgaatgaaggggtaattcaatcctggttactcaccttaaacttatttctcatggatttacgcccatatattaaagactttaattccgccagtgcgatgatctctgatacgggaagtgaatttaaacctattaatatttcggaaggccagtcgaacaacaaatcttcctcgataattcgcaaggttctcgcgggcgttctgagcataatcattgtctttctgttgctgttcgccatgtcggccatcctgatattgatttttggcgatgctgtggacaattatgttgattcactgcggccggtaggcatcatcggtctggcgctggcggcagcgttgggtaaaaaaatctacgacaaacttgtctaa

SEQ ID NO: 72451 - DNA, 960 bp, synthetic construct
  source 1..960: mol_type = other DNA
atgaagcaggaaaatacctattctccagttagtagtttgttttccaagcagctgaatctttcggattttggttttgaaaaacccgcgctgaaaaagattaaagaaattaacaaagagattaaaccgaataaactcctgaaattcatcaaatatacatttaaatactcaaaaattgtgctgaataagtattctagtcatttttcgaagcacgacttcacgcaaccggccttgttcacgcttttagcggtgaaaatctacaccaggagcacctatcgtcagatcacggatttgttagaactttctgacaaaatccaggaacatttgcacctgaagaaggtcccgcactacaccaccctccagaaattctttcaacgcctgccgacgtccatcttacaggaactgaacaaactgatcctgcaaaatcaccaaataactggtaaaatcattgctctggatggcagcggcttcactaacgactacgctgacaaatattacgcaatcatgcgtcggaaagagcgtaaaagctatattaaaaaccatatttccatcgatgtggatacgcgcctgatcctgcatttcgcggctcagcgcggcccacgctttgatacacgctttgcgatccctgccatacgtaacattaagaaatataacccgaaatacatactagcagatcgcgcctatgacacggaaccgatccgtaaatgcattaacgaggaagccaaagcagaggatcaaatccctctgaaaacccgtgcgaaaaacggacattaccgattaaagagtaaaaaacagtttaaacaggaaatttattcccgcagaaacaatgtagagtcaattttcagcgttattaagcggatttttaatgggacaaaccgcagccgtagcctgcaactgtcgaataaagaaaccaaactcaaaaacaccatttataatatttaccgttcaactcagattcagtaa

SEQ ID NO: 72452 - DNA, 1275 bp, synthetic construct
  source 1..1275: mol_type = other DNA
atggttgttaaatatctgccacgtatactggatgatgatttggaaaaatgtctgaccatgattggtgcgattctgattgtcggcccaaagtggtgcggcaagacgacgactgcggagcagcatgcaaacagtgtactgaaactacaagataaagacaattacaaaagcaacatgatgtgggcggacatagaaccttcgcgcctgctcaaaggggacaaaccacgcttaatcgacgagtggcaggtggctccggtcctgtgggatagcgtgcgcacgagcgttgacgagagcgaggattacggactgtacattctaaccggttcgacagtagttgatgaagatagtatcatgcactctggtaccggtcgtatccatcgcatgctgatgcgtccgatgagcctgtatgaaagcggcgaatccaatgggcaaattagtattatggatctgttcaacaacccggacatcaacattaatgaatgtgaatccgatttaaccattgatgatttgatatttgcagcatgtcgtggcggctggccggattcgctgaaccagaaaacccgcgagggcaaactgtttgtggcgtataactatttggaaaatatctgcaatacggatgtctctgccgtggatggggttaaacgtgatcctgatcgagtccgcctgctcctgcgttcacttgcgcggaacaattcgaccctggctaaggaccagactatcattgatgatatgaatgcgaatttcatggatattagtcggccgacatactatagctatgtggatgcactgaaaaggctgtttgtcattgaagacaaccgcgggtggtccccgaacatcaaatccaaatcagccatccgatcaggcaataagaaagtgttcattgacccttcgatcgcagtagctgccctcaacgcgaacccggagtccatgattaacgatttgaacacgttcggtttcatttttgaaaacctgtgcattcgtgatcttagcatctataccaattctcatggtggaaaagtttcatattaccacgacaagagtggtctggaaatcgactgtgttgtgcacttaagagatggccgctatgccttaatcgaatgcaaacttggcaatgatggtatcgaagaaggctctcagaatctccttaaaatcaatggtttaattgagaagaatgacaaactggacaacccgacatttcttgccgtattgaccggtggaaaatacgcctacactcgtcccgacggggtgaaagtgtttcccattggctgcttacggtaa

SEQ ID NO: 72453 - DNA, 222 bp, synthetic construct
  source 1..222: mol_type = other DNA
atggccgagacgaccgacaaggttattgtaattgtgggatatctgctggctatttttataccgatcctgggtctgattgcgggcattgtcctttactttgtgaaaaaagaagatccattctaccagaaacatgcaaaatatattatcatcgtgagtatcgtcgtatgggcgttaagcgccatctttgtgggtatgctcaacgttgggttggatggcttctaa

SEQ ID NO: 72454 - DNA, 699 bp, synthetic construct
  source 1..699: mol_type = other DNA
atggtcttcactgacatcattgcgttaattgtggtttatatttacgtagcaattatttttgtagtggctgaaatggttttgaaaacacgcccggaaatttcccgtaaatttctgcacatcatggtgggtaacatgatatttgccatgccattttttgcgaatccgtggaacatggtttggtttctgacgctgcccattaccatcgcactcttcttcctgacggattactcgccgattaaaatcgaaaacagtgtgactgagtccggccatgcattgggcctgtttttctatgcgggcatctggacgatactgattgccatctttacaataattgctccggccagcgactctaagctgttcctttggatcgtagcgttagctatcgtcccaatggtctacggtgatggttttgcggccctgattgggcagaaatttgggaagattaaatataccgtctttggaggaaccaaaagcctggaaggctcacttaccatgttcgtggttaccagcgttatgggtgtctttgtgtggatggtattctattcaatcggctgtaccatgcctgagtttaatatcgttagcatcttggcaatttcggccgttgcaaccgcgtgcgaagccttcagttacggtggcattgataatctcacggtgccggtgatcacttctattctatatttcctggtggcgattttataa

SEQ ID NO: 72455 - DNA, 420 bp, synthetic construct
  source 1..420: mol_type = other DNA
atgaaagtaaaactgattgagaaatttgcactgggcgctttcgtaggctgtttcatcgtgatgtgcgtcatggttctgatttcgctttatcagggtcctcagaacattcgttttagcggcattgatatcatcaattcctttttcgggagtatcgttgcgggttggggatttactttttcaggattcatttacgataaggaagatttgccgctgacgttccaagtgatcattcagatgggggtcggcatgaccatattgttattaattgcaatctacctcaaatggatgccgattaatctgggcatcggtccaatagtgacctggatcgccatcgcgtgcatttttgccattattttctggtttggtttttatatttattactatctggtggcgcgcgacctaaacaacaaactgaagtaa

SEQ ID NO: 72456 - DNA, 1779 bp, synthetic construct
  source 1..1779: mol_type = other DNA
atggataataaaaagatatttctgtccttcatcttgtttatcctcatcgcaatctccgtcagtgccgtgtctgccgtggatgctgataatgcgaccttggcggaggatgcaattccgaccgatgcggatgttgtgcaaacgaaagtgaacaacgcaaattcaggcgatacgattacattggaagacaagacatatgactttgctaaccagacggtgacaattgacggtcgtgataaaatcaccatccgcgggactggtaacaccatcattaaagggcatgggggccagaactcaaaaacaggcgcgctgtttatcgtatcggagagcattggtgtaacctttaaggatatcactttcattgacaccaacccaaacaataactttacgtacgatggtaacgtggagggctatggcattacctttgatggatcaggtgccgaaaacggtgtggtagacaactgcagttttgcagattttaataccgcggtcaacgtgaaatcttgtaattatgtcaccgtgaaaaacagcaaattcagcgggggctatgcgacgaagcttattaacgacccgacagtcaacaaagaaaagggctcgaaagtcgtgagcgcggggggatcgttattcctcagtgtgctgaattgtacgtttgatggaccgatgctagatgccgtatctatctatggtggcagtggagatgcgaagataattggcaacaccttcaaagacaacgtatatgcgattttctttggtggtgcatctactgaaggcacgttcatcaatgataataccttcatcgaatgcggccagtttgttaaagatgcaaatacgacctgggggggatacccggtcatcagtatagaaaaagcgtcggatagcgtttacatgaacaataatactttctatgccgttaacaataataaattaatcgccgcggagtccgcgaatacggcccacggcgcgccgagcactctgggcgatattaacatcactaactctaacgtaaatcttgcgaatgacaatgttgtggccggttcggtgacgttcctgcacattctgagtcggaccggagacatcaatcctaaagctcctattaccctgacgggcaataaatacgcaaaaggcgtgaaagcggtggtggtctggtacaatgactggggtgtggaagactcagaaaacattgtgattccccaagccccggaaccaacccccgctccggttgccgtttcaaccagcattagctcggctaacctggccatttatgccgggaactccggtaagattaagctcactctgaaagatgcaaacggcgttgcggttgctaataagaccgtaaatattgtaattgacggtgttgcgaaaacggtcacgacggatgacaatggtattgccatcctgtctgtgaaatatagtaactcaggcacccattatgctactctggcgttcaccggtgacaatgattacaccggcagcattaaaacagtgaaaatcagcgtcctgaaaaaagtcaccgctctgaccattacgaaaaagacatttaaagttaagacgaaaaataagaaagtaacgactgtgctgaaatccgggaaaacagttcttaaatacaaaaaggttactttaaaagttaaagggaaaacctacactgcaaaaaccaactccaaaggcattgcgacatttaacatcaaaatagctaaaaaaggtacctttaaagcattaaccaaatttgccggcgatggtgcctacaaagcagcaagcaagtatagctatgtctatgtccgctaa

SEQ ID NO: 72457 - DNA, 651 bp, synthetic construct
  source 1..651: mol_type = other DNA
atggacttgattggtgggtacttactggtcattctgctcctctttacagcaaatattgctttaatcctgggcgattacaaacttgataacatcaaattggttgcgctgtcttccatttgcttcattgtttcgttcatattgatgtatgctagcagctttctgaacgtgagcttgtcgttcctgattgacacgtttagttacgtcttttttattatctttcttgcactggttgtggtaatcattaagtatatcaaaaataacaatttcaaacacgccctgtatctaaccttagtgacattcctgatcaccatctttctgtttgcgtctcagtcaaatctgaacgtctttaacatcattgtgtactcgctttttatttttattatcctgtttgttgtttatcagcttagtaaactgctgcatcatgccaaaatgcaatacaacgtaataaccagtgaatatatgtttctgttctccatcgtgatcttcattttcgcgctgacttatgattccactaaaagcctcaactacacgagcttcaaggcgtttttaattctgacgccgacctatcagttaatctatgtgattattgccttcgtcgtgattttgatcattggtgtattcataaatgagatcaaaggcggaaattcataa

SEQ ID NO: 72458 - DNA, 642 bp, synthetic construct
  source 1..642: mol_type = other DNA
atgatcattcaaggaactgagaccctgacgtcgattattcatatattttccgaaagcctgttgacacctgttgtggtgctcctcgttgtgtcaggcgtaatcatcatccttgctttggggggtttgattaatgagtacatcagccggaaaccgattagttccaatgatttagagaatctggtgcgtcgcattagcttcagcaacaacgtggaccagatgaaatctgaaatcaccaacagtaacctgtttaattaccaaaaagaaattctgattcgcattgcgaataactatgatattgggtgcgatgcccgaaaggcattcgcgagtgaactaatctctgcagaagaaacaatcttaattaaaaaaacgaacaaaacggacattttagtccgtgttggcccctcgctgggccttctgggtaccttgatcccattaggcccgggtctggccgcgctcggaacgggtgatattgcgactcttgctcagtccctgaccattgcgttcgataccacggtaacaggtctgaccatcggcgccctggcctttgtcgtctcaaaatataaaaagcagtggtatgaggctgaactgatagacgttgaaaccctggcagagactgaactggaagtgatcaataactggtaa

SEQ ID NO: 72459 - DNA, 300 bp, synthetic construct
  source 1..300: mol_type = other DNA
atgcttcggaaaaagcgccgtatttccgaatcggttgatgatgatccgatgggtgggttaaacaatctaagtgatgccatgctggtgctcgctctgggctttttgatctttgcaatcatggcgctgtctgtcaacccagacatgattacggagcagacccaaaccaaagaagtttcaaccgccaatacattcactcagaactatactgatgcgggtggcctggaagacagcggatacagtgaagtgggtaaagtgtatgaggacccgagcacgggcaaactggtaatggtcagcggctaa

SEQ ID NO: 72460 - DNA, 378 bp, synthetic construct
  source 1..378: mol_type = other DNA
atggaaaagcaaagcaaaattctgattgtgttacttatcgtttttttgatctgtgtgggtgtattctggtttcagtttaacaataacgtgagcaccttcatgattgtcaacgagactcatgtgacggaaaacagctcgtttagtgggatgctggtcgattcttacggcaatggcgtcgcgaaccagacaatcgcctaccacgagccgggagggaatgtgggaaccctgaccacggatgaaaatggtgagtttacggttgaactggctaaatatctctccaattcaaccagtgacaactattatggtgatttcaaattctcgggcaatggcaaataccagggttgcgcatatgaaggtaacgttactgtaggcatataa

SEQ ID NO: 72461 - DNA, 348 bp, synthetic construct
  source 1..348: mol_type = other DNA
atgaaaggtgaggtcttttatggcaaaggcattcgggaactggaaggtgaatacccagatctatacgagttagtaaccgatatcaatgataccgtttggaacgggaaggtgttggattataaaactcagaaactgattgccatcggtattacggcgtcgcgtgccgacccgcgcgcgattaaaaaacaaattcgcagtgcgattgaagtcctcggaatcaccaaagaggaaatcgtggacgttttacgtgttgtgctgctgacatctggcatgccggcattctccaagagccttcagatactgaactcagtgacggcagctatcgaagaagagaaacaggaagaataa

SEQ ID NO: 72462 - DNA, 933 bp, synthetic construct
  source 1..933: mol_type = other DNA
atgaacagtaacaaaaaattcttctcccgcatagggtttaattaccttatttacgcggtatttagcctagtaattaccatgattctggcaaacattattgcctataccagtccggaaatccttaataacatcaatacctccacgacgatcacagcgatctgcaattacattctgccgttacccgttttcatttatctgatgggcaagctggatagcaaaaagctagagatccacaaaatcaatgctcgcacctttctgaaatatctctgcattacatttacgttgatgtggattgggaacattatcggggttattatcactaccgcacttagcggagctattcagagcgacatatcaaacccgattcaggacctgattaattcaactggaatctggttgaacatcgtgctgatcagtattatcggccctgttttcgaagagtttttctttcgtaagctcttgattgatcggacgattaaatacggtgcccgtacgtcaatagtgttatctgccgtcatgtttggtctgttccatggcaatctgaaccagttcttttattctgcattaatcggtggctttttcgcgtatgtgtatattaaaaccggcaagatcacttacaccatcctcctgcatatgattattaacctgctgggctcggttgtgtcgctgtttctgaactcgagcgtgacgaacctcatcaccggtaccatcaatccattcgatctgatttttgtcctgttgtacttggcgatccttataattaccctgattattggtctgactaaccttttaaattataaacaagcgaaatttaacggccagaaaacagaaatttccttacagaaaccgttaaaaacgattttcctgaatctgggtatgttctgttttatcatattttttacaatcaaaatggtcctgcaagtgatcaattaa

SEQ ID NO: 72463 - DNA, 2130 bp, synthetic construct
  source 1..2130: mol_type = other DNA
atgaaatatgaggtggtgtatgataacggctcgcgcctccgagttcgtagtggccagtgggcgttcacaaaagaggaaggctatggtcttgcgtcactgctgttaaaccagaatttcatccacgaggtgctgacgtcacatcggaatggtagtattctgatgtattacgatgaaggcattgataacaaagacaaaatctttgatattttggataagatcggtttggatgacctgttcgaagccgaacctacgcaaattcaaatttctaaagaaatcagcgaagatttttataaaaaaatagctaagatgattctcaatcgaggaatttacaagctctttctgccaattcccgtcagaaatgctctgacagtctatcatgccatgaaatatatctggaacggttttgacagtctgactagttttaatgtggatgtggcactgctggatggtgcggcggtggcgggcgccctgctgaacaaacattacaaaccggcaagttcaatgatgttcttgttgtccatctccgatgccctagaggactacaccttacagaaagcgaaaagcactctcaaagatagcctggctctgaatattgacaccgtatgggtagtcggtgaggacggtgaagaaaagcagtgttccgccgtagaaattagcaagggggataaaatcaaggttcacatgggggatgtaatcccggtcgacggcaaagttatcgaaggtgagggcctggtcaacgaagcgtcgatgaccggtgaaccgctggcggtgcataaaatgaatgggaagacggtgcacgcgggcacggtggtggaagaaggtaatctgatcgttgaagtgtattcgatgaacaaagaaacccgcctaaataaaattattcatctgattgaaaattcagaagaactgaaagcggaaagccagagtaaagcggaaaaacttgcagattctattgtgccgtacagctttattgccactgcgctcacgtacttcattaccggaagccccaccaaagcattgtctgttttgatggttgatttcagctgcgccatcaaactcacaaccccactctctattatttccgccatgcgtgaagcatcggataaccgtatgatggtgaaagggggaaaattccttgaaaattacgccaacgccgatacgattgtctttgacaaaaccggcaccttaaccaatgctgcgcctaaggtggttgacgtcatctcaatgtctaaaaaatacgactgcgacgagattttacgcatggcggcatgcattgaggaacactttgcccacagtattgcgacggcgattgtcaaggaggctgagaaacagggtctgaaacatgaagaagatcacagcgaagttgagtatattgtagcccacggtattgtaactgaatatgaaggcaaacgtgccgtcattggttcccgccactttttattcgacgatgagaaagtcaaagtgactaaaagtcaggaaaagaaaatcaacgagaaaattaaagagcattctgtagtttacctggccatcgacggcaaactggaaggtatcatctgtatcgatgatccgatacgcaaggaagcaaagtatgttatagaagagctgaaatctctggggattgaaaatatcataatgcttaccggcgacagtgaaagcggggcgcgtgccggcgcgaacgctttgggcatcacagattatcgcagccaagtactgccggaagataaaagccgcatcgttgaagaactgaaagcagagggcaggatcgtcataatggtgggggatggaattaatgactctccggctcttgcagctgcggatgtgtcggtttcaatgaagcatagctcagatatcgctcgtgaagtggcagatatctccttattgtcggatgatttatatgacctggtcacgcttcggaagctaagcactggaatgctggacaaaattaacaacaactatcataacatcgtggcagtaaacggttcgctgctggttttaggcgttttgggcatcatcccgccagcaacatcgtcaatggtgcataatctgtccacgatgctgtttggccttttaagcacccgttccgttctgaccgacgaggagtacattaaagatatagaggtgaaagcgatttaa

SEQ ID NO: 72464 - DNA, 750 bp, synthetic construct
  source 1..750: mol_type = other DNA
atgttagataactataaaaataaatttatcccgctgatcctgccggtcgttttaatctttttttggtatattatcacgaacgccctggcactgttctcttcatacattttgcccggcccgcttgatgtggtgaatagcgcactggtggtgatagaaaacgggaaactcttgactaatacgattgataccctttataaagtatttgccggtttgattctggcctcgattgtggctatccctcttggaattgtcctgggttggtataagaccctcgaagatatatgtactttcgtaatcagcattttacgtccaatcccgcccgttgcctggattccgttttccatcctatggtttggaatcggtaccttcccggcggtcttcattatatttatgggctgcgtctttccaattctggtatacaccattgacggtgttaaacgcaccgacaaggttctggtggaatctgcgcagacactgggggcgaatgactggaacatcctccgccgtgtcgtgctgccttcgacgattccgtatatcgtttccgggctgaaagtgggtattggtattgctctgatgtgcactatcagcgcggagatgattggctcaagtagtggcctgggctacatgattttaattgcaacaaacctgttcgataccggcaccacggttgttggtatggtggtaatcggcttgattggccttgtctttgactttgtgttcagccgggcgcaagataaaatcttctggtaa

SEQ ID NO: 72465 - DNA, 753 bp, synthetic construct
  source 1..753: mol_type = other DNA
atgagcattgaagtgaaggatatttataaaaaattcgaaaccaaaaagtcagaaaacctctctgttctggaaaacattaacttaaccatagatgatggggagctggtatgcctgttagggccgtcgggatgtggcaaaaccacgcttctgcgtttgatcgccggtctggacactccaacgtctggtgaaatcgtggcgaacggcgaagtggttaaaaaaccgtcgggtgatcgcgcggtgattttccagcagtactcactgttcccatggctcacagttctgcagaatgtaacgttcggcctggagatgaccaaaccgggttcgaaagaagaaaatattgccgccgctgagcgctacctgaccagcgttggtttaatcgactttaaggacagctatcctcacgaactgtccggcggcatgaagcaacgtgtggcaattatccggagcctgctgaatcatagtcctatcctgctgatggatgaaccgttttccgcattggatatgcagaaccgccatagtcttcaggaacagctaatcggagtctggaaacgttttgagaatacaatcgtctttgtaactcacgacgttgatgaagcgatctatctggcagacaaaattgtcattttggacaaaaatcccggccgaattgcgaacattgtcgaagtggatttggaaagaccgcgcaaacgtgagtcccaagagtttctcgctcttcaggaaagcatagtgagtcaattaaatatggatgagtaa

SEQ ID NO: 72466 - DNA, 372 bp, synthetic construct
  source 1..372: mol_type = other DNA
atgaaccgggatgatctggaagattatattgaagataactactccgcggagcctgaatttccatggctgaaattccccaactacgaggtgttccgtcacgacgataatcgcaaatggtttgctctgattatggatgtttcaaagagtaaactgggtttggacggggatgaaattctcgacgtggtcaattttaagtgcgatcagattctgatagattcgttaactacggaaccgggctttttcccggcatatcatatgaataaagaaaactggattaccgttgcgcttgacggcagcgtatctgacgaaaaaatcatcatgttgctggacatcagctttgagttaaccgccagtaataaaaaaatcgattaa

SEQ ID NO: 72467 - DNA, 735 bp, synthetic construct
  source 1..735: mol_type = other DNA
atgatcgtcatgtctattgcaggtgttgatcccagtgcgggcgccggtatctacgccgatctgaaaaccttccaggctattggcgtgtatgggaccgggattgtgacggccctgacggcacagaatccgtataaattcttctccgccagcccggttctgccagaatacattgaggaacagatggatagtgtgcttgattcgtatgaagtagaatttatcaaaactggcatgctgtactccccggaaattattaaactggttagcaaaaagattaaggaatatgacctgaaagccgtcgtagatcctgtcatggtggcgacctctagtggcaacctaaccaaagaagacattgcagatgcatttaataagtacttacttcctaattcaatcttaaccacaccgaacatagctgaagcggaaaaactgacgaagtttgaaatcaaaactaaagaggatgcgtttaaagctagcaaacgcatcgtgtgcaacaacattattacgggaggtcatttagacggcctcaacactatcaatattgatggggagattacaacgatcaaacaagaattgataaaaaccgacaacctgcacggtaccggttgtaacctgtcgtcagcaattgttgcctatctcgcgaaaaacaatgagctggacacaagcatcatcaaggcgttgaattacgtgtatgagggaattaaaaatggcaattatggcaccttgatcgcgaaaatataa

SEQ ID NO: 72468 - DNA, 222 bp, synthetic construct
  source 1..222: mol_type = other DNA
atgccgattggtgctggcatgccatttgatctcaaagacatgagctacaaaatagccattattttcggcgcgctacttgtcatttatggggttttgtggctgctggccgaactgaaaatcatccctgcaatcttatttgtgatcttcccgcagattgtactgatcctgattggtatttgcatcatttactttgcgttcgatcgcaagaaaaaatattattaa

SEQ ID NO: 72469 - DNA, 2985 bp, synthetic construct
  source 1..2985: mol_type = other DNA
atgaacaaaaaggggtatatactggtgatctcactggttctgattatgctgttttgtctgagcacagtctctgccaaagataccgatctgaatgcaaatacactggaaaaaagcaacgatgtgactatcctgaatgaaggcgatagcaatgttagccaaatacattcacaacacaccgtgaaagttggatcagatagtgattccatccaaaatacaattgattgcatgaacgatggcgacatccttaactttgaaaccggcacgtacaaggatatctgtatttatgtaaacaagagcattaccatcaacggtaatggcgcggaactgatcgggtatgacacgccttcgaagagcaacactccggaaatcatctacaacgataccggtaaaggaggctatgccattgggaattttgctacgttatacattgtgaaggctgacaatgttgtaattaacggtttgaaaatcaccggcggtgccaatagtacctccacgtattcgaatgcgctcatctatgcgatgaactcaaaaaatctgacgttcaaaagcaatgttctggagggctcttcttgggggttatacttccagtactgcacggacggccatgtcaccaacaacatcatcaaaaatcaggcggtgaccggatttttaaactttggctctgcgcgtaccagcattgaaaacaacaaagtaatcaatgcgaaaaaccacggcatcgatgtacgccatggtaccggcccgaacgttaaaattattaataacacagtgattggtagcaaagaagggatctatttgatgcattctacaggccatgtggcagcgaacaacacgttaataaactgcactattagttcaattagctgttacggttcgaaaaatattaagctgaatggaaataaaatgcagaaatcgcgtattggcgtgctcctcggcgggggatacgagaacatcactgtgggtgaaaacatgtttacgctggacaacctgccctatccgccaacctttgcctattatatcgcagaagccaaatcggaataccagaatgatgaggatataatgggtacgtttagtgacagttcactctatacgcctaacttcgtagcgtttacgggaatcgacgtcccgaaagatattggcattaattatgatcccattttagaaaaaaccggcccagagtggatcgttcccgaaggcgctagcagttctgagatccagaacatgatcaacaatatgaacaacggcgatactctaagcttcacgcagaacgctatctacaatgaaatttcaatctacacggacaaaaacattaaaatactgggtaacaatgccacgctggtcggatgcagtggcattaacttcaacaatacccactacttggacaacgtcgctgaaaaagtgcggaaatccaccaatgagggtggctatgcaatcggctacaacgccgtattgtacatcttgaataccaccaacgtggtggtgagtgacctgaatattaaggcgcagtaccctaaatatgattcgagcaaggttgaaacaacgaccaatgagtataagacagtggggatttacgccgattccaactcaggactggtcattacgggttgcgacgtaaccggtgcttcttggggtattttccaacagtattgtaaaaacagcaccattatccgcaataatattcatgacatttacaccacaggcatcatgaactttggttccccgaatggaatcattgccgggaatacagtgacggatgcggccaatcatggtatcgatgtacgtcatggtaccggcccgaacgtgactatcttcaataacacaattagcggtgccaaggaaggaatttatcttatgcactcgaaagggcactctgcgtacaacaacacgattctaaattgtaaaatcagtgggattaccgcctacggctctggcaatgaagtgctgtttaacaataccatttcggggagccgtcttggtatcttgcttggaggcggctattacaatatcaccattggtaaaaacacattcaagctggattcattgccgtttccaccgaccttcgtcacttatctggcacgagcggacaataaatatcaatctgaagatgatgtcattcgcacttactccgataaagaaactgccgcagttgatgcgaacgacattacggtcggctataagaaaggtgagtttaacattaccttaattggccagaatggtgacaaactgtcctatgaagatctgtccatatcgattaatggtgcgaatttcaccgcgaaaaccgatgagaagggcattgccgtgattccgctttccctcacaacggggatttataacatgaccattaaatttgcgggtaatgacaattatgcaccgatcaacgtgactaaaactgtgacggttaacgatgaccgcatcaaaaccattctgtcggcaactagcaaaaccctttatctcacgatcatttcgaagggctattcatacaaagtcacatttaaagatatgaatgggaaggcgattgcaaacaaaaaaataagctttaagattgacggtaaaacctatagtgcaaccacgtcgagcactggcatcgctaacattaaaataaaagcgacaactactggcaataaaaaagccaccattagctttaagggtgatgataaatatgctccagtcacgaaaacgctgaccgtcaaagttataaaacagtcatccaaaatcagcgcttataagaagacgttcaaagtaaaaatcaaaactaaaaaatacaccattactctgaaaaacaataaaggtaaagcgatttacaaaggcactgtttatatcaaagttaaaggcaaaacctataaagcagttaccaattctaagggtaaggcgacattcaagattaccaaactgacgaaaaaaggtaaattcacggcaaccatcaaatattacgggaacaaatattacagttccaccagtaaacaggtgttaataagaacccgtcgctaa

SEQ ID NO: 72470 - DNA, 1716 bp, synthetic construct
  source 1..1716: mol_type = other DNA
ttgaataaaagcctgaatattttattcatctgcttcgtggctcttctggtcatcagctgcgttaacgcggcaaatgacaacccaaacaattctgacgatatttccaactatcagatcagctcggatctctcaaacactgaaattcaaacaatgttggataacgcaaaagaaggcgaccagtttgaatttactgaccgtgaatacaagaacatctctctggttgtcgataaaaagctgaacattgtcagcaaaaagaatagtaatattcatactagtaacaagatcgctgacaaagcccgcaatttgggcctcaacaattctttcggcttttacttcacgtcgaatagtggtggaagtttcctgtatgggctgaccatcatatctaacagtgattacggcatcgttgtggataaatctgataatacgaccattaaaaatgttgttatcaaaaatgggaatgtgggcatcttggtgaaaaactccaacaatgcggatatcattcagaacaatatttccaaagcaaattccaatagtattcacttagaaaatgtatcgaaatcaataatttccaagaataccattagctataacgggcggtcgggtatccacgcgtcaaacatctactattgtaacgtaaccaacaacacggtccaccacaataaatttaacggcatctcactgtacaataaaaccacgggaaatatcattaaattcaacctggcttacgagaacccgaacggcatttatataaatagccagtccgattttgatgtggtgaacagcaatacattcaccaagaatcgacgtaataccgattatgaactgggtgcgttcgagtcaggcaacggtctgctattcggtgcggattttaaaacggcaaaagagggcaagtcttcacgtctggaagtgaaatataacgtgctcacgcataatgagggataccaggccaaaaacaacccggaccttccgacctttaaacttggggataactggtttgactccacggatgatgagaacacttttgtttgtcccatgcttctggcaggtattatgaagatgggcacgatatcggtcaaaaacggtttcggtctgcagatgtatgacacaaacggcgaagcggtcacagaatttggtacctttgacaccaccgttaatgtgaacggcaaccagtacaccgcaaaatttgtaaatggtaaagccattattgatgccaatctggacccggataaagagtatgaaatcgaagtcattattggcgataaaccagttaaatttacgtatcgcacctcctcgggtgacaaaaacgatgaaagcgatagccagacaagcaccgacggtgacttcggcatcaaccatcatgattttattgatgccatgggcaatgatgcgagcaaaggtgtggggaacagcgaaaacggaacttcaagtgctcattttgccaatagcgaacaatctggagcgcatggaacaaatgcgtcgggtaattttcaagatagctctgataacggtgatagtgtattaaccaatgggaatgccaacgcgggcgactccagtaaaggtgagcagtcggaagaaggcaaagcctatgagatcgtgccgcaaagcaaaatttcaaaggaaatcacggacactagcggcatcattgtattaagtattgtgtcgattctgggcatgattatctatgggtactggcgcaagcctgaaattgagaactaa

SEQ ID NO: 72471 - DNA, 405 bp, synthetic construct
  source 1..405: mol_type = other DNA
atgaaagtgaaaagcgtgtcgctgaaaatcagtagcaatgagaaatttgagataattgacatcacctcgaaaattaatgaattaattgaaatcgatgaaggcattgtatcgatcttctccaagcactccaccagcgcgattgtcgttaacgaaaacgaggatgggctgctgaaagatttggaagtgagtcttgacgatattattagcgataaattcagctattcccatgatatgattgacaacaatgcccgctcacatctgaagtcttttttactatcttctagtgaaaatctgccgatcaaaaacggccgtctggacttgggtacgtggcagtcagtattctttgtcgaactggatggaccacgctacgatcggacaataatcctcactatggttggtgagtaa

SEQ ID NO: 72472 - DNA, 357 bp, synthetic construct
  source 1..357: mol_type = other DNA
atgcaaatgatttggttttatgttgcgattgttttagcaatcagtgatatacttcacaccacgctcatgtggaaagtgttgaataacttttacatcctgttgggtgtgtttattcagcagagcacccattcaacatggcagacttgggtcatccatgaaattatggaggcggcctttcacttcatcattctgtcgatagtgttcctgaatccgacgattggcctgctagcagccctcattcattttgtaatcgacgtctcccacaccgtactgattcgcaacatgggcgaactggagcatcgtgctcttcattttgtggttgaatctctgttcttcatcttaatctatgggctgtaa

SEQ ID NO: 72473 - DNA, 630 bp, synthetic construct
  source 1..630: mol_type = other DNA
atgcggtatctagtacacgttcaggaagcggtgtctgaaaacaagaaactgatcttgctgatgtcagtgatctttatcatcagcgtcgcggtcggctttatttttcaggacattatttacaaagaaatatcaccgatctttgaaaagatggtacgcgagtttgtgaacgatcctaacagtaatctgggctttgaaattttcattaataacatccgcgcgtccctccttacctatgttttaagcgtcttttttgctttaatggcagtgttttcgctgatactgaatggcattatcctgggtgctgtaggtggggcctacatgtccgccgatccggtgtacaatgggattatgttcttggctctgattcttccccatggtatctttgagattccagccctgattttcagctctgttgcaggcattttactgttcaaattcatcttcaaatatctcaaaacctttgtcaaacgtgatgacttgagtcttaaagagatactggatatgcataaggttatcattaaacacagcatcatcctcctgattctgtcgtttgtgctgtttgttattgccgcagcgattgaaggaaacttcacgggtgcgttcgcgaaatggattcaaactttattctaa

SEQ ID NO: 72474 - DNA, 948 bp, synthetic construct
  source 1..948: mol_type = other DNA
atggtaaatgtgcccgaactgaaacgcggagtactggacagcgtggtcgatgcgattggaaacacaccaatcataaaactgaacaatctgaccaaggatctagacgcagaaattgacgtgaagatggaagcattcaacccaacgggcagtgtcaaagatcgtgttgcggttgccatgattgaagatgcggaggaaaaaggactgcttaaagatgatagcgtaattattgaaccgactagtggcaatacgggtatcggcatcggtttcgccgccgctgccaaagggtacaacgtcatcttgacgatgcctgagaccatgtcggttgaacgccggaaacttttagctatctatggggcggaaattgtcttgactccgggttcggagggtatggatggcgctattgcaaaggcagaagaactgcatcgtgaaaaccccaactctgtgatcctcggccaattcgacaatgaggctaatgtggccatacactacaaaaccacgggccaggagattttacgagataccgaaggtaatgtggactatgtggtggcaggggtagggaccggcggtacggttaccggcataggtaaagccttaaaagaagttctgccagatgttaaaatcgtcgcggtggaaccggaagagagccagacattggccaagggtgcgaaaggccctcataagatccagggaattggtgcaggctttgtgccgtccatttatgactcagacgttattgatgagatcattccggtcccgagcgatgaggcaggcaaaaccctgatcgcccttgcgaaagaagaagggatctttgccggtatttcctcaggcgctgcgacttgggcggcgctgcaactggcgatgcgtaaagaaaacaaaggcaaacgcattattgcgatcctgccggataatggtgagagatacctctctgtagaatggctgtttgaataa

SEQ ID NO: 72475 - DNA, 210 bp, synthetic construct
  source 1..210: mol_type = other DNA
atgttgaaagtgcgcatctggaaactgctgctgggtgtcctgatcttatccaaaagctttgaaaaagagattatctcagaagataccgccaattcgctctggattgcgatggttaacaacggcatacatctgccgaaagacctgtttttggattattgtagtcgtctttacgagattgattgcgaaaagttcttaatggactatttctaa

SEQ ID NO: 72476 - DNA, 372 bp, synthetic construct
  source 1..372: mol_type = other DNA
atggactactcggaaaaagtaatggatcatttcgcaaatccacgcaattctcggaaaatggaagatgctaatggggtgggcactgttggaaacccgacctgtggcgacctgatgacaatctacataaaagtggaagataacattattaaagatatctcatttcaaacctttggctgcggtgccgccattgcaacgagtagcatgattacggaaattgcggtgggtaaaaccctggaggaggcattaaagatcagccgtaatgacgtcgccgaagagctggatggccttcctccggttaagatgcactgctccaacctcgcggctgatggtttgcaggcggcgatcgaaaactattatgaaaacaatcagtaa

SEQ ID NO: 72477 - DNA, 519 bp, synthetic construct
  source 1..519: mol_type = other DNA
gtgtctagttatagcaaactgatcatttttattttagttctgctgtttatctccgcagctattttcttcattgacagctccatggatagtattaatcggaccatgccgggtgtgagcgattcgattgttaacggggacaaagagtataatgaagcggtgcaactggtcaacgataaaagctttgatgaagcaaagaccaaagccgtatctgccgagaataactataacaacagtcttatcaaactgaacggcatccgcaataatttctcgtcggatatcaacgaagtccaggaagaatatattggcactgtaatcaaagaattggaattaaaaattaacgccgtcaacaacttgaaggaagcgattgactgctttaaaatcaactcaaattacacaggtacgaattacgcgtcaaaagcgaacgatctcatgtatgaggctacggagtaccagcatgaacgtaattccatagtgaagaacaatagcaatctgttcaaacagcaaaattttgttatataa

SEQ ID NO: 72478 - DNA, 612 bp, synthetic construct
  source 1..612: mol_type = other DNA
atgaaatgtaagtactgcggtattgagaataagaaaagtgcgaagttttgtaccagctgcggcaaaccgttaaacgaaagcccggaacccaccggagggaactcgaaacttatcatcattgcactgattgcgattataataattctggttggtactattggattcttcgtcttgaacaataactttaatagccatgatagtgagatcccaaataataccgtttcctctcaggaaagtaactccgccaacattcaagattccgataatggcggggatgtcaaaacgcaagtgacctcatctcagaccacgaacagcaaatcatgggaaccgattgggagttatagcggttcaggctcaggttcgaaaaccattacggtaccggaaggcaaaatcaaagtggaatttagcgcctatcctatcaaaaattatgcaacgaactatctgacagtctccggctctaatggtgagtctggcggcgtagactggggttcgcatagcgctgtgaagactaaaagcgactcattcatctacacgtccagctcgtcggagacatttaccatcgactactatgaaactgtgagttgggaagttcacttttaccgctatcagtaa

SEQ ID NO: 72479 - DNA, 357 bp, synthetic construct
  source 1..357: mol_type = other DNA
atgaaactgaaggtattgccgccaacacttcgtaaaaacaatcgctatctgacggtcgacgtgaaggttacctgccagattaccaaagatgatttagtggccatcgtctgggatgcgtgtatccgttttcagggggaactgaacactgcaaattttaatctgtgggttatgaaattctttgagattgaaaaacgtgacgactactatcgatatcgcagcattatccgctgccaacgggattatgtggatgaagtacgttcttccttcgctctcaccaaccgctacggtaacaatatgattagtatcaccacgattggcctgtcgggcactataaaatcaagcggtaaatacatttaa

SEQ ID NO: 72480 - DNA, 762 bp, synthetic construct
  source 1..762: mol_type = other DNA
atggatgaacatgagaaatggaaaatcaaattttcactgctgatggttgttttaatcatcattatttatgggtcgaattacctcgtcctgggcgacggcgagcatatcatttcctatgtgtggacccacttgggtttcattcctgtcgatattctcgttgtggcgttcttgctggagggtattatcgagcgcaaagaaaaagaagcaatgcttgaaaagttagacatgctcatgagcaccttcttctctgaattgggtaacgacctgattacgcagttaagtactgctaaccggcataaggcctcgacggccagtctcaaaagcattaaaaactgggatgacgaagattatgaagataaacttgaagaactgaaaaattccccgattgagtttaccgccaatatcgcaccggaaaatcgtgagaagttcctggaggatctgcgtgaattgcttgtgaacaaacgagaatttatcctgaatctgataaataaccccaacctactggaaaaagaagaatttaccagcttgattaatgcgattcttcacctggatgaagaactggagcaccgcaaggatttagcgctggtaaacgatatcgactttggacatctgaatggcgatatgaaccgcgtttacaatattctggtacatgaatgggtgtattatctgaaatatctgaacaaacatcacccgtacatgatcgcgttaatgatacgtactaacccatttgacgaagatgcttcagtgtacgtcacagagtaa

SEQ ID NO: 72481 - DNA, 549 bp, synthetic construct
  source 1..549: mol_type = other DNA
atgatagttgtcggtattacgggtgcaagtggagtaatatatggtatcaagctccttgaggcgttaaaagagctgaatattgagtctgctttggtgatcagtgatctggcgaaagttgttattgaatcagaaacagactataccttcgaggacgtaatcaaactgagcaacacctattttgattttcatgatctgacggcctctatcaatagcggctcgttcaagaccgatggcctagtgatcgtcccgtgcaccatgaaaactctgtccagcatcgctaacggctacggggcgaacacaatcacgcgtgtggccgacgtcagtctgaaggaaaaacgcccgaccattattgtgcctcgtgaaactccacttcggagcattcacctccagaatatgctgaccctgtcccaagaaggggccactattttgccggcaatgccgggtttctactcaaatcccaaaacgattgatgatcagatcaactttgttgtgggcaaaattttggactcgctgaaaattgaaaacaatttatttaaacgctgggaataa

SEQ ID NO: 72482 - DNA, 288 bp, synthetic construct
  source 1..288: mol_type = other DNA
atgaaaggcagcgttaaagcgaagttaatcgtatttatggttattgctctgctggcattcggtatcagttctgcgtttgccagcctcatcataagtgattcgcctgactcatataaattgattcccatcaagaatgattccttcgaaccaaactacattaataaagtcccgacgattctgccgaaagtggaaaccaacaacactaccaatattaccacgaacaaaactaattataacatgaccaatcttaactatacaaatcagtgggtggagacgtacgaaaactaa

SEQ ID NO: 72483 - DNA, 1218 bp, synthetic construct
  source 1..1218: mol_type = other DNA
atggttatgtttagtgcgggtgacacggcgtgggtgctggtttgcaccctcctggtcctattgatgagcatcccggcagtcgccttcttctatggcgggctgagcaaacgcaaaaatgtgcttaatacaatctttttaacttttattgcattctcaatcattagcgtcatatgggttatttttggttatcaatttgcctttggctcagatatcaacggcctgataggttccccaacgaacttcttcctgcaaggcattggcatcgatgacctgagtggatcaattcccacactgctgtttgtcatgttccagtgtgcctttgccgggctgacgtgcgcaattatgtctggcgctttggttggccgtatgaaaacgaaagcttgggtgatcttcactgtattgtgggtatgtctggtttacgtccctattgctcattgggtatggggcggcgggtggctgatgcagatgggtgcgcttgacttcgccggtggtgcggtagttcacattaactccggtatttccgcattggcggtggcattagtcctgggccgtcgcaaaaacaccagtctgatccctcataacttagggtatgcggtgctgggtgcggcgctactctggtttggctggatgggcttcaatggagggagcggcctggccgcaaacggcctcgccgcaaatgcgatcatcgtctcgaatgttgcagcagccacgggtctgattgtttggaccatcattgatacataccttgtgggaaagccgaccgtgctgggtgcgatctcgggggcggttgcgggcctcgtcggtatcaccccggccgccggctttgtggatgtctacggagcgttaattattggggctgtggctccgttagtatcttactttgcggtctattacctgaagccaaaacttggttatgacgatgcgctggatgtatggggcatccacggtatgtctggtgtgtggggggcggttgccactggtatctttgccgtgccggcggtaaatgaagccgccggcttgattgctggaaacgcaaaccaggtggtgattcaggtgatgagcgtggtggcgaccattgtttatgcatttaccataagctttattcttgctaaagtgctggataaagctatggatggaattagggttgaagagagtgatgaaatcggtggcttagacaataatctgcataaggagtcggcatataacttcaactcctaa

SEQ ID NO: 72484 - DNA, 339 bp, synthetic construct
  source 1..339: mol_type = other DNA
atgaaacgtatcgttgcaatcatacggccagaaaaatttgaagatgttaagcgtgagctgatcgaagtcggctgtgaggggatgacggtgtcagaggtaaaaggtcgcggcagccagaaaggcatacgcgaatcctaccgcggtagtaatttttgcattgacctgattccgaaaacccgtattgaaattgtggtcaacgatgaccgcttggatttaattgttgacaagatcattgagggagcgtataccggcaacatcggggatggtaaaattttcatccaatcggtggataacgtaattcgtatccgaactaatgaacatggtgatgaagccgtgtaa

SEQ ID NO: 72485 - DNA, 612 bp, synthetic construct
  source 1..612: mol_type = other DNA
atgattcagatggctaaaaaaaacattttggcgctcataatactaattctgattatcatcattttcggcatgaacctgtttaataatacggtaaacatctacctggatggggaaaatgtatcagttgagacccaaacttttgaggacatcgattcgaacagtttaaacaaagacatctgcagctatacgttgaatgttatgaataatacaacctccgatgtggaaactctgaaaaatggcgtcgagaagctttgttaccagcatggtcttgaagatgccgaaataaacattgattccagcctgggacatgatcagatcccaattattgtccacgtggacggaacatcaatgctgccgacgttacagaacggccagaccgtcctggtaaataaaacgcacgatttcgaagtgggtgatattgtggttgcggaatctaaggaatatgggggcattatcaaacgcgtggacaaaattgacgaaaataaagttcatctgatcagtgacaacaagaacattagctatgagtacatcgacggcgcactctatcaaatcaaaggtatcaccacctgggtggatatttcggatgtcaacggtgtggttattgattattaa

SEQ ID NO: 72486 - DNA, 1203 bp, synthetic construct
  source 1..1203: mol_type = other DNA
atgtcaaatcaggaaatcatcgataaactgctgaatggtgaaatgaaactatatcaggtggaccgagaggtttcagccaaagaggccaccgatattcgccgcgaatttttagagcaaaaatattctattaaattggataacatcagcaattatacgctggatatggaacgcgcgtcggctcgtaacattgaaaattccattggggtcctgcagctgccaatgggcatcgccggcccgctgaagatcaatggtgaatgctgcagccgtgaggtatttgtacccctcgcgacatcggaaggagcacttgtcgcttctatcaatcgcggtgcatccacgattacggcgagcggtggtgccaacgtacgtatcacctccgacatcatgacgcgtgccccggtaattaagtgtgaaggggtgggggacgcactgaaaattaaacaatggttcattgataacttcgacgagttaaaaagtattgcggaaagcaccacaagccatggtaaattaatcaagattgatcctattctgatcgttggaagctatgtttacccacgctttgttttctcaacgggggacagcatgggcatgaatatggtcaccatcgcttctgaaaaaattttagataaactggcgcaagatactagtgcagtccacgtggcgctgagtgggaacgtttgtgtggataagaaacctgcggcgatcaacattgttgaaggccggggcaaaagtgtgatcgcagatatattggtgccgaaagatatagtgttaaaaaagcttaagaccactgctgaagcaattgttgaagtgaacatggcgaaaaacctgattggttcggcggcggcgggcagtatgggctttaacgcccattacgctaacatggtggccgccatatttttggcaacgggtcaggacccggctcatgttgcggaaggctcactgggtatcaccacagccgaagaccgcgatggcgatctgtacttttctgtgaatctgccggacttgccggtcgcgactgtgggcgggggaaccagcctggaagttgcgcacgagggattggagattctcggtgtcgccggctccgataaagcgcgtgagttcgccgagattgtggcctgcaccgtacttgcaggtgaactgtcgcttgtcggcgccctggctgcaggccacctcgcaagagctcatcaggaactgggccggggttaa

SEQ ID NO: 72487 - DNA, 639 bp, synthetic construct
  source 1..639: mol_type = other DNA
atgatttttgattcgttctataccttcctggggcagcttgtagtttttctggcgatcctcattataatactgttcattgtcatcttagtgttaggcgtgctgatcgctcgcaaaaatgagattaaatttccgcgctttattctgtttgtggttgactccctatacttcccgttcaagagtattgcaaattttctgaaactggatgaatacttgattgacgatatctccattaaagtacgggatgaattgaacaaagaaaaatttcgtagcatcccgtcggaaaaaaccttaatcttcctgccccactgccttcgtcataaaaattgtcctgcaacgctccaaaaagaaggcctgaactgcactgaatgcggcctctgtagcattggtgtcgttaagaaaaaagccgagccaatgggctataaaatgtatattgtaccggggagcagttttgtcaagaaaatcgtgaaagaaaacaagttcaaagccgtgctgggagtggcgtgtcatgaagatttgaaccagatgatgatgctgctgtctgatttttgcccacagggtgttctgcttgaaaaaacgggttgttttgagacaaaagtcaatattaagaagatcttcgagaaattagactcaaaatactaa

SEQ ID NO: 72488 - DNA, 3939 bp, synthetic construct
  source 1..3939: mol_type = other DNA
ttgaacaaacaactcctgctcaccttcctttttgtacttgccgtgatactgtctgtgagtgcaattagcgcgagcgatgtcaacgtgacagattcgtacaccacaagtgtagcggatggcgcatcaaacgtcagcgtgcctattgaaaattctgacgattcctccgtcctgtcgctatcaagcgaaagcgatgtgggcaatgtatcatcgaagaacagtgaatctgtcaaatccaacacgctgagcacgaactcggacactaactctctgagcaatcgcggaaacgatgttctggaagtgaataataccgcgtctccgactattaacgcatcggaaaccattgcgtcaaaagatattacgaagtactataagggcagcacaggttacactgctaaatttttagatatgcatggtaatccactgaacgggtcagatgtgaaaattaccgttaacggtgtgacttatactaaaaaaacgaacagcgtaggtgttgcgtcgctggcgattaatcttaaacccggaacctacaaaatagttagcgaaaatctcattacaggctataaactgaccaatactattaaagtattgtcaaccattaatgcgaacgacgtgaccaaagtgtatactgacggcaagaagttttatgccacctttttgaaaagcaacggtaaagcgttagctaacgcctatatcaagtttaagattaacggaaaaacatactctaagaaaactaatagcaagggtgtggctagtctatcaatgactaacctgaaaaaaggtacttataaaatggtctcgtataataaggatgggctaaccaaaactaatactgttaaagttgtgtctaagacgagtagcaagcttaataccaacgcctatacgttcctgaaaagcgacagtaaaaacattaaggttaccttactgaacggtttaggctatgccccagggtccggtaaaatcatcaagttcaccgtaaacggtaaaacctattcggcgaaaaccaacagtaaaggtgtcgcgtcacttaaactgccgtatctgaaagccggtacgtatacagtcaaatacaagttttctggcaatacgttttataccgcctctagtgcatctaacaaattatatattctgccgagtaaaacggcgaccttcacggtgaaaagcaccaccacgtttggtaaaggcgcgaatactcctttcaaggttgcgttaactagcggcagtgttccgctggtcaagaaaacgattactctgacggtaaacggcaagagctatgataaaaccactgatagcaacggcatcgtttccatccctatcgacctgcagaatggcaaatataccgtcacctacaaattcaatggtgactcgaaagtaaatgctaaaaccggatcgtcgtcaattatcgttaaggaacgtacttccacgaaagtgacctggaaaagtggaacctcgttctaccagggggcgcagtcttacaaagttcttctgcaggactctaatggtaaagcgctggcaagtaaagttgtgaaactgacggtgaatgggaagacgtattcagcaacaacgtcaagcaacggctatgctacatttaatgtgaatctggcgccgggcaattacagcatttccctcaaatacccgggcgataactcttatgctccaagcaacggcaacgtaaaagtcagtgttgagaaaaaagaaaatacaggctacgggtattgggtgtacggtgaagacatgagcaatgtggaccttaaaagcctcgcttccaaaggcactagcgatctcttcttaaactttaaagcaattgagcttcatggccaatctaaagtggaatcatggattgcgagcgctaataagctgggaatgcgagttcatatttggatgcagatcttctatgaggggggcaaatgggtcaatccggtgaagaacggaaaaccctacgaggcctttttcgagaaaaaaatcaccgaagcgcaaggatacgccaaaatcaaaggtgtggcaggtatacactttgattatttacgttatagcggcaacggtgagagcgccgcgcataaaactccgggtggtgctgcagccataagtcaattcgtggaggatgcgacggaggcgattcacaacattgattcgaacattatcgtgtccgcggccttgatgccggaaacgaccagtattctcaaatactacggccaggactactcggtaattagcaaatacttagatgtcgttattccaatgatttataaaggcaattatgggaaaacgtccgcttggattaccacaaccaccaaatggtttgtagataattcgaacggggcgcaagtgtgggccggcctgcagggatataaatcggatagtaatgtgactaaattgtcggcgtccacaatcaagacggatgcacaggctgccttagatggtaaagctcccggggtcatcatcttccgctggggtgtcaccaactttgtcgatttcagtagcctgtctgacaaatccacatccccgagtaccaccggcagcgtaacgattgcagacataattgccgccgcaaacaatttgaaaaacgtgatcaattcaaagaacaccatccctgcaaccgttagcgtgggcgggagcagttattcaaccgcacagtttttatacatgatgaccgaagctgttaagaagatcaacggtgggaaaacgagctcccagatactgccgatctctgttggcgttccaacaaacccgtcgggctcatttaaatccgggaatatcgcatccagcgaatatgtgaatatggcaatcagtattaacagtttcattatggaaaatggtagagcgccgaacttcgcgtcatcatcgtccctgggcaccattgattacgattctctggttgaaatgtttgcggatatcctcaccgactacaaagacaataataaattgcccacctcggtcaaagtggacaacggcaccaaatccgaagtcataacggccaaaacaatctccatcaaggacatcgttaccggtgcgacgaacttgaaaaaatactacaacgattacaagaagttgccgtccacggtgaccgcaggtaagattacattcaaactgtctgaatttgtttacctgatgagcaaagcgattaaccagatcggcaaatcgaatacaaaggccatcactatcatcacgggcataggcaacccgacgaatccttctggcgataacattaactcaaaatatctgtcaaaaagcgagtatctgaaagttgccctgaacgtgaccaattatatcaataaaaataaagtcgctccgaattatgtgagctccagtcttggcaaaattatctactctgaatatgtcgatgcatttagccgtatcctggccttttacggtaatgaaaatcgtctgccaaacacagtcacgattagttatagctcaggatcaggcagcaattctggcaccggtgcaactggcaccggtctcaacgaagcactgaaaaatggtacggagttgtcacaatatctgaaagcaaccaaaaattgccaggtagacaattcgaagattaaagatattgtgaacaaagtgaccaaaggtctgacatctgtgaaagataaagcgaccgccatctacaactacgtacgcgacaatctggattatagcttctattacaatacgaaatatggcgcggtaggggccctgaacgctaaaaaaggaaactgtgtcgatcattcccacttgctggtcgccatgtttcggacggcggacattcatgcccgctatgttcacgggaaatgcaccttttccagtggcagcacgtatggtcacgtatgggttcaggtgctggttgataagaaatggacagtggccgatgcgaccagtagccgcaactcgctgggaaaagtagccaactggaacacgaataaattttcctttaataactactattcggaacttgggttctaa

SEQ ID NO: 72489 - DNA, 177 bp, synthetic construct
  source 1..177: mol_type = other DNA
atgaaggcctgcactgtctgcaaaatgattagtaacaaagatcattgtccgaactgcgggaatccaacctcggacaattggagcggtctgctgattatcaccgatccggaagaatccaacgtggcacgtgaattgaatatcacggttgcgggcgagtattgtttacgcgtacggtaa

SEQ ID NO: 72490 - DNA, 315 bp, synthetic construct
  source 1..315: mol_type = other DNA
atggagatcgaatttatcgaggaaaaagaaaataaactttttaaccgcaaagaaattaagttctatgtggactatgacggcgaggccacgcctaaaatcctggatattaagagcaaattagttgcgttgctgaacaccaaaaaagatctgattgtggttgataatgtccagccacactacggtgaaccgaaagcactggggtatgcgaaagtctacgcaactgtagatgacctcaaatacatagagaccaatcatgtgctggcgaagaacgaagaaccggaagaggctgccgaagaagctgaagatgaagagtaa

SEQ ID NO: 72491 - DNA, 2049 bp, synthetic construct
  source 1..2049: mol_type = other DNA
atggggcggggatttaaattgaaaatcgataagttcctgttactcattttgatatttttcattttgctctcttgtgtgagtttagtgtctgcgtccaatactgtcgacacaaacttaactcatgatgcaagcagcgatgcgaacatcggaattaacgatattgaatcgtattcttcgggcgtcttttctgacgatgtgaaatcaacaggtaacgtcatcgtgaatcagcgcaattataagatgtactttgatgatagcaatgtgctgaaaaaggagtatggcggcaaaatcatcgcgtttagtggtaagttcacggataaaggggtgattaccattgactccgaaaacactaaaattactggtcgcaataccctcttcaacaatacggtctttaacatcaaatctaacggtgtgatgctgacgaacctgaacttcgttctcaacaaggaatttagtgataacgaaggcgcgtgcgtactgatcaacggtgacaatgtcaccgtctacaatgttgatattgattataatgtgccgaaaaacgttaccggtttcggaatctattccaacggtttagacgaaagcctgtctgatgttaaactggtcaacaacacggttcggcttcatgggaatgcgctgaatgatgggtacaattatggggtggtactcaccaatacgcgtgatgctattgtctacggtaatattattgactgccagctgccgctgcgtgcggttaactggatggcggaaatatatggcggtataagtatggacgcagtatccgggctggccgcgggcagctgtaatggcttacgcctttccaacaactacatccgttgtgttgtcaacggtgtcgctcagggcgaacctaccttggatgcggtactgatctacgcctgccacaattcgacaatagaaaacaacaccattatcgagaacgattacgtgacaaaaaagggggatgtgaattatctgtatggtctggacctgtatttgtctaacgatgttgtaatctacgggaatgacatccatattcgcacaagcggcggtaaagaggcgcacggtacggcctatccgattcaggtaactggccaggccgagaatatcctgatcgccttcaacaatctgagcagttacagtaacggcccaaatatagggatttactcacaaaactattatggcgtaacgcatctggatattatcagcaactttattaatgttaccggtcatgccagcaaacacagttgggccttggtggctggcattgaagtgcaggactccgatgaccgcattatgaacaataccattattgttgataccgtgaataaatttgaaaaaggctacaacgtgtacggcatcagctactcacaacgaaccgatggagaccacaattacaacatccagtataataatgtctcaaccaatagtgaccatgctgttgcactgaaaggcagcggcagctcgaccgtcagtaactccattgttgccaataacattttaaagggccgcaaatatggtggaaaccgtgcagcatacattacgggaggcaccggcaatgttatcattaacaacacggacgggtcccgtcccgtgcataaaatgacagatgatgagtattccgataatctgaaattctatctttcaagcccatttaaaggcaacggtctgggactagggtggcttgacggtgatggaaactccataatcggcaatggcgacaggaatggcaattcattaaacaacggcaatagcggtttggttaacaacaaggtgtatggtaacaatcttaattatagtgaatcgcaagcacgtaatggtgtgctgaatagcacctattacacgtacggctcttcaggtactgacatcgccagtgcgtcgagctcttcgggttcaggtgctggcagcagcaactcggagtcatcggatgtgaaatcgtatgaagtaaccaaaaaaattaacgataatctgattcatattccgatcgtgattatggcggtaattgcactgattctgctaatcatcggatataaaagaaaagaacacaaagaataa

SEQ ID NO: 72492 - DNA, 3300 bp, synthetic construct
  source 1..3300: mol_type = other DNA
ctgaaactgaataaaatcatcgtgctgtcactgttcctggtccttatctgttttattggcgcagccagtgccacggaagacgtcaacgacacagccattgcggatagcgaaattgatgaagtaagcgcggtagatatcgaacaatcggttgacgataatgagataaccgaaattcaaagcagcgatgaatcaaataaggttctggcccgcggcaccccgaccacggcgaaggattggaataccctcagaacaaaatgtgaaaaaaccacggatcaatatataacattgactgggacgagctatcccattggcacttacataacgtttaagaacagtgcgaccattgtgggtagtgatgtgagctacattactggaggttctacttcaaacacgccttttgtaaataataattcggcgctcaccctccattttattaatgtgaaatttttaaacgttaatgcgaagaatttgttagagcttgatggtaccgtatatctggacaattgtacttttgacaacgtgcagacggcaaccggccacaactcggtcatttataatactaataacctgatgtatctgactggctgtaatattacgaactgccacacgggttatggtgctgttagcaattataactctggcagtaccacaagtcctgtcatgtatgttgacgattgtcgctttatcaataacagtgctagcgtcgaaccgggtgcgatcaataactgcggaattttgtatgtaaacaactcggaatttgatggtaaccacgccaactggtgggcgggcgccatccatacgcatacaaatgcgcagacagaaattgaaaacacgaattttcgacgcaacacggctggctggaatggtggggcattattcacctacagcaaactgaaaatcaaaaattgcacgtttgaagacaacaactgtaccacgaacaacgggggtggagccatcggagcatacaactatggctcaggctacaatatcaccatcgacagctcgcgttttaactataataccaacctgtgctatgcatacaccaacatttcaacgacctccgtgggtcgtggaggagcaatctctgtccttaacggcggctacctcacggtgtataatagcaatttcaccggcaactacgcaaaaatcgggcaggccattgcagctgcaacctacaattacgaaaacggaacgggtggcaacccacacattaaaatctgcaacaataaatttacagaccacacggccacgggcattgatacggtggttattacgggcaacgactatatattcaacaacaatgtctttatcaacagttaccagaacaccatttacaccgggactggaaacacatacaactcagccgctttgccgggtaacctgaatagtaaattgaatctgaaaaccaagctgcgggccactaacactgaaattctgtctgattatcaggatcatgatgtggtgtatgttaatgtttcttccgataaagatgcagaagacgacaatgtgcacggtcagagctgggatgatgcgtatggtggtttggagtgctttgtaatggccatcaattaccttcataataatgggataatttatatcgcagatgggcgttataatgaggactatggctatgagtactccatcgctcatggcaactttaccatgattggtcagggtccaaaaactaatatcgagaagattataaccactgtatatggcggtagcgatcaaaactctacccataactttatcaacctgtctttcacggggaaagattttggcatcaacgcgaacttcattaactgcacctttttaggttcaattagcatctcaaaagggctcacatatcatgatccgaatcatgttgtggagtacggttacgctcagacgtatttcatgaactttaataactgtgtgttcaaggatgtcaataccactaatgctctggttaccctttataagtatggggctgtgaactttactaattgcattttcgaaaacattaccgcggattccattgtgtatcgtaatgatattaactattttgaagaggatggcattagctttaaaaactgcacgttcacgaactgtaaatacaacggtattgcggactccctggcgaattttgatgacgcggttgtgatcgaggattgcacgtatgatagtgaggttgctttaggcacaaccgaagttaatgggcattactatatcaatgcgaccaaacttaaagtgaccgctgtgggcaccagcatttcaatcaaatcgaatgaaaataatgtaattgtgaatctgactgatgtgaacggtaatccggtggcgaatgcaggtataatttatagtatcgccggcaccaatgccagtgcaactacgggcgcggacggcacgttcaccctgtcgaacctgaaagggatcgtcaacatcacggtttactattcaggcaacgaatcttatctcgcttcgaacaaatcggataatttcatctttaaatacaacacggcggtgtccagtgcggtgaatggtgatgatattctaatcattctgaaagacgatgagaacaatcccattgccaacgcgaatgtaatctataccgtcaacggcatcgactacaacgcaaccaccgatgaaaatggaacagtaacggtgtccaatctgaaaggtaaatttgcattcaacgtcctttataaaggcgacaccctacacacagcttccaacgcgtccaacacattcatcttcaagtatgggaccaaaattacagccaaaaaagtaaccgccacttacaacgtggcgaaaaacttagttatcacactgaaagacgaaaacggcattgcgattgcagggaaaaaagtaaccgttaaagtcggatctatccgcaagacgctgaccactaatgccaaaggtcaggcgactctgaaggtcagcaatctgttgccgaaaacctactctgccaccgtaacttatgcgggtgacgatacacacattaaatcctcagtgaaagttaaggttgtggttaaaaaagcaacactgaaagtctcggccaaggcaaaaaaattcaaaaaatccttaaagaccaagaaatattcgattgttttgaaaaataatgtgggcaaagtcctgaaaaagactaaagtgacactaaaaatcaaaggcaaaaccttcaaagcctacaccaacagcaaaggcattgccaccttcaaaattaccaagttaacgaaaaaaggtaaatacaatgcgtacattaagtttgcgggcagcaaatactacaacagcctgaacaagaaagtcaaaataaccctgaagtaa

SEQ ID NO: 72493 - DNA, 5595 bp, synthetic construct
  source 1..5595: mol_type = other DNA
ttgaaaaacagcgatgatgtgctgaatatcgatgtgctgaaccaaaattctaccgtcaattatccacgcagccataaaaccatcgaaattacacaggataattatgaaaactattttaatatccgcaccggcaagatcattgatgccagctgcatcagcaagggagatactctgaaaattggcaacatcagcaatcgcgcgttcgtgatagaccgtcaacttatcctgatgccaatctcgtcgaatgataagattagtaatggtttcatccatcttatcaaaggaagtgacggttcgactgtaacaaatcttacgatcaataatacaaaagatcgtctgaacatcctgggcggcaacgtcggtcagttacacggcatttggttaagcaatagcaacaacaaccttattagctacaatacaatacgcattgcaaacgcggccggcgtgtatgccatgccgatgggttggagcagcaataatcgcattatctacaataacatgaagacctatatcacatgtaacatggtgatgggccagtgccattataatctgatctcccacaatagtcttgaattgttaagttattccgatacctcggttaccaatctgatttatttcaacccttttgggcacgccgattatagcggtagcggactgtgtaaatataacatgatctcattcaacgattttaagggtttctctaacgggcctatgtccattctgttacagagcgtgtacgagaaccatgatggcacggttatcgccaataacacgttttctaaaggctcctatgccattcatctgtttggtaacaatatttctgtttatggtaacgtagtcctcaacagtggcattggtatttctgtgtttggccgtaacttttcggtgcataacaacgccgtcattggggacagccaggggtatggtattatggcagaagcgaatggcggctcgctgtgcaacgtttacaacaacaacattacgttcatcgatgtttataatgcaatatttatcggtaatcatgtcaaagcgtacaataattatatcaatatcaaagaatatggggtgagtatctttattaaaggtaactgctccaacattcatgacaacaggattaacaacaaacacgatgctggcatcagcgtactgggtaataataacactatcaataacaacatcattaacaccaaaaatatcggtattaccctaccggcgcgctcgacgaactgccgttattacaacaacacatttaccaacaataaaattaatagtgaaagctacggtatttatattgatgggctcgtgtataactgtatcatcttggataacattattgagactaatagtacgatgggcattttcaaagacatcacggatgaactgtccaacattgaagaaaataacatggtgaacggcgttattctggatagcacctatattattgtcaacaataccaactaccataaatattttgataaatatgggcatctgacctttaaattcgaaaaaaacaaaactaaaataatatttctgacatttttaaccaacaaaaatctgatcttccaggagaaaatcaatgtaatcagtaataaaatgaacaacctgctcattaatgttaccattactttcgaaaccaacgccagtggttccttaatccgtgactttaattttattaaccacgataaagaagctattattctaaatggggtgaatgatgttaccgtcacgcgaaataatatcacaaatctgtttcgcaatggcagtttgagcaatagcgcggtattgattcaagacgtctgcgaaaatcttatcatctcctataataacatatatgtcaactcacggacccattgttacacttatgcaatcaacgcccctagcattaacccggctactcataaaatgaacaacaaactgagcaaacgcgtcaacattttagacaacaccataatcatgatttcgtcagggattaccgaagctatttacactgatacgctctcggagagtaatttcatttctaacaaaatcaatatcatctctaaaaactatggctatggtattgcagtgtctaatatgatcggacgcctgagcgatattaacgttagcaataacgaaattgtgatccacagtgagcaaatggcctacctgatcgaacttctccaggtggacaactcaacaattgaaaataacaagttatacgggaaaagtaacggagtctatgcgattggtatctattggtctgacaatatttcggtgaacaacaacgccatttcggtatttggtggcaatctgtctaaaatcttagaaatctctgatgtcctggggatcggcaactcagcgatcgcaatccttcgcaatagttctaaaattatcatctccgaaaatatcatctacgcgaatctttccaaaacaatctttgacaacacgacggacgggatcataaatgcatcttttaacagctttattattgataacgagaactacaactgttacttcaatgaggtgggcgagctgtacagcaatgttgtgattaaaaatagtactttgctaatccataacctgaccaaaaaccagctgttgattatcaacgatctggtgaaaatcagctcgtacgatctcaattcaccctcgtcaatctcaatcatttttaaaaacaacgcaagcaattcaattatttccaatgcatcgtttattaattcttcaattgacttaatcaatgtttcaaacattaatatcataaacaacacgttcaactcgagcaacagttgcatactgaacattaacggcggagaaaaaaacctgttcgttaacaacgagctcttcattaattcgaccgatatctccgtgatcaatctcaacaaaacgttactgaacattatcaaaaataataatattaaattcaataccagcaactctaaaattatcactattaacaacagcaacttcaccttgatcagcaataacgtaataatcggcatttccgactccttaatttttatttgtagcaagggttccagttacgataatatttacaaaaacatcctaaacgcgaacgcgtcgtccatctgcggctatctggcgtcgaatgccaagtggagtagtattagctacaataatattctgattaataaatcaaccaaccagtccgctatctattactgtaacaactcctcgaataatactattaacgaaaactacattatttcgtattccctcaacgccaatgactacgcagtgtccgtcattagcaacgaaagtctgtcaaatctgatcattaaaaactatctgatcagttctaatggcttcaaacgagccaattttgcagtatacgcgccgttcgacttggttaaagacaatagcccatttgacatttacgtttcatgcaacggcagtgacgtggtaggcgatggtagtattgataacccttatgcgaccatcaaaaaagcgattgaaaacagtctgaacttgtacgtgatacacgtatttgatggcaactacacggagagcaatatcattattgataagaacctgacacttgtggctgtgaatttaggtaaagttttcattgatgttcaaattaatcagctgttcgatatacttgaggataacaccctgagcatttctggctttctgattggcaacgcgcataacgttgacggaggcagcgtctttattaacaatggtaagttgttcatcaataacgtggttatctttaattcctcatcttattttgataattcgcacccgatcttcgaccagaacataacgtaccacgaagacaatctgatcgataaggcacataccgtggattgctcgaacaccggtaaaggcggcgccattctcaataacggcgaactgattattaattcatctatcttctttaataattttgggcaccgtggtggggtaatagctgattacggcaaaacgattataaattcatcgattttctacaataaccggggcatccacggcggctgtatttattccgatagcaaaaataatttgtttgtaattaacagcattttcaataataacactgcagtcacgagcattgacttctgcaaaatcatgctgcattccattggttggtccattggagagaactatatttataattataaaagcgaatgtgattcaccgattggtgctggcggagtcatttatacgaaaaacacgtcagtcctgattaaaaactcatcgtttatttataactcggcgcgtatcgggggtgtaatagccacccagtgtgatatttttacacaactgtcaaactttatctcggacgttaatctgtatattgataattgctattttaacagtaataaggccaacgatacccgtttcaaagatgatccgctttacctgaagaactacgattatttcaacgattataatggcggcgttgtgtatggaacgtacaacaaactatacataaacgcttcgaatttttattataatcaggttattaataatggcggcgtgctgtatgcgaaggcgaatgatggtaagataatagactctattttcaataataaccgtgccggaagtaacggtggtgcgctggacatctcaaaaaacttccttatcatgagaagcatcatttccaataattcagcccggtatggtggagccattgagtacgactcttacacctactatgggcatattcaggacaactttaacatctacaattccaccatctcgaacaataaagcgttaaatgcgggtggggcatttaacatcggttcgggcaacgtgagcgttcacgattcaaacattgtaaataattttgcaccgtcgggtactaccatcaatagccatggaatcaaatacgctattgatatgcgctataactattggggtgtcttgccaaatggtcacattggcccggatgacagcgtttggaatgtgaaccataatctgttcaagccgtggtacaaacaatgggtagaatggaagcccaaagtcattgaatcaaacaactctgggttcaactctaactctagcaatcataacccgtatatcaatcctaactccaacagcggtggcaataatcacaataaccccatctcgacaggctctagttcttccactaccacgtcaattggtggagcgaacgggaataatcatggatacggcaatgggaaatactttggttcaggggacggcaacaacttgggtccgagcagtggaaatggcggtttttatttagcgattccaggttataataaatataatgggcaaaacgtgaatagtaatacctccagcaacagccacaagagccagaatcgtggcaatgtggattcagacagcctcagtaaaagcaatagttccaaatataacccggacctggtgtctgcgggttttacggttaatgctgcttcctctccgagcagcagccagagaggcatcgaacgtgcgagtaaggaatcaggctcgctgagtgactccgcatcttacgagattaccaagaaaattaaggaagtcttctatgatgagaaccacataacgacgttcatcctgtttataattattatcttgtttctgataattctgggatacaaatacggcgtgggtaagtttgatgaataa

SEQ ID NO: 72494 - DNA, 6582 bp, synthetic construct
  source 1..6582: mol_type = other DNA
atgtcatacactaaatttatcctgatcctctcaatcatcttcctcctgttcgcttcaatagcttttgttagtgcggctgatacgaacacgagcattgtagaagaaccgatggacgtgaaacataatttatgtgacattaacaattcgttagaaaaccaggaaatttatgtcagtccgctcggtgatgatgacgctaacggcagctttcaaaaccctgtgtcctccatccaccatgcggtggcaatggcaaaaaacaattctaaagtgattttaatggagggggagtataaaggtgcaaataatacctttattttaattaacaaaaacctgaccattgagagctttagcaacaacgttgtcattaatggcgagaataaacacgcctttttcaaaataaccccctcttcgtcgctgatccttaacaacattaaattcattaatggctacaccgactcttatagccaactgggtattattaataatcttggcaccctggtgatcaacaactcgtcatttaacaacatgaactctattatgggcaccttctttaacgaaggaaccctgaaaatcgagaacaccaaggtcactaatgccgttagcctgaccatggcgcagatcctgactaacattgggaatacgaccatcctcaactcccaactgatcgaaaacaacgagtattcgagcattgatgttgtggtttacaattataatcgcattagtattgtgaactctcaggtgaataacctgttctcaaacaagaagtatagcgaagactcatacaatctggcgtccattcttattaataattctaagctggataacattgatctggaagacgcatttgtgtgtattcacaacagccaaatcacctttaaaagcatttttaatgggtgtaacgtgtctgtggatgagagtacctttctttataacaagtctctgttctcaatcattaatgtaatgaatagtaactttaccgcgattcatagcgtgtttaatagcccgattagcacgaaacgttcgcatgtgaacataacctattctgcaattctgcggagcatctctggcaacgcctacaaatgttatctgtacgcgccttataattggtggggtattaattccggtccatcgtaccagtactttaccgacgttaatgttagttattgggccatctcgactttcgaatatgaatcggactacattccaattaacccgaactccacttttaccacaacactgaataaatggagtgatgggaacagtacctttgaatttaaaacagaagaatacctgccgtttcgccatttgaaattcgaatcgcagaatggcaaatttctctactcatctgccaatatcgagaaagttttttccaattatctgattggaaacaatcttgattgtcaagtgcacgtcatcatagactttcagcgtttgacgcttcggattggcgaaggtctgacgaactataactacttcgtctccaccgaagggcatgacgggctgggcaacggtactttcgaacatccgtttaagaccataaattatgccgtttccaaagtcggcaatggcaacacgatttgcttactcgaagggatttataaaggcaattggaatagtaatgttaccattacgaagaacatcacgattgtcggcctgggaaacgtaaacctgctccgcagcaacgattatagcatcttcaatattaaagaatggggcagtttgtctttaaaaaacattaacttctctgtcgatataattgactatgcacatccgctgattattctgaacggtgggaatttatcgatcatcaactgctcgttttcaaatattacgtctaccaatgtgatccacacctctaatgggatcgaacataatggcattgttaacatctctgattcttattttgccgacattagcggcagcatactgatcgggagtgcgaaagtaagtgttagcaactcgctgttcgaaaaaattaaatgctataggatcattcagggatacgaatattacaatgtactatttgcaatttcatcgtccatcgaaatttatagttcctgcttccaaaacaatctcatgggtattgtaaacctgcatccatttttttactcctcatccaaactgcgctatagccagtatagtaatgcatactcaagatacgcttatattaaaaacaccaagtttgaaaacaacgtatttttcgataagaatagttattatagcagcaatggcatcgggttggatatttataatgaaaatgaacatttttatggaattatagataactgtagcttcattaacaacaaaggtcaactggccatcgccaccagtgtcaattcatcaatatttatgaacaatttcgaatcccgttatggttacagcatggtgtatgctgacctgatcaataactcagtctttattaataacaaaaacctgtacgaagactacaacaacgtatttatcggtaatggcatcgcgagtgctggctgtatattggagtctatcttcatgtataatgaagcggcgttcgggggcgcgatcgccgatacgaaagaagcccactattgcgtgttcgtcaacaacacttcgaaatatggtggtaacgacatttactcgtacagcggcgacgtagattattcgagtaactggtggggtgacaaccagaaacccaactcggataaagtgtttatcttccttggaacgctgacgttgaataattgggtcataatgacctttgagtcggttagcaattctattattaaagcgtcactgaatgctcttaacaacggggaaggtaatatttgtaaaattaaccacaacatgccgtcgcgcatggtttatttcaaaattaatcacggcagccttagtccagagaatactctgctgataaacaactctgcttataccaacatgacttataacctcaacttagattttaaagtctacgcacgtattgataaccagctactcgagttagacattcgtaacacaaagacgctccttatcatggaggatgtcatcttcaagggcaagagcaacaactttgctgtggatctgatcaatatcaatggttacaaaatatttaatcagaccctggttgttgagattattgacgagaataacacacagaacatctttacaatccagaccgatgacaacggtcacgccgaatttaatgtcgactatccagtcggtatttaccaggtaaacattaattatctgggtaacggctattttgataaatgcaattctacgtccattatgaaaatcatcaaatcgaatacttacctgattagttataatcagacatattacggcaaaaataacttgttcaaaagcgtcttattcggtgagggaaataagaaactgagcaacatgacgatcaaattcacgattatagactctaaaggtaatctgcgcgaaatctattctctgaccaaccaagacgccactagcgaaattattatcaacttggatgtaggtgagtacacaatccgctcggaatttctgggtgatctgtggtacagctatagcagcagcattagccacatattggtcaatccggtgagttccaccctaattgtgtcgaatgttacactctacggtgtgggtgatgtgtacaacatcacgttaaaggacattcacggatcattgatccgtggtgaaaacattattgtcaccataactcagggagccagctgcgataaatttaccctgaaaacagataacaatggtgtggcaaaactgactataaactatctgccgggcgtttataacgtgaaagcgcagttcctgggcgatagtatctacgccccgaccagcggtgagggagtgattaaagttgaaaagatcttcaccatcattagcgggttccaccattgcattttacccttaaatgggatctacacagtggtcttaagtgatatgtatgggcgacgtgtcaacaatgaatcggtaacactgtccttatataagggcaatctcatcaagaaatacaccattaacacggacgccaacggcgaggctgatttcgtgatcaacctggaggaaggcacgtacctcacaactttcgagtacggtggcaataaatggtattgtgatgccacgaacgcggcaaccattgttatcagtaaaaaagtgaatctgtccaacattaatatcaattccaccgacttggtgcagtattatggggaaaacaagtacttcatcatcaaatttaacgatccgaatgcatatagccaatacggcaaaaagattggcgtgaccatctctagcggctcatggtcccagtcttatgaagttttcacggatattttcggtctggcacgtttaaaaatcaatttgaacccgggcgaatacaatattacttacaagtatagcaatagtcattacaatatattcggcacctctagcaacactatccatgtatacaaaatgcctgctgttctgatcgcgaataatattgtgatgaaaagcaatgaacagcagctgtatgaaatcaatctccgcgatattaataacaatcctatcaaaaacatgcttgtaaacatcgatattgacggtgtgaaatataattccacgacaaatgatgagggtatagcgaaaatcctgcttagcttgggtgtgggaaagcatattatcagttataactttatcaatcccaattatttgtcctcaaactcatcatcggtgattctcgttgttgatagtgataaaataccgagcaatctgtattcacaagatattaatgcattcgataatcagatcctgaatttcacgatacgattgtcagacatgctgaataacagcatcagcagttctgaagtaatccttgagctttttacattctacggcgagtcaattattaacatcactggtatcacagactccaacggccgcattagcttcgatttaaacctggattatggcaaatatatagcgaacctgcattacaatggaaatgccttgtatttagcgagctactccactaacacgatcaatattgaatcagcggataatcgtaccaaaaccattctgttcaatgtagagaccaagctgaccaattctaaatactatgttattttgtccgatattaacggcactttgcttgtgaataaagaaattaagtttatcattggtaacaaaacaattacttccatcactgatgaaaaaggccgcgcgtacttggaattaaacctaaacccgaactattatattatcaaagcgatttttaacggggataaggattacaaaagcgtgtctagtttgaaaaagatctttatttcaggtgaactaacgcatctgtacgcgatcccgctggttaagtactatagaaatggaacgcagttccatgcacggcttgtgaacagtaaaggcgttccgctgattaataaaatcttatcgatcctgttggaagggaactattataattgcaccacggatgaaaacggctggattaccttaaacatcgacttaaaaccaggattttacgatgtggaatgctactattactccaataacacggacgaaaactcgttcgataaaaccaacatcaccgtactgtcgaccgtcctgggtcagagcgaagtgaaatattacggcgattatccttatctgaccattaaatttttagatggtgcgggcaatctaatcaaaaacaccagtttcgttattgatattgacggtaagaaatacagcgcacaaacgaacgatgagggtatttttaactttaacctgaatctcaattcaggaagtcaccttatttcagtgaacaatccttatgacgggctgtttgtgacgtataaactggatatcctgaccacgatttgctccaataacctcgttaaagtgtttaacaacggcgtttcctacactgcgcaactgctggatagctttggcaatccgctgaaaaacaagaacgtaaaaatcattattaatggggttctgtattataaaaaaacagacgtcaagggtattctggaactgaatatggactttaaccccaagatttaccttgtgaccgtttttaatccagtgacgaaagagtatatcgaaaataccgtgaaaatattgccgaccctgattaataacaagaatatcaatatgtatttctcgaactgcgcgttttacaaagtccgtgccattggcagtgacggtaaaattgtcgaatcgggggtaattgttaaaatcaaagtgaacggcaaaagctacaaaattaaaacaaataaggatggttatgcgttgtttaaaatcaacctgaaacctggcaaatatattattaccgcagagtacaattcctacattgtaagcaataaaatcaacgtaaaatccctgctaaccgcgaagaacatttttcataaaaaggctaaaaagattaaatttagctcgaaactggtcgatattaaaggcaaagccctgaaaggtaaaaaaatcacttttaaattcaaaggcaaagtctataaagtgaagacgaataagaatggaatcgccacacttacgatcaagaatctgaaagttggcaaatacacgatcatgtcaatctggaacaaattccgcatcaaaaacacgatcaaaatcaaaaaataa

SEQ ID NO: 72495 - DNA, 5736 bp, synthetic construct
  source 1..5736: mol_type = other DNA
gtgagcaaaattctgaaaatcaataaaatcatcctggttggtattgtgctgttgacgattctgtccctgaacgccgtgagtgcatacgataactcaaacaacacggaagagtatctttcgtcggagaattatgaggaaatccttagcgccgactcgtttaatgacaacaatattctggcttcagccagttataataaaaccatctatgtaaattacactggggatgactcaggcagcggcagtcagaacagcccatatgcgaccttgaataaggccatctcgaatgtaaacgattcggataacgccgttgtctatctcagcgcgggccggtttagcggtgaaaacaatacggatctgagcattaatctggctcatcgcaactataacagcagtttaacgattatcggagccggtaacggtcagactatcctcgacggcaacgatgaatcagccattttcacgtccattagcgcggattctattgtgacgttgataaatattacattcacacatggcaaatctgagattggttcagtgatgactacttctggaaatttgaccatagacaactgtatttttgataataattatgcgactagctcggcagcgatttatgcagaaaacaccgaagacatcaaaattaccaattccgtctttaaaaacaattacggccatgaaggctgtgcagatttttattgtgaaggcagcgaatccacgatcatcgatattatcaattctacctttataaattccaccacaccgtatctgtatagtctgccctcgttcttaatccagtattcaaatgcaaacattattggcaataaattcgaaaatatcactggagtctatcactcgggcacgtttgaattgaaatatggctacgggaaacgtaaggtaattaataatacctttattaattgtaattatacggggaacaacgacgggggcatcatttatatttccaacacctatcttaaaaataatcaattcataaactgcacttcaaaaaaggctctgatctattcgctgacggaatttaacgcctatctcaaatttaaaaacgcgaccattaacgggacggaatttaagctctactgcgaagtaacagatgacttaaacaatagcgtaagcacttacggcgaggttcatttcttcattaatgatgaaaagataaagtccagccgctccaacaatgggacggcgtcaatatctgtgatcaaattattggataatggtgattacacacttagtggcacttattactattatgagaatccgttcgaggtgaatgtgaaaaatgcaaccctccacgttgactttaatcatgaccccctagaattgtgggtctcaaatgatggtaatgataccacgggtaatggcagcgaaaacaatccattcaaaacccttaaacacgcgctgaactatgggttcgaaaacacgatcgatctgactattcacatgaaagatggcgtgtatactggcagcgacaataaagatctgtcttactctaacgttggtaaattaacgatttttggtgaatcttatcgtaataccatcattgatgccgagaacaccaagaagatttttaatttcggtgaatatctcaatgtgacgttggccaacctgaccctacgtaacacaagtggcaacgtcatttctgcgtacattctcaaaatctatgattcggttattgagcatgctgactctctgaacggggagtacagtgatacatctaaaataatttttaacaatctaacgtacactaacagtggtggaatctacatctacaatgcggagatttacaattccaaattcaaaaactgcaacaacacgaaaaacaactgccttctgcggataggttcccttggaaacaatatcatccatattgaaaacactactatcatcaacaacaccgtgaacggccgccatggtagctcgattgttagcatctcgggaaatagcgtcctgataaataacgattacattaataatactgtgattagcgaaaactcgaagtatatttttcagagctattcgaacaagctgatatcggtaaacgaaactttcataggcaacaatgtgtccagttatatcgcatattatgatattaacggcaacaacgtggaaataatcattgaaaatattacgtttaaaaataattatgtcaaaaccgatggctcagggttggcgattaagaccggacgcattaaaggggccaaattcattaataacacggcgttaaacaacggcggcgcgatcattatcctgccgcattataccggcagtcaagttccgaaatgcattctggaaaatgtcttttttgaaaataatagtgccaacaatggtaaagacatattcattgagaaggccaacatcgggtatgagaacgggcagctggacaacattacggtaacttttaacagcctgattacacataatctgcaagatattgtgattgcaaatattagccatgtgagcggtgctgttattggtggtggaatgattgagtttgatttaaacggctcctatatgggagttgcggaagtgattaacggtgtcgcgaaattaaactatctgggcttcacaaaaaacggcaactatacgttgagtggttcatacaactatgaatccaacaccaccatctacaacagcgctgttgttaatgtcattcttaacccgttaaaagaaaacattacgtcatatgtgtccgacagccggggcgacgatgagaatggcaatggttcatacgagaatccgtacaaaaccatcgaaaatgcattgaacgaggggtacaaacagtctaaagtgatttttatcaaagtcttggaaggtaactataccggtaaattcaataacaacattaccatttatgactctctgaatatcacaattattggtgaaggaattgataaaaccatcatcacaggcaataatacgaagaacaactggtttataaccgtcctgcacgcaggtaatggctttctgaaactgatcaatatgaccattagcgaaattaattataattacaaaaacatgaacagccagaaaagcgcggtagttattgagaaaggtgcgaacgtatttatcgatagcgttaaattcactaaaaaccgtggctacaacggcggtgccatcaacaatcaggggacgctgaacattattaactcgatcttttacaataatggtgactcaagttatggtggatctatatacaacaaaggtatcacaatcattgacaattcatcatttattgcaaatcatgctaagtattgttcggatatgtttaatgagggtattttaaacatttacaattcaaatattcaggattcgatgcgtaccaatggttggaccggcaacacccttgtcattggcggcctgggcaacatcagcattattaactccaagatctttcgcaccggtaaaatgccgctggaactcattgatccggacgatacctatgctgacaacccggccttcacgatcagtattgggacgattggaagtatcaccctgatcaataccaccatcgatggtcacgatgccaaatatactgggccgaatttttatattaccaataatgcggctatcagttggtctgtctcgaccaacattaaaattcacaattccagtttcctgaatttaaacaacatcctcaataaccagatgggcaatttaatcatcaagtcatcattcattaaaaatgtctccaacctgattatgtcaaccagcaactataatctcactgtaatcaactcgtactttgcagatggcaccatctccacggaaaaatacgatatttccaacatttacttgaacaacaactggtggggaagtaattcgaaacctacttacaaggtagataacgttgatacaacgcctgagacctggttaatcctaaccctgaatcaaagtaataaagaaagcctgctgaaagacattattctgtcgtttaaagttacggatggtgaaaacataaccgattataccggctacctgtatcctcgacccttcacgatgtcggcgatcaacgcgacacttgagtacgccaacggcaacattattaaccaccttatcaaccaaatcaatatggcgaaaaatgcgacgagctattacatagaagcgaaaatagataaccagaccgttaatctgacaagtaatatcacccacaatgttacgatcattgcgaacgacatagaatttgattacggcactaaaacaattactgtgaatgttctgttcgacaacctgtctgcagatgatgaaattattaccctgaaggtgaacaacaaagagtactctacgaaaatcaacaacggtatcgctatcttcaatattgacacattagtgcgtggaacgtacaccttgaactacagtatcaatgcgactgaactgcacgacaacgtcatcaattcatccacactcattgtcaacggaatcgatcctaacattaatgcaagtagcaaagcggtgctggttgggaataatgtgaccgtaacaatcacaatcccgtctgacctgacgggcaccatcaacgttatcctgaataataagacctatgtggcagagatccatgataacaaagcgattgccatcattcctaatctggcgcaaggaaactacctggcgaatgtgatctattctggcgacgaaaaatacctggctaagaataccaccttaaacatcaaggtactggaaattaacatttcagcaccgaacgttgaaaaatactacaaaggttccgaaaaactacgagtgatcgtaatcgatagtgaaggcaatgccattgttggtcagagcgtgcagattaaacttaacaatgtcaactacaccgagatcaccaaccaggaagggattgtaagcgtcaatcttgacctgaatgtgggcaaatatagcgcaacgattctggttaatgataagaaaattaacaccgaaatcactatcaaatccaccatccagggcttcaacatgatcagggggtataatagtggcctggattatcaagcaacgctgctgaatgatgatgggacaccactggacaacacccttgtaaagctcaaaatcggaaatagcatctatgaagtgcgcagtaatgccaatggcgttgtgaagttaaacaaaaaactggccattgggacctacacggtcttgattacgaacccatctaactttgaaacccaaacagctactctgaagattgtgtctcgtattaacaataataagaacatcattggtgattatttgtcgggctttagctataaagtgcgcatcattggtgacaatggtaaatccgtgggcgctcgtgaaattgtgaaatttaaaattaacaaaaagacttacaatatcaaaacggataaaaacggttacgcgagcttaaaaataacattgacgccgaaaacgtatcaaattacggccacctacaagggtcagagcgtgaagaacaaaatcaccgttaaacagatccttaaaaccgcgaaaaaaattaatatcagaaagtctgccaaaaaactgacgctgaaagccacactgaaaaaatccaacaaaaaaccactgaaaaacaagaaaataaccttcaagtttaaaggtaaaacctacaccactaaaaccaacaacaaaggcatagctaaaatcatcattaaaaagaatgtgattaaaaagctcaaggcaggtaaaaaatacaccgtcaaagtgacctatgtaaaagacatcatcacagggagcgtcaaagttaaacgctaa

SEQ ID NO: 72496 - DNA, 5112 bp, synthetic construct
  source 1..5112: mol_type = other DNA
atgaaatttttccgcaaaaagccacgcatcttcctgatccttctcattgtaatgatatgcttctgcctgttctcccaactggctttcgccgagaacatcaacgaaagtgaagtggttggcaacgcagaaatcgagaacaacctgagcagtacgaatgataattttgaagtttcaaaagatatcgggtataacgtctcgaaaaagatttcaacggataattcaaatgaaaatctgcgcaactctcagcacatgactctctttatcattagtgataatccgggaaccaatattctggataaggcgattctcgaactttccaacgaaaataagatcaatggtgtcaacctgattatccggaatggaaatcaggtaaagagcatgaatgagaacgaattaagctatctgctctctgattgtgacgcttttatcggtgaatggattagcagtgatgtcgattcggtattgacaagtgtgttagtaaagaaccctgatctgtctaacaaaaaactgtttcttgtcttggaacctccgtcaggcaatttaaactcggggtccagttcactgaatctaatccgtaataataccttgaattataataagatatttacaaactactccaatgaagagctgattaattactttaagaatacgaaaaggggcaactcctattcgaacattaataactacctgaccaacggaaacggcaaaaacttcgatagcatttttaatcgactggtgctgtacaaggatctgaatgataaaaacaatttgaaaaatcagatcttgtttattctcaactatttgggcgtggacgttagttatgaacagcccacctttaccggtgtgaagaactatggtatctatcgggatcgttggtactccttggatgagtatatttcgacgttttttaaagccacgaataatcgtacggttgggattctggaaagcaaaatgtatattgaatctcagcagttaaacacgtgctactccattataaactccctggaatcacgtaattataacgtcattcctgtcttcgctgatggaggctcggcggaacagttgaaggtcatggtggaatcctggaccagcgcgggcgacgatattagcggatttctgagcaactcttctaattttgatgtgtatattgatgcgatcgtatcgatggtggcctatggtgtgggtggggaaaacttcacaaaagccacaagcttttttgaggaagcgggtgtgcaggtattccgcgcggttcactcggaccatgtttcaaatgaacagtgggaactgggttctacgggtctgacgaccgaaaaaagtgacaaatggtggcacattactattgcggaagcgcaaggtatcatcgatgccaccttcattggcggtaattcaagctacatctccaacctgaccggcgctcagatcaccacttatattccgcatgaagggaacatagggctgcttgcggacagaatcgattcgtgggtggatctgaaatacaccctgaatgaggataaactgatctctatcatctattacaactatccgccgggcaaacaaaacatcggttccagctacctggatacaataaaaagcatttacaatatcctgtacacgctgaaagcggcaggctacactgtgggaagcctgccagttgatgttagtgagctcgagtacctaatgcttacatgcgggatcaatgtcgctacctgggccccgggcgaacttgaaaaaatcgcgaatcgttcgtgcataacgttacttccggtaagtgaatataactcctggtttaactcattagatgagattgtacgcatccaagtgtctaacggtacggttgcatatattggggagctgacgaagcgcgccgttgaattagattataccaaaaccattggcagcacaattgacgactggtataaccaggttgtttccctgcttccggatgaaaaatcagttgaggccaaagaggtcctcagtaatattgtccgcgcgctgaaagactatgctaatacgcactcacaggactactatcgcctgtacttaaaatattttgatgaatttaaggaactgaacattcaaggcttaaacggctggggggagacgcccggcaacgtcatggtagtgaacaaaaacggtaccgactactttgtaattcccggcctgacatttggaaatatcttcgtggcgccggagccgcaacggggctgggagtcggatattaaaaacctttaccattgtacggcggtggcgccgacccaccagtatctggcggcatattactatatgcaaactcgcaacccaaacgccatgattttcacgggccgtcatgcaacccatgaatggttgcccggcaaagaaattcttttatctgcaactgattacggaagcgttgtggtgggtgatgtaccgcagttgtatttttacattagtgatggcctgggtgaagcgatccaagctaaacgacgcggattcgcagtgattatctctcacctgacgtcgccaatgtcctatactcacttgtatgggaacttaacttttctcgcgaatctgatcaacgactaccagaaagcagggagcagttccgaaaaaaataaaattggcgaaaaaatccaagacctgatcattagcaatgactattccaccaatctgggcctcaataagagtcaaatcaaaagcatttcgattgatagcctgatagaaaaaattaatatctttttaaaaagcacccaggatactctgcatccgctgggccttcatgccctgggagaatactggagtgaagaggatattgcgagtacagtgtcggcaatgctctctcatgactttgtgttagagaacaaccagggcacacttaatttattcaccgagctgtcgaactattactattccaagtcctatggtgatttaactccatttgaacgcgagtttgtcttgaataaatcgtatgacatatgtaaggccttgatttattgggatgtgaactcggtaagcaatgtactgatcaatggcaatgttaaatttaacaattctaacttctacgcttgtctgaacttggcgaaaagctacatcaatctgatcaaccagagtattagcaatgaactaaatgccatgcttgatggtctgaacggccgttatattcctaccggcgaaggtggggaaattgtggtaaaaccaagtattctgccgaccggtaccaacattttccaagatcaatcatctgagctaccaacccaggatgcctggaactacgcgaaaattctcgcactgttaaccctggctgatttaaatgacaccacggaaaaaattatcatggggatctggtgtgtggaaaccgcacgtgatgacggtgctttggtttcaacggttctttacttgttgggcatgaaaccggtgtggaccaattcgtcaagcgccggctttgatgacgagggcaacccgactggcaaaaaagttggtgcaatgcctgaagtcatcaaactcaacgacctcacccgtccggagggttggaataaaaaacgcatcgacgtgaccatcattacgagcggcctcttcagagatctgtactcttctcagagcgttctgatggataacgccttccgggtcgcgttggcgcgttcatatctgaccctcattaacaacaaaacgctgatgaacggcaaatacggcaaggagttacgccaggcgctggactgcgtcatggaggggatcaactattaccgcgcgtctaatgaagctctgaaagacaactatgtggctcagcattggattaaagattgcctctattacttgagcatcggttataacgcatcttatgccggggaatgcgccattacccgtatcttcgccccccctaatggcgactacggtgcaggtatatccaagctggtgtccatgtcatggacttggaacaacacagacgaactggcgcagttttacttaggtcgaatgggcaatatgtactcgaaaaactactggggcgatacaaatccattagtattcctaaaagcactgtctaactcagacacgataatcaccagccgcaacacaaaccagtatggggtcatggataatgatgacttctttgattattggggtggtctgtcaatggcggtggaacatgttagcggtaaatcgccgaaaatgaatgttctgatgtatgcggataaggataacgcatatatttcttcgctggaagaagtcatgtatcgtgagattgcgtcacgttacgacaatcccgaatggattaaaggcatgatgaaagaaggctacagtggggctcgttacatgtccaacaaatttgttagcaacctactgggttggcaggtgacccgcccggactcagtgagcgacgacctgtggaaccgggtgtataacacctactataaagacaaatacaatctgggtgtgaaggattggctgatgagtggaaataacgcctattcccttatttcaatgagtggaaccatgttgagttcaattcataagggatattggaatgctgatgatgccaccatccgtgacattgcaaatacttgggcgcaggccacagttaaaaacggtgtggcctgttgtgattgcagctgtggtaacgtggcgatgatgcagtgggccgttcagtatgtaaacccggacatcctggcccaactgctgccgaaactgtatgatgcaacggaaaatcccgtcttccttaacaacacgcataacccaaataccaaaccggaaaacaataacgatccgcaggtcgaacctagcactccgaaccctacggatggttcgtcttctagttcaactattagcaataatgcaacttccacaaattcgaaccagcacagcctgagcaatagtcaaaatagccagggcaacgcggtttcggatgtgggagacagcagttccagcgacagcgggaccttcagctctgaaggtgctgacgtgaagaaagccattgaaattaacccgatcacccaacaatcggcgagtgaagtgggtatgagcctgctggcagttctgggcgtcatatgcttgatccttatagttggcgtcggttatttccgtgataatggcaaagagaaaaaaggcagcaatctggatgagctttttaatgaaaaattataa

SEQ ID NO: 72497 - DNA, 708 bp, synthetic construct
  source 1..708: mol_type = other DNA
atggacgtcatcaatatcctgtggcagttaggcattttgagcgctgtattgatatttggcattaaactgggccttgcgaccggactggcgaacatgtcgaaaaagtacctggcactcgtctccatagggtatggtggtggtgttttaatcctgaccgagatatcatcctttttcacagaacagattacgggtctgatttattcttataatttcgaatttttcttaatcatggccattatcatgattctagcggggattttcaccattcgcgagtacaaggtctttgaaaaaaacacggctgccgcgacttgtatggcagtggtggcaccttgtccgtgctgcttcggcagcatcattgtgagcatcatgcttgtagcgccggccgtcgggctgggtcttctgaatttaagtgtttatgttgcggcggcactggttttaactattgttctgacctactttgcaagcaactaccttattaaatttatcaacaaaccatatcccattgtgttgggcaactttatgctctttctgggcatttacttcctgctgtcagccctgtttttgccaaacatcacgtcgatgatccaaaatccgatggatgccatcgaaatcgcctctccggaatatctggtggctgtgctggtactcatgattattatgatgtttctgggcggattctacttcaaaaataatagttatttggattaa

SEQ ID NO: 72498 - DNA, 645 bp, synthetic construct
  source 1..645: mol_type = other DNA
atggtgaccaccatcccggggagcgaaatcctgacgtcgggtctcaacatgatttctcagagtttacaggtgccggtgattatcttcctggtaatttttgcatttttcgccgttgttaccctgggcagcctgattgcagaatatacttcacgtaaaaaggtctcgccggacctacttgagaaactgatctattccatatcccgagcagattctgtggaggagttgatgagtatcatcaaaaatgcgggaatctacgagaatcaaaaagtaattttagttaaaatattgcgtgccgatagtctccctaataaaacccgcgaaacacttgctcgcaagctgattgaatttgaagaaactgaactgggcaagacaattgaaaaaaccgatatcattacgcgtattggtccaaccttaggcctgatgggcacgctgatccccatgggtccgggccttgcggcgttaggtgccggcgacgtaaatactctggctaacgccattattgtggcgtttgacaccacggttgtcgggattggtgcgggggcggtgggatacttcgtcagcaaaatccgtcgccggtggtatgaagaagatctgtcaaacagcgatgccttggctgatgcactgctcgacaaactgaaccgctaa

SEQ ID NO: 72499 - DNA, 336 bp, synthetic construct
  source 1..336: mol_type = other DNA
atggcacggcgtaaatgcaaaaaacgctttagtgataacgaagaagatccgatgaccggcacctccaatcttgtcgacgccatgctggttattgcggtcggctttctgattttcgtggtaatttcttggaacatgcagagcatcgtgttctcagacacatcgcatgatcaaagccaaagcgttcaggattctcacatgaatgttacggaggtaagcgagggtcaggaactgaacgacactttggattccgtggagagttcggggcagggttacatggaaatgggtaaggtgtataaagatccatcaacgggaaaattaatcatggtcgaaggctaa

SEQ ID NO: 72500 - DNA, 2541 bp, synthetic construct
  source 1..2541: mol_type = other DNA
atgatagtgttgtccattagctctgtgtcggcggatgacctgcagaccaagtatgccggcgaagttagcggggatgttaatgtcgtgacggttaacccgtggaccacgagcggcagtctgacatacgacattccgtcagaagcgaaggacatccgaagtgccgatgtgtatgtcaacgtttacgggggcagcgcgaagaatacttacggagcaaacgcgaatgtaagtctaaaaactgcaaatggcgaaaaccaaatagcgaatgaatcgctgtggattgaagagggcagtagcgatggaacgatttatgcggtgaatgaccacatcaataaatgctattcggactatcagatgcactatgatatcaccaattctataaaagggcttaacggctcgtcaatcaccatcaaagtggatacgttcaaaatggagaataaatcgtttgatggtaaaattaaactgattgcgctgatcttagcctacgacgatggggacagcgatgtaattaactactgggtcgatgcaacccagaaatggaccaagactaacgttaccacaatattcaatacagaaaaactgagcaacattaatggtgcgaacctgatcaatgtggctctttcaagcggcgacggaagtttcaaagtgaatggtgaaatcatcggcgaccctattgtccatgattctggtaattattatcagtataactcatgggatatttcggataaaatgaaaaaaggtcaaaacacagaactgttatccatgaacgtggggagcggctcttatgcatctctgaaaaatgttttgtctgttttgaaggttaacccgattaaagcgaatgtgtccctcgccactgagtatgctgatacttgctatgccggtacgaacaatacgatctcaattaacgtgatctccgataagaaagagaaatattccatcgagctgctcgcggatgggaacgttgtaaacagtacggaaattgagctggacggtgaaaatcagacaattttattcctgaccgatcctacggttcgtgaagttgatgattccaccgtaaacggggcagataatgtgaaggtaaattacatggtcaatgtccgctttaatgatgtggttgtttcaagcgcaaacaaaacggtgccggttctgtacaacggcaatcttggtaaagatttgtcttatccgtccagcggctttgcctcctttgaaaatatttcatttactggggatattgtcatcgatattaaaaatgagagttcctacaaaagcggttcgacgggcacgatcgaaattttcaacgtgaacttaggtaaagactccacgattgtgaaaggctttatttatgtgccatacaactggtttaatggaaagaagtacgttgaaaacgaaaccatgtttaatgtaaccttcaacaatcagaccatctgtccggcaggattccaccgtgaccagagcaacctcggcaattatggcaaatacggctatggggtcgtggtttatgacgtaaccaacagcattaaaaacggtaacaacaccttcgtccttaataaaattaacccaacccccactatctatccgagtacgctgatttacatgtacaacaccaccggcagtgaagtaattaaaaacatttacatcattaatggtgcggatctcctgagcaacaccagtaacaatgctggacgggtcgtgcaggcaaactcaaatattaacatcaattctaaagatatcctggatgccaaattatacgtcttcgcttcgggcgcgcaaactaacgagggaaacataattatcaataacaatgtctttgaaaacgtttggaatggcaccagtaaaactacagacctgtttgctacagacataaccgacattgtcaaagattcaaacgatattcgttttgtggcgaccggttctacaattctggcgttgcagcaatttatcgtcaccacgaaagacgcccccatcaaaacgagcgtaaaaccaacaaaactgtccacgacgtatgactccggtaaatattttaatattaaagtgctggataatcataaaaaaagcgtaaaaggtctgaaacttaaactgaaagttttcacgggtaaacgctacgccaactattatgtcacgactggctcaaacggtgttgctagctttaaaaaagcgtctaaactcagcatcggcactcataaggtggaaattacaaccaataataaaaattacgtggttaagaagactatttcgtatatcaaagtatataaggctaaaacaatcgtgaaagcaccgaaaataaccgtaaagtttaaaaagtcgaagtattttaaagtgaatgtgaaaaacaaagcaaccaaaaaggcggttaaaaacatcgccgtgaaactaaaagtcttcaccggcaaaaagtacaagatctacaagattaaaaccaacaaatacggtaccgcctacttaaaaaccaagtacttgaaagtgggcagccataaagtcatcgtatattcgggtaactctaaatattcaatcggtgccaaaagtagcattaaggtgcgctggtaa

SEQ ID NO: 72501 - DNA, 1806 bp, synthetic construct
  source 1..1806: mol_type = other DNA
atgagtccacgtcccattaaacgacgcccgcctgaaaaagcggttgataataagaaagcgattatgaatatcttgagtattctgaagtgccacaaattcaaactggccctgacaatcgtgtgtgctgtgatctccacggcattcaccataatcgccccgctgattattggtaaagccaccacaaccatttttaacggaatcaatagcatttcgaaacacaccggcacaatggatttcaacaccctctttaaccttctgactattgtggtgatcttgtacatcattagctcattgttttcatacttgcagagcttcttcctggtggaagtgtctacaaaaatcagctatgaactgcgcgagcggctgatggataagattttaagcctgcccatggaaagcgtggatgaaaacaaacgtggcgatatcctatcacgtattactaacgatgtcgattctctccagcacggcattacccagtcgtttctgcaactgactaccgcagtaattacccttattggcgtatttgtcatgatgctcacgattaacatctggatgactctggcaaccgtcatcctcatcccgatcgcgtttttggtaattcgctctattacgaagttctctcaaagttatttcctgaaacaattagtctttaaaggttccctgaatggtcagatcgaggagacatttactggccatgatatcattcgtatattcaaccaagaagaaatctcaatgaataagtttgaaagtgacaatgaaaactggtttgatcaggaatggaaatcccaattctactccagcttaaacggcccgctgatgaactttatttccaacttcacctatgttataatcgcggttctgggcgccatctttgtgcttcaaaaagcgattgctgtgggtgatattctggcattttttcagtacacacagagcttcacccgcccgattcagcagattacgcgcgttatgaatcaaatacagacggcaatggccgcaagcgaacgtatctttgagttcttagattatgacgatgaggagaatccatccgacaaacagctgacggaaataaaagaggggattgcgtttgagaatgtgagtttcagctacacccctaacgagaagatcatcaaaaatatgacatttgacattaagaaaggtcagaaaatcgcgattgtgggggaaacgggagcggggaaaaccactattgttaaactgcttatgcgcttttatgaaattgactcaggttcaatcaaaatcgacggtgtcgacatcgaagaatatgacaaacattcacttagaagccatatcggcatggttttacaggactcctggctattttcggacaccattgaaagcaatatccgttacggaaacctggatgtcagtgatcatgaaattattaaagcttcgaaacaggtttatgtggataacttcgtccggaagctctctgacggttataaaaccatcctgaacgaagattcggataatatttcccatggtcagaaacagctgatcacgatagcccgtacgatcctgtcgtcgaaagaagtactgattttggatgaggcgacttctagcgttgatacgcgcacggaaaaattaattcagaaagcgatggataaattgatggagaataaaaccagttttattattgcccaccgtctgtcgaccattaagaatgctgataaaattattgtaattgaaaacggccgcatcatcgaaaagggcagtcatgaagagctgctgaggcttaaagggtattactataatacgttaaacacccaatctgaagacagcccgatataa

SEQ ID NO: 72502 - DNA, 1707 bp, synthetic construct
  source 1..1707: mol_type = other DNA
atgaaaaaattaatcgcacccctaaaaaacaaaatcggccagatcttcgcgatattcctgtttctggtggttcaggtttattgcgacttgaccctgccacaatacacctcagatattgtggacattgggattcagaacgccaacttccagtttattattgatactggtatgatgatgctgctgatggtggcgatatcggctcttgccactgtcggagttagctatttctcaagccgcgtgtcctcaggttatgctaaagatttacgtaaaatagtctacagcaaagttttaaaattcagcaatcatgaactaaacaagatctcacgttcgtcgctgattacacgcagcaccaatgacatcaaccagctccaaagtgtgctggcgatgatttttaccacaatcctgtttgcacctctccttggtgtgggaagtatcatcaaagcgtttgagctgggcaccaacttatcttggatcatttttgtaacgtttatcggggttgtaatcctgctggtgattgtgattgtccgtgtgcttccgtactttaaggtcatccaggaaattatggataagatcaatcgaacatcgcgcgaaattttaataggcatacctgttatcaaagcatttgtacgccaggattacgaagaagagaaattccgtaaaatcaatgaagagttctatgatgtcaacatctatgtgtttcgtaacatgctgataatgctgccactaatgacgctgcttatgaatttgatgattgtgctgatcctctatttcggcgcctatgatgcgatgcgcggttcgatcctcaccggcgacattatcgcgttcatccagtatagcacccaggttgtaacgtcatttctgatgattggtgcgtttttcattattctgccgcgcttgctggtttctggacggcgtgtgaatgaagtcttgacgacggatctgactatcactgacggtgaactgacagacatttcggaaaatccgacgattgagtttaagaacgtttcgtacaaatacccgaacagtgaaaaagaaactattaaagacattagtttttccttgaagcccagtaaaaccacggcaattattggtggcaccggcagcggcaaaagcaccatacttaacctgattccgcgtctgcaagatccgagctctggtgaaatcttgatcgatggtaaaaatattaaactcttcaaactgaaaggtcttcgcgataaaatcagttttactccgcaaaaggctattctgttccaaggggacattaaatcaaatatgttgacgggcaaaaacgatgccacagatgaagaaattgaaaacgcgcttaagatggcccaggtggactttgtctccaacctcaaagaggaagtaagccagggcgggtccaactattctggtggccagaagcagcgtctgtcaattgcccgcgcgattattggcaaacatgacttttacttgtttgatgattgcttcagcgcactggacatgaatacggagagattaatcaaaaacaatttaaagaatttaaaagatagctccattctgattgtatctcaacggatttccaccatcattgatgctgatgaaattctggtcattgataatggggagatcatcgataggggcacccactctgaactggttggaagttgtgagatctataccgaaatcgtgaatacccaaattgacagcatggaggccctgtcctaa

SEQ ID NO: 72503 - DNA, 645 bp, synthetic construct
  source 1..645: mol_type = other DNA
atgaaaaaactggcgatttttgattttgacggcaccatcttcaattcaatcacggatgtaatcatctgcttcaataaagccttatcaacgaatgattttccgaccctcacgtatgatgagtacgtggaaattctaggtggcaacatagatgagctggtgtcgagctgtttaaaagacaacaacacgcctcaaaatatggagctcgttaagaacacatataatactatttatggcaaaagcaacaaggagaacagtcttccgttcgatggaatgcacgacgttctgctgaaactgcaagaaaagggcatattgcttacaatcaactctaatcgcaacaatgattccattcgtaccttcgtggataaatactacagcgacatcgattttcaggctattgaaggtcataatccagtctatccctcgaaaccaagtccgtttggcattaacaaaatcttgaaccagctgaatgtcagcaagaaagaagcgctgtacattggggattcttccactgacattaaaaccacccagaatgcagaagtggactgcatcattgttaaatggggttacgggaatcagaacgattatggtaacgaatacgtactgaacgtcattgaaaaaccgtatgacattctgaattatttttaa

SEQ ID NO: 72504 - DNA, 351 bp, synthetic construct
  source 1..351: mol_type = other DNA
atgctgttcgtccagtatccaaaatgttcaacttgccgcaaagcgaaaaactggttagatgaacataatattgaatatgaatctaaacacatcgtagaagacaaccccacggcctcggaactgcgtgaatggtggaagatcagcgatttgcctttgaaacgctttttcaacaccagtggcatgaaataccgtgagctgaaacttaaagacaagcttccggaaatgtccgaagaggaacaactaaatctgctggcaacagatgggatgctcgttaaacggccgattgtggtgaccgataattttgtgttagttggttttaaggtcaaagagtgggaggaaaaactgctgtaa

SEQ ID NO: 72505 - DNA, 372 bp, synthetic construct
  source 1..372: mol_type = other DNA
atgaatgcaaatgcgcaattaatgaatttcccgatagataacgtcattcagctgatccgcaaaaaatgggttgtgcaaattatcaatgatttgttctttgggaaaacccgtttccatgaatttaaagaaaacaaaccaaaattgtccaaccgcgtgctgagcagttgccttaaagatatggaagataacggtttaattcagcgtattgtagataaatacgacaaaaagaatgtgcggtattacctgacagagaaaggccagtcgctgaacaaaatcatttatgaaatggccatcttttctgtcgactcagaaaactatacggacaagacgaaaactgagctcaagaccgtttttaaagagaagctgctgtaa

SEQ ID NO: 72506 - DNA, 2235 bp, synthetic construct
  source 1..2235: mol_type = other DNA
gtgaggaaacttagcaattccacgaaagtcttattactgatcttggtcacgttccttagcctgaccgtggtttcggctcatgacgcaaatgccacagagctgataagtgataattcaaacggtacgtgtattgtctcgtcagcggctgtggcggaggacaaccaaatcctcggtgaggttgacaaacctgacctggtggtaaatattacgtcggacaatattgatgattattttatccgggggcgactgaagtccatttacgcttacgctacactgtgcatctctgaggatatcgatgacttgggcatattaaccatcaagtcaaataacgtgaccattaacgggaataaccacacattaaaaaatacggtcttcagtatcgaagcaaatggcgtcaccctgaacaacatcattctcaatataacggagaagtttgaagacaacgaaaacagcgcaattctcatctggcgtgccaataacgtgaatatttataataccaatattaactacattccgccgcaagatacgaccgcatatggcatttattctgagggaacaaaacgtagcctgaatagtaatctgaaaattattaacaacactattaactttgagggtaacaacccgtcggagggtcgcgattatgcggtttgtctggaatactccccgaactgcatctttgagaacaacactgtgaacgcccgcctgccattgcgcaccatcgccttcgatctgaccaccgcctatctgtactcagaatttgccctggcaatggggatcagcaactgcaacaattcaacatttaaaggtaacattattaactgcgatgttaatgaaagacctgagtgcagctttccaaccttggacgccatattcatttgcgattccaaagactgtgaatttatcggtaaccagttgacgctcactgatttcaaatcctataaaaaccagccgaactacttgtacggtttagatatttaccgcgctgataacctacttgtggaagggaataatattcatgtggaaacaagtggaggcactttcgcggcaggcactgcttatcccatacaattaacagggccggcgagcggcatcatcattaaatataatgaaatctttagcaaatgtaatggtccgaatattggtatctactcacagaacttcaacggtgaaaattacattacgatcctgaacaaccatatcaatgttacgggactggccggcaatcatagttgggcgctggtcgcgggcattgaagcgcaagacgataacgatattattatgaataatattatcgaaattcacaacattcgcaagaccaccaaagaggataacctgtatggcatctcatattcacaggaaaccaaagggacccactcgtataaagtagtgaacaatacggtaatcagcgacggatactacctgtctcacatgctggatgcggacaacaccaccgtaactaataatacactggtccgtacgtataaatatgccgacaccaattatgatccattcaaacgtggggatgcgatcggtaaggacactgatgaaatcaaaaacaacgatttttccggaaatcgtgtgatcaccatctttgagtacgaaattgaacagcagggcgacgaaattgatgaaggggatgagtttaactatgaaccgccaacgaatacgggcaaccattccaatattattaacggcagcggcatttctccgctgaaaccaggcttccccggcggcaacccgttaattccgggcagcaattcgggaggcaccatcaacaccgggggtaatggtaatgtgggaggcttcaccaaccctgatgttgcagatggtgataaggggtatattggtcttccggacctgagcggcgatgatggtaaaagtctgtcccgtaagtttaatcagcgcgcgaatgttaaaaccgttaactcgtttaataatcagggtgacgcatcgaactcttacaacaatcttgtatccactgaaaactcgacgtctagtgaaagtcccagcgtgaatggtgtcaccgcgagcggcactatttctaaaagtgcctcttcagccggtgcggcgggcagcagcggtgcggcacaggaaagtctaaaagcctatgaaatcactaaaaacattgtagaaaatggtccttatgatatgatccggttcataggcttggctatcatatgtgaactgctccttattgttggctacaaacgcaaagaaacaaagaacctggattaa

SEQ ID NO: 72507 - DNA, 5568 bp, synthetic construct
  source 1..5568: mol_type = other DNA
atggaggcgataatcaaaatgaaaatcaaaaaatacatgctgattatttttattctgttgaccctggtgaacatcacgtgcatcgctgcgatggataacgatacgtttaccaccaatgttagtcagaatatttccaatattaatacggacgaacagataaatatcctgacgcaaaaaaccgaaaatatcaatgagatacaccaaaccaccgaaaacgatcaactgtcattctctatgcatccgccagacgataactattataacaataaaaagggcgaaatttatcacacccaattaattctgaccatcgaaaatttcaccacgttcagtacggcaaatacgaccatgaatgtccacctcgattgggacctgtacatgagcaaagactactatgatacatgtcagatccgaatctatgaaaacaacacaaaaatccacgcgtttaacgtatccgaccaaaataatgctgaatatgaacacaatgcccatcaaacactagatgtaacatttccatacacaatcaaagatcgcactgaattgaaagccgtgattttacaaattgaatcaaataccttaagttttgaagaaattaaaaaaattaacctgactaatctgaacaacaacaatattatcgtcaataatacgtattttagcaacgaaaactggaccaaccagatcaaatacctgaaaaaagcgataaatgatgcgccaacaaactctatcatttacctgaacaatatggagattctgaacgatgaggacatcacgatcactatcgacaagaatatcaccattatcgcaaacaacaccattatcaacggcttggatcatggcaccatctttacaattaactcccaggcgacactgaccctaattaacctcacgttcaccaacatctccactaattacatcatgcagaataacggtaacctgaaaattgtgaacaataacttcaacaacaacattggcagactgatatcgaataacggcaatttaactatcgaagacagtattattgaaaatacgacaaaatactatgccctgttccttaacaacatcaaaacgacctcggaaaacggactgatctacaataaaaaaacactaaacattaaaaatactacttttaataacattaatctgaatccgttaacgaacaataataaaaaactggactggaatgcaatcatcgtgaactatgggaaagccattgtaactgactctaaatttacaaacatcaattatcgtacgatttacaataacgcgatacttgaaattaaaaacacgataatggaaaacatcaccagcacagacattttttctcacacgatccagtacacccggcaattaaacaatacgggaaaatacttctcatatatacgggcaacctcatctcttgaaggaggcgcaatctacaacatcaaacactccacgattaccaacaccacgtttcagaaaatcaccggcaaatcgggtgcgatatacaataaaaaaaccctgaacatcacaaacaccacattccagtcaattaacaatggagccatttacaacaacgaagatttaacaataagcaactccaccttccagaccataagcggcgaagccatttatactaaaaatgcgaacattaccaattcgcgcttccaaaccatcagtggaaaagcactgtacaatatcggcaccctaaacatcaacaatatattaatcaacaaatccaccggaatacacaacgatggaatattaaccatcaacaatacgatcattaataaatgtggaggcatttataataataaccaactgaatgtcaataataccctgtttaaccgctgcagcggggttggtgcagcagtctacaataataatattgccaacattgaaaactgcgaaattatcgaaaaccatggcgatgcggataccaagtggagatatgtagagcagcctaatgggcaagtcttttcatacattgttgaagtatattcgggcgtaatttataattataaaaatgctaaaatcaacattaccaaatcaattattaagaacaatgacatttcagaagaaagcaatggtaactgggatacctattatggaatcattaaaaatgatggggaaatgaagatcacgggctgtattctggacgggaacaaaccacgtgagtggattgctttttggggtggtgatggtagcatcaacatttacaacactggcaagctgacctataaatacaattacctgctcaacacacagtattataccggcaacattcataaacccagctcgtttttatttaatacggggaatggtgcgtgcgacgtcaactacaatttttattgtctgaaaccgtccagcatttttgcgaatgcaaattataattattattttgttccgtattttggggagtatattccgattaagcttaacgaaacccgcaacatcacgctgtcactgggcctgaccaacggggctgactatatgaccttcaatgattgggacaaattactgacgccaggactgaacgcaaccattacaacgattgatgaaaacggtgaatacaaaaacatcacaacgctgctaaaagacaaatacacatttaacttcaactacacccatgtgaaaggcgagtacatcatctacagcaatatcttgaactttaagagtagtgcgttggttgatgtgggaaaggagtttgcggaaatggaagtaaactacaataacatcacctataaagagggcaacatcaccttccacattaaaattaagggcaatctcaccacacaaccaaccggaaacattactctgcgctacaacaatgaaaaaatcatcttgaacctcaccgattccgagtgcagcttcaccattcctgaaatcctgaaaccggacaactatactatgcgtattgattatgatggcgatgatgaatactttaaaatactgaaccagtattttatttttgctgtgtataaaataccgaccaatattacggtagtggctcccgaggttaaatatggtcagaccggtctgatcaccatcaccatcacaccgggtgaggcgaaattaaaaggcaaactctacattaacggcatctacacgaaaaatgctgacacccagggccatcgcattttgcgtattaatcgtaacccgggggtgtataatatttctgtggtttttgaaagtgatgagtactatatgggtggtgtggccaacactacttttattgtaagcaaatggaagaccaatctgaccctgaccggcaaggatattaatgctggtgaggatgcgattgtcaatattacgattgatcctggtgatgttcgaggtgatgcgatcttgattattaatggtgtgaaccagacgatatttataaacaatacggtcacccctattactatttcgaacctgcagaacggaacatatcatgttagcgtgtattacccgggtgataaaaaatatgctccctctaacgccagcactactttcactgtgtcgatgaaaacgaccaaacttaccgtgaacatcactaataatgacgacctgaccggcaacatccacgttaacacggattataacgattgtacgggtgaagtgggcgtgtatattaataatgataatgttctgattatgaatttgacgaacgggtcttgtaacttcccggtgaaattcaaacgcggcaacaattacatctacatccattatattggggacaaatattattcgtatgcctcttggaacacgacgcgctttattgagggcaaggcgattatcaacacaaactacaaccataccatcgatgagcaggaactcggttactacattattaaaatcttcgatagtgacaataacccttacgaatatacgaacttcacggccctgttccagaataaagaaatccacctgactactgatgagaatggtgttgcaaaactgcctatccaatgccgcgccggcacctacaacataacggtcaaatacaaaaatacggttaaaaagagtactgttgtggtgaatgcgacccgtatggatattgacattaaggacattcttgcgggcgaaaacgaaacaatcacgatccgcctgccatacaatgcaactggcaacattacgtttaaagtagataatacggtaattagtaaacgtttgagtaacggtctggcgattgtcaatatttctgcgttgacgttaggcgaacataaattaaccgtattctatagcggcgacaataattatactgatcagaaaatcgaaaaaattttcagcatcaaacattccctctcccagatcattgcatcgtcatccggtgtcacatacggcgaggatgttattgtcacttcaaaggttacatcaggcgcaagcgggagtgtgacctttgtccttaaccatgaaaccatcacggtgaatcttactgattctcaggccaatgctgcatttactaatgttccggcagggaattacgttatcactacccgttataatggtgataagacgtataaagggtctgtttgcgacgtgaaaatcaacgttaaaaaagcggtacccaatataatggttaataccagcccgctgctgctcaatgaaaatatcaggattgatgcgttgctcaacaatgacgccatgggtaatgtcaccttccatattcagggtcagtattcaccgcgtaaccgcacagtgaataacggcgtcagtagctggctcatctcgccgttaagtaaaggttcgtataacctgattgtaacctactgtggtgaccggaactatgaatccattaccacttcgaaaattcttgtcctgaaccagaacgagacggtcttgaacgttaatattggggatgtaaacgcggatgatgatctgatggtctatgcaacgcttaacagcgacaacaagtacaaaatcacaggcaacattacgcttgagattaacgataagtactataaggtggtggtgagcgatggggtgggcctgcgtaatcttggtgagtttaaagccggccgttacacttatactgccacgtacaccggttcagatttgttcagcatgtcgaccattaaaggttcctttaacgtacggtgcaatagctataagataaccggcaataaaaatattgttcagtattatggcacatacaagtcttataaagtgcgcctgttaaacaacaatgtcccggtgaaaaaagccattattaccgttaagatcaataagaaaaacattaaagtgaaaactgacaataaaggttatgcgaccctgaaacttaaattgaaggccggtaagtatagcattactgcttcttacaaaaaagtcactgtgaaaaataaggtcacggtgaagccgatcctgatcacaaagaacatggtggttaagaagggcaaaaccgtcacctatacggccaaactgctcaacaaatatggtaaaaaggtgaaaaataaaaaggtgatcttcaaggtgaaaggtaagaaatatattgttaaaacgaataagaaggggattgccaaaattaaaattaaaaagctgaaagtgggcaaatataaaatccagagcatctatgggaaagttaaaaacaccaacaccattaaaatcaaataa

SEQ ID NO: 72508 - DNA, 2589 bp, synthetic construct
  source 1..2589: mol_type = other DNA
atgaaatacaaaaacattttattcttttccatcttcatcctgtttattgtaggcatcagttgtgtctctgcccagaacatagatgagattggtaattcatcatctgatgacacgattagtctagatgatgacatcagcactatcaatattgttgacaacgagattagcacaaacgtggatggcgaagtgatttgtgatggtaaatcaacgcgcgatacatattcttgggcggattttaaatcagaagtcgaaaatgcgaatatcaacacaatagaactgaataaaggcaatatcgctccatccagcgatagctccaaccagatcagtatcaaccatgacatcaatatcattggcgggtacggttattatatcggtggggacagttggagcagctcgaccaaatacaactatattccgattattacctcgggatctaatctgaacgtcaaatttgaaaatgtgaccttccagtacctgtcggacaatgttttcatgaaattgatggggaacggaaattacacatttaaaaactgtgtcttcagcaatattaatgcaacgggctcacatcagtcggtaatctggctgaattatggacacgcgctgatcgaaaactgctcgttcatcaaatgcaactgtagcttcggtgcggtaactaattattattcctcctggggtactgcggtgaacaacgctcggatgacagtgcgcgattctacctttaaggacaactatgcgacgacggagccgggcgcaattaataattgcggccaactggtggtttacgactcaacctttgagaacaatgaagccgtttggtgggcgggcgcaatccacacacacagcaatgccaataccaccattattcgttcgaagtttaaaaacaactatgcaggatggaatggtggtgcactgtacacctacagctatctgacggtcatcaactcaacgttcaccgccaatacggcaaaaaccaacacgggtggaggtgctattggagcgagcagctatatgagcaccccgaaagttgttattaaaaactcggaatttaaatacaacacggcgctcaccggtaatggtggggcaattgtgataagctcaggaaccttgaatgtggaaagttcagaatttacaaacaacaccgcacttgaactgaatggtggggcaatttccagcagcagctgtacggcagcgatctctaactgcaaattcatcaacaacactctgaacaagaccgccggcaaaggcggtgcggtgtatgggacgggaaaaggccgtctgacagttgacaaatgtgaatttattaacaatgcggctaaagacaacaactcgggccatgccctggcctattattatactggaaacagcaatactgccgcgtacctgacctataccaacaacatattccgtggcaaggataatgggactgggtcggtttttgtcgctaatgataaagtaaacatcgtacagtacaataatagtattgatgatattactaattacattgaaccggagaacaataccaacggcacgagctcgggcaatatcacaatcccgatcggcacggatatactttcctctagttgggatgttatcttgggtgacaatttaaatggtacctctgtgattgccggtaactatattctcattccggcaagccacgatttgtactgctacaattacatcacccaagatctggtgtggaatttcacgaccgaatttggttatttccatgagttattggtggatggcaacattgtttatgcacctgcctcatgggacgcgctgtatatctttaacctgaccaatggtgaatctctgacgtattcaaacatttatcagggctcgagcctctataaaccagtaatttataataatactctttacgtcagtagtgaatacgggtatggcattaactccaataattggatttccatgattaagcatgactctgactactactactatggcagtattctggagctaaataatgtatcttatggcacgccggcaatcttgtcccaaccatatatacacggcaacacgctgtatgtgaacaccattcaggggctgatcgcctataatttagtggatggcactagccataacgttagtggcactgtcggtaaccctattattgacgccaatggcaatatctgtattctctcaaacaacggggctgcgatctcattacttaattccaatttagaggtggtggcgtcgaccaccctcgacggtacctgcaacaagctgattagtgatgcgaatggtaacatttacacggttgataacaatggctacatctattatgctacatacaccagttcctccatcacctgcagtaagactaaattcaacattaaccccgtaagctcggcgatggcctgctacgatggtaaactgtacatcggcgacaacaacggcatactttgggcctttaacacaagcaagctggatgaacccgtccttaacaatgctgtgtatcgcgtttttgatgctggttctgcgattgtcggcaacattgcggtggataacgatggcaccatatacattggtaccgataatgggcatttttatgccatcgaatattaa

SEQ ID NO: 72509 - DNA, 4578 bp, synthetic construct
  source 1..4578: mol_type = other DNA
atgcgactgaataaatcggttttattcgtatttatgattatttttctcttgagtctgaacttcatcgttgcaaaagatattaacgaaactaacctgaatgcagattcgtttgaaatagattatgacgactcaatttctagctcctatgataccaatctgcagaaactgaaccagaatgatatcgaaaaaaccgatgaatccctggaaaaatcagacaattcctcaaacaggctcctgaacgaagacaataataacgggctgttgggtgatggcgatggcctgaagcatctttatgtcgcccccaacgcaacggggagcggtctggatgaaaatgacccgggagatttcataaccatactgaacaatacggaagataacactgtgatccacatgctggaaggcacctacctactgtccaacattactccaatttaccaagatggttactatcactttatttcaatcaaatcaaagaacaacatcagtattgtgggagagaatccagataaagtaaaaataatttccaatctgacaccgaaaaaacggacttcgtttatcttttcgttgcataacactaataattttaaatttgaaaatattacattcagtgctatcaagaaagatcccaaaaaagaaaagacgaagtcttacttcctgttgaataagaataattatattttcgaaaactgtaaatttatagacgcctattccaaatttgcgatcatcgaactggatgagggcactcatctaactattaataattgttatttcacatccacggatggacacgtgggcagagaaatttctccacgcctgttttgttcagtccttttaaacaataccatttttaaaaactgctgccgatattctgattataaaatcggtgttatgggcaactacagcattttcaattctcagtttctagaatatgacgacaacccgctcttgtatttccagccatattgcaatttgattttcgagaataattacgtggaccacccgtacaattttgtttttttccagccctctgatcattacgagggctcaaaccggatgttctgttcacacacgaccctgacgtttctgaatggcgaggacagcgtgaatgtcaattgcggcgacgttattaatcttaacgcttcgcttgtagatgatctgggtaatattcttagtctgtataaactgaagttcaacctctttgaaaacgacctgacctatactaatggggtgtatcagaaagaagtgaccgttcctgatgtgccgggcgaatattacattgacgttagtgatgaaatgttcactaaatatctgggcaattgtaccgtgaaagctccgattttcattgttaaggaagcgccggaatttctatttgacgataagaacagcagcacttatggggaggatgtcattatcaacgtggattccctggacattccggatggaaagctgaccttccgtttcaacaacagtgaaataatcaaaaacatcaccgactaccgctgcagcattaatttgggcgtactgcctgcaggcgaatacgccattactgcgtattacgcaggcgatgaagtctatggcgctaaatcgtacacaaaaacctttaacgtaacgaaggcaaaatccaccatcagcctgacgaaaggccatgtggacgccatcaaagataacggtgatgtgggtttctacttcagcaccaccgaaaacggcaacgaaaacaccatcgggattatcttaccggataatgccacgggtaaattaacatttaaattggacaccgatacgtatagtatcgacattaccaaacgtaaagtactgctcggcaatctggactacggctcgtacatcattgcggtgaagtatgatggggacaataacttcaatgaaagtgaggagtgtacgtttaccttggttaactcgaagccaagcgttgatctgaccttaaattacagtaacatcaactacacgaatccgtttaatgtgaacgtaacgctgaaccaggatgtggtaaaagataccatcatctttgaagttcgcgatctggaggacaacctgattaactcgaccactggaattattagcaacaaatcggcgaatgcgaccttcaccggtctcaatgccggtgaatacaatatcattgcaatttatgaaggtgatgaaacgtattgcaactccattgcaagtcaacgttttaatgtcaacaaaattgatttggaatactttaccctcaaagcggacaaaacaatcagcattcacgacaatattaaagtggaggcgttaatccccgtcaacgtcggcggcagcataacgttccgcatcaatggtcaggacatgaccgtggagatctttaacaatcgtgctgaggctattttcgataacccgggtttagggaactacaccgtgtacgcgacgtttaatggcgatgataactacaatcctcatgaggaaaacattaatatcactgtcattaaagccgatgctaacctcagcgtgtctgcggaaaatgttgactggggggaagaattagttgttgtggtgaaaaccgacacccgtttcaccggcaatcttagtgtgaaaatagatggggtggagaaaatcgttgaaatcaccgaaggtcaaggtaatgtttcgttttctaatctgaaagcgggcaaatataatgttgcggtggaatttaatgagagcgaatttttcacgtcctcccagaaagacatcaacgtaacggtcaataaaatagattcagccctgacgctggataatgatgagatggtctttgactatggcggatctgcgtcagtgacctttggttacgatggggcagtgaatgttaccgcggaagtcgtgaaccatccggaggcggtaattaagattaacgaggattgcattgtggtgtcggatctggacgcggggcaatataccttgaaagtcacgactgtgccagatgagaaccacacgggcgtagataaagaatttgaagtgacggtcaacaaaatagattccgcactgacgctggataacgatgagatggtctttgattatggtggatctgcgagtgttacattcgattatgacggcgcagttaacgttacagcggaagtagttaaccatcctgaggctgtaattaagattaatgaggactgcatcgtcgtgtctgatttggatgcggggcaatataccctgaaagtcactactgttccggatgaaaaccacaattcggtggataaaacaatcagcattacagtaaacaaggtaaacgcaaacatcaatattgaggatattgtgttagactacggttctcatgacattacagtatttacaggtgaaggcattgagtcggtcaacgcgaacatcttaaatcagagttatgcaaatgtcattgtgtcaggcaataacattagcatctacaatctcaacgtcggcgaatatgtgttacagctgattgttaacccagatgaaaaccacaacagcgtgagtaaaaacgtgaaggtaaccgttaataaaatcgattcggtcattgacatccgtaatgaagtggtcttcacatacggtgatgcggggtattgtgatgtgtatagcgagggtgctgttgacttcacggtaaaagtaatcaatcatccggaagcagttatcaacatcaacaagaacggtattgtcaaggtgtcagctctgaacgccggaacctacattatggaagtcaccactaatccggacactaaccataatagcgtgaccggtcgcgttaatgtcacggtaaacaaggctgattctaaaatcattatcccggatatcatctttgattatggtaacagcggtagtgtgaacattcttgtttacaatgcaactggaatcggcaatgtcaatgttgtgggtcatcctgaagccatcacaaccattaatggcaccaaaatcagcgtcggtggcttgaacgcgggaagctatattttaacggctaccgcccttacaggtgacaactataaccctgtaaacgtcagcgccaacgttatcgttaataaactgaccaccattattggggtgaaaaaggtgaatggggtgtacggtagctccggtaagcttattgtgacgctgaaagacagcaatggcaaccttctgacggggaagttgctgcgtgttaaagtaggcagtatttccaagactctcacgaccaaccgccatggtcaagtctctgtgaatgtggcctatctgattccgaaaagctataacgcaaagatcagctttgcgggtgacaatgatttagtcgaatcatcaaacacggcgaaagtggtgatcaagaaggccacgccgaaactgacagccaaaacgctcaaaaccaaagtgaaaacaaaaaacaaaaagcttaaaataactttaaaaaacaaaaaaggcaaagcgcttaaaaataccaaagttacactgaaactgaaaggcaaaacgtataaagccaaaaccaataaaaaaggtattgccacatttaaaataaccaaactgaacaaacgcggaacctttaaaggaaccgttaaatttgccggcaacaaatacttcaaagccatcaacaaaaaagtaaaggttatcgttaaaaagtaa

SEQ ID NO: 72510 - DNA, 486 bp, synthetic construct
  source 1..486: mol_type = other DNA
atggaacgtgaaaacctgtcagggatttttagtattgtactcggtttgatcttcatcctcttcccgatgtttagctccaatctgatcagtataattgtgggtttaagtttactattctttggtctgtcagcggcattcatgggttttaccatgcgccggaacggaatcccatactcgctgatatccatcatcattggcatcgttgccgttattctgggctttggctttatcttctatctggacgcacttagctttttggttggattccaactgtatattgtcggcttcattatgattgtctttgggatcacgggcctgatcagcaaactgaatcgcatctcttcgtttacttccatacttgtgttactgatggggattgtaagcattgcgcttgccatttttgctctcaaccagccgatttacattgcgattatcattggtatcgtgctgattattgagggcgtgtctttcctgttgaatgattaa

SEQ ID NO: 72511 - DNA, 981 bp, synthetic construct
  source 1..981: mol_type = other DNA
atgatcattagagcaccgtcacgcatacacatgtccctgatcgatttaaatgggtcgtatcgtcgcgtcgatggcggtattggattagccctagccgatccccagttcgttctggaagtgaaacagattgaaaatggcatagagctcgaatttgcagataacgtaaccgacgaggaagcgatcgaggaatgccgggaaaaaatcccggatgcagcccgaaaaactatcgaacactttaacattgactcgggttttaaatttattgttcatgaaacatacccgccacactccggctttggaagcgggacccagattgctatcagcacagcccatctgatcaccgaaaccatggacattgaagtcgaaagccgtgtacttagcagtgttgtgggccgcggaggtacctccggtattggcacctatacgcatgatttgggtggctttatcctggacggcgggcacagtaaggaagaaaaaccattgtttcttcctagcggcgcgtctcaagcaaaaccggctacgttaattgcccgttacgattttccggaggaatggaacatcctgattgcgattccggaaattgaaaagcatatggagggggacgatgaagtggatgttttccagacgtactgtcctatcccaaaggaggaggtggagcaagtgtcgcatctgatcctgatgaatctcgttccgttcatgctggaaaaggatatcaaaaattttggctgggcggtcagtgaacttcagaaagtgggctttaacaaactggagcactctctggatgctagctatttgcccacgatgcaggcgattgaaaaagccggggcgtatggtgtgggtatatcttcattcggcccggttctgtatacgttcttcgacgaatcaaacgaggacatcgtggagaaaacaaaagaaattattggtgaaaatggtaccgtcttcgtaactaaagcgcaaaaccatggtttcactattgaataa

SEQ ID NO: 72512 - DNA, 993 bp, synthetic construct
  source 1..993: mol_type = other DNA
atggagaataatcgcacggtgttcattgattacctgaaagtgataggtcttttatgtattatcctggcccatatttcaacggatgaaagtatcttgcagattcgaaactttgacgttccactgatggtgatcattagcgggtttctggcggtaaactcttttaaacgcaaccttaaacaaaaccgcagcttcctgcgttattactggaaaagaattagccgtctgttgtttccgacctggacctttctcattatattttttattgtaatggcttttctgccgatcaacggcatctatcattatgatgccgatttcatcctcaacagtttcttattgctggatggtcttccatatgtttggatcatccgtatctttctgatttgcacgttcatcacgcctgtaatctactatttcgacaagattgaaaatgactatattcaatttctgattctgctcttaatctatatactgtacgaattatccatcttcctaaaaataaatgaaacaaacatcatttttgagtttatacttgcttacgttatcccttacggcatcatctatctgcttggtatgatttcgaccaaaacaagtccgaaaatggatcgtaatgtctccattatctgtctgattgcatttattattcaggcggtcattatttatttgaatactggcatcttccagccgacccagattatgaaatacccgcccactgtgtattacatatcctacgcgctgttcgtgagcttcatgctactgagcatttttaaacgcattgacttgaagcccaaccgggttatcgagttttgctctaaatcgtcattatggatctatctctggcacattctgttcctgaccgtgatcccgctgatttttggggaactgaattggattttatcgtatatcattattgtcgtttgcgcggtcggcgccacttatattcagaataagattctggatttgaccaacgcagatatcaaagtgctgcgcggataa

SEQ ID NO: 72513 - DNA, 711 bp, synthetic construct
  source 1..711: mol_type = other DNA
atggatatgatcagcgttctctggcaagttggaatctttgcttccgtccttgtgttcggcataaagatagggctggcaagtggcctggctaacttgccgaaaaaattatttgcagtaatttgcatgtcttatggcggtggcgtgattctgattagctatattgcttcgtttttcgcggagcagctggtgcaggccatctacagctataacaccatcttttacattattatggcgtcgatcatgattatcgccggtttatttacaatacgcgaatggaaaatccatgataaaaatacaagcacggcgacgtctttagcgattattgcaccttgcccgtgttgttttggtagcattatcgcaagtgttctgattgtggccccaactatcggaatcagttccctgaacctaagttggtatgcgtcagcagccctggtcgcggtcatggtggtgacctacttcgcctccaataccattattcgttttaccaataagccgtatccgattgttcttggtaatttcatgctgttgctcggtgcctacttcttgctgtcggcgattgtaatcccaaacatcgcgtcatcactgactaaaaatacgagcccgattacgatcgcttctccccagaacatcctcatggtaatcctgacctttgttattctgcttgtgggcggcatggtcttaaataaaaaagggcggaacattctggactaa

SEQ ID NO: 72514 - DNA, 645 bp, synthetic construct
  source 1..645: mol_type = other DNA
atggtgctgaacattcccggtggcgaatttctgacgggctctctggatgtaatctcacaaagcttaaccataccggtactggttattctacttgtcatcgttattatttcgatcatcacactgggcggcattatcgcggagtataccagtcgcaaaaaagttccgataggcacaattcgtgatttgatctacgatattaatctttcggaatcgattgatggactcaaaaatataattagtaaagcgaaaatcccaaatagccagaaaaaggtgttaatcgagatcgcctcagcagagtccttaggtgtgaacagtcgcgaggctctggcgcgtaaactgtttgaatttgaagaagaaaagactatggaaaccctgaagaaaaccgatatcattacgcgtattggaccgaccctgggtttaatggggacgctgattccgatgggtcctggcctggcggccctcggcgcaggggacattaacactcttgccaattccctgaccgtggcattcaacactacgattgtcggtattggcagcggggctctgtgctatttcatcggtaaaatccgctcttcctggtatgatcggtacctcagcgatttggacgcgctgattgacagcgtcttggattacatggacaaataa

SEQ ID NO: 72515 - DNA, 324 bp, synthetic construct
  source 1..324: mol_type = other DNA
atggtccgcaaaagtaaccggcgccgttcaaaacgtgtggaagaagacccgatggcaggtacctcgaacttggtagatgccatgttagttattgcggttgggtttcttgttttcgtgatcataagctggaatatgcaggctatgattgaccctgatcagagcatccaggaaaaaatgcaacagcaaaaaacaaccgaagtggatcagggccagcagctgaatgagactccggacacctccaacagttctggacaaggctatacggagatgggtaaggtctacaaagatccagcgacgggtaagctgattatggtggaaggctaa

SEQ ID NO: 72516 - DNA, 816 bp, synthetic construct
  source 1..816: mol_type = other DNA
atgaaaaataccaaaaagattgttattgtggcaattatcattgtgattgttgccggtattgcactgctttcaggtgttggcagctccgaaaacatagatattgtagggtctacatcggtgcaacctgtggctgagaaactagtcgaaacttataagcagacccatccggacgctaatatcaacgttcagggaggtggttctagcgtaggcattaaaagtgcgcaagatggtagtgcggatattggcaccagctccaaggagctgaaagaggacgagaaacaaggactgaccgaatataacatcggccaggacggtattgtgatagcggttaataacgaaaacacggtcaatgatttatcaaaagaccagctgaaagatatcttcagcggaaaaatcaccaattggaaccaagttggcggccaggatggtgaaatcaacatcatcactcgtgaggagggttctgggacgctggatgcctttgaaaatattgtaatgggcaaagatactaagatccggagtgacgcagtggtgcaaagttcgacagaagcggtgaaacagtcggtaaaacaggatagcaacgcgataggctttgtgtcatttgctcacatgtcaaacgacgtcaaggccttatctattgggggggtcagccccagcaccgatacgattgccgatggcagctacgaattgcagcgcccgttcttgttcctggtgaaaggcacgccatccggcgatctgaaagaatttatcgactgggtcaacagttcggaaggtcagaaagttctcaatgaagaaaaaatcattaaatccaccaattaa

SEQ ID NO: 72517 - DNA, 864 bp, synthetic construct
  source 1..864: mol_type = other DNA
atgtcagaacagtttattgagaaaggtctcctgatcaccgcaatgttcagcatctttatcatattgattatcttaggatttattatcattgaaggcctgccggcttttcaggattacggtttcattcagttcctgttcggccagacctggtcgcctaacgaagggcaatatggcctattttcaatgattattggcagcatttgtgtgacgatctttgcgctgattatcgccgttccgctgagcattctttgctctatatttatggcagaggttgcaaatgaaaacattaaaaattttttaaaaccggttattcagactctgtccggtatcccgagtgttgtgtatggcttcttcgggcttatcgttcttgtgccaatcgtacggttctacttcggcggtaccgggtttagtatcttcaccgcgggcattatcctgtcggtgatgattctccccacgatcatttccgtgagctttgactctctgtgcgctgtaccgaatgagtacaaggaagcatcgcttggtttaggtgcgacaaactggcaaaccatcaataaggtcatcttcccggccagcttgccaggtattgtgacggccattattctggggatgggtcgcgcgatcggcgaaaccctggcggtcattatggtggccggtaacgtgcccggcatccctaattcaatattttctccggtccgcacgctgacttccaacattgctttggaaatgagttatgcgacaggactgcatcacaatgcattatttgccactgccaccatactgtttgtaatcattctgttgctgctggtcattgcgaactatattcaacgtaaatataaaatggatgttggaggcggcacgctctaa

SEQ ID NO: 72518 - DNA, 852 bp, synthetic construct
  source 1..852: mol_type = other DNA
atgaaattcaactatatctctccgaagcgaagccagaaaataatgaacggaatcttcatcttttcaggcgttcttaccctgtcgatcctgattattattctgggttacattttgattaatgctgtgcccatattaagttttgatttcatcttcggtcaggtgattgacgcaggtaaatctgggggcatttccccaatgattgtatccagtctgtatgtgacattcatttcaattctgatcgctactccgctgggtgtaggggcggctatttacgtcacggaatacagcaaaaacggcctgctgatccgcctgatccgttttggcgcggaaactctcgcgtcgattcctagcattgtcttcggactgttcggactgaccttttttgtcgtctttctgaatctcggctggtccatcctttcaggtgggcttgtgcttgccatcatggcaattcccaccatctttcaggttacagaagtttcgttaagcagcgttccgagtagctataaagaaggcagttttggtctaggcgccacgaaatggcaaaccatttgccacgtgattctgccggcggccattccaggtatcgtgacgggcattatcttgggcttaactcgttctataagcgaggcagcggcggtgatgtatgccgtcggttcggccacgaccataccaatctccatgtttgatccgggccgcccgctcccgttgcatctgtatgtgctggccaccgagggggtttctttgcctaatgcatacggcacggcagcggttctggtgattattgtattaatcattaccttctttacaaactacatcgtaaaccggtatcaaaagaaaatcatgggtaattaa

SEQ ID NO: 72519 - DNA, 753 bp, synthetic construct
  source 1..753: mol_type = other DNA
atggatcgtatcatcgtgaaggatttgaatacctattttggtaactcgcacattctgcgtaacattaacgtcacgtttccggaaaataacgtcaccgcattgattggaccgtcgggttgtggcaaatcaactttcctgcgttccattaaccgcatgaacgatctgatttccacctttcatcacgatggttatatttatatcgacaacaaagacatttacgatagcgatgtggatgtggtggagttacgcaaaaaagtagggatggtgttccaaaaacccaatccttttccaaagagcatttttgaaaatgttgcgtacggcctgcgaatccatggttatgatgatgaagacttcataaaagagcgtgtaatcgagtctctgaaggcatcggccatctgggacgaagttaaagacaaacttgatcagagcgccatggggctgtctggcggtcagcaacagagactctgcatcgctcggacgattgctaataacccagaagttattctaatggacgagccgtgcagtgcgctggacccgatctccactctcaaaatcgaagatttaatgcatgagcttaaaaaggattacagcattatcattgtgacacacaatatgcagcaagcgtcacgcgtcagtgattacacgagctttttcctgaatggcgaaatcattgaaagtggaaaaaccgaacagatatttgttaatccgaaagaagagaaaacagaagaatatattaccggccgcttcggctaa

SEQ ID NO: 72520 - DNA, 1299 bp, synthetic construct
  source 1..1299: mol_type = other DNA
atgagccgcaacgcgtatattaacaaggatattccgctttctaagattcatgaagttaaagcggatttaaagcactatatcgaagtttatgagaaaattacattcattgaagatatttatgctggtgaaacagtcaaatatgctatcgaaaagcgtgggaaaacgattccgacgggccatacgtggctgaaatcttggaatgaggagggttttgacggactgctccgtaaagaaggttctggacggaaaaccaaactgactgagaaccagttcaaacaactaaaagaaaacatcatcaaaaaacagctgaccagcgtgcgtgaagtgaaacatgaaatcttcgaagagtttagcgtcagttatagcgatcgtcaaattcgacgcattatgaaaaaactcggctttggctatggtaaaccttatgtcatcccggccgaagccccaaaaaacgcctcagagcagctgaaaaaaaacacggaaaaaattgatttgaaaaaagacattttaattttcactgatcagacggcagttcagaacaaagacaataccaacagaatctactacgaactggggactaaaaatcgccagaccaaaatcactacacgcataaaactgaacgcgaatggctatcaagcggtaaacggcaattcgttgattctatttcagcaaaatacccacacctttgaggagattaaatcactgatcaatcttcgcattgttaattgcattaataaagagctgaaatcagagcttaaaaatattttgaccgatgatgagctcgacgaaaacaagatttacaacaaactgaaggatgaaaacacgctggaaaccctgaaaaatgaatttaatgagtttatctcgaacagtaacagctcggaaaagcagtttttggtgaaaatcaagaataaggccaataagctgaaccctaaaaaacacacaaacatagaaaatattcagaaagaaattatcattaaactgctcaataaagacaatattatcaataacttacaaaatgaacgcaagcttgtggtggtattggataattactccgttcataaagcgaatctggtgattcaggcatgtgaaatcctgaacatcaaattaattcatctgccaccccatagcccgcacctgaacccgatcgaacaggtctggaaatccataaaaaagtacatggcatattacctgttcgataccataaaatttatggaagaattattcgaaaaggaattttatcggatcgtaaaccgtgactcctactacaagaactggatcagtaaattcatcatggtgaactaa

SEQ ID NO: 72521 - DNA, 1557 bp, synthetic construct
  source 1..1557: mol_type = other DNA
atgaagaatctcgaaaagactctgaaaagcgtgactgaaaatcccaaatatattttccgtctgacagtccagggactaatggttggtatcttcgctgggttgatggtctgtctgtatcgattcttactttatggctcggaacatattctgcgcgattacttaaacattattcacgggaacatcctatacattattttatttttcattgcgctggcgataatgggacttctcgtcgactggctgatcaaatgggaagttgattcggcgggcagtggcatcccccaagtttacgctgaggtaaaggggcatatggaagcgaactgggtgaaaatcctttttagcaaaatggtcagcggtgtgctgacggctctgggggggctgtctctgggtccggaaggccctagtgtgcaaattgggggtatggccggcaagggcgttgcccgtttatttaaaggatcaaaaaccgatgaattacggctgatcctcgtgggttctgcagtaggtattaccgccgcatttaatgcgccactggcaggcgtcctgtttgttctcgaggaaatcaatcacggctttgacaaaacgctggtatttattgccctggtctcggcgattgtaagcgattttatatcaaaagttatctttggccagtccactgctttgacatttccgatccataacattccactgggcaattactggctgcttcttgttctgggcgtgttaatcggactgttgggttatgtgtacaacattggtatgataaaaagcagtgacttcgtaaaccagctcaaaatcccgtcttggctgaaattcgtattggtttttatggtgtctggtgtcgtcgcactgctgatcccggaaataagtgatggcggacactttatgatggacatgttggatgtggcgatgccatcgctgggtgtgttagtatttctgctagttctgaaatacctgttctccttgttcagcttctcgtctggcgcgcctggcggcatctttttaccgattctcgtcctgggcgcatatattggggccgtgtttggggttgtcatcgtgtccgtgttcggcttggaacataccctcatctacaaatttgtggtcatttcaatggccggatttttcgccgcaaccgtacgcagcccgattacgggtgttgttctgattgcggagatgtgcggtagtaccgaatcactgattgcaatgatcatcgtgagcctgatagcctacgtggtgccgacccttttgggtaatgaaccgatttatgaatcactgtatgatcgtctgcttcttaagaaaaaccgcgaatttgtgaaaaagccttccaagcatgtgctgtccgaatatctggtgcccctggactgcaattatatcaatttcaaagttaaagatattccgttcccaaaaaacgctattgtcgtgagcgttatccgtaacggtaaatacgtaattccgacggaggattttaaaattaaatatagtgatcagatccacattttagcggacgtgaacgattatccgtttgttcgcgaggaaattgaggagttgttcggcggttaa

SEQ ID NO: 72522 - DNA, 714 bp, synthetic construct
  source 1..714: mol_type = other DNA
atgtacaagcgcatctttagcatactgattgtcatggtcttcttgatgtttagcgttagcgccgttttcgctgaatctgatgccgtgcaggatacgggtggggagagtacttcacgcatcattaatgtaaaagtgatctggaacgatgatggccagaccaacaaccgtcctgatagtgttaccgtacggctcttaaataatgggagcgtggttgattccgtaatcctgaacgaaagtaacttttggaacggcacgttcaaaatcctggacaatggaaattatgacgtggaagagacaggtgatctttcgagctattcgatttcgctgacgggcgacatggataacggttttgtaattaccaacactattaagcaggcgccgaataacggcagtgatgacatgattgtggacgaaaattctacagataacagctcagacgatgttaatggtattattgacgattccaaccatacagtggaccaaaacgacgcgaaagatgagaatcaaaccgaaaatatctcccaggcaaaaaataccacgtacaataataatgataaagaaaaacaggtcatcaaaaaagaaaataaatctgtgaaaaagaacaacaccaacatcacgggcattaaattaaagaacaccggactgccggttgtggttctggtggtcgtgttgtttatcatagtcattactccaatttcacgttggaaaaaataa

SEQ ID NO: 72523 - DNA, 846 bp, synthetic construct
  source 1..846: mol_type = other DNA
atgaaggtgtttaatatggaaatcatagatattatcaaagaggcatttatcttcccatccaataatctcgaaaaactggcaatttacatcgttctgacctttgtcatgggaatgttagtggtggggggaatcttttcgttcgtattcagcagccagtctagcgcgcttctgattgttggcctgatcctgtgcattgcggcgatcattctcgcattgattatctctggttatcagcttaaaatcatgaaatccggcattgaccaggatgaagaggctcccgcctttgactggaagaatgatggcatcaacggtattaaagtaatagtcctggggattgtatactttattattccggccatcattgttggcattgtggcactgattacaaacgttccgggcaatctcgtgcaaatcattcaggaatattcgaccagcatcaacgcgaccgcagcggtgaactcgactgcctccgccatgcctgctgtatcaagtgctagttgggcggccttaggcactagccttgctattaccgcgatcattgcgtttgttttgttcataatctttgccttcattcagacgatgggtcaggcccggttagcaaacacgggtagtctgggcaacggactgaatattgtggaagccgcgaaagacatcagccgcattggtgtcggtaaagtcattgctgtgatcctgctggtgtttatagttatcatggttattcaaggcattctgggctatatttatggtcaaatcccgcagttgtcaattatctcaattataatcacgccgtacttcgtcttctttacacaacgtgcatacgggctactgtattctgatattgcgtaa

SEQ ID NO: 72524 - DNA, 1410 bp, synthetic construct
  source 1..1410: mol_type = other DNA
atgatcgaaaacaatatctgcctgttaaccgatagctataaagtgacccatcattatttctaccctaaagggacagaaaagatctactcctaccttgagagccgtctgggttcggagtttaacaaaactatcttttacggcctccagtatatcattaaaaaatacctggaaggttctgtcgtgaatcagcaaaagattgaagaagcggataaacttatctccaaccacattggtgaagatatattcaacaaggatggctggtattatatcctggacaactatgatggttacctgccaattgaaataaaagcagtaccggaaggcacaccggttaatgttagtaacgtcttgatgagcgtggagaacacggataaaaaatccttctggctggtgaattacctggaatcgttattattgcaggtctggtatccgtcgactgttgccaccctgtcggcagaggtacgaaaactgtcaaaattttaccttgaagttactggttctagtaaagacaatctggacttcatgctgcatgatttcggctatcgcggcgcgagttcaaccgagtcaagcatgctggctgggagcgcgcatttactcagtttttccggaacggacacgattccggcgctactcattccgaaaaactactataatgactccaatctgtatggctttagcgttcaggccacggaacacagtgtaatgaccagcctgggtcctaaaggtgaatttgatcagattttgaatgtgattgacaatgctaaaaacggcatcctgtctatggtgatagatagctacgactataaaaatttcctgaccgaggcgggcaaatcagatagccaattaaataaagcgatcaacgactttttagcagtggaaggcaacaaagttgtatttcgcccggatagtggtgaacccgtgtcaacaacaattgactgtttgaatatcctgggaaaagggttcggatcttatctcactgacaaagggtataaggtctttgatagcaacattggtcttctgtggggggatggtctggactatcataaaattcgcgacatcctgtttgccatgaaatctaacggctgggcggctgaaaacattatctttgggatgggtggcggccttcacacctatgtcaatcgtgatacgcagcgtaacgcattcaaatgcagcgcccaactgcgtgatggcaagtggtttgatatttataagaatccattggattccagtaaaaagtctaaaaccggtcggtttaaactaattaacgaaaacaatagctttaaaaccatttcaattgatggatacggcgatgactgtctccgcacggtgttcaagaatggaaaattgctgattgaggataccttcgccgatatcaagtcgaaaacgctgaactactcgaacttcctgtaa

SEQ ID NO: 72525 - DNA, 3657 bp, synthetic construct
  source 1..3657: mol_type = other DNA
ctgcacaaaattcgcaaagctattatcatctgcctgatcctgttaattgtgtttatcccaacggcatatgcggcggataaccaaacaaatttaggtctgaacagtaacgatgtaatgttatctgacagctattatttcgatgcgaacgtggatgacgacttggggaatggcagcttggattttccttataagcagctgaagagtaaccgtgtgatcgataatagcacaatctatctgaatgatgggatatactatggctttaataaagaatttagtaatctgacggtaatcggtaagaatagtgaaaagactattatcaagaacattcaattcgatattaaaggttctttgatcattcagaacgtcacgctgattaattctaaaataaccaataatgcaaatatcaccttggtcaattcaatttttaaagactcgtccagcttcattggcggcgttctgaagtccaacccaaacacttttgtaactataactaactgtacatttctgaataatcatgccaatcgctacgctggcgtcatttatagcaataactctaatctgaatatctgcaacagtagctttgttggcaattatgcgaattattatggtggagcgatttattgtgagaaaaattccaagctgacaattatcaacactgatttcaccaataaccatgccaaaaacgacgcgggcggagccatctacggtatggatagcgatatccttgccaactaccttagcatttcaaattcgtcatccactttcggtggtgcaatcactgccctcaacaccaatttgaacctcacgaacttcaacgcgtggaacaataaagcaaaataccgtggcggggtgatttattcagtgtacggttattatattgtgatgaactccacctttgaaaacaacacagcgtctgatggtggtgcgctgttcattgactcaccacacagcgtgaatgtttcaagcaacaaattcattaaaaacaacgcgctgaatattggtggcgctgtgtatatcatttcgaataaaaactatttcattcctgataatttatttctgaacaactcggccagttttaataatgatttttacaaaacgatgctgtctaatctcacgatcggcaataataattacgtcctgattaattacaacggaagccacataggtaaccttccgagcagttatgatctgagagaattaaaccagaccacgtcggtaaaaaaccagggctcggggggtaattgctgggccttcgcagcaatagcgagtttggaatcctgtattctgaaggcgacaggcaacgcatacaaccttagcgaagaaaacatgaaaaatctaatgaccttatactccaactacggctggaaagtctctccgaatgatgggggctacacgtcaatgggcattgggtatctgacgtcctggctgggcgctataaacgaaagtgatgattcatattatgagtcatctgccttatcaccagtacttgacagttttattcatgttcaaaatattctctttctgaaacgcaacagctacaccgacaatgatgaaataaagcgggcgatcattgaacatggtgcggtttcaaccagtgtattttggaaagtagagaaatatgcgaatggggagaactactataattatgaatacgcttcgggttcgaaccatgccgtcgtgattgtcgggtgggacgacaactattcgaaaaataactttattaaaaaggcgccgggcgatggcgcatggatcatcaaaaacagttgggggacgggtagcggtgatggcggatactattatgtttcttactatgatgcccgtttagcgcccatcaatacttcctctgttacgtacacatttgtgctggcagattcgattaaatacgataaaaattatcagtacgatatcccgggaatgacggactacctattgaacagttcggatcgtgtctggtataaaaacaagtttacagcgaccgacgatgagtatctgaccgcggtgtcgacctacttccagaaggaaacgtcatgggatctgtccatctatgtaaacaacaaactgatgctgacgcaaagcggtaacagcagtgcaagctacagcaccattgaactgaaccgattcatcattcttaaaaaaggtgacatctttgaaattgaatttaaaatcacggtggacggtgacgccggggttccgatatcagaaatcgcttctcttaacaatctgttctacggtgaaaatatttcatatgtgagttacgatgggaaaaaatggatcgacttattcgatgtccgatggacatatccgggccacacctataacgattcgcaggtagcgtgcattaaagcattcacggtcttgaataaaattaactccaccattgtcctcaccattacagatgagaataacccggtggaaataaccgctaaagttttaaaccagtatggcaacccgattaaaacgggtaaagtcacctttaatattgagggcaaagactacattgctaaaattaataacggctttgccaaactgattcatatttttaatggcaatgaaaataaactcatcattgcttcttttagcggtgccggctttatcgagtctttctccgatatcactttctgtcccgagcaggtttcaattaaagcaagtgacatggttagctactataataaaaattcgtactccatcactttgctggacatctacagcaaaccggtggccgataaggaagtgaaatttaaaatcaataacctggaatacgttgcaatcaccaatgagaacgggatcgccgcaattacctttaacctgtatcctaacgtttacgatgtgatcattgggtttaatagcatcaactttgacaactataatgtgactaaaaaaatcacgatcaaatcgaccatttccatccccgaaaacaccgtttatacctataacagcaaatatccgattaaactgctgaacaataatggcaacccactgtccaattgcaaattcaagcttgtgattaacggcatcaccaattatgcacataccgactctaatggtgcgtttaaatacaacattaacctgaaaccgggaaaacacacgatcaccgtgatcaacaccaagacaggtgagaaatcgacccagaagattaaagttgtcagccgcatcacgcaaaacaaagattttagcatgtattatggtgctggtcgcaactacaaagttaaggtggcggatgactatggaaaagttaagaaaaaccttaaaataagcttcagggtgaacggcaagacctactatcgctacactaatgaaaaaggttacgcctatctaaagatttctctcaaacctggaaaatacacgatcactgccaactataaaggatataaggtatccaataaaattcgtgtgaaaccgaccatcatcacgaagagcattgcggtcaaaaaaggaaaaaccggcaaattcacagccaagctgttgaacaacaaaggcaagattctcaaatacaaaacaatcaacttcaaattccggggcaaaacctacaaagtgaaaaccaataaatatggcatagcgactctgaagattgctaaaaaatataaaattacccgctatagcataattacgagttatcgtagtgaaaaaatcaagaataccattaagattaaacgttaa

SEQ ID NO: 72526 - DNA, 156 bp, synthetic construct
  source 1..156: mol_type = other DNA
atgtttgagattgaactgaaacagcaaaaaattagcaacggcttaatccgctttttcaccagtatcctggatctgcattcgcttctgttgtgcctccaggaatattttacgtccatgaataacgttgaaattaagaaaatggaggtgttccagtaa

SEQ ID NO: 72527 - DNA, 3609 bp, synthetic construct
  source 1..3609: mol_type = other DNA
atgcgtaaaaataactatctcgtatttctattaatcttttccctgtttctgaccatttcgtcagtatcggcactgaacgtggacgataatgcgacaatagaagacaccaatttgaacagtatggatgttaattttgacatttccaatggcgaatttaatagtattaacatcgataaaacgttcgatacaaatatcgacgctgacgccggcaaagacaccaacatcgaggaaaaaactattagtatcaccaattctaacaactccatcctttccactaaggagaacaatgtgaaaaacaactttaaattaaattccggtagcctgcgcgcgggtaacataatttacattagctctgatggtacgggggatggtttgactagtaacaaccccacaaactgggcgaatgggtacattaatgcgcagtccggcgataccatttctttcctggacggcacctataatcttgtaaacgtaaacctgaataaagatctggtcctgaaagcgtttaacgaaggcaacgccatcatcaacgcaaatcgagcgggcaatgtcttttcgattaacaacaaccgaaacatcaccatcaatggtctgacctttataaacgggaaatcgacgggcaacgggggcgcaatctcatttaattcaggcgccctcaccgtaattaactgtcgctttattaataataccgcaagctcgtatggcggcgcaatatatctgcgcgacggaaagctgaccatcgtcaacaccacgttcgtcaataactcagctgacgtggggggagcagcaatagccgacaccattagcatcactcactctgatttcattaataacacggccgacggtagcggtggcgctatcagggcttatgacaacttaacaattgtggattctatttttacgaataatacctccatcaacgggcaaggcggagctctgtataccccaaacgtggacatcaacaacagtatttttgttaataatacgtcactgaatggtggcggggcgatctactccagcaacgaatatctgattaataactctgtattcgttaataactcggcgattgatggggatggcggagcagtgtcatcctaccgtactggcaatatcaacaactctaattttaccaacaactcggctaaaaaaagtggtggagcggcctatgcgcgcgagagtattgaaattgataattcgagcttcaataagaactatgcgggggctggcggcgcagtccgtgcgcagtcagaagttaacattactaattcaaattttaccaacaatgtggcgaacaatgagggtggcgcaatctattcgaatggcaaaattgttgttaataatctgacctttatcaacaacagcgcgattgaaagtgatggtggagccatcttctcggtagaagatgtggaagtcgataactccaacttcatcaacaattatgccggcgaactgggtggggccattagcgcttataacgaacttaccgttaataactctaatttcaccaacaataatgccaaatattacggtggcggagtttacgcgaacgtgttgaacagtaaccgcgacaactttgttaacaacacggcagaatataatggtggcggcgcgtatgtattctcgaatgcgaatattaatgggtccaactttgactcaaataccgcagtgaatggcggaggcctgttcagcacgggcaatagcagtgttaacaactcgaacttcattaacaataatgcttatgatggctctgccattattagcggcaatctgcatttaaataataacaacttagaaaacaacacatctcggggctatggcattgtatatgcggaaaacgccacgattgaaaacaataaatttatcgataatgatgccctggaagataaggaaatctatgtcctgaatgaactgagccagagcaacaatacgctgagcccgaatcaaatcgaaaacatcaatgctaacacagtcaaagtgaatactattaacgggacgacgtatttggttgatttagaagatgggcttaaaggctactgcctgcaacgtacactgaacttcccggactatgtatacctgctcaacaaccttagcctggcacataaccagctgacgggcgaagatgttagtgaatacttaaagatcctgatttacaaatactacttctcagataaaaaagacaacataacgtacagcttatgggactttaccgacagcgactttcgtaatagcaacaacaatttaacgaaaaaagtcattgcgctctataattcgggattccgtgtccccgattctaacgctagcttaatattggataatggcacgcaagtactgtttgatttttatagtgcgggaagttcaaccacgcagaatctgttcctctttaatattacatatatgggaaacaactacgacatgaaagtggaaaaaattacactgaacaagtcggtaatcaatggcaacaaaaccaaattcatcattcgtgtcacaaacatcggtgataccattctccatggggtgacggtatttgaaaaagagtacgatggtctggtgtatgattcatacatcgatgagggcaataattggaattataacaatgggaaatggatttacaaaaaacagcttaacattaatgagagcgccgaatttactgtggtatttaaaaccatcaaatccggtaatttcacaaatatcataattagcagctccaatgaaacgacaaacaaaaccaccaacaataccaccactgtttacacccctaacctaacggtggagaagctttctttgaatagaacggtctatgttgggaaccagactgtctttacaatcgttgtccgtaataccggtgattgtgatctgggcgaggtgtttgtcgtggagaaagcgccagaaggtcttgcgtacagttcattcaagggcaccgactggagctacaacaatggcaaatttacgtatggtaaaactttgaaggtgggtgagagcgtgagctttgagattgtcttcgatgccgttagttcggggaattggaccaatgtggttgttgcaggcagcaacttaacaggtaacaaaaccggtaataacacgaccaaggtgtataatcctggtttgaaggttgaaaaaatcacgttggacccggttgtgtctgtgggtgagattacctcttttgaaattatagtgactaatactggtgattgcaaacttggtgatgtttttgtgcacgaagatagctatgaaggtctgcgcttccatagtttccggggtgatatgtggaagcagaaaggcgataccttctactaccagggtgtgctgaacccgggtgagtccgcctcctttgtcattctgtttacgaccctgaagccgggaaacttcacaaacatcgttacggccggttccaacgttactaacaataccactactgaaaacaaaaccaaagtcatcgagaatcacactaacaataatacgaatggtattaataaaacagtgaacaacgaaaccaaagaggtgaacgtgcataaggtcgatacgtcacgcgccaccggtaatccgctgctagcgttgctcatggtgctgctcatgattagtgtgacttcggtgcgcaaattcaaaaaataa

SEQ ID NO: 72528 - DNA, 1131 bp, synthetic construct
  source 1..1131: mol_type = other DNA
atgcaaaataaattcgcgtggataagtacgccggatgaattatgggacgataagaaagagatgatcacaaccgcgttagagagtgggattgactatgttctggattttgacgatattgaggagatccgcaaactgggcaacgtgaaaatcattgccaacacggacgatgcagacatctatttggtaggtattaacggtgagggagatggctttgtggaactcaatgatgatttcactgacagcattgacattgctaacgccaaaaaagcgaaaagcgaaggcaagactgtctgcgcctacataaaaataaccgataaagcccatgagcagctggctgtacgcctgggtagcattgttgattacatcattttgattggtaccgactggaccattatcccgcttgaaaacattattgccgacctccagaagttggatgtcaagattattgcggcggttcgtgatgtggacggtgcgcgtgtggcccttgaaaccttagagcacggcacggatggcatcatctttgaagcaaatgacttcaataatattaaaaaaatcgcccaaaacgtcattgaagcatcccaggtcaaatatgaactgaaactagctaccgtcacgaaagtaaaacccctggggagcggcgatcgggtatgtgttgatacaacggacatgatgaaaccgggagaagggatgttaatcggttcctatagcaaatccatgtttctggtgcactcagaatcactggaaagtgaatatgtggcgtcgcgcccattccgggtaaatgcgggccctgttcaagcgtatgtgatggttccgggaaataagacaagatacctgtctgaactggtcgccggcgatgaaatcctgatcgtcaataccgagggtgaaactcgaacggcatatgttggccgctctaaaattgaacgccgccctctgctgttgcttgaggcaaagtacgaaggtaagaccatccgtacactcctgcagaacgcagaaaccatccgtatcgttgatgaaaacaacaatccactgtcggtggctgatgtgaaaccgggcgataaagtgaaagtgtacatagaaactaacgctcgtcattttgggattgcgattgatgagaccatcattgaacagtaa

SEQ ID NO: 72529 - DNA, 4830 bp, synthetic construct
  source 1..4830: mol_type = other DNA
atgaaactgtttaacaacaactttatctctgtcctgttaatactgttcgtgctggttcttgctgtcaactcagtgagcgcgacggataacaacattacggacatcaacaatgtcaattcgaatttatccaacgtattgaaaagctcgtcgagtctcaatgatggcgacgcgatttcatacgatctgatggataataaagacgtgatttctcaaaaattttcctctaactccaatacaaacgataagtcaaatatgtcggacgtggttgattctattgaatcggtggcagaaccgacgagcctggatagcccgatactccgctcggtcgtcccgagcggcattacatttgatggcgtgttccatgtggggaccggacaacagtattcaaatatacaagacgcactagatcaatgccggcgcggcggctataattatcagatcatcatacatgaaggcacatatacgggctatggtaacaaaaatctcgtgattgagccgacgacgtggtggaacccgaattttggttacctggacattcggaccgcaaacgatggcgatgtggtaatactgaatgcagaacgctctccaagcattctgactattaattctcggaatgttcatattacgggcttgacattcatgaacgcgtacaattacggtagcggcggcacatctggtgctggtgttgccatcaacattcgcaaaggaaccgtatctatcgataattgttccttcattaacaacgaagctagaaatctttggggaggcgcagtccatatcgactcaagcattacaaatcgtatttcgaacatcgatattaccaactctttatttgtgaacaatagtgcggaggtcggtggcgcattccgttcggaacgatattcgagtaatattaacataattaataccacatttattaataataccgcgaccgaacacggtggggtagcatgcctgtttagtaccgacgtgacatttgcaaactgtacttttattaacaactccgccccgtcatcgggaggcatccatttccatgtgggcggatcacatatcgacaattgcaccttcatcaataacagcgcgtatggcaccggctcctcggaagaaggctatggcggagcgatcgcgttagtttatagcactagcgatggtgtgattatctctaactcgagcttttccaataacttcgccggtaaatatggcggcgccattgatgtaaacggctccggtagcaatgcgaaaatactgaactgtaatttcgaaaacaacaccgccgggtatggtggcgctatccgtgtccagggctctaacaccgttatcgataacaacagcctgattaacaacaaggcgattaacactgacggcggtggaatccatgtcgaaggctcaaatacccagatctcaaataccatttttcgcaataattcggccgccgcgaatggaggtgccctggcgattgtggcgggcgacaatacattcgtttccaattcagtcatcgccaataacacggcggtgaatggcgcgggcgcttatattcagggacgccgcgtaactatttccgattctatcgtcgcgaacaacaccgcagaccaaaatggtgcaggagtctatattgatggcagctatgctacgatcaaagactcgacgatttataataacaatgcgaccgtgaatgggggtggcgcttacatcaacggtagggatgcgacgatctccaatgtgaactttgtgctgaacaatgccattcctgacgaagaagctctggatgatgggcttggtggagcgatcttcatcgccgggagcaactcctacatcgaggatagcaattttacgtacaacaccgcccgtaatggctccgctatttatatagatccgacaagttcgatagcaaacaactatatttataactgcaacttcaccgaaaaccaagcctggagctattggctacctattttctataacgatgtaaccaaaaccattgaatcgaacctcacgggtggaaataatatcctgaacgctatttacaataatggaagcaacctgcacatcttcattgatggcgtaaacccggtgctgggctgggaaaactctcagaacgggacaatcatgtaccaggataaccgtgagttcaatcagactattgtaacccttgtgtgggatcgacacggtaatctggtatttaatgaaacggcagttacggacctcgcaggtaacgtgtgctatgatattcctcaagatacacatctgtggttcatagtttccatgactcacctagaggacacctactataaagaaattacgaatatcacgggtatcaacattaacccggggttgaccattacggatgtcacgatgtatgagggcaattcaacgccgcagaccatatacattgttctggccgatgatgacgcgaaccctatccccaacgaaggcccaatcatgatttacgtcatggtcaatgggaacaagatccttctgggtagtgggaacactagtaagaacgcagtattgattctgaacgaaagtgcggtatttaaaacacttaaccccggcaattacacgattatcgcagaatgtacatatgcatattataacgaaaccacccaatccatctcgaacaaaacggtatcaaccgagggcattctggaagttctgccatacatctggagtcttaataaaaccatttcgcatgtcaatggcatcccatatattgagggtatggttatccagatcaatgacaacgttacttttaatatcactgtattcaacgaagtaaacacgacgctgtatggattaaaattaatcgatctgaataccgaaggattaagctatgtttctacgttaccatccaactggaactatgaaggtaataatgtatggacactggataacctagtgaattacggcaattcatcattatttgtgacttttaaagtactgaaaaccggtaatttaaccaacatcgtgaactgcagctttcttgacgggtttaaaaacaaaagcgccaacattacctttgcagtcaacctgacggcggatttgggtgttagcaaggttgttaacgtctccaacccgaattacggtgattttattaaatacaccgtagtggtgtctaacgcgggtcctgacgatgctaccggcgtggtggtcaatgagaccttgccggtgggtttggtgtatgtcagtgatgatgcgagtgttggtagttacgaccacgtggcgggtctgtggacggttgggagcttggctaaaggcgacagtgccactttgatcgtcgttgtgcgtgtgggtggtactggtaacatccagaatttcgtgaacgtgagtggcgcggagtacgacaacaatactggtaacaacaaggccaatgttaccgtggcggtgaatgcgagtgcagacctgggggtcagtaaggtcgtcaatgtttcgaatccgaattacggtgattttattaagtacacggtagtggtttctaatgcgggccccgacgatgccaccggtgtggttgtgaacgagaccctgcccgtggggctggtctacgtgtccgatgacgcgagcgtgggcagctacgatcacgttgccggtctgtggaccgtgggcagtctggccaaaggtgatagtgccaccttgattgtcgtggtgcgtgttggcggtaccggcaacattcagaattttgtgaacgtgtccggtgccgagtatgataataatacgggcaataacaaggccaatgtcactgtggcggtgaaccagcttaaaacctatattatcgtgtttaacaataccgtctatccgggggatgatgtgacggtgatcgttaccgttaccacgcagaacggctcactctttaatggtaatgttaacgttgcgctgaacgataccgcaaacacaactaaagtggtgacgatcgttgacggtaccggtagctttaaggttacagttgataaaaatctggtgaatggctatgtaatcggcattaatgcgagctacgatggtaatgacacgtatattggatcgaaaggctttggctggattaaggttctcccagtcaaattccatgtggaaaaaacgattgtaaaaggcaacgaatttttcatcggcgatgagataatatttaatattactgtgtataacgactgcaacgggaccctgtacaatctcgttgtgagtgacgtgctgccgaatggggtcgtgcttatcaatagcggtttcgggctttggacttacgatggtggctcgtcttggagctacggtgatctgagtgcaggcgccagcgctaccttgattattaagtctagcgcagttaaagccgggagtttcactaatgacgcgaaagctacagtaaacgacgttctggataatagcagcttggttgatttctccatttcaaaactgaatactagcatcagcgtatctaatgttacagggcacccgggtgatgtagttgtcatcactattaaagtcagtaccggagataacgttccgttcaatggggacgttgacgtgattctgctcgatgggaaaaaaattattgtccatgtaactaatgggatcgccaagtttaaatggaccatccctaaaaacgctaagaacaacaccatctttagcattttcgtatccttcgctggtagctcaaaatactttggatctaacaataccggctttatcaaagtaatcgacaataaacagaacaaaacgaaccacacagataacaatgattttaccgataaatgtaataaagggattattaaaaacacggggaacccactgctcgtcttattaatttcaattgttattctggtcatctcactgaaacgtcgcaaagactattaa

SEQ ID NO: 72530 - DNA, 1743 bp, synthetic construct
  source 1..1743: mol_type = other DNA
atgaacattaataacaatatgaagttgggtctaatcgccgcgatatcgatcatcgcgctgtttgtgctgtcgttatggatttcccagaccccggctaatgatgataattcaattcgttttggcattctgacacttctgccgccgctggtcgcgattgggttggcgtttattaccaaagaaaccatcctgtcactgtttatgggcgtctttgtgggggaatttatgttgtgtgtcaacgatctgaatatcgtttccaccgccattaatgcctttctgcagatgggttcgcagatcatctcctgcatggccgatccgtggaatgcaggcattattcttcagtgcctgctgattggaggtataattcagctggtcacaaaaatgggtggagcaaaagcccttgccgataccttcgctcgccgcgcggataccccccgaaaagctcaactgttcacgtggtttttgggcttatgcgtcttctttgacgattacgcaaacagcttgattgtgggtccgattatgcggccggtgatggacaaacttaaagtctcgcgtgaaaaattagccttcattgtagatgccactgcagctccggtggccggtattgccattatttctacgtggattggtctggaaatcagtctgatcgctgcgggctttgagagcgttggcgtaaccaacgtcacagggttcggcatatttctccagacgatcccataccgtttctacaacattttcattctgctattcatcgttattagcagcataacgctgtatgaatttgggccaatgaaaaaagcggagcaaacggcacgtaaacgcaaggaaaacgaagaaatcattgttccgaatgcgcctggttttgacgaggtgaaaccagttgaaggcattaagttaagcatatggaatgccattatccctattggcaccctgattataggtgcgcttattgcattctattggagtggctacaccactattttaggtggcgaggatcaggctctcattgcgataatgaaatcatcgccgttatcctttaacggtgtgtttacggcgttgagccagagcgacgcgtccgtggctctcttccaagctgcacttctggcgtcgatcgtggcgatcgtgatggctgtgggggagcgcatcctcaccatcgaagatgcaatctctgaatggattggagggatgaaaactatcgttatcactggtgtaatattgctgctggcgtggtctctgggtggcgtaatcggtgatgttggaacggcgaactatctggtgggcgtgcttaagaacaccctgcctcaattcatcgttccggcattaatctttattctcggcgcgctgatcagctttgcgaccgggaccgcctatggcacgatgagtattctcatgcctttggcaattcccctggcgtgggccgtcggcagtggcgacatgagctttactattgtctgcacgagtggcgtactgacgggcgcgatctttggtgatcactgttctccgatctcagatacaacaattctgagctctatgggaactagttgtaaccatattgaccatgttcagacccagatttattatgccatcttcgttgcatctgtggccatcttcatcggttacatcccagcagggctgggcatcccgtggttcattagcatccccattggtgtggttgtaatgtatgttggactgaaaattttaggccaaaaggtagactttgacgaagtggaggaatcatcctcataa

SEQ ID NO: 72531 - DNA, 507 bp, synthetic construct
  source 1..507: mol_type = other DNA
atgaaacgcctgtacgcgctgcttatcatcctgattgtgatttatattgggattaactccttcagcctgatcttcaacgacaatggcactaatgacgccaacgatgtgaacgaatctatgataactgtgggtgccagtagtctgccggaaatcgaaaactttaccgacaacaccttaaacgacacaacgatttcattagttgattccaataaaaatatgacaattctagtttctgagattgataactcccagtcaatcagcgatatcttcaacaattttgtcagctcgaatgacattagctcgacccagaccatcgatcagaacggtgtaaccacgtatttggcatacagctcgggaagcgattcatataatgctgatattttttttaacaaaaatggtcaaaattattgcattagtggcgataatatcctctcttccgatagcgactactttataaatcattgtaagggcattatcgatgcgattagtatcaactcaacgtcgtaa

SEQ ID NO: 72532 - DNA, 297 bp, synthetic construct
  source 1..297: mol_type = other DNA
atggactttttgctagttttagcgaaaattcaaccgaaggaaggttgccaggacagtatcttagagctggccgaggaactgatctatgaatctctgcttgaggagggcaacatcgattaccagctgctgaaatccagcgaggatgatagtttgaccttcgtggaaaaatgggaatcgccagaatatctgaagaaacacatggcttcaccgcattttctcaacttcaatgcagactgtgaagaatttattgaaagcaatgatattcagctgattgaagcgaacaaaatcgaaatataa

SEQ ID NO: 72533 - DNA, 567 bp, synthetic construct
  source 1..567: mol_type = other DNA
atggagattacggcggatgaaatgaagaaaacaatacgcaaaatttatgaccgtctcgataaagtctctcccgttgatttcgactgtggcaaattgtgtggggaaatctgctgtgtgtacgatgcagacgactaccataacgaagatttggccctttatctgctaccgggtgaagagctgatgtatgaggatagtgacagttacaagctgtattacatcgattcatcggaaattaaatatcctcattcgtggaaaggtcaaatttatcttgtgaaatgcattaaccctccgaaatgtgatcgcagcatccgtccaatccagtgccgaacctttccgctgatcccgcacctgaataagaaaggcgaatttcacttaattttcgatgagagcgaatttccgtacaagtgcccaattgtccagaaccatatcaaactgaacgacgatttcattcaggtgacttatgaaatctggtccattttaatcgctaatccgctggtttatgatctggtagacatggatagccgtatgcgcgacaatcggaaaaccgattacgaaattataatttaa

SEQ ID NO: 72534 - DNA, 1386 bp, synthetic construct
  source 1..1386: mol_type = other DNA
atgaaaattgaatttgaaacctatgtcatcttcgtcagctttattacgagcttttttgcggtgtttctgtcaaacggtatcatcatcggcgttcctgcgatcgcccaggactttgcgatgaacaacgttattcagaactgggtgccgactatctttttcctggtggtggctgtctttacagtgccggcagggcagattagcggaaaatttggtgtgaaaaaaagcctccttgcgggcattacggtcttcctgttgggttccattggcgcgtgccttgcgttttcgactgagtcgttcctgatctttcgtatcattcaaggtgcaggcgttgcgtttctaaacgtgtctgcaatggccatggtagttcatgccgtgaaacctcagaaccgcggcaaagctttgggttttacagtgactggtgtttatcttgcaacgtcgcttagtccggtgatttgtgggttcttagtccataacttgggttggcgggcgatgttttacttcgtaattccctttttagtattgtgcatcatcttactgatcctgaaaatcccgcaagaatggaagacctatcagcacgataccattgacaaagttggtagtatcatctacgccattggcattctgctgttcatttacggattcacgacgctgattacaaccaatgggaaaatattaaccgtgacgggcattattttactcgtgatctttggagcatatgaactgcgccagaaatccccagtattcaatatgaacttgtttaaaaacaaaaagttcacctcatccaatattgcggcgctgtgcagttatctggctatcatggtcgttaccacgattctcaattaccatctgcagtacgtccgcggttgggatgcacaaatgtctggcatgatactgattatcaccccaatcattatggcgataatggcgccgaacgccggaaagctatcagataaaatacacccgcaaaagctggccgccacgggcatggctattgccaccattgcactgggcattctgaccttcctgaatggggaaacccccatttatttcgtaattatagcgatgattctccaaggtattggcatggggctgttcagctctccaaatatgaatgcgatcatgagctccgttccgcctaaagatgccccgactgcaagcgcttcacaagccaccatgcgtacaatcggccagaccatgagtctgggtcttttgacgctggtttttgcgtggatcatgggtaatctggagttatctccgcagtatactaccatgattatacaggcttcccagactatttgcgggatctgtacagccgcatgtatcctggctattttcgccagcctcattggcatcaaatcgagtgacaagtttaatacgggccgttaa

SEQ ID NO: 72535 - DNA, 687 bp, synthetic construct
  source 1..687: mol_type = other DNA
ttgaaccgcaagaccaaaatcatcatcatcgccatttttctgattatcgccagcatcctgttcgttgggaatcggtttttcatcccgcactatgaaactatcgcagacactgatataggtacggtggaagtggcgacgtacggcaacgcgaacgctaccaaatgcattgcgctgattaccggaatccacccacgcgaaaccctggcaattaacccggaaattgatgcggcaaaacaattcgccaatgacgatgtcaaaatcattcattataaggtcaccgttaccaaaaatgcacaggactatagcaaaggccgtgcaaatggtgagagtctggtgcataattacgtgaacccgaacgtgaccgcttcggatgctgatgcggttattatttcacattcacacattcctgaatatggtgaaggcttttatgtagccactcccgccatggacaacgcgtctgttaaaataggtgagaacataaatcagagcagtgattttaattattacccggtcaccgggaatgagacatacaaatccacgtcggcggtgcttgtttccaaaccgattgcggaagccggctatccaacatttgtatacgaggtacctgaaaacgtcatggaatttattatcacgggcaaaacaaaggatctcttccagttaattattgaaaacacgtacgataattaa

SEQ ID NO: 72536 - DNA, 2955 bp, synthetic construct
  source 1..2955: mol_type = other DNA
atgaataaaaaaatcctgattctgcttttaatcgctatcctcacattttccgtagcgaccgttagtgcgagcgataacacaactgatgactctgttattgactcatctaatcgggacgtcgttagcgtcgatgataacaatgtggttagcgatgaatatgcggttaacaaagtgtcgaacggggcgctggctgatgtcaatggggaagaaaatgtaaataacgatgtcgacatggtgatcgacccgatcaataatgtctcggtacttcagggcgataatgtggatgtgaacatcaccgtgaagaatataggggaaaataatgcgtcgaacgttaccgtgaattttgaactgccggatggattttccctgattgattccaacaacgtatcagataacacttggcacatcggcgacttgcagtcaagcaaatctacgaacatcacggtgaaactgaataactcgggcattaacaacggtgattacgtcattaacctgaccctacgtgcgaacgaagggattgaggaaatttttaagcagaatgtaaccgtgaatgtgataaaaaaactgattcaaacaaacctgacgatcgactttgataaagagtcatatgtatatggtgatgatgtgggcattgacgtgaagttacccgatgacgctaccggtaatgtgactataaaaatcaacggcacagagaacaacgcaagtattaacgaggtattgattttatcgaatctgactcctggcaattatgaagtgaatgttacctatagtggggacgataaatataatggcagctctggtaaggctcgcttcacaatctccaaagccaacacaaccgcggccatcgacattgtcagtatcaaagtggatgatgagctgaatatcacgattaactacgattctgagattaatggtaacgccacgatttatgtggataatattaagaaccagaccattgagattattgatggcaacggaaatgtgactatcaagggattatccaaaggcatgtatgacattaaagtagcatttgatggcaatgattgctataatagctccgaaactaacaaaacgattgaaatatcgaagaacaccgtgaacatgctgatcaacgtaggtgatattgtttatggcaatgacctcgtgattaacctcaaactgccggacaacctgacctccaatgtcacggtaagcctgggtgatattaaccgtagtattaactgcagcggcaatgtaacatttaaagatatgaacgcgggaaattacacggcaatcgtcagctacggcggggacgaaaattacttcaatgaaaccaaatatgtggatttcaaaatatacaaagcgagcacccaaacgacggtcaatacctccgatattaacatcggcggagtgctaaatgtcagtgtcgatccgaaaattgatggtacagctacggtttatcttaatggaaccaaatatagcgacgatatcgtaatcgttaacggtagtggcaacgttgtgatttcaaacttaatcgaaggaacttataatgttcttgctgtatttaacggcaatgataattataactcctcactgaccaacaaatccattaaagtgtcacgcaatgttttcaacattactgtgaatgtcaccgatgtttgttacggccaggatgtaatcattaacattaccctgcctggggatgtgaccaacaccgtcgatgttgtttttggttataactcgcagaatattaacctggaaaacggggtcggcacggtgaaatttagcgatttggatgtgggcaattataatgccaccgtgatctattatggtgatgcgaaatacctgaaaagcacccaaatcatcagtttcaatgttaccaaagcgaagccaacagttgacgtgaatatttcaggcaacaagctgggtcaggatctggttattaatattgccctgccgagtgacgtgaaaaacaacgttaccgttggcatagacaatatctcccaagacgtgaaagtgaccaatggtgtgggtaaggccatctttaaagacttaacaattggcgagcatgtcttgatcatcgactatagcggtgattctaactacttgaacactactgaaggcatttatttcaatgtatcgaaagccatcccggtcattgacatcgatgtgaaaaacatctacgtcaaaggtaaggaagtcatagatatcgcgcttcccgacgatgcaaccggttctgtaacgatttttattaacggggttgaacagaaaacagtgaacgacaacattagcagcatcgttttaaccaaatctggtctcgcggccggtacctacaatgtgatggtgagctataccggagattcgaaatacgaatcggcaaacaccacggttcagtttaaagtttcaaagtacaaagcgaaactgaccgcctcatcaaaaacgtataatgtgaaagtaaaaaccaagtattactacatcacgctgaagaacaacaagaacaaagtcatgaaaaagatcaaagtctacttgaaagtaaacggcgtcacctactccgctaccactaatagctatgggaaagcctctttcaaacttagtaagctgacgaaaaaaggcacatatgacgctctgattacctacaaaggcacgagctactacaataaactcacgaaaaaagtgacgattgcggttaaagccactccaaagctcacggcctactctgcaaaactgaaaaaatcggttaacgccaaaaaatatagtgtcacgttgcgcacagacaaatacaaggcaatgaagtataccaaagtgactctgaaagttaacggtaagatctatacgttaaaaacaaatagcctgggtaaagcaacgttcaaaattactaatctgaataagaaggcgaaattccttgcagttattagctattctggtagtaaatactattactcggcaactaaaaaagtgatattgaccgtccgttaa

SEQ ID NO: 72537 - DNA, 1650 bp, synthetic construct
  source 1..1650: mol_type = other DNA
atgaaagtgattgctagtacacgcaatgatgatctcaaacgcctgaacgaaatctataaggtcctgaaaaagaacgattttggttatctgatcgaggagaacacttttttccgtaaattcccgttcctgcgcaactataaaatagaaaaagaggataacttctccgacgagtctgtcccgttgcgcatcagaaaagtactggaagaattaggcccagcatatatcaaactggggcagatgctcagcacccggcctgatctggttggtttggaaattgcagaggaacttcaacagctccgtgataatactcctataacgccttttgacgaaatcaaagaagtcatcgaagaggaactgggcaaaccgatggaagatatttacagtgatattgaccagaatccgttagggtcggcatcgatcgggcaggtttttaaggcccaactgaaacgcaatggcgaagaagtggccattaaagttcagaaacccaattcccgtgaaattatagaatcggatattaaaatcatgaaattcctggcaaaacgaattgataaatacatttcaagttctaaaacgtttaacctaccgaccatagtgaatgaatttgaaaggtctattcttaaagagatcaactacctggaagaagtcatgaacatgcagaacctttcaaaaaacttcaaaaacgtgaactatatcaaaattccaaatgtgtatattgattattgcagtgaaaagatcatcacgatggaactgataaaaggaattaccgtcaccgagctgattgagggcgactacccgcacattaataaacgtctgattgcgaattacggtcttaaatcgtattttaaacagattatgattgatggctacttccatgccgatccccaccccggcaatctgatcgtgacccgggataacaaattgtgttatattgacatgggtatgatggggattctgagcgaggactttaaagaaaatctggcggaatttatgttgcttctgatcagcggcaacacagacaacattatcaaacagttaatttatatgaatattatttccccatcacagaacaccccggaactgcgtgcggatattaacgacctgttgaatctgtactatggtgcggagctgaagaatatggatggcgccatggaggatctgctgaatgctatggttaagaataatgttgtgctgccgaacgaatttgtaatgattggccgtggcattgcgttgattgaagatacgggtaaaaagctcgatccgaatttcaatgcggctactgagttgaagaaattatcccgcaagattgtagtgaacaaatataaacctgagcgtctggcaaaagtcagcctgaactaccttctccaattggaacatctagccaaagacctgccggatacaatcaacagcacgatctcaaagttggaagaagggaacattgaggtaaaattaaagcacgaaggaatcggtcatctcatcaaccaattatccatcagtttaattttaagctcgctgatcatcggtagctctctagcgctcatcaccgacgtgggtccggacctgtttgactttccaatcctgggcctgatcggatttgtgttcagcggtgttcttggcgcctacctggttttaataaatgtaattgaacgctaa

SEQ ID NO: 72538 - DNA, 1338 bp, synthetic construct
  source 1..1338: mol_type = other DNA
atgctgaatgagtttttcaagttatcggaaaacaacaccgacgttaagactgaggttatcgccggcctcacgacgttccttgcgatgtcctatattttgggcgtcaacccggggatgctggcggaaggcggaatgccggcaacgggagtctttttcgctacggctctggcgtctggtattgcgtgtattatcatggggcttgtgagcaaatatccggtgggactggcgcccggtatggggatgaatgccctgtttacgtatactattatcttaggtatggggaacacctgggaggcggcgcttgctgcagtatttatttcaagtatcatctttttgctgatcacagtttcgggtctgcgtgaagcgattctgaatgcaatcccgcataacttgaaactagctattggtgcaggcattggttttttcttagccttcattgggctgaaaggtgcaggaattatcgtggctgacccctcaacgatggttactctcggcagcttgttcagcgcgccggcccttctggccttgatcggcattgccgttactctgattctctatgtgcgcaaagtgccggccgccgtatttatagggctggtcattactgcgattctgggcattatatttaccgctgcaggctttggtgtgggcgacatcgcgatgccttcagttccaacggaatttgtgtctacaacaattgatacatcggtgtttggtgcgtttgcgtctggctttagccagctgttcacaaacatccctaacctgatcctgatcctgttctccttactttttgttacctttttcgataccacgggaactttaattccgttagcaaatcagtgcggcttcattgatgaggaaggcaatgcggatggaatagacaaagcattcctgggcgacgccatcggtggtattattggtgctattttggggaccagtaccttaaccgcctatgtagaaagtgcaacgggtattggccttgggggtcggaccggtctgaccgcgatcgtcacaggcattctatttctgatttccattatctttgccccaaccgtactcgctctgtttacctcgagcgtaaccgcggcggccttggtgatagtgggcatcttgatgatgatccaattaaaagatgtggattgggatgatctggttgtcgtggcaagcgtattcatgaccatcatcatgatgctgctcacctactccatcagcctcggtattgcattcggctttgtcacgtacgccattaccagtattgcggccggcaaagcaaaagaactgaattggctggtttggataatggtcctggtgtttatcatctacctgttcttcggcctgtaa

SEQ ID NO: 72539 - DNA, 3186 bp, synthetic construct
  source 1..3186: mol_type = other DNA
atgttgatcacattgctgtgcctgttcactgtgagtgcgaaagaaatctatgtgagctctgatgggtcagacgacctgaacgggacagatctcaataatccgtgtagttttcataaggccatcaacatttcggaagatggtgattcgatcaaaatgaaggcaggcaattattccatctcggaggaagttgataagtctctgaatattagcgcatatagtgatgatgttgttaatataaagaataaattcagctacgtgttcaaggtgaaaaacaacaacagcctagtgctcaattctctgaactttaagaattttaacacagcgattgagagctatagctatccgaatatcatgattaaaaattgcctgttcgaaaaaagcagctatatgtgtctcaatatgcggggaggcacgacgattatcaccgactccatcttccgcaataacacgggtagtcagggtagcgcaataaactttcagaacacgctgtacaaaaatcgcagctatctccatatcaataacacgattttcgactccaaccacggtacaaacctgggcggtgttatctacatttctctttcaaacatgtacctgtataacaacactttcatcaacaataaagccgggtatacgggtggagtaatctttaatgacgtatcaaaagtttatgacaaccgttcgcgttatatcaataatggggccctgtattcgggcggtgctatttatattcgcggcgataaagatctgggttcgtactatggcgatcacgtggaatttatcaacaactcggccccatacaagaatggtgacagcggagggtacgggacttctggaggagcgtttactgcagtagatggtggagaaatcgttctgaagaatagcgtccttgaaggcaacaaagcaatgagccgcgggggcgcaatttggtcagatcagaaagtcagtattatcaacacccttatttccaataatagcgcttacaatgaaaccggtctcaccgtgggtggtggcctatactgcccgctgttaaaagtaaacatcatcaactctacattttcaaacaatcatgccaaagagtatcccgacatttttaatgacataacctttccttccgtggatattgttgaaaatattaataatactgatgggaaaaaaattagtattaaaaacttaaccaaaccagtatcatactgcttgcaaccggggattttgaacattgcgagctcgccgataattgaaacgggcacaaacaaattactgggctcgggcggctacttcaatgggaagccgatcggcgaactgttgaaaatttttatcgtgcaaaattatcagcgcgtgctggataagaaaatcagtgaaaatacctttaaaagcatgttgggtttcatctccagcggctgctcatcactaccttctccatttaacgactcttattatttatcacatagattaattaaagaaacgctggatgaatacgagaaaggcgttcggtatccggacgtaaatgcaaccggtcccattaactggctgacaaaaaaatatttaacattcgatttttatcaattctcaaatgaagaccatcaggatttgatcgtgttcaccttcaatgaatcaaacaccacgctgaacccaccgattaacgtaacgaaaaaatcaaacaccaccaatcctgactttaacaccgtggtatcgtatgttataaccgtaaaaaacacgaacaaaacctccatggtctttgatgcgctggttattgataccttaagtgagggattagtgtacaacggggcgtcccacaacggagtatataacaataccactaatacagtcacgtggattctcaacattcctgctgatagtgaaattaacctttttgttaacgcgacagtggaaaaattcggcaagcttaacaacacagttaatgtcttcaacaaaacggccaacgttaccgtgaatgtcccaaacactgacgtaaccaaggcagtgaatgtgacacgcccgagtttcaatgatacgatttgttacacaattaccgtttttaaccgtaatccgaatgtcgacttaatgaatctggtagttcgtgatgttctggatgatggcctggtcttcaatggagcttccagtggcggtgtgtttgatccgatttctcgcaccattatttggaccatcaacatcactaaaggcggtcaggcggtgatctacgtcaatgtcaccgtcaataaatatggcatgctggttaacaaagttttcgtcgacaacaaaacggccaactctactgtgtatgttccaatagaaccgccggtgaacccggacatgacggttgtgaaactgtcgttgaaccgtacggtgtatgtgggcaaccagacggtctttaccattgttgtccgtaacacgggtgattgtgatctgggtgaggtatttgtggtggaaaaagcgcccgaggggctggcttacagtagctttaaaggcactgactggagctacagcaatggcaaatttacttacggtaaggtgctgaaagtcaatgagtctgcgggctttgagattgtattcgacgccgtgagtccgggtaattggacgaatgtggtggttgccggtagcaatctgaccgataacaaaaccggtaataacaccaccaaggtgtacaagccggatatggcggtggagaagctttcgttgaataggaccgtgtatgttggtaatcagactgtatttacgattgtcgtccgtaacacgggggattgtgatctgggcgatgtctttgtggtggaaaaagctcccatgggccttgtgtacaactccttcaaaggcaccgactggtcctacagcaatggcaaatttacttatggtaaggttctgaaagtcaatgagtctgcgagctttgatatcgtatttgacaccatcagtcctggcaattggacgaacgtggttgtggccggctccaacgtaaccgataacaaaaccggaaataacactaccaaagtctacaaaccacctgttaatccccctgtgaaaccgcccgtcaacccgccggttaatccacacaaaatagaaaaaccggataacgaaaaagacaagattatcaaaaaagattcttcaatcaacatccgcaaaaccggtaattccatcttcctcatgatgctgtcggtcattattagcattccgctgatacgtcgaaaccaaaaataa

SEQ ID NO: 72540 - DNA, 576 bp, synthetic construct
  source 1..576: mol_type = other DNA
atgaacaaaaaggtggtagttgcgattgtggttgttgtgattgttgcgattctggcgatactgatgttcattggttcatctaatgtgacactgatggcaggcgatagctgcataacgctgccgtcggattacatgttagacaataaagggatcgcctacaagaatgatattggcatcttttttatttccgtatcaggtaacagtccaaaagatcagaaggaactcttcgacgccatcaaaagcaacggcaaaagctccgggtataaaaatgtcaccaaagacaaagtgaacggctttaaactatacgagtacgaagctaaccctgacaaacttaagaacgtatcctcggatcgtaaaatcagcggtagttatgaaacttggaaaacctactcgccgtacacgccctatgaagatgtcagtgacatggatgtgactaaattccgctatatcgcttatgtcaatgaaaacacggacgatatctcagaattgtatatctttacaaataacaccaatgtcgatctgtattctggagaaatcaccaaaattattgatagcattgcagttgtggaggagtaa

SEQ ID NO: 72541 - DNA, 357 bp, synthetic construct
  source 1..357: mol_type = other DNA
atgatgattataacgaccattctgggaacgctggtggccctcgaatttttctatatcatgtatcttgagacgtttgcaactaattcggatcgcacctcaaaagtttttgacatggataaaagtgaactggagcgtgaatccgtcaacactctgtttaaaaatcagggcgtttacaacggtctattggcggtcatgattctgctggccctgttcgtatttgtaagcaagaccgcgctgagtgtgttaatggcatacattatcttagtggctatttatggcgggattaccagcaacccgaaaattattttcatgcaaggcggtttggcgatcatcacacttatctcttgcatcttctaa

SEQ ID NO: 72542 - DNA, 222 bp, synthetic construct
  source 1..222: mol_type = other DNA
atgtttaattccaaatttctgattttgattcttggtgtgctgatcattgggttagcgctattcggttatttcggcctgtcagacaatgccctggagtctgactcgagtttaaacgaaagccatgatgatgtcgtttatctctggatgttggatgataacgacaatctgaaactgatcccgacgaccgaaacttacagcgaaggcagcggaagtaactcgtaa

SEQ ID NO: 72543 - DNA, 1029 bp, synthetic construct
  source 1..1029: mol_type = other DNA
ctcataaataagcgtttcattctggtgtttgtaatcatcatgattctccactgcagtgcggttagtgcctatgaaaattatgatgattttgtttttaacaatattacaatcgatgacagtgggcacgatgatactaagctgatcgatgaaaaatccttctactattatgaagaggatagcggttatcttagcgataatatcgttggtggaaagaatattaagaatactacaggcgtagtgatggctgatgacgaatacagttgtggcgctgcatcgtttgcgacagtgctgaacaacttagggaacaatattacattatacgaagcgaaaatcgccaccaacacgacgctgaatggcacgaccatgaaaggcataattgacgcgacgaagaaatatgacctgatgggcgtgggtgttaaattagaaaccgttcagcttaaagaaaactatattgtgaatatgaatattttgggtattactcattggtctgtcgtgaaagaaattaatgaggagttcatcatcctggccgattccaacttgggtaattataaatttgacatcatggaatttaaccaatactacacgaaccagaccatagttatcctgaacaaacagcaatacaacaaccatatttcgattgtcagcaacaatacgaattatattagcaacattgaccaaaaatacatttcgggtaacggctacgcattctacgtatcgaaatctatgtcatacattaacgccaaccctaaggggtatgcattcaaatataccatcatcgtccccaaatggggcggtaaagtcgttaaactaagcacgaaaaaactgaccaaacatcgcattaccgtaaaagtgatctataagataaaagtgtattctaaatcccattttaaaggcaaagtggagactattcaccagccggctatttttaatctggcgcataaggcgggaaccaaatttagcgtctcacggccgacctccttcccaatccagagcatcaaatataccgtgtcatactctcacttcccgtaa

SEQ ID NO: 72544 - DNA, 1512 bp, synthetic construct
  source 1..1512: mol_type = other DNA
atgattctcgcagtcgcatttccagaatcctttcgacaaattactaactcgatccgtgattttctgggcattcacttcggctggttctacctgatggtggtgttcctgtgcgtcgtcattagtgtcattgttatctttcacccgatgggtaaaatacgtctgggggaccccaattcgaaacctgaatattctaccttttcctggatcgcaatgttattctcggcgggtatgggcatcggccttgtattctatggtgcagccgagccgttgagccattatgctgtaatggccccggaaacaacggtgtttactcagcaggcgatgcttgatgctttgaaatactcgtttttccattatggtatttcagcatgggccgtttatggaatggttgcgttggccatcgcctactttaaataccgcaaaaaggaggttccgaatatctccagcacattaaagccgattttcggcaagtatactgaaggcaatatcggttatgttgtggatgcccttaccatctttgcaaccgtggtgggtgttgcaacgtctctcggcttgggtgcggttcaaataaacagtggcttaaactatttattcggaattacgcagtctatcaatgtgcagattattatcattatcattgcgtcaatcctctttctgacctctgccgtatccggcatcaataagggtgttcgcatactgagcaataccaacattctactggccatccttctgatgctgatcgcgtttgtgattggcccaagcctcgatatcgcgaacttcttcatcgaaagtatcggcgcgtacatgaacgactttatccggatgagtttcagaacggcggcatcgggtacagtggctcagcaggggtgggtgcagagctggaccatttactactgggcgtggtggattagctggagcccttttgtaggggtctttattgccaacatctcaaaaggccgcactattcgtgaatttctaacgtacattctgctggttccgagtattttttcatttgtctggttttcaattttcggcaccttggctatgaatgggacgacgcctgggagtcccatcatcaagatgccgatttctaatatgctgtttggaatattcaaccaatatccactggctattattttatccattttggcaattattctgattatcatttactttatcacctcagcggatagcgctacagtggtgctggcgattttatcggaaaacggaaacgaagagacctccaaaaaaattaaagtaatctggggcatcattctcagcagtacggccaccatactgctgataaacggtgggcttgacggtctgcagaacattctgatcattactgcgtttccattcagcataatcctgatgctgattgtcgttagcgtattcaaagaactggtctatgaaaaagatgaaatgcgcctgtttgtgaaagcggagcgccatccgaccgtggaccgtccgttcaaatcttatgagaatcaaaataaagaagatgaagagtaa

SEQ ID NO: 72545 - DNA, 237 bp, synthetic construct
  source 1..237: mol_type = other DNA
atgtcgggcaccgatgagttacttctgaaaatctttttccggaactatgatgaggaagaacgccgtaacggcctgattgacaacaagaacagtcagatgattgtcctaacaggtacgatgctgactttacaagcgacgctgttctccgtggggctcctgaatgaatttgtgtataataaaatcataattaatccggttaaattttggatctacgccgtattgaataacagcacctaa

SEQ ID NO: 72546 - DNA, 345 bp, synthetic construct
  source 1..345: mol_type = other DNA
atggaaaaagtctattgtactgagtgcggaaacgaattagaagggggctctaaattttgtccaaaatgcggcaacaaggtagacgatgaaacctttagcatcgaggtttcgccgagtaaatcctacaaaagttatattattattggctatatcctggctattttgggcattattttaccgattcttgcaatctttggtgcgatagtgggtttttatctgatctaccgtaactacggggatctactcagcggtaagttcaataaaacgaatgtgaacgcgctgctgatcctgatcttctcaatcttcgccattgtgttcatgtttaatgttggttttatacgctaa

SEQ ID NO: 72547 - DNA, 516 bp, synthetic construct
  source 1..516: mol_type = other DNA
atgaaaattggcgattttgaaattggtctgaagaccattattctggtcatcgttgcgcttatcgttatttttgggatcatctcctttttcagtggcggtgatagcgtaaacgtgactgatgttggcatgacggtcaattataattacaaaaccaatgtggccttcaccattataccgacggacacaatcactgaagtgaataacgtgcagttgaagaacattgaagttacgtaccataacggtaaaacccaacacctggaagacgttacctttaacagtaagaatacttatgtgaaagacaatgaatacgggttcaaattcgattataccatctctgatgactgcattgacggtttagatgagtatgattttggccatgcaacccaccatatcaaaggagatattgtgatcaacacggtcggcggcaacgagaaagtggtggggcacattgactatgatgtcccagcgtcggctacagtatataaatacagctcgggaagcggttcagtaatataa

SEQ ID NO: 72548 - DNA, 477 bp, synthetic construct
  source 1..477: mol_type = other DNA
ctcagtaaaaagattttcgcgatcttgatcgtggtcatggcgtttgtctccctggccagcgtctttgcagttgaaacaaccacgcacgatttcgatggcctgtttaacatgagcgttccgagcgatgaggaatttgtaacgcttgacagtaacatcaccggtgcatctgtgtttgggtataatttcaactacggagacccaattggtgataacatcatcgtatattactttaacgagtccattgttgatgataatgacacaaatataactgaatacgtgattaacattctggatgaaaattctactttcaaacatccgtcggtcgaagatggtttcaccgtactgtataaccagatggttcaacatgatggcggctatatgttaattgcctcaaatgacaacgaaacggaagtggtgggcattgtgggggataatctagacgacctgaaaacctatgctaattcgatcgagttttaa

SEQ ID NO: 72549 - DNA, 552 bp, synthetic construct
  source 1..552: mol_type = other DNA
atgcagcgcgagatggacgagcagaaagagcagtatgaaaaaaagatccgtcacgtggaaagcgtcaatagcgctctgtcttcgcaggtgttggacattcaaaaccagttagataaccttgccaatgccaacgacttaaaacgcatacaggagtatatttctggtcacgaactggttgaaaaatacaacctggcgtcgacgattattggctattataaggaggatgtgaaaaaagaagattttactggtgttaccgactactatatcgaagatctaatcacccaggcattcaacaccacaagcgcgtttcaaagcaccgcaatccgcgatgaatattaccgtactgacgataattggaagcgtatttactcagaaattggcctctatgaacatgattatattgaaagcaatgggtacgtactgtcgaaatcccaaagtaaaaagatcacggatgaactggagagttactcaatcaaactgtgggaagataacgaaaaagtcaaaaaaagtaaagtgcaatccataatcgacaatattgtattgcggcattaa

SEQ ID NO: 72550 - DNA, 258 bp, synthetic construct
  source 1..258: mol_type = other DNA
atgtctaatattgtatatctatacaattatgtcctgatctacatttatgtgttttataaggagatacatttccgccacattaaatatttcacgaaccgtatccatagtaaagacaacgattcgatgaaactgtttttcgataatatgagcaaataccttattttttcactcatcttgctgtatctgaatgaattgaacttaatcattatcatttcctttgttctgacccacattaacgtgtacgcgtttaaaaactaa

SEQ ID NO: 72551 - DNA, 555 bp, synthetic construct
  source 1..555: mol_type = other DNA
atgtcttttaatattatttctatcagcctgattgccgttgctcttgcgatggacgcgttcagcgtctcgatgacaaaaggttttacccagaaaaacctcagcaagtcacagatcttgtattatggcctgtttttcggggggtttcaggcgttgatgccagtattaggctacttctgcggtaacgctattgccagtatcgttgaaaccttagcatcaattatcgggtttatcctgctgctaggcatcggcctgaatatgatccgcgaaagcttatcctcggatgatgaggagatcactgacgtctttagcttcaaagaagtaacgttgcttgcaattgcaacgagtattgatgcctttgctgtgggaattgccattgcgctgctgaaagatccgattctgatctcctccataattattggtgcggttgcgttcatattcagtgtgtcgggcatctttattggtaaaaagatcggtcattttgtgggcgacaaatttcaaatccttggtggcgtgattctcatactgattggcattaaaatcctgctgggattctaa

SEQ ID NO: 72552 - DNA, 342 bp, synthetic construct
  source 1..342: mol_type = other DNA
atgaacgccaaaagtatcttctccatttttgttttctttgtgattcttatcgcgtgcaccaacgtagctttcgcatcagaaaacattgacgattcaaaatttagtgaagaatcggatttagatgaagtggatagcgatctcgatgaagttgatagtgatctggatgaagtcgactctgatctggacgacttaaatgatgattcggatttggatgacctgaatgatgatagcgatctggatgagtttgacgatgattctgacttggacgagtttgacgatgacagcgatctggacgagttcgatgacgattccgacctggacgaatttgacgatgacagcgat

SEQ ID NO: 72553 - DNA, 195 bp, synthetic construct
  source 1..195: mol_type = other DNA
atgattacgattaacccggaactcaccaagatgcagaaagaatttgagcagaatttaaaaaaaatggatctgaatctttcagacaaccaaatcaaagaaaaattggcgctgtccgacctggtgctgatgttcagtttcgtagatttctgcactagctttgatccatcggacgtcgttaagttttattctgattaa

SEQ ID NO: 72554 - DNA, 2664 bp, synthetic construct
  source 1..2664: mol_type = other DNA
atggcggtggtgatgccggcatataattccgcgaaatacattcaaaaggccctggatagcattattgatcagtcactggacttcagggacattcagatcattgttgttaatgacgcaagtaatgacagcacaaaaagtgtggtcgaagagtacatcaaggaatacccgaaaaacatcactctgatcaataatgatgaaaaccgaggtccggcgtatagccgtaacgtgggcctccagaacgtaaacgctgaatttgtgaacttccttgatagtgatgattgcattagccggaatgcattcgagaaagcctatctgtttttaaaaaacaatgaggaaattgacatcgctagcattcccatctattatttcgggatcaaaaaccggccacacaatttgaatttcaaattcagcaaaactcaggtcataaacctggacgagcacccggagtacatccagcttagcggtccgagcagcttctttcgttttgaaaagttaaaacattaccgcttcaacgaaaatctgcgtgttagcgaagatcctctcttaatcaaccagatgcttattgacaaccctaacattggctttataaatggtgctaagtattactatcgtcaggatactctgcaaaattcactgatcgcaacctcaaccagccacaagtcttacttcacgtcacgtgtggataattatttcatcgggctgattaattatgcaattaataaaaagggatatgttccccgctttattcagcatattttgatgtatgatctgcaatggattgtggaaattcgtttcattcacttgttgcttagccagagcgaaattgatgagctttatgacaaaatcttcttcattctcaagtacattgatagtgatgtgatctatcatcagctgtctctcccaattgaactgaaacatcacctggccctcctgaaagatcatgggacggcctacagactgaataaggataactttcaggaagacttcaacctgaacacggtatatattgataactatgaatttttagacaaggacaagatttatatttcgggtgtgctgaccaactttctgcgcagtacggatgtatatgcgattgcggatggcaaaatttacaacaccaataagctgaacttcacccaacgtcgtaatttctcgcttgattttgactatggttacaaccacagttttgatgtggttctaccagtaaaaccgggaatgaaaatcagctttaaaactaacgcttcgaatctgctgattgattataatcaaacgagccggctttctggaacgtcccgctatcgtttttctaaagattacttgtcaattgattgtagaaaccacatccagatcattgagaaaaccatcaccaaaggcgtgaaattagaattatctgttttaaagcagatcctgaaagagaaaaaacaggggtggcgtacaggcattctgctgcgcatattgtacttcatgttttatttttacttccgcaataaacacatatggatctttatggacttgccgaacagttccggggacaatggttatttcttgtttaaaaaagcgattaaatccgacaaacttaaaaatattaaaaagtattacgttttcagcaagtccaaaaacctgcatgaaacctttgccgaacaggaaaacaaatatgtcgccagttcaaaattcatgaaagcccgcaccttatcgggctttatcacgccaaatgaagaatttgaacgcctgaaaaaaataggcaacgtcctacagtacaaatccatcaaacatcgcctgtacttactgtttgccgattacatcattgcgtcccatccggacaatggaatcatttatcccttttggggcaactaccatcatctgtctggtctggcacgatccaaaaccatctttctacagcatggcgtcacaaaagacgatatctcctattggctcaatcggtatgacaaacgaataggtctgattgtcacggtatcggatctggaaaaagaatcctttctgaaccctaaatacggctatgatgagagttgcatccaggtacttggttttccacgcttcgactttctcaaaaagggcgaggacaagaaggaaattgtcctcatgccgtcgtggcgccgtcaacattcgcagctcagtgaagacgaatttatccaaacagattactttaaatctataaatgagttgatgaacaacgaatatctgatcaaattcttaaaatcaaaaggctaccgcttaatcttcaaaccgcaccgtaacgtgctgaaattcattgattcatttgatatcccggatgaagcggaactgggcattgagatgagctacaatgagatatttaaccacgcgtcattgatgattaccgattattcttcggtggctttcgactttgcgtatctgaaaaagccgctgatctattatcatcatgacgatgattaccactttaatctggatgactcttactttaaatacgataccatgggttttggtcctgttgcaacacaaatcgatgagctgaaagatgaaatcatccgtctggtcgaaaatgactgtcaaatggatgagaaatatattaaacgcgttgacgatttctttaaatacactgataaaaataactcgaaacgcgtgattgataagattttggaatttgatgaaatgttttattattaa

SEQ ID NO: 72555 - DNA, 396 bp, synthetic construct
  source 1..396: mol_type = other DNA
atgtcggaaaaaagtttaattgtcaatcatgatgcaatcgatgaggatttaacggagaaattcataaacatgcatgatggtctgccagtgttgctgatgaatattctcgatgactttgatgacggcatctggattcgtcggtatgagctctacctgaagtatccggaactggaaaacctggacggaaaagaaatggaaatcacctccgaactgcttaaagaaggtaaaatcaaagaagccgaggattttcagattaattatgcgcttgactttctagataagcacccgcagttcaaacaaatgattgatggggttcaccgccagggcagcaaagacttggaaattctgctgaactcaattaaggaagctttcatcggcgattttgactacttttaa

SEQ ID NO: 72556 - DNA, 549 bp, synthetic construct
  source 1..549: mol_type = other DNA
atggtggataaaaaagccccggcggaaggctggccgccaatcagcggggattatatcgttggtgaccctgaaagtcccgtagctgtcacgacgctcgcgtcccatattgaagcggacctgtcgggcgccgcaatcgcaggaccatgtaaaactgagaacctgggtatcgagaaagtcgtagccaatgtgatctcaaatccgaacatacgtttcctgattctggcaggtgcggaagtgcaaggtcacataaccggtcaaagctttaaggcactgcatgaaaacggggcggaccccgacaaaaagaaaattgtaggcgccacaggcgctattccgttcgttgaaaatgtcccgcttgaaggcgttgagcgctttcagcagcagttggaaattgtggatctaatcgacaccgaggatattggcaatattcagtctaaaatcaacgagtgcattgaaaaggacccgggagctttagaggaagatcctattgtgatggaagtcgatgaagaaaaccagaaattggttatcgtgaatgatgatgcggaagattaa

SEQ ID NO: 72557 - DNA, 354 bp, synthetic construct
  source 1..354: mol_type = other DNA
atgaataactgccaaagcagctccgtcaattggagtgagaaagtgcgtatcctggatgaaaaaattcgtcgcgaaatcggtctggaaggggaaagtgaagcaaaacatattctgatcaaggttcaaaccaaatcggccgagaccatcgaaccagcgttcatagtaggcgaggacgaaacatttctggatctgtttgtgctctctcctcaggaatcaaatattatttccactgccgtgttgaaaaacaacattcagtcaattggtgttattggcggaatgtctgctgaaaagacggatgcgtcggagatcccggaccgcccggcacttgatgacgcgagcacgttatatcagtaa

SEQ ID NO: 72558 - DNA, 609 bp, synthetic construct
  source 1..609: mol_type = other DNA
gtgaaacagaaactgattgccaaggcgcaagaactgcggcaacatggctttaccaccggcgagatcgccgacgaacttaacgtgagtatggacactgcccgttggttgactttgcagaaagcggaagagaaaaccgaggtgccagtagatttcgcgattaattggaagagcatcggcggaaattccacacgtttaagctatgtttcaggtgcgctgagtgatatggccctgtcgcatggtgaagtggacaccgttgtcggtattgcggtctcgggcgtgccgtttgcaacggtgatggctgatttcattgaagacatgacgggaattgacacgtcaatagctatcttccacccgaacaaacaccgaaaaaatcaggattcctccgatgatgaaggtgcaataagcactaactttggcaccgttgagggcaaaaaggttgttatcgtagatgatgtcattacgagcgggaaaacagtacgcgaagtcattcataccgtgaaagacttaggtggggagcccacgtgcgtcaccgtgctaattgataaagcagggctctctgaaattgaaggcatccctgttgaatctctgatcaaaatcagtcgcctgtaa

SEQ ID NO: 72559 - DNA, 354 bp, synthetic construct
  source 1..354: mol_type = other DNA
atgattttaaataaatatctgtcaatgattctgtcggcatgctttttcatgctccttatgatgatcgtcagtgctgttaccgtggtgttctttaatgggggttccatcccatatgtgggcatcgtgtttgttgtaattttttattttatggcgcgcatgttctacaactatctgcgtaacgacgaactgtacaaaaacaataagaactacacgagcgatgcgccggatgaggaatacatgattaaaggtccgcgggatgcaaaaaaaatattcattatcttctgggtaatcattgttctgattttggccgccgtctctctatggttatatagttttaatatgggcagcgtctaa

SEQ ID NO: 72560 - DNA, 1164 bp, synthetic construct
  source 1..1164: mol_type = other DNA
atgaagcacaaccctttccgcaaacggaccggcattctgccctcttatttcaccggtcgtgaaaacgaattaaacgaacttaatgaaatctactgctcaacgaaacgtggaatccccggccacctgatcctgtatggaccgaaaggcattgggaaaacgagcctgctgttgaaatttcaagatgagatctccaattttgatgacgtctattcggttcgcattccgctgatggagggtaactttgatgatatctacacactgataatcgagaagtgctcggatgcgctgaacattaacattggtcatttctgggagaaaatcaattctctcggcattaacataccgctgattgggggcattagctttagccgtgagattccgaagaccagcccggcggttgcctttgaaaaaattctgaatgtaatttatgatgaactagatagcgacaatcctgtgctgattctcctgctggatgatcttcagagaattattggcgatgacgaaacgatgaaaatattgagcatcttgcagaatgcacttgtggaattaaatctgcagggtaaaaacatcatgtttgttgcgacaggttctgaagacattttctacaaaattcaagacaaacttgactcagccgtacgtattttcgagccgtatctgatcgggccgctatcctatgatgaactgtgtgaggccattaacgttccaaacaaaaaacagaacgtcagttttgaagaagatgtgttgaaggaaatctattacctgtccaatggcatcccatattacatgcaaattctggcttacagttgcttcgaagaaataaatgcagacaacaaagtcaccatgactgagtttaaaaaagcctctgtgcattcgctgaacattctggctcagcgcgaatttaaagtgttgtttagcaaatccacgaccgaagagcgaaagattctctgtctgatggcggaaagtgacaaaaccgtgttaagttatagctatatcaaagataatgcgaacctcaattcggaaccatcagcattattaaagaatctgatcaataaaaacatgatcattaaaccgtcacgcggcaagtacaagctcaaaaacaatcttttcaaattatacttgcagaacctgcgcatcaatcaggatactggtctgatcaatgaataa

SEQ ID NO: 72561 - DNA, 237 bp, synthetic construct
  source 1..237: mol_type = other DNA
atgatgcggcacgagctttttgaagttgggagttacgattattcggacttggatgatcgcctggacaaaccggtaatttggagcgaagatgatctgaaactcatagcggaaaactatcgtggtggaatcccattaacctccgagcatgacaatatctacgtgggcatcggtaacaatattgaatatgagaaaggcaagctgttcattgaagtcccggacgaactggatatggaataa

SEQ ID NO: 72562 - DNA, 1668 bp, synthetic construct
  source 1..1668: mol_type = other DNA
atgaccttgcagaaaaaactgcagatcaatattgtcatgagcaactacaaccagcgcagcagtagctattcgtccggccacgattatatcttcctggataatttagccagcagttcttactccaactacttccgcagtgatttgaaaaacctgaagatcaaaacttccaatggtacggaatgtcaggtagtgtacattccgtcttatggctcacaaggcgcagcaatccttgcgcgcgtttcggtgggtcagatttcgcagaacaccaagctactcctggacgttcacgacaccggaacggccttcgcaagcacgctttccaccggtaacgaagttttaatgtttgatgcgaataatgatacatactcacaatttttcatgaactactccggtctgtcatcgaacaatgactcaacagacgggggccagtttctacgcgcgcgctttgttccgaacctcgaagggacttctcccacggatttgtttaccacctttgctagcggccaaccactggccaacaatcgtgtggtggtagcccgtttcaaatatattaacggtaacgtttttgtgaacgataatgcgacctatcacggttccaccattgggggcatcatgatgcagattgatggcactctcagccctgacgagtctaatgtaaaggcgacggtcaactactggggtggggaaaaagattattgcatgttcacgggtgcaaaaactttagtactggccagttcatttgatgcgtacaatcagggcagtgatgaagagggcaactggaaacagtatcattttcataatcgtgtgggaaccgggacatcgaatacctcggattatattgaagggttcagccgcaacaatccaacgaaaatttatctggggtgttttaaaatgattattgattacgacgtaaatagcaccatcggtcatggccgtggatacccgaccggccttgaacataccgagaaaatggatgtgatcgcgtgcctgctggatgagggcgaacgaacatatgtgaatgatgaacatacggcgtggatttgttccaaccaatgtgcggtcggcgatatggttacgctggacatgtctagcacaatggaacacaccattgttcggaaagctcaagcaggcgaattggcgttcggttatctgttaggtaaagtccaggtgaagactagcggactgacactggttgctgtggccgtgctgggtgatgtctttcgtctgaaactgaaaaggcccgtggctgaagacatattgccgaatacccgcatctatattgacagtgccggtgaatgcaacccggttgaaggccatgacttacgactgctgtcaatcgtgaatcttcaaaataatgaggatacggattacatcagagtttatcgtcagatgtcggaggtggaaatgtatcgggaatctcagaactgcattgatctgggagattgcagttttgaacaggatgagataactcacgttgttaacatgatcgtgccgtcagagagcaacatcatggcccaggcaaattatgtcaaggacgcagacggtgtcacctattgcgagcttcctgatgtggctattgtcaataacgtccgtttcgtatgggaagacaacaaactctacatggaatgggaaggctgtgacgatggccaaaacgtatattttatataa

SEQ ID NO: 72563 - DNA, 192 bp, synthetic construct
  source 1..192: mol_type = other DNA
atgaccatccgcaaactggtcggtacattagaaaacaaaggcccgtatattgaccaaagcaccggccattggttctactggaacgggactcgttatgtggatagtggttatccatacgcggttaaattgatcattgaatttaagatcgaaaatggaatactgtattactccattacgtgggaggcccagtaa

SEQ ID NO: 72564 - DNA, 150 bp, synthetic construct
  source 1..150: mol_type = other DNA
atgaaatatataaaatactttgaaaccattgaagagtatgaatcctggatgaaagtagaagaaaacgcggaagaggtctatcagagtgaagagaagattctggttgatggcgtgatcatcagccatacgtacaaagaggaagaaatttaa

SEQ ID NO: 72565 - DNA, 252 bp, synthetic construct
  source 1..252: mol_type = other DNA
atgatttacgaatttctggaagcaaaccgtaaggacattgatattttaacttcgtttctggtgaccgcgattccgatcgtcatgctgtattccgaggcgctcggtatcaccgagaatacgattccgtattgcattctgatgatcatccttggtatagccagtcattacgcaagccgcatccggggcgagggcgatgttgaagatgccaaacagaaagctaaacgcgtattggggttcccagaagaaaaataa

SEQ ID NO: 72566 - DNA, 270 bp, synthetic construct
  source 1..270: mol_type = other DNA
atgaacaaaattaaaaaaaagatattcatctgcaactttaccaaaactattagtagcgccgttctaacggctgtggcgatcaacatcattatgaccaatgcaacaaagtacgcgctgattgaagggttactgccgtttacgcttgccattgtaattgtcggcctcatcgatctgtatgagtatcggtgtgagcgtgaagacaaaattaatttggatgaactggaagagcgcatcgaaaaactggaaggtaatgtggatggcgaacgctaa

SEQ ID NO: 72567 - DNA, 603 bp, synthetic construct
  source 1..603: mol_type = other DNA
atgatgaaatttatgatcaccatcaccatcaacaatatcgaaaacaaagaactgaaatccaagttaaaaaaaataatcaataacgatgagctgctcctggaaaacattctgaatacaatcaataaagagaagaactataataagctgctgctgacttttaagaacttgtcggaaaagaataacactattaaaaaactgtatgaacggcttgagaaaaacccgctcagttttaaaacgaaaagtaaatctgttttggaaaatcttcaaaaaggcatgctgctggcatttttctcagacaatgaactaaaacacgagctgatcctcgaaaaacccatagctgtgattctggacaattacagcgtccaccatgccattttcttcacggaattatgcaaaattttaaacatggatttaattcatttgcctccgtattccccaaaatacaacccgattgaacaggtatggcgtaccatcaaagcgaaaatttctcgcaaatacatttcaagcattgcgcagcttaaatatctgtttaagaccgaatttaaaaaggtggttgataatagctcgttctggaaaaactgggaggaaaacttcctgcagtaa

SEQ ID NO: 72568 - DNA, 384 bp, synthetic construct
  source 1..384: mol_type = other DNA
ctgtttaaaaccacgtatgtgtctaactttggtgaaatcaaccatatcctgaattactgctatgaggaattagaatggggcgagctcatcaagctgtcgaatgagctgttggatattgaaaaaaatcaccagaataaccggcgcagtgataatatacaatattcagtaatcttaattgcgatcgttactctttgttcccagttattgatttactacagcaactttaaagatgtgatacttttcattggcgggattgcctttctgttcttcctgagcttgattttcaaagaaaaaatttattatgtctggcagattctgaagctggtgccgaaatttatttacaacctcatcgttctactgctgaaacgtatcaaagacctgtaa

SEQ ID NO: 72569 - DNA, 570 bp, synthetic construct
  source 1..570: mol_type = other DNA
atggatttgaactttattagcattattctagacataattctgaccatcgtcacgggtttcatggcatttgcgacctacaaaatggcccgcagtacgaacgaatcggtggaagaaatgaaaaagacacgtgtggaggcaaacagcgctgaggtaatcatgtattttaaagtcgagaataatcgcatgtatttaattgttgaaaacatcgggaacacggttgccaaagacatctcgattgaagtggagccagaactgaaagattcacacaataaggattacgaacatctgaaggagattagcttcctgcctccgaactatcagattaaagcgttctttgatatgggctttaattacttaaaaaacgaagacaatccggttaaatataaattcattattacatttaccaatatctacaatactaaaatcacgcgggaatatatcagtgatttgagctatatcaaaagtgtgtcttatctgacctcagaatccgattccatagaaatgtctctgactaaaattaaagacgaactcaagaacaccaacgattacctgaaaaagcttaataactaa

SEQ ID NO: 72570 - DNA, 729 bp, synthetic construct
  source 1..729: mol_type = other DNA
atgaataaatacgtgaccttcgtctcagacgaaatctttctagaagaagtcaaaaaggttgtagatgcctatgcgacggatgaagatctgtccaaaacaccttgggaagttctgagcaactcgcgcgagacgattgaccaatttaaaaccctttttgatatttattctaatcgcttcagcctgagcgaatggattaattttgaaattccgcgccagcatgataagacggcatcgaaccgtgttggtgacttccaccagaatcttttgggtcgtgttgacggttgggtgaatctgggccgtgggcatccatccggcatggacttgaaaaaggaagatgataccatatggatcgagctcaagaacaaatacaacaccatgaatagtagttctctgcgtgatacccgcttcaaatgcgaggagctggctgagaaatatccgaatgcgaaaatctattgggcgtatatcgtgtcacagaactacgaaagcttcgataaaacttgggtgtaccgagacaacaaagaaaatgtggtccacgaaataaacgataacattcggaacattgccggaaaagatgtgtatacattagtcactggcgatgaaacggcttttgagcaactgtttgatgccctgcccaatgcaatcaacgatattaaaaagagtaaacatattttaaccccgaaagaccaggtagtatttgaaaagtacaaacagctcatctttaaagactaa

SEQ ID NO: 72571 - DNA, 495 bp, synthetic construct
  source 1..495: mol_type = other DNA
atggccgatagcattattctgcttgaagagcgtaaagaagtcacgaccttcctgctggatgaaggtacaatcaccgccaccacagttaccactccgaccggtgaaacgcccgggtacgaatacgcaggcactaaaataaaggtcgatgatgtagttacattgagcgtcaattccgacatcggaaaaccaaccgtgaagaaattcacgggtgcggaaggggaaatcatcttaggcattgcagtgaacgatccggtgacaatgaccggaggcaaacgcaaaacggcgattctcgtattgggtcatttatttcgcctgaaactggcgtctggcattagtaacattgccgttaataaccgtatagctctgaccagtaccggtgcgatcaagtccgatgagggcgagtatattgctatgcaccctgtgactagctcagacgactacaaatatatcgaggtgtttcggccgtatgacattggcacgactgggtcgacgtaa

SEQ ID NO: 72572 - DNA, 939 bp, synthetic construct
  source 1..939: mol_type = other DNA
atgattaccaaaggaaatgataccaaagtgcaaaatgaggtaatagctcaaaccattactgatgaaactgcaaaacgcctcaagttagcacgtttgtttcctaaacaagaaatcaaagagaactcagattactacacctactttcgccagaacatcaatctcgatgaagctatcaaaaagggtctgcttggagaagcgaaagacattgcgccgggtgcctcgctccaagaactgaacatccggaaaccggtaaccgacacgatcagcattgacacggttggtggcgtcctgaatgtgaataaggatgtgttcgacagcgatatcgtttcatttgaggatctgttaggcgatgtggcgaccgtgattgccaaccgtattgaatacaacatttatgacaccttaatcagctccccgaacgttccacagtataacacaacccaaacagatgataccatggacgcgtttggtaactttgtcatcaaagcccaggaagcattcaaaggcaatgcgggcgcgggggccgatctgacaatcatggcggaatcttacaaaacgttaagttatgttaaacagctggcttactccagcaacaaattggttcagcctgtagaagacattaaggaatattatgggattgacaacattgatcttctgggcactacccaggcggacggcggatctctaataggtgaaaagcagtacattgggttcgatctgcgaaatgccccgctgactgtgctgtattccaaatcgagcggcacgacggtcgcacccattacgagtgatgagaatattgcagatttttatcccatcattgaaatcatgcgtaaagacatttatgatgagctgccgcagtatacaaagctgttcatacagagtaaagtcggtatcttgctgaataaaccgggccttgccctgaaaggtacgtgccgcccataa

SEQ ID NO: 72573 - DNA, 927 bp, synthetic construct
  source 1..927: mol_type = other DNA
atgctgaccaaaggcaatgatgcgaaagtacaaaatgaagtgatggcacagattgtggccgatacgtctgcaaagtggatgaaatttacgcgtctcttgcctaaacaggaaattgaagagaactcacagtattacacgtacatgtctcaacgtgtcaatattgaggaagctattcagtcaggcgttcttggtgaagccaaagacattgccccgggcgctactcttcaggaactgaacgtccgaaaaccaatcagtgaaactatcagtattgacacaattggtggcgttctaaacgtgtccgctcaaatgctggattccaatctgatctcggtgaatgacatgctgcaagatgtgggaatcctgataggccgcagcattgaaaaggcggccattgatatgattatgaatagttcgaaagttgcgacctacaactttgaaagtggcgatgacacgggtatgaccatcctcaaagcgcaggagaaattcaaggaatcggcaggtagctatgccaacttaaacagcatggccgtaagctacaaatctttgacaaccctgaaatcagacatattttcgagcaaccgtcaggtcgaaccggtagaacttatcaaaagctattatggggtggataacattgatatcttagggacagcggtctgcgatggcggttccgagatgggggataagacgtatatcgggatggattacatcaaccccggaatgaaactgctgtactcccgcactaccggcaccaccgttgcgccgctgggcccggacggtgagatgtatgatttctatccattgattgaatttatgcggaaggacattcgcgatgagctgccgatgtataccaaactcttcatcctgtcaagcgttggagtgttaatgaatgcacctaaccgcattatcaaaggtaattttcgtgcgtaa

SEQ ID NO: 72574 - DNA, 819 bp, synthetic construct
  source 1..819: mol_type = other DNA
atgagcgataataaaaataataatattagctggacctctttttgccaggctatgaatagtattgcctactggctgctccagaacaaaaagaaatataagaaacgtgaccattaccaaattttaacgttgaaaggtagctgtagcgatatcgaaaagaaagcgaagaaactggggaacgataaactggtgtcaatgtataccatggctctgatcaaagataacacctctttggactttctgccaaactatgtgaccctgaagaacggcgaacagattgacaaagccgaatacgttgacatggccatccgaacagaggcatatatccgcgccaataaacgccttccggcgattgtatatagaatgtcgacccttcccgattacaaagactccacaatgaagctatttatcaatgtcttcaacttcaaaggtaatacgatcgatgaggcactggcgattataagcaagatgaaactgtacagtaaatactttgattcccagaaaactgacaagaaaaccatcaatgatgcttctctgggtaaaggttcgaactgtgtggactggggccaggtgtattatcgcattgcgaaatcattggggtatgatgtacaatttgtccacgtcaaatgccgtgtgagtggaactggccacattaaactgcggttaaaacataaaaaacatacgggaggcaactggattaaccgtgatccggcggcagttgcggataccacttcgggcaacgttaaatcaatctggtgcgaagatggttacctcattgcatatgacccttcctggatattcacggatttatatagcagttaa

SEQ ID NO: 72575 - DNA, 267 bp, synthetic construct
  source 1..267: mol_type = other DNA
atgaccgatcgcagcgcagaaatcagcaaaatcaacgacgaaaaccaggaagaagatgaggaactcttcaattcactggatgaaatcattagtcaaaacatagacgaaattgatggtgtcgtgatttcgtttccggagaagattaatagtaaaaatggcatcgcccatacggctcgtgcgtttatgtggatttgcgacttggcgttaaaatctatcctggatgagaaatattcccagccagtttggattcttatgaataacctgtaa

SEQ ID NO: 72576 - DNA, 348 bp, synthetic construct
  source 1..348: mol_type = other DNA
atgactaatattgaaattaatgccgaaaccaaaaataaactggaagcgatcgggaaaatcctgtcgccatacctcgatatcggttacgacgattttgatgaaattatcggtattctgatcaacaatttcaataaccataaattaaaagcagagtatgacgagaaagaaaatataattaaaattggatatgaaaacagcaaaatatatagtatcccgattttgattttcgagctgaaaaagggctgctatgaaaaaattggcatttggatgcagaagaacaactttattccggaaatcaacaccgacgtgacggaatacatcaaaaagtgtgaggatacatttctttaa

SEQ ID NO: 72577 - DNA, 105 bp, synthetic construct
  source 1..105: mol_type = other DNA
atgctggaacaggaggtcaacggtaaaacccacgtgttggttccgaaagatatttgggacgatatcatggcgatgtttaacgaacatctgaataagggcgaataa

SEQ ID NO: 72578 - DNA, 558 bp, synthetic construct
  source 1..558: mol_type = other DNA
atgatttccgataaagcaggccagtacctggttaagctggctgggaatgcgatccgtcaatatctggaaacgggggaaaaaattaaaaagtctgaagactacccgattgaactggatgaaaagctaggtgtcttcgtcacgttgaacaaaaactccaatctgcggggttgcatcggctatgccgaaccaattatgtcggcgattgaagcgacaatcgatgtggctatagccgcggccgttaacgatccgcgatttccccaagttagtttagatgaactcgagacccttgacttggaagtaaccgtgctcaccaaaccggagctgattccggtggcacattataaccagtactttgatgagatcgagattggccgcgacggcctgatcatccagaaaggttattcacgtggtcttctgctgcctcaagtagcaactgagaatcgctttagcgtggaagacttcttagaacacacctgcatgaaagcgggcattagtactgatagctggatggatgaaagctgtgacgtctataaattccagggacagatatttaaataa

SEQ ID NO: 72579 - DNA, 1791 bp, synthetic construct
  source 1..1791: mol_type = other DNA
atgagcaataatcagaataagaataaattcatccgattgctcaattattcgggaaactataaatatctgactattttgggtatgattttttcaggtctgagtgccatttctcttttggtcccattcatatacatatggaatgtggtaaacgcacttctggttgtagcgccagactttgcgaaagcccagaacttggaaagttatgcggttggtgcgtttttctatgcatttctggggatcgccttaaacttttgcggtttaatgtgcacgcacctctctgcatttaaaaacgagaagaacatgaaagacgccactatcaatcatctgctcaatttgcctctgggttatttcagcaaccacactagcggcggcctgcgtaaagtaattgattttagtacggcgaagaccgaagggttcttagcgcataatttatttgatctggttggcgcaatagtcacaccgatcgtatttctgatcttgttattcagctttgacctcttgctgggcctgatatgtatcattccgatcatcctatgtttcctgttcatgtatccgatgttttcgaaagatagccagaacatcatggcccagtatcagagttacctggaaaagatgaacagtgaagcggttgaatacgtccgtggaatcccggttaccaaagcattccaacagacggtatattcatttcgcaacttcatcgacgccattaaaaattacggcaaattcgcggcggattattctctgtcaacccaactgccgatgaccgcatttacagtctccatcaacggcttttttgctctgttaattcctgccggcatcttaatcgccggcactctggttgatgttaaatttctggcgaatttcattttctacgtgattttcactccgatctgcgctgtgatgatgaataagatcatgacaatttcccaggactggatgcttgccagctatgccctggacggtattgaagcgattctgaatgagaaaccgctggcggagccggcaaacccgcagaaacctaaaaaccatagcattaaattcgagggcgtctttttcgactacgaagaatcaaactcggaagaacatatcttaaatgatattaatctgaaaatcaacgaaaacgactcggttgcgctggttgggccaagcggtggaggaaaaaccacgattgcatcactgattcccagattttgggatgtggatgaaggttccattaaaattggtgaggtggatgtgcgcgatatatccacaaaagacctgatggagaacatttcctttgtatttcagaacacccggctgtttaaagattccatttataataatgtcgcgattggcaaaaaaggcgcttcacgtgaagaaattctaaatgccctgagtcttgctcagtgtgatgatattattgatgagttgccggatggcattgacaccgtcatcgggaccgagggcacctacctgagcggcggtcaacagcaacgcatcgctcttgcccgcgcaattctgaaggatgctccaattattatcctggatgaagccacggcactcgcggaccccgaaaacgaatacatgatccaaaaagctatctcggaaattaccaaagataaaacggtgataatgattgcgcatcgtctctctaccgtgaagaatgtggataagatttacgtggtggaaaacgggcgcgtggtggaagaagggaatcacagcacgcttgtcgagaacgagggtctttattcgaaaatgtgggatgaatttaaccgttctatccaatggaaggttaaaagcgaggtgatctaa

SEQ ID NO: 72580 - DNA, 1746 bp, synthetic construct
  source 1..1746: mol_type = other DNA
atgctgtctgaattgttcattgaacgctttggcctgacaaaagagggttctgacaatctgatcaaaggaattatttacactgcgctgcagaatattagtttcatgtttccggttggcctgtatgcggcactgctgtatatctggattaatccgctgatgggtggggagatcatcagtcctgatctgggcatatttattttaggcattctgattatccttggcattatattcgcgttcagctggaaacagtatcattttgtctataacacaacttatgtggagagtaccaaccgccgaataaacctgggtgaaaacctgcgtaaattgccgcttagcttctttgaacgccgggacctggcggacctgactgcgaccatcatgaacgattgcacggatttggaacatgtgttcagccatgcaattcctcaactgcttggtagcatattatcattaattctggtgtccatcgggctcctgatcttcgactggcgtctcgccgtcgcactgctgtgggtagttcccgtatcatttatcatcctgtatatcagcaaaagaatgatttaccgcgggagtaagatcgtaacaaatgatttgcttgaatgcggagactcaatgcaggaatgtatcgactccattcgtgatctaaagagctacaactacgaaaatgagtatctctctaaattaaacgatattaccagcaaaatcgaaaaaagccgcattaaatcagaattaatgctgtccagtggcgtgattaccggcaaagtaattttaaatctgggcatcgtctcggtcatcctgctggggtcaaatctaatcatgaacggccaggtaaccatctacacgtttctgatattcctgatagcgtcggccacgatttacgctccagttgaaaacggcctgatgtttttgtcggaaattctgatgatggatattaagattgaacgtgcaaaggaaatcgaaatgctggttaccgaggagggtcttaaagattactcgctggacggctatgatttggaatttcgcaacgtgaaattcaactatgataatctaaaagatgttttatcggatattgactttattgccaaacaaggtgaagtgaccgcactggtcggaccgtccggcggcggtaagtcaacggtgagtaaactcgcggcgcggttttgggacccggtttctggtgaggttagcattggagggcaaaatctggcagaattggattccgaaaaactccttgaaaacttctcgattgtatttcaggatgtgattctcttcaataacaccatcatggagaacattcgtgtgggaaaaaaagacgccagtgacgatgaagtgattaacgccgctaaactggcggaatgtgaggaatttgttcaaaaacttccgaacggctataatactatcatcggggaaaatggtgagttattatccggcggtcagcgtcagcgcatttctattgcgcgcgctctgctgaagaacgccaatattgtcctcctggatgaagccacgtcctttttggatgtggagaatgaatctaagatccagaaggctatcagcaccttaattaaaaataaaacggtcatcatcattgcacaccgtatgcgtacaatcgcgaatgccgacaaaatcgtggtcttggatgatggtaggattgttgagcaaggtagcccagatgaattgcttgctcagaacggcctgtttaaacacatggtggaactgcagaaactcagcggtaaatgggagatttaa

SEQ ID NO: 72581 - DNA, 582 bp, synthetic construct
  source 1..582: mol_type = other DNA
atgagtgagatcctgaacgtgaaagatctgattactgttggtatcttctcggtgattatggtggtcttgatcttcctgtttggcatgctgggctacattccgatcttgatgctggcgcttccgattattgctgcgctgatatgcggagttccgtatatgctgttcctcacgcgcgttaccaagttcgggatggtgacactgctggggttagtcctgggcattgtaatgtttctgtccggtcacacctgggtgcctattgtaatcttcacgctctttgcctttgtcgcagattgcatcctgaaaatgggcgactattcctcggttaaaaactcaattattagctacagctgttttatcgtcggtattatgggtaatatgctaccattttttgtgttacgggactatttcatcggctctatccgtaatagtatgggcaatgattacgtgaacgtgattgcaccctttctgaactatgaagtttttataattctcgttattcttaccttcatttttgggttaatcagcgcctatcttggtaaaatcgtattgaaaaagcatttcgaacgcgcgggaatagcttaa

SEQ ID NO: 72582 - DNA, 723 bp, synthetic construct
  source 1..723: mol_type = other DNA
gtggaacttaagctaaacaacaatcccggtttaaacgtggaccctcgcacaaaaatcattctgctgattattatcagcttcatggtcttcaacgaggcgccgctgtacgtgagcggtattctcgtactcatcccattcttctgcctgtttttttcagactacaaaaaggtagccctgatttatattgctgtctactccatggccatttacgtccagatttatttgatcccgacctcgacgggtatcttatcgataatcttgatcacttttagctataccagctcgcgcatgctgccgattttcatgatggggtattatacgatcagctccacaaaagttagtgaatttatcacgtcaatggagaatattaacgttcccaaagagattattattccgctttctgtagttttccgctacgtgccatcagtttatgatgaaatcaagagcataactaatgcaatgaaaatgcgtggctttggcctgaccgtgaagtctctgaaatctccgttgaaaatgattgaattttatatgattcctatcctgatcagtgctgttaaaaccagtgatgaactctccgccgcgtcccttacccgtgggctgagtaatccgcgtaaacggacgcatctgctggaagtgaaattttcgaaaatagattactttttaattatgattgcggtcatcggctttatcatttttgcatattatttcatcggaggccactaa

SEQ ID NO: 72583 - DNA, 1434 bp, synthetic construct
  source 1..1434: mol_type = other DNA
ctgatcaatattaataatgttagcttttcctacaatgatgatattaatcttgagaacattaacctcaacattaaaaaaggtgaggtgattctgctgtgtggcgaaagcggctgcgggaaaacaaccctgactcgttttttaaacggccttattccgaacttttttgatggcaatcgcaagggtagcgtatacatgaacggcaatctgatcgacgagatgaagatctacgaaatatcggaatatatcggctcggtcttccagaatccgaaaacccagtttttcaacgtggataccacgtctgagctggtgtttggatgcgaaaacttagctatcgataaagacgagattgaacgccgattggaaatggttgtcaacgattttgacctggaacatctgctcaacaagaatattttcgaactgtccggtggtgaaaaacagaaaatcgcctgtgcaagcgttagcgcggtgttcccggacatcttggtgctggatgaaccctcatccaatttagactcgcagtcaacgtggtacctgggagaaataatcaaaaaatggaaatcacaaggaaagacggtgattatcgcggaacataaactgttctttttagaaaacgtcgtggacaaagtaattttcataaaaaacggtcgcattaccaacatttggccaatttcagaatttaaaaatatttctcacaaagattggggtctgcggcaattgaatctggggaatctgaccgcaaaatgtggtgaatattattccaacgcgcaggaatttctggaatttaaaaactttaaattcaaatacaaaaaaatccctgtgttggatatgggtaattttaaagtcccgaaaaatgagatcatcgctattattggcaagaatggggcgggcaaatcgacctttgcgaactgtctgtgcggtcttaagcgctcattcaacggggaactgatcttcaataacaatagcctaaaacgtaaagatcgtctgaaaaagagttatatggtgatgcaggatgttaaccaccagttattcactgaaagtgttcttgatgaagtactcttgagtatggatgaagaagatattgattttgctgaatctatcctgacgaatttgaacctgattcacctcaaggatgcccacccaatggttctcagcggcggtgagaaacaacgtgtcgcgatcgcctcggccattgcatctaaaaaggaaatattgattttcgacgagccgacaagcggccttgacttaaataacatgatgaaagtaagtgaaaatctgaaatatcttcaaagcctggggatgacttcttttattatcacccatgacttcgagctaatcatggaggcatgctcccatatcattcatctggaggacggaaaactgattggcaactataagatcaacggcgaaaaattaagtgagttctttctgaactaa

SEQ ID NO: 72584 - DNA, 705 bp, synthetic construct
  source 1..705: mol_type = other DNA
atgagcaccatcatcgagtttaaaaatgtgtgtaaagaatataaatcgggagaccacattctgaaagcgatggataatgttaactttacaattggtgaaggggagtttgtggtcattctggggccgtcaggtgcaggcaagagcaccctcctgaacctgctgggcggccttgatagtgtgacctccggtcagattattgtgaatgataaccatgttgaatctttcaccgacaaccagctgactgaataccgggcgaaaaacgtgggttttatcttccaattctataacctgattccaaatttgaccgccctcgaaaatgtggaattaatgaaagatattgtggacgtaaaaatcaacggattggatgtcctgaactcagttggcctagaagatcatgctaatcagtttcctgcacaattatccggtggcgaacagcagcgcgtctctattgcacgcgcggttgcgaaacagccgacaatgctgctgtgcgacgagcccacgggggcccttgactcgaaaaccggcgttctgatcctgaatttacttcaggacatgagcaataacaagaacactacggtggttattgtaacgcacaatgctattttggcggatgccgctgataaagtaatccgtatcaaaaacggccaaatagaaagtatcgccataaatgaaaacccgaataaggtcacggatctcgagtggtaa

SEQ ID NO: 72585 - DNA, 2271 bp, synthetic construct
  source 1..2271: mol_type = other DNA
atgcttgccaagaaaatgttacgtgacatcaaaaagcataaaactcagtttttatcgatctttttaatggcgttcctgggagtatttgtgttcgcgggtgttggcggggaaagcgtcggtcttgaagtcaatgtaaataattactataacgatacgaatctggctgatggttggatttatagccctaatttggatatgaattttattgatgatgtgaacaacctcactccgacgacccaaagtgagcgccaactggttctcgactcgattgcggattttagcaataacccggagattaaactgcatttcatcgagaacaatacgatatctaaattttatttgatggatggtgaaccattgaatatcagtgatgaagacggggtgtggcttgataaaagttttgcagatgctaaaaatttgaaagtgggcgacaatattacttttgagtttaacggcttcaaaatcaaaaaagaaattaagggcatcgggtattcgccggaatacgtctatcatgcatcaacctcatcagtaataccggattttaacaaaattggtttcgcttacatgtcttacaaagcctttcctaccgacaacattccatacaacgtgttaaacgtaaaatttaccggatctccggaggaatacaataacctgctgagcgataaacttgacggggagtataacagctttgtggaacagagcgaacatagtagtgttagccagttctcagaggaaattaatcagcataaaatgatgggcgatatttttccggtggtctttatcttgattgcaatgctaatcctgctgaccaccatgacgcgcattattgcccaccaacgaacgcaaattggcattttaaaagccagtggatttaccaacaaaagcatcatgatccattatgtgtcgtacggtttctggctggttctgattggttctatcctgggtctgattattgggcctgtgacattgccgcagctattctatccaagcatgagttccacgtacaaactgccatcatggaatcccgcatggagtatggatttcgtttacgttgcggtggtgatgattataatgagcctgctggtatcttattttgcggttagaagcatttcaaaggaaaacccggccgacacaattaagcccaaaattccgaaaatttccagttcaggcctggtggaaaaaatcggcttctggaaacatttatcttttaactcgcgttggaactatcgtgatgctaaacgcaataaattccgcgcactgatgaccatcatcggagtcatcggttgcaccgccctgctagtctccgccttcggcatgtatgacggcatgaatgatttaaaggaatgggaatttaaccagataaatcattatgatagcaaactggtcatcgacaatgacgcatccctgtccgagattgatgatgtggcccgtgatgttgacggggacaaaatcatggaatccgcgattgaaattgaatcggactcggcgaaaaagtccggctctctgatagcgttgaaccacacggacctgatcaccccaacagactatgactggaacaaaatggaaatcggtgatgatgaagtgtctattagccagaaaatggcggacatgttggatatcagtgttggcgatacggtcaaatggcacattatcggttcggataaatggatcaagaccaaaattgataagattcacgctgatccgacctcccagggcattgtaatgtcgagcgacaaactcgaaaaccttgatctgaactacactcccacaagcattgtgaccgaacagcacgtcgataagaattattctattattaaaaccgttaactccatgaaagacatcacttctagctgggatgagttaaccgagtcaatgtggctcttaatttatatcttgatcttcttcgcatcccttctggcgatcgttgtcctgtataatctcggtctgctgtcgttcacagagatcgaacgggaaatcgcgacgcttaaggttctgggattcaaaactggtagtctccgcaaacttctgctgacccaaaacctgtggtttacctttgccggctttattttggggctgccggtgggttattacgtactgaagatgatgtgggatagctcaggcgattcattttacatactgcctagcataagcccgatgaacttcattctcacggcgacaatcacttttacgctgtcgatcctggtaaatctcatgttcagccgtaaaattaagaaattaaatatggtggaatccctgaaaagtggcgagtaa

SEQ ID NO: 72586 - DNA, 2259 bp, synthetic construct
  source 1..2259: mol_type = other DNA
atgtcgttatcgaaaaagatgttacgcgacatccgcatcaatcgcacccaattcatcgcgatattcctcatggcatttctggggatctttgcatattgcggaatctgtagcgagtattatggcttggaacagaccagtgcggatttttataacgaaacgaacctggcggacggttggatttacaaaaccagtttcgacaatgcagacttggacaaaatcaataatctggccatgcagacagaacgccagcatgtaatttcctcggtcggggaatttgataacgatcctgacattaccctgcactttgttgaaaacaatacaatttcgaaatttcacgtgttccaaggcaaagattttgatattaatgatgagtccggtgtctggctggataagcgttttgctgactccaaagagctgaacgtcggcgacaatattacgtttaaattcgatgggaaaacgatcgaaaaagagattaaaggcattggctattcgcccgagtatgtgtacgagagctcggcgacctccatcactccaaatttcgaggatgttggtttcgcctatttgtcatataagagttacccggacaatgtcgaatttaatcgtttactggttaaatataatcagtccgatgacagctttaaagaaaagctggatgattccattagctatctatcattcacaaagcaggaagaccatgtgagcgtggcacaatttagtgaggaaatggcgcagcataaaatgatgggggatgtttttccgattctttttatcctgattaccttcttaaccctgctgacaaccatgacacgcgttgtaacctaccagcgtactcaaattggcatcctgaaagccgtcggttttaaagaccggacaataattctgcacttcatctcttacggatttttcccggttctgatcggttctatcctgggacttatcgcaggaccgatggttattccgaagatgttttacccatccatgacgacgcgttatactttaccgtcatggaacccgggctttgatatgagtttcgtttatgtggccgccgcccttgtgatctcttctgtgattgtgacgtatttgacgtgccgccgtatttcaaaagaaaacccggcaaacaccatgcgtccgaaggcgccaaatgtatccagcaacagcttttttgaaaaatctaaattatggaaccatctcagcttcaatttccgttggaactggcgagatgcacgccggaataaattcagggccctgatggccattatcggtgtgatgggttgcgtgagcctgctgatcgcggcttttggcatgaacgacagtatggatgatctgaaaacgtgggaatacgatgacattaaccatttcgagagcaaactggtgatctcgaacaatgcgtctcaggaagaactgtattatgtaattaacggcactaatggcagttttattatgcagatgcctattgaaattaaatcgaacaaccacgaaaacacgggtgtacttctggtgtcaaacaataccgacctgatctcttacacggatagtaacaaaaatccgattgaaattaaggaaggggatatctcaatttcaaccaaactcgcgcaggattttaatctgagcattggcgataaaattaaatggcacatcgtgggcaatgatgactgggttaaatcagaaattggtcaaattcatgcggagccgattagccaaggtctcataatgtcgcccgatacgctggaggatgaaggcctgaactttaccccaaccagtattctaacctcagagaaattcggtgaaaatatcaacagcattaagtctgtaagcactctggaagacatggaggaaagttggagtgagatgacctcgagcgtcatgatgatggtctatgtgatcacggtcgtcgcctgtcttctggcgatcctggtcctttacaacctgggaattttaagctttacggaaatggaacgcgaagttgccactttaaaggttcttggttttaaaaccaacttcctccgtcgattgttgctgactcagaacctgattttcaccgctatcggttttatcctaggcatccctctcggcttctacttcatgaccttgatgatggatgctgcgggggaatctctgtactacgttcccatgttgacttggggcaacataatgctgagcgctgtgataacattttccatatccattgcagtgaatctcatgtttagcgataaaatcagagatttgaatatggtggaagctttaaaagatgtagaataa

SEQ ID NO: 72587 - DNA, 717 bp, synthetic construct
  source 1..717: mol_type = other DNA
atgaaacgaagcaagaaactgattattgccatcctgctggtcatccttttaggcttggtggcgtttattgtaggtacactgttcatgaccccggacctgtctcatgagacgaagaacatcctagtgttagcgtcggataaagaagaacagccaaacggtggagtcgatatggcattcatgatccgcctggaaaacggttcacttaaaaactataccccgatttatccgggtggcatgacccaccctacgaagtcggcgcctggaggcctgcaagggcccatgatgttgcacgactgcctctggaatggcctgggtgagggtatgcagaatgccaaggagattgtagaagttcgtactggcatgcatgcggatgccgtggttgtggtttacgataaagggattgacagcattattgattcaatccggccgctgaaaataaatggtacggaaacaaaccttagtgcaacggacatcattcgtcagaacgatgcctacaacgggtacccgggaaatgaacatgttcagggcacgatgtctcgctccgatgcggtcatggtattggctaaagcactggctaataccgcgaaagatccggtgaaaaaaagtaccatggtgcaaaccgcactcaaagaatattccaatggcaatatcataatggagccacagggcagctttaccaaattactggctactaaaggctttgaaagcatcacttaa

SEQ ID NO: 72588 - DNA, 2355 bp, synthetic construct
  source 1..2355: mol_type = other DNA
atggtcaaaaatcgatgttatgatgcggattgcgataaagacaactgccacaatccagaacattacaactatatctgttttgatccaaattgtgatgaaattaaatgcaacgatagcgatcactatgataagcagctgctgagagattatcaaaaaaataccgacttaagtgtttatgaccatggcgaagagatagattatgacgaagatgtcgacataagtctttgcggttgtccggactgtgccgacgaccacgatcacgatcatgaccatcaccacgaccactctcatgaccaccatgaacatgacgaggacgattcatgctctgatgaaagttgcagttgccatgaccacgatgagcatgaccatcacgaccatgatgatgtggatataagtctttgcgggtgtccagattgcgcagatgatggccacgaacacggccatggcgatgaagaattgttggctgaaggaaaacccctgattgcgaatcgtccaatacaaatcattgtgagcagcggcatcctgtttgttttaggtcatgtttttgaatggttgtcattcagcccggcagtggttacgataatttatatgttaggtgccctgattgccggttatgaaatcgctgttttagcctacaactcactggtgaaacgccatacggttgggccggccatgctgatgtgtgtcgcctgtgtcgcgagctttattattgggcatcctgaggaaggtgcggcagtcacctttctttattacatagcggagttcctggaggactatgcggaacatcgtgctaaacgttcgattaagagcctggttgaaattgcgcctgaaacggcacgcgtcaaattaaatgattcggaggagctgcggaatgtggatgacgttgatatcggtgagatcgtgattgtcaaaccgggagacaaagtgcctttggacggtgaagttgtgctgggatcgtcctcaattaaccaatcttccattactggtgagagtgtgccggttctaaaggaaacgggtgatgaagtcttttcgggcaccgttaacgaagatggctacttggaaattgcggtaactaaaaaggctaaggattctgtgattagcaaaattgtcacgctggttaaacgctctcagctcaaccgctcggaaaccgaatcactggttgaaaaagtggctaaatactataccccaatcatgatggtggcagctatctgtgttgccctgattccgtcgtttgtatttgggcagaacttagtggattgggtgtacaaagcgctttcccttctggtaatttcctgcccctgcgcctttctgatcagcaccccggtaggtatggtaagcgcgatcacctcagcgactaaaaatggcgtcttgatcaaaggcagtacatacgttgaagagatgcgtgatgtcaaagcagtcatctttgataaaactggcacgctaacagagggcaaactgattctgagtgacgtggaagtgctggatgaaaacttctcaaaagaagatattatccgtattgccgcatctctggaaaaccaatcgtcccacccgatcgcacaggctatcgtaaactatgcaaccgtaaatggcattaaattcagcgaaattaatgactttaagaacgtgccgggcaagggcattgtagcgaatattggggaagaacagtactatgcggcgaatgaatccttaatagaggatgggagcttcgaggtgagccgggacgaaattaaccgctactccgcggaaggcaaaaccattgtctttattggaaactccaagaacgttctggccattattacagtaagcgataaaatccgccccaatgcgcatgaggtcattagcgacctgaaagaacagggtgtacagacaatcatgctcaccggtgacaataaacttgccgccaaaagtgtggcctctgagatcggaatggattacgtgtattcgaacctcatgcctgaagacaaactcaacattctggatacaattaggaacaagtttggtgatgtggctatggttggggatggcatcaatgacgcgccggcgctggcacgtgccaatatcggtatcgccatgggcgcggcaggctctgatgtggctattgagaccgcggatgtggcactgatgcaggatgatatctcaaagctcccgtacctgttcactttaagccgtaaaaccatgggtatcattaaacagaacatcacggtggcgattgccgttaaattgctgtgcgtcatccttgcaatcctgggcatcattacgttgatgatgtcggtaggtttcggggatctgggcctgaccatgctggtgatcctcaattccttccgcatcggaatggtgaaagatccgctattctaa

SEQ ID NO: 72589 - DNA, 1371 bp, synthetic construct
  source 1..1371: mol_type = other DNA
atgttaagcaatgatctggtaaatggtgtggaactgatgctgcaaaacccgaaaaaagccctgattgagatgtccatacccttgattatcagcctgctcattacgagtttttacaacttgatcgacgctgcgtgggtttctggtcttggtgcggatgccctggcaggcgtgggctttttcacaccaatcttcatgattctcgtgggctttggaaacggtctgggttctggcgctgcgtttgcactttccaaatacctgggtggaaacaataaacagaaagcggacaatgcagcgatccactcaatcatcatcgacctaattgcctcattgatcatcacgctggcactgctggttctattaaatccgatactgaacgcgatgggtgcgggtcaaactattggctatgcgacggattacggcatgattatcatcttgggctctgcattcattatacttagcaacgccttgtatggcatttcgcgaggcgaaggggataccacccgtcctatgtacgcgatcattgcaagcgcgattttaaatatgattctggacccgatttttatttataacctgaacctgggggttaagggagccgcgattgccacgatcgtgtcatccgtgtttgtcattctgatcctgctgtactggttctacatcaagggcgatacatatctcaaaccgaatctgagtaattttgattttaagaaagatattagcatagatatcattaaagtgggcgtgcctgcaagcattcagctgttgaataacgctttttttgcggccgttttcagcgcactcttaacatttgtcggttcgacggattcggttgccgtctattcgaccggctggcggatagttactattgggaccaccccgctgatagcgatcggaacggccctgattagtgtcatcgcggccaattatggtgcgaaaaactataaaaacattcagattgttcatcgctatgcgatgaaagtctcaatcgccctggctattatcgtggctatcctcaccaacgtattcgccggcgacatttcctcagtattcgcctcttccggaagtagtgtacgcatcgctgcagagctgaccggtttcctttcgtggattgtcatttactatccaaccatggctgtgggtgtggcgtctacgtatgtgttccagggcattggtaaagggattactgcaatgtttcagacaattatccgtgaaaccgggttcaccatcacttttgccgtattgtttgctgtggttttaaattacggtgtatggggcgcatggatggggattgttttaggggaaattgtcagcaataaccttaccatgctttgggcggattatctggtgaaaaagttaatcgacatcagcggctaa

SEQ ID NO: 72590 - DNA, 615 bp, synthetic construct
  source 1..615: mol_type = other DNA
atggaacttaaaggcagcaatatttcgtttaaatatccgagtactaaaaagtatattttgaaagatatcgacatttgcatcgataacaccaaaatcaccgctttagtcggagatagcggcagcggcaaatccacgctgtgtaaaatcctctcaggttacacgaataattttgagggtgcagtcaccctggacggtaaagagctacctaagaaagaattttgtccggtgcaattaattttccagcatccggaaaaagttatgaacccgaaatggaaaatgaatcacattctggaagaatcgtggatgccggacgataacctcctgaaagaatttggcatccagaagacatggctgacccgctttccacaggagctgtctgggggtgaactgcaacgcttctccgtgctgcgggcgttgaaccccaaaacccagttcatcatagccgatgagatgaccactatgttggacgcgatcacgcaagtacagatcctgacgtcagtgattgaaatcgttaagaagcgtaacatgggcatgctgattgtgagtcatgatatgccattagtagaaacaatttgcgatgaaataatttaccttaaagatattaatgggatttaa

SEQ ID NO: 72591 - DNA, 960 bp, synthetic construct
  source 1..960: mol_type = other DNA
atggagaaattactggatgttgaaaacgtgagcattagctttattcagtatacgcagggtttgaaccagcgcgatctgaaagttattaccgacctgacgctggatgtgtttgaaggcgaaatattggccattctaggttcgagcggctctggcaaaagtttgctcgcgcatgcgatcttcggcattttaccggaaaatgccaatctgaatgggacaatcaaatacaaaggaaaagaactgagtcagaaagataaggaggagatccgtggtaaagaaatcgcgcttattccacagtctgtcaacttcctggaccctttgatgaagattagcgatcaagcaatcggtgaaactaaagatgatgctgagaaaaaggaaaagaaacagaaacaacgtgaaatttttgaacattacaatctgggtccggaagtggatgacatgtacccctttcagctttccggtggcatggcgcgccgtgttctggtgtcgacggcgctgctctccaatccaaaactggtggtagcagatgagccaaccccggggctggatcaaaagacggtcaaagaaaccttaaatcacttcaagcatatgaaagaagatggcgtaggagtattgctgattacccacgacattcatgccgccttagaagttgctgatcgcatcggcatcttctattcaggttatgtgatagaaattgctgagaacaaagacttctcaggcaacggagaaaacctcttacacccctacaccaaagcactttacaaagcgctgccggcaaacgggtttgagctgacagaaggtcaccaaccgctgcatggggagatccctaaaggctgtccgtattatgaccggtgcgaaatgcgtatgggtatctgcaaggaagagcgcccggaactgaccgaccttggcaacaaaaaagtccgatgttttaaatatgaggggggtctgaaaaatggcacttaa

SEQ ID NO: 72592 - DNA, 855 bp, synthetic construct
  source 1..855: mol_type = other DNA
atgaataacagcaataaaagcatttacagcccgatttcaaaaatgaacctgcgcacaaagacgttgctgacgattgggcttacggtgtctctgctgatcattgttatgatcaccagtctgctgattaactctaccgacatcaccactaactttagtgcaatgaatttaccaccgagctttgaacacctgtttggtactgactggcttggtcgtgatatgtttatacgtacgttgaaaggactgggcttgagtgtgcagattggtgccggcgcgtccatcctgagttccttaattgccattattctgtcctttgtttgcagcattaataagaaattcgactcattcgtcgcgtggatcgtggatttgtttttatccatcccccatattctgcttatcattctgatcagcatctcgctggggggtggagcttttggcgtgacggttggcgtagcgcttacgcactggaccacactcacacgagtattacgggccgagattaaacaaatcaaaacctcagattatgttaaactgtctgaacagttcggcaaatcgaaattttggattgcgcgcaagcatatattgcctctggtgattactcagatcatagtgggcaccatcctgatatttccgcatgcaattatgcacgaagcttcggtcaccttcctcggtttcggcctggcacctcatgaaccggcaattggtattatcctatcggagtcaatgaaatatcttgccaccgggaactggtggctggcgttattcccaggtctcgcgttactgatcctggtcctgctattcgatatcgctggcgaaaacattaaaaagatcctcgatccgaccagcgccaatgagtaa

SEQ ID NO: 72593 - DNA, 996 bp, synthetic construct
  source 1..996: mol_type = other DNA
atgctgaaaaacgaaaagattttaaaatttttgggtaagaaaattatccggtttattatcctgctcatctttgttatcatcctgagtttcatcctgattgacatgtccccgatcaatccggtaaaaacatatattagtgctcttggctcagtttcttctgagaaaatcgctatcttagaggcgtattggggggtgaacgaacccatcaccacaaaagtaattagctggttaggaaagatagtgcagggcgattttggtacgtccctgattttccgcatgccggttattgatgtgattaaagaacgatttattgcgtcgctggtattaatgctgacttcatggctattttcaggtcttctgggattcatacttggcaccatagccggctttaagaaagacaccattattgataaagcaatcaaagtgtactgctacattttacagtctgcgccgactttttggattgcgttactgttcctgatgatcttcagcgtatatctgggttggttccccaccggcctgggcgtgccgatcggcaccctgagcgaaaacgtctcgatttgggagtggctgcaccgcctgattctccctatgattacgttgagtgtcgttggcatcgcctccattacgctgtatacccgtgacaaactgattgaagtgatgaatagcgattacttcttgtttgcaaaagcccgtggcgaaagtggttggaatttgattaaacgccatgggattcgtaatattctgctcccagcaatcactatccaatttctagggttttcggagttgtttggtggtgcggtccttgtcgagcagatctttacgtatcctggaatcggccaagccgcagtgtccgctggcctgaaaagcgatgtgccgcttctgctgggtatcgttattttcagcgccatattcgtttattgtgggaacttgattgcggatatcctctacaacttcgtcgacccacgcattagggaaggtgaagaagatgaataa

SEQ ID NO: 72594 - DNA, 1629 bp, synthetic construct
  source 1..1629: mol_type = other DNA
atggaacagaagtacattatcggaataatcgtactgattctgattgccattattggtggaactctttttatgagcgggggcaataccagcacgcgcgcagataatgaactggttgtttcggcgtttgtccatggcagtgaaccagagaccggttacgacccgatgtatggttggggcgaccgtggagagccgctgattcagagcaccttgatgaaaatgaaccgcaatatgacctatgacaatgatctggcgaccagttggtcgtcgaataacaactttactgaatatacggtgaatatccgagatggcgttaaatttacggacaacacaacactggacgcggaggatgtggcattttcctataatcaggcgaaaagcactggcaatacaattgatcttagtagtctggataatgtgtcggccattaacaagaccacgattaagttcaagctgaacaagcccgactcgacctttaccgacaaactgctccacgtgggtatcgtcccttcagattcatatgacaacaatacgtatggcagcaacccgataggatctggcccattcaaacttgcccagtgggataaagggcagcaagtcatctttgagaaaaaccccaactattatggcaaacagccaaaatttgacaaattgaccataagcttccaaaaaaatgaagcgtcctttaatgccgctaaaaaccatgagctggatattgcggcggtcccgctgtcttacgcgaatgagaccatcgacggttatcactcattcttatccgaaagcaatgacgtgcgcggcatttccttaccgatgaaaaacaatacgggtgaaaccaacgaggacggcatcgcgctcggcaataatgtgactgccgataaatcaatccggttagcactgaactatgggattaaccgcgaagacatatgcaaaggggcgttaaacggtgccggcgtgccgaactacgatggtatcgctcatttcctgccgtggtataacaatgattccacgatcaaagatgcggatattgacaaagctaaggatttcttgaagaaaggtggctggaaagacacagatggtgacggcatcgtagaaaaagatgggaagaaagcctcatttaacctatactactccagcgatgcaccggaacgtcaggccattgcggtggcggttagcgaacaagccaaagaatttggtattgaaatcaatgcaaccggttctaattgggatgaaatcgataaaatcaaatttagtgaaccggttgtctggggcttcgggtctactgatccttatgtaatgtacggagaatattatagtaaccaagcaggtattggatacaacaacccgagccttgtgaataacagcgctgttgattcacatattgataaagcaatgtctgagccccgtgaacagtcgtatgctgactggtcggccgttagctgggatggtcagactggcatttcaccaaagggggatgcagcatggctgtggatcagcgaaatcaaatacacctactttgtagatgatagtttggatatttccaaagatacgttcaaactgcaacctcacggtggcgacctcttcggcaacatctacgattggacgcgtatttctccgattaacgctacaaattaa

SEQ ID NO: 72595 - DNA, 1620 bp, synthetic construct
  source 1..1620: mol_type = other DNA
atggaacagaagtacattatcggcataatcgcagttattctgattgcgattgttggtggagcgatcctaatcggcggcccgtcgactgaacgcgccgacaatgagctgatcgtggcggcgtatagtcatggtggggagccggaggcgggttttgatccaatccttgggtggaactactactcggaacccttaatccagtccacgttgctgaagatgacccgcggcatggagtatgaaaatgatctggcgaagagctgggaggctaatagtgattttacagaatatacagtcaaaatccgagacgatgttaaattcaccgacaacacgacgctggatgcagaagatgtagccttcacctacaacgaggcgaagaaaagtggcgcaagcttagatctgagtagcatggagaacgccactgccgtggacaaacaaaccattaaatttgaattaaaccggcccgattccacctttgtagataaatttgcctatattggtattgtgccgtctgacagctataacaatgaaacctatggtgcaaatccgataggctcaggcccgtttaaattcgtccaatgggacaaaggccagcaagtgatcctcgagaaaaacccggattactatggtaaagagataaaatttgataagctgacaattctgtttgaacagaatgaagctgccttcaatgctgcgaaaaataaggaagtggatatagcggcagtgccgctgtcttatgcaaatgaaacggtcgatggatacaacatgcacctcatggataccattgatgtccgtggcctttcgctgcccgtacagaacaacaccggtaaattaagcgaagatggaaacccaattggcaacaacattactgcagacaaatcaatccgtgaagcgctgaactatggggttaaccgcaccgccatctgcaaaggcgccctcaacgggattggagtgccaaactacgatggtatcgcgcatttgttgccgtgggcgaataatgaatcggcgattgatgatggtgatgttgataaagctaaagacatcttgaaaaaaggtggctggaaagatacggatggcgatggcatcgtggaaaaagacggtaagaaagcctcgatcaatgtctattacagctcaaacgcacctgaacgtcaggccattgccgttacgattgctgaagaagccaaagaatttgggattgaagttaatgcaactggttccaactgggatgaaatggataaaattaaaaatactgacccggtcgtgtggggattcgggtcgacggacccgagcacaatgtggtccgagtactacagtgaccaggcgaccgtcggctataataatccagcccttattaacaatagtgctgtagacaagcatattgataatgctatgaaatctgatcgtgaatcaagctatgcagagtggtctgctgtgagctgggatggtcagacgggtatttcacctaaaggtgacgcggcgtggctgtgggttggcgagattaagtacggctatttcgtagatgaaagcctggacatctccaacaataccgaactgattcaacctcacgggggcgacatcttcggaaacatctatgactggagccgcgtgtcttccattgaaaaataa

SEQ ID NO: 72596 - DNA, 615 bp, synthetic construct
  source 1..615: mol_type = other DNA
atggagcttaaaggaaataacgttagttttaaatatccgagcactaaaaaatacattctgaaagatatcgatatttgcatcgacaacaccaaaatcaccgcacttgtcggcgatagcgggagcggtaaatccactttgtgcaaaatactggctggttatgtgcaaaacttcgaaggcgaggttacattaaataataataagttgccgaagaaagagttttgtcctgtgcagttgatttttcagcatccggaaaaggtaatgaacccgaaatggaaaatgaaccgcattctggaagagtcatggatgccggatgataacctcttaaaagaatttggtatccagaaaacgtggttaacgcggtttccacaggaactgtctggtggcgaactgcaacgcttctccgtgctgcgtgcgctgaatccaaaaacccagttcatcattgccgatgaaatgaccacgatgctcgacgcgattacacaggtacaaatcctaacctcggtcattgaaatcgttaagaagcgtaacatgggcatgctgattgtgagtcacgacatgcccctggtcgaaacgatctgtgacgaaataatttacctgaaagatattaatgggatttaa

SEQ ID NO: 72597 - DNA, 960 bp, synthetic construct
  source 1..960: mol_type = other DNA
atggagaaattattggatgtggagaatgttagcattagctttattcagtatacgcagggtttgaatcagcgtgatctgaaagttattacggacctgactttagatgtctttgaaggcgaaatactggccattctaggttcaagcggttctggtaagagtttgctcgcgcatgcgatcttcggcattcttccggagaatgcaaatttgaatgggaccatcaaatacaaaggcaaagagctgtcacagaaagataaagaagaaatccgtggcaaagaaatcgcacttattccacaatcggtaaacttcctcgatcccttaatgaaaatttctgatcagtcgataggacagaccgagaacgaagaggaaaaaaaggaaaagaaacagaaacaacgggaaatttttgaacagtacaatttaggtccggaagtagatgacatgtacccgtttcaactgtccggtggcatggctcgtcgcgttctggtgagcaccgcgctgctgtccaatccgaaactggtcgtggccgatgaaccaaccccgggattagatcagaaaacggtgatggagacgcttaaccacttcaagcatatgaaagaagacggtgtgggtgtgctgctgattacccatgacattcatgcggcgctggaagtagctgatcgcatcggcatcttctatagtggctacgttatcgaaattgcagagaacaaagacttcagtggtaacggcgagaacctcttgcacccctatacaaaagccctgtacaaggccctgcctgctaacgggtttgagctgaccgaagggcaccaaccactgcatggggaaatccctaaagggtgtccgtattatgatcgatgcgaaatgcgtatgggcatctgcaaggaagaacgcccggaactgacagaccttggcaacaaaaaagtccgctgttttaagtatgaaggcggtctgaaaaatggaacttaa

SEQ ID NO: 72598 - DNA, 693 bp, synthetic construct
  source 1..693: mol_type = other DNA
atgagcctatcgcttaaattgaagcagtacctcaccgaccagggtgcggatgaagtaggtttcgcagacatcaccaactttactccgaaaaaaaatctgaataaaggtgtggttttttacatcacctaccagaaagagaccctgcgccaaatgcaaaatgccccgaccaaggaatatctgaatgaactgatcaacttgaacctcaaactggatgaactgggtatgaaatgtgaagagttcttaattgaacggggctacaatgcctatgcgcagacgaaaaaacgcctggggtatgattttggtgaatttaactcattcgagttacctcacaaaactattgcaacacgtgcaggcattggctggattgggaaatccgccctgcttattacagaaaaacatggttgtgctctgcgattaagttctgtgctgacggacgccccgctgaacccgggaaagcccatccttaagtcgaaatgcggcaagtgcatggaatgtaagacggcgtgttttggcggcgcgatcagcgggaaaaaatggaactataaaattaatcgtaccgatttctatgacgataaaaaatgcgaaaaatacgcgttgaaaataagtaaagagaacctgggcaagtccgatactgtctgcggaaaatgcatctatgcttgcccatacacgcagaaatatattaaaaagagctaa

SEQ ID NO: 72599 - DNA, 1617 bp, synthetic construct
  source 1..1617: mol_type = other DNA
atggataagaagataatcatcggcgcgattgtagtggtgttggtagtgattattggtgcgttcgcatttatgggcgggagccatgacagtgatccgacccatttaaccgtcgcggcccacagtaatattaaagaaccggaggcggggtttaatccgcttactggttggggctgcggccaccaaaactacaatcccctggttcagagctgcctgttcaaaacggacaaaaacggcagtattgtgccggaccttgccacgggttattcagtaagtggggatgggaagacgtggacagttaacgtgcgcgatgatgtgaaattttcagacaactctacgtttgatgcagaagatgtggcctttacctttaacacagcaaagcagacggaatcggagctggatctgaccaacattgccaacgttactgccgtcaataacacatgcgtgaaatttaaccttgttgaagcgcgatccacctttatttacgatttgcgctatctcggcatcgtgccttctgattcctacgacaattcgacgtacggagagaatcctattgggacgggcccttatgtactggatcattgggataagggccagcaagcgatctttaaaatcaatgataactactatggtgacaaaccgtactttacccagatcaccttactgttcccggaagaagctacatggctggaactggctaaatcgggtgaaatcgatgtcgttcccgttgccaccagtgcattgaatcaaaccgtcgatggctatcagtttattgagaaatccgcaggccgtgcccagggtgtctcgttaccatatctgaatgatactggcatcatgtataatggtactatgaaagttggtaacaatgtgactgcggacaaaagcattcgtgaggcgctgaacgtgggtataaaccgtcaaactatgtgtgatgagatcttcgccggacatgcgtctccggaatttaccggcgttgatacccgcacgtatgccaacccggatgcgaaagtggctgacggggacgtatcaaaagcaaaacaaatcctgaaagacggtggctggaccgataccgatggcgatggaattgtcgagaaaaatggtttgaaagcaagcttcgacctctactatcctccagattatttggatcggcagagcatgagcacggttttcgccgaacaggcaaaggaattaggcattgaagtgaaactggtaggtgcggattgggacacaatttataaaaacctatacagttcagcagcgctgatgcagcaaacgagcccggacccatacaaaagcatctatcagcagtaccacagcaaagaaatggatggattctatatgaatccgaacctgtataataattccgcttctgatcgcctgatggatgaagctatgcataccagcgatcttaaccaggctgactcattatggtctcagtcggccctggtcaacgggggcggttggggtccggcgggagacgctccctgggtctggattgcgaattatgattacaattacttcatcaaagacggcatcgacattggtaagcaaccagacggcctcggaaacgatgtgctgattaacatatgtgattggtcccgtaccaattccacagcgtaa

SEQ ID NO: 72600 - DNA, 990 bp, synthetic construct
  source 1..990: mol_type = other DNA
ttgaacaaaaaccaactgctgaaattcttcggttacaagttaatacgttttctaatcttgatgattgccgttagcatattcagttttgtgctactggatctgtcccctatcgatccggtgaacgcgtatctgaaacaagctgccgtatccgaagctcagcgacaaatacttcaggaatactttggtacaaatgtcccactgaccactaaaatcttccattggttaattgatttatttcagggtaatctgggcacgtctctgatctaccgtgcgcccgtggtcgacattattctggaaaaagcttcggcgagcatcgtgctgatggcgatttcatggctgttaagtggaatcatcggatttctgctgggggtggtggcgggcaaaaacaagggatcatggattgataaagcagtaaaagtgtattgctatgcgattcagtcggccccgtccttttgggttgggatgcttattctgatggtcttcgcagtttatttgggctggtttccaattggctttggggttcccattggcgtgagaagcacggacgtcacctttgccgagtgggcaacccgcttggtccttcctactttgacgctcagcttagttggcttagcgccgattgccatgtacacacgtaacgaactgattcaggttctcagctcggattttgtactgtttgctaaatctcggggcgaaaaaggttggaatcttgtgaaaaatcacggcatccgcaacatcctgttgccggcaatcaccctgcaattcctgtcatttagtgaactgtttgggggtgccgttctggtggagcaggtattctcttatccgggcattggtcagaccgcggttgcagcaggtcttcagaacgacgtgccgctgtttctgggtatcgtcctcttcagcgcgatcttcgtattcgtcggcaatctcctcgccgaccttagttactatctgattgatccgcgcattaaggaaaaggagttcaatgattaa

SEQ ID NO: 72601 - DNA, 852 bp, synthetic construct
  source 1..852: mol_type = other DNA
atgattaaaaaagcggacgataaaaagcaatggtttctgtatccggcaaaccttcgcaccaaaacgattgtcattatcattctgtcggcgttggttatcctaagcatctttatttctggttactttatacgcgatattccaacaagtttcatcaatgccaaccaaatgccttccttagaacatctcttcgggaccgactggatgggccgggacatgtttcagcgtacgattgcgggtctcggactgagcctgatggttggttttatcgcgtctattgtcagtactgtgatttcgattatcctgggcctgttttcaagtttcaataaattcaccgatgaatttgtggccggcattattgatctgtttggtagcataccgcatattcttttgattatccttatttctatgatgttcggcgggggcgtaattggcgtcgtgatgggggtagggctgacccactggacgccgctggcgcgtgtgctgcgcagcgaagtgaaagaaatccgtacaaaagaatacatctcccttgcagagaacctcggaaaatcaaagatgtggatagctataaagcacatcttacccttagttatcagccagattatcgtgggtgttattttgatgtttcctcatgccatcatgcacgaagctgcaattaccttcctgggttttggcttgccgccacatgagccggctatcggtgtcattctgtcggaaagtatgaattacttatccagcggctattggtggctggccttctatccgggcatgtcactgttgatcgtggtactgctgttcgattttatcggagagaacgttgaaaaattactgaatcccgagactgcgcaggaataa

SEQ ID NO: 72602 - DNA, 693 bp, synthetic construct
  source 1..693: mol_type = other DNA
atggatcttacgcagaagctgcggaaatatctgattaaaaacggcgcgactgaggtgggtttcgcggatattattaattttacgccgatcacaggtttaaacaacggcatcgtattctacataacgtacccaaaagaaacaattcgtaatatgaagaacgcccccacgaaggagtataatgaagaatatgataaaattaactacaaattggatgaactcggcatgaaatgcgaagaatttctgatcaaatacggttacaatgcatatgcacagacccgccaacgtctggggaatgactttggcgagcacaatagttttaaactgcctcataaaactattgcaacgcgtgcgggcataggctggattggtaaaagcgcgcttctaatcaccaaaaaatacggcagtgctctgcgcttatcttccgttttgactgacgccccgatcaaaaccggtctgccgaccattaaaagcgaatgcggaaagtgcatggaatgtaaaaatgcctgttcgggaggtgccatcagcgggacagaatggaactataaactcaaccgcaatgatttttatgacgataaaaaatgtgagaaatatgcgctgaaagtctcaaaagaaaacctgggcgacgagaagaccatctgtgggaagtgcatctatgcttgcaccttcacccagaaatatattaagaaagcttaa

SEQ ID NO: 72603 - DNA, 1089 bp, synthetic construct
  source 1..1089: mol_type = other DNA
atgaccaaagagaatgaatcgatattggtatttgaatacttcacggcttcgggtgaaaaggataaatgcatcatttctgaggcggaagcgttactattctcacttctggatgatttaaaagaatttaacgtcgatttgattattaacgaaagctatggcagtgttgtaaaaaactatggtaatgtgaatccgatcctgattaatcaggatgtagtgtcctggcttgaagagaacgcagatcagttcaataaagcgattttcatcagtgccgaaaacaacaataacctctacaacattaccaagattttagaagaaaatgatgtgaagatatacaattcttccgcggaagcttgcctgaagtcatccgataaatatgaaacttacgaagccctgccgaacaccattccgcaaccacggtcctttcgcttcaaaatcgattctaaaggctactggaaacgcgcaattgaaaacctgcatgaacgttggcaagctgaagatccattaacgccgcttaaattgataatcaaacccctgatgggggtggactgtgaggacattgtgatcatcgagaaaatcgaagacttaactctggacctcgacaaaattttcacccctggcagccgtgttctggtccaggagtacattgaaggcagcgatattagtgttagcctgatcagcgatggtaaaaatgccctgccgataagtctcaacgaacagtatgtcgagttgaaagagaacaaaggaatttatatgggtggccgtctgccttttgagagcaaatttaaagacgaagcctttgacattgcaaccaaggcgattgaatctatcgaggggatgaaaggttttgtcggtgttgacctgcgaattaattcggatgaaaaggatatttattccctgtatctgcttgagattaattcacgcttcacaacgccgtatgtgggcctgagcaaaatcgcgaattttaacatcagtaaaacaatcattgatctgatcgatggcaacatcaatatcggggatttggacatttcgctggacggcgagatcgaatttaaaaagagcggaaactcactggaaattcgtcgcatctaa

SEQ ID NO: 72604 - DNA, 567 bp, synthetic construct
  source 1..567: mol_type = other DNA
atgactattaatattcagatcctgcttattgcgtgtgttacaacgctctatttcattctgccggcatacttctccaacggtgcgggcctgttattcggcggcgggatgcctgtggattttgcgaaatctgatcgctacgggattcgctggattggcgacggcgtaacctggcgtggattgttcgccggtaccattattgggattataaccggtatcgtgcagggctttattgctccgcacatccttccggcgtatggccagtacatcatcactcccatcgtaacgaacattaacagtgggatattaataggatttctgcttggttttggcgccctactgggtgatgcaatgggcagctttctgaagcgacggctgggtattggtcgtggaaaaccggctccactgttggatcaattggatttcctgattattgccctcattctcgtgtcgttggtggtcaaaatcgacttactgtttattgcaatctcaatcatcctgacgctggttatccatttaatcgccaatacctgcgcgtatctgctgggtatcaaagacgtctggtattaa

SEQ ID NO: 72605 - DNA, 486 bp, synthetic construct
  source 1..486: mol_type = other DNA
atggatataatcaaaggcaagacgtggacgttcggcgagaacattgacaccgatgttattatccctggccgttatctgcggacattcaacccccaggacttagctgaccacgtcctcgaaggtgaacgaccggattttacccagaacgtccaaaaaggagacattatcgttgcggatgaaaactttggctgcggttcctcacgcgagcaggcaccagtggctattaaaaccgccggtgtgagcgcgatcgtggccaaaagctttgcccgcattttttatcgtaatgcaatcaatattgggctgccggttattgtcagtgacattgaagcggaagatggggatgtaatcagtatcgatctgtcggaaggcaagttggtaaatgaaactactggagatagcaaaaactttgaaccgttcaaagagttcatgctgaatatactggaagatggtggtctagtgaatcattaccttaacgagtctgactaa

SEQ ID NO: 72606 - DNA, 1278 bp, synthetic construct
  source 1..1278: mol_type = other DNA
atgaaagtatacatcgagtcttacgggtgcaccttcaacaaagctgacggacagattattgcaggcaacctccaggaaaatgacattgatatcgtagggtccatggaagaagccgacgtgattattgtgaacacatgttacgtgaagcttccgacggaaaataaagtgacttaccgcatccagaagcttcagaacgattttccagataaaaaaatcatcgtcggtggctgcatggtcgagatcgaccccgaaaaactggataaggttgctccgaacgcgtcctggatcggaccgcaccagttaaataaatctgccgaggttgtgaaatccacctattgcggtgaagtcgttcgtgagtccggcttttcaaaggagtcgaaagttgatgtgccgaaagtcatggacgatagcctgattcatattatccaaatatgtgaaggttgtctgggcgcctgcacattctgttgcacccgttttgctcgtggcccattgaacagctatccgattgaggatatcaaggaagaagcaagaaaagcgatcgaacagggtgcctgtgaaattcagctgaccgcccaggatactgcagcgttcggtaaggatagtggtgaaaaactatcggacctgatcaaagaagtggcgaacctggatggggattttcggattcgtgttggaatgatgcatccgaagaacatcttaaacgacgtggatgaaatcatcgatgcgatgaaacatccgaaggtatataacttcatccacttgccgattcaaagtggcagcgataaagttttatcagacatgcgccgcgggcacagtgtgaatcaatatcttgatattgtctcaaaatttaaaagcgaaattcctagtctgacgttggcggttgatattattgtgggctaccccacggagagcgaggaggattttaatttaaccgttgaactgctggagaaaataaaaccaagtctcattcatctcagcaaatatcaacaccgcaaaggtgcagtgtcgtctagccttcctgaaattccgcatgaaaccatgaagcgacgctcaaaattcctgtcggagattaaatcaaaaataacggaagaagaaaataaagaactggtcaattccaatcagaaagtcctggtcattgaaaaaggttcgaaaggcggctttattgccaagactaattcttatattcctgtaatcgttgacaacgtgagcctgggtacctttgtggacgtaaaaataacagatgcaaccgcgacgtatctgaaaagcgaactgttgggctaa

SEQ ID NO: 72607 - DNA, 1077 bp, synthetic construct
  source 1..1077: mol_type = other DNA
atgaccaacgataactacacgtgcgtaacaaccggtaccgtcgcaactgcctgcagcctggcagccttagacgcgatcctgaatactcccgatattgcttgtgtcaaagtagagacccccaaaaaagtcttgaatattatcattgacgagtgcaaatgcatttcgaataataaagcctacgcgatcgcgcataaaaacccatataacgatccggatgtgaccgtaaatctcgatatcattagcacagtggaactgctcgataaaaatgacgaagaatctaacgtgatcatcactggcggggaaggtgtgggcgtaattaccaaaccgggtctgcagatccctgttggcgagtatgccataaatccggtgccgcgccgtatgattattaagaatttgagcagtaagatccctaaggggaaagtcgcgaaggtaacgatttcaattccggagggcagaaagatcgcgaaaaaaacaatgaatccaaaactgggtattgtgaacggcatatcagttcttggaaccacggggattgcacgctccatgtcgagtgaagcttacaaaaactccatcgttacccagattgatgtggccatcgctagcgatattgatgatctgatttttgtgccgggcaatatcggcgaaaaattggcactaaaacaactggacgtgaaaaaggaacagattatccaaacgggcaactttgtgggtttcatgttcgacgaagcggccaaacgaggaattgcgaagtttacgttctttggtcacatcggcaaactgatcaaagtcgctgggggcatttttgacacgaaacatgcgattgcggatggccggcgtgaaataatggttacccatgcggcactctgtggtgtcgataaaatcaaccttcagaaactgtttgattcaaaaacaactgatgaaatgatgtctattctggacggtctgggagttagcgttgaagtttccaacagtattgcctcggcaatccacgaccgctgtatgcagcgtttcgatttagatctgaatgttatcttagtggacatggagggtaactatcttaacaacaatttcattatataa

SEQ ID NO: 72608 - DNA, 1272 bp, synthetic construct
  source 1..1272: mol_type = other DNA
atgaaaaaaatctactcgatgttgcttctgattgtgatgctgtgcagcttatcaatagtgagcgccagcgaaaatctctcgactagcgacaatccggtggtagtggacaatgtggatatgtcaagcaaaaatattggcagcattcccgatgtgacatctgcctccaacgatgtcgtcgtttccgaaaattcgtcggtggaatggaaatcgtatgaaaacgagaaggacgataatgtatcagataaccagtccaactcatcaagtaacagcacgtcaaacggcagttataaggaggagtctgttgtaagtaacgttgtaacaaagaacgtgagctccagctacgggaccgtcgtgaactacaacatcaaagttctggatcagtttaaaaaaccgatggttggcaagaccgtcagcgtgaccatcggtaaaaagaccgtggagaaaatcacggatagcgatggaatggttaccttcaccctcaattgccaagcgggtaaatacgtaatcaaatacaaagtggataatatcaacggttctaatagctatattgtgaagaacaagatttcactgacggtcctgaactggaatctgaaaggtgatgtgtctaaaatcaatctgattaaaaagaacatgcctaataatacgtgggtcaaaaaagctgtcgcagcaacgaaaaaaggtattccgttactgaaatttaagggtggcaaaggaaagattgttttcatgaccgcaggtgtgcatgggaatgaattatcctcccaggtggcggcgatgaaaatgattaaatatttgtcggacaatccaattagtggaactgtttatatcatgccgtttgtgaatgttaaagcgattgctaaaaaagtccgctataccgacaaagattataaccgtatcgcgtcgagttctggcacgataccaaacaaaattgtcaaactggttgtaaaatacaaatgtaattcgtatggcgacttccacacgaccaaaccgggtggcgcgcctgggaaagatattgtaatgggctctaagagtctgaaaagcaaaagtgccgaccttactaactatattgctaaaaaatgtaaagttaacaagcggatatatagtcacattggccaagaatacccgggcgccttgtttgaaaatgttaacaagaaagggatcacttccgttatctgcgaagtggcacttccccataacactgtaacaaccaaaacagtcaaaacctcttttaacatgatgaaatacctactgaaatataatagcgtgatctaa

SEQ ID NO: 72609 - DNA, 741 bp, synthetic construct
  source 1..741: mol_type = other DNA
atggccattactaaaaaacatgtttttagcctgctgatcattctgataattgcacttggcactatttctatatctagtgcgtatgtgggcaccggtttctcgcacgacattccgacctcaaaatatcatgatctgagcgcttctgatattctgaacaaatataacacgacaaattgccatgtagaagaaaacggtgtctgcaccaaagtggttgatggcgacaccatctacttagataacgggaagaaaatccgttttgtgggtgtaaacacccccgagcgcggcgttgaaggttacattacgtcgaaaaatttcgtgcagaagttatgcctaaataagaaagtcggtctggatatcgatgactccaaatttacggaccgttatggccggaccttggccgtggtgattgtcgatggaaaaaatgttaacgaaatgctcctgaaggaaggtttggccgaaatcatgtacatgccgcctagtgaatttaacccatttgagtggggcaccaccaacacccatgtagatacgacacacagttcctctagcacaacccatacaagcacggaatccaccagctcgtcagactcggcgaaatatattggcaatgctaacacgggaaaattccacactgcggggtgtagtagcgttaaccatatgtccgagcacaataaagtcttcttttcaagccgcactgatgcaatcaatcaagggtacacgccgtgtgagatctgtaatccgtaa

SEQ ID NO: 72610 - DNA, 1548 bp, synthetic construct
  source 1..1548: mol_type = other DNA
atgctaattaaaatcaatggagaagagatggacgtggcagaagcttccacaattcaggacgtaatcgaggaaaccaatgctccctatacgccgggcagtattgtctgtttaattaagggtaaaaaagaactggaaaaaaacatcagtaaatataaaattcgcactaacaaaggctctatcgttatccagttagacgaatcggacgaagccaaacccctcgtggatatttggaaaaaccagtatgatgaatttgtggatctgaacatccgttggagcaccacaactgaggtggcgattggtccgattgtcacggacttggaaccaacctcagaagaatacaaatattacgagggcgatgtggttttaagcctgtccagttttagtaatgagagcactcatctgatattgctgaaagataacaccaccaacgtctatagcgttcctccgtttaacaaggggatttttgcccgcgttatcgggggcaagaaaacactggataacctgacggacgacgattccgtaagtagtatcgagccgattattgagagaagcacaacaaaggatattgtatcagtatctgatctgactacggtgttagaagaaggcaacgaattgtatacctacatgtcttttgatattgacgaagaatccccggtttgcgtggaacacctgtttgcccttataaaagatggcaagatgaaggtttcatatgaaagcgaatcatttctgggtttctacgaactagccagcctggaaaagcctaaagagcatgttaccaaacgtaaccgtggaaccatcaccgttcgcagcgacggtgtcggcgtcggcaaactcttcatctatcgtgaaaatcgggtgctgtctccaaatcacactacggtgggcaatgtagtgaagggcatggaactgatcgatgcggcaaaagaaaacgaatttatcaccgtgaaagcagaacaaggtcgtttaatgttgctgaataaaacccaagcggaggcgacggaaatgctttcggctgcaggtgttgagcatatgatcgacgggcttgtggatgataatgctattatcgttgagcagactccgcaacatacaattgatatcctcaaggagggtaaagtcatcaccaaagcgatcaacaaagacgatctgtgcaccattaagttcaccgacaacgcgccacgctcggtacgctactttaaactgctgagcggtcttttggaaaacccggtcggtcagattaaaattcacttcgcagtaccgggcatgcatattgtcattttcgaaggggataaaaaagcagccaaagggctggtcccagagaataatcctgtggataaagttatacgaggtcagataggaattacgaatatggcctcaaaaagcgcggggctgattggtattcggttcgaggataactctgattttggcccgacggcggaaacgttcgacgcgaccaatattatcggcgatatcacgtcggattacgattacctcgaaaatctgaaagaaggagtggtggtgtatgttgccgaatcgaacaatgagtcctaa

SEQ ID NO: 72611 - DNA, 561 bp, synthetic construct
  source 1..561: mol_type = other DNA
atgctagtggaatgctacgatgagagaggcgccgaagtttatgaaatcatcattaaacagatctttcaggatctggtgctgggttccagcgttgatgatctgaaggcgtacgtgaatcccgatgaccctgtatttgttttggctattaaaatgcgtaaaacgagcaacgtgattaagttcgaagacgtcgcgaatttaatgtataataaacaaaacgacgtcacaaccatactcattgataatgagaactatcttccgaacattctgaaagaattatggaaacgcttttcacgtgatgaaatctatcaaccaaatcgctaccagcttgaaattaaaggggatttcaccgagctgggcagtatcgttgtagacgacccgcattctaacctgcggcgacgtatttatgacgccgtattccgcatactgccggaaggatttaaaatcattaaggatctgtcgacggaagacattgtgactgtggtcgcaaccgatgagctcattaaagatgcatggatcgaaaaagcgctggaatttatcgatgagttgaacaaaggtatttaa

SEQ ID NO: 72612 - DNA, 447 bp, synthetic construct
  source 1..447: mol_type = other DNA
atgaacaaaaaaattgtcatcctggttattgtcgtaatcattgccgttctgctcttgtttctggtgtacgcgaataatgactcttccagtaatagcaatcgcacgattctgaacgtgtcgtcggaaggcccaatcgaactttctaaaataactgatgatattaaaaacaactcctattacgagggttatgacgttgaaaccttacgctggatggaaagtctgggcgataaatacgtgttcaaaagcaacgatgaaattgtaatcatggacaagtgggatgcagacaaaatcccgagcgcttatgtttgtgacgcgtatttccgggagatattttcatgcaatgtgttggagaaccgtaccttaggtgatgggaatcactttaaagatgtgctgttcatcaagaacgtcgaatttattgatgaggaagtgcattatattcagatctaa

SEQ ID NO: 72613 - DNA, 936 bp, synthetic construct
  source 1..936: mol_type = other DNA
atgagtataaagaaggtcgttgtcgccggcggcggcgtgctcggtagccagatcgccctgcaaacggcgtactgtgggtttgatgtgaccatctggctgcgcagcgaagggagcattgaacgtgcgcagcccaaacttgaacggtttaaaaacatctatgtggacaccctggagaaaatgaaaaccgacgcaagcgcgtactgccgcggtctgtcgaaaaaagccgatttaagttcggaggaactggatgcgctgaaagaacaagcgcaaaatgcgtatgattcgctgaaactgacaacaagttatgaagaagcggcaaaagatgcggatctgattattgaagctatctctgaaaatcccgaacagaaaattgcattttaccaggaattggcaaaacatatggaggataagacgatacttgtcaccaattcctcaacattgctcccgtcaatgttcgcggaatatactggccgtccggaaaaatatctgtccttgcactttgcaaacaccatttgggccaataacactgctgaggtaatgggccatcctggcaccgagcagaaatactatgatgaagttgttaaatttgctgaagatattaacatgatcccgttaaaactgaaaaaagaacagccgggttatatcttgaacagccttttagttccattcctcaacgccggacaggccctgctggcaaatgacgtggcggaccatgagacgattgataaaacgtggattctagcaacgggttctcctgccggtccattccacatcttagacattgtaggcctggagaccgcttacaatattgtgatcatgaacccggaatccaaagacccggaaactaccccgggaaagattgcgaaaatgctgaaggagaagattgatgccggtgagacgggtatcaatgctgggaaaggcttctatgaatactaa

SEQ ID NO: 72614 - DNA, 267 bp, synthetic construct
  source 1..267: mol_type = other DNA
atgtttgtcgcaacactcgacggcatcttcaaatactcggacctgccggaagaatacgaaccatatgtgcagtttaaagcgacgatagataaacgcgagcttaaaccgaccgatgagatggcgattctgaacattgcagggaccagcacccatcatgttttgttcctggatgcttattccagtatcgccgaaatcgaagcggaattaaaggaggccgatgctaaaattaatcacacgactctgaagattatcggtggccacctgtaa

SEQ ID NO: 72615 - DNA, 387 bp, synthetic construct
  source 1..387: mol_type = other DNA
atgctagataagaaagtgaaggaaatcatgacaagcgacgtactcactaccacctcagacgtcgatgtggtctttgcctttgagaaattaatggaaaataaaattagtagcctgcctgtggttgaagatgatgaactgattggcattattaccgcaacggacgtcggtcataacctgattctggacaaatatgaactgggtaccagcgttaaagaaatcatgataacgccggttgtcactgtgtcgccggatagtacgatcgaggaggcggtttgcataatgaaagataacgtatcgtccggcatcttaaaccagcttccagtggtggagaatggaaaattggtagggattatttctgatggcgatattatccaagaaatcttctaa

SEQ ID NO: 72616 - DNA, 909 bp, synthetic construct
  source 1..909: mol_type = other DNA
atggatgaactgcgtaataagggtggtaaaaaagctgtaactgttgcgatcattgccaatacttttctgaccgtttttaacattattgtaggcatgctgtctgggagttatgccttgatcagtgaaggagggcacactctgtcggatatcacgacgaccataattgcctacattggctttaaaattggtcagaagccagcggataaagaacacccgctcggacacggacgtgctgaggcaatttccggcctgatcatcatgctcttcctgaccatggtcgcttacgaaattatgagtggcgcgatcgagaaactattcaatccctccacgatcaccacaccggacatctatgcggcagtgatggcgattttcggcatatttatcaactacatcatcagcgagtatattattcggctgggtaagcagattaacagcccggcgatcgtggcggatgggaaacaccaaaaaaccgatattttttcaagcattgcaatcttaattggcgtgcttgtgtcgaacatcggttatccgatcttagatcctattattggtttgattattggcttcctgatcttaaaaacggcctacggcattggtaaagagaatcttgacaacattatgggtaaaattccgtctgaaaaatttgttaacgaaatacgcaaaatagcaaatgaaagcagcgattatgccaacaacgcccataacattaaagtggactatctggggtcctacgctgcagtcaccctgcatatcgaaatcgacggcaatatgacactgaacgagtcacataaaattgttcatatcgtccagaataatattattgaacgcatccctgacgtaaagtacgtgaacgtccatgcgtgcccaaagggcttggattataatcataatcaagaaatagataaataa

SEQ ID NO: 72617 - DNA, 2877 bp, synthetic construct
  source 1..2877: mol_type = other DNA
atgttcttcctggtgttgggggtagttggtgcaacagaatttaacaacgcgtcaaatacagaagactcaaacctcatgacggataacgttgactccctgagcgttgaaaataaactggaagtgtcgaacgaggattctatcagcgaggctaatctggttaactcgcatgacgataatctgaacaactattcggatagtgatgttctcagcaactatgaggatgattacggcaacgtgcaggctagcaactatgccgaaataggtaataccaactcggttcgtagcgatgtcctgtctgtttctaacgacgataatctcgccgcgagtagcaaagtatctgcaaaggttgatgtagtggatacacattattccaaatccgcgacatatttcaaggtgactttgaaagatactaaaggtaacagcatcagcaaccagaaaatttcgtttaaagtcaatggcgtgacatacaccgcgacgaccgataaaaatgggatcgccagcgttaaaaccgccgcgttgtctgtaggcacctacacggtggcaattaagtacgccggtagttccaaatacgcagctgtcgcgcttagcaagaaagttaaggtattgtcctctgtgagtggcagcgatattacgaaatattatggacctgtggtccagtattcagtaaaattctggaagaattataatgccttagcaaatacgaaagtctcatttaaagtgaacgggataacctatacgaaaaccaccgataaaaatggagtcgcgaaactgccggtcaatttggcgccaggcaagtatgtgatcaccacaatcaatccctattcgggtgaaaagttgtcgaataaatgcatttcactgcgcgacggtaccacgctgacccatggttccaccaacacctatattactccgaataaaaaacatagcttcacggtaacccttaaatcgaagcacggtattttaattaaaaacaaaaatgtcgtatttaaatataataacaaaaaggtcaccgtgaagactaattcgaacgggaaggcgacgctgagcatcccggcgctttctaaaggcacctattatatcagctactcatattccggggacaaatattactccggttcatcgggctcgggcaaactgtatgtcaaaaatccaacgacgaaaattacctctagcaaactgaagatgcagtacaaggacggtagcaaatttgcggttaagctgaccaagaacggtaaagttctggcgaataagaaagtgaaactgaccttcaacggaaaaacgtacacggaaaaaactaatagcaagggtatcgcgtacctgaccgtcccgacagtaaaacccgcgacgtacaatatcaaataccagtatctgaccccgagttactttaactactgctacggctccaacaaaattgtggtttctaaacagacggcgaaagtaagcgccggggacttagtgatgaactataaagacggctcggtgtacaaagtggttgtcaaaaataaatttggcaacccgcttaaaaacattaaagtcaaatttaccattaacggaaaaacctatactaaaaccaccgatagcaatggcgtggctaagcagtcgatcggcttaaacattggctactatagtgttaaaaccgtactgtctaataactactacgcccatggcgctatatacaaacacatctccgtgaaaggcaccaaatttgtcggcggcaacattcacgtagccgtcggcaaaactgcctactattcagtaaaactgctcgattataagaataacccgatcaaaagcacagaagtgactttcattttggacggtaagaagtacaccgcgaccaccagttcaaaaggtgttgctaaagtcaatctgggggtgttaagcgcaggtacgcataatgtgaaatattcacaaggcgagtactccggctcaagcaacatatatgttgctgataaagtgactattaagcaaatcatcgcggcatctggcaatgtgcagaagtatattcaaaaaaatcatcgcctcccgtccacagtgaacattgggggtgtgacctactcaacgaaccaatatctgtatctcgtgagcaaagcgattgtaaacctgaaaagcaacgtgaaatcggcaatttatgtgaaaaatgtcgatggtccgagtaatcctagcagcacatacgcggccggtaacttatatgactatctttccgttgcaaatagtgttgtgaaaaactctgattcaaaaggcagtgtacctaatacggtgagctctaaagttggaactattggttataaaagtctagtttatgcgtttgcgcgtgtggtcgccttctacggtgatgatgaccgtctgccatcctttgtcgaaatcaaatccctaagtggcacgagttcagatagtaatatcaactctaaaaatactatttcaaacctgaaagcctatctggcagcctcaactaattgccaggtgaacaatgcgaaaattaaacaactagtgggcaaattaacgaacgggttgaagagtgaaaaatcgaaagcaacggcaatttataattatgtgcgcgacacaatcagctacagtttctattatgacactaaacacggtgctgttggcaccctgaatgcgaaatctggcaactgtgttgaccattcccacctgctggctgccatgtttcgaactgccggtctggcaacgcgctatgtgcatgggagctgtacattttctagtggaagtacctacgggcacgtttggactcaggtcctgatcgataacacctggacggttgccgatgcaacaagcagccgtaactcgttaggaaaaatcgctaactggaataccaagtcgtaccggcttaacggatactactccagtcttccattctaa

SEQ ID NO: 72618 - DNA, 183 bp, synthetic construct
  source 1..183: mol_type = other DNA
atgtttcgtaagcggattgacagcaaaggccaagggagtgcggagctgattctgatcattggcggtcttattgtcgttgtgctgctgatagcctcctatatttcgaatatcacggaaaaaactcagaccaacattcagaacttgttaaaaaccgaacgcgatttcctcatcaataaaatctaa

SEQ ID NO: 72619 - DNA, 207 bp, synthetic construct
  source 1..207: mol_type = other DNA
atgaaaaacatgaagaaactgatcaaagaaaattcggggcagggtgcggccgagtatatcttgctctttggcggcgtgcttgtaatcgcgctgctggcactgacgatttaccgttcctatatggaaactagcgatgtcagtttaaaagctaaagatgacataattgatgtgcgcaataccattctggacaaccggacccatgtttaa

SEQ ID NO: 72620 - DNA, 1149 bp, synthetic construct
  source 1..1149: mol_type = other DNA
gtgggaaatacaataaaactggtgtcaggttttattttattcgtaattggtgttctcatagcgtatgaggccagtgtgtataatctgctggatatcttactgatcatcggtctgatcatcgcaatcgtaggcataattatgatgatcagtcatttcgtggagtctaacgcggatcgcaccaccaacaaaattaaagagttccttgagagcaaagaaagtaattccagctttgaacgcaaaaattttaccggcgaagaacctttaaaaatccgtcatgattataacgattttgacgatgccgaatacgatgacctgggcattgaagattacaacgattccacacctagcgagtactatggcgactcgtttgaagataacccgaatcgggtactgcgcactgttccacgacaagaaaaagaactgaatctcgataaccagctagttttcacgcccaattatggacgcccgttgaaggtcacgagaaccccaaaaaaacgtcaatcagactatttcgaaaaagagatgccgccgtttgtggtggagacggataagtctgatgaaattaaacgtgctctggaagaaccaacgccggttgaaaaagccgttaacaatcacaccttggctcccgaagtgaaacagcctcgcgacattaaaattgatattaacgacccggagagcctgccggttccaaaatccctcagtagccacatcctttgcaatgattctgttattacttcccaggaagcgtttgaccagctggcaatctatgtcaataaggaaatcatgttggaaattccgtcgctgaatgaactttccgatcgtttcttatcgcatgtgccgaccagttattcacgcgtaattatcgatgaatttgacacctcagacatgagctacatgtttctgattagctcgcttctgaagcaaggcgtccatatcaagaccgtcccgaaagtccacacagtgaacctgatcacggatgatagccatgctatgattataagtgaggggcagaatgatatggaatacggtgcgatctacgatgaccggaagagcatttcaaacattcgtgccagcttcgaaaaaacttggaacattgcatcgaacttggacgagaacattattatgggttctgtggggggctctgcgtaa

SEQ ID NO: 72621 - DNA, 720 bp, synthetic construct
  source 1..720: mol_type = other DNA
atggagatacgctggctgggccactcggcatttgaaatcatctcagacgataacgtgcggatactgatcgacccgtttattagcaacaatccgacttgccaagtcccggtagaggaattaaaccccgatattatcttgcttacccacggccatagcgatcatttcggcgatgctttggagatctccaatagcacgaatgcgccgatcgcctgtattcacgaaatttcactcttcctggcgaaacagggcattcgcaatattagtgtgaacattggtgggtctttcgtatatcgtaacattaaatttaccatgctggaagcgaagcattcgtctgatattgacatggttgaggaaatcgcccctggtggcactgccgcaagctttttaatcacctttgaagatggcacgaaaatataccattgcggagatacaggactgttcggtgacatgaagaatattattggtgcaatctacaaaccggacgtggtcatgatcccaatcggggataaattcacgatgggtccgtttgaagctgcgctggcttccatgtggatgaatccgaaagttgttattccaatgcattataatacctttcccccaatcgaacaagaccctgccattttcgcgaactttgtcagtcagttcaacccgaacattgacattgtggtgatgaatcctgatgaatattttgagtataacccggaagattaccaggattaa

SEQ ID NO: 72622 - DNA, 273 bp, synthetic construct
  source 1..273: mol_type = other DNA
atggacataacggtgaaagtcaccagtattcatattgttgccggcatcatcgcggccctgatttccactgggcttacactgggctggttcggatttaaaaacgatatttttgcgttttttatcgctgtaattatattgtatttcgttggtcaggcttgccaaaagatcgcgggtgatgaaattagcggtttttcgcagtggttatgggatggcattgcaccgttctattttacctgggtgatcgcatacacgattttcgccatctacctgtaa

SEQ ID NO: 72623 - DNA, 1821 bp, synthetic construct
  source 1..1821: mol_type = other DNA
atgtcgagcatgagttcggtggcaggcttatcaaaatatattaaaaccctgccaaaaaccaaattctcaataatcggaatgctaattattagctttctgattggcagcatctactacctcatagatttgaatccgacgatgggcattctggaagattttattgccggcgggctgtttggtctgatcgtctttggtatttcttccatcatgagtggtgcgttgaaccagcagaccattagcgttgttcacggcatcaacctcaaaatcaagcactccatgtttttatctgttctttcgatgacaatcctgggcatcatcataattatcggatgtatcatttcccaaatactcaagatagacctgtttctgaacagcatgctattcggttgtgttttaatttacggcttcggcacactggttttctgggccacctcaaaagtgcgctttgtgactgcggcgattactggtttaatccagccactgctcatactggcaatgtacacactgattaccttcttattcattgacaccagctttattggcccggcgatcctgcaaataactctgaaagccatcgtggcggcaatcatatttgtgatggcgatctacgcattcattaaagtgattgcgtccccatttaagaagaacctgggtatcggtgttttggatctgctgagtctgttcattgcccatatgaatgaaggatctaactcccttgaaggcttatttgaaaacatgagcgaagctattgacaccatcgtcacctttgtgagttttaaaaccgaaaatggtatcaaagcactgtttatctctccgtctgttcacccggggccgctgggggacctggggggatcaaatatgcccacgctgttggctaataagtttgaccatttcacgatggtggcgcatggcccaagcacacatgattttaacccgattgcggtgtcggagattgataaaattgaagagtctgtccggaacggcttgaaaacggtcgagtatagctcaaatgcctcgcgtttcatccgctataatgttgaaaaagccaatatcggtgtgcaactgtttaataagggtatggtgattttaagcacttttgctccggatgcggtggatgatattgaatttggtgtggggctgactatgatggctcaaagccgcagccgttgcaacgtggaggatagcattattgtcgactgccataactccttcacccctgaatcgggggagatcttgcctggcaattcagaggtattccagctgattgatgttattgacaccattaatccgaaacagggacgttatgatgtaaaagtaggctgctatgaagataaccttgaatccctggataaacacgacggtgtcggagacagtggtatcaaaaccatgattgttgaagtcggcaatcagcgcaccgcatatgtacttttcgatgcaaacaacatggaaattggcttcagacaggaaattattgatgccgtaagtgatttggagatcgatgagattgaagtcatgaccacggacacacatacggttaacacgctttctcgagggtacaatccgattggtattgcgaaacgccctgaaattatcgaatatgtccgtattagtatcgaagaggccatcaaagatctggagaaggtagaagtgggcacgggcactgaaaaaatcgaaaaccttaacacgttcggcccgaaaaatagcacggagttgatttccacaattagttcagtagttgcggtgtcgaaaattatcgctcccgtgctgctgattaccgcattactcatcgcctttatctggatcttctttggtggtctctaa

SEQ ID NO: 72624 - DNA, 279 bp, synthetic construct
  source 1..279: mol_type = other DNA
atgattactagcaataatttggttcaccatgaatttatcggcctgcgcatccatgcgatgaacccgaagaaccctagtctgaacttaaaaggtaccgtcattgacgagacgaaaaataccataattattgaagaggaagataacaatgaaaaaatgattccaaaaaacgggacatttttcgtgttcgaactgccgaacggcgagaaaattaaaatcgatggtaatatcctttcgattcgtcccgaagatcgcatcaaaaaacggtttaagaagatctaa

SEQ ID NO: 72625 - DNA, 1362 bp, synthetic construct
  source 1..1362: mol_type = other DNA
atgtcatcactagaatttctggagcccgtcttcaaaatcgtgccggaagtaaagtcgccggttcaccgtgaagactttaacgaaaaacttaagtggacggctctggtgctggtgctgtattttatactgacccagattccgctgtatgggctggcacctggcgcgattgatagctttgcgcagctccgcgcagtgatggccggcagtttcgggtccatccttacactcggtattgggccgattgtgacggcctcgattgtgttacagttactggttggttcaaatcttttggatttggatttaagcagccacaaggacaaatcgcatttccaagcgacccaaaaaatcctttctatcgtttttacattttttgaggcaagtgttctggtactgactggtaacctggtaccaatcgatggctcgtacactttaatattgatcatccaactggtggtcggggccctggtcattatttacctggatgaagtggtttcaaaatggggattcggcagtggcatcggtctgttcattgctgctggcgtctgccaggccattatcgtagggaccttctcgatcttgaatggtagcgatggactgttagccggtattattccgaaatttatccagcttgcgaccggcggtacctttgacttctcaattctggttccactcatagcaactattatcgtatttgtcgtggttttatacggggaggctatgaaggtcgaaattccgatttcccacggtcaggttaaaggtcacggtcgcattcggggatctgtgggcaaatatcccctgaaatttgtttactccagcaatatgccagtaatcctgacgagcgcattgctcgtcaacgttacgctgtttgccaacgtgttccaaaaaatcggcgtgccgatcctaggccatctacagaatggcaaagcggtggatggtattgcctggctgttgtccacacctaacttaaccatgtttattaccgagccgattcatgttcttgtatacgccctgtttttcattgcgtgttgcatcttattcagctatctgtgggtggaaatcagtggcctgaacgcgaaaaagatttctgagcagcttcataaatccggtatccaaatcccagggtttcgcagcagcaaacgtcagttatacaaaattttgaaaaagtatattcctgcactgaccattataagtggtgtgtatgtgggcctcattgcgttcctggcggatctcacgggcgcgctgggtggaggtacgggcgtcttgctcaccgtcggcatcctgcataaactgtatgaagaaatggctcaggaacagctgatgtctgcaaatccggttctgcgtaaagtgctgggcggagactaa

SEQ ID NO: 72626 - DNA, 579 bp, synthetic construct
  source 1..579: mol_type = other DNA
atgtttgatatcatgggaatgatctacggtgttttgaacaccatctttgatccgatcctggcgatggacccgaacccaagtaatccggcgttaacggtgctgattattgcctttattgtcagcctgatcacaaccattgcgaataaatatctggtggaccaggatgccctgaatgaaaaacaggccaaaatgaaagagtttaacaaagaacttcgtgacgcacagaaacgtggtgatggcaaaaaaatagctgagctacaagcgcggcagactgaaatgatgaaggaaaacaccgcgatgatgtcggaacagtttaaacccatgattgttacttttgttccgatcatcctgatatttttctggatgcgcgcatctgcaattcatgatctcgtgattatcttgccgaccaccgtctattgggtgacactgacgcctctttggcacgtaattggctcaatgttctatggtggccaagctacgattccatacgggatcggctggttactgtggtacatgatttgcacgtttggtatgtcccagattctgcgcaagttcctcggcttcaagcaagggttctaa

SEQ ID NO: 72627 - DNA, 1767 bp, synthetic construct
  source 1..1767: mol_type = other DNA
atgaacgttaagaacacgtttgtgatcatcctgcttttcctgatcttatttagcaccgttacgtttgtatctgcggacgatgatcgcagctattcaattgatcaggtgatcacagatttaacggttaaaaacaacggcctgctgcatgtcgaagagcagtatgattactcgttcgatggggcgtttaacggggtgtatcgcgacatcccgctaaaatccggcgagagcattgagaatattaaaattcatgtggatggtgcctatgccacatatgaagaaagtgatgatgatggctacaaacacgtaaagatttatttatattccgatgccgcccatactaaaggtatcaaagattgcaacgtgaaagtctacattagctacgatttgattggtgcggtaactattttcaacgacgttagtgggcttcaatacaaactgtggggtgaggaatgggatgttggcgctaacaacctgaaagcaaccgtacacctgcctggaaataatgggaacgagtattatctgaccccgtccgagtacaacgataccagctccctgaaaggcaacacgatcactgcagaaagtagttacattccgaaaggcgaatattatgagttgcttgtcctgatgccggttgatgattttaataagtccccaaatgccaaacatgtcaatcagaatggtcacgacatgattatgaaaaacttaaaaaacaccattaacgaacgtgacttttggaataccacgtatcttgtgctcggcttactcacgctgataagccccataagcgcgatcatagtctacttgaaatatggtcgggaaccagaagtgaattatgacgggatttacgaacgagatttgcccacgaacgatccgccggaaatagttaatgccctgattgaaaataaaatcagcattggccatccgaatattaagggcttcgaggcgtctatcatgaatctgattgatcgtaaattcattacactgtcctcgcaggaaaacattgaaagcaataccaaagacctgatgctgaccttgaataacaaggcaggcttgagtgcatcggagcaaattgtctttgacactcttaaccacttttcgaccaataatattctgaatctgtcaacccttaatggccagctgtctagcgaaacgaacggtaaatggttcatggaaaaaattcgcgaatgggaaagctcagtggaaaatgatatggatgtctcccgttttttcgatgacagaggttctagcatcatgaatgtgatcggtctgttaggcatcccgttcgctatcgccctgattgttctgggtttcatcaccaacctaaacaacggcctgtatagtatcgcgggaggcatctttctgataatcttttcaatcgtgatcaccatgtcggatgatgatatctttggccgctggacagaagaaggtcgtgtatactacctcaaatggaaaaatttgaagaattttctggaagacaacagtttaattaaagagcaccctcctgagtcaatcattatttggaagaagtacctcatttatggtgctgctctcggagttgcggacaaagtgtacgaaagcatgaaactgcaagtgccgaacatttcagactacgacaacgacggactgttcatgtatcattattacgggggttatggcatgatgaatatggcattttcaactggtgaaatttcggcgaacccatctgactcgagtggcttcggtggttctggcgggggatctggagggggcggtgggggcgcgttttaa

SEQ ID NO: 72628 - DNA, 558 bp, synthetic construct
  source 1..558: mol_type = other DNA
atggattttatactaacgatcgtaattatcatcgtcgtcttattcattattgtgaccttgatccacatgtacaataacctggtcggtcttcgaaatcgtgttaagaactcctatgcacagattgatgttcagctgaaacgccggaatgatctcattccgaacctggtggaaaccgtaaaaggttatgcttctcatgagaaaggcgttctggaagaagtaaccaaagcccgtaatagtgttatgaacgcctcatccattaaagaaacatcggtggccgacaaccaattgactggggcgttaaaatcgcttttcgcggtggcggagaattaccctgacctgaaagcgaacagcaatttccagcagctgcaaaacgagctgagtgaaacggaagataaaattgcctattcacgccagttctataacgatgttgtgctgaagtacaataatgcatgccaacagtttccaagcagcattctcgcacgtatctttggctacaaaatcgaagactattttgaagctccggaagcggagcgcactgtgcccaaggtcgaattttaa

SEQ ID NO: 72629 - DNA, 423 bp, synthetic construct
  source 1..423: mol_type = other DNA
atgatcattgacggcgaggggtgcgtcttgggacgtttagcgagtgtaactagcaaaaatcttctggagggcgaagaggtcatcattattaacgcagaaaagattatgttaacggggaataaggattgggcgtatgccaaatacaaacagcgcgtggaccgcgcatcgatttctaacccgcgtgatctgggtccaaaatatcctagacgcccggacgatatatttcggcgtacagtacgaggtatgttgcccttcaaaaaatcaaagggtaaaaccgcattcaagggcctgaaagcgtttgttggcgtgccggcggaatacgctgatgtggaactcacggccgttccggaagccgaatataaaaacattaaaaaaggtatcgagctgggcgaaatctccaaactgctgggagctaccttttaa

SEQ ID NO: 72630 - DNA, 171 bp, synthetic construct
  source 1..171: mol_type = other DNA
atgattccgattcgctgccttagttgcggtaagccagtgtccgcagtatttgatgaatacaacaaacgtgttgcggccggggaaaaatcgaaagatgtcctggatgacttaggcttgacccggtattgttgtcgccgtatgctgatcagccatgtgcagacgtgggagtaa

SEQ ID NO: 72631 - DNA, 1656 bp, synthetic construct
  source 1..1656: mol_type = other DNA
atggggttggagaataagaaatttctgagcgcactgaataagaaatttaaaggcgaagaccaggaaaacgaccacaccagcttctattgctttgacggctggaaacaatctgctcgcaaacgagagtttaatgaagctgctgagaaattggcgaaagaacgcaacattccgttctataaccctgatatcggtgtgcctctggggcagcgccagctgatggcctataagattagcggcaccgaagattatgtcgaaggtgatgatctgcacttctgcaacaactctgccatccagcagttggttgatgatattaaacggaccattattgtgggcatggacaccgcacattcagtacttcaagagcgcttgggtgtcgaagtgactcccgaaacgataaacgaatacatggaaaacattaaccatgcactgcccggtggtgccgtcgtccaagaacatatggtggaagtacacccgggtcttgtagatgactgttacgccaaaatattcactggaaatgatgatttagctgatgaactggacaaacgcctcctgattgacatcaacaaggagtttccggaagagcaagctgagatgctgaaaagctatgttggaaataaaacgtatcaggtgagtcgtgttccgacacttgtagtccgcgcgtgtgatggcggcacagtttcccgctggagcgcgatgcaaattgggatgagttttatcaacgcctacaaactatgcgcaggagaagccgcgattgcagatttctcgtatgcggccaaacatgcggatgtgatcggcatgggggcctttctgccgagccgtcgtgcacgcggcccgaacgaaccgggtggtgtcgcattcggtacactggcagatatggtgcagacctccagaatctcagatgacccgtgtgaggtttccctagaagttattgcagcggctgcggccctgtacgaccaggtgtggttaggctcatacatgtcgggtggtgtgggctttacccagtatgcaagtgccgcgtatacggatgatatcttagacgatttcctgtattacgggaaagattacgttgaaaagaaatatggcatgtgtcaggctgatttaagcatggacaccgtgcgtgacataagcactgaagtcactctgtacggactggaacagtacgaaaccccgaccctcctggaaacgcattttggaggctcgcaacgggcgtcggtagtgtctgccgcagcgggatgctcaacggcgtttgcgacgggcaattccaatgccggtgtgaatggttggtatttaagtatgatcctgcacaaagaaacccattcgcgtcttggcttctatgggtatgacctgcaggaccaagcgggcgcgtccaattctctgagcattcgtagtgatgagggtctgatccacgagctccgcgggccaaactacccgaactatgccatgaatgttggccaccagccagaatacgctggtattgcgcaggctccgcatgcggcacgaagggatgcgttctgcacaaatcccctcattaagattgcattcgcggatcatcaccttacgtttgattttcgtcatccacggaaagagatcgccaaaggcgcgttgcgtgaatttatgcctgccggcgaacgtgagatcattatcccatcacgctaa

SEQ ID NO: 72632 - DNA, 1332 bp, synthetic construct
  source 1..1332: mol_type = other DNA
atgaaaatatatgacgacaacctggatctgtacggtccagatgggaaaattattgaagaaagcgtgccgcttgaatctattagtccgctgaaaaattcggcgatccaacagatgatctatgatatcaaacgctccgccgctgtgaacctggtaggcatcgaaaaaggtctcaaatccggtgcaatgggtggaaagtccacgtatatcccaggccgtgagttagatctacctattgttaaaaacgcggaattaattgcgacaaagattaaaaaaatactacaggttaacgaagatgatgacaccaccgtcaacctcatcaatggtggccaacagcttttagttcagctcccgtttgaacgcctgaatgtggccgcagattacagtgtctctacgctgcagaccagtgccgccaccattcagtcgatcattgacagctttgaaattaacatgttcgatgcaagcaccattaaaacggcggtaatgggggcgtacccgcgcactgttgacctttcggggagcaacattagtgcgctgcttggcccgccggttctgttagaaggattgggctatggtttacgaaacattatggcaaatcacgtggtggcgattaccaataagcagacgctgaacgcggctgcgttgtcttcgattatggagcagactgcgatgtttgagaccggtgatgctaccggggcgtttgaacggatgcacctgttgactttggcttaccaaggcctcaatgcgaacaacctggtgtttgatatagttaaggagaatggtaaaggcacagtcgggaccgtgatccaaaccctggttggccgcgccatcgaggataaaatcattaaagtcgcgaaaaaaatgcccagcggctataacatgtatgagcctattgattgggccctgtggaatgcctacgctgctgcgggtctgctggcagccgtcatcatcaatgtcggggctgcccgtgccgcacaggccgtagcatcaacagtgttgtactataatgacatgctggaatatgaaacgggccttccaggcgtggattatgggcgcaccgaaggtgtgggtgtcggattcagcttcttctcccattcaatttatggtggtggaggcccgggaactttccatggcaaccatgtggtaacgagacacgcaaaaggcacggcaatcccttgtgcctcagcggcaatgtgcctggacgctggtactcagatgttttcagttcaacgtacaagcgcgctgatcggcacggtgtacggcaccatagacaatctgcgtaatccgatccccaacgtagccaagattgcgggcgaaattaaggataaactgtaa

SEQ ID NO: 72633 - DNA, 786 bp, synthetic construct
  source 1..786: mol_type = other DNA
atgaaaggaattttgggcgcaatttgtggcgatatcattggcagcacccgcgagttcaatccgattaaaaccaaagattttaaactgttcaaacgtaaatctacattcactgacgatacggtaatgacgctagcgattgcgaactggttaatcgaagataccgcctcggaaagtatactgattaagcagctgcaatattggggaaataaatatccggattcaggttatggcggccggtttcgaaattggctgaaagaaattgacccgaaaccttacgggagttgggctaatggctctgcgatgagagtatccccgtgcccctgggttgcgaactccctgcaggaatcgcagaaactggctaagttgtccgcgatcgtcacgcataaccatccggagggcatcaaaggggccctggccacgtcggatgcgatttatcttgcaaaaaccggtgcaggtaaagagaagatcaaacaccatattgaaagccactacagttacgatttatctcgtagcgtggacgaaatacgcactaactacagctttgatgtttcatgtgcgggcagtgtgccagagtccatcatctgctttctggaaggtgtgtcatttgaagacaccattcgcaatgccgtgagccttggtggtgatgcagatacacaagccgctatcgcggggagcattgcaagcgcctattgggacatcccaaaaaacatttcgtacaagtcaatcaaccgtctcaactatgacttgctcaatgttctggtcaattttgaagaaaagttcatgtaa

SEQ ID NO: 72634 - DNA, 783 bp, synthetic construct
  source 1..783: mol_type = other DNA
atggatgaaaatatcgcgatactgaaaggcattggtcttactatgtacgaagctcaggcatacgttaccctggtttcattaatctcctcaaatgccacagaaatttctgaaaaaagcgggattcctcgtagcaaaatatatgatgtactcaagggtctgatccaaaaaaattacattgatgtggaagatggacggccattaacgtacaatgtcaaatccccggttgaagtcttgagtctggaaaaaaaccgcttgacgaccgaactggacgatacaataacgcgcctgacaaacgtgtatgagaacggcatgagtcaggtgcaagccccgatttggagaatttatggtgtcgataaaatcatcaatcaggaactggagatcattacgcgcgcgaaacatagcattaacatgcgtatcgggtttttgttcgaagaggaaggcgaggcattagtgaaaatcctcaaaaagcgtaaaaacctaaatatcaacatcctggcttcgccgacgtgctgtattaacaacaaaaccttcaacattatcaaattttttaaggacaatgacatgccagtgcacaaagcggacattccgtttgttaaagtactgatttctgattcgaaagagatgatgcacacctatactaagtttagcgaagacaaacgtaccgtgcttcccgaaaccgcgattggcatttggaacaaatatgaagatattgcccgaaattatgatgagcgcttcatgaaccagctgcataaaatccagaataaaaagaaaaagactacctaa

SEQ ID NO: 72635 - DNA, 1005 bp, synthetic construct
  source 1..1005: mol_type = other DNA
atgaacactgacattaacaaagcacagaaatacatcgacgatgaaaattacaaggatgctatcattctcgctcgcaaaaaacactcaaaagacgatgttgaaacgtacctgagtattttggatctgttgattgaagcggactacatcatcgctattgaagagaaaggcatgtattaccagtactatgataaaacgcatgacaacggcgactatggtgagaaatacttcgatgagtatctcaaaaaacagccgaaatccattaatgccctgtgcgacaaggcgatgagccgtttcaataaaggccagatcgacgaatctctgaaatatatggatacggcctataaaaactataaaaattattcgaaaatcgaaaagccgcgtattagcaaaaaggaactgttaattgccaaaattgaactcctgatgcaggcaaaacgttacgatgatgcattaaaatatcttaacaactatgagaatcaatttggcggcaatcaaaagagcgatttatacaagggtcagatgcttcaaaagaacgggaaaaacaaagaagcgctggtgtatttaaacaagtcattgctggaagaagatacactggtagggtttaacgccaaaggtgatgcgctgttcgaccttggaagatacgaagatgcgctgaaggaatacaaaaactgcctaaattatgaaagtaaaatcgagggtgatctggaattaattaccaattttaattacaaatcggccttttgctgtgtcaaccttggagatgacggggaggcgataaaatatctgaacaaaactatcaacatgctgaatgagcatggccgactgccacgcaatattgaagcaatatatcagaaatgttcctttgaaaaggaacgcattatgaaaaagggcaatgtgaccgatgaggagtttcggaaaagtaaattcttcagcaccaaaacctctctgatcatcttgttcattatttttatattttttatcatcctgaaattgaatggttattaa

SEQ ID NO: 72636 - DNA, 1476 bp, synthetic construct
  source 1..1476: mol_type = other DNA
atgaatggcatcaccatattgatttggatcacgatcgtcatcattggggtaatcgcctgcatattagtgaagttacactacaaaggtaacgaactcgaacaagacgaaggcagcataattccaagcacagataaacttaacggcatactgtcacagggcaaagaaaaaattaatagcaaaaacctgactaacagtctgagctccaaaaccacccggacccaaaattcgcaaaacaccaaatcactgtacgggaacaagcagcatacctcacaagactatgatgtttatattgtccccgaagtcaacaataaaaaaacgtacgaatatgagtcggagaaccaggttctcattgattatggtgataaagttaaaaaattccaggagccgattaagcagagccagatggatattatgaatcagaataaagacgataaaaccgaactgaaagatttgttcaccattgatgaactgattaaagaatcgaaacgcaaagataacgaacgcgaaaaagagcaaccgaaagtggaagatagtgaactgacggaactgaaagaaagtattgcgaagaaacaagagaacacgatcgaaaagtcttcgagtgaagaagatatcggtgagtttgaaacgatcgagagtttgctgaatgaagaagaacttaacgaggatgaaacatcggaagagatcgaaacctcaaccaccagccagaaaacgattgaagaagcaatttcctctgcttctcaggaaaagaaagaggagattgaaaaccttagcgaaaacgaaaacataactgacgttttactgcacgcagatgatgatcagatggacattccgaatgaagagattaaagagccaactctaaagacgccaacaaaagtcgatgagtcaaacgattctgaatttaattccccgcttaaagaagacaatgaagagaccatggatctggattaccgcaaggacctggataaatttacccagaaaattaaaggatcgaaactcttcaaagacgttaaggaaaaactgacggctgagccggaggaatacattgaggaaggcatccccaaggatgagacttacattcgtaatgtgaaagaatatgatgactttgagcctattatcaacgagacacatgccgactatgtagatccgattggcgacattgagcctgcgtttgaagataatcagagcctgaaactggaaaacaaaccgaaagcgtttgaagtgattaaggattctagcaaacctgaagtgacacagcagaagatcccaactattaaaagtaaaccgtcccgaaacaacatcaaaatcaaattgaataataacgaagtagtgctgaaaaaaggagacgaaatcatcttcaatcatttaggtgaaacgtattccagccaagtgtatgccattaatggtgacgacatctccgtgaaataccgtcgtcagaatatcatcatcaaaccggcggacgttaagaagatttattaa

SEQ ID NO: 72637 - DNA, 585 bp, synthetic construct
  source 1..585: mol_type = other DNA
atgaatacgcggtctctgaaactgattcgcgaggtcatgatcaactccggtaagtggtcctccattgaaataagtcaggactcaatctacctgcaatttcgtgatgtagaactcggcacaccaaaaatcgacgaagatttttctctggttgtgcgatttgccgatgacagctttttcaccgtcttctacaacaacatctgggacattgattttctgtcaaaatatgattttaagaatcagctactgagtgaggaagtaagcttcaacattaaagacattaaattcattgattttgaatatttaaatacctttttcactaattataaaaaagagaagagtgtgtcggtggttgaggatttcaacatccataatattcgcaacgattttttcatgttgcttgaaacggatgaaatcgcaattgtcgttgggggcaaccagatggatttctttagcccttttgaacgtctggatgatgcgtcgcttcgtgaactcagcaatgactggatgctgtattttctgcgctaccatcaaaaacgcaatatagtgcgtgacccgatgtgcgaaaaccacccgttgaaattataa

SEQ ID NO: 72638 - DNA, 939 bp, synthetic construct
  source 1..939: mol_type = other DNA
atggacaaaaagattattgcaatcattgtggccttcatagctattgtagctattggaggctatttcctcctgggtggtggtagtgacaatgtcaccatcgggtacttgccgtcagaccatgatgcggcgctgtttgttgcggatgcacaagggcaatatgcgaaaaatggcatcaacaccaaactggtgcagttcaacaatggcggggatttgatgaccgcaatggcgagtggggaagttgacgttggttatgtgggcatcacaccagttttatcttcaattgaaaaaggagtgcctgtcaaagttatctcagccgcccaaactgagggctccggcattgtcgtggcgaaaaacagcggaatcaatagcgtatttgatttggagggtaaaaagatagccacaccaggcgaagcctctattcagcacatgctgctgcagtactaccttaaacagaatggtatcgatattaaagatgtgaaagtatcggcaatgaaggttcctagcatgaacgatgcgttaaaaaccaataacattgatggcatgattacgtttgagccgtatgtatccattgctgagaaaaacggtgccaaagtgctggttgactcctcggaaatactgccgaatcatccctgttgcgtggtcgtggcttcggacaagttccttgatgagcatccgaatgaaacgcagaagattctagacatccacaaaaacgcgactgattacatcaataacaacaccgacgaagcggcagaattacttccgagtgatatcgtcagcgacgtggatgtggaaaaacaggcactggccggttttcccttcatttctggcctgaacgatacgtataaacagaacgtaatggaatttatgaatctggaagtcgaactgggcgttctgaagaaaccgctcagcgaagataaaatcttttggaacggtagctaa

SEQ ID NO: 72639 - DNA, 1047 bp, synthetic construct
  source 1..1047: mol_type = other DNA
ttgcgccaatatatttataacaatgtgcctaacattaaatactataatgagtttaagctgatcgatggcgaaaaaatgaacaaaaaaatcacctttgtactggtgtttgccttagcggcatgcctcgctatgggttcagctagcgcgggccttttcgactttctgggtgggggcgatgacaccgtaaagataggttacctgccgtctgatcacgatgccgccctgtttgtggcggacgcgaaagggatgtataaggataacaacattacaacagaacttgttcagttcaacaatggcggggatctgatgactgcgatggcgagtggggaagtggatgttggctatgtgggaattacgccagtgttgtcgtcaattgagaaaaatgtcccggtcaaggttatttcgtccgcccagactgaaggttcaggcattgttgtcaccgatgatagcggaataaaatcgccggcggatctgaaaggaaaaacgattgcaacgcctggtgaagcgagcattcagcatgctttacttgtttactacctaaatcaaagcgacctcacggttgacgatctgaacgtcagcgcaatgaaagttccgtccatgaatgatgctttaaaaaccggccaaattgacggtatcgtgaccttccagccgtatgtgtccattgcggcaaatcaaagtaatgcgcacatcctggaaaattccagcgaaatcttgcccaaccatccgtgctgtgttgtggtagcgtctgacgattttatcaaaaaccatgaagatcaggcaaaaaccattgtcaagatccacgaaaacgccactaaattcatcaatgacaacgtgaaagccggcaacgcagataagatcgtaaaactcttaccggaggacatcgtatcggatgccaatctggaggctgatagcctggcgagtttcccatttatttctggcattgataatgatttcaaagcagacgtggatgaatttcaggccctggaagtcagtatcggtctgctgaacaacaccatcccccaggacaaaatatactgggaggcctaa

SEQ ID NO: 72640 - DNA, 2097 bp, synthetic construct
  source 1..2097: mol_type = other DNA
atggtcgatctcaataaaatgtttaaacctgagtcggtggcagtgattggcgcgagcaatacgccgggcaaagttggctatatcattgttgataatctgatcaacgacggctttaaaggtgaaatatatccgatcaacccgaagggtggcgagattttaggtaaaaaagcgtacgcgaatatagaagacgtgccggggaaagtagacctggccattattactatcccatcagtatttgtaaatgcggtcgttaaggagtgcggtgaggcgggtgtggaacatatggtcgttattactgctgggtttaaagaggtcggcgatgaaggtgctaaattggaagccgaactgacagccattggcaaggagtatggcataaacataatcgggcctaacagcctaggcattactgattcgcacaccccgatgaacggaagcttttcgcaaatgatgccgccgaccggaaatatggcgtttatcagccaaagtggagctatgatggtagcgatcatcgactggagtgtaacctccggcattggcttcagtaaagttatcagtctagggaacaaagctggagtcaatgagattgagctgctgcagtacctggccgacgatgatgaaacgaaagtgatcatttgctacctggaatctatttctgagaatgaagacttcgtgcgaaccatgcgcgaaacggcgcgtaagaaaccaattatcatcctgaaatcgggtagcagtagcgcgggagccgcggctgcctcttcccacaccggcgctcttgcgggctcggacctggcgtttgatacggccttccgccagtccgggattatccgtgtggacactatggcggagctgttcgatctgggtctggccttctcaaaagcacccctgccccggggcgaccatgtcgctatcattacaaatgcgggtggcggcggcgtcgttactgtcgatgccatggaaaaagcagggctgaaactcgtgcagtttgatgaggaaaccacggagcgcttaaaaaagtgtgtgaccgaagagggtagcgcgaagaatccgattgacgtgttaggcgatgcgcccgtcagccgctacaaagaatccttggagatcgtcttgtcgcaggatgaagttgacagtttgattgttatggtgtgtcctaccgcgtctgccgacccggatggcattgcaaatgccatcctggaagaacgtaaagaatttgataaaccaatcattgtagtgaacatgggcggtccatcattcgaaaaagcgaacgatgctttaagagaaaatggggtgccaacctatgtattccctgaaacagccgtgaccgcactcaaagcaatgacagattatgcaaaactcgaggataaatcatatgatgatgttgttgaaaacatagatgatgttgacaaagatgctgtcaaagccatttttgaaaaggttaaagcagatgggcgcgacacgttgcttggtagtgaagcatacgcagtggctgaagcatacgggatttctgccgccccgataaagctgtcgacaaatgcggaagaagcggcttccctggccgaagaaatggagtttccggttgtccttaaaattgcatccgataaaatcctgcataaatcagatattgggggtgtaaaagtgggaatcagcagcgctgaagaagccaaatcaacgtatgatgagattatcgcgaacgcaaaagcggcacacccggacattatccctgacggcgttgaagtccaaaagatgatggattctggtgaagaagttattgtgggtatgatccgtgatgagcagtttggaccgatgattgcgtttggtatgggtggtatctatgttaacctgattgaagatgtgagcttcaacctggcaaaaggtatgagtagccaggaaattgatgaacaaatcaacaccaccaaagtatctcagttgcttgccggctaccggggcgaagcagcgtgcgatgtggaagaagtgaaggaagccattaaacgtgtggcgcgcctgacgttagacttccccgagatctccgagctggatattaacccgatcttcgtgtatgaagaaggttcaagcgcccttgacattaagattaagttataa

SEQ ID NO: 72641 - DNA, 2628 bp, synthetic construct
  source 1..2628: mol_type = other DNA
atgaaacggcatggcctgttcattctcatcttgctgatcgtcgtattggctatcatgaacagcgcgtcggcggaaaactcgtcagcggatctgatctccgatacgcagtatgagaacagtgttgatatcgatgttgcggatgataatctgaagtcgtatcagagcgtatcgtctgacttggaagacaataatgaggtctataatctcaaactgaatgataattctcaggtggataacacatttttaaaggacaacgcttcggtctctgacagtaagatatataaactgggttatgacgttacccacgtggccgataaactgcttaatttctcctctgcggacgacatcttggtaattacaacggcagggatggcctggattgacaataaaacgaccgaaagcgccttaggcgggatagtcgatgcgtcaaataactacgtgagctatggcaaaggcaacatcttgacattatcgtccacccgcaacgatccgacgaatattgcattttttattaaaaaagacaatagcctgaccatggcattttacaaaaatgggtcgctgactcctattttccacggcaacgcaggtccgacactgagcgctggggagtggaaaaaactacaaaaagcgcttggtgatgaagatgcctatagttacattagtatagcgaatgcatggtccgccggaatgccgaatgatgtgttaacgcaggctacgtatcatggccatgtgtgcaccgggcttatcagtggtcaggctatgattcaaaccttgctgacgtactatccaccgaaagacgaatttgggttgcccctcgagcataccgcctactacgtcctgggcgtgccgggcggctctgaggacgatgcctttacatggagcttagacatcactccgggcaaaagagcgtacatcggtatcgataccatggtgaataaagccatgactggatttatccgttggaacacaacgtccaacactggcattattattataatgagctataacgaaacggccatcaaggaaagcttcaagaaagtttcgggtttaaatccggatgcaagtgcaactaacgacctgaagtaccaaaattggcttatcagtaccctgcataccaacccgacctcccttgtcaccatcctgtatgaatttaaaggcctgacgaaagataaccttgaatacttgatggggttggagattggtaagggtaatgtggttaaaagtgcgcacggtctggacatgaattatattctgggcctgaacctgaccaaagcaaaccgtgaagcgaatgtgaatattgctgaaatcaagctgagcgatgcgaaattaaaacagatcggtatcgatgcttgcaacaacgcaattgagtattttagctcacaaggcattaccattagcaaagatctgaataacctgtatgtgctgacttctgcgggatatgttcgtattaatggtacgcctacctcaatggtctttgatggtatttacgaggtgctcggttcagccctatacaaaaaaacattattcccagttcatacgcctatatggaaagacctcgtgtttgatttttactgggtagatccaaataacgttaccaatgattcttccttctcgttgaagtatgatgtggcgaaagatgaactgattgttattggcaacaccacgcgcaatgctaactacattctgcagaacgctatcaaatatgaccctccctacgatgtattaattggctggctattccacaaccacgtatgtggtggcagtgcaccgggttacctgattgcggattatatctacgaaaacttccccaccaacgaaaatgaaagctatatctacctgacaacgaacgcgaattgtaaggatgatgtgatctcacgtgtgctgggggtctcaccgggtatggggacatattataacctccgctacgataataacaaaaccaacagcaccaatgtagggattgcgattaagtggaatagcaaaaccaaaaccggcgaactgattattatcaacctggacaattggggttcaggagccatcttcaaaaaaggaagcaacatgtatgaggagtatattaagctctataaaaaagattattcctctccaaatttaatcagccgtccgcagatttccataaccgcacgaaaagaaatcaatgaggaaatgctgaacaagattattgggggcgcgacggatacgaaagaaggcaactcgattgcgtatatcatgaacctgccggacaaacttccaattaacaacggagaaaacaacaacaaaaaagacaataaaaaaaccaagatcactggcaacaaaaagaaaacggacggcaagcatatcaataatagcagttcatcttccaattcgattgattctaatagtccgaccactggcacttacggaaaatccaacgccggtctgtccgtcggcatttcaaaaaacattataaatgccaatagcaactctgaaagttcagatgaaagctcgggtgacggcaaaacttatgaaatcagcaaaaagagtcctaataaaaaaattaatagcaacaacgccatctttgccatcctggcagttcttgtgctgggcggtattgttggatacggttacattcgcaaaaaccgcggtaaataa

SEQ ID NO: 72642 - DNA, 480 bp, synthetic construct
  source 1..480: mol_type = other DNA
gtgatttcaacggttttatcggtatcttatgctcatccgggacatggccactacgtagatgagattacctcggaagatgtcggccatagtaaccacccttccagtgattcccacgacagctccggtaaagaacttagttctaaaagttcatcaaatagccgtattgcctcttctcatagcaactcgaaatcaaataaggtgagcagttcggatacctccaacagcgatctgagcaacaagcacacgagctcccaaagcattaaaagttcgaaaggtgacgtggaaccgatcaattctcagaacgaggaaatgccaaataatacgcaggtcaaaaataccagcaacatcacaaatcataccatcactgaagaagcggagaatacaaacttgctgactcagtcaaacattctgctgttcattctcgtggcaatcgttgggttttgcatagttgtcctgtttgacaaattcaaaaaccgctaa

SEQ ID NO: 72643 - DNA, 231 bp, synthetic construct
  source 1..231: mol_type = other DNA
atggataaagagattccgtattatgttctggacgaaaacggtcagataggcagcatcaatgaaccgtacatcgatgatggcgaccttaaagaactgctgctgtccatcctgggggatgacattccacaggaagagattcaaaagatcttagatgccagtgcggatgaaaaactcaccgaagacgaatttgataagttggtggatgagttcattctaaaaaacaaaaaataa

SEQ ID NO: 72644 - DNA, 1380 bp, synthetic construct
  source 1..1380: mol_type = other DNA
atgaagctaaaaaaatccgactacattatcatcatttcttttatcgctagctttattgccgcgttcatctcggccgcgcctgcggtggcgctgccccagctcgccaacgaatttaatttgaacaacattatgcagaattgggttgtgaacatctttctcttcacggttgccatcactgccgtccctcttgggaaattctctggcaaaaatggcatcaaaaaaaccttaaaccttggactgattttgttcctgattgggacaatcattactaccttcgcgaactcgtatattacgctgcttattttccgcgccattcaggcaattggtaccgcgatgatttacaacacccagaccagtattgtggtgttagctgtcgaagagaaaaaccgcgggaaagctctgggtataatcatatcgggcgtgtacattggccttgcgattgcgccatttattagtggcatcctcacttataacttcggttggcgtactatcttttactttaccatcccgtttacactgctggccctgttcctgtcactgtataaggtcaaggacgaatggaatatgtatgaagatgagtcctatgataaatttggatctattctctatatgattggaatcttcttcttcatttacggctttactatcctgaatcaaaccaaaggtgtgatattcacagtaattggtatagttttactcattgggtttgccgtgattgatctgaagattaaaaatcccatcttcgacctgaaactgtttaaaaataaacggttttcctcgtcaaacattgcatcactaatcagttatattgcgacgtttgtggtaacctatattctgaattaccatttccagtatattttgagtctgaatagccaaaccaccggcatcctgctggtcgttacgccggttataatggcgatcatctcgccatttagcggcaaatttagcgacaagattgatagccaaaagctggccgcgattggcatgggcttcgtgacgattgcggtatttatcttaatatttctggattattccaccccactgtgggttatcattattgctatggcactgcagggtttgggttacggcatcttcagctcaccgaacacaaacatgatcatgagtagcgttccgcaggaggaaacaccgagcgcatccgtctctattacggtaatgcgtgtcatcggtcaaacgatgtcgcttgcaatgttgacgatcatcttttcagtgataatgggtaatgtgccgatcattccggaatactttagtctgttaaccaaaagctctcagaccgcatgcatcatttccacgctgttgtgttttattgcagttatcgctagccttgtaggcattggtgggaaaaacgatttaactaattaa

SEQ ID NO: 72645 - DNA, 396 bp, synthetic construct
  source 1..396: mol_type = other DNA
atggtgagtatcttttcccgtcgcattatcgcatattttgttgatttctttgtcgttagcgctttcatgtggattgtaagctatttgttatcactcgtcatcggcactaataatccgatataccactattttatctatctggtgccaattctgataatgatctactttgtgctatgcgaaaaaattgtcggggcgagtgttggcaaatcgctgctgtacttgcaggtacggtcccagaatggtgcccatatctcttggtcgcaagcgattgtgcgcaacctgacgaaaatttattggattccgatcattttcgattggggtatcggaaaggttctgaaaaaggaccgtttattcaacagcattaccaaaaccgtggtgattgatgagcttaactaa

SEQ ID NO: 72646 - DNA, 450 bp, synthetic construct
  source 1..450: mol_type = other DNA
atgaataagaaatccattagtgtaattttattgattattttttcaatcacaataatcttcactacggcaaatatcttgattaacgacaacactccgctcgaaaatcaagcgggcaccctgaagatcaacaataaaaccatacattatgagaaatcgggtaaatgtctggaagtgatcgatggaaacaccatcaaagtgtatggcatcggtaaagttcagctgacccaggtagggagcccaagcagtgaagcgaaagactttgtggaaaacaattgccttggcaaaacggtgtacctggacattgatgataagaaagtcgaggatgaatacggtcgcgccctggctattgtttataccgacacggttgatgtcaataaggaattaattaacaataacctgtcggaaatctcttacttcacaccgagcgagtttaaaaaaggcgatatttaa

SEQ ID NO: 72647 - DNA, 1104 bp, synthetic construct
  source 1..1104: mol_type = other DNA
atgaacgataaaatcagcatcattcttccgatttttaacgttggggaccatctccgtggcggtattgactcccttatcaatcaaaccatcggcaatgaaaatttggaaataataatggtcaacgattgttcgaccgatggcagcgataaaatcatcgatgagtatgcggaaaaatacgactgctgcattgccatccatcatgaaaagaacagtggtgcggcgtacacaccacgtaacaccggcattgatgcttgtaccggggattatataatgtttcttgatccggatgaccgctacacgccggatgcctgtgaaacattataccacgcggctaaaaaaaataacgcagatgttgcgtttggtcgtttccggcgcatctttgagtatggcggtaaagtgcagaaatcgttctcgccctacattgacacgctcgaaaacagctatccaaatgaaacttttgatactgcaaactttctggatgtcccggatttcatttgggataactttgttgaacgcttcctgtatggcaaaaccctggaagtaacgtatccgcgtgatgtgccaattgacacgatccatgtggagaacatcgagcaggaacccgatctgctgaagatggcgcctgctgtctggagtaaaatctataagagagagttgattacggacaataacctgcgattccagccgtttgtgtcaggtgacgacatggccttttcactcgaagcactattaaaagccaagggaattgtgttcttaaacaatttcatgtgttataactactatatccgcgacttgcctaacgataaatccattaccaataccgtgaatgtacgccttctgtatgaactgatggagtcctacatttactgccgtcaatgcacggagggattttcgaaagaagttcagactgtctccatcaacccgcacctgctgcactggactaattcttggaaaagctctccgttcaccaaagaagaaaataaattgctgctgagtgaagtaaataaactgaagagcattcataatacagacctgaaaacaaaaattttactgagctcaatcagtaccgcaattgaatctaaaattcagattcaaaaggagtaa

SEQ ID NO: 72648 - DNA, 468 bp, synthetic construct
  source 1..468: mol_type = other DNA
atgacgaacgtcctgattgcatatttcagcgccagcggcgtgaccaagaaccttgctgaaaaaatcgccaatgataatgattatgatatatttgagattgtgccagaagaaatctacacccctgaagacctcgactggaccaacaaacaatcgcgttcaacgatcgagatgaatgacaaatcctttcggccgccgatttcggaaagttgcgatgtcggtgagtatgagaccgttgtaattggttttccggtttggtggtacactgcgcccaccattattaacacattcatcgaaagtgttgatctgacgggcaaaaaaatcaaaatcttttgcacttccggcggatctggggtggacaagtgtgtaaatgatttaaaggcgacctacccggaactgaactttacaaaaggtattcgcttcacgggcaacgtgagcaatgcaaaagaatggattgaacaggatttgtaa

SEQ ID NO: 72649 - DNA, 696 bp, synthetic construct
  source 1..696: mol_type = other DNA
atgatttgcgccgccatccttgcgggtggcatcgggagtcgcctcaaacaaggcaaaccgaaacagtttgtgaacattaataacaagccgatcttggttcactcggttgaaatcttcttaagtgtggacgaattagataaaattatcgtatcctcgccgaaagaatgtgtcgataaaaccaacgacctgatggatgaatatttcccgaaaaatgataaaatcattgtcattgaaggtggagaaactcgtaacggcactatcctcaattccattcagtatatgaagggtcaaaattgcgagaaggacagcattctggtaacgcatgatgcctcacgcatctttgtgtctaaaaaattaatcaaggatagcattaaatacgcaattgaggttggcgcagctagcgcggcgatacctgcgaccgacgtgatatttgaaacagaaatcgacgggaagcttaccggtgttccactgcggaaatacctgtgtcacgcacagaccccacagagctttaacattgacaagtttctggatatttatgaagacctgtcagaggaggagatttctaaactggatgaagctatggtgctgttccatctgcgaaatgccgatgtcaaattgttccccggcgatcagaacaattttaaaatcacgcgtccgtttgatattaaactagcggaaagtattttcaaaaactaa

SEQ ID NO: 72650 - DNA, 1068 bp, synthetic construct
  source 1..1068: mol_type = other DNA
atggacaattttaagtgtggcagtatggattttaagattagcgtgattgcgccggtgtataacgctgttgactccttagagatcgcaatcaactctatcatcaatcaaacaatcggtttcaagaacattgaactcattctggtagatgataaaagcaatgatggcagccaggacatcattaaaaaatacgcggataaatacgaaaacgtgattggcatatttctaaaggaaaattcaggccttccgggaaaaccacgctcccttggcattaaatatgcctcagccccttacttaatgtttttagatgcggatgatgaatacctgccgaatgcgtttgaactgctttataacaccatcgttaatgaaaaatcggactttgtcatggggtctcatttctggaacatgaatggggagcgaatgaaaatcaacattctgcatgattgcaatgacaaatccgatgtaattaacattaatccttttctcaatcagcggaattttattctgcttagttataatcatgtggcaccgtggggtaaaatttttaacaaagagctgatactgaaaaataacatcagcttcccagaagacaccttggcggaagatacttatttctacttcaaaaccctaatcaactcaaaaaaagtgacgctgttgccgaacgatagcttatatatgtataacgtattcgaaaacaaagattcggtcatccacacgcacaacctctccaaatttaactatttcctgaaaggttttgctaacgtgatggagctgattaaggacatcccctttagcaaagagcgtattctgataagtaatatgggaagtttgttactgatcttctcgaatctgtcgatgaaagaaaaaaaggaggcagtcccgaaaatctattatttcgaaaaatcactggacgaggaagttgttctgaaacgcaaggaactcatactgctgaataaattgattctgaaaaaacatttttacctggccatcatcattagcgatatttactctattctgtacaacaacgaaaaaattaagaatttgtatcgtaaatggggtcacaaggaataa

SEQ ID NO: 72651 - DNA, 999 bp, synthetic construct
  source 1..999: mol_type = other DNA
atgaaaaccaaaaaagagcgtatcttttactacgattttttacgtgcatttgcaattattgccgttattatctgccatgtggactattttttcggcccactcaccagcaccacccaaatcattgtgcagatgacgtttcacgacattggacgcattggggtgccaatcttcctgatgatcagcggcgcgcttctcctgaatcgcgaatatccggatctgtcccagtttttgaagaaacgctttgtacggattatttacccgttcatcttttggataatccttattctggcccaaatatattattatgggggcaatccaacatatctctggaaagtcttcattggtgaaccgtcaattacgtggtatttttgggttttaattggcatctatctgttcctaccgatcctcaactcatttgtgaaagaatatggtgagaaaggtttgaagtatttcctggcgatctggtttagcattatcattctgcagacattcaacgtgtatccgttgtggacgaaccttgacctgagctacttcgccggttacgttgggtatccggtcctgggttactacctggaaaataaagaatttaaactaaacaacgagaagatctgtattctgggcgttatcacgcttttaattagtctgagttgttttgtctacctgaactacatcaatagtactgctatccattctatttatcagaatatcccgattgtatttatgggactgggtctgttcatatctattaagtatgctgataaactgaacaaattcaaagcgatcaaagataacttcattggcaaaagcatcatttctttatcgatatgctcctacggcatgtacttttcacacgtgattgtaactaaatttttgtcgtattacaatccccattccaatctgatgttccccttaatgttcatcatgataatttttctgtcgtggctgatgccttatattttgagcaagattccttatgtccgtacctttagtggcatctaa

SEQ ID NO: 72652 - DNA, 732 bp, synthetic construct
  source 1..732: mol_type = other DNA
atgtcccgctacgcaatcctttcggacattcatggcaacctctttgctctcaaagaagtctttaaggatctgagtacacaaaaaaccgattacataattcttttaggggacctgattgattatgggatgcagtctaatgaagtggttgagttcatccgtgacaaccttagctcaaaaatcatctgtaatatctggggcaatcacgaaatggcgattttgacgaaagattttaaacatttcagcagctcacgtggtgttgaaagtgcaaaattcaccgattctatcctgactaacgattcgcgtagctatctaaacaatgagttggtgaaagagggtaaactggactttgaaatatgcgagaaacaggtcctggccgtgcatggtagcctgacggattattattggaaagctattttcccagacaatttaaatggaaattatattgattacgacattgtgctgtcaggccattcccactacccgcacgtctttcagaagttttatgaagtggatgatccggacatgcgaaacaagaaatccgtactgtttattaacccgggctcggttggccagccccggaatcataatcctaacgcgcaatatgccatcttagacaccgacctgatgaacatcgaactgaagagtgtaaagtacccgaaatatgatgcgatggatctgtatgatggtaacattgatgatttctaccgcaaacgcttgaaaaacggaatttaa

SEQ ID NO: 72653 - DNA, 1005 bp, synthetic construct
  source 1..1005: mol_type = other DNA
atgaatatactgtatattattagcggggtgaccggaatgacgggcaacgagctggtccgccagctgctgaatcagaatgaagatgaggtgaaaatcatcggcttcgataatttttatgcctcttcaattgatacggtaagcgattgcattaacgacggtcgttttgatttttatgaatatgacttaaacagcaacgatgatatggataaaattgaggcgctggtgctcagtatcaaagacgatttcgatgagctggtatacattaactgtgcagcggttgttcataccgaacacttctataaagtgtatgaaacctatcagaccaacgtcgcgagtatgaatgacttcctgcaacaggctatccgtgtgggtgctgaaaagtacattaattgttccacctcagaagtctattccatgaacagctggaatgaagagggtggggtgaaagaatcggacttcatcacgatggcggatgccgaacacagccaacgcacaagttatgcaactggtaaactgttaaccgagttttttatgaaagactcggtcgataacggcaaaatcaaggggtgctcgattcgctttgccaatgtttactccaaagatgaaaagtacccgaaacatatcataccacatatcatcgatagctttaaaaacaagggtgaagtggtgctgcttgaaaactctaagaagaattgccgcactttcctgaataattatgatagttgtagcgcggtaatcgaattggctaaaacggactctgcacttgatggcacaatttacaatgttgcaacagacgaagaaatttcaattattgatctcgccatattaattgcgaaaaaaatgggaattgataaacctgttattaaatttgaaggctaccgtgagtcggacccggaacggcgactattgtccaccgaaaaaatcatcacccgtacgaactggaaacccatcattgacctggataaaggcttggacgagtgcattgagaactacactaaaaactaa

SEQ ID NO: 72654 - DNA, 771 bp, synthetic construct
  source 1..771: mol_type = other DNA
ctgaaaatttccattattaccgtggctggcgtctccagccggttcaataaagatatttcggaagaagaaaagatgctgaaatgcatctattatgaggaaaacccgaaagacactctgatttataaaatgattaacaaactgagctattgtgataagattgttgttgtgggtggctacaaatactcggatctgactgaatatgtcaacaaagaaatcccgatcgagctccaggaaaaaatcatgcttgtggaaaacgaccgttatgcggatctaagctccggttacagtctgtaccttggaatcaaagagtctctgaacaactttgacggcattgaggaattacttttcgtagagggtgatttggacattgatagcgagagcctcacaaaggtaatcgattcggataaaaacgttctgaccttcaaccgcgaacctatttttagtaacaaatctgttgtgttatatcaaaatgaaaatgatgagtaccactacctgttcaacagtaatcatggcatgttaatcctgaatgaaccatttaaagcaatctttaattcaggtcaaacgtggaaatttcgtgacattgaactgctgaagatcgccaatgactatttttatgaaaactgcatagatgacaccaatttgggcattatccagaaatatttcgattcagtggaaaacaaggatacgattgagattatcgggttggaacattgggtcaattgtaatacccgcgcggattatcagtacataaaagaatactgggggaaataa

SEQ ID NO: 72655 - DNA, 1488 bp, synthetic construct
  source 1..1488: mol_type = other DNA
atgtcagataaaaacgaatggggcagcaacatgagcttcatcctggcaatgatcggttcggcggtgggacttggaaacatttggcgctatccttacgtactctatagcaacggcgggggtgcattttacatcccgtatattgtagcaattctcctgatgggcatccctttcctgatcttggaatatggtgttggatataactacaaatcgagctttgcgaaggccatccgtaagatcaatgccaaatgggagtatttaggctggttcctcccagtggcggtctttatgattatgatttattactctgccattttaggctgggatggcatctacatggttctgagtttctttaaagggtggggagcggacccgaacacgtactttgccacgacgctcctccaatctagtgattccatgaatggcctgttcacgttcattccggttatcgcgatcgccatgcttgcgggctgggtcattatctggtttatttcacataaagaccttgaatctggtttagggaaggtctcaaaaatcttggtgccgttattgttcttgatcatggttgtgatcgtggtcttcagcctgaccctgccgggctcgtcaattggccttgctgagctatttaatccggactggagcctgctgactcactttgaaatatggatggctgccttcggccagattgtgttttcactgagtctgggcatgtctattgcatttacatatgcgagttataccaaagacggttccgatctgattacaaacaccatttcgattgcgctggcaaattccatatttgaaaattttgcagccttaggcgtgttcagcattctgggttatatgtccctgcagtccggcacggcagtcgccgacctggtaactcaaggtactggtcttgtctttatcgcatatccaaccgtgtttaatgtactgggtgattgggccctggtcctgggcccgctgttcttcctgaccgtgtatctggccggtctgaccagtattctctctaccatcgagcccttgtcgttcagcattcagaacaaattcgggctaacccgcagccggacaatgaccatcttgtgtgtggttggtgctgtggtctcgatgctgtacgcgacggcgtacggcgggagcctgctgggatatgtggatacctttatcaaccagatcgcattactaatcggggttgtagctgaatgcattgtgtttgcgtggatatttgaagctgaaaaattaattgatttcctgaatgcgcgtagtaaaaccattaaacttggcaaatggtggttgggtattgttaagtacatactgccaatttttgttacggttatttggattggtgggatggttgatgtagtcaacaatggtacaatggatcagctgatatttaccatcatttccgccgcggtgttactgattgcgacgttgatctttactgttcttccggctaaaactcccgagtgggataatgctgaagaccgagtgtaa

SEQ ID NO: 72656 - DNA, 369 bp, synthetic construct
  source 1..369: mol_type = other DNA
atgaaaaactatgttataatcctgattggtgtcattatcgcattggtgattgtgggcggcgctattgcatacacgtctatgcatgacgacacgagtgacaacaacaacaccactattaaaagctgcatcccgaacatcacgaatgccacaaatgatgcgccaaatgcgaccggcgatgataaaaataccacttcatccgaaccttatgttgtaagcgaggtggtcaaatttaatgcccagcagggcgaaggatattaccgcgaggtaacctatagtgatgggaacttccgtcagtacgatgtggatacaggtaagttaattggttcgtcctatgactcggatcaagataaactgccgagcatggaataa

SEQ ID NO: 72657 - DNA, 1896 bp, synthetic construct
  source 1..1896: mol_type = other DNA
atgtttaataagaaaattagtttaattctgctgacgctggtttttatgttaagcatttcggccgcggttgcaacggataccaactctacggatgatgtgatttcgagtgatgaggaggctgagcctccctcggtggtctctcaggacatctcgataaatgaaggaaatgattcaaaccctcaggaaaattatactttgaagggcagcgatgtaagtatgtactataactcaggatctggttacgaagcgagtctgtctgatggaaatgattctgtggaaaatgccacgattaatctgaacattaatggtgtcgattacaacaaaagcaccgacgcatccggtaaagtttttctcatcatcaacctgaaaccgggcgactatgtaatcaccgcgagctacggcaatctgactaccgaaaataagattaacgtcttgccggtgatcactggaaatgatgtgtccaccacgtacaaacacagtgtgccatatagcgccacatttttaaaaagtgacggtagcccgctgtccaatacctatgtcaaatttaaattgaacggcaaaacctattccaagaaaacaaattctaaaggcatagctaaattatatgtcgggtcaaaaatcggaacttacaacatctacgcaatgcatccgaacggctacagcatctcaaataaaatcacggtgaaaaacagcatcataagcagcaacctgaaaaaacattaccgcagcagcaaaacttttaaagccacattttatggcaaaaatggtaaacttttgactggtaaaaccattaagttctacacgaaaggctcgtacttctataaaaaaaccaactccaaaggtgtggcgtatattaaagtaatttcaaaaccgggaacctataagattacgagtattaacaccaataccggcgagaagaaatccaatacaattactgtgttgtcaaccctggaagcgaaatcaatgacagttttcaccggcaccacgtccaaatttaaagtgaaactttacaaaggcgaaaacattgctaaaaacactaaaatgacagtttacgttgacggtgttaaaaaacgtgtaacgacaaactcaaacggtgtggcaaccgttaagttcaaactcgacaaagggatttataacatcaaatcggtcgatccttttaccggctatgttctgaataaaaaagtaacggtaaaactggcgtctatcagtgcgattaacgtcaacgcaatcgaaggcaaggaagggctgttcccggccaagctgctgcagcaaaatggtaaggtagcgagtggtacctatatggagatgacgattgacggggtcaaacataaagtcaaaacggactcacgaggtattgccgggtataagttcacctttaaggatgcgggtgtgcacactgtggtttgtaaagatctatctaccggctacaaggtaaccaaaaagattaacgttgtgaaaaagggtgaagggaaatcgtacgatcaatttggtgtgtccgaagatggcaaaacaatgcttgtgattggccgtccatcggcttcgggtgaaaccgcgaagtatggttatacatactataaaacggaagtggaccgcacctgtccgatctgcgggagcaatgaactgtactggagcatcttttgggcttccggtaatactgatggcggaacgttccccgaaaccccgagccgtccggcccactatgacgagggcaacctggacggcatcatcatttgcatgcattacacgggcgatgatgagtattgcgatgccgactggtctgttttcgggcacaaccatgatgggagcggccgggatttaaagcttgtgagtaaaccagtccgctcctcggagatagaagcatatctgctcaaaagcggctattatgttaaagtctaa

SEQ ID NO: 72658 - DNA, 1428 bp, synthetic construct
  source 1..1428: mol_type = other DNA
atggcgaaccaagtaaaaaccatatttgcaaacatgagcttcatgctagtctcccagattatcgctagtgtctgtgcttttgtgtggaccatcgttactgcttggtacttgggtccgtctgattacggtgtatttggcgccgcagtaagctttgcggccctgttcggtattgtgatcgattttggactctcgacgtatgtggtacgcgcgattagcacggatttcgctaacgagcataaatacctggataatgcaatttctcttaaactgtttctgtccgtgttctacgtgattgcggtgtacctttcggtcttggtcatgggctggcagcccaaattggtgttagcgtgcgtattcctggcgtttgagaatgtgataaaaagctatcatgcgattctatttacttcattccaagcgcatgagaaaatgaaatatcaggccgtgaccaatactgtcatcaacgtattcaccctgatctttatactgctcgttgcctgtactgactatgcactggttggcattttaatggcctatatcgttgcaaacgcactgggtctgttttatgaagtgtatgcccttcggaaacacatcattaaaccgaaattgtcgttcgatttcagtttttacaaagcactgctcaaagcaggacttccttttgctctaaccggtcttttttataccgtttactattccatcgacctggtcatgattacacaattttcaacgacgtatgcgacagggctttataattcagcgtataagttaataacagtgttaaccctgttctataccatctatacctctgttattttcccggtgatgagtaaattgttcacggacgagaaggacctgctgaatctgagttttgtaaagagcattaaatatctgatgctggtcacgattccaattgccgtatttacgagcttttactcgtatcagattattgcaatctacggggcggaatacattgaagccggcggtgtgctgcagatactgatttggaccgtctgcttcttgtttgttaatggggcgtgctccttggtgctgaatgcaagccaccaggaatactcagttacgaagatttacaccatcgccgccctgtttaatgtggttctcaacctcgcgctgattccgaagtattccgtttacggcgcgtcggttgccacagttttaagtgaaattctgattctggtcttggaactgtacatgctgggcaaaatcaaccaactgccagaccgtcacctcattcatgatatcttacgaatcatcttcgcctctctggtcatgggcaccgttttatatgtgcttgatttaaacatctgggctgctattgcggtaagcgtggtggtctattttgcggtgattgtgctgattaaaactgttgatagcgaagataaactgatcatccgtcagatcatcaaccgctaa

SEQ ID NO: 72659 - DNA, 1038 bp, synthetic construct
  source 1..1038: mol_type = other DNA
atggtaggcatcgtaggatacggggcatatgtgcccagctatcgcattaaagtagaagaaatcgcgaaggtgtggggagatgacccggtcgcgctgagccgcggcctgatcgtgaacgaaaagtccgtcccgtcttcggatgaagacaccgcaacaattgcagtgacggcggctcgttacgctctagcacgtgcgcagattgacccaaaaaatattggtgcggtttatgtcgggtccgaatcacatccttatgcagtgaaaccaacggcgtcaattgttgcggaagccgtttgcgcaactccaaagctgacggccgcggatctggaatttgcgtgtaaagccggtactgcaggcattcaaatgtcgatgggccttgtgcagagcgatatggtggactatgcgttagcgattggtgcggataccagccaaggagcacccggtgacgcgctggagtacacggccagtgccggcggggccgcctatattatcggtaatgataacacagttgccgacattgaacacacctgcagctacacaacggataccccggacttttaccgccgggagggtgagccttacccgtcgcatggtggccgttttacaggcgagccggcctactttaaacatgtgctgagcgccgccgaaatgctcttcgatgaaaccaacaccgctgctgaagactatgattatgcgtgtttccaccagccgaatgggaagttctacctgagagccggtaaaaaattaggcttcacttctgaacagattgaacgaggccttctcactccgaacatcggcaacacgtactccggggccgtacctctggcgttgtctaatatcctggacgttgcagaaccgggagataaaatatttgttattagttatggctcaggtgctggcagtgatggttttgcaataaccgtcaaagatgagatcgaagagcgccgtgaattggctccgaaaaccgaggatatcatcagtaaaaaaacctatgtggattatgctgtctatgcgaaattcaaaggtaagattaaaatgtaa

SEQ ID NO: 72660 - DNA, 1191 bp, synthetic construct
  source 1..1191: mol_type = other DNA
atggatgaaattgcaagcattacggataccaacctgaccgaaacacagttcttcaatcgacgcgatgaaatcaacattctgtcaaatctgttgatcagcactgagtttaactctgcgccgacgatactgctgacaggtattcgtggcgtcggaaaaaccgccctgatcaaaaaaatccgtaataaatttgaaagggaatacttagttgtagatattgatctgtcccgcagcagtgcgtatcagcagaaaaatctcacccgggcttcgatgattaaaattatctacgattcgatcatccggtcttccaaagagtttggcctgaaaacgatcagcaaccaaattgaaaaatattttaaaacaaaaaatttcaagattgataaactcttatcatacgaacacatccccatcccgatttttgagagtgaagacaactatgagcgcttggcggaatttgtaatggaactgcctcagaaaatttatgaagacaataacgataagattaaaggagtgttcatattcattgatgagatccagctgatcaaggatttgggtgatgagttgaatggttttttatggtatatgcgcagtttcattcagacccaaaagaatgttgcctacattttttgtggcagcatgagcctgaaagacagtttgatcaatgacctgaatggcaataaaggggcatttggcgggcgtatgctgaccattgaagtgcaaccgttttcgaaaaagaccactgaaaactatatcaaatcaatgcgtcgcaacatccagctcgaccatgggggctttgaaagattttacaaatgcacgcgtggtatcccttattacatcaacatatttgcgaaataccttccagaaaacctgacgctgagtgaaaataacataagcgagctgttcaaggattctattgattatcttgcaatccatttcgtgtacatgtggtccaaattaacgttccaggaacagaaaatcattatttcactacttgagaatccaaaaaagcgtattgaagtggccaactccctcaaagtcactagcggttcgctaaaccgtccgctgaaccgccttctggactatgatttaattgagtatgctaatgacaaatatcaaattaccgacccgatatttggctattggctgaagaactcctatgaaaaaaacggtatttacccgttccgctctatttaa

SEQ ID NO: 72661 - DNA, 918 bp, synthetic construct
  source 1..918: mol_type = other DNA
atgccgatctacaatattgacggcgaaacactgacgccaattaaacaggttaaattcaaaaacgaacgtgaactgcagatcctcaccgaaaaaaaccttgaagaactcttcggtctgaaattcattgcaacggaatttcaggtggacaatctccggatcgataccctggccttcaatgaggaaaccaatagctttgtcattattgagtataagaatgtaaaaaattatagtgttatcgaccaaggatacagctatctgtccctattgcttaacaacaaagcggagttcgttctgaagtataaccttgtgtgcaatgctgcgttaagtaaagatgagtttgatttttcacaaaccaatgtcatgtttatctcgccgagctacacaacctatcaattacgctcggtggaattttctgatatagcttttgaactgtggaaagtcgttaaatacagcaacgggaccgtcttatttgataaagtgaataacaccgacacgcaggcgtcaataaaacagattaccaaagaaaacactagtaaagataaggtcaataaggaaattaaaaaatacacggaagaggacacgctgatgaacaaatccgatgacattaaaagcttgtatgacaatttaaaggaattgattctgtccaattatgatgatatcgaaattaaccactggaaatactatgtggccatcaaagtgaacaacaaaatggtggcaactgtaagtgttctgtccaaaagcttgaaaacatggattaacctgaaggaaactgaactgcgcgattcggaaggcaaagttcgtaatgtgtctaacatcggccatcatggtgtaggtgattacgagtatgtaatctcgtcagaggacgatctgtattatttcaacaagctgtttaaacagtcttacgatgagaagatttaa

SEQ ID NO: 72662 - DNA, 456 bp, synthetic construct
  source 1..456: mol_type = other DNA
atgagcaaactgttaatcgattcttcgttcatcattgcgttgtttcggaaaaacgatggtctgcaccaaaaggccattgagaacaaggacatgcttaacaatgactgctacatcacagacggtatactggcagaagtaatgaccattattggacagaaaacgaaagatattgggttggtgcgcacggtttacaactatctcaaagacaatttcaccatcattcatgaaagtgagatcagcatgtacaacgataatgtcttatccgtttttgaaaaatacaatcagaacagcttcaaagtgagttttattgattgttcacaagtcatcatatataatcattataatctagattatgtgatctcgctggataacggctttggcctgtttgaagaaattgagctgaaaaatctgtccgaacagaagcgtactatccagttcattaaatataacatttaa

SEQ ID NO: 72663 - DNA, 1188 bp, synthetic construct
  source 1..1188: mol_type = other DNA
atgagcattgtccccttgcacattccaattaacgaaatcgacagatatttctataaccggacggaagatattaaaaaaattgagtattacctaaattcactggaaatcggaatctctcaatcgctgttaatccgtggggtgcgcggtgtgggcaaaacctttctgctgcagaaactgaagcaggactcaaaaaagaactttctggtgtcatacattgatatttcccgcattgtgggcattgatgatacgcagttaacagcgcaatccgttctgctggagctgttggacgagatgaacaacaccatctacgataagattcatgacggtaaaaaagtcacttttcttttgaaaaaactgattgacaaattaaaaattaaagatttcagctttagcaaaggcattcacatggctgagataccgataccagcaaccgaagacaattacaaaaaaatcagcaaatttgtaatggaatatccgcagaacgttgttgagagtattgatggcattaatggtttcatcattatcattgatgaatttcagatgcttaaaaagcttaaaaatccggaatcctttttttggttaatgcgaagttacagtcaattccagtcgaatgtcagctacgtgatgagcggcagcatctcgcagacctcggatgcaattgaaatgttgaacggcgctacgggagcctttggtggccgtatgatgcagatcaatatcgatcctttcaccaagcacgaaaccaaatcttatttcaatgaccgttttccggaaataaaattcactgacgatggttttaatcgtttttatgagtatacaaaaggcatcccgatgtatatcaacagcttttacaacgcgctgtcatcccatgaaacctatgatgaaaaaagtatcgattacattttcctcaataacatggaccaaattcttgtaatgtggattcgcatctggggtacgctgaacaagtatgaaaaaaagatcatctgcgccatgctgaacaaagagaacatttcctggtctaaactggaacgcagtttagacatgtctccggcgacgctgaccaagtatattaaaactctccaggataaggggatcataaaataccatgatgggaattataatttcgaagatctgatgctcaaaacatggctgaacaatgaaaaagagcgcactggtgtttatcctcaataa

SEQ ID NO: 72664 - DNA, 1980 bp, synthetic construct
  source 1..1980: mol_type = other DNA
atgaaatttgaagaagtagagataacggaggacagcccgcaagaactggttgctgagccggtcgtggaaaaagaagatcacggcgaagagaccaaaccaatgctggattatgacaatattaaaagctcccaggatattgaagtgccgcctctcctcatcgaccaggtgatagggcatgaagattccatcgagacaataaagaaggcagccaaacagcggcgcaacgtgctgctaattggtgatccgggcgtgggaaaatcaatgcttgcgaaaggcatggcgcaaattttaccgcacgaaacgttaaaagatgtcttggtctacccgaacatggaagacaataaccacccgttaatacgtaccgtgcctgccggtgaaggtaaaaaaatcgtaaaggctactaaggggtcggctaaaagccatgaagaaaagaaaacgattattacaatgtttgcgattggcggtattctggtcattggctttatgtatggacgcctgctggaatcgattattgccgcagcgttaattctcctgatttccattcagattaaaccgaaaaacagtaatatgtctccaaaattattggttaacaatcaggattcacgctttgcccccttcatggatgccaccggtagccatgctggtgcgctcctgggggatgtccgtcatgacccataccagtccggcggcctgggcacgcctgcacatgagcgtgtggaagcaggtatgattcacaaagcgaatcgtggagtgttatacattgatgaaatcggtacaatgtctatgaaaacccagcaggagttattgtcggcaatgcaggaaaaacaatatgccatcaccgggcaaagtgagaactcaagcggggcgatggtccggtcacaggcagtaccctgcgacttcgtgcttgtggcctccggcaacctgcaagttctggaaggcatgcacattgcgatgaggtcgcgtatccgcggctatggttatgaggtgttcatgaaggattacatggaagacacgaccgaaaaccgcgaaaaactggtccagttcgtagctcaggaagttaaaaacgatggccgaatcccgcattttgccacggacgcgttggatgaaatcatcatggaagcaaaacgtcgctccggcaaacagaatgctctgactctgcgtctgcgcgacctcggcggacttgtccgttccgccggggatgtggcgatcgaaaagggtgcaaatcttgtaaccgctgagcatgtgttcgaagctaaaaaatatgcacgaaccttggagcagcaaatagcggaccggtctattctgcagcgcaaagactacagcatggtttcggcgcaaggtggaagagttggtctgattaacggccttgcagtgattggtgaccgcagcggcatcgtctctccgattgcagcggaagcagcgccgacccagagcaaaacgggcggcaaaatcattgccaccggtaaacttggggagattgctaacgaatctgttcagaatgtaagtgccctgattaaaaaatacactaataaggacatctcaaattatgacattcatgttcagtttatccaaacttatgatggcgtggaaggggatagcgccagcgtaagtatcgccacagcggttatcagcgcgattgaagaaatccccatcgatcagactgttgcgctgaccggttcactgaatgtgcgtggtgatgtaatgcctattggtggcgccacggcgaaaatcgaagcagcggcggaggcgggaatgaaaaaagtgctgatcccgaaaagcaacttgaaagatgtcatgattgagaagaaatatgaggatatgatcgagatcattccaacagaaacgctgagtgatgttctggaaaacatcctaatcagtggttcgtcgaaagataagctgattgccaaaatgaagaacctgagttctaaagtggccgataaggttccacaaaccggcttgaacaatccgaccataaattaa

SEQ ID NO: 72665 - DNA, 369 bp, synthetic construct
  source 1..369: mol_type = other DNA
atgacccgcttatgtaaaaactgcggctttgagaaccaggatgactacgatttctgtgcgaaatgcggtactccgttggtggaaggtctaaaacctaatcagtttcgtgtgtatcggacacaagatcttgaaatcaacaaaaaggcgctcatcgccgcttacatcgcaaccatatttttatcgtggagtggcttcttcattgggctgatttccaaaaatacggtttttgcgacctttacgttctttggatttttcatgccatttttcctggtgcagtcaaaacacccggcactgaagaaacatggtctgattatgatggctatttcttttgtcggcgttgccctgagcttctatgtaatgatgcattaa

SEQ ID NO: 72666 - DNA, 513 bp, synthetic construct
  source 1..513: mol_type = other DNA
atgaaaaaactgaatgtcgcccttattgccttggtactgatcgttgttgcatttctcgcatcaaccattgtaagcccggttctgatcgtcgccgaggatgcaagtgaagacaatggtattgatatggcggcgactattgggctgacgggttttaactggatttacccgggtaactctgtgaacgctcaaggccagacactgcataatgtgtatgcggactatcctgataatccgtatggtgcggcccgtgacataatgagttatacctaccacgtcaccccacatatcatcatttcgattaacaatgatgcagctgcggccatcttcggcgagaacatcatcgatgacattcgcgccaatgatggttacaacggatatgcgggaaatgataaggtgagcggctccatggatcggggcgacgctgtgggcacggcaatggcggaaaatggcattaacataattgaaattccgatccagtttttaatcgggaacattagcccccacttcgtgtaa

SEQ ID NO: 72667 - DNA, 1209 bp, synthetic construct
  source 1..1209: mol_type = other DNA
atggttctgtcgacaggcaatactgcgtggatgctgattgccacgattatggtgctgctgatgagcgtgccgggtatcgcatttttttacgggggtctgtccaaacgtaagaacgtactgaactccatgttcctatctttaatagcatttgcaattgtgagtatcctttgggtcatgtatggttaccaatttgcgtttgccgatctgagttttgcgggtttaatcggaatcccaaaaacgctgttcatggaaggcattggtgtaggttctctgaccggcacgattccaacatttgtctttgccggatttcagctgacctttgcaggcttaactgctgccgtcgtaagcggagccattgtgggccgtatgaaaaccaaagcgtgggtaatctttatcatactgtgggccacattcgtgtatattcccatctgccactggatttggggcggcggctggctgatgaacatcggcgccattgatttcgcagggggtgtggcggtcgaagttaactcgggttttagcgctctcgctctagctttaatactgggcaaacgcaaggatacctccttgctgccgcataacctgggctacagtattctcggggcaggcttcctttggtttggctggatgggcttcaacgggggctctgctctggcggctaatggtcttgccgggagcgcaattcttgtctcaaatacggcggccgcggtggcaatgattgtgtggttgcttctggatgtgctcaatgacggaaaaccgaccgttttaggggcgattacgggtgcagttgcgggactggttgcagtcacccctgctgcgggttttgtttcactgtctggcgggataatcatcgggctgggcgcctcgttgatcagctactatgcggtgttctacattaaaagcaaatttggttatgatgatgcgttggacgtctttggtgttcacggcctttcgggtgtttggggattaattgccactgggttgttcgcggcgccgtcaatcaatggtgtggcgggtctcttctatggtaatccggaacagttgatcattcagctgatcgctgtggttgccgcgatcagctattccttcaccgtaagttatttcattggcaaggtgctggacattctgattggcctgcgcgtagatgataaagaagaaatcatgggtctggacagcgccctccatgaggagtcaggctaccggatttaa

SEQ ID NO: 72668 - DNA, 339 bp, synthetic construct
  source 1..339: mol_type = other DNA
atgaaacgcatcattgcggttatacgtgaagaaatgtttgacccagtgaaattagcgcttctcgccgccggctgtgaaggcatgaatgtgtccacagtgaaaggtcggggacgtcagaccggtatcaaagaatcgtacagaggtagtagctattgcattgacctgattccgaaaacccgtgtcgagctgatcgttaacgaggaggacttggatcgtattatcaatattatcctggaaaacgctcgaacgggggatattggcgatggcaagattttcgtttcagatgtcgaggaagtaattcgcatccgcactggggaacgcggttctgatgcagtgtaa

SEQ ID NO: 72669 - DNA, 774 bp, synthetic construct
  source 1..774: mol_type = other DNA
atgccttgtaatatacggaaaaagtttttcgcagaactattgggaacctttttccttgtatttttcggtaccggctcagccgtggtcaccctgctggtctcgcagagcatcaatcctgctaacgtgggcattggtgttttgggcggcctgggtgattggattgcaattgcgctggcctttgggttaaccgtcatgattggcatctatgcatttgggcgcatctctggtgcgcattttaatccagctgtcacgatcggcctgctcgtcactaaaaacattccgctggttgatagtatttattacattgttgcccaactgattggcgcatgcttaggaagcctggcgttattcctgtgcctcggggcgcaggcggtgacaatcggaggcttgggtgcaaccgcgccgggcctgggtattggatatatgcaggctatgtttgctgaatttatcggcacgtttttcctgatgatggtgatcatgggtgttgcagttgataaaaaggcggaaccgggttttgccggcgtgtcgattgggatgacggtaactgcggtaatcgtggtgttaggtagcttcacgggtgcgtccatcaaccccgcccgtacattcgggccgtacttgatggacatgattcttggtgggcagaacctgtggggcttcttccccatatacctggttggcccgatccttggtgccatttgtgcggcctttgcctatgcatatctggctaaaaatagtggcgtgtgcgagctcccgcaaccatttaaagacgagtaa

SEQ ID NO: 72670 - DNA, 849 bp, synthetic construct
  source 1..849: mol_type = other DNA
gtgtttctgatctttgtgcgtggcgtattgatgggttctgcggacattgtccctggggtttcggggggaaccattgcgttgattacgggcatttatggccatttggtagaagccatcagcaatatccgtttcggctttctaaaacccctgtttaagggtgacttcgatgggttcgtaaatagtattcttgatgaaatcgattttaaattccttataccgctgatattagggatcggcgttgcatttctgacccttgccaaagtggttacttactgtatggacgtgtatacggcatttacgtatgcgttctttctgggccttatcatcgcttcggctgttattctgttcaaaaaactcaaccacattaactttaagaacatcctcttcgcgctgatcggttgcatcctgacctttatctttgtaagcttaaacccgattgccaccaatcactccttactcgtgttattcatcagtggcatgatcgcgatttgtgcgatgattttaccgggtatttcaggttcattcctgctgctgcttctgggacagtacaaatacatgctgaatgccctgcacaatttccatctgtccgaaattattgtttttgtcgttggtgcactgattggcatcttgggctttagcaaaatcctcaattatctgctgaaaaaccatgaggagatcacaatggcgtttctgatcggtgtcatgattggatctctacgcgtgccatgcgtcgaaattgcaaactccattagtataaacatcgctagcctgttcccgtgcctgattgtggccgtgattggttttgcaataattattgtcttggaaactcgctttgattatattgattaa

SEQ ID NO: 72671 - DNA, 2049 bp, synthetic construct
  source 1..2049: mol_type = other DNA
atgatagatgaaatcactgatttcctatttggtttaaaaatgaccattgtgtcaggtatctttctgctgatcgcagtgattttcatgatctttggcgttaatactccaatttacttaaaccctgcgtggggcaccgtcataataagcggcattccgatgttgaccttagcaatgagccgcctgatccgtgaaaaatggatctctagcgccctgctgattgcgattgcgatggttgccagcctcttgattggcgaggtgtttgcggcaggcgaagttgcatggattatggcgttaggtgcgattttggaggactggaccgtggaaagggctaagaaaggcctgaaaaatcttattaacctcactccgcgaacaggtcgccgcattattaacggtaatgaagagatgatctttgtcaacgaaattaaaattggggatattttacgtattttgccgggtgaaagtgtgcctgtggatggtgagattgtgcgcgggacctcgtcgctcgatcagtcaatcatgacgggggaatctctgcctattgataaagaagtaggcgatgaggtcttttgcggaaccatgaacatgtacggcgcaattgacattaaggcgacgagtttggatgaaaatagctcacttcaaaaactgatcgatcttgtaaaagccgctgacgaaaaacaggcgccgacccagcgcatcgcggataaatgggcaacgtggctggttccggtggccctgataatcgctgttgtgtcttggattgtcacggggaacatcgaacgtggagtaaccgttttggtagtcttctgcccatgtgccctgatccttgcaaccccgacggcaatcatggctgctattggccaggcaacaaaatatggggtcctgattaagtctggtgaagcccttgagaccctgggtggtctcaatactctggtcttcgacaaaactggcaccttaacgtatggtaacctagaagtttcggatgttatctccctgaacgagcatctgacggatgaagacttgctaaaaatcacggccagttgcgaaaaactgagcgagcatccattggccaaggcgattgtgaataatgcaaacgaggttaaaattcaaatcgaggaaccagaagaatttaaaatgtatcccggtaagggcgtgacctgtataaactcctacggccgggtctacgtaggcaactccaaatttctctccgaaaacaacattcatatcaacattgacagtcaactggacaaactgaaacacgaaggaaaagcctcaattataattgcgttaaacggggaagtcatcggcctgatcggcctgtcggatgttgtgcgtgaagattccaagagcatgattgacaaactgcatgatctgggtaatgagactatcttgctcacaggggataacacagaaacggcgaattactttgctgcaaaagtgggaatcagccgcgtgtatggcaacttgctgccgcatgagaagctggatcggattgaaaaactcaaaaatgatgggaagaacgtctgcatgatcggagatggcgtaaatgatgcgcccgctctgaaaacgagcgacgtgggtgttgccatgggttcagttggcagtgacgtggctatcgaggccgccgatattgcgcttctgggcgatgacatcggcaaaatcccgtatctgaaaaaactgagcaattctaccttattcaccatcaaggcgaacattgcaatttccatgaccattaatgcggtagcgattgtctgttcggtacttggtctgttaaatccggtaaccggtgcgattgtgcacaatgccggctcttgtctggtggtgctgaatgccgccctgctgtatgaccgtcactttgatgattcagtgaaaatcatggatactgaaagtgttgaacatagccattaccatttccacaacgacggtgaacacacacattcgcatgaccatgttcatataatcaatgaaatcagaacagacaatggaatcaagcacattcatgctcacaaacacgcgttccgtcgccagatttgcaaaacgtatcacagttaa

SEQ ID NO: 72672 - DNA, 480 bp, synthetic construct
  source 1..480: mol_type = other DNA
atgaaatattcggatgatctgtttgatgacaaaaaggacctgaaatttgccagtgtgttcggtgttttatgtgcgattgcatctgcgggtgctaccatctatagcactgaagccgcctatatttttattgcaatcctgctcggcaacctgatagcgctgaaagtggacggcattcatcatataatcaccttgcttttgttcgttttactgtgcctcgtattcgggattccggagctgagctacgtcattctcctgatctgtattcttgcagctctgggcgatgaagtcggccacgaattaatctcaaaagttacggataataagtttctgaacctgtttttcgaataccgtttcgtcatgaaagtggtgattctgcttttggcgatcgggggtgtatttagtatttggatcttcctatgctttctgtcctttgagatcgcgtacgagtttgccggaattatttttgaacgcttcaattaa

SEQ ID NO: 72673 - DNA, 246 bp, synthetic construct
  source 1..246: mol_type = other DNA
atggctaacgaagtgaccaaactcgtcatggaaactattctgggattaattaccacggccttcgcctttgtcgcgggtctagcttggaatgatgcgattcagaagttgattgcaacaatcattgggactggcgacgcactgccgagcctgtttatctatgcaatcatcgtgacgattgtggcggttgttgttaccgtactgcttgcccgcgtggcgggcaaaatgggcatagagctgggtgaataa

SEQ ID NO: 72674 - DNA, 666 bp, synthetic construct
  source 1..666: mol_type = other DNA
atgcatatcatggaaggctatttacccctgacatggtgcattgtgtggtttgtcatatccttcatcatcgtggcctttggcatctatcagattaaaaaaattgttgacgaaacccctgagagcaaagctctgcttgcggtgagcggcgcattcatgttcatcctcagctctctgaaactgccgtctgttacgggaagttgctcacacccgtgtggcaacgggctgggcgccgccctgtttggtccggccgtaacggcggtactcgccactattgttctgttattccaggcaattttacttgcgcatggtggtctgaccacattgggtgcaaacatattttcaatggggattgtcggaccatttgtcgcctggattgcatacaagggtctgaccaaggcgaatatctcgtcgaccattgcaatcttttttgcagcgtttttgggcgatctcctgacctacgtggcgacgtccttccaattagcctttgcgttcccggcacctaccttcagtgcggcgctggggaaattcctggttatttttgcggtaacgcaggtgccgctggctatcggtgaagctatcctgactgtgattatttgggatcgcctaaaagcttataagccaaaattgttgaacaaacttggcgcgctggctccgaatgaggcctaa

SEQ ID NO: 72675 - DNA, 288 bp, synthetic construct
  source 1..288: mol_type = other DNA
atgaagacctctacgttaatcattctggcagtggtttgcattattctgttcgtcgctccgttggcaatgtataacggccatggggaagatgacggatactttggaggtgccgatgatgctgcaggcgaagcgattgaggaatccggctttgagccgtggttctcatcgatttgggaaccacctagtggggaaatcgagagcctcctgtttgcgcttcaggccgcgataggtgccatcatcattggctatgcgttcggctactggcgcggtaaaggtaaagaagaataa

SEQ ID NO: 72676 - DNA, 690 bp, synthetic construct
  source 1..690: mol_type = other DNA
atgaaatttgacatggactatattgcgcataacaatgctctgaccgaaacgaacccttactttaagttgttcctgacgataatcctgctgattgtgacgttagcctttgataatttatactttgatgtaactgtgtttgttatcatgtctattgtcatcctgaccattgccaaaattaactacaaaagctatttgaaatttctaagcattccgatggctttccttgtcatcacctgtatatttctgatcttcttcttcggaaaaggtgatgttatctatgagaccggcatcctgggcattgtagttacgaccgattcgtggcactatggtgtgtacacctttatgcgcgtgttgggctgtctgccctgcttagggttcctggcgctcacaacaccgattgcaaagattttaaattgcctccgaactctgaaagtgccgaaaattctgattgaaattgccctgctcatgtataactccattttcatctttctgaatgaaatcgatacgatgcaaaaagcacaggagactcgtcttggttatcattcctattggtcgtcattcagtagtttgggggcgcttgtcagtatcatctttctgcggtcgctggataaaagcgagaccctacagtacagcctggactcacgcggctattctggtgaacttccggtttacgaaccaaaaaagcgttaa

SEQ ID NO: 72677 - DNA, 843 bp, synthetic construct
  source 1..843: mol_type = other DNA
atgatcaacatgctggaagtaaaaaatattaaatatagctataactccaactaccaggcccttaaaggcgtcagcttaaaagtggacaagggtgaaatggtagctctgctgggtaaaaacggtgcaggcaaatcgacgctgtttcttcacctgaatggcatctaccgcccggacgagggcaaagttttcattgacggggaagaattgaaatatgataaaaaaagtctgctgaagtttcgtcaaaaggtcgggattgtattccaaaatccggatgatcagatatttgccccaaccgtcgaggaagatgtcgccttcggtccgctgaatctgggattgccgatggaggaagtgcaggaccgcgttgaggaagcgctggtgcgtgttggaatgtcaggttatgaaaaaactgcgcctcatcatttaagtggcggccaaaagaaacgcgtagcgatcgcggggattctggcgatgaaaccggagataatggtgctcgacgaaccgactgcaggtctcgatccacagggcgtggtggacctgtctaaactgttgcgtgaacttaacgatgaaggaattacaattatcatcagcacccatgatgtggagctggtgccgaattacgctcagcgggtcttcgttttagttgatggtctcctgattgcagaaggcacgcccaaagagatttttgccaaaccagaaatcttggaaaaagctaacctgaaagttcccattgtgaccgaattatttcagaaacttgaagatgagggctttgacatggaagggaattatcctctaaccatcgatgaagcgaaggataagttcttaaaactgttgcacgagaactaa

SEQ ID NO: 72678 - DNA, 348 bp, synthetic construct
  source 1..348: mol_type = other DNA
atgctgttttattcgattttatttccaattatctcattaattgcgattatttggcttctgtggcgttacctgaatgaaaaagattctctgattacggttattctttgggctgtgttcctaatcattgttagtgtatttgccattttcccgcatgcaagcaccacctttgcgaaactgtttggcatcactcgcggtctggatttcatcatcataattgtatttgccgtgttggtctacacaattttcaaactgtattataaaatcgacaaactcgaggataacataaacaaaatcgtgaaagaagtcgcattgagcaatgaaatctccctgaaggacaaggaggattaa

SEQ ID NO: 72679 - DNA, 672 bp, synthetic construct
  source 1..672: mol_type = other DNA
atgctgtattttcgtggatgtaccgcacgcgaaaaactgaataatatccagagcgcaaccgagaagctcttaaaactggcggatgtggattatcatattctggatgatgaaaaatgctgcgggtcggttctgctgcggaccggcttcttaaaagaagcggaagatcaaatcaaaaaaaacactgagattcttaaaggagagaccattatcacgtcatgcgccgggtgctataaaacactgaccgaagattacgatggcctggacgtaatccacatctcgcagctgctggacgagctaattaaagaagggaaactcaagttatccaaaatggacttggacgtcaccttccatgattcctgtcacctcggccgccattgcgctgtgtttgaggaaccgcgtgatgtgattacaagtgttgcggacattgtggagatgaaaaatatccgtgaaaacagtttgtgctgtggtgcgggcggtggtgtcaaatctgcttacccagaaattgccgatcaaatggccaagagccgcatagaacaggcaaaagaaacgggttgcaagacgctggtcacgagctgtccgttctgtaagcttaacctggaaaacggcgatttggaggtacttgacctgactgaatttttagttaaatacggcggtctgaatgaacgacagtaa

SEQ ID NO: 72680 - DNA, 180 bp, synthetic construct
  source 1..180: mol_type = other DNA
atggcgatcgttgggaccacgatcttctcgcatattcttccagtaatttgtggcttttttggaattgtgatgatcatctcaggctctttggaaaaaagcaactccaaactgggtctcggtattgttctgtttattatcgcctgcatattcccgtatctgattttaagtgtgctggtctaa

SEQ ID NO: 72681 - DNA, 849 bp, synthetic construct
  source 1..849: mol_type = other DNA
atgcggattgacactcatcaccatcacaaaaaggccggcgagaatctagcatttgtttttttcatgaacctgacgttcaatataatcgttattgccggtggtctggcgaccaacagtatggccattcttgcggattgcatccatgatatgtccgatacgatctcaattgcgtttgcgtggttcctggaacatgttgctcagaaagatagcacggacaagtacagctatggttaccaacgctttagcattctgggagcggtaataatctctatttttgtgattattatggcgctgttgattctgcaggaggctatccctcgcctgttcgctccggaaagcgtggatgccaacggcatgctgctaatggcaatcgtgggactggtatttaaaagcatttcggtttaccgtctccatggtggcgaaaccttcaatgaaaaagcaattcttctgcatcaactcggggacgtccttgaatggattactatcctgatactgagtctcgtgttgatgttctgggatggcgcaccctatctggacccgttcgtatccatcggtattgcgttatggttgatttttaatctgggcatgaacttatataaatcggtggaggtgctgcttcagaaaaccccaaaccacttcgatgtcaaggagtttaaggtcaacgttttaaatatcgaaggcatcaaatcatttgacgactttcacgtttggtccctggatgggattgattcggtgttgacattaaaagtgtctatcgatgattggaacaatcaggaaaaaatcaaaaatgacatttataacatcgccagtaaatatcacattgtcgatatcaccattgaatttgattaa

SEQ ID NO: 72682 - DNA, 540 bp, synthetic construct
  source 1..540: mol_type = other DNA
atggtgaaatgcccccgttgcggttacgagaacagttccacagccgtctattgtgataactgtgcctatcttctgactgattctgaaggaaaccgtatcgataactcgccgcgcgtgagtagctggaatataagcttcgccaaaaagattgttatcgtattgggcatcatcgtgattgcaatgttactgttctcatttatttataacaatacccaaccttcccatgaagacagcttaaatctgattacggacaacgggaccgttcataaaacggcgtcttacccatacaaagctgtcattgaatacgaaggaagttggggtgcgaaaatgggcgatccgaattatctggtaagcgaagatggttatggcactaagagctttgtcctcgactgcgctgcatgggatcgcgtatcgatttcggcacagaaatatgactacggcgagggggagttgcacgttaaactgctgcggaatggcgaagttgtggcggaaaattcaaccaccaacgtgacgggtgcggtggtcgttaactataattaa

SEQ ID NO: 72683 - DNA, 1704 bp, synthetic construct
  source 1..1704: mol_type = other DNA
atgatcaaagtggaaaatgtaagcaaggattatgagctggccgatggaaccaaaatcaccgcactgaaaaacgtgagctttgaagtgaaagaaggcgagatcctgggtatcatgggtaaaagtggctcaggcaagacgacgctcttacgcgcgcttaggggtgttgaacatatagacaatggcattattgaagtaggcaaggcaaaagttactagcgaatcatcgcagttttactataacaacctgaaaaaggagacggccatacatctgcagcgttcgtttggcatctggccggacacggtgcgtgagaacgttctgcgaaagttatatgcacggcgctacttcgacgaaggggatactaactttgaaattgcggagagcgaatttggtaaagaggctgatgaactgctagaactggtctccctgaccgataagcaggaccactatgcatctgtactgagtggcggtgaaaaacaacgtctgatcatggcccgtcaacttgccaaacagccaaaagctctccttctggatgaaccggcaacgatggcatgccccaaaacaaagcaggaaatcttggatgcggttaaaaaaatcaacaaagaactcaatatcactgttgttgtcgtctctcatctgccggatgtgcaaaagtatctcgccgatcgagtgattctgctggaaaatggcgagattgcggaggaagggtcggcgaacgagatctgcgataaattcatggacgaaatggatgatattgtggacatcgacaatatcgcaaccgacgaggatgtcattcaggtaaacgacatctataaacgttttttcttgttaaccggtggggaagttctgcaaattgaagatgtgaactttacagtgcaaaaagagaacatcctaagcatcatcggtccaagcggtgcggggaaaaccgtcctgttgcgcatgctggggggattggaggaccctgatgagggggaagtcctgtacaatgtggatgacgaatggtccgacattgatattcccggcatgggccgtatgaaaattcgctctaaattaggttttatgcaccaggaatttgccttaaaccattattcaacagtgttgaatcagctggcgacgcggttaggctataaaaatcagaacattgttaaggaggcgcaacagcgcgctcgcaaaattggcctgagcgaagaactgctggattcgttctacctgctcactgatctgccggaaatagaagcgcgtgaccgcttgaaaaaagtgggtcttgattccgatattctggatgatctgttcccacgctttcctgaaaccgcgacaaaggaagctgttgccgacatcttcgagagtcttgatttggacatgagtattctgcacagaaaatcttatgaactctccggcggtcagaaagtgcgtgtaatgctggccctgattctggtgtcccggccgaaattcctacttctggatgaaccgtttggagatttggacccggttaccttacgcgacgtgaccaatgctcttaagaaaatatcaaaagattacggcatcaccattgtaatgatttcgcacaatacggactttatcaaagaattaagtaaccgtgcggtctttatggatgacggaaaaattattgatgatagcgaggatattgataaaattgtcgataatttcattgatttctgtcatgccgactacctcaaaggtgaataa

SEQ ID NO: 72684 - DNA, 894 bp, synthetic construct
  source 1..894: mol_type = other DNA
atggagaatgaaagtcatgagtcaaaaatcgacgtccgtatcatagtatccggcctggacattgcgcagcttgtcagtaaggcggtgaacaacattcacctggaaaacgattataatatcgtcgttagctcgataattccgacggtagaattaagcatagtaaagaaagtggctagtggtgccgacattctgctgatcggcggctatggtagcgatgaaacctacaatattctgttcaatgaactgaaaaccgatttcaatcacattggactgtttgattataataacattattgtggaagatgaatctattgactttaagctcgcggaaaaggagattcttaactccatcatcaaatcgactctgtcttatagcctgaacttaatcaatgttcatacccttgaaaacaagctcatgaaagtgacgcataactacaacaatttactggacgattacaatcaggttctcaaagaaaacgaagtgctgtctcaggagaataacgaactaatggaagatatcaaagagctgaaatcggactttaacgctttcaaattgcgctacgaagatatttattcaaaagagattcttgaaatcttcagtttagacgatctgtggcaagagacatttcgtcaggacctgctggatggggatcggattgtgattgccaccgataaatttaaaccagacgatatcctggttggtcagggcttcattgccagccaatcaaaagaaaaagcaatcgaatggttgaaaatcattcgcactgcattgatctttgtcgatgataacgcgggggatttgaaaaaggaaagcggtattggcgaggaggaaaatatcccggaagacaaagatgattatgacatgtccaatacgtttgagaacttttgggattaa

SEQ ID NO: 72685 - DNA, 1248 bp, synthetic construct
  source 1..1248: mol_type = other DNA
atggtggaactgctggctcccgcgggcaactttatttcacttcgtgctgtcttagaaaatggtgcggacgcagtttacttcggcctggatgattataatatgcgcgccaacgcgaaaaacttctcactgaacgacctcaaagaagtgagcaaaatagcgaatgagtacggagccaaaacgtatctgtgtaccaatacgatcctcaacgaacgcttggcgtgttcgttagataataaactgggggatattgcatctagtgaaattgacgggttgatcctatccgacattggcttaatcgaaaatactgtatccaacggtctggaagcgcacatcagcgtccagcaaaatgtaactaactcctacatgttgaaaaccctgaaaaagttaggtgcgaaacgggcaatcctttctcgggaactgtcgttacgcgaaatcatggatttggctaagaaatcaccaattgaaacggagattttcgttcatggcgcgatctgcatggcaatctccggacgatgttttctgagctacggtctttatggtcgcagtgccaactgcggggattgcctgcagccgtgccgtaaaaactggacactgacctatgaagagggggacgataatgttataaacttctcggatgcggaagaggaaagctttattattacctcaagcgatgatggtagttaccgcacgaactttttcagccctaaagacctgtgtatgattgagtacattccggaacttatgaagagcggtgtggcctcttttaaactggaaggccgtgcacgtagtccggactatggcgccatggtgactggagtgtacagacaagcgattgatagctatattgccgatccgctgaactataaggtcaaggaggaatggatggaagagctggaaaacgtgtttaatcgtggctttgacactaacttctactttaatacgccattcgaaatcagcgaggataaccagtcaaaatatattaagaaagacattggtcaagtggtaaactattataataaagttaaagccgccgagctgcgtatttgggatgatttgaaaacaggtgacaaaattatcatccagggcaaaaccaccggctcgataacccataccatcgattctatgcagattgatggcaagtccgtgtcgagtgtcaaaaaaggctctaatgtagcaatcgctatcccgacaaaagtcagggaaaatgactttgtgtataaactcgttgagcgcaatgttgatgattaa

SEQ ID NO: 72686 - DNA, 540 bp, synthetic construct
  source 1..540: mol_type = other DNA
atgaacctgccgctgaacatcgtcatcggtaacgcaatctcgctcattgcaggcatctttattctgttcagtatgtgggttaatgatgagaaggaagtctacaaacatcagttttctaatgccttcattctgacgatcagcagcgccttctttttttcctggaccggtgttgtgactatggcgatcgccgcgtcccgcaatgcgatggtttacaaggaccgtcttacctttaattggacaatctttttcattatagtgtcgttaaccgtcggctgtttagtgaacactatgggcattgtaggactgttgccaatcattgcacttgttcaaattaccctgtccaattactatctgaaaagtatcaaagcgattaaaatcagcttcattgtaaatagcataatttatataatttatttctttgcgatctgggatttttcatctgtagctattgaaagtgtgacggtggctgtggggatgatctcactgttgcggctaattaacctcaataaaccgattttttgcaacaacgaagtcagctaa

SEQ ID NO: 72687 - DNA, 183 bp, synthetic construct
  source 1..183: mol_type = other DNA
atggagaaatactatgaaagcatcatgaaaaatttggagatctatcgcaatattgcgaactttgtgtccaacttcaatatttatgggacttcggaaggcaagtacctgattatattatggcagaaaacggtcggtctgaaaaccgaaaaaagtcataacaagctggccgttccgaaactttaa

SEQ ID NO: 72688 - DNA, 858 bp, synthetic construct
  source 1..858: mol_type = other DNA
atgcgcaagatttcaatcctggtgctgctgttgatcctcgttggtatgcttattccaaccggattcgccacagactcaaatgtcgtgataacctatggggagactacctatagcaatagcaattacaagtctttcgttgacaacttttttgtgaaccaggccaatgttgacattaacaacgtcggcgttaaaaccatcactgctgatcaggtgaatcaggtgtcgagcggcatcacgggtaaaagctataactcaaatcaaatactgtcttcggcgctggttgatctgaatgataacggcaacctcaaggtaagcgtggacaaatccaaaattacgaccatcaccggcgatatgtacattagcgccttaaaatctgcgggcattacgagtgggcatgtgtatgtgacaagtccggttcaggcgaccggtgaatcggcgcttgccggaatcatgaacagttatgaggaagtgactgacgttcaaattccggactcggtcaaagaggcagcaaatgatgaaatttatacccaagctgaaattgtaaataattctggtgtgaatgcggatgatctgtccaatctggtaaatcaggtcaaagatgaagtgtcaggcggcaacgttacgaaccacgatgaaattgtcaatattatcaacagtcatgtggaaaacaataacatcaacatcaccaataatgatattgaaaacttggcagatagcatcgagcaagtacagaacgtccagggtgatgtaaactactacaaaacgcaggtcaacgaatttctagacgataactccacaggcggtttcagcttagacggtctgtttgactggatcaaatcctttacggatgggatttaa

SEQ ID NO: 72689 - DNA, 609 bp, synthetic construct
  source 1..609: mol_type = other DNA
atggtggtgaaacattgcccaaaatgtggcaatgatattgatgatgaggatatcgaattttgcactgaatgcggtcacaaattaagcaacaaaatcatcaaaaacagttcgaaaggttttttcgacaacttaaatgagaaaacaagttttagcgtgatcatcttctcgtttattatttttggcgtatttctgttcatcggttcagtcgtctggtcctcgttcatggccaacggttcaattgaccttgttacctatctgctgctggtcatcgtgttttctgtattcttcggtggcatctttgtgggctacttcggatgtatggatgaatcttatattattccgaatttcagcatatatttggggagtatcttttccgttgttctatgtggcattggcctcatatttacgttcctgatgggagttatttccattctgagctctattgcgccgtttggcagctcaaacagcatttctcaaacgtccacctcaagttacgctcagtcggttgacttgagctttatttttaaactggtactcttcattcttctgatccctgtggcaagctatattggggtctatttagggtactttctgaagaagaatatctaa

SEQ ID NO: 72690 - DNA, 456 bp, synthetic construct
  source 1..456: mol_type = other DNA
atgaaagttcgtaaaattttagtcatgctactcattctggtgacgctggggttcacactgaatgcagtagtggcgagctcccccgatccgatcaaactgggagacatcaaaaacgatgacttggtaatcaccgaggtcggtcagaataagctgaattttgaatactccgttgaagtggacatttctgatctgtcgagtgaggataaaaaactttttgaaaaagcactgaacaataacaacaccagctttattcttaacctgacctcttcaacgccaacgaagattgccatcactatgcatagtttaccgaaaaaagcggaaatcataggcaacaccttgtatattaaaaacaacaatatgttccgcctgattaatggtatacagctcgataatttaaagatctcggccgtgtcattcaatacaactagcggccaactgtttattgctcggaaataa

SEQ ID NO: 72691 - DNA, 957 bp, synthetic construct
  source 1..957: mol_type = other DNA
atgaatctggggaagttggtcggcaataccccgatgataaaaatcaactatgaatatggcggaaaatcagggagcatctattcgaaactcgaattttacaactactccggcagcataaaagatcgtattgcattatatattattgaaacagaacggaaaaatggcaacttgaaagaagggcaggcggtggtggaagttaccagtggcaacacgggtatcgcctttagcgcgatcggtgcgctgttcggtcatgaagttcatattttcatgccggactgggtgtctttagagcgtcgtaaacttatccgcatgtatggcgcgcacgttcacctcgtatcgaaagaggaaggtggatttaaacgcgctctggagcttgccgaggaatttgctatcaaacacgacgcatatatgccactccagtttgataataaattaaacatcgaagcccaatacatcaccggtcaggagattattgatgagattccggacattgacgcgttcgtgagtggtatcggaacgggtggcaccctgatgggaataggcaaaaagctgaaagaaaacaatcctgattttaaactgtacgcactggaaccaagcacactttccattctgaaaatggggatggaagaaggcactcatatgattgaagggatcggtgatgatttcattccgggcatcgttgacaagaatctgatcgacgatattgtactaatcgatgatctggatgccattaacatgagcaaacgcattgctaaagaatttggtttaggcatcggcatctcttcaggtgcaaacttcttggcgggtgtgctgattaacacgagtgacattaagatagcgactgtctttgccgatgacaataagaagtacattaccacgaaactgtccgaggaaattgatgatgatcccaatctgatttcgaataaaattaaactgatcaacttcgaggtcatttaa

SEQ ID NO: 72692 - DNA, 885 bp, synthetic construct
  source 1..885: mol_type = other DNA
atggtccagtattgtcgcaaatgcgggaaagaactggaagacgatgcggagttttgtgatggctgcgggtttaaccttaacaaccatcctacggaagataagcaagaattgaacaaaaaaattaaacagacctcgcagaaggacaaaaatgattttatcaccaagttgcccctatctttagccatcatcagcatcattgtcgttattgcggaaggcttaggtaccccgatgattatgggttgggacaacattatgcttgcaattgcgatcggcattattgggggcataattggaatcattcttatggaaaaaatcgatgaaccgctgattgcttctgtggaatttattgccactggcgcgctcgtgtactcatttattggtcgttttggtgacatctccctgataatcttcattatcaccgccattttaacgctgtactttaaaggtcacagtgctaataacaaaaagctctggaccatcccaattctgactatcgttctcctgttcgtgctgctgatcgcaagcggcgcactgtatcagatcaacgcggaaaatagcgtcattgtaggtaatctgagccaaaatataacaaatgacggttatggctactacaacggttacgtcacgggcgacattaaagtagattctagcttcgattatctgtgcgtgaatgttaacttcctggacaacaacggcaaagtaattgattccactatcgggtggaatgatttgaatccacagagcggaaaaacctataaaatttcggcttggtatttcgagcagcaagccccggaaaaagcagagatcagtgttgtggattcggcggattccacgacaccgctgtataccgagaatataacgatttcaacatcaagtggagtgtaa

SEQ ID NO: 72693 - DNA, 1125 bp, synthetic construct
  source 1..1125: mol_type = other DNA
atgagcgaagaacgtttggtccccaaactacgctttagcggcttttctgatgtatgggaatcgtacaaaatcggtgatatcagcaaaacgtactctggcggaactccttcgacctccaaacgagagtattatgaaggcgatattccatttatcaaaagtggcgagatctgcaaggataaaacggaacattatattaatgaaattgcaataaataactcctcggcgaaaaaaattaaaaaaggggatttattgctggctctgtatggtgctaccagtggtgaagttgccatttcaaaaattgatggtgcgattaatcaggcagtcctgaaaatagataataacatggataattatttccagtacaattattttctgaaatataaagataaaattgtccacaaatacatccaggggggtcaaggcaacctgtccgccaacattattaagaaattggaatttaaattcccgaagttagacgagcaaaagcgcatcagccaatttctgctgctcatggacaaaaagatcgatctgctggaaaacaaactgcagtattaccaggacttcaagaaatacttaatgcagcggatcttcacccagaacctgagatttgattttgataatgtgaaactgaaaaacatttctaaaattaacaaaggcaaacagctgaataaggacgacatggtggaaacgggcatctttcatgttttaaacggtggaaaagaaccgtcaggttacaccaatgcatggaatacgccggagaacacaattaccatcagtgaggggggcaactcgtgtggttatgtgaacttcaacacagaaaaattctggagcggggggcactgctactatctggacaatctggcggaaaaggtggacggctattatctttacagttacctcaaatttatcgagccgaagatcatgcgtcttcgcgttggctcaggcctgccgaacattcaaaaaggagatatcgagaatattaaagtaaaaatcgcgcttccaactgaacagcaacgtattagcaatttattgtattccaccgacgaaaagataattaacattgccaaccagaaggataatttcgaacttttcaaaaaaggtctgctccaacagatgtttgtgtaa

SEQ ID NO: 72694 - DNA, 120 bp, synthetic construct
  source 1..120: mol_type = other DNA
atggcaaaattcaaatgtaaaatttgcggttatgtgaccgaagaatttgaagagctgccggaagactttaagtgtccaatgtgcggcgccacggcggatatgttcgaaaaaatcgagtaa

SEQ ID NO: 72695 - DNA, 420 bp, synthetic construct
  source 1..420: mol_type = other DNA
gtgatcttccttccgggctccaaatcggctacctttctggttatttttatcgtggcgattgtagcattctgcattgcctgcgtttgtgcatctatgaccggacagatatcaatcttgccaaatgataatgaaagcgaaagtatcctggacaatttatctgcgattacaaacgatacgggtaacagcgggcagagttacggttcgaaagactattcaagctcaagcagcagcagttcgtctaacgatgattcccaggtcgagacgaccactgaccatagcggtgataatcaaggcgactcccagaaggattcagatgatcacgaccatgaaaacagtaaccaaaataataaagataaagataccaaaactgattcggggcacgccggtcagggctccggcgacgcgaacgactttgattaa

SEQ ID NO: 72696 - DNA, 231 bp, synthetic construct
  source 1..231: mol_type = other DNA
atgagtggccagaatgttcaacgcccgctggacgcgctgggaaaatcggtggatgcaccggtcttaattaaactgaaaggcgatcgtgaatttcgtggtatcttaaagagcttcgatctacatatgaacctggtccttaacgatgccgaagagttgcaggacggggaagtaacccgccggctcggtgtggtgctgatccgaggcgacaatattgtttatatttccccataa

SEQ ID NO: 72697 - DNA, 1392 bp, synthetic construct
  source 1..1392: mol_type = other DNA
atgaaatatgataaaagtctcatcgtgctgtttataattcagatttgcgaaggatttagtttttacgggctgggcgctatattaactctgttcatgactcaatttctgaatttaagcctgagctttgcctttctggtttatggtacctacttcggcttggtttacattgcgaccctgtttggaggctatttgtctgataagtatatccgtagccgatgtcttatcaatgcgggcataatcctgatgggtttaggttttattgtcctgagttactttgcctcatgggctaacccgcttgtgcagacccactcttatttctactttaatacccccgaaatcatgctgatcattagtctgatgtcgatcattttgggtgagggcctcctgcgggtgaacatctcctccacggtgaaacaggtctacgaagataatgaaaagaaagttgaatctgcctttaccttattgatcatggcactgaacattggagcggttagttcggcaataatccttggcctgacaattggtgaaggcaatctgagcctgtataagtatgggttcctgatccttgccgttagcctgttcattggcatcattatttataacctctttcgcaataaatatctggtaaattcaaaaggggagattgttggtattaagccgtcaatcaaactggaatcggtaatggacaatgcggaggaaaaactgaccaaacaggaacgtaaccatgtgaaagcgattattattattctttccatatcgttaatcttcttcatcggttttgaagtaatcgattcctcacttatgttctttgcaaaagattatgttgcaaacacaattccgttcgtcccatttcgcattagccctgaaatcatcaaattcatcgagccctttggtgtaattattttctccccatttatcctaacatactttaacctcaaagacggggatgaaaatgaatctttaatcttcagaatcatgctgggcattattgtgttgcttgtaacgtatgccgtgtttttcattccgtgcatgatggtcgacaacaacatgacggacgtcagcattattttcattattatcatggagctaatccgcagcacttctgaaattctgattctgccgataggtttgagtattgtcagcaaattaagcccggcaaaatacctgtcgcgtctgctcggcctgttctattgttctttggccggcgcctatgtggtgtccgggtacatggctggcttctaccctaatgcggagagcatggcgcataagctgtttggtctcatccaaatcaacgattttaaaatctttgcttcagtgttcattgtgatgtatttgaccctgtttacggcgacgtacatttcgcgcaacaaaattcgtgatttaatggagtaa

SEQ ID NO: 72698 - DNA, 408 bp, synthetic construct
  source 1..408: mol_type = other DNA
atggtggaactcaaagacatagctcaagaaaacgaagtggatctggaaaactgcgtggtttttgtacgtggggaagatgatattcttgccgtggatgtttccaacgccaagatccgccagcggagtgacgacactatgggctttacgttcagcattaccccggaacagaccctgaaatttgaagaatattttaataaattcgcaaatggtgagaaattttactttgatattagccagacgggctatcgtcctgcgtattaccgcggtctgtcgcagatcaacaaagaagtctctgaggagtatgacacaaagttcaatgtcaccttatttgcacaaaaagcgatcgtagagccagatgattcatacttcgctccgacttgtgcgtgttgccagttctgccatttgtaa

SEQ ID NO: 72699 - DNA, 624 bp, synthetic construct
  source 1..624: mol_type = other DNA
atgggtatcgggtacgcggcgattgccattaaagcgggcatgacgccactccagaccatctctatgtctgtgctggtgtacgccggtgctggccagttcatcgctgcctcgatgatactaagcagcgccagtgtcttggcgatcgtgctgacaaattttgtggttaatctgcgctattttgtaatgtcgacctgcgttctgaatcaaattgaggactccaacctgccgctgaatgtcctcgcagcacatacgactgttgatgaatcctttgcagtgttttcattgagcgaagatagctctatttgggtctacctggggattgcagtcactgcgtggttaagttggatcttaggcgcggcaatcggtgttgtagtcttggacctgctgccggtaatagtgaccaacagcttcaacatctcactttatgccctgtttgtggccattctgacgcctgctatcaaggagaacaaacagattgccattctggttgcgatcacagctgtgctgaatattatcctgagtcaattcttaggcaactggtcgttaattgtatccacccttgttggtgcagcgattggaatgtatattgtggacgatgaatatctcctttcaggcgatgcgtaa

SEQ ID NO: 72700 - DNA, 315 bp, synthetic construct
  source 1..315: mol_type = other DNA
atggattacatgatgctggttattgtcggttgtacgcttgtaacatttattccccgcctgatcccagccctattcattgacaagttgaatttcagcccgaaatttgaaaaattcttagatttaattccgtataccgctctggcagccctgatctgccctggggtgctgaccgtcgataaccagttgtggtatatcggtctgattggcgcggtggtagcggcttgcctggcgtggaaaaaagcgccgatgggcgcaattgtgatcataactgtcgttgttctcattgccgtgtacagtatcgtgccgtttttttaa

SEQ ID NO: 72701 - DNA, 237 bp, synthetic construct
  source 1..237: mol_type = other DNA
atgcgcaccatgattaaatatcttcggcaggagctgaagatgagtcaaaaagaactggggaacaaagtaggtgtgacccgtcagacgattaatgcgctggagaacggccgctacaatccgagcctcttcttggcctacgatatcactcaagtttttaacaaaatgttatttaagggcgacaaagaacagtacttcgtcatggaagatatcttcatttttgatgaagactattattaa

SEQ ID NO: 72702 - DNA, 732 bp, synthetic construct
  source 1..732: mol_type = other DNA
atgattctggatatctataaggatgcatttgaatactctgcgaaagattggaagacattattgatcttgggtgtgatctgtctgttcagctttctcttaatcccggtctttctgctggcgggctataactaccgcgtggttggtacggccgtgcgtggaattatcaatggcaaagatcccttgcctgagttcgatgaccttattggtatgtttattgacggcataaaagtggtcattgtgcaaattgtgtatctaattgtcccggccgtgacctttatcgtctttgtgctcattgctaaccatctgtccggtgtgctggcctcggctgtcgtactgctgggatgtttagttacgctgattcttggcattattgcatgcctgatgattcagatgggcatctgtcacatggcctataacgacggggcgtttaccaaagcatttgctgcggaggaaattaaagcggtaattaatgaaatcggcctgtttaaatgccttttgacttacgtgggcatcatcattatctgcgtagttttcggcgttgtcgttacagggatcgttggcattatcttcaccatattcggtctgtcaggggcgatgctgggtgttgatgcaggtggaatcctggtgctgggtaccctagtaaatagcctgattaccacgttcgttgtaggtccataccttagtatcttcactggccggagtattgggttactctatacgatgcagatataa

SEQ ID NO: 72703 - DNA, 825 bp, synthetic construct
  source 1..825: mol_type = other DNA
atgacatcgatcaccgattgcgtggttgaagggctgaaatatccgttcaatgatctgaaaaaagtcttaagctttggtgtgttgtttgcattgattaatctgatctccctggacatcactaccaaatttattgacgcggtaataaaatattctaaactttatccctctgcgagtaatgtgttccatctgagccaattgccggccaacgatatttatatgataatcgctttgctgattatctcgttcatcattgtgctgtttatcaatgggtatgaatggaatattgttcgctttagcattgataaaaaggaggatctgccggagtttagtaacgtactgaagatgtttgtcaacggcgtgaaatacttccttgtcaatgttgcgtacaacattattccgattgtacttttaatcattggactggccctgtttaacgaatcatacagcccaattattatactgatttcggtgttactgttcttaattgcttattttatcttaattatggcgctgaataacatggtggcacacgacagtattaagaaagcctttgacctgcgtgaaatcacgaagaacatttcaaacctcggctggggtaaatacatcggcattatcgtatttacgctaatcgtctaccttgttatcatggttgcggtgggcgttatcctcttctttatcaccgtcttcatcatctctgccattactgatcagtccatgattatctccatttttctcgcaatcattgagggtctgttcatactgccttacgttgaaatattcttcagccgcgtgtttggttcaatttatcgggaaagcattaaataa

SEQ ID NO: 72704 - DNA, 633 bp, synthetic construct
  source 1..633: mol_type = other DNA
atggacgtgtttcaacatcctatttttctgctgggggaacttatgaatattaacgtggaactcttttatctgttcaaccacgcctttcagaatccattcttcgattatatcatgccggttttcacccacttcgggggctttaaattcttaatcttggtcttgatcgctattgtgctgtacgcgcatttgcgcaacaagcgcacactgcggaaaatcattttcctgacgctgatcgcgttgctgttctcggatggtattgcgtttgtcttaaaacatctgattcatgaaccacgtccgtttttaagtctcgacaatgtacacctgctgattgcggaggatgacccgcttagctttccgtcaggccacacgacttccaccattgccatagtcacctttcttgtgtttaatatgaaagaattagcgaagaaacattacaaaatcatcaacgtttgcctgatcatttttgcaatcctcattccgttcagccgaatgtacattggagttcattatcccggcgatgtgctggctggtgccgcaatcggcattgttggtgcagtaattgtgaaccactttaaatgtgaaatcctgaatcgtatcgatatactaaacaaaattaaggagtctataagttaa

SEQ ID NO: 72705 - DNA, 216 bp, synthetic construct
  source 1..216: mol_type = other DNA
atgacaatcgaaaaagacgcagaggacattatcgaaaaatttagcaagatcctggaagatattccagattccgatgaaacctggtatataaccgacaacctgaaccttacgcgtgatgacaaaagtcaggagaagaatccggagaaaattttgcgcaatgcgcggattgataaagaaggcaatttaatcgtgaaaaaagccgattggactaactaa

SEQ ID NO: 72706 - DNA, 636 bp, synthetic construct
  source 1..636: mol_type = other DNA
atgaaagtgttactcgtgaacggcagcccgaaccgcaagggctgcacctacaccgcgttaagcgaggttgcaaatgtcctgaatgaacacgatatcgagaccgagattttctggattaaaaccaaaccaataacaggttgtactgcctgcggcacgtgtgccacgatcggcaaatgcacttatgacgcggatagtgttaatgagtttgttgaaaaagcatatgaagctgacgcgtttgtcttcggttcaccggtgtactacgccagtgcgaacggatcgatggtgtcatttctagaccgtgcattctactctaacagccatggtaaaggcgcggaagcgtttaagcacaagcccggtgctgtcatctgttctgcgcgccgtggtgggaccacggccacttatgatcagctgattaaatatctgggcatttcccaaatgcctattatctcgtccttctattggaatatggtgcatgggaacaccccggaagaagtactgcaggatgaagaaggactggggacgatgcgccaattggcacataatatggcctttttcttgcagtgccttgaagcaggcgctgaaaaaggtctgaaagtaaccgaagagccaaaaccgcgtacaaactttattcggtaa

SEQ ID NO: 72707 - DNA, 1356 bp, synthetic construct
  source 1..1356: mol_type = other DNA
atgaacatctttaaaactccagagggctacatctattcaaacaaagcattgctggcgttattcattccgcttttaatcgaatatgcattggagttttttgtaggattcgcggattcgatcatggtggcaagcttaggtgaggcggcaatttcaggagtgtctctggtggattttctgattcaacttctgattttctctttttcagctctggcaacgggtggcgcggttgttgccggacagtacctgggcaacaagcaaatcgacaaagctcaggattcggctacgcaactggtttggttctcaacaatcctgtcggtcatcctgatgattattgtgattatcctgcgtcagtatctgatcgggatcttattcggtcaaatcgaagtggatgtttggcagaatgccgataaatatctgtatattgtggcgctctctatccctttcctcgcgatttacaatgcaggcgcgagtatttttcgtaccactaacaacgcatccctgccaatgaaaatactattcatctgcgatatcctgaacattgtgggtaacgcgatttgcatttattacctgggctgggacgttcatggcgtggccatcccgacggtaatatcccggctgctctccgccattctaatactgcacttcgttgtcaatgaagactataaactgcacattaaacgtacgctcattcataaatttgactttaaaatacttcgcaaggtcttgcaggttggcattccgtatgggatcgaaaatgggctgtttcagcttggccgtgtgttggttctgagtattgttagcaccttcggcaccatggccatcgctgccaacagtgtgggttacgcggtcgggatattcagcgtcttaccgggctttgccattaatctgggtctgaccgctatcatcagccgctgcgtgggagcgaacgattatgaacaggtccgctattacaataaaaagtgtctgattattgtatttgtcagccacatcgtaatcaatttgattatttttgccgcattaccgctcattttgaacatttataatctgtcggctaagactgccgccatgacaagtgaaatgattatttggcatggcatattcggtattatcatctggcccctgtctttcaccttgcctgcgacatttcgcggtgcgggcgatagcaaatccgtgatgtatatcagtttaattgtaatgtttacctgtagaatcgctcttagctatgtaattgcggattttatgggtgttggtgtcttcgggacctggatcgcgatgtttattgactggtatgtgcgtgcagccatttacatttaccgatactttagcaataaatggacggaataccgcgtgatctaa

SEQ ID NO: 72708 - DNA, 408 bp, synthetic construct
  source 1..408: mol_type = other DNA
atggacggcattgtctataaaaacacacataacttctctaagcgcgaactcgaagagttatttctgagcctggaatggtcagccgggcactttccggacaaactgatcattgccatgaaaaacttcaaaaccgtcttttccgcctgggatggtgaagaccttgtgggtttagcttgtgctatggatgacggcatcatgaatgcatatgttcactacttgctagtgaagccggaatatcagctgaaaggtattggcaaagagttgctgaatcggattactacccattacaaagattacatgcgtatcgtggtagttgcatatagtgatgaaatcaagttttatgagtactgcggattcgaaaaagcggatgatgcgtcgccaatgtttataacgaaactgtgggcgtaa

SEQ ID NO: 72709 - DNA, 774 bp, synthetic construct
  source 1..774: mol_type = other DNA
atggtactgttccgcggagatatcaagtgcaaaagcttgcagcggcgtacgtcaattagtgtgatcctgccggctgataacatccacttcctgagtgatacagaagagatagtgcctcaaccctataaaaccctgtatctgctccatggcctgtatggcagcgatgatatattccttgcaaacacgtcgattcaaaaatttgccgaagatcatggaatcgcgattgtcattccgtgtggggaaaatagtttttatttggacaataaaaaggcgcatgcctattacggtgaatacgttggccaggaacttctggatattacccgcaatatcttcccactgtctgataaccgtgaggatacctttattgcaggcttctcaatggggggttatggggcgattcgcaatggtctaaagtactcgaaaaacttcagcaaaatcggcatgattagcgcggcgttgatcactgacgaaattgtggactataccgacgatgacaacgtgctgtggagcaactccttttacaaatcctgttttggcgatctcgataaaattaaaaattcggacaaagacccgaaatacttaatcgaaaatactgccgatatcccagatattttcatggcatgcggtgttgatgacttcttatatgataagaacgtcgagttttacgagtttttagagtccaaagacattaatgctgaatttatgcagtctccgggtgaacacacgtgggatttttgcgaccgatatgttaaagaatttatcaaacgtctgtaa

SEQ ID NO: 72710 - DNA, 444 bp, synthetic construct
  source 1..444: mol_type = other DNA
atgaaatgcccggaatgcggtaacgaactggatgaggacaattactgtagcgagtgtatggaatttatagataatccgatcggaggccggctctgtccatactgcggtgaggaattggatgaagataattattgtaatagttgcatgcagtattattatgaagaggaaaacacccaagagcttgaagaaatcgattacgattctatggttaacaatggcgacagtatttgcttaaactgtactttttggtcggtcagcccttatgggtcggcgcatggcatgatttgccgcaagggtcagatctccgatggtcccggcgactcatgcggtctgtttgtgcaggaatacaacttcgcaaactatggcgacgccggacagtaccaattcaacgaaacgaatcgtgctatttccaataaactgtatcactggaaaaacagcgggtaa

SEQ ID NO: 72711 - DNA, 867 bp, synthetic construct
  source 1..867: mol_type = other DNA
atgattattactaccatcttcctgattcagattattatcaccgttttattttcgatcatggcggcaatttacgatattaaaagtaatatcgttccaaacaaactgaattattctctgatattctttggcttattttcgaacctcattctgtccatcattagcaataatattaaatacattctggcctcttttatttcaatgtttattacctacgctgtaacgtacatgctttggaaattaaatatttggggaggaggcgatgtgaagctgttcacggccattgcgaccgttatcccgtctggtcttaacatcaactttttgaacatttttccccagttgtccgtctatccgttctcgtttagcgttgttattaatagcattttagtgtcctttccgttcctggtaatctttgtcacgcatctgatctttaaaaataaggtgttcatgggcaacattgattttctagtcaacatctttaacatcgaaagcctgaaatatataaaaaattcgactctgaacaaactgattcctattaaggatctgaaggaaggcatgatcgtcaacgattattattttaataatgagcacatcattgaacttctgagtgagatgggtggtaatttggaaatttacaaaagcaaccgcaatgacttcaaatattactttaaatcacaaagtgcaggcggtatcacaaatgaggaagtgtggcagcttaaaattatgaacagtcaagacataatttccgacaacataagcattaaactctcattcccgttcgcgccagccatcttcctcgggttggtaatcgctatcgtgtatggggatatgatgatgctgatcatcaaaaacatattcctggtgatctaa

SEQ ID NO: 72712 - DNA, 429 bp, synthetic construct
  source 1..429: mol_type = other DNA
atggttaaagagagtggtgcgcagatttcgttagagtatatgctgatttttagcatcagcctggtcatcctgattgtcttcaccttgccgctcgccgaaaactcgatccgcaatactctagacgtttccgattctctgaacgtgaaatccgatctgtcaaaaatagctaatgcgatcaagcaggtctatggtgaagggcagggaagccgtcaaacgattaaaattgaaagtaacaagaaacttaaaattaatatcgcaaactcgcacgtgtcaacaagttttaagttgaaaagcaattccaaaaaggatatcaaagagcatgtaatgtcaaatattggcaaaaccaccatcagcctgaacaaaggcgaaaacgtgataattgtggaatggccagttaactctaaaaatatgttaatttacacggtataa

SEQ ID NO: 72713 - DNA, 804 bp, synthetic construct
  source 1..804: mol_type = other DNA
atggacataatcaccaccatcatctacctcgtgctcttcatcgtcatgatggtctttgtattttcgatcggcatgttacgacagtacatgcctaaacgcgaggtaatactggtaatcctggtggcctttctgattggctccattggaggggcgtttttccttgatccgatttacgatgaactgccaaatgtggccagtgttattgaaaagaacatgcccaacaatgaagaaaccctgtacctggatctaagtagctccattaacattgatgacttgaaaaacaacctgagcgcaacggatggctttatcagttttgatgaaaagtcggttaatattccgatgtggacattcaatgagcgcgaacataactactttgatgaaatcgtgggaaacattgattcgaattataaagcgtataacataagtacctctgagattcagatcactcttgctgacaattataccagcgcgcaggctctgaaatccttttccgattggtacaaattggtgtatggtgaaacgatttcttatgcgcaagtgcatgcagtactggttgttgactcatcaagcctggatacgttcgagcacattctgcttcaaaaaggtattgttgcgagcaaaatcgaagggccgattcaggacacggtcaacaataccaattcaagcatgttaactaacatcgagttcacattggtctgcggcggcattggtgttgtggtcgcctttatgggtatctatgtggactctgttgtgccggcatatcggaaattccgtaagttcttaagagaaaaacgccgtcgttaa

SEQ ID NO: 72714 - DNA, 384 bp, synthetic construct
  source 1..384: mol_type = other DNA
atgaaaatcaaattagcgattatctttggcgtactaatatggattctgacttttgtgctgagtgccaccttcaacccgattttcaccaccaatgttcgtaacgtcaacatcgtggtgccaattattaccatcattgtaacgggttttttcggtatcctgtatatccgcgcaattgatacgaacgaaattgtggagggcttcttggttgggataatctttgttataatcgacattattctggattatatctttatcatcagccttcagaagaatttatacatcattggaaattatacgttgcatgtcttttccatgattacaattactctgctcattaccacattcctgggctacctggctcaaatgacgattgatcttaaataa

SEQ ID NO: 72715 - DNA, 1032 bp, synthetic construct
  source 1..1032: mol_type = other DNA
atgatggaactgatgagagagctctcgctgacaccaggcgtgtctgggtccgaggaaaaaatagctgaaattattacccgtgagctgaaagacgtcgcggataaaatcgagaccgacagtatgggcaacattatcgcaaccaaaaaaggcgaaaagaaggcgccgactgtgatgctagcaagccacatggatgagattggtctgatggtccgctacatcgacgatgacggttttattaaattctcaaacatcggtggcattaatgatcagatgttaatgaaccagactgtaacggtgcattcgtccgttggagaaccgatcgtaggcgtcatcggttcaaaaccgcctcacgtaacaacggcggaggaaaaaaacaaagttgttaagagcaccgacatgtttattgacattggtgcaaaagacaaggaagaagccgagaaaatggttcgcattggcgacaagatgaccttcaatagcctgttcgcggaatatcccaataacctgatcatgggtaaagccctcgacaaccgggtaggttgctacgtgatgatggaagttctgaaacgcgtggatacgcgtgctactgtttacggggtgggcaccgtgcaggaagaagtggggctgaagggggctaaaacgtcggcatttcgactgaaccccgatcttgctattgcccttgatgtcacactgtccggggatcatccgggcattaaaccggaggaggcgccggtagtgatgggcaaaggcccggcgatcatcttggcggatgcaagcggtcgcggtatattgacgcaacagtctgtgaaagatttgctcattaatgcgggagatgaaaatgaaattccatatcagctggaagtcagcgatggcggcacgactgatggaacagccatacatttaacccgtgaaggaatcccaaccggtgtgctgtctgttcctacgcgttatatccacaccccggtcagtgtctgtagtatggatgatgttgaagccaccattcaacttattaccgaagccatcaataatttataa

SEQ ID NO: 72716 - DNA, 711 bp, synthetic construct
  source 1..711: mol_type = other DNA
atgaataaaaagatgcagtaccagatattacttattgttctcatcgccattgtaatcttcaatctttcaattatcgtgagtagcatgatgaacactccagataacgtgtataatattacaaacgtcgggcacaacgctaatggtacggtgtacaaaattgaggccggtaacatgtcctctaacgaaaccgtcggcctgattctgggcgtccatccccgggagcatgagatccacgaagcggtgaacaacaccatttacaatatcacctccgaaaatggcacgaataacctgacgaaaaaatacgtaatttattatatcaaaaccaaagataacctgacttcccgtgaagacacccgccctgcgggtgaagaactcgcgaacaaattcatcgttccgaatattgttaaggataagccatttatcgtattggatgttcatgaaataaacccggattatgaatattcaaatttcatctttagtttatcgaaccgcaccaacacagtcgactcgtacatttcgcacattgctaatgatgtgaatctggtggattatcagtttagcgagggaacgagcccggaaaaagttacaaaaccgattgcatctaaaggcgtgactaccctgctgatggaaacgagcattacggacgccctgatggaaaagcaaaaaaccgcagacaatttgatcaaaagtctagatagcctggagccgtaa

SEQ ID NO: 72717 - DNA, 675 bp, synthetic construct
  source 1..675: mol_type = other DNA
atggaaaataaaaatatgattattatctttgcggcagttgcggtggtcatcattgcaatcgccggcattttatttgcgaccggcttcatcggcggtaacgacgtcgaaacgactccgtttaaaatgagtttcatggagggtagttttatcggtaatgtaagcctggagaatgataaagagaaattcatgcacagctacgaggacaaggaaaacaaaatcacatataacatctccaccgtggacaactcttcagtgttaatggaaatataccaaattcaagggttgggtaatccggaagttcgcagcttcaatggcaacgaatggaacatctacttcacccaggctgttcccaacaataactccagcactaattcgtcgaacggggatgatgcaatgaatattattattggagagtcacaagggaaaaaacagggttatttgatttatatgatcattgacggcaaatctaagatcaatgccaccggtaagatgtatggcgaagcctacacgaactactttgaacctctgctcgaaagtctgaccctgaaagaaagcaagaacgtgccacatatttatgatgaatttggcctgacaaaagaacagtttgattatcagattgatctgatacgtcagtataaatcgggaaacacgtccgcgcttcagggcgctcagtaa

SEQ ID NO: 72718 - DNA, 1074 bp, synthetic construct
  source 1..1074: mol_type = other DNA
atgctgaacagcctgtacgaaaaagccatcgcgaaacgcggttttattcacgatatcgattcccagactgacgtggaatcgcaattggagtataaatggtttaatcgcgatattttggaaatcgacaacgggtttagtattgcggcaggcgatgggagtttcaacaaaaagaaatttctgacaactaatttctgcgccgtgggcgctgaatctataatttatgatggtaaaattaagaagatagacgatagcgatatttttgatattccgcatgtctcgtttctggacgaattgctcagtaattatatggcgatttacgagcttaaatgtgcacttcgcaccatcaaagaatataacgttgactactacatgattgatggctctatcctgggcgatctgcagaacccgttcccgcgtggtgctaaactgccctccaaattaaaaaacaatctggatgacatcctccttaaagagtttgagcgacgcttaaacatcaaaaaatacggcctgatctttccggaaatccgtgactcactcaatctggttgagtttcctaaaaacgaaaactccaataaaatcgaagaatacaatctgcaccttgcgtctattgaaaaaattattctactgaaagaaatcctgcaattccggaaaaaaatcattagcatctcaaaaacgagctcggacaacgatctcttccactggaatattccagatattgcattcctggataaatttaccgagaagcagggaatttcactgatcaagcataaaacggtctataaaaaaacggctttcccgtacttcaacgatttttttaagagtataaccttcaccatcttttatatccgtctgcaggataacaaaaatgtattgaaagtggaattgccttataaggccagcaaagaggacgtattcgaattaattaaaaagattaatgcgctgaccgtgcagggttatccatatctgctgaataaagcccataatgacgttgtcattaccgataagaacattaaggaattattaaaaatagcgaaaatttatgaaacaacgaaccgtgaggtgatgagctggtaa

SEQ ID NO: 72719 - DNA, 1281 bp, synthetic construct
  source 1..1281: mol_type = other DNA
atgaaagcagcagtcattggcctcggcgtcgaaggtaagaaagccgtaaactctcttttaaaccacggctgggaagtttatgccaccgacctgaatattaacgttgatctgtctggtctgaacctaccaaacttgtcactggatgtcattgatgaaacgcaaacagtgtccatcgttggagatggcatcaccctggatctgggttttaccaatccatatgacattgatcagtgcgatgcggtagcaatcagcccgagcatgttcggcggcgaatttgctacaaaactactgaaaaacagtaatctcctcagtgatgtggtcgacaaacataaagatattttcactatcggtatcaccgggaccaacggcaaaaccaccactgtccatatgctgaaagaaatcttggaaaatgcgggtaaaaatgttttagtgggcggaaatgggggtggaggcttttcaggttattatgacttaatcctggaagctaacgaaggggaatacgatatcttgctggtagaggtatgtgatatgacgctggatttctgcaaatactgttttgattttgacatgattggtcttacgaacattggtaacgaccatatgaatgttcataaaaccattgccaactacaaaaacagccttgtgcgcttcttcgagggaaaaaccgtcttcaccgcctttaaccaggattttaacacggattttaaagaaagtagcgataaaaacattccgtacttcgagtatcaggacgaactgaaactgtttggcaaatttaacctgcttaacgccggtctggcgacagccatcgcacgcgaattgaagatacctaaagatgttattaaaagcacactgtcggaatttaatgcggtggaaggccgattagacgtgtacaagattaacaatgtgagcgtttatgtgggcaagactgataattccgatgcactgactagtattctgtcggagaaggatttctatgcgatctttatcggcacgccccgccacaatgaaatccaccgtctggatatcctggacgctgctgtgcgttacaatccggaggtcattgtgttattcccggggttggatgacaccctggacatggcggtgtatcggctcaattccctcggttatatggggaatatcattacggtaaactctcttgacgaaattatcgaactggttgcggagtactcacatgaggacgcgatattaatagggggcaatggtcaggatacgctgattaatattcaagaacgtattaagttgatttcggagaatctgtaa

SEQ ID NO: 72720 - DNA, 1188 bp, synthetic construct
  source 1..1188: mol_type = other DNA
atgagtagcggctggcgtcggataagcatcaccatctgcttggccttaatcgttctcagcatcctgtttgttgcctttagtgcagcgaccaacgcgccgtataccgcgcagtccgtcgcagacgagtacaaccttccgatcggccaatccatgtttgaaaaccaatcgattctgggccagcaggattcaatttcggtcccattgatctcaaacgttggattcctgcagcatcaaattaccgccctggacatccagggacttctgatgacgttgaccacgggcatggttccctttgattttagtaccgtctctagcgaaggtatcgactcatatggggatgtggtgaacgtagagggcccaggcttcctgacatttgaaggagataaactcgcggtaaaatcccccaacaactatgtatgggggtacagtactccctataagtggttagttaaaaccgataccggcgtggatgttgtggaaaatggcaccgtggtgaaatcggtgccagaaaatgaaattaagaatcttgactatcataatgactactacaatagttctacgattcgtagctggtataactatgatgcgcacaatgggtctacattcactctagaaaaaggcatgaaaggcttctcggatggccgaaataatattagcgcggctgatgtgccagtcatattcgggcacgatgtggtggattatgcctccgagtatccgaccggttctcctattctgctgtactcgggcaactacactgaagaggatggtgaagcgtatggcaccagcctgggaagccatgccgagtacggtgactcaattcgtgaagtaaatgcacgccagtttgttgacgcctggaacggcacggtcattccgccgaactctacttccagcggtaaagattacgtgtactttgaatcagctgtcgacccgacggccccgggaggcagtgcggcgcatggtgtgtgtccgcctgctcgcgcgctgcgcgccgcagtcacggctgaaggtttcggtttacctgttgggatgacttgggacgaagatgcagttctgtttgggtataatccggcacaggatatcacagtgacaaacaatcacgattatccggtactgattaaaatgtggacggaaggtgagggtacgggtatgggtatctactgccaaattgtaagatatattccgaagtaa

SEQ ID NO: 72721 - DNA, 654 bp, synthetic construct
  source 1..654: mol_type = other DNA
atgagcatctccactattattacagcggccggtaaaaactcccgcatgcggaatgaccagattagccgcaacattgaattaacgaacaaacttatccttccatttaaaaataaaacagttatcgagaccacgattgataacgccctgtcggccgatatagatgaatgcattgtggtgttgggtcattatgctaacgaaattctcgaatcgatcttcgacaattataaggacagcgttaaattcgtaattaataaccctgtggatgtaggcctgagcgtctcactgtacaacgggctttcaaacatctctagtgattttgcactgtgtatcaccgcagaccaaccgacggtgagcactgaaacctttaaccgtatgattgaggcgagtcagaactccaagaatccgaaccgtaccatttctatcttgcgacgccgtaaaattggcctactggatagtgcggaaggcctgggcatgccgtttgtcgctcaccgtctgaatttaatgaactatttggaaaatgaggatgataatatcaatcccattttacgcaaaatcttcaatgatggttataccttttatggaataaaagaaaaaaacaaaaaggagctgctgaatatcaattactacgacgactacctggcgctgctcgattaa

SEQ ID NO: 72722 - DNA, 1236 bp, synthetic construct
  source 1..1236: mol_type = other DNA
ttgaaattgccgtcccggagcaaatcctatatgattccggaatacagcgtaactggtgatctgctctcctacttaacgtgtaatctgcagtacaggtatcagaacaagggaacactaccgccgtcaaaacctgtccagcgttggtttggggaatttattcatggggtcatcgaagaagcctacatacaatgggagcagaacaacatgcactttccgtgggactggaaaaaggatatccgcccaattgaggatctgattgatttgcgtctgcaggtccgcggcctgtacccttttgatgaggacctgttcttcagtattcacaatcagtcagatgaagaactgaccatcgatgatttaaacgagcatgaccataagaaactggccagtgctagagcagaaaaagccatcaatatctggggcaaagatttattcccactgattgacgcatctgaacacctgatcaaaggcatccgtgatatgcccaactatgatgaaaacactagccgttcgaattactatggtattaacggtgtggtggatgtgagctcgtctgttaaaatcaataagaccctggaacaaagcaattttgacaattataacaaccgcattatagagtacctcaagaaagatgagaacttccagaaacgcattgctaaatttgacaaagatgacgagtatgaaatccttatcgattataaaggtatgaaacgccccccggaaaaagtaaacaatccgaaagttgaaaataaatgggaaacgcatgagcaacagatattaacctatagctggcttcgctccgaacagaagtcttctaaaccaatcatcgcgggaatcattttctacctgaatgaactggtgccttcaaaagaggacttgattctgatcaaagatgaactgaacaatggcttaaccgatattggttatgaatatgataaggacattgagctgattaacagctggcaagaagatgataaagcgccggagctcagtgacaacttcaaaatcgaccgttccatccgaattataaatgtggacgaatatgaacgggaaaaagcgcttcttaaatttgatagtgtggtttcgaatattgaagaatcactgattaaagagatgaagggctgcaaaattcaagatgcatggaagggcgattcggacgaacgtacctgcagtgcgtgtgattttaagacgttctgcaaaaataacagcgttaaaacaaaagactttaaaattccgtaa

SEQ ID NO: 72723 - DNA, 1083 bp, synthetic construct
  source 1..1083: mol_type = other DNA
atgttgttgattgcgcagaaccatctgcagttaattttagaagttggcttaatgttgtttgttaccctggtcttttgtctgaacttgattccgctctcacttagtattgtgaccttcctgagcttattcataatggggggcttaacgcttcttttcggtgcggatattgcactgctggtgctgtttagtagtcaagcggaatttacgcacccctttggcccaattgccctccttggggccgtcactgcacttgcttcgctgaaagtgatgtcggaaagcggtgttgatattcgcccgctgcggcgttttgtaattctcttcctcgctggcatcacagtattcggtggactgatgcaccgtagcttcctgatcctgtggctgctgggtttattcctcggatacctaatgatctccaaaagcttccgcgaaaaatctgtctttacgctgaagagaatcatgatgtttttcggtgcggcgggcgcaggttttatttttctggaggttctggctcgtgttagcggcatgacgattttctctccgcttctgcgcctagggcgcatcgaacagtactctttatcaagtattaaaatggtcctgaacaacattcagctgatagggcataatgcgaatgcgagctattggggagccgatggcaccgcgtttgctgaaggctatattactttgccgatgcagctgatcctgttttttggcttgcctttcccgctattctttggtgtgctggtgaaccaaaaagacaccatcgattatatgcttccaggtatatttggttggggcttcgactttggaatcttggggctcattggtctgatgatctttgtgctgggcacaatcatcattggctttaaagtactgaatatgtaccgggaaaaacgcgagaagaataacaagaaatatctgggccgtgaggtgctgttaaccggtgccctcgccgcattctgcgcacaatcactgatcggcctgtttatttttaaccgttccatcaatgggatggccttgttgaccttcttatttgtgggtgccctgattctggcgaatgttgtctcgctgaaatcccgatcctaa

SEQ ID NO: 72724 - DNA, 432 bp, synthetic construct
  source 1..432: mol_type = other DNA
atgtacttcggatttagctttatcggcctgttatttttaatcatgctgtttattccgaacgtgctgtggaataaattccaaccgacggattatgagaagtacagtaaacgcgaaaacatcattctactggcttttgaacgtgttggccaggtattggtatgcatcttttcgttattctgcggtgtgaatttcaatctctctatttgtgttgccattccttttattatattgatcctgtatgaattttactggattaaatatttcaaaagcaacaagactatgggcgatatgtatagtgactttctgaaaattccactccccggtgcgacccttccggtgttggcattcgtcttcctggggatttgttcagataacatccttctgatattttccaccatcatttgggagctggtcatcctggtgttcatttaa

SEQ ID NO: 72725 - DNA, 732 bp, synthetic construct
  source 1..732: mol_type = other DNA
atgaaatttctggttattaacggcagcccgcgcaaacagaacacgtataatgtgattaaacaagcaaaagttaatttaaatggcgattttgaggaaattaatcttattaaggagaacatccccatgtgtaacgggtgcttcaagtgtatcctggaaagtgagacggaatgccctcattatgataaaatcgatccgataatcgagaagctgcacgaatgcgatggcctgattattggttcgccggtctatgcgatgaacgttaccggccttctgaaaaacttctttgaccatactgcgtacttgtatcaccggccggaatttttcactaaaaaagccctcgtggtggtgacaaccgcgggcgccggtcacaaaaaagtggctaagtacatcgacgaaaccctacgtcattggggagtaaataaagtctacaaaatcagttttgcgtgtggtgggaacgacagcctggataatgacaaagttaacaaagtgtctcagaaatttgcattcgatctgatctcgaacaaactccattccccaaagtttaccgacattatattctataatgtatggcgcgctatggccctgagcaaagatcctatcaaggcagataaggaatactggtttaacacgggtctggttaaccatgatttctcaccggaagtcaaattgaatattccaaaaattgtatttgccaaaattgtcttcaatgtgttaaaaaaagcgattaaataa

SEQ ID NO: 72726 - DNA, 1029 bp, synthetic construct
  source 1..1029: mol_type = other DNA
atggtgttacgtgaaaaccgcatcttctacctcgacgaactgcgcgctattgcgatcctgtgcgtaatatttgctcataccattcagaatttccctactaacatggattacctgacatctcccacgctgctttcgtatcttacagttgcccgcatgggtgtgattctttttttcatgattagtggggcactgctgattggccgagaatataacctgtcggattttttaaaacgtcgctttgcccgtgtcctgattccgaccatcttttggcagattatcggctacttatcagtgctcatttttataggcttcacctatgataacctggtgcaggcgagtgtgcaagttggtttcccatggtttgtatgtgccatcctgggaatttattttgttattccgatttttaattcctttattaaagaatatgggattaaaggcgcggagtatttcttgatcatatgggtctttctggttatcctgaccaacatgcagctcaatgaaacttattatattgacttcatcttcaacaatgtcggcatctacattggatatgccgtgctgggttactatctggcaaataaggagttcaatatctactcgtttcctatggttgtcatatgcagtgttcttttcattatctctctggcgttaaattcctattacgcatttaacttcagccatgtcttctacatcgagtcctattccattattgtccagtgtgctttgctgtttttgatcctgcgttatatgagcaaactggcgaaatttcggccgaagtttgtgctaagcaaactacactcattcgtgcaaaactcatttatcggtagctttatttactatctgagtatcttcagctttacgatttacctgatgcacggctttattgtaaatgccattatcaaatacatgccagttacgcaatttagcatgatcccggcaatattcctcttaatcgcggtaatctcgattgtgattgcggccgtgttgtctaaaatgccgattatcagcaagttgtgcggtatttattaa

SEQ ID NO: 72727 - DNA, 396 bp, synthetic construct
  source 1..396: mol_type = other DNA
atgaacgatcgtggttttgtgagcgtagagtacatcttcacgctgttcatactctttaccattggatgtggcctgttgttctattccagcagtttaatcaactcaagtattaatattgaagactctgtctctcatcgcatcattctgaatgatgtgtcgtgcgtaattagccaggttaattcgaatggcgtcggttacagcaaatacattaaactgccgtcggataaagggtattttgaaatcactgttgataagtccaaactgacaatcgaatatgataacaagaaaggtgagacgatgctgccacttttgaacatggacagtaaatataaattaatcagcgggcggggctattacatttcaaaatccgacgatggcaagattgtgataacctaa

SEQ ID NO: 72728 - DNA, 498 bp, synthetic construct
  source 1..498: mol_type = other DNA
atgaccggtgacaacggccagatttcggcggagttactgtttctgtttggcaccttgatcatcgtgctgatgattagcatcgtgttcatttcagatgaaaacgaactcaatattgcaatggccgcggctcacagcggtgttatcgaaggcctggcgactagttcaagcggtatttaccctgccgatgcttacagtgattatagcaactcgaaaatgaacgtattggaaccatactctgtggagatcgtcaatatttcctatacggagcttggaggcgataataactatgacaagaaacaaatccagtttaaagtatacgcaaaaacatctgaccgtttcaacaataaagaactgacttcgattggggatcgcataaattataacctgcggaaatccattgcagtcagttttaactccataaatgccaccaataaattatataacccggttttcagcccgcattatgtgtacacgaccgcgaatgttaagtgggtctaa

SEQ ID NO: 72729 - DNA, 717 bp, synthetic construct
  source 1..717: mol_type = other DNA
atggacatttcggagattaacctggatgaaacgcatatccgtttaaccaccgatctgagttgtcatgatctgaaacgctacatattttctattcgccgtgatctcaagaactatatcttcaagaaccaggaatttgcgctgagcctggaaccgattaaatcggaagataaccttccgttaatcgtaaaaacaatgatcgacgcatccaatatcgctgatgttggtccaatggcgtgtgtcgccggtgctatctctcaattgtcgctgaactacttaatcgaacaggattctaaatattccattgtggaaaatggtggagacattgcccttataaatgactcaagcctgctgtgcgggatttactccaataatcaggtgctgggaaatgatattgcgtttaaaattaaaccccgtaaaaaacctttggggatctgcacttcaagcggcaaaatcgggcactccatcagtttcggcaaaagcgactctgtgacggtgatttcaaaaagctcggccatcagcgatggcatcgcaacccgggttgcgaatgaagtcaacggtagtaacagcgaagaaaaagtttcaaagggcttggaatgcggcgaggattatagtgaattttttgacggtctactcataattagcgagaacaatgtgggcactgtcggccgcctgccgaaaattattgagaccaaagagttcgatgtaaagattgtttaa

SEQ ID NO: 72730 - DNA, 570 bp, synthetic construct
  source 1..570: mol_type = other DNA
gtgtattacttgaaattaagcattggtgataacatggcgcgtcgcgaggctattgaaaacataattaactgtattgacgatgagctggtcgtgtgcaatatcggtttcccgtcgcgggaactgtacgatatcaaagatcgtaaagaaaacttttatatgatcggctcgatgggcctggcgtcttcaattggactcggtctggccttggcacagcctaaccgcaacattgttgtcatcgacggggatggcgcccttttaatgaacatggggagccttgtaaccatatttgcaaataatccgaaaaacctgacttggattgtcattgataatggtgcctacggctcaacaggtaatcaagatacgtatgctcagaaactggacctggtggacgttgcgcgtggcgttggctttaaaaatagctatgatttcgaagacatcaatctaaaggaatttatcaagtccgatgacgcgagttttatcgtatatcataccgaacccggaaactccaaagcaccaattatcgatctgagtccggtggagattaaaaatcgcttcatggatattgtgtaa

SEQ ID NO: 72731 - DNA, 585 bp, synthetic construct
  source 1..585: mol_type = other DNA
atgaagaagtttattgtcatcgacggcctggatggatcgggtaaagatacgcaggtgaaattaatcgccgagatgtacgaaaaacagggccgtaatgttgttatccgcagccatccttgttttgacaaccgctatggtagaaaatcaaaagaagcgctgttgaagaccggtaaaattaatcatttgcttgcgactgtctatttcgggctggacgcaatccgcagtgttgtgaaatacacccacgatgacaacgtggatgtattaatattctcccggtacattctcgccgtgatgtatcttccgaacgggataaatactattgtttataaaatcgtggcatttatcctgccgacctcagattgcatgttctttctggatgtaagtccagaagaaagcctgcgccgtattggcagccgaaacgagaacacggaaatgttcgagaatattgaatgtctgcgtaaaaaccgtctaaaatcccaaaaatttacatataactggaatgtgattcccggcgatgattcggctgaggtcatttctgaaaaaatcaaaatgaaatgcattgaaaccgacaagctgctcaattaa

SEQ ID NO: 72732 - DNA, 630 bp, synthetic construct
  source 1..630: mol_type = other DNA
atgaaattaaaaaattttaagcgtgaaaacatgatcccgcttccggtgactttaatctcgaccgccaacaaagaaggcattcggaatattgcgccttattcatgtgtagtgacgatcttgcgcccaacgaatctggtttgcatcgcttctgcaatgatgcgcgacacctatgtaaacattgaagaaaccggcgaatttgttattaacatgatctctgccgatatggtggatgcagttataccgacgagttcccatgtctcctttgaggtggatgagtatgaactggccggtttggaagctactgaaagcaaaaaagtaagtgcgccaggtattaaaggcgcgtactcgcagatggagtgcaagctaacaaagatttacaaagacaaagatcccattggcatcccttacctgctcataatcggggaagtcgtccatcttgaggttgatgacgactgcctggatgaggagtatggtgtgctggacctcaacaaggtgaaaccgctgatgatgctggaaagcgataaagggatgcacttctgtacaattgaagacctgaataaattcgaaacctttggcgcgatgttcagcgatggtaaagatccgctggaatggatgtatgaaggagattaa

SEQ ID NO: 72733 - DNA, 2727 bp, synthetic construct
  source 1..2727: mol_type = other DNA
atgaataagaaactgctgattatcagcgttctggtaatattcatattcatcaacgcggtaagcgcggaaaattcgaccgatatcaacttagaactcaatcataacaatgatgagtgcattaaggaaatctcggatgaaagttcaaccgacatcgatctgaaaatcaactacgagtatggggacgagatcaacccggaaatttccatatctcactgcaataataatatgaactacacaaaaaatatcatccatagcaacaattaccgaatcaccatgaacaaactgaacgacggcgccgaatgctctgtgtcagtgtcagcgctcgggtacatcactcagattcaaaacataaccataaattcccaatccaacaaaaccacgatttttaacctaaaagctacggatatctacaaaatgggatacgatatgaccaaaagcgcagatcgcttacttaattttagctcggccgatgatgttctggtgattaccaccgcgggaatgacacggattaatgacattactaccgaaaatgcattggatggtatttataacgccgctgatggccacatcacttacggaaaaggtaaccttttaacactgcatgccatccgcacagatccaacgaactttgccttctttattaaaaaaggcaaccgcctgaccatggcattctatcaaaatgcatcgacaactccggtatatacgggcattggaggtgtgggcctgacgacaaaccagtggaaaaaactgaaaggcctgatcggggctgatgatgcttacacttacgtcagtattgctaacgcatggaatgcggggttatattcagatatcctgacgctggcgtcgtatcatggacacgtatgtaccggtctgattagtgggcaggcgatggttacgacgctgattaaatactatccgccacgtggtgaaaccggcgcccagcctcttgaaaacacggcgtattatgtgctgggcgtgccgggtggttctgatgacgatgcatttacctggacacttgatatcacgcagggcaaaatgagctacattgggtttgacacgatggagaataaaaacatgaacggtttcattcgctggaatagctcatcaaacacgggacttctgattataatgtcgtatgacgaggcaaaaataaaaaacaccttcaagagtctgtatcccaatatcaacccagacaacagcgttactgaagatttaatctatcaaaattggttgatctcaactttgatgagtaacccggaatcactggtcacaattgaggccgcctacaaagatcttaccttggaacagaagaatcagttaataggcaaccagctctggagcgcgtcgaatattaccgctcggggcctggacttggattacattaacagcctgaatttgccggatgcggagatggagacgggcatctttaataatgtccatttatctgattcacagctgaagcaaattggtgtggatgcctcgcttaaagcggtcgactactttaaaaacatcaatgttacgatcgaaaaagacatgtctaacttttacgttttgaccggtgcgggctttgtccgtattaatgacactgccacatctatggtctttgacggtattgaagatattttcggtgcgcgcttaagtcgtggtaatctcttacccgtacatacggcactgtggaaagatctgatcatcgaattttattggctgaacacctcggatatttataactcagttacgtacagcctaaaatacaacagcaccacagggcagctgtatgaatgttcacagcaatacaatattcaggatcgtagtctcaggtatgaccctccttatgatgctctcatgggctggctgttccacaatcacgtgtgcactggtagttctcccggcgtgctgttggcggataaaatctttgacgacttgcctctgggtgaaaacgaaagttatgttctggtgagcacttatacctattgtaaggacgacatgctctcccgcttgcttggcgtgtctccgggtatgggtaactattataacctggcgtactccaatagcgacgtaaatgcaggcgccctgtggaccgcggactctgatatcattatccgatggaatagtgagacgaataccggcaccgctaccattattaagtttggttacccgatcttcaaggatggcgccgatgagtatgcggaatggatgcgttttgtaaaaggcgattattcgtctgagaacattgtcagcctgccaactctgagcttcgaagtgaccaaaccaattaccagagacgactacaataagattatctccggcaaatccgatgatgaaggaattaatgtcctgagttatatccgcgcgctgcctgataaaattccggccgtcctaattgataacaacggcattagcaacggcaatgatggtaattccattaataaatatccgaaaaaatcgaacaacaacagtgcaaacaccaatagcatcttttcatctagtaacaactataattccccgagcaagggactgaacccgaacgttggggtttcgtcctattctcttagcggcgatagcgacgtggaagataaaggggaagccagtagcaatggcaaatcctatgaagtgtccaagaccccggcaacgaagtccattgactcgaatagcttaatttacgcattagttggtgtgctggcgattgggattctgatcggtctcggtttcatgaaacgtcgtaaataa

SEQ ID NO: 72734 - DNA, 1014 bp, synthetic construct
  source 1..1014: mol_type = other DNA
atgatgatcttaccacaaattccgttgtatggcatagccatcatctgcggactgctatcgttttttgtaagccgtttaactatgccgcgaattatccggaaactcgaagcggcggatattgttgggaaagatatccataaatcctggaaacccgttgtggcggagatgggtggattcggtatcctttttggctttattatcggaatctttagcgggatatacatgcacgacatcctgacctttaatttagtggtggttctggtagtcatattgctggttggaattattggtattgtggatgacctgctggccctgagtagtaaggaaaagttctttctgctgttccttgcaggtcttcctctcatctgggtggcgccaccgaacgtcggcctgttatacctgattacaatcccgatcgcactgtcggtcggctctaatctcaccaacatgcttgccggtctgaatggcattgagtccgggctgggcattatctcaatggccagcctgaccatagcctgtattattctgggcaagtatgatgtaactatcatttcgatgagtatgcttggtgcactgattgcatttctgtactataaccgctatccggcgaaaattttcccgggcgacaccggtacgcttattatcggcgctgcaattgtttgcattgcgttcattggccgtgtgaaactgattgcgtttattgtgctgatgcccaatattattgatgccgctctcaaattctattctgcaggttttatgaatcgtcagcagcagaaaccaacgcagctaaacgatgaaggtaaattggtccgccctgatgtgggttttaaatcattgatccgcttaattctgcgcaaaccgattgcggaaaaagacgccgttcgtttaatctgggctatcggctttgtattcggcatattggggattgcggtggctctcacgatgccgggggtcctggagagcaaaacactgatgaacttcctgcaaatcaaggaaatgttgtaccatatctaa

SEQ ID NO: 72735 - DNA, 4047 bp, synthetic construct
  source 1..4047: mol_type = other DNA
atgaagattaaaagtatctacaaaatcttgatattttcaatagtcctgctgattagcttgtcggccgtggccgccgaagagagtatggataacaccacatcaaacgatgatgttctaacctcagattcacacgatgacgttctgacgctgaatagtaatgatgatatcttgacgtcgagcgaaaaaacatggtatgtcggaaaaaatacgaccgttggaggcagcggaacccaggaagacccctttaacaacattgaactggcgttaaaccatagctcgagcaatgatacaatctatattaacccgggggtctacgatggtccgcataataccaatctgaaaattgatattgataacctaacgatcaaagcaaaacccaattccgtactgttaaacgcaaatattaataacacacgtgtgtttgaggttactggcaatgatgttagcattagcggtctgaacttctccaatgtgtacatggaatatggtggcgttattaaatgggacggtaatggaggaagtttaaccgattccactattaaaaattccaagtcccgtgttgggtctattcgttgggaaggcaataacgccatcatcaataacatcaccattctcaattcgacctccgaaaatgggatactggtcataagcggtacttcttcgaacattacaaattccaccattcgcgataccaaaggctactatggtgccgtgatgtttggtggtaaattcaatatcattgataactgtacatttatcaacaacaccgcctggatgaatggtggcggcgtgtacgattggggggccaataacacggtaagcaatagcttatttatcgcgaacaacggaactcgtgggggcgcgattctgacgtatgaaaatcagccaaatcgcatgaacataatcaacaacacctttattaacaacattgggggacaggcaggtgccatcgtagtacgccgggcaggcgcgaacattgacaactgcacgttcatcaacaatagcgccggctctgcaggagcggtcttaatcttgtcggaagcgaatatcaccaactccatttttgagaataacagcgcttccaccgttggtggtgctgtatatattacaggtgacggttccaccattgataacagcatctttattaacaacacggccaacaacgatgggggtgcaatttactggagcggtgaaaacgggacggttaccaacaccattttcattaataacaccgtaaacaatgggacgggcgaagcgattggctatattaacaatgttactctgaacaatgttacgttggtaaataataacattgaacaggtaatcgtgaacgaatcaacccccacctttgaatatgtgtttaaacttaccgaaggctacagcaatgtgaaactgaccgataattatactgccttttgtactgaaaagacgaaatggtccagcagccctcgcacgccactgatacctcacaatgatttatccatcctgaaaaatcatataactggtgaaagcgtagcggagtatctgaaaatactgatatacaaatacctgaaagatccagaccgtatccgaaacttacaacaaaaaatctggatcttcacggatgacaattatattgatagtactgattctatcatcaaagaggtcatttctgactataactctgggttccgtattcctaatcagggattttctgaaatcatcaatgatacaaccgtacttcgaattgactttaaatcatataacatcacgaaacaaatccaaaacatgatcggatttaaaagtagcatcgaaaacattacgtacaatatgagcgtcgtgaaaaacaccttaacgccagcggtgattctcggtaatcaaaccacttttgaaatcaaagtcactaatacgggtagttactacctgacgaacgtgagtgtgattgaagacggctacgacggtctcatctacaacagttttagcgatcctagcggaaaatggatcttttcacgcaatagtgatggaaaaccaatgtggacctataatggtacgctttatgttggcatttcatatagttttaatgtaacattcaacacgaccaaaactggtaatttcaccaactttgtagtggtcacatcgaatgaaaccgacaacaaaaccacaaacaatacgaccaaggtttataagccggatatgactgtggagaagctttctctgaaccggaccgtatacgttggtaaccagaccgtctttactatcgtcgtccgtaataccggcgattgtgatctgggcgatgtcttcgtggtggaaaaagcgcccgaaggccttgtgtacaacagctttaaaggcaccgactggtcgtacaacaatggcaaatttacgtatggtaaagtcctgaaagtcaacgagtctgttagttttgagattgtattcgatgcggtgagcccggggaactggactaacgtggttgtggcaggctccaatgaaacggacaacaaaaccggcaataacacgactaaggtctataagccggacatgaccgtggagaagctgtctttgaaccgtactgtgtacgtggggaatcagaccgtctttactattgttgtgcgcaataccggcgactgcgatctgggtgaggttttcgtggtagaaaaagctccggaaggcctggtgtacaactcattcaaaggcacagactggtcgtatgatggcaataaattcatgtatgggaaaaccctgaaggttggcgaatcggctagctttgacatcgtatttgatacaatcagtccgggtaactggaccaatgttgttgtggcaggttccaacgtaaccgataacaaaacaggtaataacacgaccaaagtgtataagccggatatgactgtggagaagctctcgttgaataggactgtgtatgtgggtaatcagaccgtcttcactattgtcgtccgtaacaccggcgattgcgacctgggcgaggtgttcattgttgaaaaagcgccggaaggacttgtgtacaactcgtttaaaggcacagactggtcatatgatggcaacaaattcacatatgcgaaggtgctgaaagtcaacgagtctgtgagcttcgagattgtattcgatgcggtaagtccgggcaattggacgaatgtcgttgttgccggctccaacgaaacggacaacaaaacaggtaacaatactaccaaagtttataagccggatatgaccgtggagaagctgtctttgaaccgcacggtgtatgtggggaatcagacggtctttacgatcgttgtccgcaatactggtgactgcgacctgggcgaggtcttcattgtggaaaaagctccagaaggcctggtgtacaactcatttaaaggcaccgactggtcatacgacggcaataaattcacatacgcgaaggttctgaaagtcaatgagtcggtgagttttgaaattgtattcgacgctgttagtcctgggaactggaccaatgttgtggtggcaggtagcaacctgacagggaataagaccggtaataataccactaaggtttataacccggggctgaaggtggaaaaaatcacgttggacccggttgtgtctgttggcgagattacatcgtttgagattgtggtccgtaataccggtgattgtaaacttggggatgtgtttgtccatgaagattcgtatgaaggcttacgcttccatagcttccggggcgatatgtggaaacagaaaggcgatacgttctattatcagggcgttttaaatccgggcgagtcagtgtcgtttgtaattctgtttacgacgctgaaaccgggcaacttcacgaacattgttaccgctggttccaatgtgaccaacaatacgacaaccgaaaacaaaaccaaagtaatcgaaaaccacaccaacaacaataccaatggtactaataaaacagtgaacaacgaaaccaaagaagttaatgtccacaaggttgatacctcaagagcgacgggtaatccgctactcgcactgctcatggttcttctcatgattagtgtgacgtctgtgcgcaaattcaaaaaataa

SEQ ID NO: 72736 - DNA, 789 bp, synthetic construct
  source 1..789: mol_type = other DNA
atggataaccggaaagtgatcatcattgcactgatagcagtgattgttgtactgggtggtctcattgcgtatagcctttttacgcaaaaccaggtccaatatcagacaatcgcggttagcaatgccaccacgatggaagtgccggtcagtaaaaattcgaccttcttcaacgacgcgctgggcatcaaatactatcaggatgacaaaagcggcgttcaggtgattagctggaacggccaggaacaggcatccgctaaaggcgcggtcaatattgcctctcaatttgaaaagcaaaaggccgggaccactcagtcgattgagaacggagtgcctgtgtatgagaataaaaaattgcgttgctttataattgaagttaaaaatgcaaccacaaacgacaacattatcatcgttgcgaaagataagaacgtggcgctgcacatgctgaaaagcatcaaattcggcgtaagcaacattacgaatgcggctcaggtcgaaccgtacgctgaatctggtgggaaccatttaaatgataataatgacactgtttttgtgttttacccatggtacgtatacgatgaaggtgattacgatgcctatgatgactattcttcacgcgattccgagtacgccgatgacagttattacgactattcgtcaagcgatagcgaatatgccgatgattcgtattatgactactcttccagtgattcagaatatgcagatgacagttatgatgaggaatacgacgagtcagatgaagattatgaaagttccgaggacttcaactaa

SEQ ID NO: 72737 - DNA, 507 bp, synthetic construct
  source 1..507: mol_type = other DNA
atgaataccaccaaaaaccagtcgattgtatatgatgaaaaaacaatctttaaagttaaggaaatgatagtggcggggttaaacaaactgaaactgttcaagtgtaaaaaaagcggtaatctcgacttttacaacgacttaaaagagacgttcacggaaatcgctctgaatctcaaagaactgaagttgtggaacgaactggattattttctttcgatttcactttatatcgagtacattgtctataaaaatagcattgactcctcattcggccactgctcttttgccatcgagttgctgaatttctacattaacctgattaaaacgagttctgattactatctaaacttaaccgaaatgtccatcaaggattttggtatctatcagaacgaaacaaaaactcggtaccgccagtatcgtcgcaaatttcatactgatgtttatgtgctgagtggcaatttcaccgaagatcaaatgtacgaaattcatgcaagcctgcgtgagtaa

SEQ ID NO: 72738 - DNA, 1059 bp, synthetic construct
  source 1..1059: mol_type = other DNA
atgagtgaaaaaatctgcagtaactgtggcaataaagtggatggcagtgcgaacttctgtccgaagtgcaaaagccagtcgtttagaaacattaatgaggttgccaaaccgaaaagcggtgttgttcacaagctgttctataaatatcagggaggttacttcgccgtatcgaagagcaagatcgcggcgatcactacatttattttatttgcttcgttaggcttcgaatccccaaacctcatcatctcttcagtgataatcgcatttttggtgtacattataggatttgctatccgacgtatcaatattattaaccaaaattcaaaaatgttctttcgcaacaataatcttggtctgatcaccgatctgatgcatctgtttgcgttctggcaggaccgcgaaaccgggaaatttgccttgtcaaaaacgaaactaatttccatcctgattttttttgtttttgcaacctcgggcctttcactgcctaatgcgacacctattttagcggcggtgttcggtttgatcttcgccctgccggtctttgtagtcggctatggcatccaccgcctgaccacgagccgcccggtgaaaaagatcgtcaaacaagcggaaccagataccggtaaaaaacatgatgatgccagcaacgcaaaaaaagacattcacatacatgaatttgacaaatatcgggcaaaactgaatgaactgaaagtgcgctacgaaattaaggaaaaaaacgcccgtaacctgattgccaaacgtttcacgccgccccagctgacgtatgataagtttatcgcatctgtggacaaatccactatgatgttcaacagtcatgcggaggtgatttctaatattcttgatttggcttcccaggacagcaaaaagattgatgatgaactcaacgaccgtttcgatattctggaagctcttgttgaaaaaattgatgagttgattgacgagctggtcttaagcttaaacgatgacgaaaaagaggggaatccgagcaatctcctgaacgacctggatgatctgattgattctgtaaaaaattactaa

SEQ ID NO: 72739 - DNA, 519 bp, synthetic construct
  source 1..519: mol_type = other DNA
atgaacggggctggtgcgatcgactctgcgaactggacgagtgcggatgtaggttacgaaaccttcaaaatacctccccagtatgaaaacccatacagcagtgactttgacatgtatgaatttgatgaggacattgatgtgtttacaatccgttatgtgaatccgaatctgatggatttatatggccacttcctgaatgaataccatggaaaaaaggtgaatgttgcaggccatgatgcagtccacttcacctactatgatcgccatgataagaccaacaattcagtcctttggttcagtgccggtgaggaattttattatatcaactggattggcagcaatattaccccggccattaaagaagttgtgaaaagctccttaaaatcaaactacactcacaaagagttttacagcatcctgaatgataacattaaaattacgatcctgtcgattccgttgaacctcaaaggcttgattatcctgctgtcgtctactcatacgacatccgaaatggtttaa

SEQ ID NO: 72740 - DNA, 891 bp, synthetic construct
  source 1..891: mol_type = other DNA
atgacgaatcacaaacatctgcgcactgtgattgaagatatatattcgaacggaaacaagctcacggaagaactcactgcccgcctaatacatgaatttcgttactccaacttgtatattccgagcaaaaaagaggacaacaagctgaactttattatttatgaggatgacgattccaaacttaccccactgtttactgatttggatgaatttcgtaaattctataaagacgaggatgttcgggcgctgcaaaatccatttgaactgtatcagaatgtcctgaagacaacggatattgaaggttacatcctgaacccggctagtgaaaaatatctgttcaaaaaagaatttattttagcgattaacaacatcccgaagacggatttttacacaaccaatccctactcggaagaggaactgttaaacatgaaacgttccgtggataataaaaatttggaacgttttatcgaaaatagagcaaatatcggggactttgagggcctgttcgaacagatggccaattcacagctgttcgctctgatgttgtctgatttaaaactgaacaaggagatgattagccttaaaaaaagtggtcctgttgcggcgatgtataccgataacgtcggcggcatctatgcaacgctgttcacaagcgagcgcaaaatggatgcagtgaagaccaaaaaatacaaatacagccaattagttaacctcgccacccttgtcaactttatcctgaccgaggacatggacggccttattgtaaatccggaaagtgacaatgtgttagtaccgcgcaccaccctgctgcgatactctttgggtttcgagatgtatgcgaatgatgaacgcctgagcgaatcaatgttctatctcttccgtatcgaataa

SEQ ID NO: 72741 - DNA, 306 bp, synthetic construct
  source 1..306: mol_type = other DNA
atgagcaaattttgtccgaaatgcggcgaggagctcgtagatgatgcgaaattctgtaaaaactgcggtgaaactattaagaccgaacaggaaacgcaaaacaatgaagttcagaacgttgaaaatgatcataagatagcactgattctgggctacgtctgcgcgattctgattccactgtttggccttatcttcggtatttatttagtgacccgcaaagactcgtccaaagctaattatcacgggaaaatcatcattggaatcgccattgtgatctggatcattagttttctgttgatgatgtaa

SEQ ID NO: 72742 - DNA, 339 bp, synthetic construct
  source 1..339: mol_type = other DNA
atgaaaaacaaaaatatcttgctgattgcgatcgcggttctcgtggtggccctgatcgcagtgggggcttacacaatgtttaatggcaacacgcatttaaacgtgaccgacaacaccacgggaatagacaatagcaccggcattgataacaatacgactgttgtcggcgataattcgccacttgagaacctgaccaacaataatacgacctataaagtctacaatccgcagtccgatagttatgtaccggttattggtgaaaagttcgatgaagaagtaaaccgttggtatacttacgacgatcaaggtgtccgctattataacacacggattaactaa

SEQ ID NO: 72743 - DNA, 1092 bp, synthetic construct
  source 1..1092: mol_type = other DNA
atgactcgccaagaaaaaatcattaaaaccagtgtgatagggattgtcgttaacctgatcctggttgcatttaaagccactattggcatgctggtgaacagcatcgccatcacattggatgcggtgaacaacttgacggatgcgctatcttccattattacgattattgggaccaagcttgcaggtaaagcgccggataaaaatcatccgtatggctatggtcgtgtggaatactttgcgtcggtcatcattgcagctattgtgctgtgggcgggtattaccgccttcatggaaagctggccgaaaatcctcaatccggatgccacctcatatacggcagtaagcctggtcataattgctgttgccgttctggtgaagtttgctcttggaaaatacgtgaagaacgtaggtgaggatattaatagccaggcgcttgttgcatcgggcagcgatgcatttttcgatgcagtgctgtctctgtcaacattaatcgcggcggtcattagcgtattcttccatgtctcgctggaaggtatcttaggagtggtcatttctatcgtgatcatcaaggccagtgttgacatgctgcgcgaaaccattgacagcatgatcggctcgcgagttgactccgagctctcccgtaaactgaaagagtatatctgcgaaattccagaagtgtatggcgcgtatgatttgagtctgcataattacggtcctgaagatatgcgcgggtctgtgcacattgaagtggatgacgatctgaccgcttttgatatccacagcttaacgcggaacatcgtatataaggtatacgacgagttctcaattgttctgactatcggcatttatgcccgcaacaatgattacaaagatgtccgtgaagatttatacaatatagctagtaaatacgaggaaatcattgaaattcacggctttatcgtaaataaagatgaggactacgccacctttgacattatcgttgattttgatgcggaccgtgagaaagtcaaagaaagaatttacagtgaaatcaaatccaaacatcccgaactcgactattatattattgatgactatgacatatcagattaa

SEQ ID NO: 72744 - DNA, 2688 bp, synthetic construct
  source 1..2688: mol_type = other DNA
ttggaaagcgataatgtaagcaagaacatttctacgtcactgaataagacccagaacaagacactgattaacaatgaaacatacaaaaagaccaccctggaattttcccctattatcacggaatatacgtcaggaaacatcatctataccgtgaaagcgtatagcctgttgaattataacggaatgaaatataaagaccctaagtacaattcccttattaagataaaactatacaccggcaattcttttaaaagttactcatcacatatcgacaacaacggcattgcttcgatcaaggtgccggatttatcgatcggctatcataaggttgagattttcattgataacgtgcagggcgcaacgtcatacatcaaagtcattaagtcgacgacgaaagtgtatgctccgactaccattatcaaatttaagaaaaatatgaattataaaattaaagtcgtggatagtcataataatcccgtaaaaaatatcatcctgaaagttaaagtgtatacggatagcaaatacaacatctatagcatcaaaacgaactcgaaagggctcgcaaccctgaaaattaataaactgtctctgaagactcacaaaattgtgattaccacgaacaataaaaattacaaaattaataaaaattccaaaattcttattaaaaaaaccattccgaaaaaaatcgaaacactgaccgtctcctcgccaaacaaaacgatacaacgcggtacgtcgttcacgattaaactgaccgatgactacaacgatattgtgaagaaggtgtcaattaaggtcaatatatacaccgggaaaaaattcaaaacgtttaaaatcaccaccaacaataacggtgtggcgaaacttaaaaccgataaactcagcttaggcacgcataacctgaaaattgcctccaacaacaagaattacaaatttcataagacttttaaaataaccctcgttaaaaccattattcatgatgacatcaagactttagtgctgaaaaatatcacttactaccagacaaaggatggcaaattcaatgcgaaactgggttggtattcgaaagttggcagcagctatcagatcctgcggaaaaccaacgaaaactataacatcatttctaccgtcaaatcaaacagcagcttcacgaccttctatgacaaaattgatggcaacgcctcatacacgtattcggttcgcgagattattgtgaaaaacaatgatattatcctggggccgtatgacaaagaaggtctaaaactgttgaagagcccgaacattactgcggattttcagaacctgaaagcggaaatcacttggaacaaagtggaaggtgccacaaagtatattatcttccgtaaaattgggcgtgatgctaattttaaagcgattgggatcgttaatagcaatgtcttaaattacacggatttttattacaaaaccccgaagcagctgcgcagtattctgaatagcaacacttttgtcgaccccagttttaacaacttgttctacaccgtacgtgcctgtactgtcaaaaatacatctggcatcaatcaaataagttatggcagctatttaattgatggcgatttccacctggaagccccgagtattatttccctgaaagataacgaaattaaatggggtaaagttccaaacgcggatggttatctgatccttaaaaagaacagtgacgatgatgagtggaccattatcaaccaggttgcacagaacgaatccaacactatcaccttgaagctcaataacatcgaaaatagttcttattattcggtgaaagcatttgctaaaaaaaatggtgagatcatttacagcaaatttgattctggatttagtctaaagaattactcaaaagataattcgaaatataaaatcttatattttggagatagtattacttacggttcgccgtacaaatcaaacagcaacaaacacattttctctatcccctacagagtaggtgaattgctgggctgtgtttactataatccgagcattccaggttccacgtatcatgacctggggcaaaaagacggcaagaacattgaaaatacaaaatattaccggtaccgtatctgccgcgaggtggtggaccaaatatctatcggtgagcttccgggcaactggaaagagcttgataatctcaagaacagtgaaggtatcaccaatacatacatcgatgactataatatcgtggtcttagccgcaggaaccaatgactacctggataactccatactgggctctatcaactctgttgatacccacaccttcaatggggcgctgaaccacattctgaataaaatcgagactgcgagcaagacacgtgttgaacgcggtgaatcccctattaaagtaatattcgtagacctctgctatagcgaccgtgcctatgataaaacgataaaagaaaatcgcgacgtaaccaaaaacaaaatcggcttgaccttgaacgactatcaaaacgcgttaaataaacagtacaataaatggaaaaataacaacttcctgaccctgtataattttaaaacacgagactacaatattgttaaccaggagaactgcccatatacgacatccgataacctgcattttagcaaattcacttatggccagtatggtaatgcatttgccagttttcttaaagaaaacattttttataactaa

SEQ ID NO: 72745 - DNA, 1203 bp, synthetic construct
  source 1..1203: mol_type = other DNA
atgaagagcaaacaggatattcagctggaattactgcaagagattgatgatatatgttctaaaaatgatcttaaatatatatttgtcggcaaaaatgcctttaacgcgtatgtgaatcacacaatcaaaaataataatgcccacgtgagcgtagcgatgaccctaggggatattaaccgtttttgcaacattattgagaaacagaataatccgaatcgttatgttgaaagtatgtttaccaacccgaaatatatccccttgtatatatcttatggcaatgaaaacacgaccgattaccatatgatcatcctgaataataacctccaccatggcatcaacatccgtatttatccaatcatcaaatccgtcaccctggatgacgaaaaaattaagatcatggatagcaaaatctataaagaatacaaattccgtaaatttctgaacaagaagattatcaacaaaaagttcttgccgatcaaaatcggtatcagcttactgaacaacatctacaatatttcgggttttcgcaaaaaataccctgataaaatctttaataaaatatacattgataattgggatgatattcaaaactattccaaagtacggattggaaaaaaaataattaactcagaatattttaaggagcttacacgctacaaagtggacaatatcgaactgaattatccaaaagacaccgacaactatttcaaacaaatttacggtcgtaacatcgagaacgtaaacgtggtgcttaagccggagcgcaaaaatgcaattgtcgatactgaaatcggttacaagaagatcattaacgaaacgaaagacctgctggatgaaattcggtcgactcatgaagagttggtttgggggagattcaaagtccgccgcgaaaaaaaatgcgttgacgatgtgtggaaactcgttaaaatgacgaacagccagattaaatacattgacttttttgaggaaaatatcgattatttactgagtttggatctgaatgacaaaagtcagttcgaagaaatggaaattattttaaacccgattattaaaaaactgcagaagtatgctaacaagggcatgaccttctcgattgatgaaaaaacggactcactgattcgaaagttcctgctcctgaaaaacaacgagaaactgattaataagatcgacgaaattaacaaacttaaatacttcgttgagtaa

SEQ ID NO: 72746 - DNA, 387 bp, synthetic construct
  source 1..387: mol_type = other DNA
atggatctgaaaaagattgcaattgtagttagcatcttgcttataatcgcgattggatcgtttgcctacatcagtttaaacacacaagaaaccaaagttgatatcattacgcaaaacacgatccacaatggtgacattattaccgtgcagctaaaggatctgtatcgcaacggcatcccgaatcaggcgattgatttgaaaattctggatgactccggctgggctcataactacaatgccaccaccgatgagctcggcatcggtcagatacagattttaggcctggagaacggtaattatactgcgcacgcaaaattcaacgggactctgtttctgaaagaatctgctaatcatgtctcattcgaagtgacggacgggtatttttaa

SEQ ID NO: 72747 - DNA, 1071 bp, synthetic construct
  source 1..1071: mol_type = other DNA
atgtacaaagtggtcaatggtcgtaaacgcattttttatctggactttatcagagccttggctatcattctggtcgttttggctcacgttacccgtgcgttttttcaaaattccccggccggcagcttcaatatgtgctttgtgtcgcagtttattgattttggcgtcattggggtcccattatttctgatgatcagtggtgcactgcttctgaacaaggattatgagcttggagatttcctgaaacgccgatactctcgcgtgctggtgcccttcctgttttgggcgatgatcttcccgattagcaaaattctattcgaaggccaggttgcgacggttgctaattttataaaaatgtactttgattctaacttttggtttgtttggatgattctgggggtgtatctgttcattccgattatcaactcgtttattaaagaatacgacatgcgtggtgtagagtactttttattgatctggggaggtgtgatgttcctgaacaccatcgggcagtatccttttcatcaacttgaactgagctatttcgcaggctatttaggctattttgtactgggttactacctggccaataagaaattccggctttccgattcaaagttattagtgatttcattgctgatttttctcaccttcaccttcatcaacattgactacacaattactatgtgtatcctgaaaaacaagctcctctattataaatatgagacgattgttacggtagtgcagtctgcgggcttattcatgtttatacgttattttgcactcgtcagtagcaacaaaccggaatcgatcaaaaaccgcatttatctattctttaaagactccttcatgtttaaaatcatcttctcaattagcactttcagctacggtatttatctggcccattataatccgttgtttttccttaaatacgaatacaaaatcctgttcacatttaatccgattatctggctgccaatcatgatgattgcgatcataggcagtagttggtttattctgtggatttttgataagatacctggcctgcgcaatatcaacggtgcgcactaa

SEQ ID NO: 72748 - DNA, 819 bp, synthetic construct
  source 1..819: mol_type = other DNA
atgaataagaagataggttttattctggcgctggtagttatctcgctgatgatgtgttctacggttagcgcaggtttatttgacttcatgggcggaagtgattcaagcaatgatgataatactttcgtggtcggttttgatgccgaatttccgccctatggctacaaagacgatagtggaaactatactggtttcgacttggatctcgccaaagaggtgtgcgaacgtaacaactggacattcaaagcccagccaattgactgggatgctaaagatgtcgagctggactcggggtctattgactgcatctggaatggatttacgatggatggccgcgaagacaactacacgtggtcgaatccttactttgacaataaacagatcattgtcgtgaaaagcaactccggcatcaacaccccggcggatttgaaaggtaagatagttgagacacagaaagattcctcagcgctggcggcacttcagggcgataacaaaacgctggccgatacatttggcaccctcactgaagtggcggactacaataccgccttcatggatttagaatccggggcttgtgatgcaattgccatggatattggggttgcagaatatgatattaaaaataaaaacgctaccagcgactatcaaatccttaaagaatcaattaccagtgaaaaatatggtattggcttcaaacaaggcaacacggatctaaaggacaaagtacagagcaccctggacgatatgtttaaagatggcaccgtggcgaaaatcgcacaaaagtatggtatctctgaggatgcgctgatccagccgtaa

SEQ ID NO: 72749 - DNA, 651 bp, synthetic construct
  source 1..651: mol_type = other DNA
atgatcctcagcaacgtgattggacaattgctgggcggtatggttacctcggttgaaatctttctgctgacactgctgttctctctgccgctcggtctggtggttgccggcggccggatgagtaaatttgcacccttgcgatggctgatgaagatttatatttcaataatgcgcggtaccccactgatgctgcagttaattattgtgtttttcgcgccgtactacgtgtttgggatgagtctaagcgcagattatcgttttatagcggtcattattgcctttaccattaactatgctgcgtatttcgctgaaatctatcgcggtggaattgaagcgattccaaaaggccaatacgaagcggctcaggtgttaggctacaataaattcgagacttttttcatcatcgtccttccgcaggtatttaaaatcgttcttccttccatcacgaacgaggtcattacccttgtaaaggatacgtccctgagcttcgttatcgccattccggaaatgtttactgtggcaaaacagatcgccgcagccgacgcgtcgattgcggcattactcgttgccgggatcttctactatgtgtttaatgtaatcgtggcgttcgtcatggaacatttggagaatcgtctggattattacgactaa

SEQ ID NO: 72750 - DNA, 684 bp, synthetic construct
  source 1..684: mol_type = other DNA
atgagtttactggaaataaagaacctgaaaaaaagctttggagataacgttgtgctgaaggatatctccctgaacgtagacaaaggtgaggtactgtccattattggtccaagtggcagcggtaaatcaacattgctgcgctgcataaccgatcttgaacaggaagacagtggaattatcaattttgatggcgccttcggcctggtgttccaagattttaacctttttccgcatcatagcgtgattaaaaacatcacgaatgctcctctccgcgttcagaaacgtgatagaacggaagttttcaatcacgcacgtcacctgctgaaaaaaatgggtcttgaagataaggaagacgcgtatccgtgtgaactgtctggcggtcagcagcaacgggtctcaatcgcccgagctctggcgatgaacccggacatcttattttttgatgaacccacttccgcactcgatccggagttgaccggggagattttagcggtgatcaaacagctagcggcagacaatatgaccatggtcattgtgacccatgagatgaatttcgcccgtaaagtctctgatagcattattttcatggaaaacggcgtaatcgttgaggaagggtcgccagaagaagtgttcacttcgaacaataaacgcatgcaagagtttttgggcaagtttaatgactaa

SEQ ID NO: 72751 - DNA, 723 bp, synthetic construct
  source 1..723: mol_type = other DNA
atggtcaaggtgtccgtaatcctgaccgcgttcaatgaagagaagtacattgggaaagctattgacagcatactgaaacagaccctgactgattttgagctcattatcgttaatgatgggtcaacggacaacacgctgaacattatcaacagctttgaagatgaacgaattaaactgatcagtcacgacaacatcggccctggagcgtcgcggaataaagcactgaatattgccaagggcgaatatatcatgtatcttgatggtgacgactggtatcgcgtcgacggcttggaaatagcgtacagtgaagccaaagataaagatactgactttaccttctatcaaatgatcaattatgatgaaaaaaccggtaagacctatgaaaacgattggttcaacttaaatatctttgatgagagcttcgaaaatacggtgttcaacattaacgattttaaaggttctatttttgacttgtctgtgggtgtttgccaaaaaatctacaatacatcgttccttaaacgtattgatgctaaatttccagaaggcatcctgtttgaggatatgccgtttttttattacgtcctgctgaaggcagacaaaatttccattattaaacagcagttatactaccgtcgcaaacacgatggatcaatcacacatgtagtggatgagaaattcctagatacggttccggccggccaggaactcattttccattattaa

SEQ ID NO: 72752 - DNA, 273 bp, synthetic construct
  source 1..273: mol_type = other DNA
atggaaaacgggtggtatgatacctacaaattcgatctgctggcctataaaattaacggtccgcgttttgcattacgcgacattgaagagaattataagatcccactatacatgctgatcaagaaagactaccattcgattaaacaaagcaaatattaccaggattatttggacaatcttggcccggtgaagaaaaaattctttctcgacatcataaaatccaaaaattataatgattacctggcgctgaacagtgataaagataactattaa

SEQ ID NO: 72753 - DNA, 1698 bp, synthetic construct
  source 1..1698: mol_type = other DNA
atggcgctgatcggcaagattaacaacctgaaagagtgcttggataacaccaaaatttatgacagttattactcggccgaaattgatgaaagcattatttatctggagtcacgtaacggcatggatttcacgggtaatatttttcgtataactgaagagttatccacaggcaaatacggtaattttaagatctatgtttacgctgccaaaagcattaaagctaaaattgagctgtttaaacggaactataatctgaaaataacgaagatcataactgatgaagatgaagccacgaaaatcctccataaagcgaaatatatcttcacagattcaggcattagatataaatacgtcaaaaaaccggggcaaattttcgtcaatacctggcacggcacgccattaaaactgatgggtttcgacaaccccagcgaaaaacataatgttgggatcatccagcgttcttttcttttcagcgactatattttattcccaaacgaatacatgctggatcgcatgtctcacgcgtatatgattgacaaagtgtatggcgggacctttctgctggagggttatcctcgcaatagtgtgtttctgaaggacaactccaactataaggaaaaactgaatctgaaagataaagaagtttttgtgtatatgccgacctttaaaggaattgtgaacaatcgaaaggacgaaaagcagaaaaacgatgtcaataagtttttgaacaaactcaattccaagctgaatgacaatcagatattgtttgttaaatttcatccgtacaatcagtccaagatcgatttttctaaatttaatcacattaaagagtatcccaaaaacttcgaaaattatgatatattaaatgcggctgatgtactcattacggactactctagtgtatttttcgacttcgcgagcacgcgtcgcaaaattattatttttaactacgatcaggatgaatatctcaaagatcgtggactgtattttccgcttgaagatctaccattccctaaagtccagaacattaacgacctggtatgtgagctcaattcgccgaaaaactatgacgataccaagtttaccgaggaatactgcaaatatgactcgaccaacagcgccgagcatatctgcgaaactgtgattaacggtaaaatcgaatgcgattacaagatcatcagtaatgcaaacaagaatatcctgatttacctgggctcgatggagaacaaccaggcaaaatcgcagcttattcaaatccttgaaaatacggatgataatatcaatattttcctgagcttcaaaccttggaacaaaaacattaaagaaaaccatctgaatctgctgaaggatattccaaacactattgaatttctgccgttaagttacaatttaaccccgacattcaaagagaaagtggaattgaaccgcttcatcaaaaaaggcaccgacttgaatttggaactaaccgaaatgtttaaccgtaattataaacgccaatacggtgattttaaattcgatctgatcattgattttatcagcaacgacccggaacagtcacttacctatgcatgtagcaactcaaaaaacgcgattatcatcaatgaagaaacacaaccgaaagtttacaaccaatttaacaaaatttaccgcctgtccgagttcaatatcaagaatatatgtgatgaaatcatccggtaa

SEQ ID NO: 72754 - DNA, 855 bp, synthetic construct
  source 1..855: mol_type = other DNA
atgaaccggctcaaagcagccaaaaccatctcggccatcaccaatcctccaatcatatgcattccgttatttcttatcatctgtataattctaagtaacggaaatttcaatagcttcattgtgttggaatcaatttcgctggttttcacatcaattctgccaatgattattattgtgtattgggctaaacgtctggacacggatcgtgatattagcaaccgcaaagaccgcttcactcccctcattgttggcatcatatcctactttatcggttttctggtctccctcatcttggggacgaatgattttctgaccgcgcttcttctgtgctacagcatcaatacaggagtggtactgctgatcacggtaaaatggaagatcagtgtccataccacgggcctgtccggcccggttggtgccctgattctgctgctgggcccgaccggtgcgttatttgggatcatttaccctattttgatctggtcccgagtgacacttgaaaaacacacgtcggcccaagctattgcaggtggtgttcagggcttctttctgaccgttctagagatgtatatgtttatttcattgttcaacttcaacgtcggcaacctggtgccgctgactgattgcatctggtatattttggcgatcatatctgcaccggtgattttaggcattctcagctatgctcatatgaataagatcgtgtttagtgcagcggtgatcattgggtttaccgtctttctggaatatgcgccgctgagtgcctctgtaatctatattctggtctgtttaactagctgtctgattagcctttacgcgggtgaggattacgaatggtctgacgttttaatttaa

SEQ ID NO: 72755 - DNA, 1386 bp, synthetic construct
  source 1..1386: mol_type = other DNA
ttgagcaaaaatgataatatcaaaataatcactggtgatcctaaaaaagctattgtgaaactggccatcccgatgatgatttcaatgcttctcatcatgatgtataatattgcggatagtatctgggtagcggggctcggtgcggatgctcttgctgcaatcggctttattacgccgctgtttatggttctggttggcctgggcaacggtataggtgccggggcaaattctttaattgcgcgcaacattggtgctaagaattacaaacaggcaaacaactcgggattacatgccatcctgttgtcggtcattgtgagcgtaatctttaccattctgattgagggctttatggtgcctatattgcagtttatgggcgccggggataccatccagtatgcaatggactacagttatatcattttcggcttcctgttcatttttgtatactcaggcgttgcgtctgccatatttcgctcagaaggggacatgaaacgttcaaccattgcgattgcgatcactgccgtgctgaatattattttggacccgatattcatttacattttaaaccttggcattgcaggtgccgcctgggcgacggtgatttctgcaacaatgtcctgcgttattatgagttactggatatggggtaaaaaagacttatacctggatttgtcccttaagaactttgattatcaaacgagtctgatggtggataccctgcaggtcgccattccaagcaccctggaaaatattgtgttttcggccctggccatcattattaacagcatgctcgtgctggcggcaggcaccaccgcggtagcagtgtataccgccagcatgcgcattgtgcaactggcgatgattcccctcatcggtctgggaacggcggttcttacagttgcgggtgttgcgtacggtgcgcacaactacaagaatctgaaaaccgctcactcctactcaattaaagtgggtttcttaatcagcatcatcctgggcgcgatcatgtttgtattttcgagcccaattgcaacgatctttagctatactgccgccagtgcgagcctgagtccgcagatcgcgactgcaatctcggtcctgagcctctttgtcctggctattccgcatggcatcatgtcttccatgatgtttcagggagttggcaagggtacctattccctattgatcaccctgcttcggtctctgatcttagagacagtcttcgcatatctattctgtttcacgtttggctggggactgacgggcatttatgcgggtgttgtctttgggtgcttcgtgggaggcacaatcgggtatgtctgggcaaaattattcatccgacgtttcaaacagattgctattcgtaaatatgctccgcaagaaaactaa

SEQ ID NO: 72756 - DNA, 651 bp, synthetic construct
  source 1..651: mol_type = other DNA
atgtactgtccgaattgcaatagtgaaaacaacgattctgccaaattctgcaagaaatgtggcaccccgctgaagaaagaggtgagccacaaaaaaatcattaattccattaacgacgaaaagtcatcgaaagatgatattaccaagtacatcatcattgctctgattataattgcaattgccctggctggagcctttgcgtatatcggctttggcaaccataacgatgatgggcagacccaagtgcaaaacaacgcaagctccagtccaaatcccgtacagtcaacgcagtccagccagcctcagcagagcagtagcgcacaaagcgctgcgatggatatccttggaggtagtttttcgactggcagcagcttgtctgcgaaaacctatgccagcatctatgtgggttcccaacattccggtgagaaagtaatcatacagattaaatattcacgcgacggttctagtctgaataacgggaatatggtcccaaaaacagttgacagctcaggctacattaatgtcaaatcggcggattcgttcaaatactatccggattttgcggaaatcaacttatttgacactaataaaaacctgctcgatacgcagtcggtttcactatctccggactctagtacgcagacattctaa

SEQ ID NO: 72757 - DNA, 480 bp, synthetic construct
  source 1..480: mol_type = other DNA
gacagcgatctggatgacttaaacgatgattcggatctggacgagtttgatgatgattccgacttggatgagttcgacgacgactctgatttggaagatgtggatgattctgattttgaggactatgacatggaaaattatgatttcaaacataatctacttaatttaaacattacatacaaagcctgtagttcccgcctgggcgctacctcgaaccttaataatcattccgtcaacgaaaccaaaaaagatagcaatccgaatactgaatcaattgaacacgcgaaaaaggcgaaatcggttctcaaaagcatcaacctgccaagtgaaaatcaaagcaactacgacaagaacattagtggtaacaataatgaaaaatcaaacaacgaggaaaacaaacaggggaacaattacctgacgatcatcagcattatcctcgtgctgatactggtaattattgcatgcaaaaagctgtattaa

SEQ ID NO: 72758 - DNA, 165 bp, synthetic construct
  source 1..165: mol_type = other DNA
gtgattattggcgaagggcatatcttcagtgataacgacttcaaagaggatttgttaaatgttggttttaagattgtcaaatttaatcgtggcgaagccacctacgactttgcgtttatcaaaagcgattatttcaactattggccgctgctgaaacgcgaataa

SEQ ID NO: 72759 - DNA, 2571 bp, synthetic construct
  source 1..2571: mol_type = other DNA
atgggttttaaggtcagtattatcataccagtctttaacgtggaattttatattgagtcctgcatcttatccctccagaatcaaacgatcggttttgagaacctggaaattatttttatcgacgattgctcgacggacaacacctcaatcatcattgaatactacgcgaaaaaatacaaaaatatccgcgccatttattgtaacgaaaatagtggcgtggcaggtaagccgcgtaatattgggatggttaacgccacatcagactacatcatgtttattgatcctgacgataccttctctaaagatgcatgcgaggttctgtatgacaaaatctcgaaatcgaaggtggacgttgtcagcgggttacactccaaaaaaattcacggcgataccgatattattttcccaggtttgctgatcagtactttcaccaatccgaacgatagttggcagattcgcaaaaaacagttggctgaatacctcaaagattttgatgagctttattttgaatctttggatgaaatgccttatctgctgggtaatttcgccatcatgagcaaaatttatcgtaaaagctttctgtttagcaataacattaactttccggaagaaataccgggtgaagattcagtatttttactgaatgtattcctaaatgctaaaggcattatttttattaataaaataatcttttcgtattatacttcacgtgacgacgaggataatgcgtcgttaacccatcagagtgatttgtcaagaaatctgggccgtctaaaagcatataagatgatgctgaaactgtccaaagatcatgataaactggacgagttcgtaaactatcttctttgtggcaagatgaattatttcctgaatcaatatgtgaataacaagaatctgtctaagaaggagatcagtataatcattaacgaaagttatgatctgtttacattgatcaataattcgaactgtaaatttgattctgattacaaaaaactggtggaacttatcatcgataaaaacgtggatgagctttacaaatactccgaaaatgacgtttttcacatcgtgaccaataatcatgaaacgaaatacattaaagacataaaagtcgccgttataatggacccctttacttacacgagctatagcaatgagttcgaagatattataattgaaccatccagctggctggaaacctttgaaaatgaaaaaccggatctgtttttctgtgagtccgcatattctggcgttaacaaaaaatctgtgatcaatggggtggccattgaagataatattactccctggcagggaaaaattgggctgaacctcattagcggcaacgataacaggaaaattctctttgacatcctcaattattgtaacaatcataacatcccgaccatcttctggaacaaagaagatccgacaagcttcgatatcaaacagtataactttatcgatacttcattacacttcgactatatttttacaaccgatgaagagacgattccgcgctacaacgcgcgcggacatgataatgtgtaccctctgttgtttgcctcacaaatcaagttgttcaacccgatcgagtataaaaagcgtacgaacgacattattttcgcgggcagctggtataatcaatttagtgaacgatcaaacgtgatgcgggaattttttaacaaaataattaacagtgattacaacttgaaaatctatgatcgtgcgagcgagattaattcgattaatcgcaagttcccgaaggaatactcgcgatacgttttccccaaagtccatttcgataaaatgccgagcgtatacaaagagagcaagatctccctgaatatcaacacggtaaccaattcttacaccatgttcgctcgccgtgtgttcgaacttatgtcatctaacacattggtgctgtcgaattacagcaaaggcattttcgacttatttaaagacaatgttatttatctggataaactcagttctctgaatctggacaaaattgatattgaaaacatttgcgaaaacaacctgtatgatgtgcttgaaaaccacacctattacaaccgctttaaatacattttaaacattatcggctttaaatttaaagaggaaaataacaatctgatcataatttatggtctgaataacaaaaacgaactggaaattattttaaacgacttcgaaagcattaagtacgttaacaaaacgtgcctgatctatgtaaaagacaataacctcttgaacagcctgaacgaacgctttatcgaagacgtcaaattcattggcatcaaagagctaatcatgatctccgaagagttcaaccagagctactttttcatcattcgggatctgtttcatccacttgaaaaagatttcatccgtcgggcgtttctgcattataactatctggacaagaacattggtgtcaaacagggaaaccctaagtataatttagcgaaaacgatcgaatataagaatattctcttcaatattgaactgctggataaagtcctggagggtttactgaaataccgcctgaacaagctgaccattcttaatatctaa

SEQ ID NO: 72760 - DNA, 438 bp, synthetic construct
  source 1..438: mol_type = other DNA
atggataaaaagtggatcgtattaacgatctttttggtcatttttggcttccttatcctcaacggtctgaacaacagtatccatgtgggcgattcctatttcagcctgccggaaggctatgtggaaggaaacatcgttaaatataatgacgtgaatatcactaatgggaccacctcactgcgcattatagaatacaatgataacaacattcaagagcacattgataaatatgtgaactatagcactaatcataattattcgaccaaaattaacaattttaacgttgacggtatgaatgtatacaagtctgaaatcatacagaacaacaaaaccttccactactggtttattaaaaaagataaggtttacgagattgtcacatgggatggtaatagttacacggacaatacggtctttaacctgattaaaagcaattaa

SEQ ID NO: 72761 - DNA, 867 bp, synthetic construct
  source 1..867: mol_type = other DNA
atgaaaaatttgattaagattaacgttgattttgaggaactggataattataagttcatcatggacgaaccgttttcgctggaagttaattacaaccacgtgaaatataatttcattatcaaatttagcagtaataacaataaccttatttgctgcgctccgggcgcgcaggatcgaaacaaacggacgagccagggggaactgattaaacctccgtattttgaccgctggtcatggtttaagtatttcgaggaaagcttcattgcgttctccgacccgattttttactatgataaagaaatcaccttaggttggtgtgtaggcgataagaaccagtggtacgctgaaaacatctccctgatcattcagaaactggcaaaaaaccaggaaatcattaacgagaatattctctttttcgcaagttcaggcggtggatttgtgtcgataatactggcgactttgatcaaaggtagcaaatgcgtcgtgaacaactctcaattctcgatctttaatttttatgaaacacacatcaatcgtcttttcaaatttttggaaaattccttccgcctgaataaatctgagatcacggataaaatcgattaccgtttagatttaatcaaactattcaaaaaagaaaattatatgccgtctattacctactacgtgaacgcctgtagcaagtatgatattaaatatcatgccatgccatttatcgaaaacgtcatgttcattcctcaatttaaagacaacctgaacgtacattattatcatgagtacaaagactttccccacaatccaatgagtaccgacaaaattctggttattctcaaaaattttattaagataaacctgtacaacaatttttaa

SEQ ID NO: 72762 - DNA, 534 bp, synthetic construct
  source 1..534: mol_type = other DNA
atgccgacttggcgcctccagttggaaagtgaggatcttttcctgaacagtaaatactatgaaaccttgaacaattttctgaataataaagaactgttggagttattaaataaaaacgactacaaactggtgttcaaaccgcacgcggaactaatggagtatctggatctgctgaacgttgataatgacgtctacatctctattaacgaatcgtatcaggatctgtttaacgaaagcgccatacttatcacggattattcaagcgtctttttcgatttcgcatacctcaaaaagccagttatttattaccaagataataacgactatcattacgatgaggggtattttgactatgaaaccatgggctttggtgaggtaatttccgacgaaaatctgctgatcgaaaaaattaagttctacctggaaaataattgccagatggaatataaatacaaatgtaacgtggaaaacttttttaaatttaatgataaaaagaactgcgagcgtgtgtataactggatcttaaataactaa

SEQ ID NO: 72763 - DNA, 1926 bp, synthetic construct
  source 1..1926: mol_type = other DNA
atgaaatataactttaaatttagcatcattattgccgtttataatgcggaaaaatacctgaatgaagcgatcgactcaatcatcgatcagtcgttcgactttgaaaaaaacacgcagctaattcttgttgatgatggtagctccgataattcactggaaatcgcgttgcagtaccaaaaagactttcccgataatattttagtattgtccaaagagaacggtggccaggctagtgcacgtaatctaggcctgaaatacgccactgggaaatatgtgaactttttagatagtgacgattacctgtcgaataacacgctggaggaagtctataacttctttgaaaatcactttgatgaaattgatatacttgcgataccgatgatcctgtttgaaagagtcaacaagcctcatcgtctgaactataaatttaacgaaaataaaattattgacctgatcgaagatccgaacaacccgttgttgtcctcatcttcgtcatttattaagtctgatgcaatccgtgattataaatttgacattaaccttgttaatctcgaggacgcgctggtcatcaacaaaatcttgctggacaaaaagaagtatgctattttaaatacatgcaaatactattatcgccagaggaacttacgcaatagcaccgttgacaccatcaattctaaaaaagagtattttaccgaccgtctgaaaagcttttattgcaatatcatcgactactgtttaagcaaagaaggcaacattcctaagttcatccaatacctcatggcttatgacctgcagtggttattgaaactgccgaatctggatgttctggaaaccgagattgaagtacaagaattttgggactgtctctactatgtgctgggtttcataagcacgaatgtggtctatggaaataaaaatattctgaatgatgttaagcccttcttcctgtatttgcttggagaagagaaatacatcagcctggacgacgatggctctgtgctactgaacgtgggcacccacaacgttgataaactgagtcgccataaaatttggctcgatataattgatataaaaaaggacatcctgaacatttctgggattttcctgactaactttccgaaccagaatatttcgatcaaagtgattaaagaaagcgaaaagcatgataaggaatatttctgccaatacaaaaaatataattcctttgaacgtaaaaaccggacctttctgggcttcgactggatcttcccatacaacttcgatgtaaaaattccgctggtgaaaaatgaaagctcgaagctgcgctttgttgtcaactatcaggatgatgagcacttattttcgttcgaatccagtctgggtctgaactacggtgtacgcctgtcggatttcagcgcatgtattagtaaaaaacattacatcgtgctttttaaatattctaaacttttcattctgccgtacaaatattcctcaatgttacgttatgagtttagtaatattaaaaaaacgattaaggataaaccaaatttcttcctcagctctatttttatccgcttagcctattacattctgtatcctctcttttccaataagaaaatttggattttcagcgatcgtccagatttcgccgatgataacgccaaacatcttttcaaatacgcaatcaaccaggatgatgatgtgaaaaaattttttgtcctcaataaggatagcaactcatttaacgatatgaaaaatgagaacaagaatgtaatcagtttttccagcctgaaacaccggttcctgtacttgtacgcggaaaaaattatctcaagttatgtgaatgaggacttcatcaatccgtttttcaactataacaaggacttgtttgacgggctgattacttcgcaacgagtgttttttacagcgtggagtaaccagcgctaa

SEQ ID NO: 72764 - DNA, 771 bp, synthetic construct
  source 1..771: mol_type = other DNA
atgagccttatcaaagaaaacgaaattttcctgttcgaagagattgttaaaaaaaattttgcttcaaaatataaaggttccgtactgggtatcttatggtcggtcctgaaaccgctgctcatcatgattttgttaactataatctttagcactctatttggcggcagtattaagaattatccggtttattttctgtctgcaaaatgtatttttgatttttttacggcgggcacgaacagtgctatgaatgcgatcaaagggaataagaacatcttgaaacgcactgcggcgccgaaacatgctttcgtcctgggtagcattatcgccgagttcatcaacttcttaatcacgcttgtgattttagtggcagtcatgattgtgaccaaagccccgtttaacattaatacaatccctttcaccatcttgccgattatctcactgctgatgatgattaccggcattgggttcattctgtccatcctttgcgtgtactataccgatatccagcacctctggagcgttgtaacactgatggccatgtatgcatctgcgatcttttacccgatggacattattccagaaccctaccaccagtacatgattctgaatcctattttttggattattgatcaatttcgtcatatgacgctctggcagagtatgccatcgaccttgaacctgataaactcgctggtcctgagcaccataatcctggtgattggaatcattgtatatatagtgtacgaaaagaaggttgccatgcggttctaa

SEQ ID NO: 72765 - DNA, 1110 bp, synthetic construct
  source 1..1110: mol_type = other DNA
atgaacaagcgtgacaaaatcaaaacaaacttaattaaaaagtataacatttccccagaagaatcggaaattctgctgaccaaaattgagaaacgcattgcgaaagaaaacgctcgtaaacgtgaaatcctctctaaaaacatgttcaatgaatcgaaagaggagtttaaccaaccggaacataaaatacgaaacattaatagcgagacgaacaaatataatgactttgaaaccatcactcaaaacattagctcaaaagagagtgaaaagctgaaaaaagaggaaaataataatgtggataccatcctatcaaatattattcccaattatgaccaggagattagcattgagctgaataatgtcgatttaatctttgaagtggagaccgataaaattgacaacataaaagaaaatatcatcagaaccttgaaacgtaacaagtcgaaaaaaacgaaatttcaggcactgaacaatatttccttcaagatcaacaaaggagaaaaagtgggcatcattggatacaatggcgcggggaaatctaccctgttgaacgttattactggcatttacccaatcaataatggtactgttacgacacatggcaagatcagcccgctgctttcattgggcgcgggttttgaccataactattcgggccgcaagaacatttatttaaacggagccgtgctgggttacagtaaaaaatttctggaagaaaaagaagaggaaataattgagttcagcgagctcggcgaatttattgatttccctattaaaaactattcatccggtatgctcgccaaactgggtttcagcatagcgaccattgttgaaccggatattctgatcatcgatgaaatcctgggggttggcgatgtgaacttccagcgcaaaagttctgataaaatcaagagcttaatggatggtggtacgacggtccttctggtgtctcactccatcccgcagatccgggaaatctgcgacaaagcaatttggatagacaaaggcaaagtacgcgaaatcggggaagtaaataaggtctgtgatcactaccttaaggatgctgaaaaagccagtaataaacagctggcaaacattaagtttcgctaa

SEQ ID NO: 72766 - DNA, 519 bp, synthetic construct
  source 1..519: mol_type = other DNA
atggtttttcgtcggtgcccgcagtgcggttcgactagtgatgatcaatatggtttctgcatcaaatgtgggtgggaatttgcaaaaattgacgccacaaagaatttatgtccactgtgcggccatgaaaacccgaatgaagccgatttctgtgtgaaatgtggtgcgcccctcgtctttaagaaccatccgaatgaagagcagcgcaatattaccccaatagtcatcaacaaagaggtggctggaaccccgattcaaaaaaacagcggcggctggattaaatggattataatcctggggtatatcttttccattctgggcggtcttttaggattgatcattgctgtatacctggttacgcgtaaagaagcgactgtgcgcaaacacggcatcatccagctagcgatctttgcgttctacatcgtactgattgccgcgctgtacgcaaccggtatgattccggcagacgccattacgaactatcagcagctgattgctggcaatatgaccttgccttaa

SEQ ID NO: 72767 - DNA, 2430 bp, synthetic construct
  source 1..2430: mol_type = other DNA
atggaaaaacttctcaaaaagtacaatacgaccccggatggcttaagcgaaagtgaagttcttaaacgtcacgaacgctacggtttaaacgagctggatgaaaaaaaaccaacaccaccgatcatcctgtttttatcccagtttgccgatattttgatcgctctgttgattattgcagccattgcgtcttttgcgattggtgacaccatcgatgcgggcgtgattctgctggccgtgcttctgaatgtaatcatcggcttcattcaggaatatcggtcaatacgcgcagtcaatagcctgaaagatttgatggtcaaaaaagccattgttaaacgtaacaatgaagtccttgaagttgatgctcggttcttgaccattggtgatattgtcattcttgaggagggcaacaaatcccctgccgatttaattctaattgaaagcaatgacatcaactgtgatgaatccttcctaacaggcgaatctgaagcggttatcaaagaagaaaaagacgctgtgtttatggattccaatattattagcggccacgggctgggaattgttaccgatatcggcatggatacggagatcgggaaaatcgcagaaattgttcatgaagaagatgagaagaccccgcttgcggtgaaagttggtaaactggggaaaatcctgtcggccattgcgattttggtttgtaccgtgattttcattctggaactgatccagggtgctggtattgtggaaacgtttatgactgcggtgtcactcgcggttgcagccattccagaaggtcttccggcagtgctgacactgacccttgcgctgggcatgtctgagatggcatcgtcagatgctctggtcaaaagactgctgtctgtcgaaaccctgggttcttgtaccatcatctgcagtgacaagacggggacattaactgataacaagatgagtgttgtggagtcgtatctgttaaacaaggacaaactattgctgatttcaaaactgtgcaacaacgcgatcattaaggataatgccctgatcggtaatcagactgacggcgcgattttacgttttgcgcagaactatgaaacttccctggagcgcattgatgagatcccgctggacagcaaccgtaaaatgatgaccaccatccataggttagacagtgagaataaaattgttttatcaaaaggtgccccagaaatcattctcaataactgcaaatatatcgataacaacggaagtatagaaatcctggatgaagaaatcaaggagacggtagtgaaacgtattgatgagatgagcgacgaagcgctgcgggtaatcgggtttgcctacaaaatcaatgatgatgagcgacctgaagagaatctcattttcacaggcctgctgggattaattgatccccccaagaagaatgccaaaaaagccgtgaaggaatgcattaatgcggggattaaagtacgcatgattaccggtgaccatgaaaaaacggcaagcgcgatagccaagcagcttggaatactgacggacggccgtgtcattaccggcaaagaattggaaaaaatcagtgatgaggaatatctggccattgcggatgacattcaggtgtatgcgcgcgtaaaaccggctcaaaaaatgcgcatcgtcgaagcgctgaaagatctgggaaacatcgtggcgatgacgggcgacggaattaacgatgcacctgctcttaaaaaagcatcaatcggtattgcgatgggcgatggtactgatgtttctaaagagtcctcggacatgattctgcaggacaatgatttttccacgattgtaaaagccatcaaagaagggcgtaaaatttacgacaacattaaacgattcgtcaaattccaagtatcaaccaacgtgggtgctattctcacaatagtcgggaccagcctcctcaatctgccgctgccattcaacccggcgcaattgttgtggttgaatatcgtgatggacggcccgccggcacaaacattaggtatggagggtgctgaaaaagataccatggcacgtccgcctgaaaccggcgacatcctgaccaaaaagacgctgacggaaatctttctgctggggctggtgatggctaccggcaccattctggtcttcagctgggagatatatagtggtgcacccactgagaaggccatgagcgtggcatttacgctgtttgtagtgtaccagctgtttaatgcctttaacggccgcagcaactcgactaagtcgagcaagtatttatatattggcctggcattgtcgttcatgctccaattgctcatcatatacataccgcagctacaaataatctttcgcacgactgccatcggcattgcggaatggacaatcatcattattgttgcaagcaccattatcgctgcgcagaaaatcatgaacaaagtgatcaaataa

SEQ ID NO: 72768 - DNA, 291 bp, synthetic construct
  source 1..291: mol_type = other DNA
atgctgctctatattaattttctgacccaagttcatttccagttcaacaacaatataaacgtacaagcagatattcaggaaggtaaatcagaaagtaaattggaagatggggaccttacctggatcttcacggatgaaaacactaagcaggtggagctgaactccaaaagcctaattctggcgtatcgcaaaggcgattacgagggctttaaagaatttctgaatgacgtctcgttaatcctggctgccttgcgttggtgcacgccgtttaatctgacatttttaggttaa

SEQ ID NO: 72769 - DNA, 933 bp, synthetic construct
  source 1..933: mol_type = other DNA
atgaacaatattgtcatctactttcttaaactattcatctgtcttataattatcgtggtgattatgcgcttatggagtaaaaaccaggaaaaaatattttttattaattcccgcaaagtggcctttccgtcgcagctgttctataaaacagacgatggccgctatttggcctattggccgaaagattaccgcggcagaaaatccacattacagagccgtaactcattgatcggcaaattcaccgaagaatgggtgtgcaagttatttggccgtctgatcgtggatgacgacctgtatctggttaaacaagcaataattccgagcctcgggattacctcccgttctccagtagacttggtgattagcacggctaatcgcaaaattctcaaggcaagtgaggtaaaagttattttcgaggtcaagatgtcgattgtctggaattggcaatacttcgacgattccaataatgtcgtggaaatcggcgattttcggactcatcagggcaagcccagtttcacgcgtagcgactctattctgaaagcgattggtaaatgtattggtatccgtgttagtagcttcgaaagctcaaagatcccgatcgttgtgattgggaacgctccactgtctaacggtttctgcaaaaaagcggatcacctgaaacgcgttggtgtaattcaaggtttttggtcgctgaacccgtttcctctcaaccatggaaatactcgaaaaaccaccccttatggaggttatatccggtttaacaatacgagcgaactgaaacgcaaccttgataacctgttctcgcaggatctgaactttttttcaggcatggaaaatccgaagaccctggggaaatacattgagatcgcgaataacgaaaataactacgaggataaaggcttaaaatttctgaagctgatccgtaggtattaa

SEQ ID NO: 72770 - DNA, 783 bp, synthetic construct
  source 1..783: mol_type = other DNA
atggaagacgatagctattttgagaacgaagaattttccccgataaaatccctgctggggcttttaaccttttcgacaattctgccaatcaatgtttacaccagcattgagtacatgactaaactgacgtggtgttggcccttcttgcacgtgttggtcggtattctggcggccgtttgtggctatgtatcgttcgaggtcctacacctgaatgcgttattcaccgccgtgattgtttatgcgtttctgatgttgatcacgggttataatcatttggatggcgtcatggacatggcggacggcgtgatggtgcatggcgatcctgaacgcaaaatcagcgtaatgaaagattcgtctgtaggcgcaggtggtgtggccaccctcttcctggttgccagtctgacgatcgcaggattatacaacattctggattactattttatacttgggatcatcgtatgcgaaatggccgctaaaacttctctgatcactaccgcactgctctcaaagccgctgattccgggcatcggaagttattttatcaaagaaacgacaatcgtgaattacctggttagcaccattcttgtcatttgcattgcgtttctgttgggcaacctcattggtgttgtgggtgtgctcggggcgattgtggggggtattatcatagcaacgatctcaaagcggaacttcattctggctaacggcgatgtccttggaatgagtaatgaaaccggccgtttatttgcgttactgtttatggccattgctctgtatttcatttaa

SEQ ID NO: 72771 - DNA, 999 bp, synthetic construct
  source 1..999: mol_type = other DNA
atggcaaaagaggatcgtagtgagataaacccattcactggccggaaacactacgataaaatcaatgatgataaattcctcaaggaatcctacaaggaatattattccatgattgatcaggtacaactcctggacaatacgcaaaatggtcagattgtcatcaatgttgcgctgaatttaatcaacgcagtcaacagttatctgtcggaaattggccgactggattatgttgaagattactacgattgggatgtgcatttggtgggagacaatgctgtgaacgcgttttgtatgcccgggggtaaaatcgtcatgttcagcggtattttgtcagtggcaaatactgaggaaaaaattgcgtttattctggggcatgaaatggcgcacgcccttctggatcatgcgcgcaccagaatcagcgctcagaatacgcaaaacgccatcacgtcggcggcctggattggtagcattgcgatggatttttttggtttaggtgaactgggcagtctaacccgtgccgccacaaatgtggccagcattgggtcccagtttctgttaatgaatagttggggccgcgaccaggagcttgaagctgaccgtctgggcatgatgattatccactgggcgggctatgacgtctctcgcatcccggcattttggcgcgatatgtcaatgcagaactcgaatgaacatgacttcttctccacccatcctgcagatagcaaacgcattgcgaccatgcagcagttgatcgtagaaatagcaaacgacaacgatttctattcaaaaccggtaatcggtgatgttaaccaaacgaatgtgaaaagcgtttcttcggaggggggtttttgttcaaactgcggaaacccggtggatattgacgctaaattttgcacatcttctggcaccaagctggacgttggccttcgttgtccgaactgcggcagcgccgttggcaacaatgacgtgttctgtattaactgcggatttaaactgtaa

SEQ ID NO: 72772 - DNA, 216 bp, synthetic construct
  source 1..216: mol_type = other DNA
atggtgaatccaattattgcggctattatcagctttttccttccgggtattggccagatcatccaaggcgccgacgttaaaaaaggcataatcatgtttgtcattgctatcattctgggttggttactggtaaacttcctggggagtctcggaaacattatatactgcatttatgcgttgtatgcagcgtacgatgcctataagatcgaagcataa

SEQ ID NO: 72773 - DNA, 846 bp, synthetic construct
  source 1..846: mol_type = other DNA
atgaatccatacatcgaaattttgcggcccggcaacgctctgatgggtgcgatctccatcattttggttgcgcttatcgataaaaccatcagcattccggtgattcttgcaatgattgctgtttttttcgaaacatcagcggggaacgtgattaatgattattttgactacaaaattgatctgatcaataaaccggaacgccccatacctagcggacgaattagtctgaagaacgggcgtaactacggttattcactgtttgcggctggcaccgtgtgcggtttcctgattagctatattacaaacaactggattccatttggaatcgtgttatttgccgacatcatcctgtacctgtatgcctataccctcaagacgacgcctctgattgggaatctcacggttggtttcatgacgggtttcggctttgtgtttggcggcttttccatcaataatccgaacattataatcacttcgctgtttttaggcttttttgcgtttgtaatgaccaccgcacgcgagattgtaaaagacattgaagatattgaaggagataaaaccgatggtgccaagactctgccgattctgattggtgagaaaaaaccggccatccttgccgctattctgatcataattgacagtgcgttgtgtccgttattgtattattaccatatcttcggcattttatatctcgtcgtgatagccttcgcagtcatgctgttcatttactcggcaatcctgatccttaaaagccagaaacgtgagattgcggcaaaagtttctaaaaatctgaagattggcatgctaatcgcgttcgtcgcctttatcttcggctctctgatctaa

SEQ ID NO: 72774 - DNA, 1578 bp, synthetic construct
  source 1..1578: mol_type = other DNA
atgtttaaagagtttaacatcaaccgcaaggacaaatattatttaattgctattctgatcttctccgccattctggtcggttattatattaattttaataacgcaattggcatttcgtgttcggatgtttatatttatcttattaactctctttattatactggagaaaaagtaaatattacgaactttatccatatatctccggtggtctgctttttgacgtctctgttttttcgtgtgggttttgtggataaattggctatttacgttgttactggtttttttgcgattatcggcaatattggtttttacctgctgctgaaaaaatttttcaacgaagaattgagcttgaccggtacaatactgtactcctcattcagcctttatttaatttggctggcaaacggcacactggacattccggcaaccggcgtgatcatctggatagcgctgtttaccatgattgcggttcgggaaaacccaaaatactaccaatacctaatcccgctcatggtcatcggtctttatacccgttacacggtaattctgacccttccagcatttttcctgttctatgttctcgaaaacgggttcaaaatcaaacccgaggactggaaatacatcaagcgtggcatcatcatcgccacgatcatagcaatcacggtcttcctcattgtgtttacgatgggcaacggcagattcgatgcggctagtcagatggcgaatggtgtgaaagggaccaatggcgagctcaccgatcctgcgtacaatccagatagctcgtattattttatgaattatatcaattacatctccaactctcatactgtgtttgaaattaaccctaccttatactccccgacaattctggcctatgcgatctatgcgttgctgtttattggggcagggttctggttatatgaccacaaaaaggtaaactttcgaaaaaccgatgcgatttcaattatcattatcctgatgggaattatcagttttacccgcgtgacctcggtgattacctccatcctgatttatattggtatttatctgctggcccgtgatcgcgaatataatgatggcgtattcatgctgggctggattctggccaacgccattttcctgagtttcaacatcgttaaggtcaaccgctacatcattccgacgttcccgccgtttatattcttcgtcttgacggccattgaaactattcatgcgcacgtcaaaattaacaagaacatgatacccctcgccctgatcgtactatttgttattcaggcttttgctttcacggcaacagtggaaccgacagataaatacatgagtcccgaggaaatttcaaattacattatcgatagcaatccggactatgaaaatatgaccattggtgtttacaacatccgcccatacagctggtgggtgggctcgaataccatcggaatcccgtcaagccaccaaagtgaaatcgagcagagcaatatcagctattacatcgtgaataagcctatggacaatttaactaacttcactgaaataaaaaatattaacgagttatatctgtacaaaaacaataatttttaa

SEQ ID NO: 72775 - DNA, 1575 bp, synthetic construct
  source 1..1575: mol_type = other DNA
atgttcaacgaatttaacattaataaaaaggataaaatttacctcatcgctattctgatattcagtgcaattctagtcggctattatattaactttaataacgccattggtatttcgtgctcggatgtgtatgtatatctcctgaatgccctttattataccggaacaaacgtacactcaattgacaacattttcttgtctccggtggtctgttttttgacttctctgttttttcgtgcgggttttgttgataaattggctatttatgtggttactggtttttttgcgattatcggcaatattggtttttaccttctgctgaaaaaattttttaacgaggaattgagcttgaccggtaccatcctgtactcctcattttcactttatctgatttggcttgcaaacggcacgttagacattcctgcgacaggcgtgatcatctggatagcgctgtttacgatgattgccgttcgagagaacccgaaatactaccagtacctcatcccgctgatggtgatcggactgtatacgcgttacaccgtaatcctgacccttccagcctttttcttattctatgttctcgagaacggcttcaaaatcaaaccagaggactggaagtacatcaaacgcggaatcatcatcgcaaccatcatagcgatcacggtgttcctgcgtgtgtatgggatggggaacgggcagttcgaagcaggcagtcagatcgcaaatggtgtgaaagggactaatggcgaactcacagatcccgcctacaatccagatatcagttattatttgacaaacttccccaacttcataagcaactcccatactatctttgaatctaatcctgtcctggaatacccgaccccgctgtcttttgcggtcttcgcgctgctgtttattggcatcggcttttggttatatgacaataaattaaaggctgaaaaacgggatgtgattcctgtgatcctgattctgattggcattatcagctttacgcgcgtcacctccgtggctacgaccttactgattctaattgctttttatttaattggtaaaaattcggaacacaaaaatgaattattcatgctgatctggattctggcaaatgccatcttctttagctatcacattattaaggtcaaccgctacattcttccaatcgttccgccgttcatatttttcatcttgctcgcaatcaacaccattcccgaacatatcaacattaacaagaatgtaattccgattgtcctgatcgcgctgttcgcgattcaggcgtttgccttcaccgcgaccgttgagccgacaaacaaatatctggccacggaagagatctcgaattatataattgattccaatccggactatgaaaatatgaccattggcgtttacaacatccgcccgtacagctggtggattggtccgaatacgattattctgcatgcggatgcccctggtgaaatagaccaaagcaatgttagctactacatctcacaaagccgtattgataacctgaaaaatttcactgaggtaaaaaatagtgggggtctgcatctgtatgaaaacaataacttttaa

SEQ ID NO: 72776 - DNA, 1545 bp, synthetic construct
  source 1..1545: mol_type = other DNA
atgaaagtggtgtgctgtaagaactgcggggcgaagtaccagctcgatgatgatgacgacatatcaaccttcgagtgttcttcttgtgccggggacttagaatacctggaaaactattcgaatggaaaagaatctaatcagtcattcgtgagtagcaccaaatataacgattcctacattgtacaatgccaggaatgtggactgaaatacaaaattaagtcgagtgacagcatccttgattacgagtgcgacagctgtggtggctctctgcggtatctggatgatgagatgaataaagaactggatagttaccttgaagagcgccacgcagagcttcaaaacattcgtaaggaatctaaaccgaaagaaccgacatcggaagaaatcaacaccgaagataacacaccctcaattaaatcgattacggataagctggaaaatttcttttccgaagagcatatgttgcagatcgcagacattgagaagaaagaagaggaagagattcaagaacaggtaatctcaaaaaccgcgcgcaccaccatcccacaatccgtgctgtcacgctttggtaaagagtttgctacgccgaagactgaagattatgacatcctaaaaaatttcctgaagaccgaatttttcaagggcatggatgaatactatcccaaagataataaactcaagtcgaacaaaagtttcctggataaaattagcctgaaagaacctgataacggtgaatcaaaacctgtcaaaagtagcattatcaataacaacagcaaatttaaccttgaaaattttaatgtggaaaacatcgaaagtaacaatacaatcatcatcataggtgtagtgatttttattctgagcatcattgaagttctgacgatcaatagtggtataggcattattgcgttatttattggcgtcattattttatgttatggaatttataaaactcgtgatgtcaaacaggacgaagaacgcacacgcatcatcagagagcacttgttaagcctgccagaagagttttatgtattctacaatgttaagatcccaacgtccacttcgggcattaatcatgttgtggtcggtccgacgggcatttatgccctacttagccaaaaatataatccgaaactgcgtttggaatccgaaaacgagaacctcaacttaattggcagcagtgagtctgaagaaaataaactggaggaattttccagctatgggaatatgcgtaaatttcgatacacgaccaaacaggccaaattctcacaggataacaaagttaaacagaaagcattgagcctgggtgaagatctgataaacttcctcaatgagaacaacattaaaaactgctttgttgaaccgctggttggcttcatcaacaatgaggtcgtggtgatcaatatgccgttgactgatgaggatttatttattgaagaactgctgaataaaatccagaatacgaccattaaattggacagcgaaaccatcgacaaatgcgctgttctgattaacaagtattctgcggactgctcctcggaattttaa

SEQ ID NO: 72777 - DNA, 939 bp, synthetic construct
  source 1..939: mol_type = other DNA
atgtttaaatttgataaagaacaggaagtgtttgactttgcgggcgtcaagatgggtggccaaccgggcgaatatccaacggtgttagcaggcaccatcttctatggggggcataacatcctgaatgatgaactgaccggtgacttcgataaggataaagcggaaacactggttaacgatatggcctccatttctgatgtgacgggaaacccatatatcgtacaggttttcggacagacggttgaagcccttcccaaatacatcgaatatattggtgaaatttgtgatgcgcctttccttatagattcgactagcggcgatgcacgcgtggctggtgcacagtacgcggacgaagttggcctgaccgagcgtgcaatttataattcgatcaatatggcagccgacaaaagtgaattagatgcgctggcgtcaactgacatttctgcgagtattatcctgggctttaacccaatgaatgctaccgtggaagggaaaatgaacatgtgggagaatggcgacgatggtgcttacgaaaaaggtttgctcgaagtagccgctgattgtgggatagacaaatttatgatggatactgcggtcacgccgctgggccaaggggccggtattgcggcgcggacgtcctttgcggagaaagctaaatggggctatccggtgggttcaggtatccacaacgttcccagcgcctgggactggctgcgcgactacaaaaaggagggtaataaaaccgcattcacagtttgcgatattggtgcgaacattgtgcaagtcatgtgcggcggcgactttgtgctctttggaccgattgaaaatgccaaaatcgccttcccggcagtcgcacagaccgatatgttcattagcgaggctgccaagccgctgggaaccgagcctgtagattaccatccgatgaacaaattgctataa

SEQ ID NO: 72778 - DNA, 1704 bp, synthetic construct
  source 1..1704: mol_type = other DNA
ttgcaggagcaggatgttggcaccgattggcgcaatgattttaaaaacttgacgccatcggagttctttaggaaaaacaagcaaatgctggggtttactggtaagattcgttcgctgaccattgtgttccacgagttgattaccaacagcttcgacgcggcggaagaggcgggcattctgccggaaatcgatatcgaactgaaacgcgtggaaaaagagcattatatactcaaactcaaagacaatggtccgggcattccggaggattatgtgatgcgcgtgtattgcagcatgtttgccggatcgaaattcagaaacatacaatctcgtgggcagcaaggattaggttgtagtggttgcgtgctgctttcacagatgaccacgggtaagcctgctcgtgtcatttcctgttataaagaaaatggcgacatcaaaggcgtgaaaatgaaattccagatggatgtcaaaaacaatcgtgggattctgatggaacgagaggattatcctgccgaaagcacgggagtctgcatcgaactgcagtttaaagaggtgagctactcgctagcagaacaaggtgcctttgaatacatccgcagaaccatgattggtaacccacatgcgaagattacctttcgcgatccttctgggcacaagtacatattcaaacgcgcggcggacattgttccaatcctgccaaaagaagtattaccgcatccaaagggtgtcagcgcggacgacctgatgacaatggcacagaataccgacagtcgtcgctataaaagcatgttaacatcatccctgtcacgcatgtccaataaacgggtggatgaaatttctgaactgacgggaatcgacatgaacaaacgtccgaaggacctgaccttcccggaggcggaaactattgtccattgctttaagaaaatgaaattcatggccccgccgacggatggcctgatcccgattggatcagagcagatcgagaaaggtatgaaacagattctgaaacctgaatttgtgaccacaatcacccggaaaccggtaacataccagggcggtgtgtccttcataattgaagcaggcctggcatatggcggggacagtggccgcgtcgtaaaagaacagcgtaaatctgaaattatgcgttttgccaaccgcgttcccttgacgtttgatgcgggcagctgtgctattacggaagctcttaaaagtattgattggaaacgttacggcctgaaagacctggataatactccgttgaccctgtttgtaaatatcatttcaacacaagtaccgtatctttcgactggtaaacagagtgtctctcccgaacctgaaatcgttcacgaaatccgacaatccactatgaagctagcccgtaaactgcaaaaacatctccgcgctaaaaaagcagctaaagaaaaagagaagcgtagcaaagtatttgaggattacatgccggtgatcattgaggaagcggccaagctgggcgaaaccggggttcccgaatatcaggaagtgttagcaaaagtgacgaagcgggcccttgccgaactcctgggtgaaaaagttgaagaagaggaggaggaagaagaacttgacgcaatcatcatggaagaagttgatgaacgcggctacgcggttgatggcaacagtaccttagatagcttcgaggaggatgatgttgatgacgaatttgaagattaa

SEQ ID NO: 72779 - DNA, 1869 bp, synthetic construct
  source 1..1869: mol_type = other DNA
atgaacctgaaatttaaaaatgaggaaaagcttgagatcatttttattattgtctcgagcatcagtttggtgttaggctttctgctgtctattgactatctttcttggatttccattatcatttgcgggattccgatcttcaaggaatgtattgaaggcctgatcacggaatttgatattaaagcggatctgctcgtgagcattgccatcattgcctccattattatcggtgaaatctttgctgccggggaaattgccacgatcatggcaattgggggctttctggaagaatataccgtagcgaaagcccagaatcagatcaaagaactcgcgaaaatgactcccaaaacagcgacacgtatcaaaaacggcaccgaggaaaaggtgccgattgaagaagttaaaattggcgatattctgaaaatcctgcccggtgaaagcataccaaatgatggcattatcatcaacggtgaaaccagcattaatcaggctactcttaccggcgaatccattccggtagataaaacccgcaatgacgaggtctatagtggcacgattaacctgtacggcagctttaccatgaaaaccacgaagatcagcgaagatagttcccttcagaaattgattaaactggttgaatcatcgaaaccagaaaacgccaatattgttcgcgcagcggataaatgggcaaccatgattgttgtaatagcgttcacggccgcgatactgacttatctgttcaccttcgaaatcacgcgttcagtgacgatcctcgtagtcttctgtccgtgcgcgctggtgctggcaactccgaccgcactaatggcagccgtcagtaacttgactaagtatggtatcctggtcaagaacggagaatctctggaggaactggcccatattgacgaagtaatttttgataaaaccggcacactgacgtacggcaacccaacggttatcagagttatctccgagaatccgcaagagatgatgtatctggccgcatcgctggaatcgaaatctgagcaccctctcgcgaaagctattgtgaaatattataataacaacgatctggccgctgttaatgaatttaagatacatatcggtaaaggaattactgggtacatcaatggtgtgcagatcatcgcgggcaataaaaaattcttagagtctaaaaatatcccgcttggttccaacgaaaacagcagtaatggtgaaattgagatttttgtggcgaaaggtaataagataatcggaaaaattttccttgcggacaccatacgcagtaatgctaaagcgacaattaaaaatctaaagaagctgcgaattaagacaacattgctgaccggagataatgaaaacacggcaaaaagcattgcgaatcaagtgcgtatccataacattaaatttaactgcctgcctgaagataaaatccaatacattaaagacgagcaaatacggaaccatcgcgttgcaatgattggtgacgggataaacgatgctccgtcactgcgtaaatccaatgttggcatctcaatgggtaatattggcagcgacctgtcgattgagtcgagcaacatcactttaatcaaagacaacatcgagaacattcctcacttaattgaggtgtcgaaaaaaaccatcaagacgatcaacataagcatcggatttgccttaaccctgaatatcattgcgatggccctcgcgattttaggtattttgaacccgattgaaggggcattaatccacaacatcggctcagtgattgtcattatttactcttcaatcttggtgaactacaaaagtagcaaaatcgattatcgcacccagcagttcgatgtcaacaaagctttgaatatcaccatgttctaa

SEQ ID NO: 72780 - DNA, 1068 bp, synthetic construct
  source 1..1068: mol_type = other DNA
atgagtttccgcacgcgccgaatcttaatcatgactccgttttatatgatttttcagttctttctgctcaaatacctgttactgctgttcggtgggcttgatgatggctatctaattattattgccataatcgtggggctgctgcattgcatgccaatgttttttgagagcaaaaaatcaacggtggccgggcgtttcctgacaaccattggaggtgtctggatgtggatgtcgctcatgtttctgtttgatctcatgttcatttacttaatcaagatgtttgtaatactgccttttgagatcatcgtggatttggtgctgatcgtgccgttcctaggcatctataacttctataagtcccataaactggttattaatgagaaaatcttggaactgaataacctgagccgtgatattaatattgttcacctctcggatgttcactttggctcggtacgtcataaaaaaatcatcaacctgttggtcaataagctgaaagaacttgaagacacctgtgagcttgctattatttctggtgatctggccgacggtagctccgcggtcggcacggatgacttcttggcatttaaagacgttgacatgccaataattttcacccctggaaatcacgatttctacccggggattgataacgttatcaacgcgtgtaaaaacgcgggtattattgttctggataacgaaaaaaaggaatttggtgacttaagtatttttggtctgaccttcagctttgaagaccgctgcgtgccgaaaattgatgaaagctggatcaatccgaatcttatcaatattatcaactaccacgtgccgtactattgggacgaattttctaagttaggctttgatatccagctttccggccatacacatggcggacaattctatcccgctatttggtttgcaaatatactgttcaaatataacaagggcctgtttaaaaacaacctgggcaaatacttgcatgtgaccaccggtgtaggttcaatggatacgcccatgcggtggggcactgacagtgaaattgtcattttaaaattgaaaaaagcgtaa

SEQ ID NO: 72781 - DNA, 1125 bp, synthetic construct
  source 1..1125: mol_type = other DNA
ttgaaaaatgataacaaaaaggcagaaattaagaccacgaatcagaaacagaaattgaaaaaagcggaaagtaaggaatgcgctgagtgtgtcattctgaaacctgtgggctacccatttgaatttaatttaatggacgaacatattgaaattaccaacaaaaagttgtttgaggaatacgcgcgtgagcagtggttaggcttagtagtaaaagaaaactcacatctctttgatcagaagataattcctgattatggttttgaagtcatcaaagcaaagccgaataactcaatcatctctgagacgactcgtatccaactaattaccagcgatttagaaaataaaaatgacaaacttacattcaaaagcaacatatcgatttcggatatcgtgggccaaacgaacgcgaaaaataaagttaaagtgatcatgaaatatctggagcacccgggaaagtttggcccctgggcacccaaaaacatactgttctacggacttccggggaccggtaaaaccatgctcgtgaaggcgctggcgaacgaactggaagttccgttgtatctcattaaagccacaagcctgattggcgatcacgttggtgatggtgcctctaaaatccatgatctgttcaaaaaagcttcggaaaattccccgtccatcattttcatcgatgaaatggacgccgtggcgctgcatcgcagcttccagtccctgcgtggggatgttagcgaaattgtcaactcgtttttaacggaaatggatggcataagtgagaacgagcatgtaatcaccattggtgccactaatagcccgaacagtctggattatgcgattcgcagccgctttgaagaggaaattgagttcaaacttccggacgacgaagaacgactgaccattctgaaaaacaacctgaagagcatgccactggactatgaactggacttggagaaaattgtgaaacttactaaggggctgtctggtcgggacatcaaggaaaaaatcctgaaaacagccctgcacaatgcaatcgctaatgattccgactcaatcacgatgaaaaacattgattactcaatcgaatctagtaaaattaaaaataaagatattaaaggcatgtttgagtaa

SEQ ID NO: 72782 - DNA, 1602 bp, synthetic construct
  source 1..1602: mol_type = other DNA
atggactttataacccttaaaaacattaccaaaacgtttgatggggtggatgttcttaaaaatataaatttgaaaattaacgagggggaaaccctcggtattctgggccgtagcggcagtggcaagtctgtgttaattaacatgctgcgaggtacatccgactataagccggatgccggtcagatactggttaatgtcgccgtttgccctgactgcctagccgtcgactcaccatctcatgtgggcgagaaatgtagctgtggtgcgactctggaagcgaaagaagtggatttcttcaattcggagagaaaactgttcgcaagtattaaacgccgcatttccatcatgctgcagcgtaacttcgccttatatgatgaagaaaccgtgattgaaaatgtaatgagggcaatgcccgagggcaaggactatgatgagaaaatctacgaagcactggaactgttagaaatggttcaaatgaatcatcggatcacccacatcgctcgtgatctgagcggcggggaaaaacaacgcgtcgtgcttgcccgccaactggctaagtcgccaatgatgtttctggcggacgaaccgacaggaacgctcgacccgcaaactgccattaaacttcacaacaccttgaaagagggcgttaaagataaaggaatcaccatgttaatcacttctcactggccagaggtaatgattgaactggcagacagcgtaatctggctggaagaggggcagatcaaagaggagggcgaaccggagaaagtggtaaacgaatttgtcgcgacaatcccaatcccggaaaagccggaaattccggaatttggcgaacccgaagtggtgctggaagatgttaagaagcattattactcgattgaacgtggggttgttaaagcagtagacggtgtgtcactcaacatcaataaagaagaaattttcggtattgtgggcctgagcggttcgggcaaaaccacgaccacccgcatgctgatgggactcaccgagccaagcagtggcaacattcagattaaacttggcgatgaatggattgacatgacgaaagtgggacctctgaaccgggggcgtatcatgccttatattggtctgctgcatcaggagtactctctgtatccgcaccgaacagtgctgggtaacttgaccgatgctatcagtttaaatctgccggccgaatttggtaaaatcaaagcgattcatgccttgacgacggtaggctttgcagacgatgtcgcggcaagcattcttgataaatacccggatcagttgtccgtgggcgaaaagcatcgcgttgcgctggctcaggtcctcatcaaagaaccgaatttaattgttctggatgaaccgacaggtactatggaccccatcacgcgtgtcattgtctcagattcaattctaaaggcgcgtacggagttagaacagaccttcatcatcatctcccacgatatggattttgtgctcgatgtctgcgatcgcgctgcgctgatgcgcggaggtaaactgttggatattggtacgcctgaagaaatagttgataaattgactgcggatgaaaaagaggacatgctgaaagagaaccgttaa

SEQ ID NO: 72783 - DNA, 627 bp, synthetic construct
  source 1..627: mol_type = other DNA
atgtataccggtcgtatcctgtccaccggcatgaactgcgaaggtaaaccgtttatagcataccgcgtatcaagccgaagcttcccgaaccgccaatgtctcaaatttgagaatcgtgcagctatcgtgccaaaagagggcttcgaaaaagacattttcgaaaacccttatattacctacaactgcattcgtattgtggatgatgttgccatcgtatcgaacggatctcagacggatgtgatatcagataaaatttcgttgggcatgaatctgcgggacgcgatggcgtatagcctgcttaccatggattatgaaaaagatagttataatactccgcgcattgccgcggtcgtgacagccagtacggacgaagatggctacggatgctacattgggatcgtgaacgacaataaaatcttagtggagcaggttccccatggtaaagcggcattcatctccacctatggcagccaggttccagatacagttgatttcgacgcgaagactgctaatgaatgtgccaagtttatctttgatgaaggtgcttttgccgattacgagaagccggtcacgtctagtgcggcgatttttgacggggaatgggcaattgacgtctataatccgtaa

SEQ ID NO: 72784 - DNA, 411 bp, synthetic construct
  source 1..411: mol_type = other DNA
atggccattgatgtggggaagcacaaaaagaaaatttcggacagcaaacccagcatcaacttggttccgttcatcgatattctgttcaccataatgatttttttagtagtcaccagcaacttttccgctgacgtgcagacggatgattcggatgtgactgatggtggcagtggcaaaccgaatgtgacctctgtttccggtgattctgagtactatgtcatgccggtcgccaatctgcataaagtgacggttaatggcgtggacaagtcagacacgattctgaacagtgcggtcggtgttcaagcaaacgtaatcgacaatgggaaaatcaccatcaaaccaggcgaaattgatattacaactcctgatggagtttcaccggacaaagcggtacagcgcccacagctttaa

SEQ ID NO: 72785 - DNA, 840 bp, synthetic construct
  source 1..840: mol_type = other DNA
atgattattgagagcatcatgccgtttgttgatgggatagtggacatttttacccaagggggcttcattacatacataattctgttcattggcatatatggtctgattatcggcttacgtaagatcgcatatcttcgcaaaatttccaaagtggacaccaccgaaatctttggcgttgtaactgcatccatggaacgtggaggggcggtagaggcgctgaaacagatcaatggatttaaaaatcccatctcgcgaattatttctgaaaccttaaagattggttataaaaataagacggaggtcgaagaaagtatggagcaaatcttcatcgtggaggttggaaaaatgacgaaaggcctgagcaccattaaaacccttacggaactagccccgtttctgggcttaatcggcactgtgatcggtatctggttgactttcaaatcactgggtgtccacccggatagtgcggcaatggccgaaggtatttacgtggccttgacgaccacaatcatgggtctgctggtcgcgattgttctgctgcctatccatacgtatatccagggcctcatcgaagtggagatggataaaattgaactggctacgaaaatgaccaattggggctatgctgtagttaaggtacgggtcgactcaaacgttgagtgtgctcttgaagcactgcaggaagcggaaggtgtcgtgaacacacgcctcatttctgatccatacgccaatatcaaggtgtcgtttaaaccgagcatgttggataaaagcatttcgaacattatactggaaaaatgcaacgtgaacgcggaaattaccgaaagtaaactcaaacagtaa

SEQ ID NO: 72786 - DNA, 696 bp, synthetic construct
  source 1..696: mol_type = other DNA
atgaaaattgaaaacacaaacatgaaacgttttattgccctgtcagatatcatttcgctgttgaacatgacgtctggttttctgtccatcatctttagctttaatcatgagtttaatatcgctgcaatccttcttattattgcgatcatgttcgacagcgcggatggttgggtcgcgcgtaaaatcaaccgccaggacgaactgggttttgggaagaatattgattcgctgtctgatatcgtcagcttcggggtggccccagcaatctttctttacagttgcattaacaccaccccgggcatttttcaaatcatagttacgattgtgtgtctgctgattgtggtgtgtggcgttttacggttaacccgctataatgtaattgctggcaagatcaacactaatgatttcattggctttccgattccgggaatgagcctgatgattggttcattctatctatccggaatcttcaacccccacattgccattttgttgagtatcatagttagcctgctgatgataagtaatatcaaatatcctaaattcgataacatggcgctgattggcatatcctgcatcttaatcatcatattgattctgccaattgacatgattctctttaacattaatattccggcaattctgctgctcttcttctgcttatactacctcatcatcaatctgattaaaaaataa

SEQ ID NO: 72787 - DNA, 1170 bp, synthetic construct
  source 1..1170: mol_type = other DNA
atgaacgataaaaaaccacgtgatccgttgtatccgaaaggttttgaagagacgcgcaaactgaagaatcagctcacgaaagaatacagcaaaccaaataaaaaagaagatgagctcactccgctgaagaaactcaaccataaactgggcgtctacctgagccctaactctgttgagatatcgaatgacgaaaaaaagaagaaaataggcattatcatcactacccttatcttaattactttgatttcctcagcgtactatttcttaatctatgaacctgctcaagaagaattaaccctggcaaaaacgacgaaactaaatgaattgcacgagatctacaatggtccgctgaccacctcccagaacagtattctgctggaaaaccagattaatgacggaaaaactccggaagaaattgagcgtatcaacatcctgacaccggcgacgaaagactggcagtcatttcacaagaaatcgatttacacaaataaagataaatataatcgtactatggcaatttatagcaacgagagtaaaaacattattcttagcacaacaaaggccataaagattgtaaatgagaataacgccgaagttttatctaaaattaaattcgaagaaccgaacacggtctcagttcccattctgatctcgcggctgcaggcaggcgctggccttgtaaacgttggaagcgtggtggacatttacacaaacaacaacaatacgaatgagaattatactccaaacaacaccagcccgaatattagtgggtgcaccgtgttagccatcatgcgctatgaggacaacggcgagattgattccaaatattctaaatcaaacacgataatcaaggggaaccataccaatccgaaagagaacacgaaagaattttcctctgatgtgctggaattgattaagggttcgatcattaacggttatgacgaagaaaaaaccattgaaattctgaaaaattatggcatcaaactgagcaattacgaacgccaaattaatttgggtgatctgaacgcgcagtatatgcttctgattgaaaccccacaggataaagtggaatacgtgatcaacaacatggaaaatatcatcctgaccatccccaccaccaaggcgcctaattggatggtcaatgaaatcagtagcacctaccaagattaa

SEQ ID NO: 72788 - DNA, 720 bp, synthetic construct
  source 1..720: mol_type = other DNA
atgaataaaccgacgattagcactatcgtcattattatttgcattctgattattggcctgtacgcaatgggagaagtgaactactttagttctaagatagcggtggagcgtaacattgactcaccaaccattctgatcccgagcattggtgtgaacgaaaaaatcaataacgtctccttaaaccagggcgtcctgagtgatcctggtgagaacatccccacgaaggattatgtagcactgtatgggcatcgcacccttcagggtagcccgtttttccgcttaaacgagctttcaattggagattccatcctcctggagtggccaggtgttggcgaactcaactacaccatcacaaataccaccattgtgccggggacggctgatgtacccatcggtggcaacgatagtttgttcctaatcacatgtgacccgattgggtcgactgccaatcgtataatcattgaaggtacgctggaaaaacagaaccctattaataacgaaattattaaagaaaatccgcaagaaagcaatgccattatcattaccgcgattttctttatcgttggctgtatctttagctatttctatccaaaagacaatcggatatatatcttggctgttattctgataatttcggcgctgttattttattcctgcatcaatccgatcccgtctgaaatcatttacgaaaaaatcatctttttgaatggcggcctgtaa

SEQ ID NO: 72789 - DNA, 228 bp, synthetic construct
  source 1..228: mol_type = other DNA
atgaacgtgaaaggtaagatctacctggattacaacaacaaagaatcggcggaattaatcttcaattctttggagatagataataaaaattatctgaaatcaaaactgaaagaagacaaaatcatttatgagattaacagtgaaaccctgggcagctttctggcaactgcggacgatcttattgcctccgagattgttattgaaaagatcctcgatgctacgcagtaa

SEQ ID NO: 72790 - DNA, 1137 bp, synthetic construct
  source 1..1137: mol_type = other DNA
atggaatgttattatcatccggaaaaagaaagcaccgccaactgcgcaatctgtggcaagtctgtttgtggagaatgcagtctggagattgcgggtaaagtctactgcaaagaatgcctggagaagattgtgggtcttggtatccagaataatattccggaagaaaataagtctgatgaacaaaacccaatcgttacagaatcacctgaagtgaatgcgcagagtgtagacgataatatctaccagccacaggaggagacggattttgagattccctatacgcctcaggaggaagtgccgtccaaggaatttaaaggcatctcggatgattcgccgtacaacatcaaagagaacatcgaatatacgggcggtcttgagagctcgtacaccatcgattccgatatttatcaaaaacctcaggtcgaacagcaaccacaggttgctcagaacgaactagacatcaagcagccgacattgaatagcatgaacaaggatgatttcatttatcctgaccatgattatgaaccaccgaccacgagtgcccggcaagaattagaagataagtatgaaaaatatctggacgatttgtacttcgatgaaaatgaggtgccattgggcgagcaactggcaaaagatgaggcccagtacggatcactgactcgtaaagaatatgcttctaaaccgaaaaacattgtggaaccgcaaattccgactcagaaagacgaaccgataattgaaacccccgaagaaatggaagcccgtattagagcggaaattctgaaagagcagggcctcatgaccgatacccagagcattgattcgacgcttaaagaggagctggaatcctccaaagggaaaaaactctttgggttacgccgcaacaaaaacaacgaagaggaactgataactgcgagcgaagacaaaaacatccacaatctgaattataaagacgagaaagaaccgatgggtgttgtcgacatactgctcaccatcattttagttattgtcatcttgattgtaatctactacatcgtgtacttattcctgctgagctcaacgtatcccacctttatggacgcagtatttgcgattcgcaatccgcagaacgtgattaatagtattctgacacaactgtaa

SEQ ID NO: 72791 - DNA, 1236 bp, synthetic construct
  source 1..1236: mol_type = other DNA
atgattgtatttaatgatgatggctgtattaaatgcggggcctgtcaaggtacgtgcccgaccagcgcgatcgaagtaacacctaatgcgatcgtacattgcgacacgtgtggcgaagagccgaaatgtgctgacgtgtgtccgaatggggcactgaaagtcgaagaatatgagattgcggagggtatttcccaggcacgcttggtgtttaactcgattctatgtgaccagtgcgggaagtgtgaggaagtttgcccccaggagactattaaagtcacggggacaaaactgaaagaagttgaaggcttttgtgtgatgtgccaaaagtgtgttgacatttgtccagtggatgtaatcggcgttcctggtgttaaagaaccggccgaatatgacttagatctcaaaggaaaaggtccagtgtacatcaaagattgcgtgggatgcggaacctgtgtcgatccctgcccggtgggcgcgatcacacttgatgaagtgggctcacccgtgacggtcaatgatgattgcatccgctgtggcttatgctcccagacttgcccgtggaacgcaatattcattgcggagaaaaaaccgatcaaacgtacaaaagaaataaaatcatttactttcgatagcgcgaagtgcattggctgcaatacctgtgtcgaagcctgtcctggtgatttcatagctgcgaacagctcgagtctgactgttgcgattcctagtgtgtgcgccgcctgtagtctgtgcgtcaacctgtgtccagttaatgccctcgagatcgacgtggaatggggtgaaggttcaccggtggacgcggaaggcattggccgagatgtcgaaaaatgtgactttatcggagcctgcgctaacaaatgccctaccgaggcaattcgtgtcgttaccaaaacgggcatgtcctgcccggcgctggtagagacggatgctgaaccaagcttcaccagctgcatccggtgtggggcgtgcgcttctgtgtgctctaacgatgcactgaaggttgaacagtacgaagtaaccattaatggtgaagctgtggcgcgcgatcgtattgcattcaacccgtcgaagtgcaaccaatgcggtgactgtatcgaagcatgcccgtatgacatgatccacaaaaccgagaatccgaaactgccaattgcaggcttttgtaccttgtgcggtcagtgtctggaggcctgtccggaagatgccctttgctacaagtaa

SEQ ID NO: 72792 - DNA, 933 bp, synthetic construct
  source 1..933: mol_type = other DNA
atgtttcgatttgataaagagcaactcgtggtggatgtggcgggcatgaagatggggggtcagccgggtgaatatccgactgtgttagccggcaccatcttctatggtggacacaatatcattagtgatgaaaaagcgggggtctttgataaggatgcagctgaagaacgcattaaaacaatggaagaaatgtcggatgtgacgggaaacccgtgcgttgtacaaacttttggtgcgaccgcagaggctatggtaaaatatttggaatttgtcggagacgtctgcgacaaacctttcctgatagactcaaccgccgcggcagcgaaaattgccggcgtggaatacgtacaggaggtcggcttgacggaacgtgctgtttataacagcctgagtatggctgcggaaccggcagagatagaagcagttaaaaactccgacatcgatgcctccattcttctgggttttaacccgatgaatccgggtgttgctggtaagattgaaatctgggaaaccggtggcgatgttatcgacaaaggtattctagaaatggcggaggaatgtggcattacaaaaccattcatggatgtggcagtcacccctttaggccagggggcgggcccggcggtacgtacgtcttttgccgtgaaaagcaaatgggggtaccccgtcggaagcggcatccataatgttccatcggcctgggattggctgcgcggctacaagaaagaacataaggaggcatggcctgtttgcgatatcggttctaatatcgtgcagcagatggcgggcggcgacttcgtactgtttggtccgatcgaaaatgcccggcttgcattcccggcgtgtggcatggccgatattatgattgccgaagctgcgaaagatattgggacggagccagtggaggaccaccccattaacaaactgctgtaa

SEQ ID NO: 72793 - DNA, 240 bp, synthetic construct
  source 1..240: mol_type = other DNA
atgagtgaggaaaattcaataccgcaagtcatggtttcctctgacgaatttaacgatgttgtggctaaacttgacgcagcggaggaaaaagtagatttcactgtgggagaatattatcagcgtctgggccagcagacggggcgcgatgtgggcatcctgtacggtattatcctgggcctcatgattctgatcgtagcgattaagtttggtgtcgcctcgatgttgagcaccctgttataa

SEQ ID NO: 72794 - DNA, 207 bp, synthetic construct
  source 1..207: mol_type = other DNA
atggtgcagatctcgaataaaccaaacataggtggaatgaagactgcagcggatgacgctgaatatagtagcaaactgctcgctcgtgaggggaaattgttcgcgggtttactggcaacccgctttaaaggctttgcgattggcatctgcatcgccacgcttctgatcgttattattccgttcattgccaaagccgcgggcctgtaa

SEQ ID NO: 72795 - DNA, 717 bp, synthetic construct
  source 1..717: mol_type = other DNA
atggcggataaaaaagccccggccgatggctggccggtgattagtggggactacatagtgggcgatcctgaaagcccggttgccgtaacaacccttgcgtcgcatattgaggccgaactttctggagcagcgattgcaggtccatgcaaaaccgaaaacttaggaattgaaaaagtggttgcaaacatcattagtaacccgaacatccgttttctgattttagcgggtgcggaagtacagggtcacatcaccgggcaaagctttaaagcactgcatgaaaatggcgcggacccggacaaaaagaaaattgtgggcgccacgggcgccattcccttcgttgagaatgtcccactggaaggtgtggaacgtttccaacagcagctggaaatcgtcgatctgatcgacactgaagatataggcgcaattcaatcaaaaatcaatgaatgtgtcgagaaagatcctggtgcgtttgaagaggaagctatggttatttccgtagaaggcgacgacgcggatgaggaagagggcgaggccattcgggtggtgagcgcggagactgggctcatcgaagcacgcattagggatattaacacgaagatcgatatggtcggcgctgttcagcgcaatatggctggtaattatgctggtaaggtgcagggtatcatgatcggactggcgtttaccctgatcattggggttttgttcttgctattttaa

SEQ ID NO: 72796 - DNA, 330 bp, synthetic construct
  source 1..330: mol_type = other DNA
atggcgcagatgttgccgatggtacaagttgtcccggaaatgaatttcgcatatgaccccgtcagcggcgtgatcggcagcagtctgggtagcggagtggttctcctgtctatggatgaggtgaacgaacaggtagccaaagtcgagttggctgccgatgaactgatggcttcgctagatccatacaccagtcctgtggggtcgtatccgggccgcgaaggttcctatgttactgcgggcttacttacgaacattgtttacggtttcctgttagcgtcatttattatttttgcggcactgccgatcctgcaggccatgggggtgctgtaa

SEQ ID NO: 72797 - DNA, 816 bp, synthetic construct
  source 1..816: mol_type = other DNA
atgtcggcgggcggaagtgccgacggtgccgcggccggtgccgttgacagcatgcatctgctggtgctgggcatagttggtggcttactcgggatttacttgacagcttttctgggcgaaacgatcggctcactgttcgccggtcttggcgcggtatgcgctatagtctggggcgctgatgctatccgtcgggtcgcaagttacgggctggggacgggcgtcccgtccattggatatatgtcgctgtctgtgggggtgattagcgcgtttgcaggcatcagcttggcggcgatcctgaaaatgcccatggtcggacctatcgcagcgctgctggttgcggtcattattggcgcggttattgcacttgttgccacgaaaattgtaggtatgaagatcccgattatgcttcaatgcaccatcgagatcgctggggcggctgccttgtctatcttgggcttctctgcggcaattgccggtagttttgatatggcggccgtgtatgaaaatgtggtggccaccggatttattgcggtactgtttattctctgtacgatggctatccagcacccattcaatgcatgcttagggccgaacgaagatcagctgcgcacactaaagtgtgcagcaagcaccgcatttttatccatgactattgttggtctcatgtccatcactaccggtggcttaggttggtttattgtattcatagtgggtctgattggttggattatcagcttcaaagcatttgtggttgcctcgatgaacgatgcggcctcaaccaaatgggcgggcctgtggccgaaagtggagaactaa

SEQ ID NO: 72798 - DNA, 702 bp, synthetic construct
  source 1..702: mol_type = other DNA
atggaccccatttccttgattttattcatcgccataggcggcattatgattggtgccggtgtgcactttattccggtaggaggagcgccggccgcgatggctaccgctaccggtgtaggtacgggcactgccatgctggcggcgggtgcgggcctgacaggcttgattaccgccgccacgatgacgggtgaaccattttatataatcgggatcggcggtgcaatcggggcgatgatcatgatgggtattaccatgctcattgcgaacataatttatatcttcggtgtgggtatcgttccggcagcatcgaaggtgcctgttgactggattacaaaacgcaatcaagaggcgtacaaaacccctggcaccgaagggcatggcgtgccggttacttcctttgtaagcggcctgatcggaggccttctgggcggtttcggcggtggactggtctactatgggattgatacggctattaaccagagtagctttgtctctgatccggctgtcagtattggtttagctgcgatcattggcgtcggcgtgttctttataaacagcgttatcgcgtcgtacaatatcgggggcacgattgaaggtatgcatgatccaaaattcaaacgtatcggcaccggggccattgcatgcgccattgcatcaattgttgtggcaatcttttgtattatcctgactggagggatctaa

SEQ ID NO: 72799 - DNA, 879 bp, synthetic construct
  source 1..879: mol_type = other DNA
atggacccggtaaccctgggcgttgtggcactgatgggggcagtggccaccatcggcggggcggctgaggatttggaaagcgacatcggctcgcagagtaaccctaactctcaagttcaactggctccgcaaatgggccatctgcatcgtatgataaacaaggcggcgtctggtgagccagtcgcttatggcgtttggtgcggtgttgccggtgctattgcctacattgtcatgagcctggggatgttgccgatcgttgcgatcgcaatgggtgcgtgtgtcgcggcgtttgtgcacgcgatttataccgtgacctcccacatgggccgcattgtgggccagtcacaatttgaacagccattgtttatggatgtactgactcagtcgctgggccctatcgtgggccatggctttataaccagcttttgcatcgttggaatttcatacttaatgacgatcccgattaatggcacggcactgcatgtcttccccctgccgctcttagcaatgctttggggcattgcccttggtgccatcggttcctcgacaggggacgtgcactatggtgccgaaagtgagtatcagaaatttgaatttggcggaggtacgccggtcgccattcagggagatattgttacgaaagcgcccatgggggcgaaaaacagcatggatgtggtaaatttctgtgccaaattcggtggaccgctgactggtttctgcttcggcctcgtggtcttctttagtttctggaatacagtggtatttggagtctatggtgggattattgtgggtattatcattgttatcctactggtgatcatggataattatttagaagtatttgcacggaaccagtacggcccatacgaggaagaataa

SEQ ID NO: 72800 - DNA, 1332 bp, synthetic construct
  source 1..1332: mol_type = other DNA
atggcaaagtttgatgataaagtcgatctttatgacgatcgcggatcactgattgcaagcgacgtgcctatcgaagctattagcccgttgcgcaacccggcaattcagagcatcgttaaaggtgtcaaacgtaccgtggccgtgaacttagaaggcgtagagaagtccgtgaaaaccggctctgttggtggagacaaatctaagatcctgggacgggaactggatcttgacattgtttcaaatgccgaagccatatcggagaagattaaaggcaccatccaggttagtgaagatgacgatactaaagtcgagcctatctctgggggtaaacgcctgctagtacaggttccatcccaacggatagatgttagcgctgagtatagcgtggcgccgttggcgactgcgaccgccctggtacaagccatcattgatgtttgcgacgtcgatatttacgatgcaaacttcgtgaaggcggccgtactgggtcgctatccgcaatcggtggagtataaaggcagcaacatcgcaaccatgctcgatattccccagaaactcgaaggaccggggtacgcacttagaggcgtcaaagcaaacgatttcgccgcggctactttgaaaaatacgttccaagctacggcgttagccagcatctttgaacaaaccgctatgtttgaaatgggagatgcaattggtacgtacgaacgcctgcatttattaggcctggcctaccagggtctgaacgctgataatatggttatggacctggtaaaagacaatgcggcggaaggtacggtgggttcgattgtccaggccaccatcgcgcgtgcagaagcggacggggtaattgccccacagaaggacttgaccgacttcagcatctacaatacagatgatgccgcgaaatggaacgcatatgcggctgccggtgctgtcgcggcaactatggtgaatattggcgcggcccgtgcggcgcagggtgtgccgtctacgctgctttatttcaacgataatattgagtttgcgaccgggctgcccagtattgattatgggcgagccgagggcgtggcggtcggcttctcattttttagtcactccatctatggcggtggcggccctggcctgttcaacggtaaccacgttgtgacacgtcatagtaaaggcttttgtataccgtgcgtggcggcggcgatgtccctggatgccggcacacagctcttttcaccagaggcaacgtcggggctgatcaaagaagtgtacagtcagattgatgaatttcgtgaaccgattaatgctgttgcaatcgccgctgaagaaattaaaggtgacatctaa

SEQ ID NO: 72801 - DNA, 1173 bp, synthetic construct
  source 1..1173: mol_type = other DNA
atgaaacgcgaattattaaccatcattggtactgctcatgtatctgaggaaagtgtgaatgaagtaaaggatgcaatttatgaacagcaccccgatattgtggcgatcgagctggatcgcggccgctatgccaagatccgaaacaaaatgcatggtatcgaggaagatgacaacatttctgtgactcgtataattaaggagaataaagtgggcctgttcctggtcagcaccctcctgggctacttccagagcaaaattggagccgaagtcgacgtagacccgggttccgaaatgattggtgcgattgaggcgagcaaagatttaggtattccgattgctctcattgaccgtgaaatcaataccaccttgcaacgcgcgctgaataagatgggctttatggaaaaagcgaaatttgcatatgggctaatcgcttcaatcctgggtttcgataatgacgaagaggagatcgacattgaagagctcaaaaactccgaaaacattgatgacatgatggaaatgtttaaagacgaagccccttccgtgtatgaagttcttgtccacgaacgtgatgcctacctggccggcaaaatcatgcaaatcccgtacgataaagttattgcggtcgttggcgcaggacataaaccagggattgaaaagtacttggataaccccgagaccttgccggatctgaaggagctggaaatcattaatgataaaaaaggaatcccgtggcttaaaatctttctggccctgatccctatattatttgttgtgatcttttttctggcgtattttaacgggataaacattacgggcaatatttatgaatttatcgtcattagtgtgatcatgggtttcattggctcaattctgtcgggttcgaaaatacagagcgcgattgttggtggcatcgtggcgccactgacgattatccacccgctgcttgccgcaggctggttctcagggttgacggaagcaaaataccggaaagtaaaacagtcggatattaaaaatctcgtgaagattgaagggttcaaagatctgtggaacaataacatatttcgtatcctgcttgtagttattggaacaaacttgggcgtgagtatcgctacattagtcattctgccgagcaaagttttcattccactgttcatgaaaatctttggtggctaa

SEQ ID NO: 72802 - DNA, 1320 bp, synthetic construct
  source 1..1320: mol_type = other DNA
atgattggaacgacactcaaaattgtgattattatcatcctaattatcctgacgggctatctgtcaatggccgagctggcggttgtctctatacgaaaagccaaaatgcagaaatacttagaagatgggaataaaaatgcacagatcgtgtttgacctgttggaagacccaaacgagtttctgtccacagttcagattggtatctcgcttattggtgtgttgactggtgcttttggtggtatcacccttgcagaaccgttagcgaaaatcatctatttcattccgtattccgacatgattagtgtggtgttggttgttcttgtgacgacatacctcaccttagtcatcggggaaattgtgccgaaagtcattgctctcaacgacccggaaaaagtttcgctgaaagttgcgaaaagcatggtgattctttcgaaaatttccaaacccgctagctttgtcctggcgaagtcaagcagcttccttctgtgggtattgcgcatcgaaaacaaaaatgatgaaatagttaccgaagaggaaattgaactaatgattaaggagggtcgtgaagacggcacgattgagaaagaagaggaggacattataaagcgcgtcttcaaactggacgataagaaagtcgaaagcataatgacgccccgtaatgagattatttggattaacctggaggatagtcgtgacatcaacaagatcaagattgtcgaaagtaaacgctctattttcccaatagcaaaaggagaactggatgacttcatcggagtggtgcaagcgaaagacattctgtcagtgatgttttcggaagaagaatttgatatcaatacgatcatcaaagaaccgttggttgtatccgaacatctcgaaaccttagaattactgaaagagttcaaagaaaaccagggctacgttcatatgtctctggtaatcgatgaatttggcagtgtggaaggtctgatcaccctgaacgacttgctggaaggtattgtaggtgatattccgggcatcgatgaagaagatgagcctgaagccattaagcgggaagatggcacctggttaattgatggccgctacccgattgataaatttaaaaaactgtttaaatttgaagatccgctgcctgatgaggaggaagacaattatactactctggccgggtttatcctcagcatcagcggcaccatccctgatgaagaggacaaatatgaatgcggccgtttcatattcgagattatcgatattgatggccaccaaatcgataaggtgctggtaaccgatctggggccacaggaggatattgaagaggaataa

SEQ ID NO: 72803 - DNA, 945 bp, synthetic construct
  source 1..945: mol_type = other DNA
atggacagcggcatcattattcaggttgtactgctgattgtggggttcgtatttttaattaagggctcggatatttttgtcgatggttcgagcagcattgcctcacttctaaaagtaccgaccatcattgtcgggttaacgattgtggcgttcggaacctctgcgcccgaagcggccgtttcgatcatatcttcgattaatggaaacaatgcaatggcggttagcaacatcattggaagtaacatattcaatatcctgatcatcataggtgtgggtaccttgctcggcgatctgttaatggaaaaaaatgttttaaaccgcgacttgccgatcctgatcggcgttaccttgctcctgacggcgtttatcattattggctggaacatctccacgattgagggcataattctgcttgcaattattgtggtttacgtatttagccttattcattcttccaaaaaagacagccacgcccatgatgtggataagccgaaactgagcacgaaaaagagcatttcctttatcattatcggcctggtgggcattattcttggtggcgatttagtggtgaaaagtgctagcactattgccatctcctttggcatgagtgaaaccctggtcgggttgaccattgtcgcaatcggtacatccctccctgaactggtcacttcactgactgctctgaaaaagggcgagaatcagctggtgatcggtaatgtaattggttcaaacattttcaacatgctgttcgtgctgggtgccagttctgcgataagtgagatcccactcgattcatcgctgctggttgatgtcatgtttatgatctttattacactgttgtgcttcatctttgggaaaacccaagaaaaatatgacaaaaaagaaggtattatcttcatcgcactatttattgcctatatggctttcgcgatcctgcgtaattaa

SEQ ID NO: 72804 - DNA, 1167 bp, synthetic construct
  source 1..1167: mol_type = other DNA
atggaagaatataaaatcaaaactattgaggaagggctgacgaaaatcgagtttccggaatttgataaggtatcttctgacgcgccagtgttttacaatccccatatggaactgaaccgggatttatcaatactggcaatacaagttttccagaaagaacagaaacgcgaaatcaatatttgcgatttattcggcggaagcggcattcgaggcatccgttataagaacgaaattgacggcgttggtgaaatttccattaacgacatcagtgagaccgcgaatcattacgagaaacacaacataaaactgaacaatctggaggacattgaagtataccagcacgatgcatcgatgtttctgcgcatgaagcgtggggaatttgatgtcattgacattgatccgtttggcacgccgtccccctttctggactcatccggttattgtgctaaacgcaactccctgttatgcgtgacagccaccgatacatcggccctctgtggcacctataaggaaccgtgtatccgtaaatataatgccaaaccgtataaaagtgaatactgccatgaaaccgggattcgcatcctggcgggtttcgttgcgcttactcttagcaaatatgcaaaatgcatcgatgtcaaaatgtcgcatagtactgaacattacatgcgcttataccttgaaattaaaaaaggttcaaaacgtaccgatgaaaccttgaacaatatcggttatatcagccattgtaaaaactgtctgcacagacagaccagcaacggcctcgctagctctatcgatgcaatttgcccagtgtgtggtgagaaactaattcatgccggccctttgtggctgggccctatccaaaacggagagtttattcagaaaatgattgaggaaacggaaaataaaaaaatcaatagcgagaaagaagcgttgaaactgttaaacaaatgccacgatgaagcgaatgccccggcaacgttcttcgacattcacctcatctgcaaaacgctgaagatcagtgctccaaagttcgacttgattctggatgagcttaaaaaagaaggatttatagccgtgaagacccatttcaaaccgctgggtatgaagacagatgcgtcgattgagaatattaaaaacattctgatccagctgcaaagcaagatttaa

SEQ ID NO: 72805 - DNA, 2370 bp, synthetic construct
  source 1..2370: mol_type = other DNA
atgtacaaatgtatcagcgcatataagattaaaattattaacattaagaacatgactaattttacgaaaaatgattccttcaaggaggaaaataaagtgatgaaactgaaagactcttatatcttgttaatcgccatggcgatcttcctattaatgagcatcggctctgtgtgcgctagtgagatctcggccgacgataccatagggctagcggacgacggctctgatgtggttatggatgacaaacccattgagccgtccaatccaaccaccccccacaaagtggatacaatgattgtgtctagcgatactgtatcgatcaatgaaaaagagaaaatcaaatcaattgatctgacggtcaacgataccaacaagtcgaaagtcattgcggggattacagtgaaaaatctgaccgttaaagaaggtacaaaaaccatcaaatttgactataataactcgaaagtcattatcaaagacgcattagtgcttggtaaacacgatctgctggttagctatctgggtaacgaaaactacaccaattcttcaaaaaacattgttctgaccatctttggcaattatacaatccaggcgccaacgtcggtggatgtcaacagcaccaaaattgtggaagtgccgatcaatgtgaccaacggtatcgatccgaaagagctggtcaaagatgattttaatgtgaccctcacatataaagatggaaatatcactaaagcgatcaatatcaccgattttcgtattatcaacaacacgataatcttcaactatccactgtcccgtaatattaccacctcaaccatcacccttgtttataccgctaatgaaacggtgaagagcaaaaatgttacaatcaaccgcatttacaacgttaaaattgaggggattaatacgaaaaatcaatacaaaaatggtaattttaccttccggctcaccgatattgataatgcaacggaaaatttaactggttttaagctgaacctgttgattggtaagaatgtgataaaccagattaccggcacggcggacaaaaatggtattgtaaactttaagaccagcaagatcttcggctatgatttcaataacaataccattgtaattaagtacttaaatgtgggcaataacactgtggaattgaaaagtggcgacaacgtgaaactgacaacaaataaggttaacctgacgattgaaaaagcaaaaatcaacattacgatcgataaatacaacgaacaatatgggagtaacaaaaacctgaccattacggttataaacgcggataacggggaaccggtgccgggcatcatcctccatctgaacatgcctcagaccgccggcaaaaactattacattcagacggacacaaatggaatcggcataatctcggttaaaggcctgattcctgggaagtacaatttgacggtaagcaacaatgacacggtcaatattatcaacaacaaggcgagcagcaaaattattattaccccgaagccggttacaataaagattacatctggtctgactattaactataacactgggaacactgcagccatcaaagttacggataaaaaaggtaaaggagtgtcgggcgcatatgtgcttgtccagctgtatactggttcgaaatcagcaaactatcttttccaaacggacaaatatggaaatatcaaatttaaagccccgctttccgttgggaaacataaaattgttgtgagtggtgccgtaggatacagttcaagcaaagttaccaaatatattaaagttaaaaaagctaccgccaagatcagtgcgccgaaagtaaccgcatactacaaacagggcaaatactttacaatcaagctcattaacactaaaaaaagcaacgccccgatttatgctgccaaagtcgacatccgagtctacatttccaattacaaatactacaaatttaatggcaaaaccggcgtggacggtaaattgaaactgtcaattgatctgaagccgaaaacttataaagttgaagtgcgcggtgcagattccaaaaattatgctgcgtcaaaggtagtctccaagatagtagtcgtcaaagctccaacgaaactgtatcccgccaaattaacggctaaaaaaggaaccaacaaatactttaaagtgaccgtcaaaaacactaagaccaagaaggtgattcctggcgtcaaggtaaagatcaaagtttatacgggtaaaaaattcaaaacttatactgtaaagacgaatagcaaaggcattgcccagttcaatgtcaaaagcttgagtgtgggcaaacataaggcgattgtaagttctgcgaacaaatattgcattgcgaaatccgcgaaaaactacataaagatcacgaaataa

SEQ ID NO: 72806 - DNA, 1023 bp, synthetic construct
  source 1..1023: mol_type = other DNA
atgggcatcgaaatcgagaaatacctgaacttccccgtgctgctgatttgcttcctgctgatcacctccctgatattcatatttcctgctttaaagatgattgttctgggcgcgattttggcgtatctggtgcgaccggtagctttcaagattcaatccaaactgaaattttcttccgttagcatcctgattgccatggttattgttttgattccgctcattgctcttgtagggtatattagctacgaactttcgtcagtggcctcaacgatgctggcctctagttccactgccgatattaatgaatctatcttaaaactgatcacctatttgcatattgatgttaacccgaacgagatcagtcagtcgattatttcttcatttgaaacaatcgcgagctatgtgatgaactatggtgtaagtttcctgggtaaatttgcaaatcttaccttggatctgtttattttggtttgttcggtcttttatttcgtgcgggatggtgacaattgtttaaattttattaaaagctttgtcccggagggcagcgttgaattttttgacaaaacggtcgacaatatcaaggacgtgctgaaaagcatattttatggtcactttctcacagcggtcatcatcggcatcttcggctgcattggctattcgattctgggttacccatttggaatctttctaggtgtgttaacgggtattctgcagctcatcccaatcttcgggccgtggcccatctactggacgttgtttttcatcgatgcgctgagcggcaactacccgcgtgcaattatggtcctgctattcggctttttcttaagtactattgatatgtacatccgtccagcgctgtcaagccactatgcagatatccatccgctcattctccttgtcgggttcctggcaggccctttagtatatgggattgtaggttttattgtgggaccgctgattctgggaataacctataccgtgctggatagttaccgcaaagaataccttatgcgcgtggaataa

SEQ ID NO: 72807 - DNA, 549 bp, synthetic construct
  source 1..549: mol_type = other DNA
atgaaaaataatgtgcttaagcgtagtctgatcatcatttcattcatatttctgattatttgcgcattctcatgtgttaatgcgcaggaagataacagcgatatcacgatgatgactttatctaaaggaggcattgttattcattacccatcgaactgggggtactcccagtccgattcgaattacagcatcatgagcatctcgaaactggacagcgtggactccgctggtgtgggccaggtcaacatcaattttgagaaaaaagcaatcgaaggggacttttatacgtatttgaataacacctatcggtcaatgcaacgcgattcttcgttcaacctaacctctagtggtgaagtcatggtaagtaatattcatgcctatgagtacatgtattccagcaaccaaaatggcaccgtaaaagagcacaaggcggtgtggtttgaaaaaggtggccaggcgtatgttatgctgtatagcgccccggtcaacgatttcgaagataacctgtacgtgtttgactacatactcagtgatattcagattacataa

SEQ ID NO: 72808 - DNA, 726 bp, synthetic construct
  source 1..726: mol_type = other DNA
atgccgaatgatcgcgataaacttctcaaaatcatggatagtttggaagtggactaccgtagcggcaagatttctccggagaaatatagctattttcgttcgaaatatgaagacaagctgaactcgatcgatgcaaaagaagccacccaacgcataaggagcatgcagggcaagtccaatcaaactacgtcaattaaacgaagccgcaaacctaccaaaaataaaaaagagaaagaacaggacttagttcagaagtacattatcaacccaaaaaagggcgatgcgaagtataacaaaaaagaaaaaaaatcaatgagtagcggaacctttaaactggtgctgttactggtgctggttgtcgctttcactgtgggtgtaggttacggggtctttaatctagatttcaacaacatttcggagacatctaccgtagcgatggttcatgatacggccttccccgatatcacggaggacattaaaaacaccacaaaaaccacaagctcctctaatacgaattattcatctactagctacaatgtcaaaacgaccgaagacagctcaagtgactcggattactcggatgggggccggaactctggttccagtgattcgacctattcaggtagtgattcgggctccggctcttcaggcagcgattctggctccggtagtgggtccagcagtaatagcggtggttccgaaagcaacggacgtagcgacgaataa

SEQ ID NO: 72809 - DNA, 597 bp, synthetic construct
  source 1..597: mol_type = other DNA
atgagtattatccataaacatattgacgaaatatttgagtatgatggtagccagatcaacccatcttgggcgttccaggaatttggagtctacggtagctcgattataacgtggattggtccggttaatatcactccggataacctgaaggatttcgctgatgtcgggttggagatcaaatctaactatatggttaattttatttgcgaattttttgatcagcagcctcccaatatgcgcattgcctacctccgacagcggcttattgtaatgatttttcgcgaaatcctaacggagtatggcattaaaaccaaacgtgaaggtgatgacattttcgtggatgatgggaaactgtccatctcaatcgcgagtatttcactgagctcggcaaaaatacacttcgccttaaacttggaagacaagggcacgccggatgatgtggaaaccatcggcctgtttgacattaaagacgaaaatggcacacaaatctttaacaaagacaatctgagcgatctgatcaatgaaactgcatcccgtttcattgatgagttacaaaccattgaaaacgacatcagtaaaaccaaggtgctgggctaa

SEQ ID NO: 72810 - DNA, 1479 bp, synthetic construct
  source 1..1479: mol_type = other DNA
atgagcgagaaacgaatcgaatggaatagtaattttgccttcatgatggctatgatcggttcggctgtcggcctgggcaatatttggcgtttccccaacgttctgtattccaacggtgggggctctttcatgatcccgtatatcgtgtcgttattcttactgggtataagctttgtgcttgtggaatatgcagttgggtttcggtttaaaaaatcaattggccgcatcctattctctattagtaaaaagctggaaccgatcgcctggtttattgtgttgatcgtgtttctgatcacaacgtactatgtttgtgttgttggatgggatttgatttatgtggttctgagtttcacgaaagcatggggtgcgaacccggatacgttctttgccagcaacgtattgcaggcaaccgattcaatctctgggatctttcagatcgtgcctattgtgcttgcgtcggtatttgcgatttggtttatgatctggtttattgttaaaagagacttgaatgatggcattgggaacgtcagcaaaattttattgccaaccctgtgtttaatggtcgtgataattgttgtgttttcgctgaccctgcccggtgcgagcattggctacactcagatatttacccctgactggaatgcgctcacgaacctgaatgtatggctggcagcatttggccagattgtcttctcccttagcctgggtatggccattgcgatgacctatgcgagttacttgccggaaaaaagccgtctgattgacagtgcggtcacggttgcatttagcaattccgcgttcgaagtatttaactcgattggcatattctccattttaggattcatggccctgtctaccaaaattccgtttgatcagctagtcactgagggcacgggcctggcgtttgtcgtgttcccgcaagtgttcaacactatgggtccaatgggctccattatcggtccactgttcttcatatgcatcctgtttgcaggcattacctcagctatagctcttcttgaagtcgtcacatatgccatctctgagaagtttaatattgaacgtaagcgcaccgttacagtgatttgtattgtgggatttctgatctcaaccatgtttgccaccgggattggttcgacgatcctgggcgcgttcgatgcattcctgaacaactttgctctgttactcggaatccttattgaatgcatcatctttggttggatctacgactttaacaagctgatcgaaacgctgaacaaagatagccgcatcaaagtaggtaaaacttggaaagccgtgattaaatatatcctgccgatttgcattgctgtgttatggattcaaggggtttactccaccattacaagctcagataatctcagtctgaccattatgggcatcctcactgtaattctcattgtattgccgatcgtgttcgccaaactgcctgcgaaaaatgaggattactataaggttgactaa

SEQ ID NO: 72811 - DNA, 999 bp, synthetic construct
  source 1..999: mol_type = other DNA
atgtatagtaacatccttaccaacagcatcgtcgccgtaattctgacagttattgtgtgtttcgtcatttcgacgctgcttccaggcattgagcgcaaatacgttcatgcacgcatccagcagcgggtgggcccgctggtatttgcgccgggtattatggctcctctgaaattcttatttaaggagaatgtggaagtgtcctctcctgttcccaagctgtacaaaatcctgccgattctctgcttcattgtgattctgtgtgttttcattgccctgacccctcaggcgtacaagattccggcacttagcagtttagtggccattgttggttttctgaaagtggaagaaatatgctatgttctcatgggcgcgctgtctaaatccgtgatgtcagtgcgtatgccgtttccggatcgtatcaaaggagccgcccacattaaagcgccgttgagctttattgaagatataagtgccaaacgatccctacgtatgatcacgtatggctcgttcccactgtatctggcactgtttgcgccggtaacggcagctcgcagcatcttcttaaaggatatcgtggccttccaacaagttcatgggccgtttttatttactgtcgctggtgggatcgccgctattgtgttttttataggctatatgatcattctcaatgaatatccctttagcattatcaaagcgaaatcggacgttattgaaggcccctatatggagtacgcggctaaataccgcagcattgtctttatcacacgtggttttttcatgtttgtactaggttctgtcttctccgtcttgttcatcggcgttccaccgagtatcttctcactgggaattttagtgaatattgcggtggcgctgatattcgtctttatgatgggtatcttctcagcatttgcaccggtatttaccaacaaacagctgttgccaaccatcttgggcaccactctgcttggtatcttggcgattgcactcgggctgctgtaa

SEQ ID NO: 72812 - DNA, 447 bp, synthetic construct
  source 1..447: mol_type = other DNA
atggggatcaaatcgtttagccgtgcccgcgcaattcatgtcatgctggtttataccggtggctgtaatggatgcgacattgaaattgtcaacagcatcctatccccacggttcgacgcggaacagtacaatgtgtttctgacttggaacccgcgtgaagcggacgtgttggttgtgacggggccggtcacacacctgaatcgcaaacccctcgaggccatttatgatgcgatccctaacccgaaactggttgtagcggcaggtagttgcgctttaatgggcggtgtctacaagaactgccatggcgacattccgtctgaagagattgaaggtccggtggataaaatcatacctgtggatgccaaagttccaggctgtgctgtacgaccccaagatgttctggcaggcgtagtgtcacttttaccgaccctgttggatgcggattaa

SEQ ID NO: 72813 - DNA, 492 bp, synthetic construct
  source 1..492: mol_type = other DNA
atgcggaatttaatcaagatcgcgctggaaggcgccttcaccaactttaaacgcatctttttcgcagctgaccgtgtgacggacatggatatgaagaagcaaattgccactctaagcgtcgaagttgatgatcgcgtggacgagagtgcatgcattggatgttcgggttgtgcgaacgtatgcccgaccaacgcgattgtcatgaaaccactggcccaccccgtgaagttgacggagggctgggtgaaagatcaggtacctgaaattatcttagaaaaatgcgttgtgtgctattactgtcatgatttttgtccgatatttagtctctacggtcaaaaaggcgcgatccatccgtcttgcgttggggatcaggaagtcgatgttagcgaatttctggaacagccgttcaaaatttccgacgataaacttaaaattattgctcagtatctgtcagacaaaacagtgctgaaaaataaagaggacggtgattaa

SEQ ID NO: 72814 - DNA, 252 bp, synthetic construct
  source 1..252: mol_type = other DNA
atgatgttaagtctggggccgatcatcttcggaataatcttgggtgtgattattggtagccagatcaaactgaaatgttgcgatagtaacttcacgtggacctcctttgtaatcatcattattgcgggtatcattattgcttggcaatctggcaattatccgttttacaccgaccttccaatttcaactgcctttgtctcggcgctgataggcatttttgttggcaagctgctcttcgcacgcagcaaataa

SEQ ID NO: 72815 - DNA, 477 bp, synthetic construct
  source 1..477: mol_type = other DNA
atgagccagagtagcattatcctgaaactggtgtcgctgccaatctcaatgatattgatttgcctgggtattatgactatccttggcggtcatattacgcctgggggcggtttccagggtggtgctatgatagcgggcggtgttatcttgtcggtccttgtgtatggcctagataattctccgttggaattttcccacttatatatcgaagttctggaatctatcggggccctgggctttattattctgggcctgattggactctttgtcagcggatttttcctgtacaatgtggggaccgatctgctgaacgtggtgccgccgacaattcaaaacgtgttacattatcccgacgttacgaacgcaggtatcattccgtacctcaatatctttgtcggattaaaggtatttgtaggcctttccgcaattgttatcgccttcgcgggcttcaaaaaaattaccgaggagagtaaataa

SEQ ID NO: 72816 - DNA, 282 bp, synthetic construct
  source 1..282: mol_type = other DNA
ttgtctagccacacaactgtacgtaacctaatcgccagtgtgatggcggcaatattttccgttacgctcctggatgcggtctttcatttaagtagcatgattaatgccggcgtatcgaacatttacaatgttctgggaaccaaaatcgcgccgaacatggtcaccgtggtgattttcgatttccgcgcatatgataccctgggtgaatcaattatcctgctgacggctggcttagtggttctgcttatctttggtcggggcctgttgggggacaaacagtaa

SEQ ID NO: 72817 - DNA, 336 bp, synthetic construct
  source 1..336: mol_type = other DNA
atgagcctgtatgacaaaatctttgatgtggtgaaacaattccgtaaattgttctccccggggcctgtaactaacgcggacgtcagcggttcaattacggcggagatctttctcatcgtttcgctggtgctagccaccatactgttgcgccatattagtgttttactggcaggactggtgattctgtttgtggctgttgttttaattatcaacattccgctgatcccaaagtttaaaatcgaacaggaagattctctcgataaaatgctgttctatgcaattgtgacccttgccattattggcgtagtcatgtactggggtggcaatcttgtctaa

SEQ ID NO: 72818 - DNA, 1455 bp, synthetic construct
  source 1..1455: mol_type = other DNA
atgaacgaactgattccccttatggtgattgttccgctgatggccgcgttaattattagcgccttttccaaattcaataaagcgacgaagatttttgcctttgtcattgcgatttgtcttccgttaatcccactgttgagcaattatggcctccactactttggcggatatgaaccgattttggataacgtgaccaacgttgtgtatcatcctgcaattacatattcattcaccttcttccagcagatcttcattgccatgatcggtctgctgacatttctggtggtctttgtctatctgactaaatacaaagagatttctggcccttatctgtttttgttgttcctgggtaccgcagcggttacggcgatgattttaacggatgacatatttcacatgtttgtatttttcgaaatcctggcacttgcgcaggtggggatagtggcggcctcatcaattgattacagctatgaaatggctctgaagtatatgattttgggctccattggcagtccgatcatgctgctgggcattggcttcctgcttgcgctgacgggtagtgtaaatatcaccgatattgttacggccgtgcataacggtttagtgaatgccaaatcgcccgtttttctattaagcctcgggttaatcttctttgggtggttatacgcatctggtctgccaccattccatactatcaaatcgggcatctattccaaagcagaaccgcatggcgcggcgctcctgcaatcatttactgtgatttccatgatttccatcgtactgatcatgtaccgtatctatagcgtcttgccgatcttcgaagttctcatcgtatttttctctatcctggcgatggtactgggggtgagtctcgcactgactcaaaccgacttccggcgcatgattggctttctggctgtgggtgaactgggtttcattggtctgggtattggtcttggaaccaactttgcgattaccgcaggccttttccaggcactgaacgagatcatcattacggccctattatttatcggctttggtgcgatagtggaggcaacaaacgaagtggacacacgcaagctggggggtctgctggcttaccatccaaaagtaagcatcatgctgctgattgggggtttggcgatggccggcgttccgccgctaagtggctttcagtcgaaactgatgcttgttcaagcttctttaagttgcggcttcccggaactgtcgatcttggccattatggtaagcatcgctacctttgtcgtgttcgtcaaaaccttttacaccatgtttctgaagccgaaaccggttgaattggatgttgagaataaagaggttcctcgtgctatggtctttgtcatgggaatactcctgattatcatcgtgctcctggggctgttccccaatcttattatacacggaatttcgagctttgtcggcggaatattataa

SEQ ID NO: 72819 - DNA, 387 bp, synthetic construct
  source 1..387: mol_type = other DNA
atggcacagacccaacttgcgatcctgttgacttccgttgcattggtcattgtcggactgtactctgcaatttttatcgataatatcataaaaaagatcattggtatcagtttcatcgaagaaggggctaacttattcattgttgcgattggctataaagccggcggtgtggtgccaattataatgccgggcatggacacatcctggtttgcctcgaacgcggcgtacccgctgccttttggtctggtacttactagtattgtcattggggccagcaccctggctgtgatgctagcgttagtaatggttctgtacaaacgctatggcacgctcagcacgagcgtgatgctggccgatacctcaaaacaggaggagtatgatgaataa

SEQ ID NO: 72820 - DNA, 234 bp, synthetic construct
  source 1..234: mol_type = other DNA
atgattgaatttatcctgtgcttaatcaccgtgctgagcgcgattctggctctcatccagaaagatctgttgaaagcagccattctgacggggttcagtggcggcgcgcttgccgttctgttccaaatattattggcaccagatgttgcgctgacccaggcgattgtgggtgctgcaatcgtcccggtatttattgcgctagccgtcaagaaaactcagcgcgtggacaactaa

SEQ ID NO: 72821 - DNA, 423 bp, synthetic construct
  source 1..423: mol_type = other DNA
atgatggagtatattcagtcagctcttctcatcatttccgcgattctgaccatcatctcggcaataggcctaattagtttggacaagaataccaaggatgtcgtgtacgcgcgaatccatattgtaggtgttttcgacattgcgtgtgttattgccatgatcgccataggtcagtatctgttagctgggatctactttattttggccccgtttatcgcacacgcaatcgcgaacgcctattggaaaaaagaagatcgcgagaataacttagatctgcagaacattggagaagacgtgggcgaagatcatccatttctgcacccgaaagaaaaaattcaagcgctggaatgcgaggatagcgaaaaattcaaagtggacgaacgtttctctgtcactacgctggaaattgaagaagatgagtaa

SEQ ID NO: 72822 - DNA, 267 bp, synthetic construct
  source 1..267: mol_type = other DNA
atggatatcctgtttgtctcaaattatattgtggttattgccttgatgatcatgatgctggcggccttacgcgcgagtgcttatgagtccacctctatggggcttctcggaagctcgattgtggtcaacgcatttgcagttgccttactgatcatcggtggcctgtacaacctggaattttttcgtgacattagcttggcgctgatattctttggcttcgtgggcacggtggctttcgcggtagttctaggtggtgatgatgaataa

SEQ ID NO: 72823 - DNA, 315 bp, synthetic construct
  source 1..315: mol_type = other DNA
atgtttctaacccggattgggtatggcattatttatttcctggatctgatttacgaaatccttaaatcaacgttcgatgttgcatttaatggcattatgcgccgtaatattaaccccgtggtcttcgacatcgaaacggtgttggaacgtccagttagccaaacaatcctcgccaacagtatctccctgaccccgggtaccctgtctgtcgatttagacagcgaaaataacattatcaaagtagcgactatttcgccgcgcaaaaaagaagatgtgatcccttttgagcagtacataaagaaaatgctggagtaa

SEQ ID NO: 72824 - DNA, 966 bp, synthetic construct
  source 1..966: mol_type = other DNA
atgaatctggttgaaaagctggaaccgattatcatcttttctgccgtcctgattggcattttggcaagtaacatcaatatcgctcagcataccaactatctgatcaacatcttcttgtgtttaatgatctacggcctgttccttgaggtgaaccttaacgaacttaaaaatagctttcgcaatattaaattcaccttaaccagcctcatcattaacttcatctggactccgctgttcggttattggattggtagcatatttctcaatggcaacctagacattctgattggtttttttatgttaattatcacgccgtgcactgattggtatctcgtatttacaaagcttgccaaaggcgatttgaatctgaatttatccattctgccgctgaacctgattctgcagatcattttgctcccgatttacctaatcatcttctttagtagcaaaaactcgattgactacacccagatcatttacagcattttaatcatcatcatcatcccgtttattacggcccaaattacgaaatttgtgttgataacgtccctgaaagaacgggcgataaacatcatctccgatctggaaatttggtttctgtcacttgcagttttttgcattttttcgagtcagggaaaacaactgttcgaaaatctcaacttcttaattacaattttcctgccactgatcattttttttattgtcaattctctggtggacctgctgatttcgaaaaaaataaacttcacatatcccgaatatgtgagtctgaccatgaccacgctggctcgtaatagcccactggcgttggcgattgcgataatttcattccagaatcatgagttggtatccattgcacttgttattgggcctttgatagagttacctattctgtacattatctctaagttctgtctgtggatcaaaaacaccaaactgttttcatttcacgattatactatctaa

SEQ ID NO: 72825 - DNA, 705 bp, synthetic construct
  source 1..705: mol_type = other DNA
ttgtcgtcgtacaagggccactcaatctttgccttcttacttgcgtgcatgtttttccacaatccgctgctgattagcctgaccttaatcggtgcgaacattccagactttgatcataaattcaagaaggataatgtctacaagatgattatcttggggttaatcatttttatctccctgtatattcttaaattaccttactatattggtctgattattgtcttccttggtataaccttttatttcagcgaacatcgcagtttcacgcattcactttttggggtgttgaccctcacggccgcggtgagtttgatcctcatctgggcgctgcagctcataaccatagttactacactgaataaccattacctgattctagccatcttgattagcttattgagctttctgttcctcaacaaaaaactgctgatggtgtttttaccgatcttcttcatctctctgtttgtaattaaaaccggcgatattgcatatacggagatcgttctgagtctgctgctgggcatctttagccatattgtgcttgactcctttactccctcgggaattaaactgttcgctccgctgagctcaaaaaaagtttataaaaactttggcctaacagtaattttcattctggcaattctgtctatcttttatcacgcttcctctctgtttaaactgtttgaaatgtatatcaaatactaa

SEQ ID NO: 72826 - DNA, 1134 bp, synthetic construct
  source 1..1134: mol_type = other DNA
atgcgcaagatcaccatccgtcttctgacccgactacccacaaaatacgtgacgatcggcctactgttaattatcgcgttatttgtgtacggcatattgggttcatattttatcatgcacctgaatattattgattctatttattactcgattattaccatggcgactgtcggttacggcgattataccccacatacgggcatccagaagatttttgcaaccacactggcgctgtcaggtgttgctctgctcgcgtatgtgtttaatatcatgttaacaagcttccaggaaaaaatgagcacctattccaagggtgcccgtaaaatgaaaaccatcgaggatatggatgactattatattatttgtgggtttggccgcgttggaaaggtagtcttcgatgaactgaataaacggaagcagaacattattgtaattgaaaagaaagaagaaatttgtaacaatatcgaagagagttcctcggtagttagcattcataaagatgccagtgaagacaacctgatatccaaactggctggtgaacggtgcaatagtgtgattgtgagtactggcgatgatgtcaacaacctgttcattgtgctgaccatccgtgagacaaacccagacgcttggattgtgaccagagccagcaaagtggaaaacattcctcgtctgaaaaaagcaggtgccgataaagttgtctccccggaaatcagcggggggcaagacatgtttttcgagtctacgaacccgtatcttcttcgcataacagtgaaacacacggtagaccaaatctacgatgagtttaaagttattaacaaatatgattgcagcttggaaaccattgattaccacattccgggcgttgagaccccgctcacccgtgaaatctacgtcacgcgccttgcagacggcaaaaaatattataactacctccagactcatgatgatcagcgtcaagcgctggacacgttataccgcactacgaataatatacattcacatctgatcctgggtcaggataaagagtcgttcgagaatctgatcaaggacttgaaagaaatcgaagaaattattggaatcaacttgacgaatgaagaaatcgcgaaaatcactcgcaaagaagactctaattaa

SEQ ID NO: 72827 - DNA, 1062 bp, synthetic construct
  source 1..1062: mol_type = other DNA
atggataaaaaatcagtgttctttctgggcatcagtgtctttatcctcatcatcatgttgtggctcgttgggatcgaagacattattgatgctcttaatgtcgcgaaactggaactgatcgcgttagccatcggtgtacaaatctttacctacgctctgtacaccctgcgttggcagatcctgaataacctagcagacattaatacctcctttaagaaactgctgccgatgattttggtaggtcttgccgtcaataacatcactccatcgggccgtggcgggggcgagcctgtgcgcgcatatattctgtctaaagaagaagattatccgatgcgcgagacctttgccacggttgttgctgatcgggccttagacactttcccatttgtggtgctgaccgtgataacaattattggtatgacgttttatttcaactttgatctgtggctgcttattgtcatgatttccgccgtcatatgcatcgttgcgttcctgctgatgattatatacatgtctattaacccgaactttggtaaacgtgtagatggatggataatcaagttagtgcgccgattttataagaagaacagtgaggaattggaaaataaaattcacgcagtgattttagatttccagagcacaatgaaaattgtgatcagcagcaaaaaagtcacctattacgcattgcccttatccttcatcatctggatcttcgaaattctacgcgtttatattgtgtttctggcttttggagcggatattagtccgatcgttattggggaagtattcattatcgcgtccctggttggcatgataccgctgcttccgggtggcctgggtgcggtcgacggcatcatggtggtattctattctgttgcaggcatctcggcgagcatcagtgcggccgcaacggtgattgagcgtctgattagcttttggatggccacgattctgggcatgattatcctccctcattacggatcgtcaattttggacaaaatttcgttcggttcaagcaatgacgaaattgaagaagcgctcgaaaatgagattgataactaa

SEQ ID NO: 72828 - DNA, 1434 bp, synthetic construct
  source 1..1434: mol_type = other DNA
atgcggtatatcaccaaaactgacctgttggttattggcttgaactccggatatctgctgataggcattggcatcatgtgcctgattccattaatatttgatctgatttatttcgagtttgatctgattagctttattctgcctggagctatcagcatctgtctgggattctttttaaccaaatatctcgatgaatattcaaataaaaatgttcgacttaaacacggtatgattatttcatctctgggttggatctgggccgcgcttattggcggcttagtgtttatgcttgcaaccaacatgcccccgattgatgcgatcttcgaaagcatgtctgctctcaccgggactggggtgacaatgtacaccaatctcgagatcttgccgcacagcatcctcttttttcgcgcgtttgaacagtggattggcggtctgggcgtggtcgtcatggtgattagtgtgctggcgaaaccgggtactgccaccagcacgttatatcattccgaggcacatgatgagcgtattaagccgagtacgaaagcaacccttgagaaaacaatagaaatttatattatttatacggttgtcggcattgtcctgtacgcgatcgcgggaatgccactttttgattccctatgcaatactttttgcatcatttcaacggggggtatgaatgttaaaaacgccaacatgggctactaccacaacgatctgatttacttcatctccattgtgctgatgatactgggtgctacgagctttctggtgcattacaaagttatcaaaacaaagggtaaaagcttgttggaagatttgcaatttaagattattatctgtgtgattgccattgtgaccttgatgctgtattacgtaagcaacattgtcccgatggaactgttattcacagttgtatcagcgattacgaccaccggggccagcatctccagctcgctgacgatggcgagttggccgtcttttgtaatcatctgtctgatctgcctcatgctgtctggcggttcgaacggttcgactgtaggagctattaagctgatccgcctgatcacctttttcaagggcatctaccgcaacatccgtgaaatcctgtcaccgagtggtcgtgtggttcccataaaactgcagggccgcccgttaccggaaaatgcatcggaacaatctggtaactatatcacgctgtatctaatgttcataatgtttacatgggcacttttctgtttcttcggccatgacccattcgacagtctgtttgccactgtctcgcttcagggcaacaatggtctggacctggggattattaccaatcagattcatcctgtcctgaaaatcgtaagtatgctcaatatgtggattgggcgcttggaaatctaccctgtgttaatcaccttacgtacggtttttgaaattttcaaaagataa

SEQ ID NO: 72829 - DNA, 660 bp, synthetic construct
  source 1..660: mol_type = other DNA
atggattacgtcgtcattatgggcggtggtcgtgtagggctggctcttgcaaacttgctgattaacgaaggatacgacatcacgctgattgaaagtgatacgaagttatgcgatgaagtcgcctcagaactcgatgcattagtgatttgtggcaatgggactaattctaaaatactcgaggaggtgaacattgaagatgcaaaatatttcattgccaccacgggcaatgacgaggcgaacctgcttagctgcatcctggttcgcaaatataacgtggaacatattattgcccgcgtgagtaatccggatcacgaagaagcgtttaaagaagtgggcatcgaacaagtaatcagcccagagcgggcggctgcctcgtacctgcaaaaaattgttacacgtcctaacacagcggagttgatgaccatcgggcagggcgacggcgagatcctggatatgaccataaccaataacaaaatcgtcggtaaaaaattcaaagatgtttcaccgaccaaggactttatgattatcgcgacttatcagaatggtacgctaatcatcccccagccggacaacattattagccgtggagaaaaggtttcggttctggtgaaacgcggttcttttagcaaagtatccaaaaagctggaaaataaatcctaa

SEQ ID NO: 72830 - DNA, 807 bp, synthetic construct
  source 1..807: mol_type = other DNA
atggtggagaaaaaatcgtttgtgaaagactatatgaccaagaatgtgatctgcgtttccccaaacactcctacggaagaaattattgaacttatgcgtacaagtcggcacaacagttatccggttgttgtaaacgatagactggtgggcatggtgactgcatttgatgtcgtatctaaaaaatggtcagacacggttgaaggtttgatgagcaccaagttagtggtcgctaaccctgaactgtccataaatgacgcttctcgcgtaatgtttcgccgtggcatctcgcgtatgccggtggtggatgagaatcgtaaaattgttgggattatcaccaacacggatatggtacgcagccatatcgaacgtagcaccccaaataaagttgaatacttcaaaaaaaccctcgaacagctgtacgacatcaaagcgacattgcgccacatgccggttgagactaacaaactccgccccacccaggatcgggtctatgcggatgagctggagggccgcacttacgaactgaagcgcggattagccgaaccggcaatcgtcgtaaaaacgggtaatcgatggattctggtcgacgggcatcacagggccgtcgcgtcgtcccagcagggttatgaaaccgtggatagctatgtgattgatctgggccaagacataaaactaggtatggagaagacggccgataaagcgggcattaaaaccttctcagacatcgaaattattgatgatgataagcatccgctgatcgcactgacagaaagccttcaggatcaagaacgtaaaagtgatgactaa

SEQ ID NO: 72831 - DNA, 768 bp, synthetic construct
  source 1..768: mol_type = other DNA
atgtttgacaccttcaccgaaaagaaatttctgctgaaagaattggttaaaaaagatttgacgagcaaatataaagattcggtcctaggcatactttggagttttttcaatccccttctgatcatgctggtatttaccgcgatcttttcaatgctcttcggccgtcagattgagaattatccagtctacttcctgtccggccgtattatttttgatttttataacagtgggacaaaaggtgccatgaaaagcatcaaacgcaatgcaaacttgctgaagaagatctacgtgccaaaatacatgtttagcgtaagtaccatttgctacgaatttgttaactttttaatttcgtttgtgattcttttcattgttatgatccttacaggtgcgaccttccattggactatagtgctgtccatcattccgatgtttttcctggtgtgcttaatcttcggtgttggcttaattctggctgtgtgtaacacttatttttcggacatcggtcacctatacaatgtcttcacgctcgtcctgatgtatgcatccgccttattctatcctatggagatcgtgccggcgatcgtgcaacgcatctttaccctgaacccggtttattcagctatttcttgtttccgggagtgcattagctatgggatttttccgaatacgtctactctggcgtatctggccatatttagctttacgaccttgggcattggactgtacctcttcaaaatttacgaaaagaaactggtactggaaatctaa

SEQ ID NO: 72832 - DNA, 1425 bp, synthetic construct
  source 1..1425: mol_type = other DNA
atgaatttaattaataaaatccgtaatttatttaacgataataccaaacaagaaaaaaacaagcatattcctcttgatgcgaaattccagagctcgcgctttaagaatatcaaaatccatgccccggattatgtgatgtcgactgaaaaccgctaccatatgcaaatcctggataattctaacaacccgattaaaaacgaggcaataacgttggtgattaacggaaaatgttatgaaaaaatcaccaataaagacggctacgcatccgccaaaatttcacccaacaaaaagaaaaaggagatgaaaatttactatctatcaaatgaagagtattgtccgtgcatcattgccaaattgatccacccagataacatcaatccggaagaaaataatgagaacccaaaactgtacgctcccgatatgagcatctatagcaaagatgaaccggaatacaatgcgcgtttgctggatagtgaagataacccgatgattggtgaaacgcttattttcaactttaataaccagacatatgaaaaaatcactgatgaggaaggctttgcgagcatagatttaaaactggatgaaggcacctatagcattgaaacaatcttcaaaggtgaaaaagactccaatcctattacgaaaacctcaaccatcaacgttaaaacccgtaacatcgaccggaaaataatgatcgaagtcaaacaccttgccatggagttcaaaatttcaaaagacaagattgatacactgaaagaatacgtaattcgaaccattaaacgcaccaaaaaagaacatgagaaaattcggatactggatgacatttcctttaacatttaccagggcgaacgtgtgggcatcctgggattcaacggtgcgggcaaaagtacgctcctccgtatcatcgccgggatctatgagcctactgaaggcgaggtaatcatcaatgggcgcattgcaccactgctggaattaagcgcaggttttgacaagaattatacgggcaagaataacatctttttgaatggtgctctgctgagcatggaggaagacttcatcaaagagaaatatgacgaaatagtcgagttttctgaactgggggagcacattaactatccggtgaagaactactcgaaagggatgcgtgcgaaactgggttttagtattgcgacgctcgtcaacccggaaattctgattattgatgagattctggccgttggagacattaaattccgcaaaaaaagctctgaaaaaattaaatcgatgatgaaggaaggtgttaccgtactgcttgtctcccattctatcagtcagatcagaaacatttgcgaccgctgcatttggattgaaaatggccacgtttacatggaaggtccggcgaaaaaggtgtgtgatgcatatgtgaaaagtgctaagaagaagtaa

SEQ ID NO: 72833 - DNA, 501 bp, synthetic construct
  source 1..501: mol_type = other DNA
atgatccttatatttctgattatcgggtgctgttgcctattttacgtggtggaaaccagcaccactgttggaaatgcgattactgtagtcaacaaaacggtggtcacgttaccaaacgaattttccattgaaagtcgcgaaacgggctatggtaccctgatcaacaaaaatacaaaggagaaaataaccattaaagatctgggtaaaggcaatttggcactgactaagttcaaaaatgccctcaccgatctgacgaaaaacccggacatcgatcatgttaaaaatagtaccagcaacatcaacaacatcacggcttataaaattgattaccaggatattacaaaagagaataattcggatttgagcaacgtgtatgtatttacgtgtaatcacaccttcctgattaaattagaaaattataacaacaacgttaagtcagacaatgatctggactacgtcattacacatatgaccccggacttcaagcagtctcaagattaa

SEQ ID NO: 72834 - DNA, 3489 bp, synthetic construct
  source 1..3489: mol_type = other DNA
gtggtcctgttatcgacgggtgtggcgtttgctatcagcgaaaacgatgtggctgtaagcaatgatgtgggcattgttaacgagactgtcctagaagtaagctctgatgattcggacctctcagaagcggacgttttggaaacccagactaacgttgtaaccaaggatactttccacaattactttggaaacgatggtaccctgctggataatgtgagcagtgacgagctgatattcaaaggagacttcactggaatcgatgtcagttatatgaccattggtaaaagcgtgaagttgtcgggtgggaataccacgcttaataacgtaacgttcatcattggtgccgataatgtggtgattgatgggtttgtccttgatcattcggatgtttatctgtttgatatagaaaacgtaaatggtgtaaccttaagcaataacataatcaatttcaaaacccttgaagggaccgaggggtatgcgatctttgccaatactgtcaatgattttaagattatcaacaacacgatcaattacgttggtaacaccaaaggcacgatggtgaacaatgcaatccgtgtcacgggcgatgaagactcggcaattgcgtccaaaaagatcatcgtggaagggaatgtaattaacatcaaaatcccttcggtggatgtgggttatgaccctgttacatgggaatcaaaagtgtttagcgaaggtattgttttctattattgtgaggacgtcaaatttatcgataatcgtgtggatctgaagtacaataacttcagtggtggtttcgataccatctacgcactgagtgtacgcggcaatccgtataacttcgagaacacaattgttagctctgacatcgaaatcattaataatacaatcaatgcgaatggacataactatatctacacgatcttcctgtcggcgaatgattttaaactgtttaataacgtcattaattcaacagcggatttttactatgctaatgggatcaacattgatggcccggcatcagaagggatcgtctccaacaacttgatcagtgttgaatcaccctatgacgtttatggtatttattcttaccaaatgaatggccccattgaatatatttcctatgtaaataatacaattatcggcaaatcttacgttggttgcggtatggaaatcgttgaatgcaatccatacattgccgataacctcataatcatgaatggcaactataccttcggggttgtggccagtatcagagataatggcaccattagcaacaactccatcagctctttgggaaacaacaatggtaccgatggtacgggtgatccgctgttgcctctgaactccctgggcattagcgtcaagggcagtgtattaattgaaaaaaataaaatcaactctgggggtattggcctgaaccttgtcgaaaagggcaatattactatcaacgacaacaacatcaacgttaacacgacgggcggggtggaaagctacgccatttactcggataaactgagtaacctcgtgatttcgaacaataacatcttatttaccggaaataccaatggcaccatggtgaataatgcgattcgtgtaaacggtgatgaaaataaaaaaatcattgcgaaaaacatcattgtggacaacaacaacatcaacattaatattccgtctattgatgtgagctacaatccggtcacctatgaggcaaccgtttactctgaaggtattgtgttctattattgtgaggacgtaaaatttatagataaccgtgttgacctgaaatataataatttcagcggcagtttcgatactatttatgtggttagtgtccgcagtaacccgtacaactatgtgtttgatgaagaagacaatatcatttattcaattgtcagtagcgacattctgatttctaacaacacggtcaatgcgctgggcaacaactatacgtatggtatttatatttccgcggagaattttactgttggtgacaactttgtaaacatttcttctgatggtaaatacgctaacggcgttaatgtcgacgccttgtccagcaatggcgtgatcaaaaacaataacgttattgtgaatgcggatattatcgtgtacggcgtttattcggccaattttatggggcccattgagaatattacctatgataacaatacaattcgagtaaatgcttatgcggcgtgcgcgatggaactgatggagccaaatccttatgtttttgataacaccataattgctgctggtaattatacctttggtgtggtggcaagtattcgcgataacggcaccattagcaacaattccatctcctccctgggaaacaacaatggtacgaacggcaccggagattccattctgccgttaaatagcctggcgatcagcacgaaaggcgacgtgataatcaaagacaatgagattgtgacatccgggatcggcgtgaaaacactcaaaggaaatgtggatattctaggcaacgacatccgcaccaccgggaaccacaccattgaggcgataaattctaacctgaccgtcaagaataactacttggtcagcaaaaaagccgtcggcacggactccattgtttcagacaaggaagtgatatcggctaacaataccccggcattaaagacgattatctcggccccaaatatatttacggaatatattaaaggtgcggtattcccggtggctgccttagatgaaaatggagatccaatctcagacatcgtgctctttttgacaatggacggcattgtttataatgtaaccactgatgccaacggctatgcagcatttctgcttaacccggattccggtattcataatgtggtggtctcattcaacggcaacgaggtatacggtccgaaatcagtcaacagtattatctcggttgatgcatcggccagcaagatcgttgccaaaacaagcacaacggtctacctgacttcagttaagagcggctcatactttaacatagctgtaaaggacgtgaacggcaaaggcctggccaacaaaaaggtgagcatttacttcaacggcaagactaagagttacacaacaaactccctgggagtcatcaaattcaaacttagcgcgaacaaaataggcaattaccagttaaaaatgaaattcgcgggggataagaactatacggcatctaccgcaattgcaaaaatcaaagtcattaaacaggcaacgaaactcacggtggcgaagaagacctttaaagcgaaaactaaagtgaaaaagtacactattaccctgaaagacaacaaaggtaaggccattaaaaaagccaaagtgacgatcaaagttaaaggcaaagtatacaaagcagttaccaactctaaagggaaagctacgtttaaaatcaccaaactggcgaaaaaaggtacttataaagcctacgttaaatttgccggcaataaatattacaaagtctcatcaaaatcggtgaaaattagcgttaaacggtaa

SEQ ID NO: 72835 - DNA, 4065 bp, synthetic construct
  source 1..4065: mol_type = other DNA
atggttaaaaaatttaatatttcactgctgttattcctcatttttatctcaatggcgacggtttgtgctagtgataacatggaggacacgttaaacaacaatggttcgattctgagtaatccatcggatgaaagcattttgctttcgaatgacgatgttctagcggaatttaccacacacgaaataaacgtagaaaagtactctatttactttaacaataacggtgatctcattagctctaaggtgaaatctggggacacccttaactttactggagattggaatgaagtgagtagcaagaccttcaatttcaataagaccctgaatattgtgtattctgggtccaaaccaatgaaaaacggtgtgttcacattttacaatggtgcaaccggcagctccattatcggcctgaacattgccaatactgaggattacaattacggcattttcttaaacggtgcgagtaactgcattgtcaaagattgttttattaacaataccggaatgtcctcgtatgcgatttgcatcgccaataatgccaactacaacaacgtatcaaataactttttctgtgattatggtatgaactatgggggtcaaggaacccgatcaaccccgccggtactgcttagcggcgctcatcataactatattgcaaacaatcacatcgagtgcgatgatgccaacgggatctatttgtcgtactatgatgggggtcctctgcacggtggtgttagcaactataacctgatctacaacaacaccgtaaaatacaatgtgttgccgacgtcctgggggtatgggattcagataatgggtggatacaacaagatttattccaaccgcatcattggtgcattccggggcatttccacttccaatggcgcctttaatgagatctttaacaatcgcattatcaatattaccggtgcggacttcaatcaccctgtcgttgaagttggcggggagtacggcatcgtgggctcagccaatgcgataatcataaacaattctattgaaaatgcacgtatactgccgggtagcggcgcgatttatgcgattgataatgcaatcattgagaataatactattgatgttgtgtcctcaggctatggtattcaggccagcggaagtaatattagcatcaaaaacaacagcatcatcaccgaatcgggcgctggcgtcttctggaaaggcgagtatttcgatttggtggtcgttggcaataatattacaagtggcaacggcgttggtgttttagtgaaaaaagaaagtgttaaaaaaatgccggggaatataaccattgttgacaactacatttctaccggaaacaagtatgcaatcgatgcaattgaggtgaacgccgacactagttatgttatcgaaaataatacgattccgaagggtaaaggcattgttgccacgccggaagggtcctatgatccatcaaaaccccgttacatctttaagggaaccacgtatagcatcactcctgaaaattatgacgattatttcgatgtgggaggtacgctcaattccgtggtgaaaaatggcgatattttatacttcgatggtaactttgagaataagggtgtcatatatatcaactcggccgtcaaaattacgggcaaaaacccgaacttttacaatgctacctttcgcatatctgaaggcgtctggattgaaaatctgaccatcaaaaacaaggacagcgaacgcataaatgcctggggaatccttgtatataacacagggggagcgatcatttctaactgcaatatcgaagtaacagaccccaacgcagcctatgccatttatgtggtcgaatccagcgacattgatgttttgaataataacctgacctcgaacggcaactacctgacttacaccctgctggcgatcagtgtctatgattgtaactttatcaacaacagtatccataccatcggcaccggtattgagcatgtctttgaaaatagccattgtgtcgatggcaatagcaactgcatcgacgggtctacgtgtgtgggcggagatacggtgtgtacaagtgggaacacgatcactggcaaccatgtgctgaatgaggtttataggacttatggcattctgatggcgtactctagcggttgcaacattagcggcaacaaagtcaatgcaacgagcaagctgaataaaacatcgaacaccttcaattccagttggggcaataactatcataacaatatcagcacaaacagcatcgtcggtatcgatttatactttaatagtcataataacaccttttcaaacaataatatttatgtcaagagcaatgataattatatttatggtatgggtgtactgggctcgaacaccgggcatgacgctcctgaaggaaaagacgccagcaataatcagtttattaacaacaatattgtgctggaaggcgactattttgtgcagggcctggtgattggccacgaaagcaaaaacaccaccctcattagcaacaccgttaatgcgaaaagcaacaacttttcatatggtattaacctagaagggagccaaaaatcaattatcaaagacaacaacctaaaactcacgtcagacatcgtttatggacttgaagtctttcggtcgaacggtaactttattaaagggaacaacctggatatcaaagcgaagcaggcatatgctatcgcgctttccaatgctgagaataatattatcctgaacaacatcgtcatgaacaacgtgactggtgaggaaattacctataacgtgtgcgattccttaggtgtgggggtggcgggaatctgccttaaattcaactcgtctagtaacaatatctcgggcaacaatataacgtctaaaaaaggttatgcgattgtgattgataaactggccatcaagaataatctgttttacaattatctcaacagcgaaatgggcattggcgataaagctatcaataacacaaataacaatttcgtgaaaggcaattacatctacattctcaatggcctgattccggaagtaacgattaactatttgggtaccgcagacattgtcttgaacgtcggcgtggatggggtattggtgaaattttacatctgtggggaggaaattggtaatgcaacctcttccaacggcgtagccaaattacgttacaaatttgatgacagttatacgccggcgggttactcgatcaaagcgattgcctcgaaaaaggattacctgacgaaagagttcattagctacctcacgatcgaaaaaggtctgctgaacatcaattataacgatgtcactgccatcccaacaagcaagggtaaatttgtagttgttgtagaagatatttttggaaattcggtaagcggcattactgttaaattttatcgccttcagggccgcgatgttttcataggtaaagtcaaaacggataaaaacggcgtcgcgaccctggtggctgaagtaccgtccctgggtaactataaactgcgtgcagacgtggtggaaaatgacaatttcaagtcaaacagcggtaaagcgaatttgattgtggcgtacaaaccgtcaatttatcaatacaaaactaaagctgtgtactacggtaacaccatcaaatacacggttcgtgtgaagggcattgacggcaaatatgttgcggggggcaaaattgtaactatcaaagttaacggcaaaacctaccgcgtgaaaacggacaaatatggtaaggcatataaatccatcaaactgaaagcaggctcttacaaagtaaccgctcagtatggggttacgaaagtgtcaagtaaaattaaatttaagcccatcctgatcgcgaaaaacatcgtcaagaagaaatctaaaaaaatcaagttctcggtgaagctggtgaataagcacggtaaaatattaaaatacaaaaaaattatcttcaagatcaaaaataaaaaatatagtgccaaaacaaacagtcacggtgttgcgatcctgtctattaaaaacctgaaaatcggcaaaaatacgattacatcattctacggcggttgcaccatatcaaatacaataaccattcgtagataa

SEQ ID NO: 72836 - DNA, 4815 bp, synthetic construct
  source 1..4815: mol_type = other DNA
atgtacatcgatgtcaagggggtgaaaatcacgaaacgactggataacaagctgctctttaccctgtttgcagtgatgttcatcttgtttagcctgaactgcgttttcgcacagaacaacaccacagtcaccgatgtgctgtccactgtggaagatgatgtgggcattcagcagatacagagttttcaagtagatgaaccgctcttggcggcgactaataataatattcagattaacgtgaaacatcattataatgaaacggctaatacatgggacgaggatggttacaacctagctaacgcgaccgtcaaactgtatggtgcgaacgataaattaatttcaacacataagaccgacagcaagggctcagtcctgattaaaaatttaaaatccaccaaatattatgtggaagtgagttacgccgattatgaacccaaaaaatcgaaagtcttggattttaccaaaaaatccggaaccttaaaaggatcatttgactttatcccggacattctactgttcgtagattacaaatcccataatgaaaagctgaacgtgctgatgaatatgtcgaagcgtgtggcgttcattagcacagggcaggattacgacgtgtcgcgtgaatggctggtggggtacgcacgtttcattcatatcgacatgttttccgaaggagcatatgccatcttcacggctgagaaactgaaaaaattgcttgcgatctcgcccgctaatgccaactataatgttgcctataccttcggtgtgtatagcaactcaatcctgaacgcgacgggcctgcacattgttggtgcaaactcgaagaataatacgttcaacaccattgaaaacacctatattgggtcgtatttccaagccaaagacatcaacctgtcagatgttttgtatcataatatggaaaactatctgaaatatgtgtactatttaatcaacccgtcaaaatacgaaaatcccacccttaatgattcgaacgcgccgcagatgggtccagaatgtggcttttatcatccagatctgggtattttcaccatctatccggaaggcagcctgataaacaattggattaaaacgaacccgggctacggtgttgatggaattggtagcctcaattggatgatacaggattatccaaagtggtttgtagatctactggacccgactactttatttgaacagtttgaaaaccaatttatcgaccggtttaacccgaacaagaaattcatcgcgattgtcagctactattgcggcggggaagtcgttgattctttaatccgcggttatgaagaaattggccggcctgccttcaacgtgtttaaattctctacagaccctagcatgtctagcatcctgaataaaatcaataatgtctccaaaataggtatttcttcgattactagcctgtacagttggtccctgagctatgcgaatggttctgctgaaaaagacctgtctgatattgatgttgaaatccttaagggcgtaaatgagatcagcaaatacagctacgaaagtgagctgggcccgcaagtggagtggacgtactctgtgacttacccgagtttcgaaggggtgtttagtccggttattctgtcgtatctagatgaggataaggttcatgtaattcaaagcggtgttgataagatggtgcagctcagtagtcgatgggcggatttgaaagacctgaataacagcgaaaaaaccatagctatcgtgctttataactatccgccgggcaaggccgaaattggcgcctcttacttggatgtaatgcagagtacctatgatttacttattaaattgtatgaaaatggttatgctattggggatattcgcaaaatgatgaacattaccgagtttaccaatctgttaattgatagcgggaacaaaggcagctgggctgggggtttgctgaaaaaatacgttgaaaagaactgggatgaattagttaaacataaccagttaatctcaatggatgagttcatcgacctgacgtccgatctgccagatgagttatatgaggaaatggttacccagtggggtgcgggtctgggtaaatcaatggtgtacacagctagtgacggcaaacagtatttggtcattcctggggtttggtttggcaatattttcattacctaccaacccagccgcggttgggaggaagcagatattggtgaagtcattcaaaactaccatgacctgaaactgccgccgcaccagcaatacgtcgcattttatgagtggatggataaagtaaccaaggctaatgccatcgttagcatgggcacacacggcacactcgaatggctgcctggtaaaaacatcggggtgggctctggggattggtcctacgagttaacacgcatccccaccatctatccctacatcgtaagcaaccctggtgaggcgatggtcgcacgcgaccgtggcctggccatgctgattacgcacatgactccggctatcgtctcatcggagctgtatggtaattactcgatcctgaataattatattaacagttataacaatcagattaaactcaatgtgacgagcaacgctaatatctacaaagaaaaaattcttaaattagcgccgaatctggggttccgcaagatgtcgaaaggcgagtcttttaatcactggctggaggaactgcacctttaccttgagagtatgggcgatgacctcatgacgtacggcctgcataacctgggtaaggtgttaaccggtaatgaactaagcgaagaagttgtgacaatcgtaacttcgcagaccaagatttataaccagataatggaatttctgtacccgaacctgaaaggcaaagatttttacaaagatattcaaggcgatgtaaaatacctgaacgaacgtcataccatccaggcattcttacgcaactatgttgatggcctggttaacggctcgagcgtcctggatttggttaataagctgggtgtcaacaaagacagtagcttattctcatccatgaaatacgcgcaggacgtaatcataaacatccaaaataacaatgaatggaatgccattctcactgccctctcgggtggatatgttaaagccggcctgtttgcggacccggcatacggggattcaattccaacaggatatgatggctacgcctccgatcctacgcgtatgccatcggaagccgcctatgaatcggcagtcaacatcgtgaatctgttgcttgcggattattatgaaaagcatggcaaatggccggaaatgactgcactgatcctctggggtaccgaaatatcaagaactgaaggaattggcgttgcagaatttctgtacttcctcggatgcaaaccgaaatgggcagaaaacggcaaagtaattggcgtggagctccttcctttaaaggacctgaaagtcaaactccacaatggttctgtggtgaaccgcccgcgtattgatgtatacgccagtctggtcaccagtaataaagattggattacgtggatggtaacggccactaggctggcggcaaatgcgggcgaaagtgaaaatgacaattatgtgataaaacattacaatgaatatcctactcttgacagactgtttggtctgccgggcaatatcctggagggtacgggtatgagcacgcttatcccaaatacggcaaactggaatatctccacagttaatgtggaaggcatgaacgtgtacttggacacggtttcatttagctggactattgatgagaagggtaatatcaacatcacgaaacagaaagatacgtacaaatatctccttacaaaaacagagctgataacccagaacctagatagcacgtggcgtattttagactcggatgactactatgattggtttgggggactgtataatgcggcttccatcctgcgtcagaaagccgggctgagccgcccggatacctcattcgttgacatccgtgataagaacaaatatgtgacccgcacttatgaggaggagatggagtttgaaatccgtaccacgcttttgaatccaaaatatcttaaacctctgaaaggaacggcggcaggtatgaactggattgcgtcacgcatgcagaacaccttcggtattttgactattagtggcaacaagttgaacaaggaactgggtaatcagatgtccaataccctgctggacttagcgagtggcgtccgggacgccagtacctcttacggcattcagtctgcgattgcgcacatgatctacctggccacccaggggacgtgggacgcggatagtgaaacccttcagaaactcgcggatgaatatatgcggcaagtgctgaaatatggcgtcgcatgttgtcaccacacgtgcaaaaacttggactttaacaacaaggtcatccaggtaagctcactgaccccggcgcaaaaagccgaatttgcaaaaatattggcacaagctaccaataccgacccgctgtatgaggtggaaaaagactccgcgaacaatgataacaacgcccaaggaattgttaacggcacgaccaaagacaaacaatcagattcagaatctggggacaaaacaagctttggcggagactcctctcaagccggcgatgcaaaaagcgcgagccagtctcaggattctagcgattcctcgggtgattccggtgcggatgcctatgagttgtcccagcaatccgctagcaaatcgaccagtggcgcggaatctagcatgccaatctttgttatcattgcgattattattctgattgtaattttcctggtgggatatgtgcgcaaccagaaagacgaagatttcgatgactattaa

SEQ ID NO: 72837 - DNA, 843 bp, synthetic construct
  source 1..843: mol_type = other DNA
atgcataaaaacagcatcatcatcattattctgtctataaccattatcggaatgcttattccagcgggtttttcagcaaatgattaccaaattgtgatcacctacggtgaaactaccaaaaacaatgctgaatataagaacactgttgattcgttctttgaaaatcaagcacatatggacttaaaaggggtcaattccaaaatcatcacggccaatgaggtgaacaaaatttcgagcacaatcactggcaaaagttataatagcaatcagattttctcgtccgccctggtggacctgggcgataatgataaccttaaagtgagcgtagacaaatcgaagattaccacaatcacgggtgatatgtatctctccgccctgaaatcagctggtattaccaacggccacgtatatatcaccagtccggttacggcgacgggtgaatctgccctggcgggcattatgaacagctatgaggtcgcgacggatgttgagattcctgcaccggttaaggaagctgcaaacaaagagatttatacacaggcggaaattgtcaaagagtccaatgtgagtgccgacgacttatctaacttggtggatgacgtcaaggaaaccgtgaaagaagaaaacattaccgattatcagaccatagtcaatatcatcaataacactaccattaactacaatatcaatttgacatacaatgatatcgaaaacctggcggaaagcattgaacagatacaaaacgttcagggcgatattaacagttaccagacggaggtaaatgatgtgctgaatacgaccgatacttcaaacacgggatttctggacgggctattcaactaa

SEQ ID NO: 72838 - DNA, 531 bp, synthetic construct
  source 1..531: mol_type = other DNA
atggacgctattgaagcggtggccatcttaattctggttgtcgctatctttatcctggtgtattactatttgctaaatagtccgagctcgatggacaaactcaaaaacattgtcccagagagtgcagatgcgcacatggacgaagtgttaggtaaaaataatgttgactcaagctacgatctctcgaaagaagacgtgttaggcgataaagaggaatccgaatccatgggcaaacgcataaaggttaaactgagtgacattgatggttctactattaacacgagcgccttttcccataaacttgatgcatttctggaccaaaaaagcgatcagctgattaaggactggagcctggccacgacaaacgatttggataaccttcaagcgaagttcgatgagactaccaataatgtagataccctggaaaaaaacttcaacgagtttaaacagtcatcggaagagttccagaaaatcaccggggaacggctggatgatctggataagcgtatcgaatctctggaaaataaataa

SEQ ID NO: 72839 - DNA, 411 bp, synthetic construct
  source 1..411: mol_type = other DNA
atggaagccattccgacgatccccgatcagatcttctacttgataattctggtaattgttgcgatcgtattgatagttatcgtctttcagtggaaaaaagtggcgcagtcaaaaaactccatcttaattcttgaaaaagaaattgaactaaaaaaaatgtctatggtggaaaaagacattgaatcgaaacgtctgatggataacccaattccgctgcctcaagagcaacaggatagcctgagcgcaatccgccagagtaccactgaagtgcggagcaatgtcggctatctgcattcggagatcaacgaacgactggcccgcctcgaagctgaaaccgagcaacgtaagctggagaagatgcttaaggaaattgaagcaaaagagaaaaagttaagtaaaatgaataaataa

SEQ ID NO: 72840 - DNA, 570 bp, synthetic construct
  source 1..570: mol_type = other DNA
atgccgtacgatagcgatattatcgtgattggctgcggaaatatactatttaaagatgacggctacggtccaatagttattaatcttctgcagaaatatttcaatgataaaaacgattattatgatccggcggtcacgtcgtacgtggaagatgaatttgacaagaacgttttaaatcaaatcaaagaaaaattcgaaggggtcacactgcccgatagtgtgcagtttattgacggtggcaccgcagcaccaatgaacttctttccgctgtacaaagagtatgactggaaaaagctgattgttattgatgtagttgaatcaaatgccgaacctggaactgtgggcatctttgatccaaacgcgatgcaagtcggcaaatatgacaacccgcatggtatgaccgtggaagagcccctccagaagatttctgagaaatgcgaagtggtcattgttggttgtaaaccggccagcatcccgatcccggacatcgatgtgggtttgagtgagtccgtagaaaaggcgattcctgaggctatcgacattattctgaaagaaatcggggtaaaataa

SEQ ID NO: 72841 - DNA, 1215 bp, synthetic construct
  source 1..1215: mol_type = other DNA
ctgaaagatagagtagtgattagccctacaacgcgtcaagagggccatgccgaactggtcatggaagttgatgatgaggggatcgtgacaaagggtatgtacctgagcataactccggtgcgcggtctggaaaagatggttcttgacaaagcccctgaatctgctgtggtgctgtgtcagcgtatctgtggggtttgccccattccccataccttggcttcagcagaggccatggatatggcgctcggcatcgagattccgaaaaatgcgaaattgcttcgcaaagcgacgctggcagcccacaacattaacagtgcagcgattcaccagtttttaattgcaactgactttgtccctgaaaatctgtttgcgacagcggttgacagcgtaagtgaggtacgcaaaaccgtgcaatatgttgtcgacatgattgcaggcgaaggtatccacccatcggatgtccgtgtgggtggcatggcacgaaacatcacgccgttcaccaaagaacggctgatcgaacgcatgacggccctccgtcccaaactcgaagaacacattgaactaatcaaaaactgtgttgttgaaaaaggcttaccggatgacctgggtgtaatcaaccgcccactgatggccaccgatgccacctacggcaccaacgatttcgatatggacgttttctccgaggtgttaccggaagcttggtatgatgacccggaaatcggtaaaaaggcttgctcggtgatcccgctgattaatggcgaaaatgtggaaactggtccgcgcgcccgtatggagaaatttgcgggttttaaaggcaagggtgtgaatgcccagcatgtggcgcgtgcggacgaaatgctgaaaaactacgatgcatgcatggaagcgttggatgcaattgatccggcggctcctgccaaagtaagctatgataaacgcggaaccggcgagcttgggtttggtgtcattgaggggccgaggggcaccaatgtacatatggctaaggttgtcgaaggaaaaactaaattctactctgcgattgtcccaacaacctggaacattccgaccatggggccggcgacggaaggcttccatcatgagtatggaccacatgtgatccgtgcatatgatccatgcttatcatgtgcgacgcacgtcatggtggttgacgacgaagataaatccattctgaagaatgaaatggtgcggatataa

SEQ ID NO: 72842 - DNA, 528 bp, synthetic construct
  source 1..528: mol_type = other DNA
ctggataaagccaacataattatttcaatcattatcgtgttgtgtgtggcggcggccgttgcggcctatggtattacgaacagcgataatccgatcttttctgacctgtccagtatgtccgcgaatgataacgatgcgggcaatggcatcgggaataacacggttaccggtaacggcagtggaaatacaatcgcaaccacatccggttcaggctcggggtcgagcagcagttcaagctccggaagcggttcaggtagcggctctggttctggaagtagctcgtcgtcaagctccggtagcggcagcggttcgggctctggagggggttcaaacagtaactcccgtactcatttaagctattcggaagcaaaatctattgcaaatgatgctattgaagaggctggctgctatgcgggcagtgggagctattctggcggctactggtacttcacggtctacgatgccaacggtaataatgtagacaccattagtgtgaacgacaacactggtgctaccggccgcgggtaa

SEQ ID NO: 72843 - DNA, 402 bp, synthetic construct
  source 1..402: mol_type = other DNA
atggacttacggaaaataggcattctcctaatatttgtgggtattttcgttacaatctttttcatcaatgacgataagcttttcgttccggcgttgacggtgaccgtgttaggcttttttgtaacggtggtaggtttcgtcatcgagattcgcaaacaaaaaatcaaaaacgaccgtctggagaaagatatcgaaagcatcctgcagccgctgattactgaatattcgaatctgaacaaacagtaccgtatggattttcaaggggatgaatacacccagaaacgcattcagttgaaccgtgatctggaaaaggagatcaccgataagattccatatctggaaagtcgcgaaattaaaaaaattgtcattcagttttcccaagaacaggacaaaatgaattaa

SEQ ID NO: 72844 - DNA, 777 bp, synthetic construct
  source 1..777: mol_type = other DNA
atgagctcacttaacgaaaaactgaaactggttaccttaaagggtctgttgatctttatttttttcatattccttatcaatgtgctgctgggtagtctgaaccttatccaaattaataacgcctggatttatatttttgtaatcttttatttcatttttaaacttcgcgagggtttttcaagtttcaagcatgattttcttaaagtgttcacgtttgaatcgttaaaaattatcagcgccatcgtaattctgaacgtcttcatttcctatgggctgctgtacttgagtgactttattctgaacgtctttcctaatctcaattcaattgttatgtcttctgaatatatcaacaattcgctgttcgtgttctacggcgttatcactaccgtttttattagcccgatcagcgaagagctaatttttcgcggcgtgttgctgaaccgtctcaacttaattattccgttggactttagcatcgtaatcacctctatcttgttcgcgtcgctacatagtttcggaagcatcactgcagcgtttatttttgctgtgtgcatggctgtgctgtacctgcggacagataatattctggtcccaatctttgcacactttctgaataacctcattgcggaaataattgttattgcggatgtgggcaacatgttattcaccaacaatgtggtcatgctgataatgtccgttctcgccatcatttccacgttcctgatcttaattctgatcaaaaaacagtggaatatactgaatattaacaaactgtaa

SEQ ID NO: 72845 - DNA, 2493 bp, synthetic construct
  source 1..2493: mol_type = other DNA
atggcttatctcaaacgcatggacctgcccatcgagggcatgcattgcgcttcgtgtgtactgagtgtgaataagacgttcggcaaaattgaaggtgtagaagaagttgatgcggatctggcggccaatcggctgcatattaccataaacccgaaaaaaatcagctatgaagaaatggagcgtctcgttaaaaacctggggtttgaacttcacagtgacgaaatgacgctgcgcatccagggtatgcattgcgcatcgtgtacgatgaacgtcgagaactttctgatccgtgtcgacggtatctttgatgttaaggctgacctgacatctcagaccgccaaaatccggtatgatagctcgaaactggatatgaatgaggtggaaaaggtaattgaatccctgggtttcgaattgttagggattgagggtcagactgagattgatgaggaagcaatttatcagcaggatctaaaagataaactcacccgtatcatcgtcggcgtcgtgtttacggcgatcttgatgatcttaatgttcagtggatgggacccgttaatggggcctattgcgagtttaaatcaagtcacgggtcttcacatttcggcgatgggactgctgtcactgattgtcagcatcggcccgtttatttacatttccctgcccattctgaaagccggatggaatggcctcagccataaaaacttgaacatggatgtcatgtacagcatgggtatcatggttgcttacgttagcagtatttttggaacctttggtatagtgttggatcacacgttcatgttttatgattctgcggttatgctgccggcattcctgatgatcggccgctacttggaagccagggctaagaaacgcacctcggattccattcgtgaattgatcgggctgcaaccgaccgtggcgatttcaattgaagtcgatgaaaacggcgaaattacatcgcagaaggaagtgtctattgcggatattgtcctgaacgatctgttgctcgtaaaaccgggtgaaaagattcctgtggatggcgacgttgtgggcggcgaaagctgtgtggatgagagcatgatcaacggtgagccaattccgaaagtaaaaaaagacggggaagaggtgttcgccggcacgataaatcaggatggagtactgtatatcaaagctaaaaaaattggcaaagaaacggtgctttcgaacatcatccgtttggtggaaaaagcgcaatcctcacgcccgcccgttcagaagttcgcgaataccattgtaagctactttattccagttatcttaaccatagcgattgtggtattcctgatctggtactttgtccttggcgaaaccctgctattctccctcacctgcctgatctccattttagttgtggcatgcccgtgtgcattaggtctggccactccgacggccgttactgtaggtgtgggccgtgcggctgaatttggcatcctcattaaaaacggtgacacactggagaacgcaggccagctggatgtcgccgcatttgacaaaaccggcacgataactgaaggcaaaccggaagtggacgatattatcgcctatgcgacgtctgaagaagacttaattaaacttgtcgcgagcgtggagcagaactcaacccatccaattgccaaggctattgttaataaagcaaaagagttgaatattgaattagaccagactaccagttttgaaaatgtcacgggtaaaggtctgaaagcggaaatcaattctaaagaaattcttgcaggtaacctggctctgatggaatcagagaacgttgaagtgtcgtcaaaacttgcggacaaatattacgaactggagaaactgagcaaaacaattattttcctggcggaagacaaaaccgtgaaagggattctgagcctctcagataagatcaaagaaaactctcgtagaaccattgaggaattgcataaaatgggggttcaaacctatatgctaaccggcgataacgaatctactgcactgaatgtggcgcgtgaagtgggcattgataatgtgaaagcgagcgttctgcctgaaaataagttggagattgttaaggatgcgcagtccaatcacaccaagaaagtgttatttgttggcgacggcatcaacgatgcgcctgcccttacacaagccgatattggggtcgctatgggtaatggtactgacatcgcaatggaaagtggagatgtggttgtgatggaaggtgatctggagaatgttgtggcagcgattcaattctctaaaaaagtaatgcgccgaatcaaggagaacatattctgggcctttgcgtataacagcatcctgatcccgattgccgccggaatcttatatccggcatttggcatcacatttgagccagccctggccgggcttgcaatggccatgagtagcgtaacagtcatatccctgtcactgatgctcaaacgctacgtgccagaaataaaacgcaagagtaatatctaa

SEQ ID NO: 72846 - DNA, 438 bp, synthetic construct
  source 1..438: mol_type = other DNA
atgctggacgaaaaaggctatttttatatcattgacgcgattctggctgtgatcctggtgtcgattgtcttcttagttgtaaacacggcaatttccattccaagcccggattattcttacgattcctgtgaatttcgcactgcccaggatgtcatggaaatcctgagcgggaaagtgaactttaccgatcggaccttcattggtgagatatcgaaaatcctgaaggataataaaaactcaaaagaatctattaatttagttagcaagatttgcaagaacaaattcaaaagtctgaatcttacaaattatcgctttactgagaataaaatcttgaaagaaaaaatcttggactcaagcggcgattacagcaaaagtaacatggtgtccgttgcgacccgtaactacgatgactattcgtacacgctcagtgtatggtaa

SEQ ID NO: 72847 - DNA, 402 bp, synthetic construct
  source 1..402: mol_type = other DNA
atgatgaaactggacaaaaaaattttagaggaaaaaattcgtgagtatcgcgattttaaaagttgtagcgagtcaacacttatggggctgtgcgaagctgccgaatatccgatgtctaaggcagaaatgtgtaaaatcgcgtgcggcttcgccggaggaatcggtggcacgtttgatgaagggacgtgcggtgctgtgactggtgcgctgatcgcgaatggcttggtactggataacccggttaaaatcaaggaaaatgccaaggagattttcaattcgtttaaagaaaaatacggcaccgtttgttgcggtaagataaccaacaacggcaaagataaatccccatgtgtcgactgctgcgtgttcattgcaaacaaagtggcggacctctgggatgaataa

SEQ ID NO: 72848 - DNA, 486 bp, synthetic construct
  source 1..486: mol_type = other DNA
atggacgagaaacacttgccgctctttggtgtcggtccttatctgatgggcctgatcattatcataacctttctgtccattgcagcctccatttacaaaattatcccggtgtataacatcaataaactcaatatcttcctgattaccttgggcataatttcaatcatttttgccatcgtgctgtggctgttggcgatacttaacagtaaactgatgaagaacattaaaaataacaatctagtaacaactggagtttattcgtttgtttctcatccgatctacgcgtgctttcttttcatcagcattggcttaattctgattagccagaatattttactgttctttctgccatttcttttctgggctttcctgacgattagtctgatcaaaacggaagaaaaatggttattcgagcgctatggggatgaatacatcaagtatagcaagaaagtgaaccgtttcattccctttaaaaaaatcttttaa

SEQ ID NO: 72849 - DNA, 906 bp, synthetic construct
  source 1..906: mol_type = other DNA
atgatcgagacaataatcatcattgtcatcttccttgtttacattgcgatgaaatatgttaaaattctgcgtccatatgaaaaaggcgtggtggaacgccttggtaaatataaccgcacggttagcagtggcatcgttgtcttaatcccatttttagaaaacctggagagagtggatctgcgggaacaggtggtagacgtgccgccgcaggaagtcattaccaaagacaatactgtggtggtggttgactgcgtcattttctatgaagtggtagacccctttaatgcgacgtacaatgtagttaacttttatcaagccattactaaacttgcccagaccaacctgcgcaatatcattggggacctggaactggatcagaccctgacgtctcgtgagatgatcaacgcagagctgcgtgaagtcttggatgaagctaccgataaatggggtagcaaagtagtacgtgttgaaatccaaaaaatcgagcctccgaaggatatagtggaggcgatgagtaaacagatgaaagcggaacgcatgaaacgagcctccattctggaagcggaaggctacaagcagtccgaaattaaaaaatcggaaggggataaacaggcagcaattttagaagcagagggtaaagctgaatctattaagaaaatggcggaagcaaagaagcaagcgctcattctagaagccgagggtgaatcaatggccattgagaaggtctatgcggccattcatgaaggaaatccggatgatggcctgatcgctattaaatacttggaatccctggaaaaaatagcggatggaaaggcatcgaaaatttttctcccgttcgagagcagcggcgtgttgagttcagttgccggtatcgctgagctgtttaaagaggacaaaaaagaataa

SEQ ID NO: 72850 - DNA, 408 bp, synthetic construct
  source 1..408: mol_type = other DNA
atggagattttcatttggatcatcttggcgatcctgttcttcctgctcgaaattcttaccggcagttttattctggtgtggttcggtatctcttcaatcgtggcagcggtattaaactattttaaatttgatttctacacgcagtttggcgcgtttatcgtcatatcgatcattctactggtgtttactaaaaagtttgccattaaagtcacaccggaaattaacaaaaagaccaccgccgaacggctgatcggccgtaatgctaaagttgttcgcaaaattgatgataagaacattattgtcaaagtgtgcggtgaagaatggtccgcttatgcaaaaaataatgtggacattggggacacggttaaagtatgtggaatagagagcattaaattaatcgttgagtaa

SEQ ID NO: 72851 - DNA, 216 bp, synthetic construct
  source 1..216: mol_type = other DNA
ttgggtattatcattaaaagtctgaaatacttcatttatctgcagattgaagcctttaaccatgaatttttccgttggccgaaacgcatggagtactggaaaaaagcactgagcattatcatcttcttttgtatcgggcttatcctcatggatatgatagcgtgcggcgacttaccagataagaataccgcttcgtcctttatgttttatatttaa

SEQ ID NO: 72852 - DNA, 2121 bp, synthetic construct
  source 1..2121: mol_type = other DNA
atgaatactcacaacatcatcacgtcaaccaagaatataattaacctgattctgcttgtgttacttaacatcctagtgatcatcttgatgtcagacttgtatggtgatttttccataggtccgtggtacaacgcctttttcatcgtcctgagtatcaccatcgccaatacgctgctctggccaatttttaagcgcttttttatgaagttcatgatccagactctgggcattggtaccatatttattaatgcgttaatcttttatattgcttgctacttcattccgaacgtggatgtcggtttctatgcgtctattaaagtaccgtttttcatgtccattgccaccacggttgttaccaacatgaccaacactaactattacaatcggcatctgaaaaatattgtcaagtacgcccttaacaaaaaaatcgactcaaaaagctatccgggtattatcatgctggagattgatggattgtcgatcaatattctcaaaaaagcaatcgacaacaatatcatgcccacgattaaagagtggatcgatagcagtactcacaacctaaaggaatgggaaacggatttatcgtcgcaaaccggtgccagccaggcgggcatcttgcatggaaataatgaaaacattgtagcgtacaggtgggtggaaaaagaaaatgacaataagataattgtttctggcaagctgagccacgctccgctaatcgagaaacgtatcagtaatggggaaggattgctggtggatggcataagcgtgagcaacatgttctcaggcgatagtaagagtgcaccactgacgtcgtcaaaattagggacactcactcgtattaaccataaaacactgaacaccgtctttctggacacgtacaactaccaacgcatctttaccctgtttttatgggacattttagttgaactgaagtcccagattaaacatttgattaagaacatccagccacgtcttcgacgtaccgtggtgtatgcggctgtgcgcgctggtgcgaacgtcgtgctgcgtgaagtgaccacagacattctgacgagcgaaatcttaaaaggagagatcgacactgcgtatgcaacctttatggggtatgatgaagtagcccatcactctgggacgcaggatgaggatgtgtggccggtactgaaacagattgatactcagattcaacgcctgaccaacgctattgatatgagcaaccgcggctacaaacttgttattctgtcagaccatggccaaagtaacggggcaacctttaaacagaaatatggaatcacactcggcaattacgttcgtcggtttctgccagacgatctgaaagtgtatcggaatgagttcaatattgatcactttcgtgatgccgttttctctgaaaatatcaagttgaaaattgtcaaagagaaaataggtgatttccgtgacgatatctttgatgaaaatacatatttccagaatattcgcgacgaacttgaaaataaaaaacctgcgattatttttgataatgaacaataccagaacttacgcaaaaaatattccaatagcctcgaatacattaaaggccatgaaagcatcgagcagagcacgaaaaaagccaaagattctgaattgattgttctgggttctggaaacctgggcttaatctatctgacggaatggaagcagcgcctgacctatgaagaaatcgtcatgctgtttccggagttgatccccggcctcgtaaaacacccgggtattggcttcattctcgttcattccatcaccaatggcggcatggtgattggtgaggacgggatatactacctggatacggacaaaataatcggtgaaaacccgctgattaattatgggaaaaacgcggcaagacacctgaaacgacaaaacacctttaacaacatgcccgacatcatggtcaacggtttctatgatgaaaaatatgatgaagtaaatgcattcgaggagctgattggcagtcatgggggtcttggcggcgatcagacaaaaccgttcattctgtatccttcggaatgggaagatcctggtaaactgattggcgcgtccagcatttacgaatttctgaaaaaagagattaatgaactgaaatcgtaa

SEQ ID NO: 72853 - DNA, 852 bp, synthetic construct
  source 1..852: mol_type = other DNA
atggataatttcaaacaacgcctgaataaatccaaagaagctattgataatgcggattatattattattggtgcgggcgctggattcagcgccgcggcgggcatactctattcaggcaaacgcttcgaagataacttcaaggacttcatcgaaaaatacgatatgaaggacatgtactccgcagggttttatccctttaaaacgcaagaggaaaaatgggcatattggtgccgtcatgtgtacgtaaacagatactcggtcgggaaaacagagctgtacaagaaattatttaatctggtgaaagataaagactattttgtcctgactaccaatgttgaacaccagttttggattaatgactttgaggataaacgcatcttcgccacgcaaggggattacggtagcatgcagtgtgaaaaaggatgccatgataaattatattcaaacgaggattttgtgtatgaatctctgggtaagatagaaggttgccgtatcccgtctaacctggtgcctaagtgtccggtttgtggcggcaatatggatctgaacctacgcaaagaccagttcttcattgaagacaaaaagtggcacgaaatggccagtaattaccagaactttttgtcgcgtattgacgaagacaaaaacatcgtacttcttgaattgggcgttggttttaacaccccgaccatcattcgctatccgtttgaacagatgacctacaataacaaaaacatgactctcattcggctgaaccgtgactatccagatgcaatcgatcagaataaagatcgtacgatcagtttcgatgaggagatttatgaaatctttgattattggctgagccgattttaa

SEQ ID NO: 72854 - DNA, 2811 bp, synthetic construct
  source 1..2811: mol_type = other DNA
atgaatgcgaaactcaacaccacctgcttcattttactgtttatttttttgattaccgcggtctcagcggcggataataaaaacgaaaccctgctgactcagaaagaaacggatagctctcagaaattatgtaagtcaagtgttagcaaggaaacttctaagaaagagaaagtcacgctgaaagcccctaatcttaaaatgtattataaggatggcagcaaattcaaagcgacggtgaaaaataaaaacaaaaaagccatcacgaaggcgaaagtggactttacggttaacggcaaagtttacaacaaaaagactgacagtaaaggtgacgcttacctgaccattagcagtttgaaatcaggtaattatccaattaaaatccgttttgctggcaccactaaatacactgcaatctccaaaaagagcacaattaccgtcaaatcgaccatcaagagtaacgatttcaagaaatactataaaaatacctcgccctacacttctaagttttataaccaaaaaggtaacatactgaaaaacaaagccgttaagttcaagttaaataagaaacactacacggttaaaaccgacaaaaagggtgtgggcaagctgccgattaatctgaaacctggcacctacgccatctccattataaatccgaagacgtctgaaactgtcaacaaaaaaatcacgataaaaagcttaattaaaactaaagatctgagcattaatgggcagaacgatggtaaattcaacgtaaaagtcttcaataataaaggcgaagtttatccgaaccagaaagtgacctttaagattaacggcaaaacatattccaaaaaaactaacaaaaatggcatcgcaacgctggacatcaatctggatgtcgggaagcactccatcaccaccgaatatatgggtctgaagaatacgaacaagatcaacataaacaaaatcgtgaaatccaccaattatatccacacaacacttattccgaattatgttaacgtgacagcgaaatatgtggttaataactctgtttactgccttaaatctggtatcaacggcatcataaaaatgccgaaaaatgaaatctttaaaattcaggttgggggcaaaatttacacatttaccaccacgtcaattaacggaatcaattccatcacgcttcggtacaacaataattatctcgtgcccttcgatgggtcgggtgtaaagagttacacgaaccgtaacaagctgacctcagatggcatcattattagcaaagtcaatgattacacccagattgactatcagtcgaaaaccaaagataataccgctctgtttggcttttatgcgagtaaggggctggataaaagcgaaaccttgacctatgtggaaaatgataaaatcacggccaaaattaacttcaacacgttgagctttgatgaatttagcctccgatacagtctgtctgcattgcatggaaaaacaatttacaatttcaattatggcaattacaacgacaccattcgctttgcaaacaccaacactccggtcacattctcgtattttggcaattcaatcgtaggttatgcctcacaagagaccattatcactaaatttaaggtggatgaaattaaagaagtagaaaaggaggagaatatcagttacggcctgaacaaaaaatatcgtacggcgatggggttcgaagtgctgcaatcgtatactctgattaatgaaaaaataaatcaaaaaacgctggagaattgggtgctcaaaaatccggactatttaagtcgcttcggtgtcatgaatatttacggtatgcatctggcatctcttgaggtcgcttggattgcggatataatcgcagataagagctccaaagaactgaacgtgaattggaaaagaaacaataccctcacaatcttgggtggtattaacttagaggacacttatcttaatatcctaaatgcggacatgggtatgaaagtaaccggcaaattcgacaatgcgttcctcttcaaactgctaaactcaatgaatctgccgaacattgaggaatatgcgttattgaaagttgcctatcgttacttggataaaagctcgaactcgctggataacgtatttctgtccattctaaaaaacaactttagtattgcgcagctggatgacatgatttacatcttttccgaagccaactcaaaatctgcaattatcctgaatacgagcagcggtgtgtcaagcgtagtgctcgctcagaactccgtgtataaaggtagctcgcttaaaaccacgcatgactgttgcggtgtgggcattatcccaaaagacataatcaaaggcattaaagaaacatttaacattattaacaacggcttatcaaacatctaccccaataagacgcatccaatttcgaaactgttttatatggctgcaaatctgctggccaaaccgttaaacggggttggatcgctgggtatgaacttgattaccaccatggcccttatccagtctggaggaacaacgtatcgcaacgaaatggttgagaagagtgattggcatgaggtgatggataaaattacttttacccgcccgggctatctgcagtccaaaaaaatttacaacattccgaatgaaaaaggaggctgtgattttattgaagtaaaaatccgggatgatatgaccctggatcgcaacaatgcaatctatatcagcgatgggaaaacccgtaaactgagtaaaacagagacgtacaaatatttcattgatgactactggacaccatttagcatgcctcaaaaatattgggacaagagctggaaccgctaa

SEQ ID NO: 72855 - DNA, 330 bp, synthetic construct
  source 1..330: mol_type = other DNA
gtcatcaagattaaaaaagagtccaaatttaccgtatcaattattatcatcctgtgcgccttaatagctatcacccttgtttacccaaaatatagcgcgatctgggatgtggcctttctcatttcgattttttacaccagtacacagactattctggacacgagtaaaaagtctaaacgcaaactgaatattaacattgtgattatcatcatcttcgcaaccatcattgcgttctatgaaatgtcgattggcaatccgttgattttctccacggcgctgttaatactagcaaacctgctggatagcactttgaataaaaagagcaactaa

SEQ ID NO: 72856 - DNA, 957 bp, synthetic construct
  source 1..957: mol_type = other DNA
atgaaaaacacctggaaacttaagctgcgcatgattcttacgtcagtggtcatgtttacgatagtctatttcctgatcatgcttgtcgggttgtacctgggtgtgagcagctggaaactgtactttggcgcgagcctggtaatcgtatttctgcagtattggtttggacctagcctggtaaaacgtagcatgaatgtgcgccccttatcagaggctgaagcaccgcatattcaccagatggtgcaggagctcgcggacgccgcgggcatcccaaaaccggaaattggtttgtctgaaattaacattccgaacgcatttgcctatggccgcagcagccgcagtggccacattgccatcacccgtccgattctgggactgctggaccgtgatgaactgaaagccgttatcggtcatgaaatggggcatattaagcataatgatatgattgttactgctgcggttagtgttatcccaatgatttgttactacattgcgctgtcgttcatgttttccggggataatgacaacggtggcggcatcataatcggcattttaggatacgtgttctatttgattggtcaattgctggtgctctttatctcgcggactcgtgaatactatgctgatgaagcaagtgtcgattttggcaaccgtccggccgcattggtgtcagccctgtataaactgtcgtatggtgcggcgagttgcgacaagcagaccatttctgaagtcaacacaaaccgtgccttcttcataaatgatgtaaacaatgctcggcatgatgtgtcggatttccagcaaatcgactttgatggtgacggcaaaatctctaatgatgagttacgcaggctggcaaattccgatgtgaaagtttcccgcaaaaatgggctcatggaactgttatccacccaccctgactcacttaaacgagttaagagactagcggagttagaataa

SEQ ID NO: 72857 - DNA, 1446 bp, synthetic construct
  source 1..1446: mol_type = other DNA
atgttgtggactgataaataccgaccgcaagaactgagtgctgtggtcggtaataaaaaggagattaaaattattaccgattgggttaatgcctggaaaagcaataacccccagataccactccttttagttggtccgccaggcattgggaaaacgaccctatcgcaaattatagccaagcagttctcggagcatattgagctgaacgcgagcgataagcgtagccaggagatcatcaaaagcacgatcggagagagctcatcttcccggtccctgtttggcgacgagtacaaactgatcatcctggatgaagtcgacggcatccacggaacgaacgaccgtggcggtgtgaaagcgattggtgatatcatcaaaagttcaaaacatccgatgattttaatcgcgaacgatttttactcaaaacgtttgcaatctatcaaaccgaaatgccaggtaattaagatgaagaagagccggtggaatagtatcaccaaactgctgcgcgaaattgctcaagccgaaaacgtggatgccaatcctgccgcattaaaagagattgccctcaaaagccagggtgatgttcgatccgcaatcaacacgttgcaagcactctccagtaaagattcgacactggaagtccaggatgtagaaaacatgaaaaccaaggatacccgttccgacatctttaatgcgattaccggtgttttaaaaagcaaaacacctgcacacgtgaaagaagcgatgtggattgaagaagatccgacactggtcatggaatatattgcggaaaacattccacgggaatacaagaaaaaagatgaaatcaaaaaagcttatgactacatttctaaagccgacattttctttggccgcacccagcgcagccgtaactacggctattggaaatatgcaagcgactttatggggattggggtcagtaactccaagcatgaaacctataagaaatttacgaaaatacaaactccgaccatcttcacactgatgagccgtaataggggcaaacgcaatctgcgcgatgaaattgcggaaaaaatgtctgtaaaactgcacgtttcgcattcgatcgcgatttcaatgttcccgtatcttgagatcatgtttaaaaacgacgaactggcgtgggagatttctgattatctggaacttgaagacaatgaaatcaaaagatttcgctctaaaaaaattcctaagaaagtgatcaataaaatggaaaaacagaaagctcagatgcgcgtggaagagcgtgaccgccgtgctgaggaactgaaaaaccagatgataacggcggcagtggagattgaagattcatatgaaatttcgaaaccggatgaaactaaagccgaagataccgttaagaaagaacccccgaaagagaaaaaggaaaaaaagaagactgacaaacaggtgtcattgttcagtttctaa

SEQ ID NO: 72858 - DNA, 1386 bp, synthetic construct
  source 1..1386: mol_type = other DNA
atgaactatcttgtggtgggtgcgggtaacgcgagtcggccggttgcacgcctcctgaattacctgggtcacgatgttgttgtcacagacttaaaagatatttcggagtttaaaatcgaatttcaacgtagtctgattgaaatggaaaaagaaggggtacgcctggatatggctaacaaaaatccgtcagtagaggggtttgatgccgtctacatgccgccgaccttgcccgagaccgccccaatcgcgcaaaaaatttacgagtcggacctgaaaattctgactaacgaagagtttagcaaaatcgtaaatgatttaattgacgtggatatcattgggattaccggcacgatgggcaaaaccaccacgacgtttatcacaactagcttgttcaaacaggcaggctataaagtgtggtcatgctcgagccttgtcaataatttagtttctgaagctattgtggacggtattgttaaaggcaaggtcaacgaatgtgatatcgctatttttgaactgcctcatggtacgattggtctgttaaacaaattaaatattaaaattggtctgctaactaacatcgccgaggatcatctgtccgagttcggcggttctctggaaaagtaccagaaacgtaaactgctgttgcaggcaatgagcgagatcttcatatccaacaactcatgccatgatatcattgaaaaagtccgtgatgatgcgatcttttacgcgttagatgaagacgtggacttcaaaggtaccgtcggtgataagtcactcactattgcctatggcgacaacgaatttactacaccgtttaatatgatgagctatttcttcgagaactctgtcgccgccgcctccattgcgctgacctatggagtgaacgaaaaagatatcatcgatgctctgaaggcatttaaaggcttgccggcgcatatggaagatgttggggagtataatggccgcaaagtaattttggattctgcgtttctctatgatggaatgaaaatcaccctggactacttcaaagacgatagcgtggtattgttcctggaccactttgataccctgtcggtacgagacaaggcagaagtgggcaatctaatcagtgaatataaccttaaagccgttatcgccagcggctttaatgaggttacacaggcggtggaaatggatgctgcgaatgaaattctggatgcgataacgaatatcaacattgaaaaagtggcagttgaaaccatagaaaaagcagcggaactgacgttcaagtattccgagcctggagacgtgatcctccacatggggccacttatagcatatgaccgcctgaccacggtggataagattattaaaggccttgaacgtggcagtaaaaagtacgaataa

SEQ ID NO: 72859 - DNA, 834 bp, synthetic construct
  source 1..834: mol_type = other DNA
atggatatattacaggctatcatcattggcattgtgcaagggttaactgaatttctcccagtgagtagctccgcacacttagtcttcgctcagaaactggtgggcgtggaaagctctctgacctttgatgttctgctgcatttgggaaccctgattgcggtgctttggttcttccgttgggacataattaaaatgctcaaaagctggtggttgagcatcggtgatctgctgcagggccgatttaaacagggtttttatgacgacccttacaagcgccttgcgtggtatgttatcctggccacgattccggtgggtattgttggcgtcctgtttgacgatgcaatcgaatctctctttgcaggcgcactgtatgtgccggccttctttttatttgtaactgggacgattctgtatctatcgcaacgcatgaatagtggcaagattaacatgaataatatgtcgaaggtcgaggccctcgtaatgggtttggggcaggcgtgtgcgatcttgccgggcctgtcacgttcaggaaccacaatcgcagccggtttggtaatgggtcttgataaagagttcgcggctaaattcagtttcattctgtccattcccgcgatttttggagccttcatttttaaactgaaagacatcggttctgccatggatgttaactttctgccggttttcatcggctttattgtctcgatccttgcggggtacctggcgatcaaatggatgctggatttaattaaaaaccggagcctggatatctttgcttattactgctggctgatgggtattatcgtgttcatgggctcaatttcccatatattttaa

SEQ ID NO: 72860 - DNA, 1557 bp, synthetic construct
  source 1..1557: mol_type = other DNA
atggcaaacaagctgatccgtggcagtttaataattctgataggtaatgtaatcttccgtatcgggggttacatttaccgtttcctgatggccattctgctgggccctacggcatatggtatcctgggaattacgctcccatttcaggggatttttcagactctgtcggcgggtgggctccctcccgcgattgctaaatatgtcgcagaatacgaagccattgatgaaaaggacatggctcggcaaacaatctacactgccctcaagattatggtttttctaggtttattctttggcgtcttgatgattttcattgttgcgccctatttggcatacggctatttgggcaaaccggaagcgctgatcccgctccagatcgtagggcttattacaccattcagtgtgatcgtgggtgcctttcgcggcgccttccaaggggtatataaaatggagtatatcgtctatacgcgtgcggtcgagcagcttggtatgattctgttcgccactgcatttgtcctgatcggtctgtcgaccgtgggagcgttatggggcaccgtgttaggatatagcctttcggtggtcgcggcggtgtatatcttcaaataccatatgggcaatttaatcccggaaccgagcgacgattttgtgtttacccgccgtgatgagttaaaactggccacggtcctggtgaagttttctattccggtaattatcacagctatcgcggaaatgctgatttacaacatctgcaccattgtgatgggtaaatttctgacctttgatgacattggatttttcgcggcggcagatcctattgcacgcctgccgctgattatttcaatctccatcgcaaccacaattctgccggcttcgtccgaggccttcaagctcaaagacattggcatgctgcagaaatatgtttcagaagcttataagttcagcttgttgtttgtggtcccgatgtgtgtgggtcttgcattgtttgccgaaccaaccctgcgagtgctctactttaaaaaccctgcgtatgtggctggcgcaatggcactggccattctatctatcggcatgaccttttattccatatttgctatttccaccagtattgttcagggcattggcaatccgcgcatcccgatgtatattctggttggcggggcggttgtgacgggcgtgcttaactggatcatggtgccaactctgggaatcgccggtggtgccctggcgacgagtgttgcgtgcttcctgatgatggtcccatgcatatactttgtatttcgcttaaccaaaaccaaagcgccggtcgtagcagtagcgaaaatattggttgcgagcgccgttatgggtatagttgcctacttcatccccaaaagcacgttatttctgttcccggggatcgtactgtgtatggttgtgtacttcttcgctttgattctggttaaatttttccaaaaagatgatatcgagagcctgcggaaattttcatctaaattcggcccgtttagcaaacttattaataaaatgcttaactttgtggaacgcattgaatttagataa

SEQ ID NO: 72861 - DNA, 585 bp, synthetic construct
  source 1..585: mol_type = other DNA
atgaagatctttggcatttgtgcgagcccccgtaataatacaacggagtatgcgttatccaaggccatgcggcgcctgaatgaagaaggcttcgaaacggagatgtttacctgccagagcaaagatattaaaccgtgcatgcattgtgattattgtctggaacataaaaaatgcataatccaggatgacatgggggatgtttataaaggtcttttgactgctgacgggattattctggcgaccccagtccagaacggtggtatcagttcgtacctgtctgcaatcatggatcgtactcgagcactagaggctatcgactataacatcctccgcggtaagatcggcatgagcatcaccgtgggcggcgaccgtacaggtggacaagattttgcccatcttaaaaatattacctacttcatgatacacggcattattccggtaagtggaggcccttttggttctaacttaggggcctcattctggtccaaagattcgctggatgacattaaagaagactattacggcatggattcactgaaccgcacgttgcacgaatttgaaaacttcctgaataaatacatttaa

SEQ ID NO: 72862 - DNA, 339 bp, synthetic construct
  source 1..339: mol_type = other DNA
atgattcgtcgcaaaaaagggaaattccttagtcagggtgaagaagatccaatgagtggcacctccaacctggttgacgtaatgttggttattgccgtcggactgctgatctttctcgtgatcagctggaacatgcagaatattgtcttcaatgaaaatatggatgaacaacaaaaggaaaaggtgaaaaacgcgatcaaagaggtgtcacagattgaccagggcaatgagttaaacgataccccggatataagcaagagctctggcaaaggttttactgagatggggaaagtttatcgggattcggacacgggcaaactgatcatggtggaaggttaa

SEQ ID NO: 72863 - DNA, 642 bp, synthetic construct
  source 1..642: mol_type = other DNA
atggtggctattccgggcagtgagtttctgactgcggcgctgaatgtagtgtctcaaagtctgcagattcccgtaattattttcctcttgatttttgccgtgtttgcagtttttgcgttcggcggccttattagcgactaccgaacgcgtatcaaactgaatcgggattataaggaaaagctgatctttagcctggttaactcgaaaaccgtcgatgaacttaaacacgccgtggatggttccgaaatctacaactcgcagaaagaagtgctactgaaaatagccgatgcacattcactgtcttgcgaaagccgtgaatcctgggctttaaacctgatcgaggaagaagaggtcgtcatggccaaaagtcttgaaaaaatcgatattgttacccgcattggacctactctgggattgatgggcacgctcatcccaatgggtccgggcctcgccgcattaggtaatggggacgtgtcaaccttggcggcggcgatcattgtagcattcgacaccacagtcgtgggtatcgggagcggtgctgttgcgtacgttatatccaaaattcgccgtcgctggtatgaggaatattcgagcaatctgcagctgttcgtgaatgccgttttagagaacctgaacgattaa

SEQ ID NO: 72864 - DNA, 684 bp, synthetic construct
  source 1..684: mol_type = other DNA
atgagctttagtttgctgtggagtgtcgggtttgccgtgtcaatcgtggttttcgcgatctccattggtctcgtgattaattccaagattaactcgaataaaaacctcgtcaagttagtattcgttctgttcatctctacgctgattcttatttattcgatttgcattttcaaaatccagctcaacagcattatcggtagctataattacgttctgttgttcctgattgccttcctactgatgtttatcggttatatcattatcaaagaaaacgggtgcggacgtaccttcatcaatgtgcttttgctgtcttacctgagttttatcctagtgatgttaatctgtataggctctaaagagtcgatttttggcttggacgatctgcaaattagcttactggcaaccctcctgtttaactcactgatccttgttgtattctttgcgtgccgcaaactgaagttaatcgatcgctcctaccggagttttggcagcttgtatctgatcttgggcatttattgtttaatgatttcactgctgcttccaaacatcatctcgctgaatatgggcgatatgaaaccgataaatattgtatccattgacagcatagcttttatttttattcttctgattgtgataatggtcctgggtctgctgtactataaacgtaacactttactgaaataa

SEQ ID NO: 72865 - DNA, 516 bp, synthetic construct
  source 1..516: mol_type = other DNA
atggagtgtaaaaaactggcactgttgatttccgtgatctttatcatgtccttcgccgcgtctggggtattcgctcacccgggtcatggctctgagtatgtggaagaagtgacttctgatgatgttggctcatcaagtaattccggatcgagcagcggtagtagcggctcgtccagtaacagcggtggttctaccgttccagcgagctcgagctctagtagctcgagttcgtcacgcagctccagttactctagctccgacccgtattcaagcagctcgagtagtagcggagcacacgactccaaccatgacagctaccagggctcatcaagcaattcggtcgtcaaagataattcgtcacttaaagacgccaacaagaccaatgaaaacttaacaaacgattccggcgaaattgataatgatgaactgtttacggtaaacaatatcctgctgctgattatcgtgttgttttgcgggtttttcataagtgttattctctttaaattattctcttaa

SEQ ID NO: 72866 - DNA, 2931 bp, synthetic construct
  source 1..2931: mol_type = other DNA
atgggggggaaaaatattaacaaacacctgattagcctgctgtttttttgcatcctggtgctgctaatggcaggtggcgtttatgcagaagatatcggtaattcagatgttttcgagaatccaatcagcacggatattcagcaagacgatttatcggaagacgatttggatatctcgaacctgaatgtgaaggtgaactatcaatatgctgatgataatggaaaaatcaaccctacgatcaaagtgaacgataaacatatcatttcaaaggaatttaatagttcctaccagaactataatgtgatcatcaactctacaaacattgccgataaacttaatatttcgatctctgcaccgggctatttgacccaatacaaaatcgtcactccaaacatgggtaagtctattttggccaatgtcacctttaatatggaatcttcggaaagctacaagctgggtcgcgacgtcaccgcggaagccgataaattacttgattttaaaaatgctgatgatgttctggcgattacaaccgcgggggttgcaaaatataacggtaagacaagcgaagacgccatggaagccatggttaattatggaaagataagctatagcaatatactgatgctgcgtcaaagtgctattgatccgattgattttgcgttcattgttaagaaaggcaatgagttaaaagcgatcatcttccagaatgcatcgaccaaatactcctacttgggaacgatttcagagaacatgaccaaagctcagtggaacaaatattataagtcccttgtgggcgaaaattcctgggccttcgctagcctggcaaacggttgggctgcgggggtgtcgcgcgaaattcttcaggaagccgcgtttcatggccacatttgtgagggtacgctgggcggatacagcattatccaagctttgctgaaatactatccgccggagcaagaaaataacccgggcggcattgggtctccggcagatattaccgcttacaaagtcctcggagttccgggcggctcggatgacgacgcagcactcttctttttagacgatacaatcggtaaaaccggctacgctggtatgaacaccaccaatacgggggccaccgagaacatgatcggcttcatcaaatggaatagtaaacagaagaccggcgatctgatcatcatgtcattcaactccaccaaactgaaaaaacttttcaaaaaggaaactaaaatcaatgctgatgcgggcagtctggaagaattaaaatactgctcttggtggattaataagattaacaacaatcctgagaaactcgtggattttctgtatgaatttaccggcctgaaccaggaacaatataactacttgatgggcacgacggaaaacataacctatgacggcgagcctgccgagtacgggcttgatggtcacggtctcgatttaaactatattttaagcctcaacctccccactgcgaaacgcacaatcaattccgttgcgcatgcgaaactgaccgacgcggaactgaaacagattggtattgacgcagccaataaagcgaaaaagatattcaatgaagaattgggtgtggaaattgaccgagacgacattgactttctagcactgactgatgcaggatatgcctttctgaacggccaggatactgtagttgttcgtgacggtcttcatgaagtcctgggcggcacattatacagccagaatttattaagtctgcaccaggcggtatggaagccgctgtggtttgccttcgccattcgttacccggattctgatctggttgacatgatctatctgagatataacccggatactaaagatttctttgttggaacgcttgatggtaaccgcgttgtggacattggtttcgaaacactgaataatagcgataaactgaaagcgattgcaaaatcttttgtgccagacggaaattggtttaacattcagagcattgtaaacgcctggaatgaacatcccctctttgaccagatggcgacgttcctgtaccatgcgcatgtgtgcccgggcgtgcaaccaggtttctttataacggactatatccaggaaaaatatcccctgggtgaaaatgaaagctacacttacatcgcctctagtatttattgtaaagatgacagtttgacgtacctattggatttatcgccgggcctgggtactttttacgtacagaaactgccaaaaaacgaaaccgaaaatggaatcagccagggggttctcgtcgtctgggataaaaacctgaaaatagggaaggccgtgattgtgaattttgatgactggggcaccattgacaccagtatgtatgtaaccagcgaggcgaaacgggcgagccagattaaagcgtacatcgacatatatgggaaccgcaacaatccaaatgtgaaaagcaaacccattgtctcaaccgtaaacgagaaatggatcactgaggaacaattcaacatgctgaagcagggtgcgggtgatgatttcaacgtactctcctacttgaaaagcctggatgacatcacgaaagaggatctgctgaagtcaatcaatcaaaactccaacagtaactcaaactcaaacagcaagcctaacattaaccctaatagcaattcaaattccaactctaacagcagttcaaatgcgatcgcctcgcacacaaattccaacccgtcaagctcgggcagtgtgggtacgtcgggtgccgtcgtctccagtgcatatgtgggcgagtttacgaaagacgcggaatctgaagattcccagaacggcccggatgatgcaaaatcctatgaggtatcgaaatctccggccgcaaaaagcgcggattcaaatagtctgatttatgctctgattggcgtcctggcgattggcatcttgcttggtgtggggtatatgaagcgtgataaaaaataa

SEQ ID NO: 72867 - DNA, 624 bp, synthetic construct
  source 1..624: mol_type = other DNA
atgcatttacctgatggcatcatcagtttcgaacaggcaatcatctattggacaatcaccctgataattgtttcactcttcttttacaaattttctaatgatgaaaataaggaaaaacgcatcattagtatcgccttgttcagtgtttttacgattggcattacaagcctgagcatcccgtccccgcttggcgtgccaatccacttcttcataattccactgatagcgatgctgctgggtcccttttcgagcacgatagtgtcgtttgttactctgattatgcaagcgttaactctgaatatgggtggtatcacgagcctcggtgcgaacttcattgtaattggattcatcttgtctgtcgctacctatgggttttacaaactatttctgaacctgaataaaaaattcgccatctttggatcaaccgtgattggcattattattgccacctttggccagatcggcattctgcttatttccggtgcaatgaaccttgacgtattactgagcacgctgttgccgttttatgtcttcatctcctttatcgaggggtttgctaacgtgattattatcaccgcgattgagaagatcaaaccggaaattattgaaattaacaaaatttaa

SEQ ID NO: 72868 - DNA, 483 bp, synthetic construct
  source 1..483: mol_type = other DNA
atgaaatacctgaaaatttcaattttgctgctgattttactgctgggcatctccacggtgtcgtcacatggagtagatgtgacagcagacaccatggttgtcgcgaatgacagcaatggcaaaatggtcaaaagtattgccgaaagcaataacattaacattagcgtttacaaattcacatctgaagatgaagttacccacatccttgagcactcgatcaacaacactaacaaacgcatcctctttacggcctatcaagagaccgctaatgattttttaaagaagcatccggatatgtccaatcggatcattgtaattgataacgtgaacgacaataccactcttgaggggctgcagaatattatgaacgtgccggtcgaaaacgtgaacagtgaaaataatttcggcttgccactgacgatcggtatcatcataggtctactgattggtattggctgcggggcgtatataatgaaacgttaa

SEQ ID NO: 72869 - DNA, 1062 bp, synthetic construct
  source 1..1062: mol_type = other DNA
atgaatattcgcaaaattgatttcttcaatccactgattgtggtcgtggcaattgtcgtttttctcctgatggggtacgccggctcgtttgactaccgttttgaagatccgctcaacatgaacgtatttctgacaattattttcgcctgcattgtttttgcgactggcttcctggtcatggagaacaagatcattgtggataagacgaaggaaatcaatttcatctcggaacgcctgctgatcattcttgtgctgatcgcgttgatcttacagactctaaacataatcctgattggaggtattccgcttttcaatagtgtgctgaagtccaactcaacgacgaacatttggcgtatcgcatatccgctctttttgatcatgatcaacctgctgctggccaaatattataataaaaaatatctgatcctggtggctcttggcgctttaatctttggtctgaacggctatcgaacatctgttttgggcattttgggcagttcttttattaccctatattatttgaatcgcatcagcaaaaaaatcggaatcttattcatagcaataatcgcgattggttttatggcaatcggatatattgcctcccaaagcatcgctaatcagcattggacattgaaccctggtcagttagtactgtaccgggcggcgtttaccctcgaagtttttgagaaaataattccgctggccggttcaaccaatgggcatattctgagtatgattttcagctcggggagcccgcgtacctttatcggcgaatatgtcctgcactacaatgtttgtcttactagcacgctgttcggcccagtgaccctggatttcgggcttattggccttgcgattcaaatgctctttatgggtgtatttattggcatcatctataaattaaaagagggtataggcgttggtgtgtactccattattctgacgcacaccttaatttggatcgaaaccggtcccaccgacattatgatttggtttttatacttcctggggttgatcctgatcattattaaccataattacattaaactgaacaaaaactaa

SEQ ID NO: 72870 - DNA, 903 bp, synthetic construct
  source 1..903: mol_type = other DNA
ctggaaaaaccacagctcattaactttatcgctaaagtcatggaggactcgggttttaaggtgtacaagaatttcaaaacctcgcagcgcgttatagacatctatgcgatcctgccgactaccatcggcgatttcggtgttgtggtagcatgcaaaaactatgataaagattttaaaattggcgtcgacgtcctgcgcgaaatggaagaagtccaacagagtattaaagcatctaaggtaaccattgtgtcgtcatcttatttcagcgatcaggcaaagaactatgcgctgcgaaaaaacattaaattagtcgatcgtgataatttacttgaacttgcgaagaaatatcaggaccgtacttcacaaacgacactggataataccccttatgatggtggggcgtcccaatatattgaagatgaatacccggaatatacgtatgatgcgtctgatatggagtatctgatgcgccgtcgggagcagaacccggctgtttataaaaacaccttgtaccgccagatcgatgaagaccgccatacgggctttagcagcatcctcaatcgtggaagcagtagaaacagtagtctgtccggtgtaacgaatctgtacaattaccaatcccggaaaagcacttttggccaggactcactgttgtttaatctggttaaaaaccccatcgtgctgattatcctggtggttgccgtgtcctacatcatttcttacattgccgggaatctactgaaagtagacgccggcatatcgggattgattgagatgatcgtggccttattccttagctacggtttaagcttgtacaccgaccgcaaccgtgattttatagtgaaaggcacattcatcttctttatttcactgattattctgattatcctcatttttgtttaa

SEQ ID NO: 72871 - DNA, 333 bp, synthetic construct
  source 1..333: mol_type = other DNA
atggaactcacgaaatatatttgccatcgtaaaccagagcgcagtttccacatcaaaaaccatcaattcccggtctgcgcgcgttgctgtggcttttacactggactgattgtttatctgatctgttaccagttttacaatcacaattatgacctgaatatgctactgatttcgatgatccttatgattccggtggccattgatggcttcacccagtattttagcttgcgcgaatccaagaacaacctgcgatttataaccggtctgattggcgggatcggtctgatcatctttttaaaaataattatccggtggattttatatgtattgtaa

SEQ ID NO: 72872 - DNA, 834 bp, synthetic construct
  source 1..834: mol_type = other DNA
atgaataatatgccaaaagatttagataagatcaagtttgagttatcggagaaacttgaatttctgaaagagaatgccgagtcggaagaagaaatagaaaagttgaacaattttgctagctatttggccgacaaatattctcagattgatgatgaagatataaaaaccgaaaaactgaaccgcattaacaccggtctcagttattaccaacgttttaaaaaggcgctggagaaaaatatcgacattgatccggggcgactgatgggtctgaccgacgggatctttggaatggtaatgactcttttggtatttggtattgcactgccagaactgcagatcacgtactattccacatttctgagcttctttagcagcctggcgccgacgatcggtgtgacggtggtcagttttgttctgctgagttctttttggatttatcatcacgaatttattaaagtgaacaacctgaatattccgtacctgtggttgaacgtattctttctgatttgcatcagtttcgttcccttcaccacttcactgattggccattactcccacttcttcttatcggaagtcatttttggcattaatatcctattaaccatcatctccttcctgctgatgtaccactacgcaaacagcatgcatttccttgaaaacgcgccgtcaaaaaaagagcggaactatgtttatcagacgtttggcatgataatgggccttaccatcgtggtgaacctcttggacttccatgtttcaagctatttcatttatctgttcttactcgtgcctgtcatctctacaattcgcgatattcgttttaaaatgaatgaataa

SEQ ID NO: 72873 - DNA, 1365 bp, synthetic construct
  source 1..1365: mol_type = other DNA
atggaaaaaaactcaaatatcgagatgattacaggtgatcctaaaaaggcgattaataaattaagtatacccattatcgcgagtatgtttctgattttcgccaacaatattattgacagtgtgtgggtggccggtctgggtgcagatccgctggctgcgctaggctatgtcacaccattatttatggtgcttatcggcattggaaacggtatcggtgcgggcggtaactccctgattagccgttatattggagcggaaaagagacagtcagccaacaatgccgcgatccacaacctgatcctgggcatcattttgagcatcgcagtctccatcattcttctgacgtttctgaaaccactcttgattgtgatgggcgcctctgctgtgttgaaatacgccatggattacggaattgttatttttgcattttcatttgctatgctgctgccgccgatcttcggcggggcgttccgagcggaaggggatgtcaaacgtgccacgatccccctggcgatttccgcgatcaccaatatgatcattgacccgattttcatttataccttcaatctgggggtcgcgggtgcagcatgggcgactgttattgcccatatcttcgcagtagctgccatgctttattggatgcttgttaaaaaggacacctatcttaaatacaatcgtgaaagttttaaaaatgatctcacgatgtataaagatattttagtggtgggtatcccggccagtctggaacagttgatcttatctgccctgaccatagtggtaaacttcatgctgaccattgtatccggccctgttgcagtcgctgtttacacggcgggttggcgcataatcaacatcgggatgctgccggcaattggagtgggtactgcagcaatatcggtttccggcgtagcgtatggggctcgtaaatacgaaaatttgcgcattactgcacgctacgcggttaaagttgcgttaatcgcttctattattgtgtgtattatactgaatatctttgccaaccagatcgcgttcatcttcagctactctgaaagctcggctcaactggaaccattaattgcgtcgttcctgcaaattatgtgtctgtttatattatatgtgccgtttggtgccagcgcaggcaacgtgttccagggcgttggaaagggcagcatttcgtttattctgacctcgtttcgggaatttgtactcgtcctgatctttgcctatgtccttggctttaccctcaacatgggggagtttggcatctactgcggcatgctgctcggtggcggcattggttcactgatctgctatatttgcatcgagctatatatcaaccgcttgatgcgcagcattgagagctaa

SEQ ID NO: 72874 - DNA, 426 bp, synthetic construct
  source 1..426: mol_type = other DNA
atggagattgattacaaggaaattgcgagctatgtagtgatcctcattatagtgctgatcgccgctcaacatctgaacgttgttgtgtctggaagcatggaaccggccttttaccggggcgacattgtcctggttgaaaaagcagatttcttcggcatccacgagtttaacgcgagtgatgtcaaagttggtgatgtagttgtgtacgatgcagcgtggtataaccagcccgtgatccatcgtatcattaacattaccgacattaatggcaccacgatgtatgtaatcaagggtgataataacaatgctcctgacccgtattacgtgacttcatcgcagataaaagaaaaagtcgtgacagtggacgataatttagtcgttatcccaaaaattggttatctttccctgtggttgcgcgggctgtaa

SEQ ID NO: 72875 - DNA, 1113 bp, synthetic construct
  source 1..1113: mol_type = other DNA
atgagtacgctagaaaaaatgaaaattctgactgattcggctcaatatgacctgtgtgactatgttagccatcacaaaagttcgcagataaatttgcctggtatttacgaagccataggtcataatggatgcaaaattccactgtttaaaaccctcatgaccaacaaatgtaaaaacgattgcaagtattgcatcaatcaatccaaacgtaactttacacgcctggagctctcacctgaagagcttgcgcgcgcgttcctgggctattataatcgcggcttagtgaatggtttattcctgagttccggcatctcggatgatgtagactccactatggaaaaacagatcgagaccgtgagtctgctgcgcaaaaaatacgggtacgatgattacattcatctgaaagttattccgggcgccagccgtgactcgatcaaacgtgcaatggccctggcgaatagagtgagtatcaacattgaagcggccacctcgtcaggtctggcggagttgtccagcacaaaggattataacaaagacatattaaaacggttgtcctggatcaattctctccagcacaaaagcaccacatatcccaattctacccacaccacccagttaatcattggcgcaaacaacgaaacggataaagagatcctgagccgcatggaaaaaatctacaaaaaatcagatctgaagcgtacctatttctcagccttcactcccattgaggaaacagaatttaaaaacaaggaggcgtgttcaacggatcgaacgtctaagttatacaatgcagacacgctgattaatagctacaaatataacgtgaaagaactgatctttgatgaaagcgataagctgagccttacccaagatccgaagattcttgctgcaaagaacatgaatatttttccggtagagatcaatagcgcaccgattcgggaacttatccgtgttccgggaattggggtcaaatctgctcatgaaattgtctctattcgtaagaaaaaaccatttacgcataaagaacagctgcaggaattgggtgtcatcacgaaccgcgcggacccgtacattaaaattaacggcgaatatcagaccacttttaacttctaa

SEQ ID NO: 72876 - DNA, 843 bp, synthetic construct
  source 1..843: mol_type = other DNA
atgagcgagataatcgccgtgatgaatcaaaaagggggctgtggcaaaaccacgactgttgtgaacaccgcaacctccctagcagtaatgggtaaatcggtgctggtagtggatatggacccgcaagccaacgcgacaactagctttgggattgataaaaccaagatagaaaatacaatctacgatgcgcttatcggggatattagcgttaaaaaagcaactattccgacgtttatcaaaaacttatttattatcccaagcaacatctcgcttagtggagctggcatggagctgtctcgtcgtgaaaattatcatattgttttacaggaaacgctgaaggatgttgtgccattgtttgattatatattcattgacctccctccgtcattaggtgtcatcacggtcaatgccctggtagcctcagatagtgtcctgatcccgattcaggcggagtattatgcactggaaggcgtggctgatttgatcaacaccattaagctggttgaaaaacgcctgcgctcgccgacgcccattaaaggaattttgctcactctgttcgacaagcgcacccgtctgagtaaagacgtgcgtaaagaactcaaaaattactttggcgagacaaacctgcttttcaaaacgattattccgcgaaatatccgcctggctgaagcgccgtccttcggtaaaccttgcctgatctatgatcccgatagcaccggtaccaagtcctacttgaaattagcgaaagaaatcattcagcgggacgaaaacgtccagctgaacattgcgaaaaccaatattgacaaagttaagaaagattctgaagtggccggcggtaaataa

SEQ ID NO: 72877 - DNA, 1542 bp, synthetic construct
  source 1..1542: mol_type = other DNA
atgaacgcaaaaaacattgaaactttaaaaaaggaaaacatgaatcttgcggaaaaaatctatattttcgacacgacgttgcgcgatggtgaacaaacgccgggtgtggccctcaccgttgacgagaaaattcaaatcgcacagaaacttaataatctgggtgtagataagattgaggttgggttcccggcaagctctcctggcgaaatggaatctgcaaaacgcattaaaaatcgggagctggattctaggcttgtcggtttggcccgtagcctcacaggcgacattgatgccgtcattgatgcggacctggattacattcataccttcatcggtacatccccactgcatcgtgattataaactgaaaaaatcgaaggaggacatcatccactcgtcagtggtggcgattgactatgccaaggaccatggcctgacggtggagttttcagcggaagatgccacaagaaccgaacgagattttctatttgagatattcaacgaagtggtcgatgcgggcgccgattttttagatatcccggacactgtcggcgtgctcacgcccattgtgacccgggagctgatcaccgatatcaaaaataactttaaaacgccgatcagtgtgcattttcataatgatttcggactggcgacagctaatacgctgaccgccattgaatgcggcgccaatcaggcccacgtcacaatcaacggtctgggtgaacgcaccggcaactgttcgctggaggagttggtaatggctcttaaatcggcttataacattgatttaggcctggatactacccgcctgtacagcctgtctaatctggtcggtcgtctgaccggcgttaaaatgccggtgaataaaccaattgtaggggacaacgcattcgcgcatgaatccggcatccatgtgcatggaatcttaaataatgcgagcacctatgagccgatgtccccggaaatggttggtcactcccgcaaaatcgttctgggcaaacacaccggagctaacgcggttaaggcgaaactgaaagaacaccacatagacctgaacgaaaaacagtttgacaaggtatttaaaaacatcaaaagcttaggggataatggtaaatgcgtcacggatgatgacctgatagccatcgctattacagaacttgcttcggcacgtgaaactccaattgtgattaaaggcttgagtattagcatgggagcgaatgtatctcccacggcgacggttaagctagaaatcgacggggttgaaaaagaaaccgcaagtaccggggtggggcctgtcgatgccgccttaaatgcgattcgtgagttgatccaggataccatggatattgaactcgaagaatacaacctcgaggcgatcactggtggtaccgacgcactggcggaagtgtttgtgatcagtagcgatagcgatggcaacaaatcaaccggccgttccactaaccaggatattgtaatggcaagtatattggctgttctggactcaattaacaagctgttgttaattaaccgcagcattctgtaa

SEQ ID NO: 72878 - DNA, 1206 bp, synthetic construct
  source 1..1206: mol_type = other DNA
atgtacaaaaaactgttcattggtatactgatttgtcttttagtaatcagcccgatcgctgctgcgaactggaatagttttgcgggtggcgtggatcacaatgcattccgggaagaaagctcggatttcgtaacgaacctttggacgtttaacatggaaagcccgattcattcctctcctgcagtgtacaaggatttcatctatgtggtgtcgacccagggtattttgaaagtgattaacatggagacaggcgagaaagattgggattttgatctcgagtcaaacaccaatagctcaccaataattaactcaaacaaactcttcatcggaactgaagatggtatcaaagccattaatatcaacaaccataacgaaatctgggactatgattgtgatgatgtggaatctactcccttcctgtataaagacacaatttacttcggaagtgatgacggtcacctgtacggcctggacaaggacaatggcaaagtggtatttaataaaaaactggatggcgaactgaaatcctccccaattgtcgtggacgataccatttacattggctcgaccaactgcaagttgtatagtatcggcacggacaaagataagaactgggaatttaccacgggcgacgaaattctgtcgtctcctagttttatcaatgacaccattgtcttcggctcaaacgacggcaacatctattgcctgaatgaatcggatggtgccctgaattggaaagttgatctcaacaataaagtgctaagctcaccgactgttgataatcatgacaataacatttttatcggttctgatgagggtaatttaacgtgcattgacaatcgtgatgggactatcaaatggagtcacagcgttggtgggaaaatacaaagcaccccggccattaaggataacttagtggtttttgggtcggacaacggtaacctgtatgttctgaataaatacaccggtagtgaagaatttacctataaccccggaacaatactgtttaattccgcgatcaattccagcccggtcatcaatgggaacagcttgatctttggcgatgatagcggcaacgtatattctctgaatattgataaacatgaggtcccgggatcaacgcagatgtatttttccattagcgttttaatcattatcgtaattgtcgcgcttgttattgtgcataaagtcaaggggcgcaaataa

SEQ ID NO: 72879 - DNA, 1155 bp, synthetic construct
  source 1..1155: mol_type = other DNA
atgctagagtttaaaaaattttggtggatgattaagaaagaagtgcttagtctgaagcgtcatccggcgcgcctggtctccattatcgcattcccgatcattatgatcttactttttggttacggcatgggcggcgaaatgaccgatctgccaattctggttgtttcacaaagtcatgggaatctgaccgacctgacgctagatactattaaaaccacggaaacttataaggtcattgaggttattgatgatttggacgagggtaaaaaacgtgtggattcgggggaagtgaaagccgcgatcatactgccgtcggattatgacgataatagcacacaacagaaatcggttaccttgtatttggatagctcagaccaaatggcgtctcagattttagatagctcaacacaagcgatattctcccggctcagcaatatggtggcgtcccagacgaacgtggaaaacaaagatgccaatatcaacccctctatcagcaacagctttaataactttaaagatgatattagcttgcacattaaccgcatttatggtaatattaagtatattgactttctggttccggccatcttaggtatgacggtgatgatgagttgtatgatgggcatgggtgcaaccatcgcgggtgaacgtgaaacgggcgaactggcaagactcttcatgacccccacatctgtgtccacagtcatcggaggcaaaatcgctgcgaagctgctcattgagttattacgcgccctcatcctgatcttcatggctgtactgctgttcaacgtgagtatcaaaggcggtatccttcagacttttattgtccttgtagttggcgctctgtgcttcgtaggctttggaatgatgttgagcgcccgcacctcgacgcaggaagattatgtgcagatggtcatgccattttcaatgccgatgatgtttatttctggggtattttaccctattgaaaccatgccgtggattctccagaaactggcatacatattccctctgacttacttaaacgatgccatgcgcggcattatgctgaaaggtcagaccctgggggacgtctggctggacctggcagttcttctgggattcaccttgctgttctttataatcggtgtgaaacgatttaatcgtgacgtataa

SEQ ID NO: 72880 - DNA, 1047 bp, synthetic construct
  source 1..1047: mol_type = other DNA
atgaaaaacgcaattgagaccaataacctcacgaaggtttacggtaacttcaccgcggtcaattcactgaatctgaaaattcccaacaatagtattttcggaatgttagggccaaatggcgcgggaaaaacaacaaccatcaaaatgcttacctgcctgatccagccgacttctggcaaagccgttgtgggggggtatgatgtagaaaaaaaccctgatgaagtgcgaaacctcttaggcatggtgccgcagcaggttagtttgtacaaggatttaaccgttatggaaaacagccagatgtgcgcggactattacgggattccatccgatgagcgtgatgcccgtatcgaagacctgatggaattggtggatattaaatatgcgaagaataaacgcgtcggtcaactctcaggcggtcaaaagcagaaagcatcgctggtggctagtctggtccaccgcccggatattctgtttttggatgaaccgacgatcggcctagaccctacgacgaaacgtaccctgtgggacttaattcgcgatttgaacgacgaaggccatacaataattctgtgttcacatgatatgcatgaagtagatatgttgtgtgataacgttggcatcattaataccggtaatctggtggcctatgataccccgcagggtcttaaagattctcttctggaagctaataagaaaaaaatgaccgaggcgctgggcaagatctcggacgagactaaaatatccactagcacgaaagaagatataggaaacctgggtctgcggaaaatgtccattcttctgaaaaatcagaatgaagagatcatcgaagcgattaaaaccagcgacttcgtgaaaacagtagagatcgcacacaacggccgtatcaatttaagaattgacagctacgatgacatggctgttcaaaacgtcctgaaggatatcaactcttttggtggtgtaattaaatcgatttatactgaagaaccgagcctggaagacgtctttatcaaagcaacggccgaggtggatgaaaacgcccgcgtgtaa

SEQ ID NO: 72881 - DNA, 408 bp, synthetic construct
  source 1..408: mol_type = other DNA
atgaccgacaaagagatctatgatactcagacaatgctgattaaacactattccaatggtctcacccgtaacctgattctttggattattagcaaagaaaagattcatggttatggcataatgaagaaactggacgaatttttcaacttcgaagatgtgaattatgagataaaaaacacgagcagtaaagtctacccaattttgcgcaaaatggagaaaaatggtctaatcattggagaatgggatatcaatgaaaacaataaacgggtaaaatactactctattacggacgagggcttaatcatcctggataaaatccgttcgattattaattttatctcaaataacccggcgtggctgaacttttatggggatatgggcgttgaaatcaacgaaaagcgcaactaa

SEQ ID NO: 72882 - DNA, 795 bp, synthetic construct
  source 1..795: mol_type = other DNA
atgaagaaagctgtggtattcgacaactcgggaaccctgattgaacgataccgggtgattaaagatgttctgaacggtaacttgttcaccgacattaacagcttggacctgatcgatgccgctgatgctctcgccctggttgtgcttcagtttaataccaataaactgcttgatttggatcagaacaccttaatctctggtgttattcgcgaatataacattgacttcgatgtcagcttttcaaccaatcccattagtaaagcggaagttaaagagattatcgataatgaaaaatccgccaccatcgcagatatcactgatggctttgatattctgcgtgacaaggtgcctaatatggaactctgcaacggctcggcattaatcgttgatatggatctgggggtcatcgcatacactataacgtcggccggcaaattctttccgaaggttttcgaaacaattgaaacgctgaaaagtcgtggcattgaaatatttattgcatcaggtgatcgcaaaggcgcgattaatcgtctggcgaacctgcttgacattccggaggataacgcgtttggaacggtgagcacccgcggtaagtgtgaggtggtgtccatcctaaaagacagtggctataaagtcatgatggtcggggatggtattaatgacctgttagcgttcaaaaatgcggatgtcagcgtactgacaatcgaacaacaggaagagatctctccaaaagtaatggataaaactgaccatatcattgaggacatctttgaagtgacgatgatagatttttaa

SEQ ID NO: 72883 - DNA, 1644 bp, synthetic construct
  source 1..1644: mol_type = other DNA
atgaaaatcaaaacgatctcaacggacgtgctgattatcggatctggtggcgccgggtcgagggcagcgattgaagttgataatgcgggcttaaaggcaataattgtatcaaaaggtctgagctttcgatcgggttgcactgggatggcggaaggcggatacaacgccgtgtttaagacagtggataaagacgatagcaaggaagcgcatatttatgataccctgaaagggggctcgtatctgaacgatgagaaacttgtggagattcttgttaatgaaagcccgcagcgcctgatcgatctggaaaattatggtgcgttattcgatcgccaggagtcaggggagatcgatcagcgtccgtttggcggacagacctaccgccgaacttgttatcagggcgaccgcacgggtgctgaactgctgaacgctctgaaggaagagatcattaaacgtgatatcgaatgcattgaggaggtgatgatcacatccctcatcacggataaaaatcaggttattggggccacggggcttgatttaaaagattcgagtcttatttactttaaggcaaaaagcaccatcctggcgagcggcggggcgggccagttataccctgtaacctcaaataccttccaaaaaaacggagacggttatgcaatcgcttacaaagcgggcgcgaaacttattgacatggaacaagttcaattccatcccactggcatggttgctcctgaatccaaaaaaggcgtactcgtaaccgaagcggtccgcgctgaaggtggaaaattactgaataaagacggtgcccggtttatgcgtaagtatgccccggaaaagatggagctggcgacccgtgatatcgtggcccgtagcatttaccaagaaataattgaaggtcgcggcacggaaaaaggtggcgtctatctggatatttcccacctggacgacgactatattgatgaaaaactcgaaacaatggttttgcagttcaataacgtcagtatcgatattaagcatgagccaattgaggtggccccgactgcccatcactttatgggcggtttgaaaattaatacggatgcatctaccagcctacgcaacctgtttggtgctggtgaggtttgtggcggagtccatggcgccaatcgtctgggtggcaacgccttggctgacacgcaggtctttggcaaaattgcgggggaaagtgcaagtaaggcatgtgccgacacagaaattaaaaccgattatgaacaggtcaaacgggagtcgtcccgtattgaaaatttgattaaaaaaggtaacatcaaaccacaaaaattcaaagagaatattaaaaacttgatgtgggaaaaagtcgcgatagtgagagacgaaaagaccttgaacgaaggtctgaaagatctccaggatatgcagaaagagctaaataacctggatgtgagcgataaaaagcaatacaacaccgaactggtgactgcactggaagtgatcaacatggttgaaatctgcattctgattgtaaaatctgcaatattacgtcgcgaaagccgcggctcacacttccggtctgacttcccggagagtaaagatgaatggaaaaaatccatcatctttaacaaggacaaaatcgaatttgaagcgcgttaa

SEQ ID NO: 72884 - DNA, 1305 bp, synthetic construct
  source 1..1305: mol_type = other DNA
atgaacgataacactatcctaatcaaaaatgccttaattctcagccccaatacaaactttgaaaacaaacagtcgattctgatcaaagacaatctgattgcggaaatttcaccggatattgatgagagtaatgtcagcaaaatcatcgatgcaactggcaaaattctgcttccgggactgatcaacacccatacccatttgtccatgacactgttccgcgggctggccgatgatctgagtttggatagttggttaaatgattatatatggccgatggaagcgaatcttaatggggattactgttatattggggcgctgctgggtgctgttgaacttattaagagcggcaccacgacctttagcgatatgtatttctacatggaagacgttgcgcgtgcggtggacgagtccggcattcgtgccgtgctgagctatggtatgatagactttggtgacgaagataaacggaaaaacgaaataaacgaaaacctcgaactgtttaaatcgtgcgagggcatgggcaatgggcgaattaaggtgttcctgggtccgcatagcccttacacggcttcggaggagctgctgatccaggtacgtgagctggccgatgagtacgatatgggtatccacatccacgtgtctgaaacccagaaagaaatcgtagatatctcatctgaaaaaggtctacgccctttcgaatatttggacaaaattggatttctgggcccggatgttgtggctgcacactgcgtctggctgagcgataacgaaatcgagattattaagaaaaataatgtaaaaatttcacataacccatgtagtaacatgaaattagcgagcggcattgctccagttagcaaattaattgaaaatgatatctgtgtgtccattggcacggatggtgcgtcgagcaacaataacctggatctgattgaagagctgaaaacagcgtccctccttcagaaagtctcgaccttggaccccaaagtcttgacttcagacgaaaccttatctatgggaacgatcaagggcgccgagacgctggggcttgaaagcgaaatcggttctatagaggttggtaaaaaagcagacattattttaattgacacgaactccgccaatatgattccggacagttcttcgctgagttcaaacattatctactccgcaaacggtttgaatgtggataccaccatctgcgacggcaagatcctgatggaaaataagaaactcactgtgctggatgaaggcgaaatttatcaaaaagcgcgccaagcaataaaggaactcaaagaagccatctaa

SEQ ID NO: 72885 - DNA, 495 bp, synthetic construct
  source 1..495: mol_type = other DNA
atgaaaattgggatcatctactctacgtccaaaaaatctactaaaaaggcttgtaaaatactggcgagcaagattaacactgatgtgcaactgatcccgattgagaaagccaaaaccacctgcattctgaaatataatttcatcatcttcattgcgtcggcatataacggtaagtttcagagtagcttaaaacgctatatcattcggaacatcaaaacgatcaaggaaaaaccaattgccctggtcattaatagtgaagagaatattaataccgaagacatctttaacaaaatctttacagaagaactcgtaaattcgtcatgcattaactcaaactttggctacgaactgaacattaatgaaggcaatttctttgaaaaaataaaaaccaagaataagattaaaaataaagagaaccttccgtccctaaacattgacgaaatcaataaattcagcgattacataaacaacttgattgagaaacgtgttgattaa

SEQ ID NO: 72886 - DNA, 1035 bp, synthetic construct
  source 1..1035: mol_type = other DNA
atggtgtataacgaactgatcaataatattaacctgattaacatcaataatatcatttccttttatctgttcctattcatcatctttgctctcctcctgtcacttgtaatagacgtcctgttcggtgaacttccggggaaaatccacccggtggtaataatgggttccttgattaatttttttaaaaaaaaatttatcaacattaaaaattgggcctctggtttgatgctggtgctgtgtacgagtgttatttcaagtgtcttactgctgatcatttacacgattattaaaaataacattattctgctgtttctagtgtttagcattcttctgtcgtccacattttcggtcaaaatgcttctccagaccgcaattgacgtgaaaaatgatttagataacgatatcaagaaagcgcgaaaaagcgttagctatctggtgagccgcaacacggaggatctctctgaatgcttcattgtttcggccgttattgaaagtctgactgaaaatatcactgatagctatgtcgcccccattttttattatattatcttcgcgatattcattctgttttatccagtgcatttgaagttgtacttactcttgttggtaccaatgctgtaccgtctgtccaacacgcatgacgcaatgcttggatacaaaacccaggagctgatctacattggcttcctgccggcgaaaatagatgatatcctcaactatattcctagtcgcatcgcaggtctgtttatcgttatgtctgcgtatctgcttaacttagacgggaagaatagtttcaaaataatgatgcgggatgctcgtaaatgcccgtctccgaactcaggctataccatggcgagcaccgccggcgcactgaatattcaattgatcaaaaaggatacctacattctgggcgacaacaacaagatcatcaccgcgaatgacatttcaagcgctgttaaactgtcgaaattaagcatcattctgtttacattaactattatttgtctgttcatcttaatttacgtgatcctgtaa

SEQ ID NO: 72887 - DNA, 177 bp, synthetic construct
  source 1..177: mol_type = other DNA
atgtccgacatcagtcgtactacgataaatttgccggtggatcttaaaaaggaattaaaaaaactggcgattgatgaagataccagtctgtctggtctgatcattaaaatgatcaatgagggcatggaaaaccgcaaaaacagcaatatttcgtattcagatgaggacaacagctaa

SEQ ID NO: 72888 - DNA, 501 bp, synthetic construct
  source 1..501: mol_type = other DNA
atggcgaataaattcgttcggattattttaatcgtggtcctgttcgttatcttttttgaagtaggcctgttcagttcatacactattgtcacggcggaggcgccgaatattcaaggcttaattgacatgcaaatccagaaaatctcgtcgatccttaatccggaaactgttaatgaagccctgatcaaagatcccacgccgatcaacattacaaacaaaaaagatgtcgcactcaaaatgcaggacttgagtaaggtggatggtgtgaacgtggatagcatgaatatttctacccgtgacaacccgagtaacgataaaaactttaccgtaattattgaggctctgggctatgcctcccccaatagcacgagcgggcagattattattagccaggaaccatcgtataagatcatcgcgagcgcccctgcatcttaccgcggtgaaggaataatggctgataccaactccatgacaataacctcagtgctaaaactgtattaa

SEQ ID NO: 72889 - DNA, 603 bp, synthetic construct
  source 1..603: mol_type = other DNA
ttgtcaattaaaaacctactgatagaaatgaaaaacatgtcggaactgatggtggacctcgcgtactcggcagttttatttaacagtaaagatgcagccgaagaagtgattactttagaaaatgaggttaattccatgaactatgagatcaagaaggaaagcttggtcgcagcacgtagttacgaagatgccgagaaactgaccgcactgcttgaaattgctgaagcggcggaaagcatggcgaacgccgccaaagacctcgctgacctggtgatcactggtttcaaacctcatccggtctttaaaatggttatggaagaaagcgataaaagtatcgtgcgcgtaaccatcgatgaatcaagcgagttagccaataataccctgggtgatctgctgctggttaaccgtacgggtatgcgggtcattgccattcgccgaggcgtgtcttggatttatggcccagataaaaatacaatgctgctggcgaatgatgtattgattctgaaggggacgtatgaaggcgcggagttactcgaaaaacttgcgtccggagcttgctctcttgaagacatcccggaggagctggaagaggaactggagtaa

SEQ ID NO: 72890 - DNA, 1272 bp, synthetic construct
  source 1..1272: mol_type = other DNA
gtgatctatgtgaaaaagcaacagaagaagatccgcagttcactaagcacgcgaaccttctcggaatttttcagtgaacacgactacgttataaaagaaggactgatcgcgctgctgatctgcgcggtgggcgacttaatcgccggtattgtcctgggtaaaatgacgttcttccttgagtcgttcccagggttgttggttgtgattcctggcgctattggcatgcggggcaatatttttggctcatttgcttcacgtctgtcgacgagcttgcacatcggtttaatctctccacattttgaattttcagatgacctgaacaataatatcttttccagctttgttctgaccctggtgctgagcatctttctgggcatcgtagcaaaaattttctgtatcctgctccactatcatagcatggatctgatcgattttatcctgatttgtaccattgcgggcctgatttccaacctcataatgctcccgatcactatgtttatttctttcaaaagttttgaacatgggtgggacccggacaacattaccagtccgatcattgccgcgttcggggatctgtttacgttaccggcgatcattgtaagcatttttattttgaaatctttaaacttcaatctcattgtgaaagatgtcatcctggccattattctgattgcagtcctgatgagttttattcattgttacaaactcagctatgagacgaaaactattctgcgccagtcgacccccatcttacttctgtgctcgttcctgggaggctctgcaggtggcattttgaatagctcggttgaaaccctgcttagcaatccaagcttgcttaccttaattccgttgttttcaggtgaaagtggaagcctgatcagtattctgggtgctcgtatatcatctggtcttcactctggtctgattgagcctctgtcgaaaccggaaggggaaacaatccataactttggcatctgctatatactggcgatcgtgatctttcccctgatcggcatccttgccgagacctcctccatctccttcggcaccatcggtgttggtttcgataaaataatcctaattagtggactgagtgggattattttagttactgtcatggtattccttgtctactacatatccacaagctcatataacaacaatctcgatccggataacattgtaattccgatttccacaagcgtgacggatagcatttctagcctgattctaatttccatgtcgttattgattctgggtactttgatttaa

SEQ ID NO: 72891 - DNA, 867 bp, synthetic construct
  source 1..867: mol_type = other DNA
atggataatacggggaacatgaccatcgaaatcacggtagtgctgctgatcgtgctgttgatcattagtgttactattacctcctatgagaacataaccgataaactcattaagacgcaggaaaaagaaaatatggagatcttaacctctgagattgttgataacctgatcaacaatcctggcgtcccggagaaatggttcgaatacggtaaaggaacgccgggcctggccattataaatgaggggggtgaaattattcccaacagcgtttcgtattcaaagttaatctcgcttaaagaaaattataagaagcttgttgatgaccagctgttcaaatcgaaatttcattcgtccatggaactgatcccgcaaaagcggactatttcaagtgtaaaaattggttctaatagtgaaagcaacaatatcttcagcgttaatcgtttggtgaaatgcgacttttacaaaaaatatgtgctgaaagactttaaaaacgatggcaaatgtaatcacaaccacgaccaaaaataccatagttgtaactattttaaaatttttaaaggcaacctaaaaaactccgattactacctgctgatcgaggatagcgaaaagtacgacctgaaatacattgtggatacaacacgcgtggtcaaggaaaaatattgggaaaacgcgatctcaaataaaatttatttaaatgacaaaattaatttctacgatgataccagcgcaatcgtgtttattcatttcaacaaaccacagtctaaggtggtcttggtaagcgttccgaaaaactttgataaaaataaacttaattatgactattttataaccaacgaatgccagttcgtcctcaaagtctggtattaa

SEQ ID NO: 72892 - DNA, 939 bp, synthetic construct
  source 1..939: mol_type = other DNA
atgaagatcaactcgaaaggaaatctgatcgtaggcacgacggcgattctgattattgcgttgctgtttatctgtatttttgttgtgaccagcataaactatattcaaaacaaaaatatcggcattgaaagtaacgataatttcaagtatattattgatgattatacccagaacttggaacttaattgccgcgacgccattgatgaagccacccagaaagtttttaacgggcttcctgtgactaacagtgaaaaccaaattaaaaagaacttaaacaaaattctcgataaaaaaaataaagaatatgaagagaaatacgacgtaaaaatcaattctgaaacgttgtccgttgagaataccaaatccccatggaaaatactttttaaaattaaactgaacatcaaaaagggtgatgagaaatattcaaaaatcgtggagaaaaatgcatctgtggaaggtctccgcgaccccctgccgatagctaaactaaccatcatgtctggcattttaacttatgataatcagattcattataaaactgcgctgtccacatacatgctgctgcatcacctggattcgccggaatcatatattgaagccacagcaccgctgtacatcaaaaagtgcccgtatgacccctacatccatcatggcgacccgggcgtgattgaagactgtctgaagcacggctacttccatgaaagcgcggacggtagttgttacttatgccgtctggagggcaaggggaaatgtccgcactacggtctcgaagtcttcatccagacgcacacccctctgaaaaatgagtcgttaagctgcccggatcacgtcgtctttgctgaccattataacggtgaaaaaatcaatccagatgattggaacagcctgattctggattcaagccatcggaagaaatacgggttgatcaatgatggataa

SEQ ID NO: 72893 - DNA, 426 bp, synthetic construct
  source 1..426: mol_type = other DNA
gtgattggacgtcagaccataaacatcaataagagtcgggagctggaagaactgtatcaaattatggagaagaaatgggataaagaaaaatataacactttctttctgggtaagcccaacccgttaagcattgaaaaatacatctgcttaccggcgacgcagcgctatatgatcattgcttatcctcgcaaagggggcaaattcttttctcgaaatgataaagttgtactgaccatttgtgacactccagatagcatgaaaaaccagatcgtcacctcactcgcacgcgacaatatttttaaactgacataccagattagtgagtccaagtcgcgtaatgaagaacgtaaaggtccgacggaagaaacgttgcaaggctataccgcctacatgaaacagatccttgaagaagaggatttgctgtaa

SEQ ID NO: 72894 - DNA, 1698 bp, synthetic construct
  source 1..1698: mol_type = other DNA
atgtattggttctttgtcatcctgagctttttgctcgccggtattaaaacgcagaaaccgaacaagtataaaaaagtgtcagttatcattccggcctataacgaggaagagactgtggccaaggtggtcaatgtagtcaaaaaagtatcctttgtggatgagattatagttgtgaacgacggttccagcgacaacactgagatggaagcgctgaaagccggagcgatcgttattaaccatgaggtgaataaaggcaaaggcgaggcgttacaaaccggctatcgggaagcagaatgcgatattatcgcatttattgatgcagacatctacaacctgacatccagtaaagttgaatccatgatcaaaccgatcttggacgggggcgcggacattacgaaaacgaagttctctcgggcaagcggccgtgtgactgagcttactgcgaaaccactgcttaactttttcttcccggagattagttttgaacagcctttaagcggtcagttcgccgcccgtaaggaggtcctgaagaagattaattttgaaagcgactacggtgtagatgtgggtatcgttatcgatgcggatgttctgggcattagcatcatggaagtggatattggagcgattgaacatgacatgagcccgctttcggatttgaatctgatggcgaacgaagtggtacgcacgattataggccgtgcaaacaagtacggacgtgttaccatgattgacgatattgggtattacattcgaatgtcgatcgtcggtttgagcttagtaatcctgggtctgttcaccatcttcttcgttaaatttgtgccactggctatcggcgtgataatttcaatcataggacttctcatcgcaatcttttatatttttaaagtgatcatcaaaagtatagtaatgtttaaaaagaccccgggccgcaatctgttaaaatcatttgtgaaaatccactttccaatgatcatttcaatcattatcttgcttctgatgattagcacatttctcggtgccgcccacttcgatcatggagtgttaagcattgaacccaattctcgcaacctaatcatttatgctgacgattctccccgcgataccatctctgtcagaggcccttatacaatcgatacggcgattgaaaatgaaagcggtcagatacgtatgccgtcggacgctatgatgacactgggcgtcaacattaatgatacgatcaaactgggtgcgaatacgtataaagtcaatgaaacccgcctgggggagccggatattctgcgcctgcctattgaagttaaaaagctattgcaagttgaaaatggtgaagtcattcagaacagtcgtctgaaagatgttttcgacgggtcgttaattacgcacgcttacgaatataataataccaccattaaagaaaaatactttattacatcaaacgagaaacaatcatcgacctacgaaatcttcctggataacgaatcgattgtgaacagttacggcacttttaaggacaacggcacctacgatatttctgtagatgggaactatctcaccagcttcagttataaaaataatctgacgaaatccttcaaattcgacggccatgatctggaaattgtgtttagggataccaattccacctccattaaacagttttctagtgggaatcagggtgttttcctgaactttaacttttaa

SEQ ID NO: 72895 - DNA, 102 bp, synthetic construct
  source 1..102: mol_type = other DNA
atggattttaaaaagctgaccaaaatacagtttgcagccttgttcatcatctttattatggtgctgagcggtgttgcgggcttccttttatatattatttaa

SEQ ID NO: 72896 - DNA, 1245 bp, synthetic construct
  source 1..1245: mol_type = other DNA
atgccaacgatgtcagagaaaatactggcgaaagcgtccggaaaagagaaggtagaagcaggcgatatcgtcattgcaaacatcgacgtggcgatgacccatgatttgacggggccgctgagcgtggagtcgtttgaaaaaattggcgcggaaaacgtttgggatgcaagcaagatcgttattccgttcgatcaccaggtccccgccgattctattgactccgccaataatcatatcatcatgcgcgaatttgttaaaaagtacaatattgaaaatttttatgatgtgaatgctggcgtgtgtcaccagattctaccggagaagggtcatgtagtgcccggagaagttatcgtgggtgccgactcacacacatgtacacatggagcgctgggcgccttctcaaccggtatcggctcgacggacatggcgatggtatttgcggaggggaatttatggctcaaagtgccggaaacaaaccgctttaacatcaccggcgaccttaaagaaaatgtttatgcaaaagacgtaattttgcacattatcggtgaaatgggtgctgatggtagcacgtacaaagcctgcgaatttgctggcgaaactataagcaacatgagtatttccgatcgtatggtgctgtgcaacatggccattgagatggggggcaaaaccgggttggtggaaccagacaaaaaaaccattgattacgttgagaaacattctaacaaaccttatgaaatctttaagactgatctggattcctcgtcgcttaacatgattgacattgatgtgagcaacctggaaccgcaaatcgcatgtccgcataatgtcgataacgtcaagccaattagtgaggtggaccaagaaatcgaccaggtattcctgggttcttgcactaatggtcgtttaagtgatctgcgtgatgctgcgaaaatactgaaaggcaaaaaagtcgcgaaagacacccgcatgctggtcatcccagccagccaggaaatttatttaaaggcattagatgaagggctgcttaaaatcttcgttgaagctggtgccctggtgagcgctccgtgctgtggtccgtgcctcggaggccacaccggcatcattgggcctgatgaagtgagtctctcgacgtccaatcgaaactttagaggccggcagggtagccctgatggcaaagtcttcctgagctctgcggcagttgccgcggcgtcagcaattgaaggcaaaattgttagtccggagtaa

SEQ ID NO: 72897 - DNA, 450 bp, synthetic construct
  source 1..450: mol_type = other DNA
atgaacaaaaaattaattctgatcattgcatcgattgtcgcattgttcagcatcgcctctgtaagtgcgggcttttttgatttcctgcattgggacgacgattccgacaatatcaatgtcgttgaggatggccagtattgcacagtgaaccaggtttcagcgtatattaaagaatttcataagctgccgtccaattatattacgaaaaaggaagcccaaagcctgggttggcacggcgggccactcaagaaatacgctccgggtaaaagcatcggtggggatacctttaccaatcgccagcacatacttcctgatagtgattataaatacattgaatgtgatatcaatgcgaacggaacttttcgtggtgctgaacggattgtgtacaacactggcaactataaagtatactatacggatgaccattacaacaccttcaccgaggtgtaa

SEQ ID NO: 72898 - DNA, 867 bp, synthetic construct
  source 1..867: mol_type = other DNA
atgaaaggtatcgtgctagccgggggtagcggaactcgtctttatcctatcaccaaagccgtttccaagcagctgttgccgttatatgacaagccaatgatttattatccgatctccgtactgatgctggcgggcatcaaggagattttgattatttcaactccccgcgatctgccaatgtacaaagacctgctgggtagtggcgcaagtttcggcattaaattatcgtatgcgattcaggaaaacccgaatggccttgcggaagcgttcatcataggggaggatttcattggtaacgataatgtcgcgttaatcctgggcgacaacatatttcatggccaccgctttaccgaaattcttgaacgagccacgaaactggatgaaggggcaatcatcttcggttactacacaaacaatccggaagcgtttggtgttgttgaatttgatgataattggaatgtactgtcggtcgaggaaaaacccaaaaacccgaagagcaattatattgttccgggtctttatttttacgacaacgatgtgatcgaaatcgcaaaaaacgtgaaacctagcgaccggggcgaggtcgagattacgtctgtgaacggggagtatttaaaacgtggcaaactgaaagtggaactgctgggacgcggtatggcgtggctggataccggcacccatgaaggactgctggaagccgcaaattttattgaaaccatccaaaaacgtcagggcttgtacattgcttgcctggaagaaattgcctatctcaaaggctacattaataagaaacagttgctgaagacagctgaggaactcaaaaaaacggattatggtcaatacttattcaacctcgctaaaatgtaa

SEQ ID NO: 72899 - DNA, 1008 bp, synthetic construct
  source 1..1008: mol_type = other DNA
atgtccaaaatacttgtcactgggggagcaggcttcattggaagtaacttcgtgcggtatatggtgaataaatactctgaatatgaaatcgtcaacctggatgctctgacatactgcggcaacctggagaatctgaaagatatcgaaaaaaatgacaattatagctttgttaaaggcgacattcgagataagaacatcgttgatgacttagtccagcaatgtgattatgtgattaattttgcagcagagtctcacgtagatcgcagtatcaccgacccagaaatctttattaagtcaaatgtgctgggcacccaggtactactcaatgcggccaaaaaatacggtgttgataaatacatacagatctcaacggacgaagtatatggtacccttggcaaaacgggatattttaaagaaaacacgccgttacaacctaatagtccgtactcggcctccaaggcggggggcgatctcattacccgtgcgtatagcgaaaccttcgatttgccgatcaacattacgcgttgttctaataattatggtccataccagttccctgagaaactcatccccctgatgatctccaacgcgttggaggacaaaaaactgccggtgtatggtgacggtaaaaacattcgcgattggctgcatgtttatgatcactgccgcgctattgatctggtgttgcatgaaggtaaacttggtgaggtgtataacattgggggcaataacgaaaaacagaacctggaaatcgtcaaattaatattaaaccagttgaacaaggatgaatcgctgattaagtttgtgaaagatcgtctgggtcatgatagacgttatgccattgactcaaataagattcaggaggaactgggctggtcgccgaaatacacctttgaaattgggattaaagaaacaatccaatggtatctggacaatcaagagtggactagcaaggttaaaagcggccagtacaaagattattacaacaaaatgtacagcggccgctaa

SEQ ID NO: 72900 - DNA, 318 bp, synthetic construct
  source 1..318: mol_type = other DNA
atgattattgtgtacggcaaatattcgatctacctcctgggcggaatggaaatgctggaacagtatctgccatttgttgggttaatcatctttggcaacattgaaaacctggtgctgtcttcccaaggtgtagttgcgggcgtcaatccggtgaaacttgggattgtcagcatcctgtttgttatgggatggttattcataggtacggtgggcacctcaatgctgatgcagtatgtcgatttcattgactttattggcggtctagcaattttcatcttgggtttgcaggccatggtagagagtatccgcggtgtgtaa

SEQ ID NO: 72901 - DNA, 279 bp, synthetic construct
  source 1..279: mol_type = other DNA
atgaaagaactaaaaccattcctggccctgttggtgtttggcaacattgaaaacctgattctcgccgctcagggtgttgcggcgcacgtcgatccgatcatcttgtcgatcctgagtctgatcgcagtagtgtgctggcttctgattggcacttttggtacgaaacttgcaatgaagtattcccgctacatcaatttcattggcgggtttgctatttttatactgggtattcaagcgatgattgagagcttaccgggaatgttaacctttttccattaa

SEQ ID NO: 72902 - DNA, 1080 bp, synthetic construct
  source 1..1080: mol_type = other DNA
atgcgctacttcaagcatcgcatctatggtgccctattcaaattattcaaagacaccatcattaaaaaaaaccgtgtttcatttattgtcgattcaaaggaatcattcaaaggcaatttggactacattcagaaagaatttgaaaatcgcgggaacttcgaatttcattatttttacaagaataagctgtccatcggaagcttccgtaaactgagtagttctaaatttatttttctgaacgacaacttttttccattagcgttcatggaatttcaccccgaaaccacaattgtgcaactgtggcacgcgccaggcgcatcgaaaaagttcgggggctcggttgatattcaaaacagagagatcctggagaaaatttctaaaaatactgactatttgatcacgacctcagtcaatatcaaagactattacagcgaagctttccagatgccgctgaataagattaaatccctaggtatccctcgtattgactattatttcgaaaatcatgatgtcaatacgcttaaaagcaacttccttaacaaatataacattagcagcaataaaaaaatccttctctatgcgccgacctttcgggatgaagagaaatacaataacgttttcaactacttgaacctggaggagtttaatgaaaacctgggtgatgaatatattctggcactgcgacttcatcctaaaattgagaatttttataagaacgatatttcggacaacggcaactacattgatgtaagtgactacgaaagtgagcaggaactgatgctgatcagtgacatactcatcactgactattcctcgataatgattgaatttgccacgctgaataaaccgataatctttttcacatacgatttagatagctacttgtctaatgagcgtggcttttattatgatttcaaaaaaacggtgccgggaccgattgtgcacaccagccaggaactgatcgatgtaattaaaaaaaatgaatttgataaaagcaagatctctgaatttctgaacacccagtttgatctgatcgatggtgattcctcgaaacgcattgtggattttctcttaaaataa

SEQ ID NO: 72903 - DNA, 960 bp, synthetic construct
  source 1..960: mol_type = other DNA
atggacaatattaatgtcagcgtcatagttccggtatataacaactgcgaatacatcgagagtacgctcagctccattatcaaccaaaatttcgataactttgaaatcattgttattgacgatggctcaacagataatagcttagaaatcgttaaagaaaagctttctgctagcgatatttcgtacctgattattcatcaggaaaacgcaggcgtcagctgtgcgcgcaaccgtggcatcgaagtggcgtgtggtgactatctggtgtttgttgacgctgacgattatatctcgcagaatcatctgtccgagttgtataacggtgaaaccgattttagtttaattcagctggtaaagcgcgaagggaacgacctgtctatcccgtaccattttagcgaaagttcaatctcatgcaatgatttcatcaaaatggagcttaatatggaaatcccatttaatttctgccagctaatgtacaagactgacattgtgaagaaaaacaacattaaattcactcctaacattatttacggggaagataccgagtttgcccttaaagccttgtcattcggcgaccggatatctattagtaatgaagtgacctattattatatccagcacgagcaatccgcaattcgaacatcggaatttaagcgttttgagattgtgggtatctttgagaacttggcgcagtactataaaaaccagggcaaaacggatctggccaatctgataattacgagcagaatccccaaagcaatctttggaaatatgaactattttttctataataactatgattttgatgatgtaattgcgaaaatgcaccaactcaatctgttcaccaaactgtccaaattcgaaggtgattttaaattcaaatttaagatacgcttattcctgctgaacccgaaaatttactacaaaatctggcgtaaagtgaaaaattcgattgattaa

SEQ ID NO: 72904 - DNA, 960 bp, synthetic construct
  source 1..960: mol_type = other DNA
atgaaagtgtcagtcgtaacaccaaattacaatggtgaaaaattcctcaaaacctttctgaaatcccttaacgaggatagtcagtacatcggcgaagttattattgtggataacggatcggatgacggtagcctggactatcttaaaaataacagctttagtttccctctggtcctgatcgagaacaaggaaaatattggcttctcgcccgctgttaaccagggcattaaaatctctcaaaataacctgatttttagcattaataatgatacggaaatcaaaaaaggttcaattaaatcactggtggatttgatcaattccagtgacgacatcttctctgttcaagctaaaatgctccagtacaataacaaaaatctgattgatgacgtgggcgacgagtacaacttgcttggttggaccaaaaaaataggtgaaaatcaccactctaatgaatataacaaggtcaaacgtatctttagtagctgcgcgggcgcggcgatgtataacaagtccattctggatgaaattggtctattcgatgataacttttttgcctatatggaagatgtggacttagcaatccgatcccatatcaacggttatcggaacttgtcatgtccggatgcaattgtttatcatatcgggagtgccacctcgggcagccgctacaacgagttcaaagtgaaattagcggcccgtaacaatgtatgggtaatttataaaaacttaccggttccgctgaaaatcgtcaattttattttcatctttctgggctttctgatcaagtacttattcttttataaaaaaggattcggctcgacgtacttgagcgggattcgtgaagggctgtctgcaaaaagcaagattagcaaggtgaaatttgagtcgaagaatactaagaactattttaaactggaatttcgcctgataataaatactattaaattcctcaaacgctaa

SEQ ID NO: 72905 - DNA, 858 bp, synthetic construct
  source 1..858: mol_type = other DNA
atggacctgtccattgtaatcctgaattaccagacctttgagctaaccaaaaatacgattaactcgatctttgaatatgaatactccttcgactatgagatcctggtggtggataatgcctcaggcgacgatagcctggtacgcttaaaagaatatttcggtgataaagtcaatttcatcgcaagcaaagagaacaacggctttgccgccggtaacaatcaggcgctgaaaattgcaaatggcaaatatattctgctgttaaactcagacaccatagtttgggaagatacactggagaatatttataactacatggaaaaacataatgatgttggggtcagtgggtgccgtgttcttttagaaaacggcgagcttgataaggcttgcaaacgctcgtttccgaacgtgaaaaatagcttttttcgtctgtttcatattccaaccagcagtaaagataatgactacaacttggataacctgccggatgacggaatctatgaaattgactgtcttacgggagcattcatgttcatgcgggcggatgccctcaaagatgcgggtctcttggatgaaacattcttcatgtatggtgaagatattgacttctgttttcgcgtgaaaaaaactggttggaagattacgtattatgggaagtccaaaattactcacctgaagggcgctagcagtaaaaaacaaaaatctaagttgatctacgaattttaccgtgcgatgtacatctattataagaaacaccatgctgatgactctctctttctgttaaactggattgtctactttggcatagcgatcctgtgcgtgttgaaactttttctgaacctgttcaaaaagaaagattaa

SEQ ID NO: 72906 - DNA, 1404 bp, synthetic construct
  source 1..1404: mol_type = other DNA
atgatcaaagagaatcagaaactgctgaatttttcgttggtattgatcgatgtgattgtcattggcctggcgctgttatgcagcttatggctgcgcttcaagacgacgctattcggtccaattggaggccacctgggcttttttaactatctgctgttctttacatttgccgtgatccctgtttatctgattctgtactttgcgttcggtctgtataaaccgcgtcgcacttataaaaacatcttttcagaagcaacccagcttattaaagtaaatatattggcctttattacgctggtgtctatcctgtttattatcaaccagccggatttttccagaatcatgctgatcctcttagccattattgcttcatttttcggaataatcgagcgtttcaccatccgcaccattctgcgcaaaatgcggattaacaatcggaatattaagcatattcttattgtgggggataatgaactggcgtttagctttgctcgtaaaatccgtgaaaacccgtatttgggcttcgttgtcagcggctttctagggcgttccgagcatataggtcgtgagatcgatgggtgcagcgtcatcggctcatttgaagatatcgataaaattcttgataaaaaccgctttgacagggtggtattggctattccgttaaagtactactataaaatcaatgacctcgtggagagctgtgaacgcgttggaattaaagcggaaatcattcctgactacatccgctacttcccggcgcaaccgtccgtggacatgattgaggacataccgattattaacatacgatatgttccgctggatgatgattttaacaagttcctcaaatacctttcggattatattatttccatcatcgcaattattattacctcgcctatcatggtcgtcaccgcaatcgcgatcaaactgtcgtctaacggtccaattatctttaagcaggaacggataggttacaacagtaaacccttcatgatgtacaaattccgtagtatgaaagttcaggaccccagtgaggaaaaagccgaatggacaacaaaagatgacccgcgcaagaccaaagtaggccaatttatccgcaaaactagtattgatgaactcccgcaatttttcaatgtgctgaaaggggatatgagcgttgtcggtcctcgaccggaacgcccatacttcgtggatcagttcaaagaaacggtgccaaaatatatggttaaacaccaggtgaaacccggccttactggctgggcgcaaattcatggttgtcgtggcgacacgtctattaaaaagcgtatcgaatatgatattgaatatgtagaaaattggcacatgggtttagacctggccatcatgattaagaccgccctgaagaaaaacccgaatgcatattaa

SEQ ID NO: 72907 - DNA, 906 bp, synthetic construct
  source 1..906: mol_type = other DNA
atggatgcgatcgctatcaccatctttagtattatcataatgatcggcctgggttattttcttaaacgcatcgattttctgtctaagaaagacatggacccctttaacaaaatagtaatgtacattctgatgccgtgtatgatattccatgcaatttacaatgccgatctaagcagccttccgaaactgagcctcttgccttttgttattctggcaagtagcattgtcaccggcgttatctcgtattttattctcaaacgtctgaaccttgatgacaaacaggtatggagtgtcctggtgacggtaatgattgcgaatactgcgtttatgggctatccagttaccctgggaatttacggtcaaaccgggtttctccgagccatcttttgcgatatcgccacattatccatgttcctgcttttgtcgttcgtgctgattctgcggttcggagggacagtgaagaccgctatccgcaaaattgctattttcccgccactgtgggcagtgattttaggtttgatcttcaacctgttgaacattcccattggtgatgtgtgtgaatacactgtgaactacctgggtcagggcgccattccgctgatcatgattacgctggggctgtctatcgacttctcagcattagcgcgtagtaaatccatgattatctttacgtcaattatgaagttagcgtttttcccgctggtcgcatttctgcttgccaccaaactcggcctcgttgacttacagtataatgtgagcattattgaggcggccatgccttctggcatgatgtccctgttgcttgcgattacctataaattagattatgaattgacgtcagattgcatactgatcaatactgtcatcagcctgattacgctaccggttatcatctcgctgctgtaa

SEQ ID NO: 72908 - DNA, 1131 bp, synthetic construct
  source 1..1131: mol_type = other DNA
atgaacggtatttactattacttgatcgcgtttgtgatcatctggatgctggtcacgatctttcacgataaactgtccaaccatggctttgagctgaatttccctattatcatgtggaagactcagaaactcaagggattaatctccaaaattagcaacttctcacccacattctggaaatggtacatgaatgtggggattgtggtagcctttggtgctatgattcttgtgaccgggtctatcatctcgtccataccgtctatttttgaaacccctagcgtttcgattttaattccgggcgtggacattccgggttcgcagatttatgttccattcatttatggtttgattggtctggcaaccgttgttataattcatgaatttagccatggtatccagtcggtttgcgaaaagatcccaatcaagagcatgggtctgttgctgttttttattcttccaggggcattcgtcgaaccggatgaaaaaagtctgaaaaattcaaaaaatgcctcaaaacttcgcatctatgctgccggctcagtggctaacattactttagccgtagttgcgctgatgctaataagcctgatctcaattggtattccgcactactttgccgaagatgggattagcatcgatcgtattgttagtgattctccgtctgagggcatcctcaaagagggtatgattttacaagcgattgacaaccataaaattaatgatagcgaaagctatgtcaatattgtgaaatcctttaaacccggcgataatgtcacggttcagacgaaccaaggcagttattcggtagtgctgagtaaaaacccgaataacgattctgtgggttttttcggcatccaagcagcgaagcattatgtgctgctgaacgacagtctgggaccgatcccttggattctgtttgagctcttcgaactgttcaattgggtgtttatcctgaacctgggcatcggattgtttaacctacttccacttaagccgctggacggcgggcacatgctggaaaccctcttgagctacaaattcaaagaacagttagtcaaaaaattcgtaaatgcgctgtccggcgtaatggcaataatcattgtcttcagtataattgcgggctttctgtaa

SEQ ID NO: 72909 - DNA, 705 bp, synthetic construct
  source 1..705: mol_type = other DNA
atggtgaaaaaaggaaagttgattggcattggtgttggcccgggtgacacggagttattaaccttgaaagcggccaaagtactggaaaaggtcccggtgattttttcaccaaaaagtgcaaaagagaaagaaagcattgcgctgagcatcgtgcgcccgattctgaaagaacggaaagactataagaaaatcatgattgttgagccgatttttccaatgattgaagataagaaagaacttgaaaaaatctgggatagtgcgtctgaactagttgcacagtatcttaataccggtcgtgatgtcgccttcatcaccctgggcgacaccagcatattcagtacgtactcctacctccagaaacgcctgatggatcgctatgagatagaaactattcccgggatcacctcatttactgcgtgcgccgcggctaaaaacgaagcattagtagaacaaaatgatatcctgacgattgtgccgaaaattgacagcagaatcgaaaacattctggaatatactgattccattgtcctgatgaaggctagccgaaactccacaaaactggagctgaaaataaaaaatgataaacgtgagaaagagatttattcggtgcagaactgtacgcgtgaaaatgaaaaaatcatcgaaggcttttctcatgaaaaaccttacctcaccacatcgatcatcaagttcaaggacgattaa

SEQ ID NO: 72910 - DNA, 963 bp, synthetic construct
  source 1..963: mol_type = other DNA
atgaaagattcgaaagaaaaagaacatcgcattagcaatctgaaggacctgatcgacaatgtgaaagaggaagattccaatatcgattcacaggaagatagtgaattgatcaactatctgcacgaagacaccgttgacttcgatgaactggaaattaacgacgaatttatctaccatccggatgatgatgaggactatgtgataaatctggaggaaagcccgattgacgaagaatttatcattaacacgccgaaagaagaagagctgaaaaacatgtcggatgatttagaagagccagaagacatcattagtgatgtgagcgaaaactttgatcagtttttcaacgcaaaaattggtaaaaccccggttctggctattgtgagctctgttctggggatcatatttatcgccatctcaataatcattttcgagtcccgtagtgatcgggtcatcgacaatgttgtctcgggtgagactaactttatttctgtcatagtgcttggcttaggaatcctgttactaatttacggcatctacaaagtgttcaacattaaaagtcccctcaatggcatcaccgagagcattaattcgattgatgggaaagaaaaagtaaagacgaatgcatctaaggagaaagaaacggaaaagattatcccgaaaagcaacatcccattggacaaagactcctataaaatcggtgagttcgacattggcgatataaagaacaagtttaaaaagtcaaccacatctaaaaaaccaaagccgcgccccgaagatacaaacaatattcctcctgcgaaagagaaagaggaaaataaaaaagaactcaccattgaaaaaattgaagatattgaatataaacaagccaaacttgataacgaaactattgatgacatttttgcggaagtagaggatatcgatgaaatcccgattattagcattgattccgaagaaaaagagtaa

SEQ ID NO: 72911 - DNA, 312 bp, synthetic construct
  source 1..312: mol_type = other DNA
atggaattttgccccgagtgcggtgcaatgatgtttccaaacaacaatgtgctgaaatgcaatagctgtggttacattaaggaagactccgataacaacgattataaagtgtcgaagaaaattgaagctgaggagactgttaaaatgctgggggaagatgtagacgttggcccgcgcaccgaagagacatgtccggaatgtggccacaatatcgccacctataaattattgcagactcgtagtgccgatgaagcgcctacgcgcatcttcacctgcgtcaaatgtaaacatacgtggcgggcgtacgactaa

SEQ ID NO: 72912 - DNA, 162 bp, synthetic construct
  source 1..162: mol_type = other DNA
atggcgaaaaaggacaacaaaatttccatgccgcagaccggcgcaggtctggtacgctattttgatgaagaaagtctggggccaaaattgtcgccggagcatattatcgttgctacggtgattgtggcgatcctttgcttcgtcttacgttacagcgcctaa

SEQ ID NO: 72913 - DNA, 915 bp, synthetic construct
  source 1..915: mol_type = other DNA
atgataatcgagagcccgattgacttggaacttacacaaattagtggtcagacttcccagccgccttggacgaaagtggataattcatatcgtgaagtcgtgttagtgaacaataatccggttatttttgatgtggaacagagcggcgaatttttcaacttcaactatattggcaatataagcaaaaaagaagccgtttctagcctgaaatatatttttgatctggaatttgatctgaataaattctataaatatttgaatggtcatgcagaactggcggagatgtcgaagttttgccacggcctgagactatttctggcaccaaatccgttcgaatgtattatcagtagtatttgtagcgccaacaatagtatcaagcgctggactaaatcaatctctgatatcaaagagaaatggggaatcaaccataacgggtttcacacgtttcccgagatctctaccttccaggagatcttcctggatgctgaagaggaattggatttaaccgacgccggtgatatttccaactgcaaaaacaatctcaaatcgtgtggtgtgggctatcgggcgtcctacatgcgaaaagcctcggaacttttcagcctggaaatggacatttccgaaatttcaaaaatgaactatgacgaggctttcgagaccatcctgcaagtgccgggcgtaggcccgaaagtcgcggactgcattttactttatggattcaactttcgcgaagcattcccatcagatatctggatcaagcgcattgtatcttacctgtactttgatgggaaagatatttcggttcctaaggtccgtgaatttgggatggacgaatttggtgacaacgctggttacgttcagctctacatgtttcattacgcgcgtaaaagcggcctgatggcgaagctgaaataa

SEQ ID NO: 72914 - DNA, 1377 bp, synthetic construct
  source 1..1377: mol_type = other DNA
atgaaacttgaaaaaatcgtgctgatcgtggcaaccctgacgtcctttttcaccgtattcttaagtagcgcggtgatggtggccgtgccaactttagcgtcggagtttggcatgagcaacattatccaaaattgggtcaccatgctatttttcctggccgtcgctatctttacaattccgtccgggcaattaagcggcaagttcggtcttaaaaaatcaatgatattcggctcatcagtttacattctcagctcgattgcagccatttttagcatcaacagcgaaatctttctgatctgtcggctggttcaaggtattggcgttagcttcctgaacgtcgcttcaatggccatggtcgtaagcgccttctccccgcaggagcgtgggaaagcgattggcatcaacgtcacgggtgtgtatctggcaacaagcaccagccccgtgattgggggcttcctgaacttccacttcggatggcgcagcatctttctgaccagcgtgcctttcctgatcctgatcctggttttactgataacggaaattaaggaagaatgggtgactatgggggatgttccgattgattggaaaggttcgattgtttactcattaggcatcttgttattcatttacggcttcacccgcctggatgaaagtacgggcatcatcttgacggttataggtctgattgtactgggcgtctttgtggcgcttgaactgcgtgaaaaatacccggtattcgacgtgaaattcttcaaaaaccctaaattttcctcggcgaactttgcagcgctaaccgcgtatctcgcgacctttgctgttacaacgatcgtcaattatcatctgcagtatatccgcggttatgactcgcagatggcaggtataatcttgctcgttgcccctctgattcaggtaattatggctccgataagtggccgattgtcggacaagattaatccgcaaaaacttgcggctattggaatgttttttggagccatcagtctggcaatgctttcgatgctgaacgttagtaccccactgtggtttctcattatcgcgatggtctctcatggtttgggttttggaatcttttcctctcccaataccaatgcaattatggggtcagtgccgcagaaagatactccggtggcgtctgcatccgttgccaccatgcgtgttattggtcagacaatgagtatgggcatgttaactctggtatttgcgtttgtgatgggtaatgtcccaatgattgagaaatattttccgcttttgattacgagttctcagattacttgcctgatttgtatggtgctctgcgccgcctctgtgtttgcttccctggtaggcattaaatctaaggaaatgttggagtttaattaa

SEQ ID NO: 72915 - DNA, 804 bp, synthetic construct
  source 1..804: mol_type = other DNA
atgagttcatttaaaagtccggtggataccgccaaagccatctccaaaacagcgggcgcaaagaactctgccaatatcgttaatgtcatattgctgtcattcctggcaggggcttatattgccttcggtggcctgttggccatcgtgagcagcgcaggtatgattaaagcaggggcgcccctgggcttagaaaaattcgtctttggtgcagtgttccctgtagggctgatcattgttgtgcttgccggttctgagcttttcactggaaatgttatgtttatggttatgggtgtgctcgatggaagcgcgtcgattggcggcctcgcgaaaaactgggtactcagctgggtttttaactttgtgggtgcgttattcgttgcgtacgtgatagcctttatgggcggtctgtgtccgacggacgcatccgtcccggcctatgcgattacggcgaaggctattgcagtagccgaaggtaaagtgactatgccgtttaccgtcgcgttaattaaagcgatcggctgtaactggctggtctgcttggctgtctggctggcgaatgtgtcggacgatgctattggtaagattgttgggatttggttcccgattatggcgtttgttaccctgggctttgagcatagtgtggcaaacatgtgcttcatcccactggggatgtttctgggcgctaaaggtgtaacctggacgacaatcattgtcaacaatctgatcccagtgaccattggcaatatcatcggcggcggactatttgtagcttgcatctattggtacacgtttcttaaagaataa

SEQ ID NO: 72916 - DNA, 1098 bp, synthetic construct
  source 1..1098: mol_type = other DNA
atgatccgaaatctgaaagaggttaaagacaataactttgacatcacccgcagcgccgacgaagtgcgcaacttgtcgttcaatgaccatgtctgtctgggttgcgggatttgtgaatctacctgccctgtcgaggcgatcacactgaatgcagtggcaatcgatgcgcgtaaccggcttagcaatgacatctattttagcgggcacgaaaagattgcgcagaactttcgtgaagattttgatgtgcagcgtataagcattgacgaaagtaagtgtgtgttatgtggcatgtgcagtggattatgtccggtggatgccttggtcctgactatcgatgatgtgccaattcgcgaaattgaagcgtatccccactataatgctttctcagaaattgatgatgatgaatgcatctactgcaagcgctgcgaaattgcatgcccgcgtgatgccatcgttatcgaacgggtgctgcccgaccgtgctgatctagtaacgggtgagatcaatgtcgatgatgacgagtgcatttattgcggcatatgtgaggaactctgcccggccgaggcaatagtggttgatcatgaaaccggtaaggaatcgattgttatcgacaaagataaatgcgtctactgcctggtatgtaaaaaatcctgcccgacgaatgcgattaacgccatttgtcgcctgtgcaactatggcgaatatgatctcgattctagcaaatcagttgtgaaaggtaactccatcattgacccagacctgtgcgtctactgtggatggtgcgagggggtctgtccgaccgacgcggcaaaagtgaaaaaaccgtttaaaggtagtattgaggtggatgatgaaaaatgtcaagcgtgtggcgcgtgcgtagatatctgccagtgtaacgctcttgcattccctgtatctactggcccgggctccagaatggcccatgttgttgcgaatgatgattactgcgtgcgttgtaaggcatgtgccaaagcctgtccgaacggcgcgattacggtaaaacgcacagaagttgaccacaccccaattaactcggctacgtggaaagaagcgctggatgctattaaagactaa

SEQ ID NO: 72917 - DNA, 231 bp, synthetic construct
  source 1..231: mol_type = other DNA
atggaacttaaagtgaatcaagataactgcttgggctgcgggatttgtgtaatagcctgccctgtgaatgccgcgatcagcccggaaaacgcgggcggtaacggtgcaaagacggaagaagtcattatgatggttgagaatggatttatcaaactgttcagtccggagaaatgtgagctgtgtggcacctgtcagatgttttgcccagttaacgctatttggttagaataa

SEQ ID NO: 72918 - DNA, 570 bp, synthetic construct
  source 1..570: mol_type = other DNA
atgtattatgctaatacttatctggaaaaaccggtcgtgccggatgtaaaaattaccggcgaaggaaataccgaggtgctgaaatgtatgctgaacacgggctctgacatctaccaaggggcatgcaaaaaacgcggctcaacactgaaacaggaatacaaaaatgtgtcgggtacttgctacatggaccctcgcgatatggcaaagttgggtgtcaacaattgggatacggttcttgttaagacagattttggggaagttgttgtgaactgcgccgtaagccgggatgccccgcatgaaggcacggtgttcatatgcaagggtccatgggcgaacacgattgtcagtcacgacacctactgttgttccgaccccacctacaagggtatcaaatgtaccgtcgaaaaaaccgatcgaaaagttttgctcatggcggatctgatgcgttgggtatataaaaaatatgtggatgaagaggatgacgatgtggtggaaaacatggaaagcttaggcgaattaccggtttatcacggacgtaaatgggaggagctgattgatcatgacctataa

SEQ ID NO: 72919 - DNA, 1683 bp, synthetic construct
  source 1..1683: mol_type = other DNA
atgtcagaatcggaacatcggatgattgaaattctacgcatcctgagtgagcaggaaaaaccgactggttccaaactgattgcggatgaactgaagaacaaaggattcaaccttggcgaacgtgcagtccgctaccacatgcagatcctggatgaaaaaggttttactgaacgcattggaaacagcggccgtaaaattaccaaacttggtcttgaaaaattagaaaaaggcttgatttatgatcaggttgacttcatttatagcaaatttgaggaaatgatctatttaactgacttcaactatatgacccaggaaggaaaagtagttgtcaatacctccaccatctacaatgaagaatcagtggacatcattaaaaacattatccaaagcgacctttctgtgagcccgtacgttaatctgaatcgtattggcaacaatggtgagatggaagtgaccaccctgtgtgggacaacgattgatggagtgctgctgaacgagggcatcccgtcacaaccgaagtatggcgggctcctaaaaattgaggattcggagcctgtcaaatttacggaactgatctcctacaaaaagacctcggtgcccccactggaagcattcagcgccaaaggctgcacctccatcatggatgtagtggaaaacggtgaaggcattatcccggcgaatttccgcctgatccctggcatcgggcgagaaaaagctatcaatatcattaacaaactggacaaaatcggaattggtggtgtaatagcgatttctgaggaggaaaaagatattctcggcctgtcggtgcctgaagggatggtgggcatatccatcgtgggtgggatcacgccgttttgtgcagttcaggaacagaatcaggatattgaaatcaaaatcgcggaggagattaaagattttaaaaccttgtcgccaatcaccagcaagattaaacccgtgttaaaagatatcaagccgacgccgcaacagaagataagcttcctgctgtcaaaaacatggaatttgatacagcaagtcaactttgacattgagaagcgcaagggggatatcatctccaacgtttcttttattgataaagataagatcgacaaaagcttgtctgtaatggaggaaacctacaatgataatccaaaatatattaatccgtactataaactgattaaccacccgactaatgattcaaaaatcggcattgcgacaatctgcagcttaagtattgatggtattttgatcgacaacggcgtcatgagtaacccaaaatatggcggtctgctggaactgaccgaaccgcccctgtttattgacctcattagctacaacggctcaacggaagaccctcataaaatatttctggctaaaaatatgacaagcataacgcggaataacgggtctaacaaaattttggcgagttttaaagagatcccgtatatctctcgtgagcatagtgtccaacttttagagattctgaacaatattggtttctcgatatataaaattggtaagccaagagaagtaacttacaatgccaaagccgacaactataacttcggtattgtgacgggcagtggtttaaatacgattggtgccatcaaggaaaaaggcattgatgttgaagttaaagctattgaaaagctcctgccgtttgaaaaaatggatcgtttgtaa

SEQ ID NO: 72920 - DNA, 546 bp, synthetic construct
  source 1..546: mol_type = other DNA
ttgaccgatgttgagatcaagatcgaaaacattgttgcttctgcaagcattggtaaagacattgttcttacagaagtgagccaagcgctggaaggggtgaactttaatcgtgaacagttcccagggctggtattcaagctgaaagatccgaaaacagccgccctgatctttagctcgggcaagctagtctgcacgggcgcaaaatccatcgacgattctaagctggcaatcaaaaaaacggtcgatttgatgcgtaccattgataccgaaatcccgcatgagtttgaaattaaaattcagaatattgtggcgtcggccaacttggagtccaccctgaacctggaagccgtagcgctggagcttgaaaatactgaatatgaaccggaacagttccctggtctggtataccgcttatcagaccccaaagtggtgctgctcctttttggctcaggtaaagtggtttgtacgggagcgaaaactaaaagtgacgctaaattaggcgtcgaacgggcgtatgatcgcctgagtgagctcgatttaatataa

SEQ ID NO: 72921 - DNA, 2679 bp, synthetic construct
  source 1..2679: mol_type = other DNA
atgaataaagaaaccaagatgaccatagtcaaatccgtttttattattctgatcctgctcgcagtggtttttgcactgaaaatgccggcggcggatctgccgttaattactgacgaagcgaaaggagaatatgttgattcgtcaggtcttccttatttcagtgaaatggatagctattataacctgcgactgacggaagattatatcgatcatggttacgtgggtgaccaaatcattaacggtagtgagtgggatatgcaccggtatgcgcctactggtaatcagatcaattatgaactaggtattgtgtatgtcacgtctttcctgcatgatatctttggcggcgatcacagcgtgcgcgaaatcgccttctggaccggcgcgattatttcaacccttgcagtaattccagcgtatattttcagccgccgtctgacgaatgagtatggggcaattgtcgccaccctgatcatcgctctggcccccaactactttgcacatacctttccgggattctttgataccgatatgttctactacatattttcattgttcttcatcttcttctttgtcgagagtatacgcgcgaaaaaaatagcctacaaattgctatttgcaattctgagcatcatctcgatcggactgttcagccagagctggacaggctatatattttacataggacttatgggcatcttttcaattgtttatctgatcgcttgctattactttaacattggtgaagactcgcaagatgaatactcaagtaaactgcattggtttattaaccagaatgctttaaagtccattttgattctgggaatcatcggcttcattggtctggcaatattcaaagggctcgacggcgtcacgggcctgttcggcagcctgcttagcttactgtccctgcagtccgcgtcccgtgttgtgggcggtttccctaacgtacttgtgtctgttgccgagatgcagatcccctccatgctggggagcgggatgaacagtttattcttagcgaacactaatggtgcggtgaacggtattggggggattggtgttctgtttgcgggactgaccgttgcatacctgttcgtacgcaacatcttccgcattaagggaaactctgttaaaaccgaatccaacgttaagccgcagaaatctgaacgtctgtcctcctcgaaacggctggataataagcgtaaactcaaaattgacctgagccgttataatctggaatttgtaagcgacatcctgtctgacaaaaaactgaccctgctgtatgggacgttgttcattgtatggcttgtagtgaccgctctggcggtcacccgaggtagcagatttattacgacaattgtattgccgtttgcgctgctgaccggcatctttgtgagtatcgcgatggaatatatccgtaataaaatcaccgacgaccgcattttattggctatcactgcaattgcagcgatttttgttgccgtgccggtttcgactgtcaattccatctttgcgattttggtgtttgtggctatcgtgggcatcggggccgtgtcgatttatgtgctcaaaccaaaagctacctctggccgcaaactgccaatcaaaaagcacattgccatcattgcgattgtactggctttagtaacgccgtgtatctgcggggctttcctgacttctgaatctgtggtgccgggcacaagcgactcaatgtggaatgcaatgacgtgggttaatgaaacccagagtgatgataccgtattgacatcttggtgggactttggctacctctttgagattgccgccgacaaacaggtgaccttcgatggcggtagccaatcgggcgatcgtgcattttggctgggccaggccatgacaacggataatctggagttgagcgcaggtatatttcggatgcttgataccacaggtgacaaagctgtggaatcattagtgaatattaccgaggataccggtaaatcagttgatattctcattgacattctcccgatgaaaagcgatgatgcgcaaaaaacattacaaagtaagtaccacttaacagcggcgcaagccaatgaggtggtccagtattcacatcctaaaaacccacgtccggtgatctttgtcgcctcgtcggatatgcttcagaaagcgggctggtggagttacttcggtgcctggaactttacaaaccagagctcggaaaactacaattactatgtgcccaccgagcaggtcaaagttaacccgggttcgactggtaaactggcactgcttgacgatcaggggatgacggtcaatgcggtcatccaaaggggcagcggcaacaactcaacgacggcatatacggaagccgtttatactgatagtggcaaacagatcatggttaatgataccccatacaacccgttgaatatttccaacctgatggttattgaagatggctatgtcatgaagaatcagtctgtgggcaacgtaaaagacgccaactacaccctcctgttaattggtgaaaagaaccaatacactccgattttaatgagtaatgagctagcgaacagcatgtttactcgcctctacctttatggcggagccgggcagaacatttttgaaaacgtccatacggaaaatggcgtgatgttgtttaaggtgaactttaataatacggcggccggtgcttaa

SEQ ID NO: 72922 - DNA, 447 bp, synthetic construct
  source 1..447: mol_type = other DNA
atgaaattcaatgcctggaacaataatgaaaaatttttctcatcaaaaatcgcacaaaatgtaatttctaccgcgtgtggctcggatattaacaccgcctgtggcagcgatgtggcggcgagcgcctgcgggagcgatattaacacggcttgcggaagtgacgtagccgcgtccgcttgcggttctgacattaacacggcgtgcggcagtgatgtggcggccagtgcttgtggttcggatattaacactgcagttgcagtcatgtggctgcttctgctcgtggttctgatcttaactctgctggtcgcagtgatgtggctgcttctgctcgtggttctgatcttgacactgcatgtggaccagataagcccgcagttagtcgttcagaccgattttaagatcaattccatcttgaacattttgtttttctatattctatttttttaa

SEQ ID NO: 72923 - DNA, 582 bp, synthetic construct
  source 1..582: mol_type = other DNA
ttggatcataaaatcacggacttacagatcaacgcactgattggaactaactcaaaatacgaaatttttgagatcgaccgtcagtatgacattatgagcacctccatcaaaatggacaaatctaagaaaataaactttaataatcacatgccacacgagtgcacgcttctgaaaaacgtaattgaacttaataataaggaactgtatgacaaaataaaggattatttttgtttgtattacatttcggccctggaaaataccattgaaaacagttttcgaaaattttggagcctcagcgagcggattatcaaagatattcatggcggcatgaaggatgaaaaactggtgaaatatatggggaaactactgaaaatgtgccgttacccggataaaattatccaacgcgttaagttcatcaaaatcaaacgcaacaacctggtgcatgagaatattcacggtgaaatcacccaatcggatcaggcgattgtcaaaatcattgctgaaaacctgatcctcttcttaatttgttatttcaatgaagttacagatattggtgattacaagagtttctacgatctgtaa

SEQ ID NO: 72924 - DNA, 177 bp, synthetic construct
  source 1..177: mol_type = other DNA
atgaacgagaaagataaccgctgggcagaaaccatcattggctattgtaaccgtattgacgactacctgaatcgctttgatgatgacaaggaaatctacatgagtgatagcttatataaagatgcgtgcgccttggttattatcccgattgtgaatctgcagataatcttccgttaa

SEQ ID NO: 72925 - DNA, 942 bp, synthetic construct
  source 1..942: mol_type = other DNA
atgtttaaatttgataaggaacaacatgtgtttgactttgccggtgtaaaaatgggcggtcaaccgggagaataccctacagttctgtgtgggaccatcttttatggcggacacaacattatcaacgatgaacttaccggtgattttgaccatgaaagcgcggagaaactgttgaacgatatgattagcatgtccgacatcactgggaatccgtgtattgcacaggtattcggtcagacggaagaggcgattgtgaaatatttagagtttgttggtgatctctgtgatatccccttcctgatagattcgacttcagcagatgcacgcgtggcgggcgcgcagtacgcggatgaggtgggcctgactgagcgggcaatttataacagtatcaacatgtccgccgacaagtctgaaatggacgcgctgaaggaaacgaatatcgattcgtcaattatcctgggatttaacccgatgaatagtacagtgcaaggtaagattgcgatgtgggaaaatggtgacgatggcgcttacgaaaaagggttgcttgaagtcgctgaggactgcggcatcaccaaattcatgatggacaccgccgttacccccctgggtcagggtgcaggcgttgctggccgcgcttcttttgcagaaaaagccaaatgggggtatccggtgggttccggcatccataacattcctagtgcctgggattggctgcgtgattataaaaatgagaccggcaataaaacggccttcaccgtctgcgatattggcgccaacattctccaggtaatgagctgcggggatttcgtcttattcggcccaatcgacaatgccacaatctgctttccggcgattgcacagacggacatgttcattgctgaagcggcgaaagatctaagcaccgaaccaattgaaacgcacccgataaacaatctgttataa

SEQ ID NO: 72926 - DNA, 675 bp, synthetic construct
  source 1..675: mol_type = other DNA
atgctgaaacgtgtcgatatcgtgggaaatccgaacattggggtctttattctggcaaccgacgagtacgcgattgttccctataatctgttagacgaaaaagccgatattatcaaggaaacattggatgttgacgtggtgaaatccagcatcagcggctgcagtcttatcggatctctcgctgtagctaactcaaacggtatggttgtttcaccgcatgttctggatcgggaaattaaacagttcgaggatttaggtataaacgtagcgaccgttccgggtcaatataccgcactgggcaatatcatcgccgcaaatgataagggcgcgctggccagtccatttctatctgaaaaagccatcaacattatcgaagaaacgttggatgtcaatgtggaatccacttcgatggtgggcagcgacattattggaagcatgatccaggtgaccaacaaaggctttcttataagttcgaatgcggtgaaatcggagatctcattcgcccaggaagtatttggtgtcgagggggacattggtacggtgggcaaaggtatttctctggtgggtgcttgttccattgcgaacagcaagggcgcaattgtagcgaaagatagcactgggcctgagatggcgcgcgtcgaagaagccctgggcttcctcgatgatgacttttaa

SEQ ID NO: 72927 - DNA, 6225 bp, synthetic construct
  source 1..6225: mol_type = other DNA
ctgaaaaagatactgatctttctactgatattgatttttgccctctccattaacataaccttcgcaagtaacactacgaacagttccgatatctacatcagtaacgagggtagtgatttctgtggcgacgggtctattgataacccctaccagacgcttaactacacaatcgggaaagtcagcaacaatagcaatatttatctgaaaagcggaacctacaactctaccggttatgatattgtaaataaaagcattagcattaacggtattggggatgttacgattgacggcctgaacggcttcatttcacaaagtattttcaaaattaactcgaacgcaagcctgtttctgaacaatattaaatttaaaaatggatactgcgacctcgacaatgagacgccgtcttgcatcataaaccaaggccgcttgtttattaccaattccacctttgacaatttcaaaacaagcgttggcgtaattacgaatgaaaattacttatgcatcagcaatgtcaagaccagtaatttgtctaattctcagctgttttcagcgccttataaatataacattccgattcaatttatttacaacatctggtgctgcgacatttataatagcagcattggcgcctcgtacaataataaaaacatgacgctcaccaactcctttatcgagcgatttgtttcaaacaaggactattccaatcagacgagctacgcttacttcaacaattcaaatgttcatttaatcacagcgaacgattgtgacatgctgatttttaataacacttatattaactgctattttgatgtggatgataccacgcatacaattgaatattcaaacctgatttgggacaatgtaaccctctcaaaatataatgacctgttttatttctcgctgaaaatcggttattctaatttaaccgcgatttcctcctacttcttaacgtctattctgtttctctcgagcaatgcaaccatctcatacagctgtattctgtctaatattattacggcggtcgtgtcgaacgtaaatgtgaattacaactggtggggggataataaaggaccgaatgtcatgaacggtgagttttcaaaaatcacgtccaattattgggtagtcatgatggcggactatgatgactcgttagttaaaatcgatttaagtaaatacaccaatggcctggacgtatggaatctgaataatccctcgaagctgcggactcgtctggtgaagctgcgtaccgaaacgggtaatctgacaaaaacgtcaggctatttggaaaacgcgaccttttactctgaactgaatggcaacaacattaatacgatgctttatgcgatggtggataatcaagttctccgcattgtggttggtgagggtaactcggactatgatctgtatatttccgatacggaaggtaacgattatttttgcgacggatcgctggagaatccgtacaaaacccttaaaaaagttgtttccaaagccattagtggcaataagatttacatcttgccgggctactatactctgagttggaacgccaatatcaaaatactgaaaaacctgaccttcattggtatcggaaatgcaaccctgtccagatcaaatgcgcgcaacattttcatcgtgcaggaaaaaggggtgttgaatatcgagaatctcacattcacccaggctacgtctggctatcacaactactacgatcccatcatccatgtaatcgatggtgatgtaaaccttaagaacagtaacttctataacattaccacgtatggggttgtttttagcgataaatctgaacatgtgacggtgaacaacctgactcttctaaatgtggaaggtccggtggtcgtgggcaactcgactaaggtttcaatttataatagcaagttcttcaatggcagtgaagcatccttctatgactcctactattccttcctgatcccagtgtgtagcaacttgagcgttgtcaactgtacggttgatggatataaagggggtctgattaaactaaacccgcgctacgaacaaatcgcggcccgctcctatatttacaattccacctttttacgtaattaccagtacaactatgtgtatgctcctatggtgtcaacctatagctataactacatgaccggcttttcaatcattgaaaactgcacgttctgtaataacattgggaacctggttttcagtaacatcatcaacaattgtacctttgtcagcaataaacggattcgttatgaggagactaacatccattacaacgtcaactacccaaaagctctcatttatgccaaaatcattattaacagcaacttcaacaacaattctttcatcagcaaaaattatgaagacatggtcattcacggcgacgaagtgtattatagcacctttataaataactctgcagcatttggcggtgcactgtctggcagcaaagagatacactatagcatctttatcaataactctgccgcatttggcggtaacgatgtcttcgtttataacggggatttaaattgctcgagcaactggtgggggagcaatcaaaagccagattcatcccgcgtgtttgttttcatcggcaccttggtcttggacgactgggtgatcttgacgatggactacaagaacgatcgtgttattgcatacctggataatctgctggacaacaacggcaacagttacccgctgaatcacgtgctgccgtctcgggctgtgattttttcaaccgaaggtggtgaactgactccatctaacacgttcttggttaataacaaagcgtcaacttttctgattcgcctgactagcagcgattttaatgtctttgcgcaagtcgataaccaaattaccagtttgactgtgtacaacaacacgactcagatcctgatgagtaacgtggtcatatatgggaaagatgtattgtacaacttgtcgttgatcaatatcaatggccataaaattagcaaccaggatctgaatgtgataatcacgcacaaaaacagcattattgactcctttatcgtcaccaccgataaaagtggggatgcctcctttagtgtagattacgcaatcggcatctatcaggttaatgtggtatatctgggaaacggttactttgaagaatgtaacagctcagctacgatcaatgtcagctcgattaaaacgaaacttcaatcttacaaccagacctattccggtaaaaacaacaaattttatgccatcttggtcgattatcatggcagatatttgctgaacagggacttaattctgcgaatctttgatctgaatgataacctggttaacacagtggatgtgaaaaccggtgttggcggacgtgccgacgtgttactctcgctggatgtgggcaattataaaatgaaatgggattatctgggcaacgaatggtacgaaaagagcacttgtatcagctttgttaccatccgcccgattgaaactaatatcatacttcccaacaccaccctgtacggcaaaggcaatgactatgagttcacctttaaagatatgtatggaaatctgatctcgaatgaaatgattaccttcaaaatcagcaaagaaaacgaatcgagtaaattcagtcttataaccaagaagggaattgcatccatcaatattaatctacttccaggaaagtatgatctggaagcggtgtatgcgggtgacaaggtctatggttcgtcctttgcgtctgccattttatacgtggagccaatttttgtaaccatgaatcacaatagctatcagtccctcccgaaaaatggtgtgttcacggtgatcctcaaggatatgtatggcactaaagtaagcggcgagaatctatcgcttgaactcattaacaaagatattcataaagtgtacgaggcggtaagtgacgcgagtggtcaggccaacttcaaactggacgctcctgaaggcgtttatttcgcgctgattaattatggcggtaatatttggtacggttcgtcagttagtgcggtgactatcgagatcaacagcaacgtgcctattaatccagtttacatcaacggttcaaatttagtacagtactacggtgaagataaatattacttaataaagttcaatgacaccaatgcctacagcctggaaggcaaacttgtcaatgtgctcatcaactctgaagattggtctaactcatacactcttgaaagcaacgtctttggggaggctcgtatccagatcgcgttggaaccgggaacctataacattacgtataattataagaacgaatattacggtctatttgcgcaaaatagcagtactatcttcgtgtataaaatgcctacaagcctcatcgccagtaacatgatcctgaagaaaggcgactcaaaaaatctggaggtgaaacttgtcaataaaaacggcgacccgattgccaacctcccggtcatcatcaagatagatgataacgagtacaatatcactacgaaccagaaaggaattgcgaaactgcttcttaacctggatttgggcacccataacgttacctattcatttaacaacaaaaattacatctcttcaaaaggtaacgtaactattctggttgtgaatgactcgaaaaaaacaacaactcttgtcggcaatgatgtgtatactcgtgaagaccagacaataaactatacggtgctgctgtctgatttattggataacccgatttcatctagcgaaattgtgttaaaaattattaacagcgatgatattaatatcaaaacatataaaggatacaccgatgtcaatggtgtggctacatttaagtttaacctgaagtttggtaactatttcgtgaatgcttattataacggcaacagtgtaaacctgccgagtttcacgactaataatctctacattaaagttctggaaaattacaccgagacgatcctgtttggcaacgatattgaaattcataacggtggcgacgattactattccgttgtgctgtcgactgttgatggtgaatttattaaaaatcagatcatcgaatttatcattaaaaacaattcgtattttacaaacaccgacgaaaatgggatagcatatctgaaaataccattctcgccgggtagctatgaagtcttaacgaaatttcacggttgcgataacctgaccagttcaagcattcacaattacattagcatctatggcgatctgtttaacttttacagcaaagatgtggttaaagcatacaacaacggtacgcattactatgttgccctgtatgataccaacaatgaacctttgtccaataaaaccattaacttctacgtaaacaatcagacataccaggatgtgacaaacgctgatggtttcgtttgctttgaagtatggctcaacccgggcaaatatatcattaatgccactttcaaaggcgagtacccggacgaatttaccagtgtggtaaataacatcaccgtcctgcccaccattatgggggaaaacctggatgtttattataatgagaacacagtcttttccctatttttactggattacaattgcaaaccgctggaaaacacagaagtagtcatcaccattggtggcgcgaaatattcgacgatatcgaccttcggtagcgcaagttggaaattaaaattaaacgccggggtctataatgtgatttgtaagaatcctataacgacagagaaaatcactcgtaagattaacattaaatccaccatcatatctaagaatctggtaaaatactataaagggagctcgaagttttccgtcacgttcaaagaccgcttcggtaatttttctcgtaattctaaagtgaaatttattatcaacaagaaaacgtatgtgaaaaccaccaattcgcgcgggattgtgtcactgaatattaacctgaagccgggcaagtacaccattaaaacgtataatttaaagacgggtgaaattaaaacaaacaagatcaccatcaagaccttaatcatttcaaaaaataagaaagtaaaagcgggcaaaaaaattaattataatgttaaagtattcaactcgaaagggaagattgcgaaaaaagcgaccattaagttcaaaatcaaaggaatcacctacaaaattaaaaccaataaaaaaggcattgccaagctgaatatcgttcttaaaaaaggcaaatacacacttaaaacaagctatttcgggctgagtgttaaaaacaaaatcacggtgaaataa

SEQ ID NO: 72928 - DNA, 5712 bp, synthetic construct
  source 1..5712: mol_type = other DNA
atgaaaaacaaaatctttatcattggtctgattattttgatcttatttatctccatttcatccgtgtgcgcgaataatgaaaactcaaccttaaacacatcgattaagatcaacaacgacctgaatcagataaacctaggcaacgaaataaacctgattgacgaagcgccaaaagaagttctgcaagatgaaagtgaaatctccatcacgccgcagaactacaacaaatatttcaacgtctacaccggtaaatttaaatcggatattgtcagctcgaaaataacgacggtcaaaataggtaatgtgtcaaaatgtctgttcgcctttgaaaaacctgtcaatctcatgccgatcgatagcagctgtcagattaccaacggggtaatacatctgttgccgggcagtgacggctctacaatctccggtctgaaaattatcaacaatgactcggtgggggatattaagtatggcggtattctgatttctcgcgcacatggcatatggctgacaaactcaagcaacaaccttatttataataataccattatcataggcaatcagaaggggtgttatgccatgccgatgggttattcgaacaataaccggattctgaataacacgatcatttctggtctcacgtcttgcatcgtgatgggccgtagctgctataacaatatttctaacaattacatcgaaatttgtggctatgaactgttcactacatctaatctgattttcttcaacccttggggacacgcagattatgatgatggtgtcgccgagtgcaacggcaattatatcgccaataactatctcaaaaactatggaacgggcatttgggcgataactctgagccttggctattactccggagatacacaggtcatcaacaacacaattattaaaggttcatcagggatcagcactagtgacatgttgttcacccaaccaaaaaatattttgatcaaggataacacgttcattgattgccccatatctatccttacctgtagcaacaatgtcacaatagagaaaaacaaaatctttggcagctctgaagataatgcaatctacattcaggctaacgatgcacagttgtacaaccatagtgtcaccatttcggacaattacatcgaatttgaaaatctaggttgtgcgatcctggtacatagtgacaacgtaacagtggttaataacgaaattcatctgtcccgttatggcactggaattgggatctctccaaccgactttccgaaggcctccagcaacaactgcaagatcgaaaacaacaaactgtatctcagcggtgatatgggcattaggattcttggccataataccaccatctgtaacaattacatcagcaccaaggataaaggcatcgtaatctcctcgtcgggttataagatctacaataacacgatcattgcgaacataattctgagtgacgatgtgccaatctacattgaaggccatgtggtaaattccaccgtcatgtataacgaaatcgaaacgaataatagtgaaggtattcacttcaatccgagcggtgatttgagcgactacttcggcaaggtttcggagaataccatcaatggaatcattgagaacacggaaactataatcgtgaatgataccaacttctacgattattttgacctgagcggctatttaaactatgaatttaaacccaactcaaagaaaatcatcttcttcaccttcctgacgaacaaaaatatttatttcaccgataaaatctttttaagtagtaacaaaatgtacaatctgttgcacaacgtgtcgattaaattttttgaaaatgccagcggaagcttaatccaggatttaaatttttataatattgggaataatagtatcattctcgacggggttaacgacgtgtcaatcaataacaatgatttcacaattcttagcaataagggcaagaacatttcaaccatttccgttattggcggtgaaaactgcatcatatcgaataataatatcttcatgaactctaaatccaacttcactacagcgatttctatctcgaatccgaatggtgccataattaaaaaactgtcaaaaaactttaaaatttttaataacaatattctgatcaaaaccaacggcattgcgcgtggaatttatgcggatagccttgttgagactaatatcctggaaaataagatcaatattatcagtgacagctcggcttacggcatctccatagaaaacaccaacgaaatcgtatataacattactattgacaacaatctggttgtgattaattctaaagagatgagttatttaatcaagcttcagatgattggcactagcgacatcatcaacaattatctcgtgggaagcagcaacggtatctgcggtatcggggcttacaatagcttgaatctgaacataaaccgtaatgaaatttctatttcaggcaaaaaaccaattaactttccggtttttgatgagctcggtcgcaacaatgtggcgatttatctgaaatccacagtaatcaatggtttttcacggaacatttttgatattgaaaactccaccatattgattaaagattcgtcctcgattattaaaaacttcaatgtgaatagttatgtcattgccgattacaaccatgatttttactttgattcgcagaataaattaaaaagtaacatcattaatgacaacagcatcattttatttaaaaacttcacttttaaaaaaatcaccaacatcaacattccggtcattataaaaccctataaaaaccttaacaatttcacggcgacattaattctgtcggaaaacgcgaacaaaagctccatctacgggtttaactttattaatgcaaatattaatctgaacggggtagataacgtgaacatttttaacaattcgttcaaatgtagcgaaattacggataataatggtctgaataacattattttcaacaattcatttgaatttaaactcaacaatgcagatggaattattttcaacggctgtgcaggtggtatttttaccaataactacattctaattgactcgaaaaaaagcaattttattcttattcgcaaagcgaacggcactaaggttaacaacaattatattaacgcgactggcgacagtttagtactgattaaatcagactcgtcagaaaacacgcagattctgaaaaacatcatcaacgttacctctactggcgattttaacgtgtataacgcttttaaaacccattttgataatatctccaacaacgaaatcaaatgccgaggtacctcaaatagcgctgtaatttactacgactcgtcatcgtcctgcaataaaatcgaatttaacgagattatttcaagcagcagcaacggccgagaatatgcagttgtatttgataccaaacacgcgctgtccaatacgattgcaaataactatctgattacttctaatgggtaccgccgcggcaatgacgccgtatacgcaatctttgagttggtctgcaacaatactcctgtcacgatctacgtgtctatcaactcaacggaagatggtaacggcagtttcaccaatccgtatctgacaatccatcaagccctggagaacagtctgagcggagctatcatctacatcctcccgggttactataaggaaagcaatctgattgtgaataaaaatattaccctgaccgccatcaacaatgatggcgcggtgtatattgatgccctcaacaatcagctgtttaccatcacggaaaagggtagtttgacgataaatgccctgaagattttcaacggcttctccgttgagggcggcagcttgttcttcaactttggctctttaattatcaataattcagttatttataatagctctagctattatgacaatagcaacccgacatttaaattcaccaacatccagacgccgactctgtcctatagttacgattgtgaaaacctgggtctgggaggggctattcttaactatggtaatctgttaataaactcatccaccctattcgataacttcgcccacaagggcggcctactcgcggattttggcaaaagcacaatcaaaaattccctgatcttcaacaacacggccgttcacggcggggccatttttaccgatagctctcatgagtttaacattgaaaatagtagcttcttagaaaacttagcgattcaaaccttggactactgctatattcagcgcaaaagcctggattctggtggctatgagtaccgtagcctgtgcgatatgcggccgggctacggtggagccattttcagcaactcttcgctgatcatctccaattgcctttttgagcgcaatattgcgaaatctggtggcgcaattggccactactctaaaatagaactgaatagcaaccgccaggggccgaactattatgcggtgaatcaaaacgtgtacagtcagttccgctatgtgcctaaactgaagattgaaaactcgatctttcgttacaacgaagccaaagacaccagctgtggtaacctgagcatgatttctgaccgtatgtataattattactacagtatcaactacaacggtggagctattttcggttcgctgagccaactgaccatcttcaactcattattcgagcataatgtggcaaacaccgtgggtggtgcactgtgcgtgcagtgtgaaaattcagtcattgagagttgtaagttttataataatacggctggggaatatgggggtgctattgaggcgtttggtacttatcgtatctttaatacggaaatcctgaataacaatgcaaagaacggcggtgctatcaaatacacgtcatataactcttatgggcacctgcaagaaatgatgagtctgtttaacgtcacagttactggaaataaagcgctgtctagcggcggcgcgtttatcacccaagttgcgaattttgcaatcaccaattcaaatatttatgataacagtgccccctacggcaataccttttacggaaagtatgggtatgatagtagttccaacatcgatgctcgtaacaactggtggggctctgttgacggacctgacgattccgtgtggaatagtgccaacagcaaatttaaaaattggttgaatgagaaagtgaactggcacgttccgcatgtgtccggtggcagtagcaacaatgatgagtcgggcattggcaaccagaacaatggtgtcaacagctacattccatctagtgtatccacgggttcgggggtccacaccggtagcaccctgaccaacaatgttaaatcgtcgggcgcgagctcaaaagggttctccttcacgggcaattggccttcaggaacggcaaacggttttaacaacggtgggtcgggtgaggggaatgcggtcaactcaaaagataatagcggaaatagtcgcacgtctattgcaggcaatgttaaaaatttgaatagcgttagtaaaatcaatagttcgaatgtgaataatctttttagcgtaggtatggatgccaatgcggccgatagctccgcgagttctgcttcatcatcgcaggggggggcggacgagagtttttccaacgcatacgagataattaatgaagtgaaaaaagaaaataaccaaaaattttccatctttaatatcctccttattatcgcgtggattttctttgttgtgggcttctatagaaagtacaacgacaatgaaaaagagatttaa

SEQ ID NO: 72929 - DNA, 5262 bp, synthetic construct
  source 1..5262: mol_type = other DNA
atgaaatactctaagctcttcttgatatcgtttgtcctgttgtttttcattgtaagtgctgttaatgctttagacgcatcggaaatcactttgaacgcagataattctattgatgagatctcgaacgaagacatgggcatacttaacgaagtttcaccctcaaatgatatcaagcatatctatgtcaacgatactggggatgatagcaacatcggtagcattaatagtccgtattcttccatcagcaaggccattggtgacgtcaattcgtcgacaaatacaacgatatacctgagtaagggcactttcggaaagaacaatgatacgaacttccagtttaccaacgaaatcaacacgtactttgataattgtaatgtgacgtttattggtgagggaacggacaaaacctttatcgacggtaaatcaacatacaaattcatgacgatcctggaaatcacccctaatctggtttttaaagatattacctttgttaattttcgcggacgggggagtagcgttttcgagctgttggaagccggcaatctgacaattgacaactgcgtgtttaaagattcatactctacgagcaacggtgatacaatttccagcagcaacagcggggatttaaaaatcatcaattctcaattcattaattccaatggtggcattattagtctgttatatgaggatgtctcgcccggaaccctgtatctggaaaataatacgtttgtaaacattaccaattctgagaataatggcattgccgtgacgagcaactacgctaaagcagtgattaaaaataataaatttaacaatatcacctgcattaaccagaaccaggttaccctgtatctggaagcgcccgacgaaggtacccttgttctgaccgataataacttcgttaactgcgagtgtctcaacgaatactttatggcgccagtatacttgtgggcatatgaagaatatgtaatatttgaacgtaacatcttcctcaattctactggggcgtcgggattcaatatcttgctgaacggtcgcatggacaacctgaatattagtatcggtgcggatgagatcaatgttcataacaacgaaattaaccacggcgtaaatattccaattaacatcacggatgatgtaggaaacctcgttttaatcaatagcggaatccaacttaatctgatcggcgataataacaattacaccccatatctgagtctgaaaaataaaaaactcacctttgcgactgttccggagagtggcatttataacgtcaccatcacctacaatgatgggctgtcaactacggaggtgttaacgattataaaaattaatatcagtagtagcccggtgaacatttgggtatctccgaagggttcagactccaacaatgggagtgaagagaacccatttaagacaattcagcatgccatcgatacgggctttgagaaatcattcaacgtcatcatatatctggatgagggcatttactatggtgaaagtaatgttaacctgatcattacgaacaaaggtagtcttcaaattatcggtaaaaaatataataaaaccatcattgatggggaacattcaaattggtttttgagtgtggacacgtgtgacgtggaagttaaaaacctgaaattcattaacggggctggaaacaaaaacttaatctctggttcaaacttactgaaccttaaagactgcattgtagatagtaatattgcgtcccgtaattgctacgttctgcatcaaacattatttgataacctaacttataccaacaataccggtaccatttattataactataatcgaaatattaccaaatcaaattttattaacaacaaaaatatttatgactcgaccggtattatttatagctcttgggcgcctatcattatcctggactgtaaattcattaacaacactgcactatatgactatggtgtcatatactcgaataacaacattatgagcctgaacaactactactatggcaataaagctaaaaactacggcatattctacgcgtcgtcttactcgagcaataaaatgattctgataaacgatacatatattaacaaccacgttgatggcagctatggcattggcatttccccgtactccagcgtcgtgaactgtaaattcatcaacaacagcgcgggtaccgatgcgggcatagggagcataaccatcacctgtagcttcaaaaactgtagcttcatcaacaacagcgcgaccaagggcggtgtttttgtacttaatgcggttcagcatgccttgggcaccacgtacgaagaacttatttcatttgacaatgtcacctttgaaaacaacaaagcgagcatgggcgcagatatttatctgcctccgcgtagttcaaattcctattacagctacacatatccgattgaactgacaattacctttgataatattactgtgacgtccctgactgacaatttaacggcgagcgtgtacggcgttaacggcatcatcgtgggcggggccattcttgaattttacctgaacgagctgtacattggttcttcgcagatcgttaacagtaatgccattctggagtatgatggttttagtaacggcaaagctatcgttaatggcaatattattcacccgtcggtcaaaaataacataaataatgccaccctggatattaaactggataatgtactgaaccatattgatttctgggtgtccaacatcgggagtgatgaaaatggcgacggtagtaaaaccaagccatttaaaaccatccagtatgctgttaataaagcattcgaaaactgccgtgacattactatctaccttggcgaagaaacctattctggggagaacaacaccaatctgactatctccagtgccagcaatatcaccatcattggcaaaggcattgggaagacaattataaatggtggtaatagcagctattttgtcaaaattctcataggcattaataaaatcatcattagtgatttgacgattattaacatgacccccgataaccgctttgaccttccgatcggctcgacaagcccgagcggtatccacagtattattaaaagcggttccacaagcccaatcacggttgataagggcgccaccttatatctgaataacgtcaacatcaccgaatgccgtggcggtaatgcgataattgatggtgaaggcaacattttcattgacaattccatcctctataaaaatggcgtgtcaaagggcattattaaatgcgagaatctggtaattaacaattccataattgataagcacttagtgggaggctatccgatcataggcacgaacattatcatcaacaacactaaaattacagatgtctttaacattattcggaatggattttatttcatctccaatgcgaaaaacacgaccatcgaaaatacatgtgtgctgattaacaactgggaaaatccgttaaatatcttggatattattgaatattatgatacccagatctgtcctgcagcgtgcatcgcgtcaactaatgccatcattaaaaactcctcatttaaaaatgaatttgagctggtgtacctgtggcagtccactactgactactcatatcataatgtgtacagcggctcaaatattgaagcagttaattcgtcattcgaaggttatcagttcattatctattcgcgcatgcttcagaacccgatctacaagttcgatggttgcacctttaacaatattgcgaacttgatgattatgatgcaatctcgtaattctatcgtcagcttttccaattcggtaatgttcatctccggcaataaaattgcaagtaataacgcatttaataactcgttcctgtttaacaacaattattgggggaacaattccaaacccgtaatcccaaactcggtaagcaacttccaaatcccgtcgcccgacaactggattatcctgattagcgaaggcgaagaaccagtatttaagctgacagacgggaaaaatgtcaccgagtatatctgcaatttgccggctaaaatatcttacgtggccgacgagaacggtgagatcattcctgttctgaacctgaacggtaacggctacaaatttaacgtggacgaaaacggtaatgttgtgctcaatatcagcgcgccgatgaaaaacattgtgccgaaggttccggtggatgaaacggtattcgcaaatgatattgaagtgattgtgaacagctcgagcaactttaaggcgaagttcacgaataaatggggcgattcactgaaaggtattaacgtgagcttcatcatcggggaaaacatcatcaatataattacgaatgaaaacgggactgccatcttgcctgtggactttgacctgggagtctactttgtgaaaatcgtgaacccggttacgggtcagtttattttcaaaaccatcgatgtgatccttgagaacacggtgacggccaacgatatcattgtcaagtacaacgacaaatctaagttctctgtgatttttactgataaatttggaaacccgctgattaacacgaacgtcaaatttaaagtcggcaagtatatcatcaatcgtacgacggatgaaaatggtattgcgtcatttgttattaacttcaacgttggtaattatgctgtcaataccattaacccggtgaccaatcagagtattgataaaatcattactgtgaacaaaatagctactaaattaacctcgccgaaactgacggtcacctacaatgctggcaaatacctaactctcattttaaaagacttcaatgggaaagccttgatcaatcaaaaagtgagcatcaagattaatggtaaagtgtacaccaaaattaccaactctaaaggacgatctagcctaaaaattaacctccctgtgaagacatacattacaaccctcacctatgccggcgataggaaccacattaaatcctctgcaactacgaaagtgatcgtgaaaaaagcaacgcctaaaatgacggcgaaaaaagcaacctttaagctgaagaccaaaaccaagaaatattccatcattctgaaagacaaccgctataaagtgatgaagaaggtgaaagtctatctgaaagtaaaaggtaaaacttatagagccatcaccaattccaaaggcaaagccacctttaagattaccaaactgacgaaaaagggaaaatattcggcgcgcataaaatattcagggaataaatacttcaatagcatcacaaaatatgtcaaaatcacaatcaagcgctaa

SEQ ID NO: 72930 - DNA, 492 bp, synthetic construct
  source 1..492: mol_type = other DNA
atgtctgggaaatcaaagattaacgtgtttaacaaaatgactaaaactgcgttggacgaagagattagtgcttatgtggcgtatcatcgctactatcaacggctaattgccgtgaaaatcgtttcggaaggcaatacaatccttgatgcggcaaagatacttggaaagtcctatcaaacggttcaccgttggatcaaaacgtgtgaatctgaaggcttggagggtttaaaaccgtcgttcggtggtggccgaccgtcaaaactgacctatgatcagctgatggaactggataagattattgaaaaaaccccaaacatgagcatgaaagacgtccatatcctcgtcaatgaaaaattcaacgtaaattacagtttaaaacagatcggcaaaattgtacgcaagctggggtacaattacagcaaagcatgccctaaatttagcaaatccctggaggatgccgaagagcagctgaaaaagctgaaacgtacctaa

SEQ ID NO: 72931 - DNA, 1083 bp, synthetic construct
  source 1..1083: mol_type = other DNA
atgaaaatcagtaagattaatctcatcctgagcgtggtgctggctattctgattaccatggcgacaactgccagccttctgtcaaacgccaacgatagctttagcaaagcagagccaaaagggaatgtttcaatcgcgatcaccggggacgttatgtttgctcgtaacatgccgggcgtgttaagtgctgattcaagtccgttctccggtgtcagtaacgtaacctccaatgtggatctgttactgattaattttgaaaacgcggccacctcatcggaaaatgcagttaagggtgatgttccactgaaatgtgacccgcgctatgttccgctcgccaaagggaacaacaacaccatagcgtcgctggccaacaatcatgcattcgattatggtattgatggaatgaaggacaccattgagaaccttaaaaatgccggcatcacgcccatcggcgctggtgaaaacgaaaaaacagcgcataatgcagtcactcaggagattaacggccggaatatcaccatcctgaactatatggattcggacaactttgccgaatattcttatgatgtcatgccttacgccaatggttctaatccgggctactccgtatttgacctagcagatgcgcaaaagcagattaaagaaaataacggcagcgatttgattgtagtttatatgcacttcggtaacgagtatagcaactctccgaatgacaaccaggtgaaaattgcgcatgaactgatcgactcgggggcggatgtggtgctgggctctcaccctcatgtgactcagggaatcgagatgtataatggcaaaccgatattttatagtttgggcaacttcatctttgaccagtccaaccccgcaacgcactctgcgtactttgtgcaaattgatcttgtcaacaatacgggtgaatgcagtgtgtacccaattgtaatttcgggatacctgccgcattacatggacagcgatagcggtaattcactcttaaacgaattgaatcctaatgcggatgaactggaagtcagcaatggcgttggtaaattacgcttcaacctgacggaaggcgattccaattaa

SEQ ID NO: 72932 - DNA, 1740 bp, synthetic construct
  source 1..1740: mol_type = other DNA
atgatttcttgtgttagcgcaggcgatagtgagatgcaacaagtgaataatgacagtgttgactccgcgaaccagtatgtggaaccagtgaagaatgcttcgtttagcaaggtgagtaataccaattacctgaaggattccaacttcactgtgagtttaaaagatgaaaataacgaagtcattgtaaacaaaaccgtttatttcacgattgatgatggattagtcataaacacaaccaccgacgggaaaggcagcgcaaaactcctgttgaatatctccaaaggcacccacacggtcaaatacatatttaacgagacggggtttacacccttcaaatcttcaactaaagtgctggtgattaccacctccaatagcaagatcaaagcgagcgcgtataaatcgtacatcggctttaaaaagcattattcctatgctaaacatatcagctttaaaaacacatacaagattacactgactgcggacggcatcccgttatcaaaccgtattgttaaatttaccatcaacggaaaatcgtacagtaaaaaaaccgatagcaaaggcgtggccagcctgcctattggtctgaaggccggccgatatccgattaaattctcatatgctggtgaaaaaaatattaaaaaagtcagtggaagctctatcgtgtatgtaattaagggcatgcctaaaaagatcattaaagccaacagcctgacctataaaaacaaagtttccgccccatttaaaataaaattggttaatgggcgtggtaacatcctgaaaaataagaaagtaaccttcactcttgatggcagaacctacacaaaatacacggacaacaatggtattgcaaccatatacctgaaactgagttggggcacgcacagtctgaaagtttcatccgccaagacctcgtattacaaatctgtgctgaaaaaatattctatccatatcaaaagcaaggcggttaataacgggctgtggatgttcagttcggacatgaaaaaagccaacttagcctcgcttaaaaaggtggggaccaaacatattttcctgtatgcaaaggcaattgatgtctggggccgttcggatgttgagaaatttatcaaaactgcctctggttatggtattaaggtgcatctctggatgaaagtgtttaacgatgacaatgataaatggatcaatccggtgaaaaagggcaaaatcaactatggtctgatcaaaagcaaaattaaccttgcgaaagaatatgcgaaagtcaaaggggttgcgggtatccacttcgattatttgcgctaccccggcaacgcttataaatactcaaacggtgtaaatgccatcaattactttaccaaagcggcaacgagcgcgattcacgcaattaatagccggttcattgtcagcgcagccgtcatgccggaaccgtcagatatgaaatattactatggtcaggacatttcaacaatgggcaagtgcttggatgtaatcattccgatgatttacaaaggcaactataacgcgggatcgtcctggattcagaaaacgacgctaaaatttgtgaaaaaatccggtcacgctaaaatctggtcgggcatccagacttaccattctgaccgcagcccgataaagctgacgtcatctgcgctgcttaaagacgctgatgcggcggctgcaggtggagccgatggggtaattctgtttcgctatggtctcacgaatttgattaactttaataagttataa

SEQ ID NO: 72933 - DNA, 1542 bp, synthetic construct
  source 1..1542: mol_type = other DNA
atgatgaataaactgagtgtgttcattgttatcattatcattgccctaagcatttcgtcggtatgcgctggtgatagtgatcacaacaagacggacgactccattcttggggaagccgatacgtcaacgagcagcaacattacgcgcattggtgtgaacagtatctacgacgacggcgtgaatgaaaccatcaaaactaattcctcttttgtgagctcgaacgtagtaacttacgaaacctttagcaccaaaataactgtccggctgctgtcgaataacaatccactgaatggcaagaatattattatttctgtcggtaacgttagctacaataaaaccacggatgctaacggtaaagttgtgttaaacgttaaactcgccaaaggtaagtataacgcaatgttttcctacggtggcgacgaaaacattaacccttgccagaaaaccactacagtgattgtgaaaacgcccatcaaaacaaaaatctattgcgccgacaaaaacatcaactatcgacaggacctgaagaataccttcattgtccgtctgattgatgggaatggcaaagcgctgaagagtcaaacggtaacttttaaggtcaatggtaagatgtacatcgcaaaaaccgataaaaagggttacgcggaagtttgtttaaacttaaaaaaagggtctttcacggtcggattctcattttataagaaaagcccgtactcacattctcacggatcgtacaaaatcaaggtaaaagcgccgatcggaaaaggtaacgggtattggctgtggccggcgcatatgaaacatttgaatctcaaatccctttcaaaacttggaaccaaacatattttcttacatgtgcaggcgatttcagtttatggcaaaagcagcgttattagctttgctaaaaaggcacaccgctatggcatcaaagttcatctgtggatgcaggtatgttgtatccgcggggataaatgggtgcgtccggtgaacaaggatggtagctttaaatattcattcatcaataaaaaagtcaaggaggccatcagttatgcgaagataccgggcatcgatggggtgcacttggattatgtccgttttggcggcactgcgcacttgtataagacatctacacaatctataaattatattgtgaaaaaaacaagtttgggaatccataaagttaaacctaactgcattgtttctgccgccgtcatgcccgagattagcaagatgatttcgtggtacggtcaggatattccgaccatgggcaaatatctggatgtgatcgtgccaatggtgtataaaggcaatttcaaccagaaaaccgcgtggatcaccaaaattgtcagtaaatataaaagccaatcaaaaagtgctgtaatctggggcggtcttcagacctaccactccgataataatgtgaaaaaactgtcgtactccgcactcctgaaagacgcaaaatccagcaaagcaggcggcgcgacgggttcgatactgtttagaattggcctgacccattacctgaactttaaaaaagtttaa

SEQ ID NO: 72934 - DNA, 1455 bp, synthetic construct
  source 1..1455: mol_type = other DNA
atgtctgaacagccgcaatgggatagctcgatctcgttcatttttgcaatgattggagcggcagttggtcttggcaacatctggcgtttcagctatgtgctttattctaatggtgggggctcattcttcattccgtatctgattgccatcgctattatggggattccgttcttaattttagaatatggtgtgggcttttcatttaaggaatcttttagcagtatcatgcgcaaaatcaagccggagtttgaagtgatcgcctggattttggtcctgtttgtatttgtggttacaatttactatctggtcatcctcagttgggatctggtctacctctttagtagcttcacattcaattggggaaccgatacggcatcgtactttgtgaacaccgttggcggaagctcggatctgactaatgcgaacttcctcctgattccgaccaccgtctgtgtgttactgctgtggatttccgtatggttcatatcacaccgagatgttgacagtggtattggtcgggtctcgaagattcttattcctgcgctattcgtgatcatgggaattatcatcgtttatgccttaacactgcccggcagcgtggtggggatcaacgcccttatccatcctaactggaatggtctgttaaatgtaaatatctggcttgcggccttcgcgcagattatattttccctgagtatgggccaggctatcgcaattacttacgccagctatttgccgaaaaactctaaactgatcgacaacgtactgattgtggtgttcgcgaacagcgcgtttgaagtctgcaccgccttcggggtgttttccatcttgggctacatgtctttcataaacggcacgcccatcactgacttaattacggagggcacgggtctggtatttattgtgtttcctatgattttcaatattatggggtcagttggccgtattctggctccaatgttatttctggccatactgtttgcgggtattacttccgccctgggctatttcgaaccaatgttgagttcaacgtccgcgaaactcggatggtcccgcaaaaaagcggctagcgtactgtccatcatcggttgtgcattttcggttcttctaacaaccggcattagtagctacgtcgttggtattattgattcatttgtcaacgagtttggcatcctgctgctgatcggcgtgcagtgcataatcttcgcgtgggtctatggcgttgaacattttttgccgctgctgaatgaatatagctcgtttaccgtgggtaaaaaatggatttttgtaattaaatacctgctcccatttgttctgatcattatgtgggttgtgggtattgtgcaactgtttaccaccgcagatgtctttgagatagcaattgacttgatcatcatcgcgtcagttttggtatctgctgtgttcctgacgaaactcaaaccgagcggggaataa

SEQ ID NO: 72935 - DNA, 222 bp, synthetic construct
  source 1..222: mol_type = other DNA
atggtccgcaacaaacgtttgaacgccgtgattagttttatactgccggggctgggccagattctgaatggtgatgaaaaacggggcatcaagttcctgatcggaatggttgttcttcacatcgtgatttattatgcgttaaataacgtagtgggtagcatgatttccacgctctaccatgcgtattcggcttacgacgcatacaaaacctgcgagatgtaa

SEQ ID NO: 72936 - DNA, 732 bp, synthetic construct
  source 1..732: mol_type = other DNA
atgcaaaacacgagtaagtatttcaatttaagcgatatgatggtggagtatttcaacttcgaaaataaagaacgcgacattccgtattacaaccataacccgcggctcaccaagcatgcttggattgtgttactgtcctctgtcctgatcagcttcatattctacgccctgtttgaagatgtctctgagttttttgcgagttttatcttctgcgcgattttactcgtgcctttaatgtactattccgactgggatttctcgctaatctttcaccgcccgaccaaaagtgaaattaaacttgccctgattctatttattggttacctgatttatgcaatcatcctggggggtgttatagaagcgctgttaagcattactaccaccaccagcgaactgacggttaatgcagaaagcttgatttcgctggtcttttcaatgatggctgaagagctgattaaattcatcccatttgtatttatcatgcgtctggtttataaatccaccagcaatcgtaaactctcaattatcacatccacgtttatcgttctgatctttttcggcctgctccactatgacttcgaaacgtcaattatttctgtgctgttgcttcagggcctgggctcgttgtttgagctttatggttacatcaaaactaaaaacctgtttgtaccctacctgagtcatcttctgacagatgccgtgatttttatattgatcctgttcggattgtaa

SEQ ID NO: 72937 - DNA, 435 bp, synthetic construct
  source 1..435: mol_type = other DNA
ctgaacaaaaagattataggcgtcctcctggtgcttatcgcggcggtggcgtttggctccgttgtttatgctgctgagacggtgaccattggcggatttgattttaatgttccggacgggtttaccgaagataaaagtcatgaaatcgtgaacatggaaaaagagcagggtggaatcaaatacattaacaacgggaaattattcgaaaacgacaaaggggatgtggtaaatattttggttgccaagtatgatggccacaaagtcaccaataaaattgcaaagggcattgccgacgagccaaaaacaatcggcggtgtggatggttacatagtacataatggtacgttcactagctttgattatgcaaaagaaggtaaactggtcgtaattactaccaacaatgaagacgccattgaaggcttcatcatcgagtaa

SEQ ID NO: 72938 - DNA, 627 bp, synthetic construct
  source 1..627: mol_type = other DNA
ttgaacaagaaaatcattattgccgcgattattgttgtgatcatcgcggtggtggccgggttcatgcttacctccagcaatagccaggacaacagcaaaataaccattatgggtaacggtagcattcatgaaaacggcactattggaattaaactgaccaacggtgaaaacacagccctcaaaaataaaacggtccacgtttgcgtgaaagactcagaaggcaaaatcgtcgtggataaaacggcgaagacctatgttaatggcgtggtgggagtccgcctgaccaatgtgagtgctggcgaatacgatgttaatgtaacctttgagggtgatgaaaactacacttccagttcggtatctcaaaaattaaagatcatcgcaggcgaaagtgatgacgatccgacatatccggtcgacgaggatacggtaaccactacggcggatgcatcatcgacgcagtcatcgcagtcctcctctcaaagccagtcttacacaccatctcgtagcaatgattatggcggtagtagcagctcggatgacgatgggggtctggatgctgactatgacgaaaacggcaatgaaatgctgcctaccgttgatgaggaggggaacgaagtttcaaattaa

SEQ ID NO: 72939 - DNA, 477 bp, synthetic construct
  source 1..477: mol_type = other DNA
atgagcttcaataaaaaaaccatcataatctttctgattctgattagtgcgttcctgatcattggaagcgtgtgcgcggaaaatttgaaggattttaaagctacgaaaatgctgaaaaaactgaccaaacaaaaaaccttgacggtcaagatttacaactttaaaccgggtgtgttatgggcgcctaaggccatcaaattaaaaaacggcgacgccattgcaggctatgttgaatataaagggaacatgcagtttgaaaagggtacggggattacttcctggtacatcggctctggtcttgatggcgatatcgagccacaccataccaaactgattaaagcaaaattcttctttaaaaacaaaaaaggaaaagtaaaaacaaaaaccgtgaaaggcaatggtggtggccatatttcgacttcactcataaaggggtatgtcccgtacaaagctaaggttagttataagacatattaa

SEQ ID NO: 72940 - DNA, 558 bp, synthetic construct
  source 1..558: mol_type = other DNA
atgattattttgatcatcttcttttccattattgtgttactctattttggtgtgaaaatcagcctgatttatgataaaaccgacagtaaacttgaaggatgtctgcagatatccattctgcgtaagattaaaatctacactttaaacctgtcttcactgaacaaagataaaaagaatgatgagaacgaaaaaaagacgaacaacgacataaagcagcttttcaaactgctgaaaccatgctttgggccctttaaactatttttaaaaagctttatgaaatgcattaaagtccaaaatctggaaaatcatctcattttcggcatggacagctacacagatacggcgaaatatattggttacatttggagtttcatcataattatcaattcgtctcacaaaaatgccaagctgagcgcagaaccttcattcaatggcattgtttttgatgtgaatggcattaacgaacttgagatcaacatcctgaaactgatcccgccggttttgcgcttgatctcgaagaaagaagtacggaccctgatcaaagaggtcaaaaaataa

SEQ ID NO: 72941 - DNA, 675 bp, synthetic construct
  source 1..675: mol_type = other DNA
atgaattttttcagctgggggaaaataaatttcaaacggatgttccgttatgctgttggtctgtttgtcatgaacattggaattgctctgtcaatcaaatccaacctaggtagcacacctgtcgtggcagtgccctatgcgattagtttaatcacttcggtggatctcggttactgcaacatgatctttcaaggctttctggttctggtggagctgattcttcttggccgcgcctttaaaccgaagcatttccttcagtttttcgttggcgtcatattcggcatctttacgtcgctgtcaatgtttatattgagttttttgccgctggcgaacagcttaacctttcagattattttcctcatttccggcattgtgctcctggcctttggtctgttcttatacgttccgatgaatgcggttccagtgtccgttgatggtgtaacacaggcactggctattctgacgaaccaaagctttgcgaaaaccaaaatcatttttgacatctctatgatcagcatctcgttgatcgtactgttcaccttcaccggacacattaatgggagtgtgggcattgtaacgatcattgccgccgtctcaattggggcaactgtgaaactgatcaacattgtctatgcgaagatctctggcaatgaagcggatttaaagaaaatgtaa

SEQ ID NO: 72942 - DNA, 651 bp, synthetic construct
  source 1..651: mol_type = other DNA
atgtgggtcaaacgtatattgagctttgtaattggtctgctgatcatgtccttcggggttgcctttagcattgtgtcactgcttggcaccactcctatcagttctatttcgtattcgctggccctgattaccaacatcgatattggaattaccaccttcatattcaatgcagcgctgattgtcatgcagttactgatccttcgttcaaagttccataaaaaacgcctgctccaattgattaactgcgtgctgttcggctactttaccgatgtagcgctttattttgtggcctttattccatttgacagtagcctctggatgtctgtcttattcttgctcattagtatctttctgacggcatttggcatcttcatttacatgccggcgaacatcgctcccctgccgggtgaaggctgtgttgaggcaattgcgattgttacgggctggcgctttagcacgataaaaattggttttgacgcttccatggtggtgatgtccctaatcatgtgcggtttatggtatacggatatgtttggggcggtctacatcggaacaattatcagcgccatcatggtgggtttcactctgcggcagatcaataacatttatgcgcacattacaggcgctcagatcaatgttgtaaataaataa

SEQ ID NO: 72943 - DNA, 180 bp, synthetic construct
  source 1..180: mol_type = other DNA
atgtttgagaacaacgacaccacgattcaggtcgatttgcgcaaaaagaacagcttaaaagaagaaatcatgtataaaaatatcgatgtgcaatcgtgcatggtgatgctggtcgtgatagcggctctgcttctgtccgttattagtgttgtagcagcccagaatccgtacattatctaa

SEQ ID NO: 72944 - DNA, 321 bp, synthetic construct
  source 1..321: mol_type = other DNA
atgaaacgcacccgcatcgtaagtcgtaactttgaaatggtgctggggattataggcagcattattgggtcattcagcggttcgattctgctgtttctgggaaccttctataatgtcccgacaccatttctgggttttgtggcaatcatcgcgtcctttctaggcttagcgtccagcgtgtatgtcaaaaaggatacggagattgctggtgtaggcttcatcatcgccactatgtttgttattgtgggctctgaatacattaacatcataagtgcgattttcctccttgttgccggtgtttcggcattgttccggaaataa

SEQ ID NO: 72945 - DNA, 210 bp, synthetic construct
  source 1..210: mol_type = other DNA
atgaaaaaaatcttccagaatctgatccttcagccgcgctacgaaacgaagaccacgaacaccataaatattgcaaatattggcttggccgccagttttaaactgtttactgttacaagcttcccgctgaacttaaacccaattgatcataaggcgaaacaggctaaaatcaacaattatcaagtggcggacaataacatgtttgtctaa

SEQ ID NO: 72946 - DNA, 696 bp, synthetic construct
  source 1..696: mol_type = other DNA
atgtatggcataatgattaactggctctacgtcatccttctgtttatcctgggctttatcacctaccgtcgccagtccctggacttattcggttctgccgtaatgattataatgggtattgtgattatcttttcagctggaaccaactggcttttgctgattgtcctgttcctggtgctgtcgttaattgccacgaaattttcgaaaaagtataaactctccctcggtgaatttgagggacggcgcacctctaaaaatgtgatcagcaacggtgttgtagcgtgttttatggctgcgtttggcgggtattacagcccctttgtcggcggtttcattggcgcaatcgcaacagcaaccgccgatacgttggcgtcggagattggggtgttggaccctcacccgcgtctgataaccacccttcaaaaagtagatccggggacgaatggtgcggtttcagtgttgggcactgttagtggaatcgtcggtagcgctatcattggtattgcagcctatttcctgggcatcatgccgaatccattcctggccattctggttagtattatcagtggtacgattggctgctttggggatagcatcctgggcgcgctgttcgaaaacaacgggtggctgactaatgaacatgtgaatttactggcgacaatcttcggcgcgcttgttggcattttactaatttaa

SEQ ID NO: 72947 - DNA, 399 bp, synthetic construct
  source 1..399: mol_type = other DNA
atgcggatcacagatgaaaaactcttacgtatctccctgataactgcgctgattggtatcatcggattaattatattcacgccgtccattgaagtcaaaaaaatcgacattaaagatattacccgcagcatgattgatgagaaggtatctgttcgtggcatcattactgatattaaagaatcaagtagcaaaacaaactattttcttacgatcagtgatggggaatcgcgcattaccctgatcatcttcgagaaacaggtttcagagattacgtctcgtaacctggacattggcgattttaaaaataaaaaggtggaagtggtgggtaccatcaccgaatacaagagtgacctggaattgattctgtcgagcggcgacagcttgcgcatcattaattaa

SEQ ID NO: 72948 - DNA, 4473 bp, synthetic construct
  source 1..4473: mol_type = other DNA
ctgaaaaacagcaagggcaaagtcctgactgggaagaagattacagtcaactactctggtaaaacgtactcacgtacgaccgattccaaggggtgcgttagttggaacgtccaaaaaaaaccgggcacctattcggtgaaatttacgttcaaggcaaaaggctatcagacaagcagtaaaaccgcaaaagtaacggtcaaagccatgccgacatcacttacggtgaacaatcttgcgttcacctatggtgacggcaacaataagctgaaagcgacactcaaagataaaaagcgaaaggtcctggtcaataaaactgtcgtttttaattttaatggtaaaaactataaccagaaaaccaactcgaagggcgtggcaacgctaacaattggagcgggcccgaaaaaatacaccaccaccatctcatttacaaatgccaactacttgaaaagtaaaaagaccgtaactgtcaccgtcaattccattccgacgagcctgaccgtaaacgatctgacctgtaattacgatgacagcaacgcatacctgtatgcgactctgaaagatactaagaacaataaatttctgagtggccaaacaatcacctttaaaatcaatgataaaagcaaaaatgtagtgagtgacagcaatggaaaagcggggattaaaatcgaagaaaaatctggcacatataacgtggatgtgtcatttgcgaaaagcccatacgcgagcattagcaaaaagattaatctgaatgtgcaaggcgctctgacccctgaaatcaatatgcacaacggtttctacaacgtatcgaatttactggttgattttactggtgataatgctgagtacatcgtctactgtagttttgataacggtgcttcgtggtataaagataaccacagtctgtcttttaatcttaccacatgtaactggagcatcatctattactcgtcgtttcgcggcttcaacagcacaattaaccacgttaactatgtgctcgatggggatgttccactggtttgggcaagtcacgggtcaggcatttataacaccaacttccaggtgaatctgaccagcgtggatttatttgatgaaaaaccgatcatatattacaccctggacggtagtgaccccacggtgcagagcactatttactcagagcccattaatgttgtaaaaaacaccaacctgcgttttttcgcaatggacaccttcaaccatcggagtgagatcatcagcgtgtactatttcattggcaattgcatcgcgaatctaaacaacggcaaaacctataataccatccagaacgccatcaatgatgacaaaaccaaaaaaggcgacattatcgaggttaacaaagacatcataattgaaaatgttgtgatcaacaaaaacatctatttaatctctaacaatgtgatctggcagtctaacaataagtccccgatcatctacatgaaaaacgtaaacaatacctttattgaggggtttacctttaaatcagataatgggtcaggtattgaactcaacaatgtgtccaattgtgttattcagaacaacaatttctataataaatatggattcagtattcataatgaaaataaagacaatgacaatctcaacaatatttgcattcagggaaataacttctacgataactactataattatattaacttcgaagtcctggaaaattcaaaaattattaataacaactttgaatctaataaaaacgtgtcggcgataaccattttaaactcaaaatccaacatccttataaacaaccagtttacgaatttaaactacggaatcctcattaataagtcctatgatgacgtgttctttggcaacaacttctcgataaataacattgggctttacctaaactgtgttgatagcaaagtaattagtaacacttttattaacaaccactatggtatttactctattaatgcttcgaacctgcgcattaacttcaatcgtatcgtcgataactctaaattcggtgtgtactgtaaaaagggtatcgtcgacgccaacaacaattggtggggtaaaaattacatcactaacaatgccctcaacagcggagatatcaataataacgagaacattggcatcaactgctcggcgtacttagtcttgaatgtgtatgaaacgaattataaaattgataacggaattgtttacaacgtttcttatgtggcgaaccttagaagcaacaattatggggaaatctttaatcaatatttcattccgaattgcaaaattgtttataatatgtattgcgagtacctgtatgacaatggtgtggtgtacaggggtgttaaccgcatcattgacctgatgctgtcggaaggtagctctattaaagaatatcgcttaggctttctgaacaacctaacggtgaccttggatcatcagaatatctcattcttccgtgaaagctcctttaatgcctacgcaaccattgacatcgtgagctctgctatctttaatggttccaatcttgatattagcgttcgggtgccattggttgataatgtagattggtttagtattgtctgccgctatgtggggaactttaaaagtgagctgttattaatttataacggagaagtgcgcaacacgatagttatcgaaagttccttttataacgaagccaagaacgtgttcagcaataacttttggaacgctctggatacataccactcttgtttctcaggttatcgcaataagcaaatatgcgcgtacgcgtacctgtatttaaacgaccctagcctgaacacgattgagctgctggataataaactcagcaaaagcaacatccaatttaagttacaagacgtctataatctgctcgcgaataacaacattactcttaatgatatcctgctgaatctgatcaagaatagttatagcctctcggatttagagatgtcatttattgattatgcaaatggcaacctgttcgatacaatgagtgtgtcactgaaatatcctggcaacgaccgtctgttttttgcgtttgaagacacgatcaacaaaacgtttgtgtggcgaggggattcttcagtgagcttgtataacatccattatgtaaatggcggatactttgatttgacggccccgttccctattggcgacaatggggatctgatctatgacaacggcaatatttactccattaactataactgtatttacacgtttctgtcgtcagactacgattgtctgaaaacctacaccttcgccaatagcaaaattaataacaatgcgctcaattattggctgaatcagaagaaccgtacggatgttaatggggaactgtactataatatcggttatatgaaagcagcgtatggttcgttccttgaaggtttactagtaatctattgcaatgatgtggtggcggacgtgagtgccgacaagttcaacgtatcctggactcgtgtaaacccgatggttatgagcgtttgcgatagcttggaaggttattatctgactggcgaatctgattttaactttggtcgtgaagtagttggcgacgtaaacaacatcaaatccttcaattttgcttgctccgcctcattctcgatcattgagaagtatgttatcgatgccctgttcccgaacgaaggcaataaatcttccgcgatgttctcgttgattgatagtctgttcaataatggcacgctggagtttattgtggagggcaattataccttgattcgtagcctcaatgttagtaacgttgtgttcgtgtacgatgaaacgactggcattttacgtgattgcattaacggatgctatggcgcctattgttacgccagccagcagacggagtgggggcataactttggtgaaaactccttgaagttagaagatctgattgtcggtatcataaacggcatcgacacctcgttggacaatatgaataatgattggctggggtttgcaggctgtttggcaattactattggcaccggcttgtttctggtctctaacccggtcggatggtcgattgcgattggcgcagggttgctgattggttccggcatgctggccacctattacgcggatgatctgaataaaggttggaattataaccgcggtgcccacttcatatttgatgttggtacgtccatgatccccgcaggtgctccatcatctctgataaaatggaatgttggctccctgggtaaaattgtccttagtgacggtcatcttgtccgccatgtgactaaaaactccattaataaaggctttgacaagtacctgatgaatcttgctaaatcgcatggcggaacgatcgattacggttctcataaaattatccgctatggcacgatagaaagcataagcaacaccatgtatggtaccacaaaaaaagatttcatatactattccattcagtattacatcaacaaatacattatcggcgacattgtaattaataaaatctttagccggtaa

SEQ ID NO: 72949 - DNA, 324 bp, synthetic construct
  source 1..324: mol_type = other DNA
atgtcgtttgataccaaacggaaaaaacttatacgccacacgatcttaatcaatattatcgtcttcttaatcatgttgtttctgagcatatttctgaacaatgaagtgtatctccagtcctgtccgttcattctgctgatgattgggggttacatctctcgtgaatacactgagctgtatttcaagtataaacataagtatagctacttccaagttttttttaaagtatgtctttttagtgttattgtgagtattatttgctgcgaagtgatcctgcgcctatatttcggctcaagcatttttttgtttattctgaacaaataa

SEQ ID NO: 72950 - DNA, 333 bp, synthetic construct
  source 1..333: mol_type = other DNA
atgagctttaacgaagaacgcggctgcctgatgaaaattaccatttgcatctacttgctgcttctggttatttttacaagcttatccatattattcagcaataagatttttctggagctgctgccgatcattattctggtcataagtattgaacatgtgcgtgattacgcctgcatctacgaaaaatattttaaacagaactattcgttgttcaaactatatcttaacgtgtctacgattccaactattctgtttgcaatctgttgtgaggcgttactgcgggtatatttcaattcaagtatcatcctcaaatatctcaagatcctgacctaa

SEQ ID NO: 72951 - DNA, 963 bp, synthetic construct
  source 1..963: mol_type = other DNA
atgttttactccagtattattatcgcctttattattgtttttatcatcacggccgtcagcaccgcgattctggatatcatttttcgcttcttcggaaaacgcggctatctgggtaacctgtatccgaacgtacgtgggggtatcccgcgtgcgataggcatcattccgttcattgttttgtccttttatatgattcccgtttgcaacagtatgattctgattatcggtgtttttgccctgattgacgatattctggggcggaagaaatgtgtcccattaggcattgaatgggggcagctgagccgtggcattggcatcgttttggtgatgattaccggtatccttgaggggtattggatttctgccattttcattgcgttaatggtccagccgcttaatatctccgacatgcaaccgggcagtgcatgtattgtgaccatgataatgtctgttatcacgatgatcttcatgctcatcgcaggttcgccgatggtcaatgagctgcctgcggtgtacacgccgctactgatatttgtggtctgcgcagcgtactcgcctctggatttttcaggcaaaataatgttgggtgaagtgggaaaccatacattcggtgtagcacttggtttagctttttatctagtgggaggcctgtggagcgttatcttgctcggcttcatcactgtggctctgattgcgtttgtgcgtcggaacaatctgcgcgtatttttccgtcagaacctccgcatcctgaatccaacctttggggactacttcatggatgtactgactggtggcggtctgggcgacctgtttcgcaaactgattcttaaggataaacgatttgatatcaagaatccgttactgatctcattaggtttcagacgcctgttgttcaatccttatgcgagccacgccaaagaatacgctccaaaaaaaattcccaaactcggcaaaggagtgtaa

SEQ ID NO: 72952 - DNA, 909 bp, synthetic construct
  source 1..909: mol_type = other DNA
atgaaagtaatctgttcaagtgaagagtccctataccgtcccgaggcggtgcgctggcgccagcgtatggaaatgatggagccgcttggggatagtgttgtcttgctgccgtgcagcatgaaaaagccttattctaattcgaagagccaccaaaaattccgaaagatcgcacgttcatatcaggaactgattgtgacatcgccgtttggcatttgcccgcgcgaactggagaacaccttcccgattcagtcttatgatgtaagtacaactggttcctggagccaggacgagattgaagaaaccggcaaattaatcgcgaaatactgtgaagggaaaaatatcgtcgcgaacctttcgggtggttatttggaaagctgcgaaagttacgtcgacgatttcattaatgtttgcaaagatggacgcccgacttcccctgattcactttacaacttaagaatggaactcaaaaaacatcagaaaataaaccgcaaggagaaaacgctgcatgagctccggtccattgccaagtttcaattcggtgaaaatggcgataaatttatccccgataacgtaaaaaccaaaggtatgtatcataaacggatactgagcgatggcaaacaattagccctgctcaacaaggatcatggcctgtatcgtctgaatttgtctggtggggaaattctgaaagaactgaacacgcacattgtggaaattgactttgacctgacgacgaacaccgtttttgccccaggcatcattaaagcagacccgaaaatcgtgccaaatgacgaggtgatcgtggttaaagatgatgctgttgtgggtgtcggcaaggctatcatgaccggacatgaaatggaagaatgtcgtaatggcattagcgttaaactgaaacaccgcgtgaaataa

SEQ ID NO: 72953 - DNA, 1887 bp, synthetic construct
  source 1..1887: mol_type = other DNA
atgaatgtcgatagctttggcaaataccggaatttcctgttgccactgatggatagtatcagcgtcattttaggctattacttgatctcggttctgattacggactcttttcttatggacccgatcagcgcaatcacccgcaacgagattctcatcagtattatactcgccatcatcattctgcagacgatttttcgcctcaccaaacgctattccaatattatccgttacgaaaacaaccaggactatattatgtacattcttctttccataatctcgctgcttattgtctctctgattgaagatatcattggtatgaagaatccgtcaatcaaattcaatctgacgaccggtatcctcattgggacgctaaccgtcgtttaccgtctggtaatccgctatgcgttactgagcgatattgcaaataaaggcattaactacacaccggaaaatcaggaaaaagtactgatcatcggtggagggtattcggcgaataacatcatcaaaaccttgcaaacctcactgaaaggcaagtacaacattattggtattgttgatgacaacaaaaaacgtattggctattccgtagcgggggtaaaaattatcggtaacaggaaagatatcctgaagatatgtgaaaacgaagagattgatacgatctttttcaccattgtgaacattgacaacaaaaataagaaggaaatcttagaaatttgtaataaaacctcagcgaatgtcaaagtgttgccggacctgcgagagatcatctcttcggaaaatttatacggtagcctgcgggatattgaaatcgaagatttgcttggccgtgagccggtggagcttgacaataacaacattaagagtctaattaataataaagttgtgctggtcaccggtggcgggggctctattggtgaggaactgtgccgacagataatgattcaccatcctaagcagttactgatgctggacatctatgaaaatagcctgtacaatattgagctggaactgaaagataactatccgaacgatgatatcaaggcgattattgcaaacattcgcgataaagaacgcatgttcgaaatatttgaagaatattccccggaaattgtgttccatgccgcggcacacaaacacgtgcccctcatggagaacaacccaactgaagccatcaaaaataacgtgtttggcacgtataacctcgttaatgcctgtgacaagtataacaccaaacgttttattctgattagcacagacaaagcagttaacccgaccaatataatgggtgctaccaaacgtctgtgcgaaatgatcatacaagccaaagataaagaaagcgaaacggaatttgtggcggtgcgttttgggaacgttctgggcagtaacggatcggtggtacctctgtttaaaaaacagattgcgaacggcggtccagtgactgtcactcataaggacattaccagatttttcatgaccatccctgaggccgtcgctctggtgttgcagtcaatcacgtatgccaaaggcggagagatctttgtattaaatatgggtgaacccgttaaaatttatgatctggctaaaagtttgatcgaactatccggcttaactctgggcaaagatatcgacatcacctttacgggtttgcgcccgggcgaaaaattatatgaggaaattctgatggatgaggagaatcttgaaggaacagggcatgagaaaatcttcattacagaaccgatgaatttcacaatgcgtgatgtggaggaaaagctggatgctttccgcgaaatcataaacaaagaaattactgataaacaaattattaaagagacgatgaaaaaatgcgttcccacttacaaggaaccaaaagaagtgaacggagagtaa

SEQ ID NO: 72954 - DNA, 570 bp, synthetic construct
  source 1..570: mol_type = other DNA
atggcacggaaatttattacctatttcgacaaagagggtaacgattataccgatgagctcataatggctattaaggacaaattagatatcacggatattaaacgagtgatcattgcgtcggccagcggtgaaagcgcactgaaactatacgaagctattggtgacgaggtcgaaatcattaatgtgacgcaccatgttggctttagtggttcgaacgaatcagatatctccaaaggcatgattaaaaaacttgaaaaggtgggtatcaagacttattttggcagtcacgccttcagcggcgcggcacgcggagtcaccaataaattcggagggtactctccactggatattgtagccaacacctttcgtatgttttcccatgggattaaagtgggcgttgaaatctctatcatggcgacagacgcgggcctgatcccggctggcgaagaaataattgcggtgggtgggcgcggccatggtgtcgatagcgcggtaattctgactcctgttaattcaaaagatttgttcgatctgaagatccacgagattatcgccatgccgcgtgactaa

SEQ ID NO: 72955 - DNA, 180 bp, synthetic construct
  source 1..180: mol_type = other DNA
atgaacgttcaggaaaattttaacaagttcatcaaagacagtaaacgcgtcctgaaggtagcgaaaaaaccggatggtgcagaatatcgtgagttggctaaaatttccgtgttaggagtggccgtcattggggttgtgggttttgttattgtgctgcttggcagcctcatcggcctgtaa

SEQ ID NO: 72956 - DNA, 3057 bp, synthetic construct
  source 1..3057: mol_type = other DNA
atgaaactcaaaaataagattctggtgctgctactgttcttagtgctgatttgctgtctgggggcagtcagcgccgcggaggacattaacgaaaccataacggcggactcttccatcgatgacgtgaatactgtttctgtcgaagacgccgtggatgagactgtatcggacgattccgatagcgataagggcatcgtggaaaatcaagatgtcgagaaaaccaccatgctgaccgatcgaggagtcaatgttaacgccgcaacctggagtaaactgtcacagtatgccggcgtgattggcactgattatattatcaccttaacgggggatagctacgcgacggatagccagatcaagttcaataacggcgctacaattattggttctccaaataattacataactacgggctcgtacactaaaacgccttttcttaataccaactctgcgctcaccatcacgttcataaacgtcacgtttaagaatatgaacgtggattatctgttaagcctggcaggaacaaacgttctggaaaactgtaacttctataatattacggcgggcacgggtcataatgccgtcatctacaacaccgatggaacaatgaacttgaccaactgcaacgtgattaattcctcggcaggttatggtgtcgtaagtaattataaatctggaacgtatacaggggttgtgatgaatgtaaatcactgtacctttatcaataactctgcgagcgtagaaccgggtgctattaataattgcggtatcctgaacgtggataactcagaatttattaataatactgctacctggtgggcaggcgccattcacacgcattacaatgcacagactatcataaataacagtcttttcgaaggtaacgtcgccggctggaatggcggcgccctgtatacctactcaacactgaaggtatacaattccattttcaaacgcaataaatgccacacaaacatcggcggcggcgctatcggtgcgtcacgctggtggagcggaaactatgatattaccatcgtgaactgtacgtttgaagagaacgaaaactgcaacacgaatggcaatggcggtgccatcacagcgttgaatagtggggcactgaacgtgcatgactcaaccttcatcgccaatgttgcaaaaaatggtcaagcaatatctgcgttctctcaagcctttgaaaacattacggcagggattccgaacctgaaagtatacaataacacgttctacaaccacacgctgaccacctccgacacagtggagatcagtggcaattacacctttgaaaacaatacctttattaattgctatcagaccaatctggggacgaataacgtctttattaacccggtcacccttaataacaacaatttgattcttaaatcaaataaagagcatttgctgatgagcaacctgtcggaaaatatcctcaaaaacgctccgaatgtaatctatgtagatagtaattctgacaaggactgtgatgaagaccccaatattgacggtcacaactgggaaacggcttatggcggaattttcgcgctgtcaagcgcaatcttcaacatatgcgatgggggcaaaatttatctggcagatggcgaatatagctatcgcacaaacggcgcgatcactcatcctaaaaatttgacgatcattggccaaggcgcaaataccattgttgaccttatctcatgcggagaagaaactacgtatacctgcatttttattaacttaaccgtgtcgggtaaggattacggtcgtaacaccaattttatcaattgtacctttattaagccaatttcaatctcggcggatattaatttgaatagcgttttaaaagaacatgcggtggaaaacggctatgccaatacctacctgatcaactttgacaactgtgtgtttaaagatgtggtggacgatcgtatcatcacgctgtttgaatacggtgcgttgaacttcaccgattgcgtttttgagaatattactgcggattcaattgtttatcgcaacagcactggctattttgaggacgacagcatttcctttcggaattgtactttcagtaattgcaagtttaacggtgtcgttgattcgaagactaacttcgatgatgccatcgtgattgaggattgtacctatgacggtgatgttgcgctggggactacggaggtcgatggtcatttttatgtaaacgcgacgaaacttaaggtggtggcggttgccacgaacatgagtatttcttcgtcgcagcgtggggtggtagtgattacccttcgtgatgcggaaggtaacgctgttagtggggttaacgttagctacacggtgaacggtgtgaacatgagcggcgtgagcgatgccaacggcaccatcactatttcggacctcaccgacgaagttaccgtgagtgcaaacttcactggtagtgagtcctatctggcttccaacaacaccgctagctttaacttcaccattccgaaagtttccacgaaactctatgtttcgagtgtgaccacattttataatgcaggcaagtatttgactgctaccctgaaagattccaatggtgaagttttagcgaaccagaaagtgaccattaaaatcaacggtaaaacatataataaaataaccaacgcgaaaggtcaggctacgctgaaaatcagcactctgttaccgaaaaaatatacggcgacggtaaattatgccggggacgatacacatattaaatcttccgcgaatgcgaaagtcattgttaaaaaagcaactctgaaactcacagcgaaagccaaaaccttcaaaaaatcactcaaaaccaaaaaatacacaatcaccctaaaaaacaacgtaggtaaggtcatgaaaaagaccaaagtcacattaaaaatcaagggaaaaacatacaaagcctacaccaacagcaaaggaatcgccacatttaaaattaccaagctaacgaaaaaaggcaaatacaatgcttacattaagtttgccgggagcaaatactacaacagcctgaacaagaaagtcaaaataaccctgaaataa

SEQ ID NO: 72957 - DNA, 1110 bp, synthetic construct
  source 1..1110: mol_type = other DNA
atgagctttttaaagttcattctgaaaaatccctttcgccggaagaacagtgcaattctggcgatcgttggtatcgcaatcggtattgtcgttatcgttagcctcggtggcattaccgacggtttaattaacacatttgaggatacgattcatgcaggtggcgctgacttcagcatttcaggaaaagaaacgggcaattcggcctatggaacgaataccattgattctagttggacagaaaaaatcgccaaggtaccgggcgttgacgaggcgtacccaatctacgttgtgctaacttcggtgggcgatgattatatgaataccctgatcggcattgatccggaaggcagtgaacttgcggacatctccatgaaagaaggccgtatctttgaagacaatacttctgaggtgattctgggtgaaatctatgccgaagataacaactattctgttggagacagtatcatcattaatggcgaggactttaaagttagcggtatttatgaaacgggtgatcaaaacatggctggaggggtgttcaccagcatctctaaaattggcgagctgatggatgataaagacagcatctccaacatttacgtgaaagtaaataagggggaagatgctcaggcagtggcggatcgcattgatacgaaatacggggataacatcaccaccgtcacctccgtgatggaaatgactcaaatggctgatatgttgaatatgctccaggcctccacgtgggcgatttcactgctggcgatcgtcgtgggtggcctgggcattatcaacacaatgctgatgtcggtatttgagcgtactcgtgagattggcgtgctgaaagcggttggttggtcgaacaaaaagattcttaccatgattgtcggtgaatcactggtaattacaatagtctcagcaattatcgggagcttaattggctttttagcgtgcacgctgctcggtccgcagatgggaataaacccattgttcaccccgaaaattttcatacaggcgtttagcatagcaattatcgtgggggtagtgggcgggctgtatcctgccatcaaagccgtcaaacttccgcctaccgaagccttgcgctacgaataa

SEQ ID NO: 72958 - DNA, 699 bp, synthetic construct
  source 1..699: mol_type = other DNA
atgaatgctgtggaaataaaagagctgtacaaaagctatgagggcggaaaaatcaaggcactgaacgggatcaacctcacaattaaacagggcgaatttgtatctatcatcggtccgagcggctcgggcaaaagcaccttgctcaacatgctgggcgctttagacattcctgattcaggcactatcaacgtcaacgggcatgacctgaaaacctcgaaaaagttaaacgagttccgctcaaaaaaaatcggtttcatttttcagctacataatctgattccgaatatttccgtggttgaaaatgttgaaattccgatgtatacgcaaaaactgtctagcaaagagatgcgttttcgcgcactgaagctcttggatgatgtcggtcttagtgaaaaaagcaagatcctgccaaataagttgtccggcggtgaacgtcagcgggtggcgattgcgcgtgccctggccaacaacccctccatcattttagccgatgaaccgacgggatcacttgattcgaagaccagtagtaaaattcttaaacaactgattgacctgcacgaagacaaaaatgtgactctgatcattgtaacccacgatatggatgtcgcgaaactggcggatcgcgttattgaagttttagacggggaaatcatctctgcaggtgatgacagcctgataaatagtaaaattgatgtgtaa

SEQ ID NO: 72959 - DNA, 570 bp, synthetic construct
  source 1..570: mol_type = other DNA
atgcttcagagtctgcgcccgctgttgacccgcatcttgaacccaatcgctaagcgactgaacattaatccgaatattgtgactatcattagcccttttgtggctctactggcggcgtatggttttgccaataaactgctgattctgggcaccatcgccattctgctttcgggtttcttggatgttgtcgacggtgctgtcgcccggtatcatgaaaaatctagcaaattcggtgcgtttctggattcaacgatggatcgttttgcagatgcgatcatctacatcggaataatatttggcggttactgcgattggctcgtgggcatcctggcgatccactcggccatctgtgtgagctatgtacgcgcaagagccgaaagtcaggaggtcgattgcaacattggcatcgcagaacgtgcggtgcgtatgattattctgatgattggggcaataattgggtatttcgcgggcgacatttactttacgtatattatttatattttagtaatcttatcctacttcacagttggacaacgcattctccatgtttggcgtcagttaaacgactaa

SEQ ID NO: 72960 - DNA, 1779 bp, synthetic construct
  source 1..1779: mol_type = other DNA
atgactcgtatttccatcttagacaaagatcgctgtcagcctaaaaaatgtgattatctgtgcattaattattgcccgggtgtgcgtatggatgaagacaccataatcattgatgaagatacgaaaaaaccgttgatctctgaagaattatgtgaaggatgcggtatttgtacaaaccgctgcccttttgatgcgattaccattatcaacttacccgaagcggtcggcgagcccattcacagatttggtcagaatcagttcgaattgtttggacttccaacgctggaggaaggcaccgtcttaggtctgctcggccagaacggtatcggtaaatccaccatcatgaatatcctgtctgggaacctgattccaaatttcggagactttgagaacaagccggagaactgggatgaagtgatcgaattttacaagggctcatctctgcagaaatatttccgcgacctgtccgagggcaatattaaaaccatcctaaagccccaaatggttgatcagctcccgaaagtggtcaaaggtaaagtgaaagatctgctcacaaacgttaacgaaagggataaactggattatgtgacccaggaactgcagcttgaaaatgtactggaacgtaaaatggaaaacttgagtggtggggaacttcaacgtgtggccatcgccgctacggttctgcgggaaggggatttctattatttcgatgagcctacctcatggctggatgtaagccaacgtttgaatgccgtgaaagtaattcgttcactggcggatgaaggcaaaagtgtcctggtgattgaacacgacctcgcgacgctggatgccctgtcggataacataaatatcctctatggtcagcctggaggctatggcgttgtaagcggccgcaaaggtgttcgtttgggcattaacgcatatattaacggctttttgaatgaagaaaatgtgcgcattcgtaagaacccgattgagtttaccatacggccgccgactccagaagacgagggagatgtcctggcatcctactcggacctgaaaaaagagtatgacggcttccgattatcggcggatgcgggggaaatcttctacgacgagattataactgccttcggtagcaacggtatcgggaagaccacttttgcgaaaatgctggcgggcgtggaagagccaaccaatggggaaattgatgaagaagttaccattgcatacaaaccgcaatacattgtgtctaactttgagggcacggtgagcgacttcctatacatgaatgctccgtcgtttggtagtaagatcttcgatagcgaaattatgaaaccgctgactctggatgagatgctggacaagcctgtaaatggcctgagcggcggggaacttcagcgtttggctattgctgcaacgctctcgaaggatgcagaaatttatctgtttgacgagccaaccgcctttttagatgttgaacagcggttaatcgctgcgcgtgttatccgcaaaatggtggagagtcgcaatgccgcgagcctgatcgttgaccatgatatcgtctttattgactacatttcagatcgcgcaatggtattcaacggaacgccgggtttaaacggtcatgcatccaaaccgacggaccttcgcaatgccatgaacgaatttctgggcaatctgaatatcacatttagacgcgataaagaaacaaaacgcccgcgagtcaacaagcttgacagttataaagaccgtgaacaaaaagagaaaggcgaatattactacttgagcgattaa

SEQ ID NO: 72961 - DNA, 663 bp, synthetic construct
  source 1..663: mol_type = other DNA
atgagcatcaaacaggttgttaaaattgggggaagtttgtttccagactacgccatagatctggctcggcatctcaaaaatactgattctctcatcattctagggggtggcgaatttgcgaacctgattcgtaaatatgactcagaaattaattttagccaaaaaacgagtcactggacagcgattgactgcatggatatcattgctaaactggtcaatgacaaagtggagtcaaccaaactggcctattccattgatgaagttcaaaagatttcggacgagggcttcaccccgatctttgtagtgagcggtttcttacgctgtgaagatccctttgaatgctcgtggaacgtcacgtctgattccattgcagcgtatattagccaccttctgaatgcaaaccttttaatcgtcaccaacgtaaatggtatctatacccatgaaccgaaagagtccggtagcacgttcataagtaaaattgatgccaaaactctgctgaactttcaggagagctcaattgatgtgatgttgccgtcgctgttgctgaagttcggcacagattgttatgttgtgaacggcaagtaccctgaacgcgtgttatctctgatcgatgacaatatcaatgattacaacttcgattacacccagatcatcggcgactaa

SEQ ID NO: 72962 - DNA, 270 bp, synthetic construct
  source 1..270: mol_type = other DNA
atgggtgaggtgctgacgaccatgaaaatcatgccggatagtcccgacattgacctggatgccattaaatcaactatcgaaaactcgatgccagaaagcgctaagcttcatgatatggcagaagaacctatcgccttcggcttggtggcgattatactgcagtttatcaccgacgatggtgaagggggatctgagccggttgaggatatggttcaaagcattgaaggcgtcgcgtccattgaaattacaggtgtaggccgcttaatgtaa

SEQ ID NO: 72963 - DNA, 729 bp, synthetic construct
  source 1..729: mol_type = other DNA
atgggtaacattatggaccgcaccaaaaagattatcattgcgcttataattattgtcttgattatcctggtaggcattatcgctagtgtctggttcattggccatgatgttgatttagatgagggtagcaaaaccattctggtatgtgcgattgatgaaagcgaggatcgtcccggtatgggggcgtgcgatatggcctttctagttcatttggaaaacggagcgatcaaaaattacacgccggtttatccgggcggtatgacacacccaacggctcaggagccggctgaagcgcaaagtcagggcgccggctcagacttactgcttcacgacgcattctgggatgtggataatagcaaaggaatgaacctcgccaaagagatcgtggaatatcgtaccggtagctccgttgactcggtggtagcgattaatactaaagccctggacgcgattctgtctgccgccgcgcctctggaagtcaacggcaagatcatcaatggcagtggaattgatttcatccgcgaagatggctccaatggtgtgtcccggggtgacgcagtcatggaaatcgtgaaagctactgcaaacagcgccaaagatccggtgaaaaaatcggcaatgataaatgcggcagtggatcagtactcgaaaggcaacatcattatggatcagcaagggtcttttgttgacctgctggcatcaaaggggatcgaaaccttttttaactaa

SEQ ID NO: 72964 - DNA, 915 bp, synthetic construct
  source 1..915: mol_type = other DNA
gtgattaatattatcgaagagtttttcatcgcaatcggcggcatttcacttttcctcattgatttttttaagaattttagcctgaaagagattgaaattgaaaaaacgaaagacattaaccagaatatcgcgcagaagctgaatttacaaaaagatatcaaattgcaaaacaacgagaaagattcgattgataaaatccgacgtctgataatcccctatctgacaaataaaaaaataattggcctgctcggattgcttttcctactcatcaacctgtttatcagtttggagatctcgggcatttatattgtattggttctgatgacatacatctttgtattctattacccgcagatccagcagcaacgcaattactccgatatcaaccaggaactgccgtatgccctgcgtcatatcggtattgaactaaaatccggcaaaggactgcatgacaccctgcggaccattaaaaatgcagattatggctctatttcgcaggaatttaatcgcattctggaagaaattaaatttggtaagagcaccgaggagtcactgcttgaaatgtctaccagagtcaagagcgaaggtcttacgcgcgccatccaccagattatcagcaccttacgtgtggggggtaacttatccaacagtctggatatcatagcgaaagatataagctttgacatgcaaattaaacttaaagaatactctcagaaactgaactccttcatcctgatttacacgtttattgctattttgactccagtcattagtctgatcatgctgatggcgagttcgactgtgatgggtgacatcctgtcatcaagcttattatttatactctatggggtgttcttcccgagcattgtcgttttcatgggggtttttattaaaaagctggaacctaagatttaa

SEQ ID NO: 72965 - DNA, 1419 bp, synthetic construct
  source 1..1419: mol_type = other DNA
atgaacaacaatggtatcatcccgcaatatgacatcattaaacaggaatatacctctgaagagaaaatcctgcttggggaaatccgcgaaaaccttgttgatttggccatcagcacgggtgaaaattttcaggtcaatgaaacaaagttaattaacaacattaagaattttttgtttgagcgcctgaacgacaaccagcagaacaataatggcacaaatgaatacttagataacttgtctcggaagttgctccgtgatattgttggttatggcgaaattgatccgctgattcaggatgatgaactggaggaaattatgattatcggaatcaacaaaccagtatttgtttatcatcgcaaatacggaatgatgaaaaccaatatcacgttcaatgacgaacaggaattaattgacctgatcgatgcaatcgcacgtcaaattaaccgccgaattgatcaggaatcgccaattttagatggccgcctcattgacggtagccgtattaacgccacaattccgcctatcagcgcggacggcccatcgcttacaatcaggaaattcaagaaagatccgcttaccatcatcgatctgatcaaaagcaaaaccatatcggtggaacttgcagcgttcttttggctgtgctttgacggtctgggtattaaatccgctaatgccatcatctctggcgggaccagttccgggaagacaacgacgctcaatgcgctgtcagccttcatcaatccgaaagaacgtattatcactattgaagataccctggaactgcaaatcccgcatgagcacgtcatccggatggagacccgtccctccaacgttgagaacaaaggcgaactgacgatgaatgatctggtgaaaaactccctgcgtcagcgcccggatcgcattatcgtgggagaggtcagagctgaagaagcgataactctatttacggcgttaaatactgggcacagcggctttggcaccctgcactcaaacgatgcgcgggagaccattacccgcctgactaatgaacctatgtcggtacccaaaataatgattcaagccattgactttatcataatgcagaaccgaatttacaccagctctggtgtatcattccgtcgcatcagcgaagtggctgaggtcgtcggcattgaagaaggtgtggttcagctgaacaaaatattccaatggaatccggaaaccgatacgattgacaacgtgagtataagcagtaaaacgatcagtcagattgcaaacctaagtggcaaatcactgaatgagctgtatcatgaaattgagaaacgtgagctggtgttgaaacatatggtgaactacaatattcgttcggttgatgacgtaactgcgattattgagctctactataaaaaccctgaaaaggtgctgaataatattatttaa

SEQ ID NO: 72966 - DNA, 1254 bp, synthetic construct
  source 1..1254: mol_type = other DNA
atgatcgagatcgttattgcgtgcttcataggcatcctgattggtacgacgaccggccttatcccaggcatccacgtcaacacggcgggagcaatcctgtttgcgagctccggtttgttgctgacccagttcagtccggaatttctgtgcgtactgatggtttcgatgagtgtggcccatgcattaatcgagtttatcccgtccatgctcttgggggtcccgcaggaagggaccgccacctcaatcctgccgggacatcgtatggtgctcgaaggccgcagcaaagaagtcatccgaatagtggctgtgggcggtttcggggcgattattgttacaattctaatgctgccgattttttcgatcatattaccgatcctccacgatattttaaagccatacacctggattattcttcttgccgcgagcctgtatctgacataccggttgacggtgaactttcgcgattttctgtggtcactgctgctgtttatcttatcaggcattttgggttggaccctgtttcaaagccccataacttccggagtaacgcttatgtgcacattcagcggtcttttcgggattagtactattctgtttagtctgaatgactcgagcaccatgcctcatcagaatcctttttatgagctgaatattgattatgacaaactgaaaagcatttttaccggtggcattaccggcgccattttaggttttcttccagggttcggacctgcacaggggactgtaatagctcaagcggtaagtggtactaatgacaatcgtaacgatgataccgtgaatttcttgctggcaacatcgggcctgaacatttcagactgtctgttttctctcatcgccatctatattatcggcaatccgcgcagtggcattgctgtttacatgtcttatttgattagcgaaatgaacatcaaccatttaatcatcttcatttttgcatccttgctggccgtgtctgtgagcctgatcttggccctcaaattaggcgatagcttctctcgtctcatgggtattgtcaactataaaaaactgtccatatccgtcattctgcttcagattattatcctgtacatcttcattttctattataaatcgcccacgtgttacatgaccctggcgttaattacttcaacggctctgggcatgctgccgcactacattggtgttggcaagtctcatctgatgggtgttctaatcattccggcgattgtgatttatatgaaaatgtttatctaa

SEQ ID NO: 72967 - DNA, 498 bp, synthetic construct
  source 1..498: mol_type = other DNA
atgaataaaaaagaaattatcattattttgatcttcattggtttttgctttgtctttgccggcccggtatttgcaaaggaaaaggttaaggtcaatgttagcattgatgatcatccactgaataacaaagggttcattgtgatcaagctggtggattcccgcggtaaagacattgaaagtaacggaacaatccactataaaattacggatgagtttggtaattataaatgggcttataaatcatatgacggcgaaatccgtttaaaatacaccgcgggtatttacaaagtggatgtgaaattcgacggcgattttcattataattcggcgatcaaaaacaaatctgtaatcgttaaaactgagaaattcaacccgtatacctactacgacaatcacaattggggccttaaccaggaaatagatgattatatcgaatacaactactgggatgaagacatatatgacgatcccacgaactatgatggcgaggggccttaa

SEQ ID NO: 72968 - DNA, 2019 bp, synthetic construct
  source 1..2019: mol_type = other DNA
atgaaaaaattgattgtcggcctcgccggaaacccgaacgtgggcaaaaccaccgtatttaaccagctgaccggcatgcgtcagcacgtgggcaactggccgggtaaaaccgtcgaacgtgcagagggccatttcacccacggcaactatgagtatgatgttgtggacctgccgggcaattacgcactgagcgctcattcgatggaagaaattgtttcccgcgattttatcgtagatgatgattcggatgttattgttaatgtagttgacgcggcgaacctcgaacgtaatttgtatctgaccgtgcaaatgatggagctgggtgccaatttagtcctggcacttaacatgaatgacttcgccaagaaaaaagatcatattattgatatagacttaatgagtgaactcctggggttctctgtggtggaaattaatgccaagaacaaagacggttttgacgttctgctgagcgcggttgaaaaagcggctagcaaaccaaaaaacacaagcgcgaaattatcatatggggatgagttaaaagagcacctgggtgacctgcaagaactgattgagcgcgacaataagctgttggatgtgccatctatttggacggccatcaaactcttggaaaaggatagcattgtcattcagaaagtacaacagtcgtccatcagttctcagatcatggccgaaactgacaaggtggccggtcacctgcacactatttacaaagaaggtgcggaagaggttgtcgcgaatgctcgctatgcatttatcgatggtctgatggcggaggcggttaaacgaccggcggtggaaaaggaaactatcaccgataaaatcgataaaatcgttacaaaccggatcttggctccgtttatatttatcattcttatgtgggcaatgttccagctaacctttacagtgggagcgccgttccaggatatgatcgatcaggcctttggtatgctgagtgaatgggtggcgaccttcctgggggatggtctgttatcgtcatttgtctgtgacggcattataggtggggtgggtggggtcctgactttcttgccgatcatcatcctaatgttcctgtttctgagcatcctggaagattgtggttaccttgcacgcgccgcctttacgctggataaaatcatgcataagatagttggtctgcatggcaaggcgtttattcctatgatcttaggctttggctgcggggtgcctgctattatggcgacacgtacgatggaaaatgaaggggatcgtatgcttgctatgatgcttgtgccgtttatgagttgcactgcccggctgccgatttatgcgatttttgtggccgcattctttgcggacaatggcggtaacgtcctcctggcaatttatctgctcggcattgtggtagcgcttattgtggcagcaatcctgaaaagaaccatgtttaaaggactgtccacgccgtttgttatggagttgcccacgtacaaagttccatccctcaaaggggtcctgttgcatacatgggaaaaagtcaaaggattcctgcgcaaagcagggacgattatcctggcttgttccatcgtactgtggattttacaaaatatattcccttacggcggctcagaccctcagatgagtcttctgggtatgattggcacggcgattgcacccatatttgcgcccctaggctttggtacctggcaggcagctgtagccatcattgctggcttggcggccaaggaagtcgtggtggccaccttcggtactcttgcgggcatggaggaggacgatgaagaaggcattacgaacttaatccatgatacgttcacaccgctctctgcctttagcttcatggcatttaccttgctgtatacgccatgctttgcggctatcggcgcaattaaacaagaaaccaacagctacaaatgggccctgactatgtgcgctattaccttagtaaccgcgttcattgtttcattcctgatctataatattggtttactggccggattcggataa

SEQ ID NO: 72969 - DNA, 843 bp, synthetic construct
  source 1..843: mol_type = other DNA
atggagaaaattcatctggagacaaaaaatctgtcttttacgtaccctgacggaacgaaagcgttaaaaaacgtgaacattcagattaagaaaggcgagaagattgcgattatgggcccgaatggtgccggcaaatcaacacttttttcccactttaacggtctgacggaaccgaccagtgggcatgtggaaattgacggtgaaaagatcatctttaaccgtgaagagctccttaaggtccgtcagaaggtcggaatcgtatttcaagatccgaacgaccaactgttcgcgccgactgtcaaagaagatgttgcttttgggcctatgaatctgggcctggattatgatgaggtgaaaaaccgcatcgccgaatcgttgaaaatggttggcatgagtggtttcgaagacaagaccccgcatcatctaagcggaggccagcagaaacggatcgcgattgcgggcatagtggcaatgaaacccgagatcatgattttagatgaaccaaccgccggtctcgatccagaaggtgttgacaaagtattgaatatcttgaataacctgaataatgaaggcatgagcattgtgatcagctcgcacgacattgaaatggtaaatcatttcgcagataaaatattcattctgtacaacggtgaaatcatcgccaaaggcaataagcaccagatcttctccaacaaagaattactgaaaaaagctcacctcaaagcaccgaccaccacggagattctgtataaacttaaagaaaacgggctggatgtcaacactgagaaaataactgttgatgaaaccgtggaagaaatcctgaatattgaacgcattaaataa

SEQ ID NO: 72970 - DNA, 831 bp, synthetic construct
  source 1..831: mol_type = other DNA
atggtggacatcacgcagatcatgcgctttgatgaattgtcttcacaaaatagcccaatccataacctcgaagggcgtattaaactgatcaccactatttttattatccttgtgagtgtcattagcaaagaactgtttatcccgataatcctggaaataatcctgctgaacatcttaaagattgcagacctgtcctatattaattctgcaaaaagattactcatgttgcttccattcggcggcgctatcattgtattccagccgttcattcaaccgggcaatattatctggagttattcgtggttgcatattacggattttgggctgaactgggcgattttactgctggtgcgtatgattgtctgcctcactgctataatcatctactcatccacgacccccctacaagaaatggcgagcagctttcgaaaacttaagatgccgcgcgatttggccatgattctttcaatcatggtccgctttctgttcctgtttgttgatgagctggcggccatccgcaaaagtcagaaatctcggaacttcaacattcactcgaagaataccacctacaaatggcgcgttaaacaggttggctacacaattggtatgatgtttctgaaatcctatgaacagggtgagcgtgttcacaaaagcatggtaagccgtggattttccgatacatcggaaatgtttgacgagaagaaatcgcctgaaaaaagcgattatatcttcattatctcaattattattgtggtgattatactggagattatcatgttcaaatatagtggtcagttaggttacttcggccagaatctgtctattaactaa

SEQ ID NO: 72971 - DNA, 306 bp, synthetic construct
  source 1..306: mol_type = other DNA
atggataaaaaggatatgtccctgatcattgttgctgtggtaatatgcattgtgatcagttgtctgtcaccgtacattgcatctggcgatcccgacggtcttgaaaaatcggcagaggatgcgagtgtccctgaagactttcagattgaaccgattaacggtatcccggacgcgatcttcccagattatgcgtttgctagcgccccggataaccagggattacaaattgtcgccctgatcatcggggcgattttgaccctgggtgtgggctatggcgttgccacgattctcaaaagccgcaattaa

SEQ ID NO: 72972 - DNA, 639 bp, synthetic construct
  source 1..639: mol_type = other DNA
ttgcatattccggatggctttattccgatcgcacagtgtctggtgtactatgtcattctgatcgtggcgctctatttttctgtgaaatgggccaaatcgaacttagatgagaaacgcataccgcttctggccgttcttgcggcaggtatctttgccatcatgtccatgaacatgccaatcccttttggtacgtcaggtcacatggtggggggtgcgctggtggcaattgtattcctggcacctgaggcggctgttttagtcttcaccgtggttctgctgatccaagcactgatcttcggagacggcggcattacggctctgggagcgaatgtattgaacatggcgattgtgggcgggtttgtcggtctgtacacctttaaaacattaaatggaaagattggcaaatatccggccgcgggcattgctgcctggttagctaccgtactggcggccctagcgtgcgctattgaaatgggcattgccggtaccttcccagtcaacgttggtatcccgagcatggttctgtaccatttctttattgggatcatcgaagcgatactgactgtgattgttcttgtcgccttggataagtttcgtcccgacctcctcagctggaataaaactgaaggcagtgcataa

SEQ ID NO: 72973 - DNA, 1275 bp, synthetic construct
  source 1..1275: mol_type = other DNA
atgagcattatttattccaagatcacttcagtgattaacaagatcagtgatgagattcacagatcttttctgtttacgaccatcttttctattctgcgcttcattgaactccaatggatcaacagctatttcaaggaattgtatccgaatgaaaaatttctgaattttttaaataacagcatcttaaaaaaaaatctgtttaacccgttaatagtccttttgctcttctcgttctttctgattctgtcgatcaaatccccatctaaaagtctggtcattaccctgattgtcggcttcatcgcgttttttattggaagcaccatcctgccgaaatatttcttaaataataacatccgcattattgaatttaacaagaaggacatctacagcattggtttttgcctgatactggtgagtatcatcttctttggaatatgcattgcgtctgtgggcggcatccctcttctgaaaccaagcatccggtatttactaaaaccgatctttacaatgcctgtgttcctgattatcccggggacctgtctggtggccagcgcttacttaaaagatttccagatgaaaaatattacgcgttcgcaggcgcgtttccgtttcatatttttgcttgccatagatactgcgctgctgctgctcctgggttatcgtaccccactagtggcagcgtttctcatcatcattatcatcggtttttacggaaacatcatttcactttgggaagttatcatcagcggcctgattggtatcggtgctattataggcatcggttattttcgatcgcttagtgagatgacaattacgtcatccacgaatccgttttacactctgcaatcacgcgcggatttcacactgcatgttctcaacttgcttgatttcgtagggggcaatgcaggcctgacgcacgggcatttgttgaccagttccattccgggtagcgatctggggccccgcatgctcattggcaaaattattgcttggcgcaccgaagtgaccgtcacccccacactgattgggcagatggttgtagactttggtaaaatcggtgtagcagttgaaatgtgtattttaggcttcattttaggcattggttttaaaataatgcagaaaacgaaaaactatttttacattgccatttactcattgattctgacctattcgattctgggcatcgagactggcattttggacatccaggttctgttttacttcgcaacggccattttcatttatctgattaacatcaaaaaatcccagcaataa

SEQ ID NO: 72974 - DNA, 774 bp, synthetic construct
  source 1..774: mol_type = other DNA
atgaaaatcaaatttactttaattgattacctgattatcattctggtcgtatgcgccatttccttcgcatttatccacatcaccacagataattcatcggaagtgcaaaaaaccgtgtttgatgcctctaccatcaacaaaattccagatacttacttcaactattatcgcgacggctatattgtaggcacgacggtcgatggatttaacgctagtacgggggaaaaaatcaccctgaatggcactatcaaatggattggtaacaatggtggtacagacgttaagattctggtggagtccgacaacaccacctacctggttggtctatataaaagtattccggaagcggatatttatatcgataaaatttcactggaaacgaatggcagcacctaccctaacctggtcgaaattaaagccagtcccgaaaatatctcgaccatcaacgatctcaataaaaacttgtcaaacagcgattttgaaatttctactattatctctcttgattccttggacttggtgaagatccaggagatcgctaacaaaataaattcgcatgataaacgtatggcgattaaaaccccgagctccggactcgggaatagcctgatactggagaatgcgaataagcaaacactggacgacgcaaattcggttttaggcaatattaacggtctgaccgatgaacttacaattcggatatacaactgtagtgacagccagttagagcaggtgaagaacagctataacattacgaatatccgcacgttctaa

SEQ ID NO: 72975 - DNA, 900 bp, synthetic construct
  source 1..900: mol_type = other DNA
atgaactataaaaaacttgtactggtgggctgcattagtgcatttgttgcgatcctgacgtctgtgatgggtgttgcaggtaccattattggctccgtgatttcttctgtgctgtataatatgctgaccgaagtattggaaaatcctattgggaagaaaactttcagccccagcttcgaatgggaaattgcttatgtcttcccacttatcgtgatagcgatcattcagtttattctcatttcagcgttactgtcagaagttggcatcctaccgtacacttttgtcaacgtttatttaagcatccaggagattgccaataacaacttataccgcatcctgggcctggcgttgctggttatgagtgtttacccgtttgtactgaaacgtggcattgtgaagaaatcgaatggaacggttattgcatttgtcggtctgatcttcctcgcccgtgggtttgtggatttgggaaaccggatcacagagatctatcacgccgtgttcgtctattttgatctgccgatagctattatcgcttttgtcctgctggtctttgtgataattaacatcctcatttcagcgaaatcggtggaaaatgagtttaaagttattagccatagtaccaatgaggaaaacttctcctctccgaatgtgcgccgtgtacatcactcccgaaaacacaatgatttcaactacgcggaacgcgacatctcacgtcagaattatcagaacatgaataaacataaacatggtgacaacgttcatgaggtaaaattcaaaaaagtcgtgaaacaggaatcggatcgcagcaagagcagcaacagtaaccaagaagccggtatcaatgaatcgagcggcaatattcaatttgaatccaacgacttgcttgatgattacaagtaa

SEQ ID NO: 72976 - DNA, 501 bp, synthetic construct
  source 1..501: mol_type = other DNA
gtggagagcattctggtaaatagcgacttgtgtgatggctgcatgaactgcgagaacatgtgtgcatcagtccataatgcgagtcgcatcaaaattattgaacacgattcgtccttttattcgattgtatgccaacattgcgagaatgccccctgtataaaaatctgcccgactgaagcggtgacggaagaaggggtggatacggaaaaatgcatcggctgtggtttatgcgtgatgatttgcccgtttggtgccatgaccttccagtccaaagttgccgaaaaatgtgacctgtgtgctgaccgtgaagagggaccggcgtgtatcaaatcatgcaccaaacgcgcgattagcatcgctgatcctgaaaagattcgatctaagaaccagcaaaagtatcttgcgaaaatggccggcatctacgaaccagatagtaaaaaaggcgggtttgttcacgtcattacaggtcaggcacgggcacgtctggttttcgatgaataa

SEQ ID NO: 72977 - DNA, 1605 bp, synthetic construct
  source 1..1605: mol_type = other DNA
atgaaggttctgatcatcaccggggagttggcatatccgctaataaaagaggtagtgtcaaattccaaagaggatattatcgtccacattgccgataatactcaagttgcagcgtttctgacgccgaaacagataatcaaagaagtaaaaacttgtttttccaaccagttagacgagatcgatatgattctggttccaggtttgattaaaaagggaacaaaagaaataacgaaagagctcggcatcccgaccttcaaaggctcaacggacggcgcggaccttgctatggtgcttaacctggtgggtactattgaattgtctgaagataaaccggcagataagttgattgatgaagaaaagcgtaaaaaagcgtttaaattcattgacgagtttgaaaacgataaagagaacatcgaaaaactgctcaaaaaaccaaacaatattctgatcaagaacctgcccgtgggggaagattttccaatgcgtgtattgtcggagattgctaatgccccgtttctgtcaaaagaagcattgattaacaaatgccagtatttcgttgactcaggtgcggatatgattgatataggcatggctgccggcgaagatttcagcgacaaaatccctgaattaattgataccctgcgccctatcgtcggcggtcgcccgctgagcattgacaccttaaacaccaatgaaatcaaggttgcggcggagaacggtattgatcttgtgctgagccttgatctgggcaacaactcggaagttaaagaaattctcaaagagaaaaacattcctgctgtgctgcttccaaccaactttagccaaggtaagtcgcccaaatctccggctgaacgagtggaagcaatgaatcagctgatcaaagacacggaaggtttaaaatacgtcgccgatctgattctcgacccggtaaatagttcgagcattgtggaatccatcatcgcgtgcaatgaatttcataaaaccaatccggccccaatgttcttcggtgtgggcaatgtcactgagttaatggatgcggactctggcggagttaatgtgttactggcaggaattggtatggagctgggtgtcagcatactgtttacccctgaagaaagtgggaagacacgcggtagcgtctacgaactcgcgaccgcctctaaaatgatgttccttgcaaaacatcgcaaatccattccgaaagatctggggattaatctggttgcgtttaaagataaacataaacgtaatgatattatcctgaacgagcgtgacggcattcccgaaaccatgcaggaaaagccgatgaaattcatccgcgataaggcgggcagttttaaaatcaacgttgactatggaaccacggtgaagcatagtaagattactgccacgcacttcaagaaaaataagccggacattgtaatcgtcgggcataacgcgcgggaaatttacgaagaaatcatcacaaaagaactggtgacaagaatggagcacgccgcatatctaggcagcgaactgcaaaaagccgaaatcgctatgattacgggcaaagagtatgtgcaggattttgatctgttcaaaaatccggatgaatttaaaaaataa

SEQ ID NO: 72978 - DNA, 405 bp, synthetic construct
  source 1..405: mol_type = other DNA
atgaaagctgataatgcaatcatcattgtcttagtcgtgctgataattctgtgcggagccgttgcgttggttattacaaacaacggcattagctttaataatacgagtgattctgtggtgaacaacacaaccaacaccaccaatatcacggcgaatgatactgatgaaacgggtgcgactcatgacaccggtcttgtagcttcctcgagcgatgacggttccagctacagttcgtccggctatagcagctcgagtggctcaaacagcggttcttcatcaggccaccaaagcgacaactctcagagtagcagcgggagcgaatccagttcagggtcggaatccaattcagaaccggagtctgattcggcaggacagagtgagggctcttccgccgacttcgaataa

SEQ ID NO: 72979 - DNA, 483 bp, synthetic construct
  source 1..483: mol_type = other DNA
atgaaaaccaaatttgttagcttactgtccatcctgctcggcctcatcattgtcatttttccaataatgggcgtgattggagtgggttccctgattggtttgtcggctctactgatgtctatttatctactgatcgtaggcatagcgatcattgattataacaatagtggtgcgattcttgatctggtgctgggacttatcctgttgttcttgagtatctgcctgattttcaatccgagcctgctgggctttctgaccgaaattagcatgtatttcgcaggcataatgctgattattgttgccgttgtctcattaatcaacaaccgcaattcacggtacggtttttatagcggcatcattggcatcatccttggtttgctttacatcattattgggacgtacctctctaacccgattattctggggactctgatcgggatctggctggtgatctcgggtattttaaagttaatggaccgttaa

SEQ ID NO: 72980 - DNA, 192 bp, synthetic construct; identical to SEQ ID NO: 72344
  source 1..192: mol_type = other DNA

SEQ ID NO: 72981 - DNA, 192 bp, synthetic construct
  source 1..192: mol_type = other DNA
ctaacagtcccagagaccagcgaaattctcgcatcattcggatttaaaaacttgaataaacaagtatttacttttaagattatatttatctccatgttatttggtttagatatacctttcatcttgagtgagctggaatctaaggaaaaacttagaaagtatttcaatatttctgaagtttggtcggctgac

SEQ ID NO: 72982 - DNA, 915 bp, synthetic construct
  source 1..915: mol_type = other DNA
atgctcattaaaaagatacccattccaattgcaggtttagcccttgctttattatctttgggcaatctattgcaggacatgaaccctaatgtcaagtacttgttcggagctatgggtgcaattatcattgttttaaccatccttaaagctattttttatccggaagatgttaaagatgattttaaaaatcctgtaattgcttcgagttccgggactttttcaatgagtttaatgctatcctctacatatgctctggaatttatgccaaatatttcctatattgtgtggattatcggaatcagcttacatattttgttaatgatttactttacttaccatttcatcataaggaattttaatatcactgatgtttatccaagttactggattgtttatgttggagtctcaatggctgctattaccgcaccactccatggccacaaggagataggtttcatctttttagtcattagtttcattagcatgctaataactttgcctttaatgatttacagatatgtcaagtattcagaaatgcctgatgccaacaaaccaacgacatgtatcttcacagccctgatgagcatactgcttgttggttatataaactcagcacccgctatttccacggcctttataatctgcctatattgtatcgcgtgcttattctacatattttcgttctacaagttggttgagtaccgtactttgaagttttatccgtcttttgccgcattcacttttccattcgtaatatctgcgcttgcgaccaaagacatcgtgaagatagtaggttcaaacacactattgtcttctgtgcaaacagttgaaaccttgatagcagtgattgtagtattctatgtcttgtttgaatactgtgaatttctgaaaaactctaaaaaatcgagaaattaa

SEQ ID NO: 72983 - DNA, 1476 bp, synthetic construct
  source 1..1476: mol_type = other DNA
atgatcaaagtttatgtttcaagatttaatagggggattgacacagaaccccatctggagtgttacgacattaatgaaacgcctaatatgaaggttctagatgcacttcaagccattaatgagaaatacgatgcagacatctcgttccgtagctcatgtagggctgggcaatgcggttcctgtggaattttattcaacggaaacggagctctggcatgtcaaaaagaaattaaggatggcgctataattgaaccacttaaattcccagtcattaaggatttaattgtcgacacttcaagcatcgaggccaaggtaaaagatttggaattgtctttgcagtgcagtcatgaatgttccgaattggattccagcataacgaaaaaggatactgcagatactaaaaaggtacgtaattgcattgagtgttattcttgctattcaacgtgtcctgttgtcaacattgctacagaagaatttggtggaccctatctaatgcgctatatcaataaatttgacactgatccaagagacaactttgataggctgaaggaggccttagatgaaggattgtataattgtacctcgtgcggcaaatgcctgtctgtttgtccgaaaaatattaacacatttggtgatgcgatagaaaaaatgagagctatagcggtggccaacggttcgggtcctctcccaaagcatgttgcatttaaggaaaacatcttaaaaaccggaagatctgtaaagactgacaaaccaaccttcattgaagaaacaaaaaacaagacaggttctaagatagcattctttactgggtgtatggttgattacaaatttccggaagtcggtcataaattagtgaaaatcttgaaggaaaatggcattgacattgatgttccagaaggccaagtgtgctgtggttctccacttttacgaactggtcagacagacatcgtacaggatcttgtcgataaaaacaaagaagtattcaaggattatgataccattattaccgtttgttctggatgtggtgctactctaaagaataatcatccagaatttggttcaaaattgaatgtgatggacattagtgagtttttagtagataaactcgatgaaagtaagcttaaagacgtcaatatgactgtgacatatcacgatccatgccacctagccagaagtcaaggcataaaagatgcgcctagagagattatagagaagatacccggtgttgaatttaaggagatgctatacccttgtcaatgttgcggtgctggtggaggcatcaaatccggcaaaccggaaattgccatggaattggcaaaatcaaaagcagaaatggtgaaggataccggtgctgatgctgttgttacaatatgtcctttctgcgaattgaatatccaagacggtttaaatgagatagggtacgacaacatcaagtgtatacacatcttagagttgttagataaagcttacgaataa

SEQ ID NO: 72984 - DNA, 279 bp, synthetic construct
  source 1..279: mol_type = other DNA
atggcttataagattgacaatgcaatcataaagaaagatagaaacggaaaagtaacattgattgatccagagaatgtgtttggtgatgaagacgcatttattgctgttaagtccgatgacttaatcactattcaacttttgatcaacgcgataatgaagaatgattttaaaagttggaaagaattaggtgctattcctgaaaccgaacccattaaatctctattcgtcagactcggctactcaagggaagatatagccaatatgctgaaagagttctaa

SEQ ID NO: 72985 - DNA, 432 bp, synthetic construct
  source 1..432: mol_type = other DNA
atggctgtaaagcagatatctgttttcgtggaaaataaggaaggcagaatcaagaaagccattaacactttagcagaggaaaacattaatattcgtgctctatcaatagctgatacaaccaaatacggaattttgagactcattgtttcggataacgagaaagcaatagctgctcttgagaaagatggttttatcgtaaaggaaaacgaagtcatacttctggcagttccagataaacctaacggtttaaattctacgttagcgatattcgatgaaaaagggattaatttagagtatttgtatgcatttgtaagttccaaaactgatgcggctattgtggtcatgaggctagaaaatatggaaaaggccatcgaagccttgcaagacagcaatgttaaaatcttgaagacagaagacattaaagacttgtaa

SEQ ID NO: 72986 - DNA, 876 bp, synthetic construct
  source 1..876: mol_type = other DNA
ttgatatcaatttttcacctattctttaaaaaaactatatattcgtctctcattctaaatctaattggtgatattttgaatttcaagtttaaggagtgtaaaacggagttcgatgggggaaattttgaagaagctttggatattttgggtgaaatcgaaaatgacgacgaggactataaattcgccttgatgcttaagtataattgtctgatgggtctgggctgttacggtgatgctctgactatcataaatatgttgattcatgaaaatccatacatgtcattgttttggtttgataaggttaaatgccattacttccttaaggatttaacaaatgccgctggtgcgttataccatgttgaacacatcattgatttaaaggatgtcgttgaaatcattgacttcgtgaaattatgtaatatgataggagagcatgtaattgcattgaaatattgtaatatcgtattggacaccgatgaaaaccaaattgacgcactccttgaaaaatcattgatctccaatatcattgatgacaagaacatgatgaacgaatgcggtgataaactttttgaattaagtggagataacttatctctattgatggtctcttttgcactaaaattatttagcggcatgtatagagacagtttcaacatcattctgaacataaattgcatggattccaaaatgggcttaatactgaagaaaattatttataaccagatgctttgtgacttaaacatacaaatcgtgatggaaagcaatgctgaattaacaattgatgagtttatactattgttatttgattatagatattacggggttgagtctggtgaagtcaagaacgttaggtacatgatagtaaaacaagattaa

SEQ ID NO: 72987 - DNA, 1611 bp, synthetic construct
  source 1..1611: mol_type = other DNA
atgaacgtcatgattttagcgatcgtctttataatctacatattttcactagtttttgtcggttattacgcatacaaaaaaaccaattcctctgaagactttatgattgctggtaaagacactcatccattcatcatggctatgagttatggggctacatttatttcgacagcggctatagttggttttggcggtgttgctagcgagtatggtatgagtgttttatggctggccttcttgaatattatcattggggtgtttatcgcattcgtctttttagggaaacgaactcgtaggatgggccatgccctcaattcgttgacttttcccgaatttctaggtaaacgtttcaattccaacttcatccattatttctcgggcttagttattttctgtgcaatgccgctatatgcagcagtagttctaataggggctgctagattcttggagtcttcactattaattgatttcagcatcgctttgcttatattgtctatcattataacattctatgtattgttcggtggtatccgcggtgtaatgtatactgacgctttacaaggcagtattatggttgtggctatggtctttttgcttgtatttgtttactggttacttggaggaatcgatattgccaatactgcattaacaaatatggtcaatctgtaccctgccaatgcaattgcaaccggaggtacgggctggacggcatttccagaatttggcactccattttggtggtcccttgtgtctagtaccctaattggtgttggtattggagtcctggcccaaccttcattgattgtcagattcatgaccgttaagtcagataaggaattaaacagatctgttctaataggcggtattttcatcgctatcatgccaacgactgcatatatagtggggtctctgtcaaatgtgtatttctacgataagttaggtaaaattgccgtggatgttgttggtggcaacattgataaggttattccaacctttattacaatggctttgcctgagtggtttgtatacatattcctgttgtcattaattgccgctgctatgtctactatatcttctcaattgcacactcaaggtacggcttttggtgtagacatctatggtacattgagaaacaaatccaagcagaagttagatcaggtaagtatttccagagtaggtattcttattgctattatatcagcgttagtaatggctttttcgcttccgggtagcgtagttgcactcggtaccagtttattctttgaaatctgcgccgcggcctttttacccgtttttttgggagcgctttactggaaagggatcaccaggctcggagccatttccggaattatatctggaactttagtcagcttgttctggttaatgtttgtgttcaaaaagactgcacttggactgggaatatgtaaatttgtctttggtgttgaaacattgctgcctgttgccccatggccatttattgatgtgatgttgatagctgttcccatttcagctatattcacaatcgtagtctccttgctaacaaaacctttggaacaagaggtgatagacaaggcatttgaaaacatagatgaaaaaggcagtgatgcataa

SEQ ID NO: 72988 - DNA, 114 bp, synthetic construct
  source 1..114: mol_type = other DNA
atgatgattttgggtatagaagacccaatgatatggggagtatatgtcggcattatcttatctactctactttgtgttgtttacggtattgtgaactggaataatggggattaa

SEQ ID NO: 72989 - DNA, 435 bp, synthetic construct
  source 1..435: mol_type = other DNA
atgaatatctccaatagatctgtcaaaatgtcaaacatcgagaaagttgatgaaattttgagtaaagctgaagtattttatctggcaacagtatatggagagaaaccaaaggtcaggcccttgggtttccatttgttaattgatggcaaaatttactttggtgtgggaacttttaaagaagtttataagcagatagagagcaaccaaaatgttgaaatagctgcatgggacggcgaacactttttaagatactacggtgtagccgacctaactaagaacgatgcgattgttgaaaaggcattcgaacttatgcctgaaatcgctgaaatgtatgaagctaatgggtgggaaatgggtgtgttctacctcaatgatgccacggccgagatacgtaacatgatgaatgttgaagagacctatgaatttaagtattaa

SEQ ID NO: 72990 - DNA, 1077 bp, synthetic construct
  source 1..1077: mol_type = other DNA
atgttaattattctaatagtgttgggtgttgccacccacctgtttttgacgccttcttcggtggagacagaaggctctaaaaatataacagacatgttaaatagaactgttgaagttccaaacggggttaataacgtcatagctacttcgccgccaatgaccactgtcttatatatgctttcacctgaaaagctaaaggcagttaacttccaatggacagaagatgaattgaagtatgtgccttctgaatacgccaatttaccagtcgtcggtggttggtatggtacacaagatggcagctatgaagagtttatcgctgctgaacccgatattgtgatcgaatctattgatgaagggggcgatggtgacgcattcactgttcaggagaggcaagataaatttggcaaaattcccgttctcgccgttaaagacactacaaatgtcgaaaagataggagactccatttccttcatgggtgaagttataggtacggaagacaaggcgaatcaacttaatgagtttaatactaaatacttggacatcgtacatgataaatcatctaaactggtggatagtaataaaaaaacagtttattatgcagcgtcaagtgatggcctgcagacctacccatcaggtgcatctcacggtcaactaattgatttgattggagggaaaaacgttgccgattcattaaatcaaggaaataccacgtccggagtacaagtatccatcgaacaggtaattaagttggacccggatgttataataactaatgacatgcatttctacaataaagtgtataatgattcaagttgggctcatttgaaagctgtcaagaacaagaaggtttatgtatctccacaatcgccatttaagtggtttgataaacctgttggtgctaacatgattattggtgtcccatggaccgctaaagtaatctaccctgaagactataaagatattaatatggtggatgtaactaaggagttctacagtaacttttaccattttgatttaaacgataaccaggcaaaagagatcttacttgacagcggactaaaggagagcaacctctaa

SEQ ID NO: 72991 - DNA, 1014 bp, synthetic construct
  source 1..1014: mol_type = other DNA
atggataacgattcaaaggatgttatttccatcatactgttaatcttcctccctattatcttatttttcacctcctttttattgggcagatatcctattagtccaatagatgtgataaatactatattgtgcccaatattcccacaattggaagtttcaccaacaataactaccattgtctttgaaatcagacttccaaggattattgccgctattgtagttggggctgcacttgcgatggcaggagctgcgtttcagagtatctttaagaatcctcttgtctctccggatttacttggtgtgtctaatggtgctggttttggggcggcattggccattctgataagtggcgccggcgttgtcacacagatatttgcatttgcttttggaatcatttctgtttcggtcacttatttaatttcaagagcatacaaagctggtggaatcttgatattggtattgtcgggagtggcaatctctgcattcttcagcgcattaatctcagctatcaaatttatagccgatcccgacgataaattgcccgagattgtttactggttaatgggaagcttggcttctattacgatggatcaattaataatgattattattcctataatcgtgggtatgattatccttctgacccttcgatggcatatgaacttactagctatgggtgacgaggaagctcaatccttgggtttgaacccaacaagagtacgcctattgatcattgcaggttgtacgttactaacttctgccgcggtatcggtaagtggaataattggttggattggcctagttattccacacatggctcgtatgatagttggtcctgacaataagatcctgatccccgcttcactaagctttggcgcaagtttcctgttattgattgacaatatttccagagccatcatttcaattgaaattccgattggtatattgacagctattataggtgtccctattttcttatacctcctaaaaagggggtattctgaatgggcctaa

SEQ ID NO: 72992 - DNA, 804 bp, synthetic construct
  source 1..804: mol_type = other DNA
atgggcataaccaacaatttctatgaggttaagaatatttcattttcgtatgatggcaacgagatattctccgacatcagtttttcaattgagaagggagacgtattgtgtattttagggccgaacggtacaggcaaaacaacgttaataaaatgccttaatggactacatgaaatcggttctggtgaaattctgattaaagggaaaaatatcaaaaaactgtcctttaaggaaatatctagaaatattggttacatccctcagaatcacgccccttcatttccatttaaggtaatcgatgttgtgcttatgggtagagccccatatttaaacctcattgatgctcccaggaaaaaggacatgggaatagcattaaactctctaaagactttgggtattgacaatctcaaagataaagaatacaccaacctaagtggtggtgagatgcaattagtcttcttggctagaatactatgtcaacaacccgatattttgatattggatgaaccaacttctcacttggacttcggaaatcagattaaacttttggaaattattgataatttggcggcatccggactttcaatcatcatgtcttcgcatttcccagaccatgcttttctgagctcaaataaggttgctattatgaaggatggttgctttatagattttggcagtccaaatgatgtggtaactgaagaaaacttaaaaaaagcatactctattgatgtcaagttaatcgaattggaaaataaacgtaaggtttgtgttcctctgaaaacaaacttcgaattaagcttataa

SEQ ID NO: 72993 - DNA, 2061 bp, synthetic construct
  source 1..2061: mol_type = other DNA
atgaggaaatgtttcgtgattatattggttctatgcttgctgttttcattaaacatttgctttgcgcaggatatatctaattcaacagattttacttttcaaaattccaatttcgattacttggaaaagactgacagtgttaatttgattagtacgtcagataaaattagcacacatattgatgtggtaagtaacactacctttgatggtactgtggactatttcaaaatcaaattgtctgacgaaaataacaaatccgttccaaatgcgaaagtgatattcaccgtgaatggggttagttatgataagaatactgactcacagggtatctcctcacttcaaattaatttggctgatggttcatacaaagtcatttctaagttcgttggcgactcgaattacaaatcgtcatccaaatcaaccacaattactattgacaacacccgtattgtagaagatggactgaacaatgctgaaattcaaaacataatagatgacgctaaagaaggtaatgtgatattattcaaaggtaacagctactccaacatcaatttagtgataaacaaaagactaacactaatctctactgttaacacagttctcaagtcaagctcctcatctcctacaataacaattaaaggcaaagaagcttcgtattcaatcgttaaaggctttaaaatccaaggaaatggtgatggtgttgtagtggacggctcgaactacgtcagaattttgaacaatgacattaccgctgatggggtagggatcacggcatttaatgtcaaatatatcaatattacgggtaataatattgttaaaaacggtaaatgtggaataatcctttattcaacagagaagtcctacataatcaataatgtaattaacaataataatgcaaatggaattgtattgacaaaatctgatattacatacatcgatagtaacactatctccaacaacgctcgttatggtattttgttaacaaacaaattcaatggtaactcttacaaaaacggtcctgaaaatgtttatattactaagaacactatcaacaacaacaagtgggatggtatttctgtaaataacgcagaagataatattaacatcaaagggaatacaattgttggcaatgatgaaagtggtatctccgttaatgttgtcggttcctacaagattcaatctaatatcataaccaatagttacactggtgtcagattcgatgaggatcacgttcagaagaaaaaccaagaaattacttataacgccatttatggcaacgctcatgtccaaattgaagccaagtcctacaatggtgttaaccctttatctgtcggggataattggtatactgacgatggcttattatgtcctaagatcaaaacaaataatttaaagtttacggtaacccaaattggtaagaatcagttccaagcaacctttgtcgactctaatggcaatattgcaagcttgctccccgacagggagctgaagtataagaccaacgatggtaagatcgccactgttatgattaagggaggaataggaacctttactgtcacggcttctgacgccgatattattaagtctacggtggatcgcacaagcagaaaaaacgtttatgattcgaatagcccaactaagacgccccaaaatggtcaatctccaacatatgattatccgaacatagactatggtggaggccagggcaatggaaatggtcaaggtggaaatgcgaacaatggtaatgggtcttcacagaaatctagtgatgattctggaaatagctcaaacagtaaaaaaatggaaccaaatagtaatccagtaaaccaagcaaacgatgtatctcagagttatgacacttcgcaaagcatggctcgagctgatgcctctgagataagtggtggagcaaattcaggctcacaatcgatcgccaagcaaatcataattgaagatgacgagttttttatagttaaaggtctttccctgatagtcttgctaatattactaaccatagggttttactacagagatgacataaatgagatgagatctaagctttaa

SEQ ID NO: 72994 - DNA, 1458 bp, synthetic construct
  source 1..1458: mol_type = other DNA
gtgagtatcaatgataatctaggtgatgcatcatctgatttggaaaatgaaatcattaattcaaaaaatggagacataatcttgattaaacctggaacatataatatccacaacataaccattaccaataaaactatcacactccaaggcattgggaatccaagtgatattatcattgacggtggtaaacagtcaagcatttttttgataaacaatattactacgtgtgtcacatttaagaacttgacgttcattaatggtttgtcctacaactttggtggtgcgatatgcattaatacaggtagtgtttatatagataactgccagttcatcaacaacacagctctaaacaataccaatgctggtgccatatccaattacggcaatgaagacaacaaagcatacctccttgtaaacaacacgttattcatgaataatcacgcagaccatgatggcggggctgtaacaacatgttacgctaattctgacatgtataattgtgtctttataaataatactgccgttagagatggtggagccgtgcgagttagtgtttatgggtatggccatgtagaagattgtatttttatgtacaatcatgctgatgagtggggcggagcgtattactcgtggtcaggtacttctaagatcaataggtgcatctttatgaacaatactgccggaacaaacggtggagctgtaatggtttcgggcaacctagaccttgaaaattcaattattgtgaacaatagtggtgggaagactggtggtagcttctacattcaagaacccatgtatcaggcaaaaacctatattaatgtcaacaataacttgattactaacaactcttcacctaaaggtcaagaaatctatgtaaagtggcgtcactctcaaaacctgtaccctgactttaatgataacgactggggtagcgaagatccaaatgattacaaaataaacgacccggataacgttactgccagaagtaaagtgaagactacgactgataagtccaacttattggacgagttgaatttcaatgcattaaacaaatattatgatttaattaaagattacttcccagaaaactatttagagaatatcaaaaaacaagctgagtcaaaggctaatcaaaacaaagaaaacaataagaacaatactccaaataacaaggacgaacatggacttaaggattcaaacaataccaagaatagccttaatgattctaaaataatattgtccaacaagacgaccgaaaatatagagacagagaattatctgatttcttctaattcgaccacccccataggtgatgatgaaaaggcatatgaattaaatgaaacaaaatctgtttccaaatcccaatctccaagactgctatacttagttatttgtttagtcattactatcatagcgttatttattggatatggcaaagagaatagcaaggataaataa

SEQ ID NO: 72995 - DNA, 2865 bp, synthetic construct
  source 1..2865: mol_type = other DNA
ttgattggtgtggtctgtgctgaggacaacaatgtaacagaaaatgcaacgaatgaagactttcaagctattcagattttaatcgataatgcaaatcctggtgattcgatatatctggaaaataagacttatcagggcagcggatctccaataattgtgaataaatcggtaaatgtttacggggtagattcctctaagacgattttggatgccagtaacaagtcaagtatctttttgatctctaaagacgttaaagtcaatttcaatgggctaactcttactaatggttataatgagactaaagggggcgcgatatataatctgggtattctcaacattaccaactctaaaatctccagcaactatgctgaaagtggtgcgatacgtaatgagggtaccggtaaattgacgatctcaaattctttatttgataaaaactgcggaagttttggtgccgctatagataattacgtcgggtacttaaacattgtcgacaccacattcaccaacaatgattgtcttgaaggtggtgcaatctataacagattcggtgagtttttagtgtataattgcacatttataaacaactctgcagctagaggtggtggagtttataataatagaggcggcatgtacatttacaattccagattcatagccaataatgtttatgatttaggaggcggcattaaaagttggggttcttgtgaagtgtataacacagtattaataaacaacactgccaaacaaggtggaggaatctatgtatcggagttcacattaattgctgaaaactgttttgtggaaaataattctgctcactggggtggtggcatcgctgtcgaagcaaaagctactgccaagattaaaaacgccacgattataaacaacttggcggacaggggtgcaggtattgatataaatatggggtctattgatctacaggactccattgttaataacaatgttgcaaagtatggtgcgggtggaatctactttgctttgttgtcgtcaacagtaaaaaacacttatatatgtaacaacatcgctaatacctcaggtggaggttgctatatttatggatttaggggtgtggttgtaaacttcactaacgtgataattaacaacaattctgcttctaaaggtggcgcaatctacagcaccggaactgcaaatattcaaaacagcattctgaactcaaataatgcttataaaggcggagctatatataatgaacttaatttaacagttaaggattctcaattctttgagaatacagctgatagttggggtggagctatctataataacttaaattcatttatagacaatgttgttctaaactcaaatgaagtaaagcaatttggtggcgcgatttataacgaaaagctagtcaatgccaaaaattctctttttgaatcaaacaaggcattacaagcaggagcaatttactctacaaatgacttaataattgataattcccaatttatcaaaaattatgtcaaacgcaactactgtgtgctaatgcttagtaagggtgatgtgaatattacaaattccttattcaaattcaacacaaatgcggatgaagggggttgcatcttcaactacaatgcaaatttgctaatcgatgcgtctcagtttatttcaaatgatgcccgaagctacggtgccgctatcgataactccggtaacctaactataaaaaattcattgttttataaaaataaagcatatggcgccgcagctatcgataattccggtaatttagttataatcaagtctaatttcacggataatgttgctaccaataatgggggggctattgacagcaacggtaaattgattattattggttcaatttttaagaacaatctcgctggcaataatggtggagccctgatacttagaggagatacgacggtaacccattcgattatctataataaccatgacaagaacggttacgcaatattcaataaaggtgttgaaaacatatctctttccaataactggtggggcagtaataacccggactttgaaaaactcttgaacatgggaacttccgatgatttcaattggatcatcatgagtttttcatccaacaatcaattgattcaatataaaaattctattttgaacataaacttcgacaacgttaaagacaagatggggaatgtctacaaaattaactcaaccgaattgttgcctattttcaaaatagcattgtcaaattacggtgaggttactatatcgaatggctttaaatcgatgaataaaaatattcccttaatcacatctatttcagccaaaattgataatcaaagtatcattctgaagattactccaaccaataagagaataattgataataagaacatcgtcgtcgattacaatggaaaagtaacctataaggttcgtgttgttggtgttgacggcaaaatcgtcggcgccaatgtagctgtggtcatgaaaattgcagggaagaagtacactgtaaaaactaacaagaacggctttgtatctaaattattcagtttgacgcctggtaaatactccattatcacaacatataaaggatttacagttaagaatagtataactgttaagaaagtattatatgctaagagcatcactaagaagaaatcgaagaagattacatactctgtctcacttaaaataagcaacggaaagccaattgccggtaaaaaaattacttttaagataaagagtaaaacctacaccgctaagactaacaaaaagggggtggcagttgttagctttaagaatctgaaagtgggtaaatactccgtcattgttaactacctcaactcaaaggttaaaacaactctaaagataaaataa

SEQ ID NO: 72996 - DNA, 4419 bp, synthetic construct
  source 1..4419: mol_type = other DNA
atgaaaattaataaaattttagtattactatcgttcatattggtcgtgcttatctgtaccaactcagtttcagctttttccgatgatagtaacttgaccgatgatttatcaagtttcgccagcgactttgataagtcaaatttaggtcagaacatcgaagtgaatctggacaagttgagctttagcgaagattctcctttgtcggatactataattgttgaagaagttgagaaagatcacaatgaaatggacgactccaccatacaaaaggcaatcaacaatgcaaaggcaggagatacaataatcatcaatgggaccagctacgtgcactgtcactttattattgataaaaaactgacaataataagcaatgttggaacaacgatggaaccctgtggtagtgacgctgtatcgggacataggggcattttctatatttcgcctgaagctagtgggactgtaatcagtggttttactatacgaaacgatgttgcgaaagctgacgattatggaattttggtaagaggggcggacgatgttaaaattcaaaactgtgtgatttataacaatggcttgtcttctgatgcaattagagtggaaaatacaaaaaacaccgtaattgagaacgtctccatatcaaaagcatttaacggcattagaattttggactctgaaaatgtcaacatatccgattcattcatcgacaacgccaaatactgtattaatgtcatcgactctaataagattaacttagtctctaataatattactaataataaaatttcaggcatagcaatttcaggttcaagcaaaaatatcaacatcctttccaacaacatctctaaagggcatgttggtatcaatttaaccgtagctaatcatgtctatataatctccaattacatcggactttcggacaaatatggtgtttatacaaattgtaatataactaagatggaaatcaaaggtaacttcatagacaggaatggtaactacaatattttcaatgatcatcgtgttaagaatctattcgtaaacggcggggagaacaaacaggtcatcaataataattatatgatcggtggcgataatcaagataggccagtctggcatcaagtttacgaatatcgtcctggaaagggtgataacacatacaaccctgaaacagatacttatacgtacgtcggggaggataatggcgattattatggtcatcaatccggcacattcatgggttacgtcttggcgattaatcaatttttgcaatgccctaacatatatttcactttccccactaatggtgtaacgccatggacaaagactggcaactataatttatatctaagcgaaattactcaggttaaaaagggagtatactcaatttcaatagttgatgtcgatggcaacctagctgaggagatcagttctgtccctgtcactttctatttgatgaaaaataacacggataataatggtaagcaaaaagctcctcaagaagatgatgtttctaaagttgtcatgatgaaaaatggtactgcaactgtgagattctacccggacgagtttaaggaatctgataatatcctcctggcaagcttcccaggtatcggcaacaacatatattctaatatgtattccccctataagttattcagcattgatgacaaattcatcccaggtaatgtaactgaaacaaaagtcactgtttctaatctaaacacctatccgaactcaaacgcaatttttaaggtaattttaatagatctgacgggtaacgctattgcaaatgagctagtaaacttcaagattaatggtaaatcgtatggtgctaccacagacgttaatggtgtagctaagataaagatctcacaatcaaaagaaggcacttatacaatagctgtcaattacattggtgacgatattgattatacttccagtagcgctcaggctaaagttgccgtcaaaaagatatctactaagattctaagctcaaatgtgtacatgattccaaacattgctgaatattattctatcactttaaaagatgcctcaggtcatggaatttcataccaaaaggtgacttttaaacttaacaagaaaatatacactgtaaaaaccaacaaaaacggtgtggcaaagcttaaactgaaatttacgaaaaaaaccacgtattacattcacgttaattttgagggaaatagcaaatacaaagcggtttcaaaaacaaataaaataattgttaagtattcctctaaaattgctaaactgacagttcctaaagtgacaattcttccaaagacatataagtattacacaatttcgctaaaaaatactaatggtaaaggaattgccaaacaaaagatcacggttaaattgaatggtaaaacttacattaaaacaaccaatggtaagggtaatgttgcaatcaaggtcaagttctcaaagcttggagcctacaaagtatctgccatctacaaaggaagcaaaatctacaagaagacttcttccaacggtaaaattgtagttgccaagtcctctactaaatttaccgctccgaaagttacaatcctgccatacgagaagaaagtatacactacaactttgaagacaagtgctggaaaagctttaagcaagcaaaagatcaccattgtccttaatggcaaaacatactctaagacgactaatagtaagggtcaggcgagtattaatgttaagttttcatcagaaaacgtgtattctgttatattgaagtattccggaaacggatactataagtccagtaaagcaacaggcaccataaccgtttccaagatatctactcagctaataagttacaataagacctttgccattgattcaactaagaacttcaccatatctcttaaggacaaatccggcaaaaccttatccaaccagaatatcacttttctattcaacaatcaaaatttaacaaaaataacagacgaaaacggtattgctagtgttaatttggatgccaatgtaggatcttttgagataatctcaaagtactgtggaaataatcagtataagtcgatatccaatacgaacatgattaccatttctaacaaaacaaacgttgtatttgttgacgcaagtttgccaaattctgagattcaaaaaatcttcgacgactgcaaaaacggcagtaatgttgagtttctagggaacagttacaatgatatctcattaaatatcaacaagccactaaatatttactctgaaaacagaataacgttaaacgcgaagtcaatgagcccagtatttaaagttttagcatctgacgtgaaaatttgcaacttatccatcgtgggaaactcttatgatggcattgagatcaacaatgcggttaacgttgtcatatttgaaaataatattttgaatcggttggaccaatctaagataggtgaatacatgttgagcacaatctcgcttccaggctatgggataaacgttattgactcaaaaaatgttgaaatctctaataattcaatcaacacatttgaaagtggaatatttgtgtccaattctaataatctcagtattaactcaaatgtgctcaaagaaaataattacgggattaagtatggatttaacgtgtccaattctaacataacgaacaacatgatttctgaatccattggtttgtatacaaatttagtgcctgaaggtccgcgcggctacggtgtctttttaaataactcggcagtcaatgtaacaattgctaaaaataacatatcgtggaatcatttggggatttccattgacgccaactattcaacaggtattttaataactagtaacttaatttctgataatgtacttgagggaattagatttaatgaaggttatgatttggctaaaaatgctattgaacctgttgtgactgataatgcaatatatagaaacggtagaggtccaagtatgatgatcctcggtgaactcagtgccaaccccgcaggaatttatggtcctggtgcatttaatgattcgctgaaattgaagttgggtgctaattggtatggtaagaatctgattgttacctgggataacgatacgggggttgttggttatggaaccatgtgtccaagaattaataccaccggcatagcctttaaggagataacttgcgtgaacccaggtacttattctatcaccttttacaaaaatgatgaagtcgcctcaaaattgccagtatttaacatgtacgctacgttaaacgacaatgttgaaattgtgtttgatgtaataaatggtgttggggtgtttactttcgatacgcaaaaattcactactggtgaaaatgtcattaaagtgtcgagtggttctttaaatgactctgataggattttcaaagttgaaatgtcgaagacattagatgatagtgaagttcccatttaa

SEQ ID NO: 72997 - DNA, 549 bp, synthetic construct
  source 1..549: mol_type = other DNA
atgacgatcaagaggtgcagttgggtaactgatgaagaaatctacattaagtatcatgacgaggaatggggagtgccaacccatgacgaccaagaactctttgaaatgcttgttctagaatccttccaggcaggcttgtcgtggataacaatattgaaaaagagagaaaacttcagaaaagcgtttgataactttgactacatgaaaatttctgagtataaagaagataaagttaatgaattaaaagagaataaaggtatcatcagacacaaaggtaagattaacgctgcaatcaacaatgccaaaatattcatggagattcaaaatgaatttgaaagctttgattcatacatttggggtttcagcaacgggaagataattaaagctgagttcaagactgaatctgaattgtcaaagaccatttccaaagatttaaaaaaacgtggaatgaagtttgttggtcctacaatagtctattcatatctggagtctataggcattattgataatcatcaaaaaagttgttttaagtttaataagactgattaa

SEQ ID NO: 72998 - DNA, 1353 bp, synthetic construct
  source 1..1353: mol_type = other DNA
atgaataacgctttgaagttgaaattgagcatgttttttctcatgatgtttgtcatgatattttacatgttggtcttcggaaaagttaatattgtaattggtttaatggtggttgtggccgcgttattgaatctaggtaatgacctgtcatacaatcctaaattatcctttattaaggtattttctcttctaatgatattggggttcgcttcttatcttaacaatcctataactgcttttggttgtattttaacgtttttcatagtctttggcacaacctttacatcgtatcatttgttcggtactcatgtttatttgccattcctcatgatttattttatgatggtagtcattccagtccctctggaagccttgccgatgaggttgctgagcttggcaatcggagctattttcattgtgggcttaaacctaaaggttaatggtaaaaaatattctaaactaagcaagttcacaatttctagcctgattaatgaacttctggaagcaattgacttgaaattggatggaaaggaggtttcaatggacagttttaacgtggctaacggattttatcgtagtattttttctaaatttgaatataagtacttccccaatcaaaagcatgaatgtatcttgaatattctaaaatcttttcaatacatcggttggagtttatccaattatgaattgtctgtaaatgaattaacccacattaaaagaattttgaacgatatcaagaactttaaattctccgaaattgaagagataaccggtgaaactaaagagatgaatttaatccttttaaaccttaaaataatcgtaaacgaggcaagtaaaaaaaatatagaaaaggagaagaagatcccaaacaaatatgttgtattcaatgttttaaaacacttaataaaaagacaattttcatttaagtcagctaagttcacttttgcattcaaaatggctgttgttctcacgctatgggaagttataacattaatatttaatttcccgtatacaaaatggctatatttcgcctcaattccattaatgcttccatacattgatgatgttgcccatactgctaagagtagaatggggggcacgttaataggcgtttctgcatttgcagtcatcatgattgctttacagtatatccccatctcttcgtacattgcaatgattatcgtattgatagcctcactattcggtatggtttttagtcttcagaataagttgaaattatcctccttcaccaccttaatgtcagtgactgtctcgctgatgtacatcacaccacctaaggcgataaaaaatactgtgggttactgctgcaacgattgttgtaacctttactaa

SEQ ID NO: 72999 - DNA, 378 bp, synthetic construct
  source 1..378: mol_type = other DNA
atgagaagaaaaaaggacgataagagggttttattctctcccaactccaacagaccaaagcattctaacaaaagaaaattaaatttgcctaattttcaacgtcaaccgcaaaggtcacgaaaacagagcaaatggggcaatgtgacggtatttcttattatattggctctcgttgcattcgttgttggtgccggaatgggggtatcgttgagtttcgacaacgatgatggtcctcactggaagaatgtcacagaagagatgacaactaacctgaatgagactgataactttacctacgacgaagaagtagatggtgtcgattttaatagtaatgaaacattaactgaactaaatgtgaccgttaaaccatcatattaa

SEQ ID NO: 73000 - DNA, 804 bp, synthetic construct
  source 1..804: mol_type = other DNA
atgaaatctatgaaaacagtcgctgttgcgattatagcaatagtagttattgtggctgtagggttatacctgacgggttcagtaggtacctccaatggagacctaaatggccaagatgttcagttagctgctgcagctagtttgaaaaacgtttatgatgaaaaacttatccctatgtttgaagaaaagtaccctggtgtgaaggttactccaacctatgcctcaagcggggatttgcaaaagcagattgaaaatggtttgaaggcagatgtgttcatgtctgctggcaataaacagatggacgcactaatcaacgaaagttatgttgataatgactccaatgttaagttcttagagaacaagctcgttttgatcgtctcggctgactcaaatgtgaacgtcagttcctttgaagatctaaaaaatgtgaacggcactattgctattggtgatcccgagtccgtacctgccggacaatatgccaacgaatcattacataatcttggtatatgggacgatgttgaatctaagttatctttgggaactgatgtcacagcagtcttgaatcaagtagcccaaggttctgccgactgtggtcttgtgtacactacggacgcgaaatctagcgatgaggttaaagtcatttgcgaagctccagaagattcactgaaggatatagtttatccagttgcgccaatcaaagattcggaacacgctgatgcagcaaacaaatttatggagttcttacaaaccccggaggcccaaagtgtatttgaagactacggatttacaattcatgaataa

SEQ ID NO: 73001 - DNA, 675 bp, synthetic construct
  source 1..675: mol_type = other DNA
atgatggattggactcctattttaataagcatgaagactgcaagtctgtcaatttttataactttttttctaggtttgattgttgcttggggcatcgttaaaataaaaaaggactcaataaaaatagtacttgatggtatcttcacactcccaattgtacttccacctactgttgtggggttttttttgttgtatatttttggtgtcagggggcccattggtagtttcctgatagactttttcgctgtgaaaatagctttttcatggtccgcaacggtcattgccgcagttgtcatgtcttttcctttaatgtatagatctgccagaggagcattcgaacaggtcgattctaatttattggatgctggccgaacattaggcatgtcggagtggaaaattttctggaaggttttgttcgccaacgcattaccgggaattatcagcggtggaattttggcgtacgcgaggggtctaggtgaatttggtgccacagctatgatcgctggtaacatcgccggacaaaccagaaccctaccaatggcggtttactccgaagtggcagctggcaatatgggggatgcttttaattatgtaatattcattatcattattgcatttatcgctatcttcattatggacttcgtttctatacgtaaggaaaagcaatggaaataa

SEQ ID NO: 73002 - DNA, 1365 bp, synthetic construct
  source 1..1365: mol_type = other DNA
atggttaacaaaaatgtagctctaatgaggggtgaacctgaaatagctgtaaaaaaattagctataccaattatgatatcaatgattctaactgcattgtacaacattattgatggtatttgggtcgctggtcttggcccaacggctattgcaggcattggatttgtcactccaatctttatggtgttaaacggtgcgagtgttggtcttggcaacggagctacttcgagtatctccagatttattggtgcaaaaaaccatgagatggccaacaaatctgcaacgcattcattattcattttcttgatagcctcaatcattttgactattattttcatgatgatgcagaagcctctccttgtatcttatggcgccagtggacaaacattaaatgaggctatagcttatgctacaccattatttttaggattgattggtttcatgttctcaaatggatgcagtggtatccttcgtggtgaaggagatatgaagcgcgcaatgtatgttgtaatcctgacggtcatcttaaatgctatattagatcctttatttatttacacaataggattgggttcagctggggcctcccttgcaacaatagccagttcgtcaattgcggcactcgttatgctctactggattttagttaagaaggacacttatgttaatgttactattaaaaagttcaagctggacatgaatctgaccaaagacattctaaaagttggcatccccagctcgcttgatatgctaatcatggcgattgcaatgtccatttatctaatcgtcatctctcaagtgggcggtgattatggtatagccacatttacctctggtcaaagattatatttgttcgctatcatgccacttactgctattggttctgcagttattgccgtgtctggatctgcatttggtgctaagaatggtgattatttgtcacgaacccacatttatggttccaaatttggtttgatattgggtactataattactttaattttagtaattttcgccacacccttgtctacattgtttgcatacacaccggaaaccaccaatttggttccggggattgccctgtacctgcaagtcgtatgtcctactttgatactaacaggcataggcatcccatctagctttttttatcaggggatcggtaaggggatttatagcttaatgtttaccatactgagagaaatcatatttgtggttcctttaatctttctattcgtgtacatattccatctagatattttgggtatctggttgggattatgtataggaagggctatcgcaagcacgttgaactacatattcgcgagatacgaagtcagaagaattaggtccaaatttgggaattaa

SEQ ID NO: 73003 - DNA, 1836 bp, synthetic construct
  source 1..1836: mol_type = other DNA
atgagtaaaataaactttggtaacattgttgagatcataaagcatgactttaaggcgtcttttagcaaccccatcgtgacaattgtcttgattgccataattattctaccttccttgtatgctttactgaatatccaagcatgctggaatccttatgaaaacactaatgaagtcgaatttgccatagctaacttagataacggatcaacatttgaaggtacctatctaaacgtcgggaatgaaattgttaaagatttgaaaaataatactaaattcgactggaagtttgtcactgaagatgagctgagaaaaggggttcacgatggggattattatgcgggcattataatacctaaaaatctgagtgaaaacatagcatccattacatctgataacccaaaacaagcggagctagaataccttgtgaacatcaagtcaaatccagtagctacaaagttaacggacacgggtgcaaataccgtttatactacagttaatgccaagattgttcagattattaacttggctgcttacggtaaactcggcgatttaaaagatggtttgtcatctggtgcaggtcagttatacagtggtggaagccagctttctgccggtgctgccaagatatcttccggtgcaggccaagtctcctctggagtgagtgacgtccaaaatggagccagccaagtgcaaagtggtgctaaccaagttcagcaaggttcgtctgccattaacaatggtgcaagtgatgttaagcaaggctctgcatcaattaaacagagtgctagtgacttagaaaaaggttcgcaacaaatacaatcacaggtcgatccatccacgctaccagaacctatgaagcaatatgttgagggcaatattaaacttgccaacggaagcggtgagttggctaaaggttcatcccagctagccgatggttctgtaaaacttgcagatagttcatcgaaattggctaatggtgctagcaatgttgcgggtggtgcaaatcaagtagctggaggttctgttgaactagccaagggatcattaagccttgccgccggtgctcaaatgctatcaggttctgcatctcaagcattgttctctgctgctggagctctaagttcttctgctaattcactgtcaagcattactggaatcaatgagactgaacttggagactatttctactccccaataaagttggacaggcaggaagtattctcagtcccagattacggctcaaatgttgctcctttctatatcgtgttatcgatgtgggttggtgctattattacttgtgtaatgatcacaccgggtacctcccaagggaccaagtacaaacccgttgaaatgtactttggtaaagtgatactgtttgtagtaatgagcatgctccaggcggcagttactatatcgggggcttatatcttaggcatttatatcagtaattcacctttatttatattctctgcaatcctggtatcggtcatatttatgattttagtatattccatcatatctgcattaggccaagtggggaaagggatcggagtaatcttgttagtgcttcaaatatctggcactggcggaatttacccaattgaaattatgcaagatttcttccaaaccttatatccgtacttgcccatgacatatgctattacattgatccgtgaggcacaattgggtgttgtgtggtctaattacttgccagcattagttgttctcgtctcgattggaatcgttaccattattgtggctgcgttgattaaacagaaagccgacaagtcctcaaagtactttgaagagagattaaaggaatccggcttgttttaa

SEQ ID NO: 73004 - DNA, 591 bp, synthetic construct
  source 1..591: mol_type = other DNA
atgcgtaataaagtggctggaattgtcttcattgttggtagtttgtactatgttctagcagaagccgtctctgcaacgttctttaacgccagcttgttcaatacttattcttttcataccatctccgaacttggaatccccaacgtaaactcccctttgttttggttaatgaacagtgcgtttattttgattggcttgacacttatattcggtaatttttataagttcaaagattttttagttaagaacaggatcataatctatattttaacactaatgacctcaactggggtcattatggttggttggatacacgggggaaatccattcactttaggttatcatatgttaggcgcaatgatggctatttttggtggtaatgtgctgctgatcgtaatttcaagatcgatgtctgagtactctaaatttcaaaagactacgttggtgctaggaatatttggcctcgctgtattttggattatgtttttcaatatggaatcgatttacatgccagttttcgaaagactttcagtttatacaatgattatctggtgttttttaaccggttgctacataataagcagagagtaa

SEQ ID NO: 73005 - DNA, 678 bp, synthetic construct
  source 1..678: mol_type = other DNA
atgtcggaggataatgatctgaagaattttcttataaaaaaaggtgctagcaaagtaggctttgccaacgtggacggtttggctgagggtttcatagatttgccttatggtattagtctcgttttaaaaattccgaaaaaggcaatgatttacatagaaaatgaagactacgagtcttattggtcatgttttcattcactaatagacaggttaactgaaatttccattaaaggtgaaaagtacatcaagaaccacggatacgatgcatttgctctaacaatgagcaggaatgagtgcgatatgaaaagattattaagtatcttgccatataagaccatagccactaaatccgggcttggttggattggtcgttctgcactattcgttactccagattatggatctgcggtcgtattgggcggaatattgactaatatgccactgacgttcggcacccagatcaccgattcacagtgtgatgactgtgaaaattgtcaaaaagcttgccccgttggtgccattaaccctcaaaaatggaatacgaaactgaaccgaaacgacattatcgatatcggaaagtgtagagaatatattgtcgaacaatataagaatggtttaggctgcacaaagtgtatgtatgaatgcaaacttacaaaaaagtacttggggagattataa

SEQ ID NO: 73006 - DNA, 864 bp, synthetic construct
  source 1..864: mol_type = other DNA
atgaaggacatagacgtattaatcgaggctttaccttacatcaaaaagtttcatgacaagaaaatattgattaaatatggtggacatgcaatggtggacgataaagcaaagtcctccacagctagagataccgttttactgaaatacgttggcatgaaacctttgattgtacatgggggaggtccagagatctcgaggtccatgaataagctaggcaaacaagccaagttcatcaaagggttaagagtcactgacgaagaaactatggaaataattgaaatggtgttagtcggtaagatatcgacggaaatcgtatcagaactcattaaacacgatggtcaggcaataagtttgtctggaaaagattcaagcctaatcttcgctcacaaaaaaggtgccagcaagattgatgaagaactagtggacttaggtcttgtcggtgaggttgattgtataaacacaaacctgctggaaatgtttctagataatgattatattccagtaatttctccagtgggtatcgctgaggatggaaccagtctcaatttaaatgccgacactgcggcaggggaagttgcaagtgctattggtgctgaaaaattgattattttgacggatgttccaggcgtcttgagagatccttctgaccccacatcattgattcaaaagatcaaagttgatgagataccctctcttattgatgagggcatcatctctggaggtatgattccgaagatagaaacttgcattaatgcgattaataacggtgttggctcatgtcacattattgatggtcgtaagaaacattctatacttttggaaatatttaccacaaacggtataggaactatgatttataaataa

SEQ ID NO: 73007 - DNA, 1071 bp, synthetic construct
  source 1..1071: mol_type = other DNA
atgaataacacagacatgctaattctgtttttaataacactctgtgctacaatattctttacatggtatattaaaagaatactaataaaagcaaggattgctgataaccctatagttagtgaacatagacataaatccggtactcccacaatggggggtatcgcattcttatttacaatctctctaattattgcgttgtattaccaaaatactcccatcttgctggtatcttttataatgctcgccgggggaatcgtgggtttggtggacgacttgattgggttgaaagttaaagaggttcaaaaaatcgttgtcaacacgtccagtgatgttattactctcggaaggttggatgtcgagccgaatgaagaggtccgtgtagctactccaaaggcaaaggccgaagtggacgatttgcttaaggatggtaaggtagaagtggttggtgaagttccaattaaaactgaaccaggcgaacttgagaagattatatgccagattgtattgggcttattcttcgctttaaccggcatcataacggccgttggcggtttcaaattaggtgttctagccattcctgtggtggtcatagctatccttggttctatcaattctatcaatttgattgacggtatggatggtttggccgcaggtattgtcggaattgcttcaattgcttgttgtgtatacggttatttatttggacctgcatcaatcattcctccattcctaattctgtccggtctgtgcttaggattcttagtatttaacaagcacccagcatcaatatttatgggggatacgggatcgtttgttttgggtactggttatgcggctgctgttttagtctgcgatattccttactttggagttcttgcattaggcgtcccgattataagcgttgtggttagtttgcttcaccgagcccatattatcaaattaccagtagaaccactgcatcacaccttgaatcattacggcatgtcggaaaccagaattatagtcagctattggggaatcacctttttactatgtataatcggtattcttgcgaagatgtatgtattttaa

SEQ ID NO: 73008 - DNA, 1431 bp, synthetic construct
  source 1..1431: mol_type = other DNA
atggacattcaagagttagtacgattggttgagggtgaacttgtcggtaacgttgatttcttttcaattgatgggttttcgggtcgctttactttcttaaatgatgcacacacaggagacatcgtagtaagacattggattgatggtaacggtgtggctatggcatttaaaaagaacattgcgtgcttaataacacaaactcccaaggatgacgctatcgaaatggcagaaaaacttaattttcctctagtgattacaaacaaaatcgaactggctaacgctttggccctgtcacatacaattgataagtattcccacaattcgacgaatgtagtcataaccggtacaaacggtaaaagcactacgtctcatttaatttaccacattttaaacaacgctggttttcatgtcctcacaaacactgatagtgaatctgaatttaacacgttaattgatccgatggtgagcaaattgataagcgatgaagtcaagaaaaatggtaagttggattatttggtgatcgaagtctctgaggttcaaggatggttgggcaaactaatgaagaatcatgcagcattgatgagtgaagctattaaaccacaggttggcgtaataactaatatcgccatggatcatatcggtcttgtaaattccattgatgatgtgtttaatgaaataactgcagttcccaaagcaataggtgatggaatatgtattttaaaccacgacgatgaactagttaggaaattaaatgctaagaatccattctacacctcaatgtctaaaatagatggcgataacgccgtatactttgatgacgggactatttattacaatgataatccaattttgactattggggagttgccattcaccggtaaacatttcatacagaatatattatccgctatcggcgcctgtatctcgctaaatctcccaatcgaggatatcgtcgatggagttagaagttataaggcgcttaatagacgttttaccaaattaaatgatgaacctttgatctatgatgactttgcccataatcctgacggaattaaggccacaatatccgaaaccctaaagttgcttcctgacaatcaaaagttgtacgttgtttgtgctatcagaggctcaaggggtgttgaaattaaccaattaaacgttgaagctattgtggaatctatggacgacggcattgaattggtactatcttcaagtaatgacgtcgtgaataatctgaattgggttaacgaaaatgagaaagaggtcttcttcaatgttttgaatcaaaataacatcgattatgttcattttgacaacctcaaagattgcttaaacgaagtttataacaaggcagataaaaaagatattattcttctgattggtgctcagggaatggaccacgcggagttcctgttaaaggacataatataa

SEQ ID NO: 73009 - DNA, 441 bp, synthetic construct
  source 1..441: mol_type = other DNA
atgtttataaagattagaagagacacactaataattctgttattggctttcatcttgattctttgtggtcgtttaattacctacgttgcgttcgcatcgtctgacgagataaacgatggcattgctatttccggggttatcatcaagggtaacgacatagttcccgttgatactatcagatcaaatgtcatgcaggcaggttttagggatggtagcgtaatttatggtgatattttgaaaacttccaaaagggaagtctcactccaagatgctattcagacggctcaagagtttgcaacacgatcaacagtgcctggaacctctgtacaaccaatcactgccgccgatgtccaagtggataagaatacgggagtagttacagtcactgtgatagaagattttagttctgttgaattagacaataaaaccagtggcggataa

SEQ ID NO: 73010 - DNA, 1260 bp, synthetic construct
  source 1..1260: mol_type = other DNA
ttgaataagttaaagctctcacttgtcttttttgcagtattgttattgacaatgagtagtgtcgcagctacctgtaatataatagtcatcactgatccttcgggtaatgatcccaatggtgcagctgctggaagtatgtcttttgcggacaacatgttccaatcaactttcctattatcgagatcgaatcattttgctgtactatctggagggaccgggagttcagatactaggttggattctatagtggacgccgttgccagtttggaaaataacgcttctgctgcctccgctgcttccctcgcttctcaatttaagggagcacgtcttgttgttggcggtcctaacattggggctgctgttggaggttcctttaatgcctatgtcataacagtggacgattcaagtaacgatattaaggtaaccccttataacagcggtgtggcaacattgcagccaggtcaaaagggagctattatacacttgcgtaacactgcgggaaatccattatatggtactgcagactctgtaagaaaagaaacagcaatgaatattggtaagatgatcagggatggctatccagcgactacgatcctagctgaggctatgggtgaggtggctaaagactctggtgagaaatacggtgggggtggagtaaacctggtatctggcatttccacgtccgacatgtttacaccaaaagaattgaatagcaccggttacccgatggatgaagaatactccaaggtttgcgatagctgcggctgggccatgggcttcccagctgcagaagcctatgaaaaatgtcccgtttgtggcggagatcttaggactgtttatgcctaccaggcattaggtgatgcgctgacagttagctctaaagccgtttcggtgtcagtctacggtagtgatagaccaggcttagccgagactaccaaagaaattgtggaagcatccgtttctaaatatggttatgatgcatctgcaatttcaggttcaattaatagaggtattaacaatggtctgctggtcggggttgaccatgttgaaccaaaagatattaatgtaaaacaaggttcaaaggcagttggcgtttactacaaatcactacctagtgaaagatcatctcctgcgtgggatttaccgatcgacggaaatattttaacaatacttggaagcatccaaacggctgtgggtataatcttgattttactagtcttattcagatcccgcttgcttaaatcgttccaaaaccgataa

SEQ ID NO: 73011 - DNA, 960 bp, synthetic construct
  source 1..960: mol_type = other DNA
atgttatttaataaaaatgagaataaagcaaacgaaaggatcatttacaagacaaaatcgaatgtgattttgggttgtaagaaagctatctatgggcttgttctgttgattattgttttgtccattagtccaatcatgattaagttcatcgccaaaatgcaagtgtatttaatttctcaaattcaactacccttaactaggtacgccgctatagcttttttcgttattattctcattattgtaatatatattatctggcatattatcggatggtattctcttgaatatacattaactgattcaagaattatggtcaaatctggcgtcatatcaaccaaaaagaactacatgccttatgcaacaatccaagacgtgacgacgtctcaaagtattcttgcaagattattccatataggtaccgtatctgtttttagcgcgtatgataacaatcgattggaactaaaaaatatctcaaatccatctgaggtcgaagaaatcatattctcgaatatgagagggtccagaactttccagccacaacagtccagaccaataaattatcaccaacaggataattacttggacaatggaagctacctgggtcgtaatgagatgtatgatgaatttgaacccattactccgataacccatgaaaaagacagctaccagggcagagactacgaatactatcctgaagacaggggttttgaaaactctgatcaaatacggcacgagtatgaatatgagccatacgatgatattgatagattcgttgaagaatttgaacctcataagaactatcctaacgaaatatatgacgatgagttggatgaggattattacgaatttggttcaaaaaaccattacgatgaaaagcgtaatgaagtaatagacaacgattcaaacagtctatccagtgagaaagttatcagacgccactttgataagtttaaaaagtaa

SEQ ID NO: 73012 - DNA, 141 bp, synthetic construct
  source 1..141: mol_type = other DNA
tctataaaaagaatcacctacactacgtttgtcgagacaaaagaagaattaattaagttgtttaaaaaggagtattataagattataaataacgaatcattcttcaataaatgggtttccaaatacattctaaagagttaa

SEQ ID NO: 73013 - DNA, 204 bp, synthetic construct
  source 1..204: mol_type = other DNA
atgggcagcgctgaggaggtgggtaaatatctcaaaaagctgtataagaattataaagacgcaaagagtaaaggtgaagtcttaaagtttgtaaaatctaacattaaagaattgttcgccttgtccttgtactttgaatcaatcgaaactgttaaccttttaataaatctattcttatacgaactagaaaaagataagggataa

SEQ ID NO: 73014 - DNA, 753 bp, synthetic construct
  source 1..753: mol_type = other DNA
ttgatagagattcatgataaactgggtacattggatgagttattggttatcattgatgatttactacttgacgaaaggtacgactataatgaattactagtccaaaaaggtaatatattgtctattcagggtaaggataaaattgcaatgaaatgtttcgataaggtgttgcaagatgactcaactaacttgtgggcttattatttcaaatgctacgtcctaaataaaagcgatgatttaagtaattttgacaagttattttcaatggttaaatcacagtcgccagatgaatactatatatggctcttaatcggtgtactgttttcccgtaacgacagattcgatgatgccttatactgtattgatgaaagcataaacagatacgatggacaagaagatagttggttgtacaaggggttgattttttatgaaatgggcaaatacgatgaggcgttgtctgcaatcgatattgctttaaagattaaccccaaagactcttacctttaccttaccaaaagtgttattcttaatgccatggagaagtatgacggagcaatcttttattccaataagtgtctagaactagacaagaataatgtattgtgcttgtataacttatccctgtctctttataatcaaaacaagttcgatgaatcgctcaaatattgtgaatctgctttaaaaatagaccctaactattgcttatcattgaatctgtatgctgaaatcctaagacacaaaaaaaaggtgtaa

SEQ ID NO: 73015 - DNA, 4041 bp, synthetic construct
  source 1..4041: mol_type = other DNA
atgttgcaagccaagaaaaccataacagtaacagtgaaaagcatccctaccagtctcacagtcaatgatttgacatgtaattatggggaggataattcttatttatatgctacgctcaaagacactaagaacaataaatttctaaatgggcaaacaatcacgtttaaaattaacgataaaattataaacgttgtcagtgacaataagggtagagccaagatcaagatagatgaaaagccgggcttatacaatgtgattgtctcatttactaaaagtccatatgcaagtattagtaaaaagatcaatgtgaatgtaatatcattcaaccccactgtgaactacgatgggggattttacaacaagtcatacctcaacctttcattaaatatcaataatgctaaattgataaagtattgtttgaacaatgacagttggtctcaatctgataaatccgtatcattcattctaacaaacggcatctacgatttatattatagtaacggttccgggagtattttccatgaacactacttgattgacaataattgccctgttgtttggagtaattttggttccgacctatatgattcttcgattattgttaatttgtccagttgggataatcttgatgccaatcccaaaatatattattcgctcgatgaatccaatttcaaattgtacgaaaatcttttgaatatttcaaggacaacactattaaaattctactcaattgattttaatggtcataaaagcgaaaccaaaacctgtaattacatttttgaaaagataggtaacttgaacagtggaagaggatttacaacaatccaatcagcaattgatgactccaatacccataacggtgacataattaagattagcgagggtctatacaacgaaccattaaccgttaataaattcgtcactatgattgggattaatgctactttaaccagtagggacccttcccgtccagtcattggcataactggtggtggatcaaatagcgtcatttatggattcaaaattaaagattcggagcatggtgtcgtcatttaccatgcagacaacgtttctgtcattaataaccaatttatcaatgtggttaagtccatagaaatagatgatgataaaaatactttggtggcttacaattctattgattcagacaagtttctgaatttcatgtcgggtgttgcgattaggaaatcagataatctaatggttttcaacaacaacatttcattaaattccgacacgggtgcgggtggaatcgttgttacaaacattacttcaaacaacatttctattgttaataataggataaccaataaaaacaatttaaacggtattggattgtatgttatctgctcaaacgtatccattgactctaacaatgtttcgaatttcaacgctggattgtatgttgtatcctctaattctcatgtaactcacaacgaatttaaaaataacaaccatggcgtattcctaagagtctccgttaataatacttacgcctttaacaatattcacgataatatactatgcggtttcgttctggatacctctcttttatcgtacaatgattcatgttacttgaacagattatgtgacaactctcagtatgatttttactcagaggcaaacagcgattatgtaatcaatgataattggtggggtgaaaacacgcctaaaatttctatcaatcgatcgatacttgctaacatttataatgctacgggaaacgtcattatgaactcgtggatggttgcacacctgttttcatcgtcttataaaataaatgaaaataacaacattgaaagagctaagttctatgtggatctgacttataataacataggcaatgatttgtcatataagggttatatcccaaataatttaaaatcttttattggggtattcaatggggatggagccaaaaaatccaatatctcatacttgcatgagggtaaatcttttgttgattttgaattaaacgatttatttaaaaaccacgaaaatatcactgtcatgtctattttcgacaatgtaaagatactaaactctttcaataaaaaggtgacaattgatataatgctattttcttccgcatgggattttgaaaataattattttgtcaacaagacttatcagataccattcagcaataacgcttcttggattacattttgctggtctgaaacaggattgtttaccggtaagatttacgtaatagttaatggtgaaatcttagacgagatcaatatccacaatcttttttaccaaaaattcaaaaacaattattccacaaacgtttttgaagctattaagttgctggatactgtttttgccagcacgaaagagggtgtttgggcacccaatggttactacttctcctttgccaaggccgctaatattgatttcagagattacaattcggtttacaatagatttttaaactacattaaactgtattatgatttaacagactctgatttaaatttcgttaagaactacaaaggtttcttcatcgactttattgacatgactattgatttccacggtgacatgactccagacataaacttcgactataacggcgttcataaacttctgaagccgccatctagttatgctcataggataagtaatatctactacactgatattgaagacgaaaataacatttccattggttatgaaggtatgcgcagttttgcaattgttaaggacaatctcactaacgacgatttgcaattctggctcaatcaaaaggaactatatgctccaggtttgatgaaagccgcttacggtacctttctaacttctttgttagtgatctatgagaatgaccgtgtggctgatgaatcggcaattaaatttaatgtgacttggtctcgtatcagccccgtctgtgtgtctttgtgcaatgattacaattgtctttatgttactggggagtctgatcatggaatgggtagagaagcgataggaaacattagtgatgtttggaagtttaatttcgcaacaagcttcagtttcagtctggtggagcagttggtcggtaataatatatggaacgatacgaccataggtagcgtcactcttggtttaattgaaagctattttaataacgagacaatggaaatctttacatctaacggatacatatttatcaaatgtgagaatgacggtaatacgttgttgtttttagatttgaagaccggaatcgttcgggactatttcagttattatggtttacttgggaccatgccatgttatcatgataacataacagagaacgcatggaaatacggaaataatctattaaacaatatgggcagagagtttaacgacctgaaaaacatcttcggcatcggagtaatatcggcaacgttaatcggcgaggtcgaatttatcggtttagaaatgagtggcattggatcagcgttaatcgaaggctctgaaattggcctattgtttggggaaatttcaatcgctccaatcatgttaatatcattgcccattatcatgtttctgttcccggaacaggtgaatgaagtatggatgaactttgccagcttatttaatccatattataaggattatcctgatattccaatctatgaaaatacctaccctgcaaatataataaatccgcctaagttggtactggatggtaaatcctcagatgattatattatctcccaacttaaaaataatagaaacttcaacaacaagtacaagagatataattctaacgtgaacaaggacaacataaattttaagataaaaataggccctattccttcaggcaagggtccaaaggacatggataaccttggttcagctgaagaagttggtaaatatctaaaagaactttataaaaactacaaagatgcgaaaagcaaaggcgaggtattaaagtttgtaaaatctaatattaaagagttgtttgctttgtctttgtactttgaatcaattgaaactgtaaatttactgataaatttgtttctttacgaaatagaaaaggataagggctaa

SEQ ID NO: 73016 - DNA, 801 bp, synthetic construct
  source 1..801: mol_type = other DNA
gtgaagaagttttacaaagcagttttattgttgactttctgtttttttatttgtttggactgtgtttgcgccgtttcagataacgtagttgaaaatgatactttaagtgttgattgtcaggtaggggaactctgctcggacactatagaggtttcctccgataactattatattgacaacaatgttgttaattcatcagatattaactttaccgatgtgtactccggtaatgtggtgaagaaagtcaaatctaccgtaaagacatcgataactgctaaagatataactaaatattttcaagatggcaccagtgtcaaggcttatctgaaaaattcaaacggcaaggttttatctggaaaaaagatcactgtcacttattctggtaaaacttactctagaacaactgactccaaaggttgtgtctcttgggatgtaaagaaagggcccggaacctactcggtgaaattctctttcaaagcaagtggttataaaagcagcagtaaaacggcaaaagtcaccgtaaaagctatgccaaccacattgactgccaataatcttgtttttacgtacggtgacacaaacaataagcttaaggctacactaaaaaataaaaaaggcaagtcaatcgttaataagacagtggtcttcaatttctctggtaagaagtatattaagaagacgaatagtaaaggagttgcgtgcctaacaattactgcaaagccaaaaacgtaccctacagccatctcatttaccaatgctaattatgtaacaagcaaaaaaaacaacaactctaactcctaa

SEQ ID NO: 73017 - DNA, 4248 bp, synthetic construct
  source 1..4248: mol_type = other DNA
atgttgaacaaaattcaaaagatagttattggcaaacctttcctcatatcattgatcttcgtttgcctaatctttacttctcttggagttagcattgagcactcatatgctgcagatttaaacgagagcgacaaattggggtctggtgtaaatgttgaagacaagctagaaaattctcagaagaataagagcatgtcggataccaaccaaaaccccgcattaaaggccaaaacttattcagtaaacggtggtacgtttagggacattcaaaacgcgattgataaatccagtgcaggcgatacaataaaattaagcggtaagtttgtttccaagggtgacgacaccatttctatgtcaaagaaattgacaatcactagcccatcccaagcaatcttagatggtaaaaattccacaaccattttgaaaatatttacaggagcaacacaatctaagctatcgaacctgagatttgtaaatggctactctgatagtaagggcggtgctattgtcatttcagctaaatccattgcatttgacaagtgcgtttttgaaaataattatgcaaacttgagttcgggcgccatacacacgccatatagggccatagcgacccaaggtatgttaattaaaaattgtaacttcacaaacaatggtgccggaattgccgctggagctctgggaatattcggacatgattttttaattgagaattgtgcttttagctcaaattacgttaaaggctacggcgaatgctatggcggtgctatccagatagggttggatacggaaccgtcttatggtaacgttcgaaactgcagatttattaataacaaagctatatcctctactggcttgggtcatgcaggtgcaggatgtgttagaaatggttcttcctattataactgtatctttattaacaacagtgcggattggggtgctgctttgacctatcatgcctctggcaacttaaataattgtacgctgattaataataccgccacgaaatacggtggtgctgtcgctataatgatgaattacctgaacttcatgaatctcaatatcacaaacagtatcttcaaaggaaacaaagctcctttaggtggtgcggttaaattggatgggttgaatataaaaattgaagaatccaccttcgacgataattatgcatctgagtatggtggtgctgtgaatatcaatgcaacaaatgttaaaatcataaattctaaattcaacagaaatattgccaatattgatggtggtgcggtatttatcaagggtaaagacactaccgttaagaatagtaagttcatatcaaatgaagcaatacctgacgttaaaaagttaaatgatggcttaggtggagctatttatgtaaacagcacaaaagtgcttgctcagaacaatgagttcaagctaaatactgcaagaaatggaagtgcaatctactttgatcggaatggtcttgaatttaagctggtcaataatacattataccaaaatcaggcttgggtttaccgactaccgattttcgctcatgatatctactacggggagtccgaaaacatcaaatccgtaatctatggggggaacaacattgcagattttgataatttaaaagtctcaaatgcaatttataatgccgccagcaacaataaaatcgagatagatggggaacacccagttttaggcgcaaccaccagcggtaagttatatcaggatgaccgtgaatataacgtgagggtcttgatgatggtaagacacgaggatgggactattgtctacaataactctttaaacactaactatctaggtgccgtatcgggtaagctggacaatttaaagcctggcaagtattacgtgaccgcaaaacatttcgaagacaactactacaaagcaattgccaatacaaccgtattcaatgttcttccaaagactgataataaaatcttaaagtccagcaatggaaactcaattgcttataaagacacagtcatctggaccttgaatattaccaacaatggtccaaatgattccaccggtgtggtagtctatgatgtacttccagaaggattgatttgggtaaatgatgacagcaacggagcatacaatccaaagactggtgtgctaacaatagggtctttaaaggttggtgaaactatagtcttaaacataatgactaaagtgaatgctactggaaaaattgtcaacaaagctaatgtaactggcaatgaatatgatattaatttggacaataatcatgatgaaaaagaaatcaacgtaccacctactgtggatttggcaataattaagaaggtcaatatcaccactccaaactacggtgattcggttatctggacattgacagtgtccaactccggtcctgacgttgcccatgacgtaaaggtaaccgatattttttcagattcattaatttggatcgaagatgactctcttggaaagtacaacccgaaaaccggaatttggaatattggaacgttaaacaaaggcaagacaatcgaacttaatattgtctcgcaagttaaccaaactggaaacattacaaacaacgtgtctgtgacatctcgtgaacatgatatcgatttatcaaacaatgttgcgaataaaactatattcgttattaaatcaggagatttgtcgattctaaagaccgttaatgtaagtgacgctaattacggtgaaatagttaaatggactctcactgcctataacaatggtcccaacaaggtgaatggggttacagtgcaagacattcttcctaagggcctcatgcttcttaactacacggccagtaagggcttttacgatgatggcgtctgggttgtgtgttgccttgaaaagggcaaaactgaaactttggagttgatatgtaaagtcaacagaacagggaatattacaaacattgctaaaatctcaggaatagaatatgaccctaatctggacaacaacctagacaatgaatctataattgtgccacctgcctcggacatctcggtcataaagcaagttgatagtaaaaacccctactttggagatattataacttggattattgaagttacaaacaaaggtccggatagggccactaatattagagtaactgacgaattgccagaaggtttaatattcaaggactatgtttcaacttgtggtgtttaccaaaacggtgtttggttcttggattatctaaatgcaggtgacagtgagtatctaaatattagctgccatgtcgggcaattgggcattatcgtaaatgatgtgtctgcaatagccaacgaatttgacattaacctgtccgataaccactataacgagtcaatcaatgtattgccagtctccgatctctcaatagaaaaatttgtcaacgtttcgaatgctaattataaagatttgataaaatggaccctgatagtttcaaataatggttttaatgatgccactgatgttgtcgttgaggatattttgcccgattctttagaatttattagtgcgaatggtgattatgaagagggtatctggtatgtgggtgatttaggtgtgggtaattcaaaaacattagatatagttacaagaatcattaaaacaggagatattactaatgtagccgctgtttattgtagtgaagacgatcccgacttgtcaaacaatgaagctgaggatacggtccatgtggggccagcagctgatttgtcaatcacaaagacagtttctaaacacgcatacgagattggacaaatacttacgtacaatatcaatgtaaacaacaatggtcctgatgacgcggtcaatgttaaagttagtgaagaatttcctaaatctttacatctgaaaagttttaagatgtcagctggtgaatttaacgcttacagtaatgtctggtccatagataaacttgcagctggtggtgaggagaagctacgcatggaatttgaagcgttgtctgaaggcatctttaaaaatactgcttctgtcgtaagtgatactttcgacaatgacttgaataacaatcacgattcggctctcgttaaaattattgctaacacgtcagacaaaattataaatgatttaacggataattttactaaaagtaatgttgttaaggctgaaaatatcaagcagccagtgtattgtctggagaaacattctacggcgaatttcatagaactactatctatttctgtaatcgtgtctatgattttcggaggaggtgatattttcagaaagcgttaa

SEQ ID NO: 73018 - DNA, 1149 bp, synthetic construct
  source 1..1149: mol_type = other DNA
atgaaaaagcaaatcgcgattatattgatgattctgttaatagctgccccaattgtgcaaggagtctgtgcctcaaaaacggccttcattacgtctgataatttaatcgatgaaaaaactgatacaaatatgctaaattccattaagaattacgttgaagagatcagcaacggtgaaattcaagtaatcgtcgataacgaagctcccggacctggggaaggttggaggtcgataagtgtcacaagtgatgtgtcgattgacatcgcagcctctgatgctggaaactacatccaacttgcatctgcagcaactgctggtaacaagcaaattatctttataaacactggtgattttgacttggataaccattctaatttcttgagaagagcctgggatgacaattactcaaatgaatctcttgcaggtgtgcgtgaccccggtacacttctcaacaatgcaggtatacaatatatccagctggctaaggactacccggacaatattgataataatggtctattagataaatatgatgacaaaatgaaccatgaaatagctgagaaaatagtcaatattgttaataactacgacaacagttcaacaaaggaattgagtgataatttgatagtaaagaataagatctccccaaaaggaatggctgatgcttcaaaaatgttggttgagtctggggataaagagatgaatgggccatatggttcctattcaaccccgcaattgctttatcagaccagtacttatctcaatggtgatggcattgacattcctaaagactataaaaaacctgacaaccctttaggtatttcattcttaaccaaagacacttactccgtttatgattacttcaaaatggctggaatagttaagaattacatggatgcgaacggcaaggcgccagattcgattgaatacgaaggcgcccacataagctattatgatttaacatataactttgctaagattgttcagaatcatactgatgcaaatcatatgggctttgaaagcgagtaccactttgataaggtaaacgattctatcttattgcacattttgccatttgtactaatttttgttgtgttattcctagcatatatgctgatgaagaggattaaacgatttaaaagaaaataa

SEQ ID NO: 73019 - DNA, 684 bp, synthetic construct
  source 1..684: mol_type = other DNA
atgaagaggtatatatcagaattgataggcacaatggttcttgtattgttcggttgcggcagtgctgctatcgcaggttccatgttgggtaccgttggtattgcattagcattcgggttgagcatcgttgctatggcctacgttattggagacatctcagggtgtcacatcaaccctgctgtgtcaatcggtatgtggatagatggaagattagaaacaaaggatttagttatgtacatcgtattccaatgtattggtgcgattattgggattggtttattagctattattatcaactctgccccagtccttggaggttatgaagccacaggccttggtcagaatggctttggatctgcttccagtgtaggtttaaatgtattcggagcaataatagtggagataatactgacctttgtatttgtctttacggttctaggagtcactaaaaaagctgaaaatggtgcggtggccggcatagttattggtttaactctggcgtttgtccatattatgggtatccccttgactggcacttctgtgaatccagcaagatcgatagctcctgcactattcctcggtgggcaagcactagaacaagtttgggtctttattttggccccgattattggtgccattattgctggtacgttgtttaaaggactgaccagcgaggatgaataa

SEQ ID NO: 73020 - DNA, 192 bp, synthetic construct
  source 1..192: mol_type = other DNA
atggctgtagagcctcacaagcattgtccgatatgtggtacacccattccactaaatgaacttgtttgctctccagactgtcaaaaggtctgggatgcgagactggcacagacgaaaaggactagaattatcttgtatatcataattgctattttcttaatcatatgggccattatgacctttatgaaataa

SEQ ID NO: 73021 - DNA, 849 bp, synthetic construct
  source 1..849: mol_type = other DNA
atgaaattcaaggtaccggagaagcctgaaaacttgcaagaaagactcatatgcataattttcggcacttttgttggcactgcagtctatgtattgttcttatatttgaacatagccattttaggctggaatttgggattgattttcgcgccattgctggcagggtatgctgagactatgcttgccgagagaatgctgtcatctgataccggtgctataagcgcctttattctgtttgcaggtacgactttttatagttttattctagtcaaccccaccttaggtgctaactttatcacattcggggcaaccgcagtaatcttgcaagcggcattccctacgctgatcaattacatcttactagttattataattggagctatcttttacattctaagattcgttaagaaaacactaacacgtatttatcttaagataaaacatattatatacaaatacatccttaaaaagccatttgaagtcaagccaaaagctattgaatattatgatgaactccgaaataatcaagaaattaattcccttggagttatttttatgacctcgactgatgtgcccgacaaacatgttattaacttaggtcagtttcaatctacagtgattttagaaaaagaacctgacctattggatttaaatccaaaagaaagggagaatcacacattgacgatattgaagtcagggaaagacaaatgtttaatcggtttaactgataagataaaagctgctggtggtaatggcattatcgatttagatatccaatacattaagattggatttggtggtgaaagttaccagatctccgccatgggaatgggtgtgtatataaactaa

SEQ ID NO: 73022 - DNA, 204 bp, synthetic construct
  source 1..204: mol_type = other DNA
atggataaaaagatgattgtttcaataattggttacattgtagcactattaatccctattgttgggctcgtctatggtgctatattgtttttctttaaaaaggaagagccaacatataggaaacatggtagattgattatttacttttctatcgtgatctttgttgctactcttatagccaagttactgataggcggattctaa

SEQ ID NO: 73023 - DNA, 810 bp, synthetic construct
  source 1..810: mol_type = other DNA
atgtttacgatcgaatatttcgtaggtttgatcttaattggtatcttcgctggtttcgcgtctggccttctaggtgttggtggcggatttctaataactccgctgcaatttttcttattgaagtatattggtgttgcaccagaccttgctatactaatatctttcggaacgagccttgcaatcattatcccaacctcacttagtggtgcttatagacacacaaagtcaatggataatattttgaaaccaggcatccgattaggtatctttggtgtaattggtggttttgtcggggggttcgtggcctcagcattaccttccagaaccttggagattatatttggtctgttattgttattcatagcttttaacaatattgttaacattaataaagaaagagaaaaagctcgtatcccatttaattggactagtattggactcattggtttgctggttggattttcctctggacttttaggcgtcggtggaggcatatttttgatagctattttaacagccctcctgggattctcgatgattgaagcaattggtacctcttccatatttattagtctaacagccatcgggggctttctatcttacatgattactggttggggagtcagcacttttccctactcgatagggtatgtaaatatcattaacttagttttaattgcctgtttctctgtgcctatggcgtcatttggtgctaaaatggcacatagggttccccagaagaagttaaaaatcatattctcaatagtaattttgtacatggcattgaaaatgttgggcgtgttgccttaa

SEQ ID NO: 73024 - DNA, 1059 bp, synthetic construct
  source 1..1059: mol_type = other DNA
atgaaagttaataaaactatcttggtgggttttttattcttgttgattggggcattcatatttgtatctgacctcttaaaccccttgatacgcccggtcactcacttatttctaatggggtcatcgaaaggaaaggacattatatttttcggtctgttgggtttgctgctaattttatcacaagtaataccgagaaaaatcgacgctacccgatatttgaagatatctattgttatcggctttgttttgcttgtatttggcaatcttctggaagttgtatttagactacaaatgggaatcaaactgaacactgtgttttgttctatgtccagcacgatgagttctacaagtattttacatacgcatttgttaaagtccattttaggtgaggttctgactaaaataattggtcctttcattcagagcaacatcaatactggtgttggcctatatgcctacgtccctgatatttcgttcttggtggttttgatcattccaattttgttcatcacccttattttagccaaccaaaaaaggccatggtttacaaactttttaattgcttttttctcaagttgtcttcttatcggttcatttgatggaggtctctgggccacaccctctcttgtgggtctgttaggcttatggattgtttatcgtaatggatattacttgaacctacacttgggaaagatcataaaagataaaaagttattgaaggctaatgaaaatatccagccttcatataggaatattggtttgagtgaagcaaagtatctcttcaatagattcttaccaatcctaataattcttattgtgatagctctaagattcactgtcgcttttgcgggtgcagagcctgattactataccgtagaaatagtcaacatgacagataatgttgattttggggacattccaatagaaaaaatatcgaatgaaacctaccatgtagattccaattataacgagatggaattaattaacgatctaaaagtcccattaaataatagctgcaagtactacacagtttcttggaatgcatattcctacttataa

SEQ ID NO: 73025 - DNA, 1032 bp, synthetic construct
  source 1..1032: mol_type = other DNA
atgttaaatagcatttttaagtattcttacggtgtaatagtttgtttgatcatcgctatcccatccctaattttggggaacctgttcccagttataggcggtcctatcattgcgattatcttgggcatgttgattgcttttgcctggcacgaaaaggaaagcttcgacgaaggaataagttttacctctaaatatgtcttacaaaccgcagttgttctgttaggctttggtttgaacttgaatataatattgaagactggtatccaatctcttccaatcattattgcaacaatttccgtcgctttaatagttgcatttattatgcaaaaaattctaaatatcgaggaaaaatcagcgatactaatcggtgtcggttcatcgatttgcgggggttcggcgatcgctgccacagcgcctgtgattaacgcagatgaggaacaagttgcccagtccatttctgtcatattcttcttcaacgtgctcgctgccatcattttcccctttttaggcaagataattggtttttctacagttgatgggggaccatttggtctatttgcaggaactgccattaatgacacgtcatctgtaactgcagccgctgctacctgggataatatgtggggactgggcagtcaaactcttgacaaagcaagtactgttaaattaacaagaacactagccatcataccgatcaccttggcactttcagtgttcacgtcaaagaagtcggagtacgttggtggtgaattttcactgaagaaagcattcccaatgttcattttatattttgtaattgcttccgttatcacgactcttgccgtcagcttaggtgtggatgcaaatgtatttttgccttttaaagaattaagtaaattctttatcatattggctatggctgctattggattacatactgatattgtaaaattggtgaagtccggaacaaaacccataatacttggtgctacctgttggattgctattattattgtaagtatttctatacagtttactctcgggataatttaa

SEQ ID NO: 73026 - DNA, 888 bp, synthetic construct
  source 1..888: mol_type = other DNA
atgaaaaaaatctattttatcctccctatcctagccggtataatgtttggatcgggtggtgtatttgttcgtacgttaatggtcaatggtattgattcaacaacgctgctttttttaaggttttcaatcgcaataatccctattatgatagccattctagtaactgataaaagtttgttgaaaatcgacttaatagacatctcattgtttttggtttgtggtatatgtattgtaggcctgaatttgtgctacaacgagagtatggggaatattcccctttctttggctgcagttctattgtcacttgctcctatttatgtcatcataattgcttattttacatttaaagaaaagattaccagaaagaagatcatttgtatggcactcgccatatttggttgtattctaatgactggtgtgttggaaactagtttaagcaacattccattttacggaatcactgcaggtattggtgctggcttattctgggcgatttatttaatggcttctaagaaatctattgaaaatggcaagcacacattcacaatacttatttattcgattaccattatttccatgggattgctgccatttacgaactttggccaaatcaccaatttcatttcaattaaccccattttggttataattttcttaataatgcattccaccttcagcttcgcccttccatacattttctccactgtgagtctagagcatatagattccggtatagcttctatattattatctggggctgaaccgttcgcagctctaatattcggattaatcttctactctgaaattccaacatttctgatgttttgcggatttatattgactatcattgcaatgatggcgttaagcagaaaagaggaaatcaaataa

SEQ ID NO: 73027 - DNA, 1455 bp, synthetic construct
  source 1..1455: mol_type = other DNA
ttgttgagcaagaaattaatactgatcacagtactactcggtttgttggcaatttcaacggtctctgctgctgacaatactgaatctgacatcattggagccgatgggttaaactctacaagcaatataccaatggatgctcctagaacctttactcagttaaatgaagcaataactccgtacaccagtattgatttagagcatgactatagatatgataatgagacagattccgaatttgctaatggagtgcccatcaccaagaatataactatcgacggtaaaggtcatacgctggacggcaactatcttgcccgtatctttattataaaggaagattgtacggcagtttttaagaacatcaacttcattaacggtaaggcgtcgaccaacggcggggcaatttatggagtttgtaatgcagaaaactgcaatttccttaataatactgcagtaaaagatggtggggcaatacatctaagtaacgccaataactgtaattttattaacaattacgtattaaatggtaggggtggcgcgatgtataaaggttatgccacaaactgcatatttactgacaactcggctgtgactggcggggcattgtttgaaaactctgctacaaaatgtaagttcaccaataattttgcgaaagagaatggtggagcattgtatggaggattcgctgtgcaatgtaattttaataagaatagtgccaagaataatggtggggccctttataaaggttccgcccactactgtaatttcagtgataattatgcagtaaatcatggcggcggaatgtatggcggtgccggtgaatactgcttctttaaaaacaatgctgcaaagtctggacacgatgcttacagatcttccctcaaaaaaactaagacaactatttacataaagcctacaactactgcccattatggtgattacgtcgttataaccttaaaaaatattaaaaacaaagttgtgagtggtgttaaggtatctgttttcattaacggtaaaaaatatgctacaaagattaccaacaaatatggtcaaatcaaaattgatacaaggaacggttttgttattaaaaaatacactatcaagtcaaagttcgctgaagattccaattactacgcatcttcaaaaacagttaagattactattaaaaagtcaacaccaaagataactgctaactcaaaaacgttcaaaaagtcaactaaaatcaaaaagtacagcataaccttgaaaaccaagcaaggcaaaattatgaaaaataaaaagatcacactgaatgtcaatcacagatactattatgcgacgaccaactataaaggaattgctacatttaaaatcaccaaactactatataagggtaaatttactgctacaactggatacgctggttcgaaatattacaacgctttaacgaagaagtccacgattattgtccgataa

SEQ ID NO: 73028 - DNA, 744 bp, synthetic construct
  source 1..744: mol_type = other DNA
atgtcaataagcccaaaggatttattaaataaaaacaagaatttgaacaagaggctggatattagtgaaatttgtctggataatgttactatcaatgacttaaaatttaatggtgataactacgatgaatatattaacctccattctcttttagaaaacatatcgacatgccaggtttctgacgccttcaacgggatctcgagacaatccggtgtaattcaaaagataaaaccgattaacaatcgaagagttttcggcagaatatttacagcagaaactactagtggtgactggggcacgtctgccatggcaatcgatgaggctgatgaaggagacatattattctttaaagtggacagtgaggagatggcaatctggggtgagcttgcttccacttgtgctagggacaatggaattaaagctaccgtaatttacggttcagcccgtgacttggatgcattgttgtatatggattatccagtctttgcatcaaattactgtcctaatgcggggttggctctaggtttaggtagcttaaacgaatcactagatatagaaggattcaaagttaatcctggagattttctaattggagatgaatgcggtattgttgtcatcccccaagaattgtttgtaaagaccatgttcgcttctctggatattaagataaaagaatccctcatcattgataaaattgcgttgggcaatacactatctcagatcgtgggtcttggcaaaaagtaa

SEQ ID NO: 73029 - DNA, 612 bp, synthetic construct
  source 1..612: mol_type = other DNA
atgaatataaatatcgaaaactactacagtactaggaagaatgtttttgaaagaatccaagatgctggtactgccaccaaggtactcatgtcattgatgatggcatgttttactggtataatggcccagataattattcctttaccttggacgccagtgcccgttactgctcagacatttgcggtattatgttctggtctattgctgggtaaaaaatatggatgtctatcgcaaattttatatgttgttctaggtgtcgcattcatcccttggttcggggggatgaccggtggatttgaaacattactcggatcaacgggcggattccttattggatttattatcgcatcctgctttatcgggacaataaccgaaaaatatgctgatgctagaaatttcaaaaagatggcggctgtcattggtattgccaacttcagtttgatttacataccaggtctgttaggcctggcattgtggttaaacttaactcaaggcacaagcgttggtattgttgatcttttgatgatgggtcttgtaccatttatcgccggcgacattgtcaaaatattgggtgctgcatccgtgtctaaggtgtttttgccgaaagagtaa

SEQ ID NO: 73030 - DNA, 810 bp, synthetic construct
  source 1..810: mol_type = other DNA
atgaaagaaaaagtaaatctgtctggtgttagtgaaaccatgctagttccattatatagcagagccttggagagcaatagaaaaaatcctgctttctatgataaaactgctataggaattgtgaagaatcttgattacaattttaaggaacgattcaaagaatctaaaaataaaatgaacttctggggatgcgcggccagaactattatattggatgacgaggtttctaaatatattaagaacaatcccgaatgttccgtggttaatttagcatgcggtttggatgatagatttagtagggtcgataacggtaagataaactggtacaatattgattttgaaaatataatttcgttgagggataagctcatagacaaaaaagaccgcgttacagatatccctacttcagcacttgatttttgttggattgacaaaattgaaaataaggacaatgtcctgatcatagctgaaggtttcctaatgtacttatcggaggaagatgtaaaaaatttgttttttaagatttcagagtcatttggcaaagttgaactgcttttagaattaatgacgcactggatggtaaaaaaccaaaagaaacatgacacggtcaagcagaccggcgctgtatttagatggggtatcaacgagaccgaagactttgaaatgatttgtccaatgttcaagatgactggggattacaacttaacaaatgtgatgaagagatattccccgattttcatcacaatcgcatctccatttttgaaacctcgtaacaaccgtatcggaaagttcgagaaattgattctataa

SEQ ID NO: 73031 - DNA, 225 bp, synthetic construct
  source 1..225: mol_type = other DNA
atgttcaattcaaaatttttaatattaattataggtgttttgatcattggtttggctttatcctgttacttttattcgtcagataacttccatgagtctgattctagcctaaatgaaagacacgatgatgtggtctatctctggatgcttgatgacaacggaaagttgaaactggtacctacaaccgaaacttactccgaaggctctgcaagtgacccagactaa

SEQ ID NO: 73032 - DNA, 2289 bp, synthetic construct
  source 1..2289: mol_type = other DNA
ttggaaaacaaaatcaacgctggttacggttccacaataacattagagaacgactatgaatatgaggaatctggatattcgtctggtatagaaattacgcaggatataacgattgatgggaagggtcatacaatcgacgccaagggtcaaacaagaattttcgatgtggaagcgggcaaggtgacattgaagaatattacttttaaaaacggaatgcaaaacttcttttttggtggtggtgccattctctggaagtcactagatggtatcattacgaattgtacgtttattaataactatgctccgtctggtggagcaattaggttggaagcctgggacaatacaatatctgattgtactttcataagaaacactgccaaccaaggaggcgctataaatttgaatacaaccaattacgcttcaatttccaattgtgtttttgtgaataatgatatttactcagtgcaaggtgatggctgcaagataaacaacaatattttcatgagctgttcaattggttttgactttactcgaaattataatattgataataattggtttgggaacaatgcatctaattatacctataaaccaaatgagttttgcaataattggttgtttctaaatgcaaccacagatcccaacacagtttcagtttcgaacactgcggacattatctttaaactttatgcctataactcaacctccggcaacatctctaagtatgataatgcgccattcaaaaatcttaatttaacaatcaccgcaacaaatggtaatattgataagaacattgctaaattaggagaaactatcaaatataccgcttccagtgttggcactggcaatgtatctgccaaagtggaaaatgtcgaatacacaattggcttagacatcattccgatagaaactaagcttatactaaattcgactgataccattattgatagcatctccactgttggcatcaatgtcactgatattaataataaccctttgagtggtgttgttaaattaaccatcaaggacaataagggtaacgaatacaacactactgttacagtgaaaactggcattactacttacatataccctgcggataaaaccaatatctccaaaattgtcaatatcactggtttctatcttggaaatgatactctggggtatgttgactctccagtagcagagaccaaattcagggttgataagcttaacgctacggtcaacctggtcgtaaacaattacacaatcagaaacttctcggtaaacattacagtaacgggtaaaaatactgaccgtatagtcgaaaatggttccttaatcatctatgcaaatcgcgagaaaattgacgagataaatattacagatggtaaagctgaaaatatactgttaaacatcaccaagataggtaattatgaattatctgttgcatatagtggaaataacgtattcaatgaaaacaacaccttttcaaaaaatgtaactgctataaaaataagcaccattatttcagctaataacattatcactacgtataacactgataagtacttagaaattactttactggatagtgaaaaaaatccattgaacaacgcaaccttatctgttgacttgaatggggctaaaaaatacacaacgtataaaaatggtcaaatcaaaatagcattaggtagtctagttcctaaaacatacaccgcaaaggtaagttttgccggaaatgatatttatagtccctattctaccagctttaaggttgtagttgaaaaagcgacaccaacaataaccgcaaaaacaaaaatctttaaatttgaggacaagaccaagaaatacactataactctcaagaacaacaagggcattgtgatgaaaaacacaaaggttacgttgacgattaatggaaaaacctacactgctaccacaaacactaacggtgtcgccacgttcaaatttaacaagttgaataaaaaaggtacatatactgcttctatcacatattcaggggataagtattacaacaaactaatcaagaaagctaagataaagataaaagctcctgcctggaaaacagtggctaaaggtagcaagaataaggcaatagttaaaaaaattcagaagactttgaaaaacaatggatactaccttaagtacaatgggagatacttgaagattgacggaattttccaaaaatatacgcagattgccgtcaaacacttccaaaaagcaaataagctgaagacaactggaaaagtcgattacaagactgctaaaaaactaaagataatttaa

SEQ ID NO: 73033 - DNA, 147 bp, synthetic construct
  source 1..147: mol_type = other DNA
atgaaggaaatcaatattgttgagataattaaaaacaaggataaactagaaaaacacgaaggataccttcctataccaattttacattggattgacataggtaaatgggagatctttctggaaaaacatgataagaagttgtattaa

SEQ ID NO: 73034 - DNA, 234 bp, synthetic construct
  source 1..234: mol_type = other DNA
ttgtttatctttaagatatcttattataatttatttactgtcatcaatttctttactaggaattttttgaagaacggcgccaacatgaaaagaaacccaattgatcaattcatgaaagatcctgacaataaggctaaaatattcatctggatgacaagagcaatgattataacgaccttcatgattacaattggagttatactatttatcttataccttattggtgtaatttaa

SEQ ID NO: 73035 - DNA, 1743 bp, synthetic construct
  source 1..1743: mol_type = other DNA
atgataattgaaggaaatataattaagatagccgggccagttattgtcgcagatggtatgagaggggctcagatgctggagatggttagggtaggtaacgaaaagctgatcggagagattatcgagcttgaaggtgacacagctactatccaagtttatgaggaaacagcaggtatccagcctggggaagtagttgaatgtacaggtggagcattatccgtagaattgggtccgggtgtgatgagtagcatttttgatggcattcagagaccattaagaattatcagagaggcttcaggtgattttatcgctagagggattgatgtggattccattaataaggagaaaaaatgggaatttaaacctgttgctaaagtcggagatgtcttgaaagctggcgatgtgcttggcgaagtccaggagacctctgcagtcttgcataaaatcatggttccgcccgcacttgaaggtgaagttacagaaatcgccgcggaaggtgaatacaccattttggaggacatagctgaagttggcggccaaaaggtacaaatgctacaaaaatggcctgttaagaagagccgtccatatgtgagaaaactagatccagatgtgcccttggtcactggtcagagggcacaagatacctttttctctgtagctaagggtggagcggccgctataccgggtccattcggatcaggtaagacggttacacagcaacaattagctaaatgggcagatgccgatatcgttgtctacattggatgtggagaacgtggtaacgaaatgacagaagtgctgaccgaatttccatttcttgacgacccaaagactggtaacccactaatggacaggactgttcttattgcaaacacttcaaacatgccagtcgcagcgcgagaggcatgcgtatacacaggtatcactatagcggaatattaccgtgatcaaggttacgatgtcgcgctcatggctgattcaacctcccgatgggctgaagctatgagggagataagcggaagattggaagaaatgcccggggaagaaggttatccggcatatttagcgtcgaggttagcgcaattttacgaaagagccggaagagtagaaaccataggttccgaacctcatgtcgcctctatttcggttgttggtgccgtatctcctcctggcggggatttatctgagcccgttacgcagaatacactacggatctgtaaggtgttctgggcattggatgcatctctggcagataaacgccacttcccatcaatagactggttgcaaagttattcattgtatgtggacagtattgagggctggtgggctgataatgtggctgccgactggagagccacccgcgaccaagctatgggtttattgcaaaaggaatctgagttacaggaaattgtgcaattagttggccctgatgctctacctgaaacggaccaagctactctagaaacaactcgtatgttaagagaagacttcttgcaacaaaatgcctttgacgatgtagacacttattgtgcccctactaaacagtaccaaatgttaaaaactatactcttgttctataaagaatcgctggccgctgttaatagaggagctccaattgcaacgatagcagctttaccagttaaagaagaaattggcaagatgaaatatataccacaagatgagtttgatgcaaaaattgccgatattcaagctgcagttgtaaaacaatgcagtgaggcttaa

SEQ ID NO: 73036 - DNA, 1155 bp, synthetic construct
  source 1..1155: mol_type = other DNA
atggcagatcagatagctactttgataagttctgtagggctgacacaagaaacattcctagtgctctgtgtcatctcattgcttgtcgttggtgccgtagtcgtcatcattacatccagaccaattttggacatttatccttatcttaatccaagtgcaagagtcagagctagaaaaggaaggttgtttgacgaaaaacaaatttctgaaattgttgaaaccagcaatatagaggaagttgaaaattacctcaagggggttccggagtatgctgatgtcttagatgaatatcccctggataaggcgttagatgttgaacgcgctaacacttacgagtttattgcacgattagctcctaaagatatcaaggctccttttgccgtaatgtcaaaaaaggcagatattgacaatatcaagtcgcttttaaccgccaaagaagtcggttatgatgctgatgaaaccaaggagttattgatcccttgcggtgcgttatacaacgacctagaatccttagcggacgctgaaaatgtaacggatattgtgacaagtttggataacacagaatatgctgcagttttggaggatgctcttccacaatacgaaaatactaacatgattcttccattagagagcgctttagataagtattacttgggcaagctgttacgttcaacggacgttccctccgatgaaaacaagcaaatcttatatgcatatgttggaactcaagtggatgtaacgaacctgaaactaataataagggctaaagaggacggcctggattacgatgccatctcgccctacatattggacgagggataccagttgcgtgaatggaaacttaaagacttaatggaatctcctgacgttacaaacgtagtgtctggattggaaggtaccaaatattctagcgcactaactgatgtggttccagtttacaatgaaactggctcagttgccgtatttgaaaaggcattggatgtttatgcctccgagtattcaaaatctctcgcctctaagaagccattaggtattggtccaataattggttacctaagtcaaaaagaaaatgaaattaaaaatctaaaaattattgcaagagcaaaaagagaagtggatttcccgaatgcgaaaatcatggagatgttgatataa

SEQ ID NO: 73037 - DNA, 486 bp, synthetic construct
  source 1..486: mol_type = other DNA
atggttgaaatcgctttaggtaccgctttagctgcgattggtgctggagtcgccataggatttgccggtttagggagcggtctggggcaaggtatggcagctgctggttctgtaggagcagtggccgaggataatgatatgtttgccagaggtattattttctcagcattgccagaaacgcaggctatatacggtttcttggttgcaatcctcttattggtcttttcaggtctattgggcggaggtcaaggactgcctactgaagccggtattgtagctataggcgtgggtgcatccatcggttttgccggcctaggcagtgggatgggacagggtatggcagcagcatcctcggttggtgctatagttgaagacaacgatatgtttgcgaggggtattattttctctgctctacccgagacacaagcgatatatggctttttgattgctattttacttatggtattcgggggaatccttggctaa

SEQ ID NO: 73038 - DNA, 2001 bp, synthetic construct
  source 1..2001: mol_type = other DNA
atgttcaagacagctagaatgcgaaaaattagaattgttacacttgataagtatgtagcacctaccgtggatgctctacacgaatcagggcttatacaagtcagtgatatttcggaaagcattcagcaagatccagagttagccgaattggtgactccctcaaaagccacaccttacacagggaagttatcctccctgctcatgaaaacaaatggtatatctgaactattgggcaattctatatccgaaggccatgggttaaaagacactctaatgtcgtttattagccccgatatgccagttcaaaaggaggtcgaaaaattggatactcccgcgtttattgaaaaagctgaagagacgttagcgaaggtggaaagtaagacaagtgttatcgagggcaaactggctgcccttgactcagagacaagtgaactaaagtctaataaatccttggccaaaagattgtctcactttgacatggatttagcgctgctgaaagattccaagtatactagcactacggttggaaggattaatgctgaatccacttcagagatcaaaaatgaattgagcaacttgaccgatgaactagaaatatttactgttcctatggatgacgatgacggtgaggtcattgctgtagtgaccttgaaggaatttagtgatgatgtttattcaacccttaggaagttcgactttgagaaaattgaggtagctaatgttgagggcacgcctcagcatattatctcaagcgccgattctagattattgacgattgaatccgaacgggctgctgttaaaaaggaattaagagcagtcgctgaacaatgggatgacgaaatattagctctaaaagagcaattagagaatgagaaagataagaacgaaatactttcatcttttgttcaaactaaagatgcttatgtgcttgaggcatgggtcccggtaaaagacacagaggaagtggaacaattagtggaaaagagttctgagggacactgtgcctttgaaacaattgaaatagaaggtacagacgatgaagatgttcctattttacaacaaaatggatggtatgcaaaaccattcgaatttctcgtagacatgtactctccagtacgctacaacgaaatcgatccaaccatatttgttgcaatcacattcccgttcttcttcggtttctgcctaaccgatgcaatttatgggttagttgtctctgcaattggtgtagtcattatcagaggtttaggtaaggttaaggaatcgatgcgttcatttggatggatcttggtttgggccggtctatgggctgtgatcttgggtttgttaactaatggttttattggggacttcccagaaagaattgcaggcttcagattgccaactgtatttgctccagtcgaagcattcaaacatccagatacgattttactaatagcaatcggagtcggtcttctttacactaatgttggctttttgcttggtgcgatagacaacttgagatatggtaatgtgaaggaagctattggatctcagctctgttggtttgttttcgaagctggtatcattctactcgccttagggtacatgatgcctgcaatcggcatggttggcatggccttgggtggaatactgattattgccactattggaatgttggtttgggctaatggcgcatatggtgttatggacatcttcggttacatgggagatgttttgtcttacgcacgtctgttagcattatgtttggccactggtggtattgctatgaccgtaaacatcttagcgcaaatgttgaacaacatggttccgcatgtcggtatagtgctggcgatatttgtctttatatttggacatatagcaaactttgctttccaggtattaggtgcatttatcaattcgttgaggctgaactatgtagaatttttctcacagttctttatgagtggtaaaggaaaattcgaagcttttaaggccaataggacatttaccaaacttaaataa

SEQ ID NO: 73039 - DNA, 351 bp, synthetic construct
  source 1..351: mol_type = other DNA
atggccaatattaaaatgttcaaattactaggggtactcgtctctttgttgttgatcatatggggcattttaccattcttaaggcatcaaccgataacaaccgatgtcattgcgactgccatcatattgattatgatagctgttgcttacatgatcatcatgtttaatccatcatggacgaaggcagttttcttttttgaaggtattattattgctgttgcaggatatatgctgcttgcatttccctacaacctagagttcgccctggtgggtgtaattataattgcaattgctatccttgcttatttacagaagctacctcctaaaatattaagattgttttatagataa

SEQ ID NO: 73040 - DNA, 330 bp, synthetic construct
  source 1..330: mol_type = other DNA
atggagagagccgtctggataattctgaacaataatttttcacttactttggactctgaaataaaagatgaaaaaatcgtaaataaaaggttctcacccggcagtgacttatggacatccgagctacctcagttgtcgtttagcgacgaaaacattcaaaaggattatgatgagtttatctctgatatcatcagcttattctctgaaccatcagttgataagatttttattgatgcaaagattggtgaagaatccgaatatgttaacgctaaaaatccactcgttataagaaaaatagaagaatacagtgtggatgagattattggataa

SEQ ID NO: 73041 - DNA, 339 bp, synthetic construct
  source 1..339: mol_type = other DNA
atgaagcttttcatattgtctgcgaacgattcaagagatatggatgacatatcccagaagttatctttaaaaaagttcaaaattacgcaaactgagaacaactacattctgatgtgtaagaaaaggtacggaaatattttaatccatgcaatttgcctcatcattgctcttagttacgtttggcccgttctgatagtgaatgtcatttattttacatattcatatttatgggcatcgccaaatgtattgatcaccactgagagtctagatgacgaaggtaatcctttggaattttccagcatggatgaaatattgaaaaaagccacagctatcctataa

SEQ ID NO: 73042 - DNA, 510 bp, synthetic construct
  source 1..510: mol_type = other DNA
atggaatttatcgatgtgataaatgagaggtacagtgtcagaggatacttagacaaagaagtagagcaagaaaaactagaatttgtattgaaagccgcaacaatagctccgacaggagtcaacaaccagccttttaaagtctatgttatcgactcaaagaagtataaagagaaactctctaagatatataaagctaagtggttcgttgaagcgccatacgttttggccgttgttgcattaagaaatgaagcatgggtaagaccatgggattccaaaaacattgctgatattgatgccaccattgttatggaccatatgattcttgcagctactgacgtgggtttgggcacgtgttatgtcggtgcttttaagaaaaattatgcgcacaagttcttgggtttaaatgaaaatgaagaagttgtgctattcactcccctggggtatggtaatgttgaacctcgtgagaccccacgaaaggatcttaacgattttgtagtgtacaaagattaa

SEQ ID NO: 73043 - DNA, 489 bp, synthetic construct
  source 1..489: mol_type = other DNA
atggttgacattatagatggttcagaaaatataagcgttcatggtattctcaactgggttttgttgctaactatattctcaatcattaccgttgttggaaattacatcggttataaacacccgatcggcgatgctttaattggcatgttcttactatccctgattacgctgattggtgtctggatggagagatatttgccattggacatttcttcaattatatatatcagtataatcggtattgtccttgcatttcctggaatgcccacatctaagactttactttactacgtctctcaggtcgaactaatatcgattgttacagtatttttagcgtatgtgggtattgggatgggcaaaagttgggatgaatttaaagccttaggaccaaaggcagtgataattacaattcttgttatcgcctccacctacctgggtttagctttggtggctcaagtaatattgatgttgactggggtacaaatctaa

SEQ ID NO: 73044 - DNA, 897 bp, synthetic construct
  source 1..897: mol_type = other DNA
ttgtcaataatatctaagagaaataatgatacggaagatattaggcatatataccgcgataagactgataggcgtattttaaaaaagaacccatggaaggactatggattgcacatcagtgtacttatcttggttgtaattgctgagctgatcggaccaatgaagattcctgtcgcaaaaggagtcgaaatttcgataatgcccttgttgtacacgatgattctaggtctaatattttacttagcaaaaccaattacttggatacaaagaaagcaatctagagttgctgaaggtgctatgatgctatttattggtgtgctcatcgcaaaattagcagtttctagtggccaatctatacatttgatttttgaaatgggtccagctttaatgctgcaggaattgggccatttagctacaattttaatcgcacttccaatcgccctgttgcttggatttaaacgagaagctataggtatgacctcctctattggtcgtgaacctgaagtggcagttgttgtggacaaatacggttttaattcaccggaatcaagaggtattttcgccctttttattgtcgggacaatcattgggacagtattcattagtttcttaacttccatctgtgtttcggtaataccgctacacccatatgcattcgctatggccagcggtgtaggcagtgcgagcatgaacgctgcttcactagctcccaccgttgcggcgttcccacaattggccactcagatagaggcctttgccggattctcaaatttgctctctttttccgtcggtatttatattgtcatatttgttgcaattcctttaaccgaaaaactgtatggcatcttagaacctaaaattggtagagaccctatcgtggatgaggaggaggggtaa

SEQ ID NO: 73045 - DNA, 933 bp, synthetic construct
  source 1..933: mol_type = other DNA
atgttgactcgaggaaacttgttacaacaaactgaaaaattactgaagtcccaaggttttaagacctcagatatctatgaacacggttctttcgatatcgtagcgagaaagaacttgttgattttactattgaaaacatttttgaatattgacagcattaatgaacagaatgctcatgaaatgaatcaattagccaatatattccttgcttccccgataattatcggcgaaaagtctagaaatggtatccttgaggaaggagtaatctatgagagatacgacattccaacaattggatttgaaactttcaaaaatatgattctgtacaatgaatacccagaaatattagctgatcgtggcgggtattttgtgaaaatagatgggaatgtgataaagcagtaccgtgaagaatattcgatgtctcttaaggatttagcaaacctagcacatgtatcccgcgccacgatgtataaatacgagaacggcatcgtcagggcaaatactgaaaccgccatgattttagaagagatactgaatacaaaagttacccttgacattgatttgctcaaacaacctcaaaaggataaaattgaatatagtgatgatgttaaggacttgtcgaaactaggttatggtgttctaagtactaacaaaagccccttcgatgctgtcgcaaagatgaaaacttcagacaaacattcaccattgatggcgaatgttgaaaagaacagaacggagaaaaccttgaaaagaatggctattcctctaaaagacttaagtctggttacaacatctgaacctgtgtttataataaacaacgataagattaaagagtctattggtaaaatcccagtcatcaaatcttgggagctcaaggagtttgaaaactcaaaagaattattaaagatgattagggaaagaaaggaaaattaa

SEQ ID NO: 73046 - DNA, 681 bp, synthetic construct
  source 1..681: mol_type = other DNA
atgtccttcatttcaaagttattcggaaacaatgatgacgaatttgaagaggttagagtggacagggaagttctgaactctgtaatctactactcaaaacaggcttatccaaatgaatttttagcattcttggatggtaaaattaaaaacagaatattgtacatcaccggtttaatctttattcccggtgaaacctgcgagactggggccgtcattcacagtgagatggttccaatgaatacaaaatactttggaagcgttcactcacatcctggaccaagtgcgagcccgtctgatgctgacttgatgacgttttccaaaaacggttattttcatatgattgtatgtctaccttactcttacaatacattcaaggcatatgatagacatggcgaatctattgactatattgttggtgattatgcttatttggtcaacgatgatttagacgaatttttcgatgaggatgacgtgcttactgataatgatgagttcaaaccaggttttttcgatgaagacgatgacgaatttttcaaaaatcttgatgaggaaaaggtgaaccattatgatgaatttgaaaaacgtaatcaaataaacaatcaactacctaataatgtaataaaaatagaactcaataatgatggcaacgtcaagaagatctcgaggcgatttaaggactaa

SEQ ID NO: 73047 - DNA, 723 bp, synthetic construct
  source 1..723: mol_type = other DNA
atgtgggatacaacaaaggactatagaattttagtagcgtcgaaggcaagagaaaattatctaaatctaatcccaacggcttcttttaggggttcttggaacaagaaacaggctatcgatttgggcaaacaaatgaatagcgatttccagtcattaatttactcctacctcgaaggtgaggagttggtaaactctcctgatgttgcatcattaaaggagaagggggaaaaaatcatagaatatttgggcggtccagactggaataagaaattcttaagtaatgctcctaaggaagatagggaaaaaacccaagaaaatatagccaaggtaagattttttttggatacaataattggcttaaaagaccgattatctctgggtccgattaatgatcccattattggggtggacattagagtgggtgaggtcatgagcgttactaaacatcctaaaaacgacaagttactgatctgtaatgtgaatttgggaaaacgtgccattactgtcctgactaacgatttgaatgttaaggatgataacaaagttggtgtctcgctactcccaccccaatcctttagtgacatagtaagtgaaggtatgttcttgggaatgaatggaaatatacttaaatcagttgaaggagagcttggtgaaatgccaaaaggtatcccaatggaatccttgaacgaaacccgcaaccttgttgaaaactacctaaaataa

SEQ ID NO: 73048 - DNA, 582 bp, synthetic construct
  source 1..582: mol_type = other DNA
atggaaactacaagatttgaaacgttcttcgacgcaatcatagccattatcataacagttcttgtgttaaaagttccgcaaccagccaccccaacgattggtgctattttaaagttaaatacaatatttattgcatacttaatctctttcctgactttgtacaacctatggtacgccaatcacaacctgcttaaaattatagatattattgacaattccgctgtttggagttacggtgcgatgacctttatcctttcattattaccctattttactctatggttggctaatgatattaattcgatacctgcagaaacaatgttcggactaatattcatttttacacatattttcaataggttggctactaaatccatatatagatcaaacccttataataagcagttgattgagttgaactttgattcacatatccaaagtataccattgattattttaatcatcggttttatcctaacttataccatttatgctcctgggatctatgtcagctgcctgttggcagtaattttttggatttctctctctaaaataaagcgtggatgtaacaatggcaactaa

SEQ ID NO: 73049 - DNA, 573 bp, synthetic construct
  source 1..573: mol_type = other DNA
atggaaactgaaaggtttgaagcgctgtttgatgcaatcttagccattataattacaatgatcgtcttggaaattccccttgctagcacaggctcttgggaagctctcttcgatttaaagtacgagtttctgatttatgcggtctcttttatagtgtgttttaacttttggaattacaacaataatatattccatcttgtaaataagatagactacaaagttatctggacaatggccattacgttgtttgtgttttcatttttgccttatcttacctcctttgttggtgagaacttctatttattcctaccacaatttttgtatggtttgtcgtttatcatcactgcaatcctatcaatgataataggtaacttcctaaaacaggcagatcctggaaatattgctttgcatattgcattaagtaagcactacccgatgtatgctactataatcaccgttagtattgggatgattattggttacttcatatatcctccagccattattgcttgttgcttactgtccattttaggagtatggttcatcccaagaattatattccatatgaaataa

SEQ ID NO: 73050 - DNA, 948 bp, synthetic construct
  source 1..948: mol_type = other DNA
atgaacttggtttttaaattcattgaaaagtactattgcctgattcttttatttctagtcgtcattgctctcatttatccaatctccttcaactgggttttgaacagctatggtaacctaaatattctaaatttgctgttaagcattgttcttttcacgatggggacaaccctgaaggtggacaatttcataagtgtgtttaaaaatcctaaagaaatcattattggcatctcctctcaatacatcataatgccttttttagcatttgctcttgctagtatattttccctcgacgccgcgctaactgttggagttatcttggtcggcacagttccggggggtactgcttcggatgtaataacattcctagcgaagggtgatgtggcattaagcgtatctctaaccgccatatcgacttttttatcacctattgtaacccctttgataactttggtgttaatcggcaatcagatcgctttcaatccagtggatatgtttttatctatcgttcaaattgtaatcgttccagtcatattgggattgttgcttaattataaattcccctcattttgtaaaattttggaggaatacctgcccggaatttcagcaattgtagtgtgtgtcattgttgcaggcataatgggtgcaaataaacaagctattctcacatcctctttggttataatggtagttatcataactcaatatttcttagccatggcattaggttgtttgatgggttatttatttggtatgaagagagaacacattatcacaatagctattgagcttgcttttcaaaattctggattgtcaaccagtcttgccaagacgcattttccaaacttattgattgccactgttccaggtgcactgtactctgtctggcagaactttgcgggttcaataattgcttacttattaaacagttatttcattgaagaataa

SEQ ID NO: 73051 - DNA, 183 bp, synthetic construct
  source 1..183: mol_type = other DNA
atggacgatagtgctcaaacttctgccgagttcattttactttttggcggaatatttgtagtggttttattggtcatttatatgtataacaactacatggatgatttgggtggtgaaatcaagtcaaaagaagttaatgaatttaataatcagctaaatgcactgaaggtttacttcaaataa

SEQ ID NO: 73052 - DNA, 927 bp, synthetic construct
  source 1..927: mol_type = other DNA
atgaaatttaacataatcaataacttaactctatttttggacaacaacgtgcctgagaagtatttatttaaaataaatgaatttttgctgagtgggtctatttctaccgaagctagtaaagtcttgtctatcattatcattttcattcttgtaacagaaatttttctagtaattgcgctaaccctcttcaatttgccattttcgatattaatattccctttcttcataattcctataatttttacttacatcattgtccagcaagaaaaaagagctcaagaaatcgaacatactgcaccagattttttaagacaactttccagcatgcttcaggtgggtttaagctttgaaaacgcaatggaggacatgtcccattactctagcggtcccctttatgatgaaatcagaagggcaatcatcgaaattcgtatgggtcaaaattttgacgatgcctggcgcgcaatgtctaagagattgaaatcaaaggagttagagcgaatttttggtattatattggatggtaggaaatcaggatcaagtatttcaacagtattactcgatgtttcaaatgatttgagagatttaatggctttaaaacgtgaaagaaagtcagctgttatgatgtcagtcatgttcttgttaatctcggctattgttgctactccattcgcgatgggtatggttagtgtttattcgaattttatgcaaagctacggcatggaatctgaaatgattatttccgccccattggtgggtgaaatgtatctaataattcactcttttttggttggattcataataagtgttataatgtacggtgaggtaaaaacgggactaaagttttccctgccgctggtcgccgcatctttcggcatcttctatatcatttccacatttggcggaacgctgttcatggggggtttttaa

SEQ ID NO: 73053 - DNA, 642 bp, synthetic construct
  source 1..642: mol_type = other DNA
atgttcaagtttacttcgtcagaaataagggatttaataattgcgtttatcgttatctctctcagttttgctatcgtaaatggtggaagaaatccctctgctgtgctgagcattttgccaattgttatggttggtgtgggagcaggtttcattctgcacgaacttgggcataaatttgtcagcatgaagtatggatactgggcagaatttaagttatggcctcaaggtttgatatttgcactagttagttcatttttgggcttcgtattcgctgctccaggtgcagtgtatacttacgccaattatatgactgacgagattaatggtaaaatatccattgcaggccctgttgtcaatattattcttgcattaatattcctagccatatgcgttgctatttacccatctgcttttaactccgaaacctcagtcttgatattcatcatctgttccgtcggttattcaatcaacagttttttggcggccttcaacttaataccgattggcaacctagatggttcgaaagtattaacatggaatgctggcatctggactattacaattgctattgccgggataatgacggtgatgtctatgacaatgggtgttgagaccattgtaagaattatcttgggattttaa

SEQ ID NO: 73054 - DNA, 1521 bp, synthetic construct
  source 1..1521: mol_type = other DNA
atggatgcaaaatctgaagaaatatttaaaaagcatttgaacaattctaaagaatatgtcaagttcaaaaaacttgttaatgaaacaagagtttatgatattccaaaggaattaaccggtgagttgagagcataccaaaagatcggttactcctggatagttcagaacattaaatataactttggatgtatattggctgatgacatgggtcttgggaagaccatacaagttttaactgcaatccttcactttaaggagcaaaaacattatgattacgagccatcgctaattatcgtaccgcctacattgctatccaactgggaaaatgaaattaaaaagttcacgcctacgctgtcctactatatttaccatggtgctaacagaacgttcccattagacgaatatgacattattttaacatcgtacggagtaattagactggatttggacatgtttttagataagaagtggttcatctgtgttattgatgaggctcagaacattaaaaacccaaacacacaacaaaccaaagctataaaaagtgttcctgcttttaataaaattgctcttactggaaccccaattgaaaataaactaactgattattggtctatatttgattttgtcaacaaaggctatttatcaacattggacaatttcaaaagagattacgtgtttaggatcgaaaggttggaggaaacatcaactttagaaaattttaaaacaataactaagccatttgtgctaagacgtcttaaaactgatgacaacatcaaagatgagctgcccgacaaaattgttaatgacatatactgtagcctgaccaagaaacaagtattactctataatgccataatggaaggaatttttgaagacttggaaggtaagacaggtattgaacgcaaggggattatcttaaatattataactggtttaaaacaagcctgcaaccaccctgctcaatatttgcggagtgataatcccaaaattaatgaatctggcaaaatggagctattgatcacaattttagaaaatattctagatgtgaatgagaaggtcataatcttcacccagtatgccaagatgggtgagattatcaaaaaactggtctctaagaaattaaaaacagacgttctattcttacacggctcactcactcaggaaaaaaggtcagatataatctcaacattccaggaagatgaagatcataagattttggttgcaacccttaagactggaggtgtgggcttaaatttgactgccgcgcaaaatgttattcattacgacctctggtggaacccggcaatagaaaaccaagcaacggatcgtgtccatcgaatcggtcaagagaaagatgtgatggtatatagatttataacgaaggggactttggaagaagtaatcgatgagatgagtaaaaataagttgaatctggctgaaaaggcgattagcaatgacgaaactttcatcaccgaaatgagtgatgaagaacttaaggagaaattatctttgagattgtaa

SEQ ID NO: 73055 - DNA, 756 bp, synthetic construct
  source 1..756: mol_type = other DNA
atgaacatatcagtcaccttaaataatcctgcctggacgctgatttatattttaatagttattatcgccacatctttcttaactcgactaattgccttcctaatgaataaaatgaaacgttttcacaacaatgaggctgcgatttatcttacgagagatattataaattatataatctatttcattgcattaatgattattctgcaatttttcgggataaatctggcaggaaccctattgagtttgggtatagcaggtatagctttgagcttcgctgctaaagatttaatatcaaatctcttctcaggaataactttgattattggtaagagtatccaagttggggacacaattgaaatcaacaataaaaagggtattgttgaaagaatcacccttagatcgactattatttctgatgacagtggtgttaagaagatcattccaaactccacattgacgaattacccctacttgcattttaagactcctgaaaagtatagggtagacatccaaaccggcttgtctttaaacattgatgtggaggaatttgaaaagtacatcgtgaaaaaaatacttgagtacgatggcatactaaaaaatccaaaaccgtccgtctactctaaaggaatcacttttgaagaaactcagctcaaagtatcgttttgggtaaaagaatttaacagcaaggataaatataaattaacaatcacaaacgaaattaggaaatttacaaagatgggtgaaaaggatgagtaa

SEQ ID NO: 73056 - DNA, 693 bp, synthetic construct
  source 1..693: mol_type = other DNA
gtgaaaaaatgccccgaatgtggtaatcctagctatgatggcgccccagtttgtggaaactgtgggtacaaattcccaaaagctaaaaattcagtaccaaagggtgaagatatcttcaagaaagaacacaaaaaggaaccttccaatgacgaaagtacacttactattataaagcagaaaaagcttattattggtataatcttagttataactttaattttaatttgcggtatctttttgactggatcgaccaataagtcttcaccgattcaaaatgttgacacggaaaaatattcggcaggctcattttcttttaagtatcctggtgattggcaggaactgaaccaaactgatgaggaacatccaggggccatattttataaggccgcaaacaacacaactgttgagtactacaatgtcagcagtagcgcatcatctttgaaagaaatcaaccaaaatagaatcacacatgctcaatcggtaggtgcttctgtcaccttgctcgaaacaattaccttagacggtaggaatgcatcaaatattatcttggagaacgctgatggcaactacacgagatatgtttccatgtttagtaatggagagctatatgtattccgtctatctggagattccgtcaactccattacatctgatgaaattaatagtgtgataaattctgcggacatagcttaa

SEQ ID NO: 73057 - DNA, 369 bp, synthetic construct
  source 1..369: mol_type = other DNA
atgactaaatggaaggccgtgattataggttttatattggccgtaatcgtcaaatcgtttttcgcacaatatgaatttattggtttgctctttgttgggttcatcacaggttatatcgcacatgatggtgcactttccggcttgtggaatgctgctgttgctggggccctgggcaccattgtttgtgctattttgtttgttctagtcgcaactctgggtggaagtttattcggtattttcggcggattaactggatttacactatcaggaattacaagcatcaccatagtgttaggttatttaatttactactctatcgtaatgggcataacgggagcgcttggtggtataattgcttctaaaaagtaa

SEQ ID NO: 73058 - DNA, 408 bp, synthetic construct
  source 1..408: mol_type = other DNA
atgaatatgttctccgagattaatataaaggctttagtttttggagctgcaattgctgccgcttgtatattaattggataccagtattgggattggttatatcctttttcagcgataggattgatttatgccggctacggtcaaagtaacatcaaaattggtactgcaatgggcgcattggcgtctactccagtagcaattctaacactacaagggtatctcggtacctttaaagaagggttctttactacagaaaatggcatccttgccgtgacgctgaccgtcattgctgttggtgctttcatcggttttgttggtgcatgggctaagagagacaggataaaggccttggaacaatacaatcaaaaacagaaaatcggtaaaaacaaaaacaagaaacaaaagtaa

SEQ ID NO: 73059 - DNA, 420 bp, synthetic construct
  source 1..420: mol_type = other DNA
atgagaaaatctaggttatcattgtttaaatcaacttctatgatgatttcggtagtcggaatcataatgataatttcaactatcatcgttgtggcatatgtgggttacagtattgtttcatccagtattaccaatgatatatcctctggcacacaatatgacgagctcgcagaacttaaggcagaatacagcaatttgtcggtcaagtttgacaatataaaatcaacgtactacgccggtgatgccgatgatgttaaggtctataacgatgctaaactagagttatctcgtgctaactccgccattgaaaatgttcagagtgcgttagacgcagataaaccatctaacgatgtagacagtagaattgttttcgctaaagaaaagctggaatctgctgaaaaggcttataatagcttgtaa

SEQ ID NO: 73060 - DNA, 936 bp, synthetic construct
  source 1..936: mol_type = other DNA
atgaataaaatgttgagcccaaaagagttcattgaagatagtatacagaagattaaggaccaaattggtgacgaaaaggcaattatagcattgtcgggaggcgtagatagttcagtatgttctgtcctagtgcaagaagctattggtgataatttaacagccgtctttgtggatcatggtcttttaagagaaggggaggttgagcaggtaactaatactttcaaagatagattgaatctgaaatttgttgatgcttcagatgaatttatggatgctcttgatggtattgaagatcctgaattgaaacgtaaaatcatcggcaagatattcgtagatgtatttgaacgagaggcaattaagtcgggtgcgaaattcctagtccaaggaactatcgctcccgactggattgaaactaagggtgaaattaaatcccatcacaatttagccctgccaagtggaatgaagttgaaagtgtgcgagccaatccgtgacttatataaagatgaagtaagagaaatcggggacgaactcaacatacctgcatctacagtttatcgccaaccattcccgggccctggtctgggcgtgagggttgtcggtgctcttacaaaagaaaatgttgaagtgtgcagaaaagcaaacaagatagtttgtgacgagatcgaagctgccggtatcgataaggatgtttggcaatactttgccgtattgaccaacacaaaggttacgggtgttaaaggagatcagagggactttggatacttagttgtggttagagtcgttaactccattgacgcgatgacggcatctgtcgctgaactaccctgggaggttattcaaactatatcaaaaagaattacctcagaaatatctgaggttacacatgtcgctttaagcgtgtccgataagccacctgccaccattgaattttgttaa

SEQ ID NO: 73061 - DNA, 558 bp, synthetic construct
  source 1..558: mol_type = other DNA
atgacaatcttagtaattaataacaaaggccagtataaccataggatcgctagaagtttacaatatttaaagataccctcgaaattagtctcaaacaatttgtctattgaggagattgaagccgaaaatcctattggacttattttgggtggtgggccaagcatagaagatgctggtctgtctgaagaatacattaagtactttgacatacctattctaggaatatgtcttggtcatcagctcatagctaaggtttacggtggggaagttactacctcagatacggaaagttatgcacaagtgaagattgatattaagaatgatgaaaacctgttcgaaggcctagcgccggaaatcgatgtttggtcctcccataaagatgaggtgaaaacaattcctgatgagtttgaaatcttggccagctctaacttgtgcaatgttgaatcatttaaacacaaggacaaagacgtctatggtatccaattccacccagaagtacatcacactccaaaaggagaggcaatattcaataatttttacaagatctgtaaaaaataa

SEQ ID NO: 73062 - DNA, 147 bp, synthetic construct
  source 1..147: mol_type = other DNA
atggaactgaaagacctcatatttgttattgctgcaattttaatcgctgtcgttctacttaagatatttttctggttgttgccagtgattgtagttttaataatcgccttctttatttatgtatacttgcaagatagatataattaa

SEQ ID NO: 73063 - DNA, 432 bp, synthetic construct
  source 1..432: mol_type = other DNA
atgttctgtgaaaaatgtggtaaagaaattcccgataatacgaggttttgtagtaattgcggaaaccagattaagaaacctaacaacaaaataactgaagagaagaatatgtacctggccttgttcctttcaatttttttgatgggtctcgggatatattatgcaggaaataagaagaaaggcattatactatttattttcattttaatctccaaccgtatgagaaaatttcaaatcttcattatcattgctattattctatggatatacgctatctatgaaacatacattgacgtcaaaagagccaatggtgaggaaaatccaaatttacttgaagatatcaacaatttcaccacttcgaagcattttgttcacataatcgcgatagctttattatttgcagtatcttattttttgataagcaaattgtaa

SEQ ID NO: 73064 - DNA, 750 bp, synthetic construct
  source 1..750: mol_type = other DNA
atgaaaatgtgcaatagatgcggtgcagaaaataaggacaaaagtaatttttgttcgaactgtggtgctatattgaacaatccgaagcctacgcatagctatgataagaaactaattgaaaggtttatggatgctaacataattctcaaattaatcattatcattgttgcagtttttgtattcttcgttgcttctgcctggattgggcatattttctttggaatgcctttggagttttacaccgagggagatgcgacttaccatttatctcaattcaataaattggacctagatggtgatggcaatctgacattttatgaagtcaaaggtttggcatcagacatttcgcaggataacctttcagggatatttgacgccgccgacaaaaataacaacggtgtcttaaagggatctgaatttgacggctatcttcagttcattgataaatattataaggaattaggaaagcagcaaaaggctgaaagaaaaaactcagctcaacaaaaaagtagttcttcttcctccagttctaacccatcattccaagatgagggccacgaaatctgcccagtgtgtggtggtaatcaatttactgaattttacaattcacaatacggtgaaatgaattggcaatgtgattactgtggtgaaatctttcgtagcgacgatgagttctatatagattattgggaatccaacggcattaagtgtatattgcccgcactggagaataatttagatataatctaa

SEQ ID NO: 73065 - DNA, 753 bp, synthetic construct
  source 1..753: mol_type = other DNA
atgacaaacaagatatgttttgaatgtggaattgaacaggacgatgccttcaattactgcatcaactgtggcgcactactttctaatgagaatgatgattccttatcaaacagtaatgaataccgtttgccagaagatatcgaaaatcaaaatgacgaatatgataatctaaatgatgtaaagacttgtcccaaatgcgggattgaacaggaaatttttgctaagttctgcagaaattgtggtgcttcattttccagcgaaaacaaggatgaaatcacaattagatgtgagtactgtggtgctgagttaaatgacgaggcattctgtccggattgcggaaaagccactggcataaccatctgtaccaactgcaggcaaaaaatagtgaacgaagacttttgttcgatttgcggatatcaaattaatcataaaattaaaatatgtgctaactgtggtagtaaaatcgatgcaatggctaaagtctgcgcacactgcggtgcaaagatcattaaaaagaatcctctgatagcattgggtttttcattcgttttcccaggtttaggccaattgtataataaccaaaaccataaagggtttattcttattattgctaatataatttctttcatcttgtgttttatttttattggtatcatattggttattttaatatggatctatgccatgtacgatgcggccacgtctgcgatagctataaacaagggagaaattctcgaggacaaactgttttaa

SEQ ID NO: 73066 - DNA, 390 bp, synthetic construct
  source 1..390: mol_type = other DNA
atgtttaatctgatagattcgaccctatttttcgcttcttacggcaacattttcggacttgctaacatagcagtcagtccgattgatatcattttagcatatgtcgtggctattgttatctcaattattatggcttttgttttaaaagttccactcttgccaagcaagccctatagatactccttcgatgtttgtgcggtctatcctacaccaatcattgccatcggtattttttcaatatttcttgtattgaattacactttcatatataatggtttagttttggccattataataggtatcttatctgcattgtttgtgaagtacctgtttaacttcgtatttcctaaacctctaaatgaggacgaaggggacgaaattaatgaataa

SEQ ID NO: 73067 - DNA, 498 bp, synthetic construct
  source 1..498: mol_type = other DNA
atgaatgaggtaattggtataataattgccgcagttctatgctggttgaactttgtcatcgtagatacatattttggtcttcccgagcaacctggtgttagaggtgctggcataattggtcaagacgtcgaaaaaagagggggtgacattgctggtggattcttccaaggaaacattacatgttctccggatgcgtccgcgggcacacttctggcttctatcggctatttagtgttaggtatccctggtggaataattgctgccttttttgtatttatcggaaatagactctgtgcagatccaggctacgccgggacctgtggaagcctaacggcaacttgcattatcttcatatgttcatttttaggtatgactccagaaatgttcattgtggggatggttattgcaatcttgactgttatgggcattagtcagaccaaagcttcggtcatattgggtaaggttgcaaagaaattcaataggcatgctcgtgaataa

SEQ ID NO: 73068 - DNA, 249 bp, synthetic construct
  source 1..249: mol_type = other DNA
atgtatggcgaaatcatcggtgtcatagtgatcttcgtagcattaagagctttagtaacgagaaatcgtgcagaaagactattgtacttaaacgtcataggatttggtgtttcagccattgtggcttttgttattaacactccatttgccctcattgttgctgcagccttctttatatgttctacaattagtgctaatgcgattgcttataccctgaaaaggttggatgacgaaattcttttggagtaa

SEQ ID NO: 73069 - DNA, 270 bp, synthetic construct
  source 1..270: mol_type = other DNA
atggagtttttcgtgtccattattgcaatcgctctaatgatcatcggtgctttcggaatcatattcatgaagaaacctctcgacaaagtcataatgttttcagtgctggacgccggttttgttttggtaattgttttatttaaatatttggatgttgcgatgtttgcagcacttgccgatccattgtctactttagtattcattttagctattgtcaagataaatgaagttagaaaaaagaaaattataagtggcgggacagatgattaa

SEQ ID NO: 73070 - DNA, 261 bp, synthetic construct
  source 1..261: mol_type = other DNA
atgatctctgtcccattattcttttactttggcatatttcttgcgattgtaggaagcattgctactgcctggggtcctggtgttaaagatcccattataaggacattcaatactgaagtagcttcaattggggtctgcctggtgctactctgttataatcatgttttggcattattgacccttttggccacaacggttattataagtctaatcttatttagagctattatcagattggaagagatgggtgcaaacatataa

SEQ ID NO: 73071 - DNA, 594 bp, synthetic construct
  source 1..594: mol_type = other DNA
atgcgcattggtgttttatggaacaaacttgctgagcccaaaaatattccacgtttgtttgcatttagtctaggaataattctaattttaggccttattgtcccaatggctttaaatcctgatcaattatatgtaagacctgctccacaagagcaaatcggtgatggtctatctattgcaccttacgataggggtggcgaagtcttaactcaacctggacagattaatccccaatacccagataattccagagagctggggatgataaccgcgtatatgtcgccgatatcccaatgggtgtcttctatttccccatactttggaacatcaatttattcatctccgggtgggctcatagacgaaatactgtattatacgagaggtttcgacactatcttggaatcgagcatcttgatgatgagtttcatcattgcctcatggttgtctataaactacaccatgaacagaaagaacgatgaatctgaaatcaagaaagatgttaaaaaggctattaaagactcaacaaaggtagccaatgaaatcagtgttagcgatgctaaagccagagcaaagcagttgaggcgagacaattaa

SEQ ID NO: 73072 - DNA, 696 bp, synthetic construct
  source 1..696: mol_type = other DNA
atggtgtttatcccacagttcgttcccgctgctttcttaaatatgtatttgcctgcaatttacgcagggctaattgttggttttattggtagtatggcaatagcattaaaacgagaagaaattcatattctaatcttgacggatattgtgggtcttgctatgatatttattgtatctgctgttggcactgatcttgcggaagccctgatcttgccaggtttggtcgtggaacttgcagaaaccctagcgatttcagaaattttgatcacaagagaaatgcgtataattgagaacaacccgaggaagaacttgagcaattcgtcttccctattccctcaactatttgccttaaatatggagatattgaatacagcgcctaatttcattgccttagttttgatagcttatggtatatttctgaccggttttactggaggggctgtagctggtggcggaatcgtattatatgccttgtctaaaaaggcaagaggacttccagttctcgtcttggatggtattgctggagtctccggtatcgcctggtgtttatggataatcggctttttatttttctttgttactccacaatactggttattaagtttgttcttagcagcctgcggactcttactgaaagtagcttcaaaagttggtctgattggcctacttatgagagaagacatagacaaggagtaa

SEQ ID NO: 73073 - DNA, 672 bp, synthetic construct
  source 1..672: mol_type = other DNA
atggattttgttaccctcggtggaaatttactgggcaccattccccttggagatatcgtattatatttgactccatttaatttgttcttatttgcggtcctacttggcttcacagtgatgataggacttagtaaacctgagactcaaattgaagctacaatgcactacttgagcaatacggaagttaaagttggtgaaaaggaatttaagcaaagaagattcctgtctgttctgtgcggtattgcatctgccggtgcaatgattaccggggacttattcaacttcacactattcatggcattggttggcatgttgaacataggtatagtgtcagctgtaagacaaacgagtgttttgaactccgcctttaattatggtctaatcgctatgatgtgttccctaccattgtttggtggtgcctcaatcatccttgcttcaactggaactttgtcccttgcagtgttatctcagatgcctgtaagcccgatggttgtctttggtgccacattgatgctcctgggtattttaggggaaagtggcgtcgctcctttctttgcgtcaaaagcagagatgtttcgtactgctggatctccatttatcgttattattcatttatcgtcgttatttataatagtgagggctgtcgaaattttactattggtattatggtaa

SEQ ID NO: 73074 - DNA, 231 bp, synthetic construct
  source 1..231: mol_type = other DNA
atggtttcggactccatggatagtcaaaaaagcttgtgcattattttattggtactttcaacaatagccattatcgcttgtctagttgtcaatttcgaggcatggattgtttacaccatagctatctttggtatacccgtctgggtattatctctcggcttgctgactatggcgaagccaagacctgaagatgcagaagaaagggtgaaagaaccatttacgggatattaa

SEQ ID NO: 73075 - DNA, 873 bp, synthetic construct
  source 1..873: mol_type = other DNA
atgaacctaatggccgatattctaatacaagttattattgcattcattgccggaagtttgcttcttggcctgcataggaaaatcatggcccgtgttcagaagagacccggcccccctatagttcaacatttgttgcactctttgaagtttttctttaaggaaactgcattcccaaaaactgtttcgaagttattttacataggtatcgtctttatattggctctcatatggattgttggtgtcattgcaggtcctgtagctcatgatagcttactgatcctatttggcgtgtatgctgtctacaaaatcgttgagcacaactccggaagcagttccggtagcccgtacggtaaattaagttgtgtaagagccgtgttgtctgcggcgactgaacttccattgtttgcagctattatatttgtttacttggtaaccggttcaatgaacattggggagatcattacttatcagtctgttaatggtcctttagtatttacgattccgcttgcagctttaatgttctttatgctgattattacaaaatcaccatattcgccatttgccataacaaaagacaaggctttaatttcaggttttgaaaccgaacacttcggctttctaagaggattcatgttattttccgaatctatcgcgtggtatgtgatgttgtgggtattcttaacgatattcttcggtcctctaaatgctgttggatatgtgattgggatgattgttatcaccttcattacaggctttattaatgctacaactccaatactctctccaaatcattcagtcatgactcaaatcaccattggtgcaatctgcttctttggaacaataatcatgttatttggtggggtcgtgctgtaa

SEQ ID NO: 73076 - DNA, 255 bp, synthetic construct
  source 1..255: mol_type = other DNA
atgaatagtgaggatgtcatagtttacttcacagcactagttgctattggtatagttgttgtaggcttgttaactaccgtcttccactcttcggtgattgcccctatcgtaatcattggaattattctcagcatctttgtattgtgcactaggtcaaacttttcacataaaatagaatccattgaaaagatatgttttgtgataacgttaatcgctattatttgttcttttatcctgctttatagaccaatgtaa

SEQ ID NO: 73077 - DNA, 306 bp, synthetic construct
  source 1..306: mol_type = other DNA
atgttagattatatgatttacatccttgtctttgctgtaggctccattctgggtttactttacagttacaaactacatggtgaaccttatgttgtagacacagagtttaatgtcttattggctgtggtttctgtcgccggttggtgcttgggcttcttaagcggtaacataattctatcagcgattgggttcctcttggcaggatttgtgatggggggaagaccaggatatggtaggagagaaactgctgttggtttaatagttgcaatcgttgcctatctgctattgaagtgtggcatgttgtaa

SEQ ID NO: 73078 - DNA, 450 bp, synthetic construct
  source 1..450: mol_type = other DNA
atgttagacgctgtcaaagatgctgtccgaaagagctcaattcacgtctgtatagtgaactgtgggggttgcaatggctgtgacgtggaagttgttgcattactttctccaagatatgatttggaacaatatggtatctacgttcagaataaccctcgtgaggctgatgtcttgttgttaactggtgccgtaacagaacaatggattcataatctaaagagagtttacgataaagctccagaaccaaaaatagtagtagccgttggaaactgcccccagtccggagacgtatttgcccaagaaggaggccatgttcatgcacccgcatctaatttcatcccggttgatgcggcgattcctggttgtccacctagacctagtgagattctcgaagctatactgtcggtgggtccacaagctattgcagataggggtagggaagagaagtaa

SEQ ID NO: 73079 - DNA, 636 bp, synthetic construct
  source 1..636: mol_type = other DNA
atgagagctaaggagttaatggataagaactttgtctaccttaatgcgaatgatagtgtaattgaggtgtcaaaagtcatggaagaaattagacgatttacttgtccagtggtaaatgacaataagcagctaatcggctgggtcacctctttcgacataacgaaaggtttgagggaaggtaatgaaaaaatttccgatataatgagcggttatgaggagattgggactgtgcatgccgacgatcctgcaagaaaagcagtaattttaaccgcaaacaataaattcgtaacagtcccagttgtaaacgatgacaagcaaatcataggtatggttcgcgcttgcgatatagttgaattgctgtccgaactctacgatattaaagtttcaaaattatatgaagccatgcaaaaccagctgaagggagttacttgggaagagttaatggctgcctctgctcttgttagccaaaaaactacaggcgttaagatttctcccgaagcatatgaagaaaacataatgaatagtacgtttggagaggcgatctggtcgacaggtgggttggaaaagttctttgctggtctaatctcagtgggcgaattggtcattgctcgtagagttggaaaagcaagaaggtaa

SEQ ID NO: 73080 - DNA, 642 bp, synthetic construct
  source 1..642: mol_type = other DNA
atgaatttgaattttgactttaccgaaaaacgtgtcattataactgcatttttctgtatggctttcacaattgcaaatttaatcacggttaaagttatcaatattggatttctcggtatggaaacccctgccggggttctaatctatcctttggtatatattttaacaaacgtaatcgcagatgtttatggtgaaaaaatagcgcaaaggacaattattttaggtctatgcgttgacattttatttgtcttcatgacaactttgatattgttcctgccctccccagcgtactacactggagattcaagcctggcctttgtctttacccaaactccaagaattttggttgcttcttacattagttacttgatcggtaacttcgtgaatgccagaatcactgctaaagtaaacgaaggtaaagaatattcatctaccaagaaccttggtattcttgctttcagtgagctaattgataattttgtctttatcggccttgcctttgtgggcgtgttcgcagtgacggatattttaataatgatagtttctcattggatattatcgttgatatggtccgcaattgctcagccatttacaaaaatgactgtaaagtgggctgaaaagggaaagccggcagaggcttaa

SEQ ID NO: 73081 - DNA, 366 bp, synthetic construct
  source 1..366: mol_type = other DNA
atggaattaaaatatataatagtacttttcgacggtgagtttatgaaattcaagagcaagttttttatttcattgttgattatttttgttttgtcgattgtggccgtccccgctagtgacgttaattctacggatttttctcagctaaatgataccgtcctagattcaagtttcaatgataatttatccactgttgaaacttccaacaactcgaaaacagtaaataacacaaacaatggcgatatggtgcaaataatcaaaaccaatcctaaaatcactgttaagtcaacatacttaaaaagtaaagacaagctcgaatttaatttcaagaacgcatctggaaacccactgaagtctaaaagctaa

SEQ ID NO: 73082 - DNA, 1572 bp, synthetic construct
  source 1..1572: mol_type = other DNA
atggtcttcatcggtaacaaaaaatattcggtgtacactaactctaagggtgtcgctaatctcaacattaacttggttgctaagacgtacaaactaaccatttcttttgaaggtgatgataattataatgctgtcaataaaataatgtacttgcgtatctctaaactatcaactagaatcacttgctataagaactttgtagttaaaggaaataacttgtacttctatttgttcgattcttattacaatccggtctcatgtaaaaaattgattgtcaagtacaagggaaagacagtgactaaaacctcaaataaaaatggcagaatttcgtataagatcaaatcatccggatctaagcattccctacacgttaaatttaaaggtgatggtcaatttaagtcatcctcaaagtaccataaattttatataacaactttttcaccattgaaaataggcaactcgaaacttttaactaatgggtatttaagaatctatctgaatggtttaaccaaatcttcaatttctaagaaaaccattgtaattaaagtcgcgagcaaaaaattctcgaaaaaatcctcttctgaggggattgttgtgctgaaaccaaacgtatgtgctaaggcatatactgttagtgcgaagttcggcaagtacgttgtttataaaaaaatgaagtgtattgaaggcaacgtgaaagatccattgaaatataatatacctacaaagtcaggtgtgccagacattgatgtaatgcctggaaattatgtcatgggagacaacaacgcaagatacacactgacaaaaatacaatataatgaagtgataaaaagagacagttattgtttgtttttaaacaataagttatccaagtatacgttttttaaaacaaaaaacaatcccaatactaatcacattattcagcgagaaaaatggaatgttattgaaagggcaataaatcttaagatcgttgggaagaataaagctaattactggctaagtgaaatttcagttttacttaagggtaagagctataagtatcctgaagtaaggaagactcaatctacaaactattactgcggtcccaattcagctagtgtttgcacccaggttttgaaaaactactattgcgaaaaatatctcgctaagctgatgggtacaaatcgtagggaaggtacaaaatgtcaatggataatcgacggtttaaataaattaggatttaatgcaacgtacttctacaaagcctcctttgacaatgcccttaatgagcttaagaaaggcggtgccgccttagtcttccacgcacctagacattacgtttctatcttggatatcagctcggatggcaagaaggttttagtgagcaactcctacggaagttatgataacattccaaccaaatggactaagatatcctatatgaaaacgaagttttctaaatgggaggagagtgtgattgtaagaagtaattacaagctatctgattctgtaaatgacagtgtaaactgtttctacaacagcatgggtaccaactggtatcgccatagcactagtcaaaagatggggttggtttaa

SEQ ID NO: 73083 - DNA, 1290 bp, synthetic construct
  source 1..1290: mol_type = other DNA
atggttgaagaaaatagtaatatgctactcggggttagggataagcctcctgcgcttaggtgggttctgcttgctatacagcatgtctgtgccatgttcggagctaccattttagtgccgatagttgttaacaccactgcaggtgcagatgttttatcaattccagtagcattagtcacatctggtataggtacattgatctatcttgtgtgcactcgtggcagaagtccagtgtacttgggaagctcgtttgccttcatagctcctatggttgctgggtacgcattggctggtaaatctagcgtattttcagctttgatgctagttggtttggtctacgttgctgtatcatgtataattagaatttccggtaaggcctggattaataaattattgccaccagtaattgttggtcccatgattatggtcatcggattgtccttagctccaactgctattagtgaaatcggtctggatttagcagtagtaccatggaaaaacctggtcgttgcattgattgcattcttaactactgcttttttggcagtgagagggaaaggcattctgcgcgtcatccctttcttgataggcattattgtcggatatattgccgcggcggctctgggtatggttgattttactcaagccttaactgccaatgtggttgaaatccctaaattctacttgccatttatgaattataatttaaactttgctgcggtccttacaatcgttccaattgctttagtaacaatggtggagcatatcggagaccacaaagtcttgagtgagatcattggtcgagatctaatagaagatccgggtcttgacagaacgttgctaggggatggtcttgcgacattccttgcagcattattgggaggtcctgccaacactacgtatggtgaaaacacttctgttgtaggcatgacaagagtggcctctgtttatgtgattgctctagccgctatcatagcaatcatatttgccttctcaggacatttgacctcccttctcaccgcaattcccgctcccgttctaggcggtatatctgtattattatacgggtttatttgtgtaaatggtctaaagatactcattcacaatcaagttgactttaacaacacgaagaatgtggttgtagctgccaccatgctagttttaggtttaggcggagcaacattgtccgttgtgtatggcaatttgtctctggctatgtcaggaatgtcgctggctgcagtcatcggtgtcattttaaatttagtaataccggaggaaaagcatgaataa

SEQ ID NO: 73084 - DNA, 993 bp, synthetic construct
  source 1..993: mol_type = other DNA
atggtctcaaaagaatttattgaaaaagagtggattaaggcatataatgcccttaacccttttcttgatgttaacggcgcatatgaactcagaaaattattatgcgatttaagaaataatgaaaagttcatatttatctcagacaatgtggactatacctgtatcatcgaacttgatgaattaaaagacgacatcccaatttttaaatatgcatcagactgcttcaaaatttttggcatttttagtaaatctcaattgagcaagcttcacttcgcctctgtgtacgatataattgtttatagctgtgttagtgagctgaaaagagatttatcctacaatgagagaaaaaaaatctattactgcaacttaattcataagttgacattgaatcaggatatttcatctaatttcaaccagaacttcaaatataataatgaactattcaaccaaatgaagaaaatcaggtggaatagttctgcaaataagctaaaaaacattatatacagagacttgatgggtacactcaccctagaattaaatactgactcaggagttacttcttcgtttggggaatgtgccgagtatttggcgtgttgtaatgtatttaacgataatcgtctggaagtaatgcctgatgatgtggtcaagtcgtggctattaacattgaatctatttttaatggatttacgcccctacattaaagattttaattccgcttccgatatgattgctgatactggaagtgagttcaagccgatcaatatttcggaaggtcaatctaacaacaaaagttcctctataattcgaaaggtcttagcgggggttttaagcataattattgtctttctgttgcttatagtaatgtcaacgatactgatattgatctttggagatgctttggataacttcattggtctactgaggccagttggtataatcggtttggctttggctgcagctttgggtaaaaagatatacgacaagcttgtttaa

SEQ ID NO: 73085 - DNA, 993 bp, synthetic construct
  source 1..993: mol_type = other DNA
atgttcgaattttactatgagaaggatattcaaaagaatttcggcgatttggataaatttgacgatgtccttaacttgtttgaacttaaaaacctgatcaatgatttcatcaataatgagaagtatgttttcatcattgaaaacattgattttgagatgttcgaaactatggaaaaatctagaaagtattctacatttattaacaatgcttttaacggtttaaagtcatttaaatactggattcagccctcaataatgaactttaattcatttactagtgtgtattctataattgtttactcctgcattattgcttacggtagaatgttaagtaatgatgaattagaatcgatcatcttttcggactttccaattaaattaacgttggtcatggatgatttctacaacataaacaatgttccactattggacaaagatttcttcaggacaatccgtgatgttaaactagataaatcagcgaaaaaactggacaagttcatttatcatggcttcctccttaatttagcagaacctgggaatcattatgtagctgtagtagttgagttttcatactgtgcaagctatttttccagatgctatgcctacagcaggaagaataaatttgttacaattaatgacattgctgacggttggattttaacctttaaactgtttttgaatgacataagaggttatatagatggtttggagtctaactcgccgtgtgctatcgtcccttctctaaagtcacacaaaaagattaaagttgaagaagaaaacaatggaagctttaacatcaaaaagataattgccatattcttatccatattgttcttttgtttccttatattggtggtggaagatatttcctacatcctaactggaagttattattactctggtgccccaaccacgcgatatgcaatatttggatttatcttatttttaactagtatgttctactctttggtcaaaaatattctcaagttctaa

SEQ ID NO: 73086 - DNA, 990 bp, synthetic construct
  source 1..990: mol_type = other DNA
atgtttgactacaatttcaaaaagagcatcgagaaaaactttaatgaattagagaaattcaattatttgaagaactttaatgaacttaagaatctcttgctcacaatatctgaaaacgaaagatacattttcatatcgaaaaacattgattttaatgcgcaaccgttaatggataaacctaaaaaccactcaaaatttataattaacgcttacaacggtttggaatcttttaaatactggatcaaactttcaatcatgaattataattttttcgttggagtgtattccatcatcatgtatagttgttcatgttcttacggtagaccaatggatattatcgagtttgaacatgttctaaattcgaatctgccttataaattaacggtatacttggatgatttcgacaaatacgatgatttttccagtctttcagaagaatttttcagaacaattagagacatgaagctagataagaaggctaatgagattgaaaagataatttaccgcaagttctggtcaaacttgactattaattatggcactgaaaaccgagtggacgtacagttcgcttattgtgccaactacctatctaggtgctatgcattcaatagggggagaaacgttgtctctgtcgaagatattgctgatgcctggattttaaccctaaaactgtttttaaatgatttacgtccatacattagaggtttagaatcaaatagcccctgcgctagtttaccatctgtaaattcttacaagaatattgaggttgacaacgataatggttcggtcaacgtgaaaaagatatttgcaatattgttgtccatattgttcttttccctgataattatggtttttcaatataccgccaacttgctgactggtgactattattatccaaatagccctcaagaccgttatgttctagcaggcatttttttattccccacaagtatgttttatggaataatcaaaaagattcttaaaatctaa

SEQ ID NO: 73087 - DNA, 993 bp, synthetic construct
  source 1..993: mol_type = other DNA
atggttcagttcccccaaaagacgattgatgaatggatcaatgaagattatgaaaaactggacgtatttatggatgccgattctatggaggatctccgtgaattgattttaagcttcaaatacgacgataaatttgctttcctttccgagaatatccattatcagaccgatattaataactattcagataacaataatttatatttggatgcaaacgacgttctaggagattttggttttatttttagtaattctcacctatcatctgtatgtatcgactccttatttttcgtgattgaatgcagttgcattggtgaactgagaagggaattgtcaaatattgagaaggaaaaagtttactacagtgacttgggttataagctcactctaggtcaagaaaacttcttaaagataaagaactatgaagtaatcaacaaaacttttttcaaaaaacttagcaaaataaagtggagttccaactccaaaaatttggataaatacattaagaacttctgggacactattacattacaatatgatacatactatcatattgtcagttcatttagtgtttgtgcaaattactttgcctgttgtagagcattgacctctggtaggctggaggtgtcgaatgaaggggtaattcaatcgtggttattaacattaaatttatttttaatggatttacgaccatatattaaggactttaattcagcttctgccatgatttccgatactggaagcgaatttaagcctattaatatctcggaggggcaatctaacaacaaatcttcatctataatcagaaaggtcctagcgggagttctaagcataatcatcgtcttcctgttgcttttcgctatgtctgcaatactaatattgatttttggcgatgcggtggacaattatgtcgattcacttagaccagttggtataataggcttggctttggctgcagctttgggcaaaaaaatatacgacaaacttgtttaa

SEQ ID NO: 73088 - DNA, 960 bp, synthetic construct
  source 1..960: mol_type = other DNA
atgaagcaagaaaatacctattctccagttagttcattgttttcaaagcaattaaacctgtcggattttggttttgaaaaacccgctcttaaaaaaattaaagagattaacaaagagatcaagccgaataaactattgaagttcatcaaatatacctttaagtactcaaaaattgttttgaataagtattctagtcatttttcgaagcatgatttcacccaacctgcattattcacacttttggctgtgaaaatctacacaagatctacgtacagacaaataactgatttactcgaactttctgacaaaattcaggaacatttacacttgaagaaggtcccacactatactacactacagaaattctttcaaagacttccaacatcaatattacaagaattaaacaaattaattttgcaaaatcatcaaataactggtaaaatcattgctttggatggaagcggcttcactaatgattacgctgacaagtattatgctataatgaggcgtaaggaaagaaagagctatattaaaaaccacatttccatcgatgtagatactcggctgatactccatttcgccgctcaaagggggccaagatttgacacacgttttgcaatccctgcgatacgtaatataaagaaatataacccaaagtacatactagccgaccgcgcgtacgacactgaacctatcaggaaatgtattaacgaagaagcaaaagcagaggatcagattcccttgaaaaccagggccaaaaacggacattaccgattgaaaagtaaaaagcaatttaagcaagaaatatattccagacgaaacaatgttgagtccatcttcagtgtaattaagagaatttttaatggtacgaatagatctagatccttacagctgtcaaataaagaaacgaaactaaaaaatacaatttataatatttacagatctactcagattcaataa

SEQ ID NO: 73089 - DNA, 1275 bp, synthetic construct
  source 1..1275: mol_type = other DNA
atggtcgtcaaatacttgccaagaatattggatgatgatctcgaaaaatgtcttacaatgattggtgctattcttattgttggaccgaagtggtgcggtaagacaactactgccgaacaacatgccaacagtgtattaaagctacaagacaaagacaactacaaatcaaacatgatgtgggcggacatagaaccctcccgcctgttgaaaggtgacaagccacgacttatcgacgaatggcaggtggctccagtattatgggattcagttagaacttcggttgatgaaagcgaagattatggtttgtacattttaacgggttcgacagtagttgatgaagatagtataatgcactctggtaccggtagaatccataggatgttgatgaggccgatgagcctatatgaatcgggcgagtccaatgggcaaattagtattatggatttattcaacaaccccgacatcaacattaatgaatgtgaatccgatctgacaattgatgatttgatatttgcagcctgtcgtggcggttggcctgatagtctgaaccaaaaaacccgggagggcaagctgtttgtcgcatataattatttggaaaatatctgtaatactgatgtctctgccgttgatggggtgaaaagagatcctgatagagtaagattactattgcgttctcttgccagaaacaattctacattggctaaggaccagactattattgatgatatgaatgctaatttcatggatataagtaggccaacgtactattcttatgttgatgcattaaaaagattatttgtaattgaagacaacaggggatggtcacctaacataaagtccaagtcagcgatccgatcaggaaataagaaagtgttcatagacccttcaatcgcagtcgctgctctaaatgctaacccagagtccatgattaatgatttgaatacgttcggtttcatttttgaaaacttatgcattagggatttaagcatctacaccaattctcatggtggaaaagtttcatattaccatgacaagtctggtctcgagatcgactgtgttgttcacctgagagatggaagatatgctttaatagaatgcaaactaggcaatgatggtatagaggagggctctcaaaatctacttaaaatcaatggtttaattgaaaagaatgacaaattggacaatcctacatttcttgcagtgttgaccggtggaaaatatgcatacactcgtccagacggggttaaagtgtttccaattggctgtttaagataa

SEQ ID NO: 73090 - DNA, 222 bp, synthetic construct
  source 1..222: mol_type = other DNA
atggctgagactacagacaaggttattgtgattgtcggctatttgcttgcgatattcatccctatcctaggtttgattgcaggaattgtattatactttgttaaaaaagaagatccattctaccaaaaacatgcaaagtatattattatcgtttctatagtcgtatgggctctgtcagccatatttgtggggatgctcaatgttggtttagatggtttttaa

SEQ ID NO: 73091 - DNA, 699 bp, synthetic construct
  source 1..699: mol_type = other DNA
atggtattcacagacatcattgctttaattgtggtttatatctatgtagctattatttttgtagtggctgaaatggttttgaaaacaagaccagaaatttcaaggaaatttttgcatatcatggttggtaatatgatatttgccatgccattttttgcgaatccgtggaacatggtttggtttttaaccctgcccatcacaatagcactcttcttcttaactgattactcgccaattaaaatagaaaacagcgtcactgagtctggccacgcattgggcttgtttttctacgctgggatttggactatattgattgcgatatttacgataatagctcctgctagtgactccaagctgtttctttggatcgtcgcactagctattgtccctatggtctatggtgatggatttgccgccttaattggtcaaaagttcggtaagattaaatatacagtatttggagggaccaaatctcttgaaggatcacttactatgttcgttgttacctctgttatgggtgtctttgtgtggatggtattctactcaatcggttgtacgatgcctgagtttaatattgttagcatcttggcaatatccgccgttgcaacagcctgcgaagcattcagttacggtggcattgataatctaactgttccagtgatcacttctatattatatttcctagtggctattttataa

SEQ ID NO: 73092 - DNA, 420 bp, synthetic construct
  source 1..420: mol_type = other DNA
atgaaagtaaagctgattgagaaatttgcgttaggggcttttgtaggttgtttcattgtgatgtgcgtcatggttttaatatctctttaccaaggtcctcagaatattagattctccggcattgatataattaatagttttttcgggagcatcgttgccggttggggatttactttctcaggatttatctacgataaagaagatttgccactaacatttcaagttatcatccaaatgggtgtcggcatgacgatactcctattaatcgctatttatcttaaatggatgcccattaacttgggaatcggtccaatagtgacctggattgcaatagcttgtatatttgccattattttctggttcggtttttatatttattattacttagttgcaagggacttgaataacaagttgaagtaa

SEQ ID NO: 73093 - DNA, 1779 bp, synthetic construct
  source 1..1779: mol_type = other DNA
atggataataagaagatatttctgtccttcatattgtttatcctaatcgcaatttctgtcagtgcagtctccgcagtggacgctgataacgctacattggccgaagatgcaataccgaccgatgcggatgttgtgcagactaaagttaataacgccaattcaggagacacaattacattggaagacaagacatatgattttgctaatcaaactgtaacaattgacggtagggataagatcaccatcagagggactggtaacacgattataaaagggcatggcggccaaaattcaaaaacaggtgccttatttatagtctcggaaagcattggtgtcacttttaaggatatcaccttcattgacaccaacccaaataataacttcacttacgacggtaacgtggaaggatatggtattacctttgatggatcaggtgccgagaacggtgtggtagataattgtagctttgcagattttaatactgcggttaatgtgaaatcgtgtaattacgtaacggttaaaaactcaaaattctcaggtggttatgctacaaaactcatcaacgatccaactgtaaacaaggaaaagggctctaaagttgtaagtgctgggggatctttgttcttaagcgttttgaactgtacctttgatggaccaatgctagatgcagtctctatctatggtggcagtggagatgcgaaaataattggcaatactttcaaggataacgtctatgctatcttttttggtggcgcatctactgagggcacgttcattaatgacaacactttcattgaatgcggtcagtttgttaaagacgcaaatacgacatggggaggataccctgtaatcagcatagagaaggcttcggattcagtttacatgaataacaacacgttctatgcagttaataataataaattaattgcagctgaatctgctaacactgcccatggcgcgccaagtactctgggcgatattaacatcacaaactccaatgtaaatcttgctaatgataatgttgttgccgggtccgtcacgttcctacacatattaagtcgtacaggagacatcaacccgaaggcgcctatcaccctaacaggaaataaatatgccaaaggtgttaaagcagttgttgtatggtacaatgactggggtgtcgaagactcagagaatattgtgataccccaagctcctgaaccaacacctgctcccgttgctgtatcaacgtctatatcttctgctaatttggctatttacgccgggaactccgggaagataaagctcactttaaaggatgcaaatggtgttgccgtggctaacaagaccgtaaacattgtaattgatggtgtggctaaaactgtcaccaccgatgataatggtattgccattttatcggtgaaatattccaactctggaacacattatgctacattagctttcactggtgacaatgattacactggatcaataaagacagttaaaattagcgtacttaaaaaggtcactgcgttgaccattacaaagaagacatttaaagtcaagactaagaataagaaagtcaccactgttctgaaatctggtaaaacagttcttaaatacaaaaaggttactttaaaagttaaaggtaaaacgtacaccgcaaaaactaattccaaaggtattgctacttttaatattaaaatagccaaaaagggcacctttaaagcattgacaaagtttgccggtgacggtgcttacaaagcagcaagtaaatatagttatgtttatgtgagataa

SEQ ID NO: 73094 - DNA, 651 bp, synthetic construct
  source 1..651: mol_type = other DNA
atggacttgattggtgggtacttattagtaattttactactatttactgcaaatattgctttgatactgggcgattataaacttgacaacattaaattggtcgccttatcgtccatctgtttcatcgtttcatttatattgatgtatgcttcgagcttcttgaatgtgtccttgtcttttttaattgatactttcagttacgtcttttttatcattttccttgcccttgttgttgtaataattaagtatataaagaataataactttaaacacgcattatacctaaccttagttacattcttgattacaatatttctgtttgcttctcagtcaaatctgaatgtctttaacataatcgtgtactctctatttatcttcatcatcctatttgttgtttatcaactttcaaaattgttgcatcatgccaaaatgcaatataatgtaataacaagtgaatacatgtttctgttcagcatagtaatctttattttcgctttaacttacgattccactaagtctctcaactatacctcattcaaggcgtttctcattttaacgccaacgtatcaattaatttatgtgattattgcattcgtggttattttgattattggtgtctttataaatgagatcaaaggaggtaacagttaa

SEQ ID NO: 73095 - DNA, 642 bp, synthetic construct
  source 1..642: mol_type = other DNA
atgattatacagggaaccgagacacttacatcgattattcatatattttccgagagcttattaacacccgttgttgtgttgcttgttgtctcaggagtaattatcattctggctttggggggtttgattaatgagtatattagtagaaaacctatctcttcaaatgatttagaaaacttagtcaggagaatttcattctcgaacaatgtggatcaaatgaaatctgaaatcactaacagcaatttatttaactaccagaaggaaattttgatccgaattgctaataactatgacattggttgtgatgccagaaaggcatttgctagtgaactaatatctgcggaagaaacaatactaataaaaaaaacgaataaaactgatattttggtccgtgtgggtccgagtttggggcttctaggtacgttaattccattgggcccaggtctggccgctctcggaacgggcgatatagcgactcttgctcaatctctaactatcgctttcgacacaaccgtaactggtttaaccatcggcgccctcgcatttgtagtttccaagtacaaaaagcaatggtatgaggcagaattgatagacgttgaaaccctggcagaaactgaattagaagttatcaataattggtaa

SEQ ID NO: 73096 - DNA, 300 bp, synthetic construct
  source 1..300: mol_type = other DNA
atgttgagaaaaaaaagaaggatttcggaatctgtcgatgacgatccaatgggtggtctaaacaatttgtcagatgcgatgcttgtattagctttgggctttttaatattcgcaatcatggcattatctgttaatcccgacatgattactgagcagacccaaacgaaagaagtttccacagccaacacatttacccaaaattatactgatgctgggggactggaagatagtggctatagtgaagtgggtaaggtttacgaggaccctagcactggaaagctcgtcatggtatcaggttaa

SEQ ID NO: 73097 - DNA, 378 bp, synthetic construct
  source 1..378: mol_type = other DNA
atggaaaaacaaagcaaaattcttattgttctcctgatcgtttttttaatatgtgttggtgtgttctggtttcaatttaacaacaatgtttcaacattcatgattgtcaatgaaactcatgtaactgaaaacagttcgttttctgggatgttagtcgattcttacggtaatggcgtagctaatcaaacaatagcctatcacgaaccaggtgggaatgtgggaaccctaactacggatgaaaacggtgagtttaccgttgagttggctaagtacttgtccaactcaacaagtgacaattattatggtgatttcaaattctctggcaatggcaagtatcagggatgcgcatacgaaggtaatgtcactgtaggaatctaa

SEQ ID NO: 73098 - DNA, 348 bp, synthetic construct
  source 1..348: mol_type = other DNA
atgaagggtgaagtcttctatggcaaaggtattagagaattggaaggggaataccctgatttatatgagctagtgacggacattaatgatactgtttggaatggtaaggtattggactacaagactcaaaaactgattgcaatcggtatcaccgcgtctcgtgctgatccaagagccataaaaaaacaaattagaagtgctatagaagtattgggaattaccaaggaggaaatcgtggatgttctaagggttgtcttattaacaagcggaatgcccgcattttccaaatcacttcaaatactcaactcggttacagccgctattgaagaagagaaacaggaagagtaa

SEQ ID NO: 73099 - DNA, 933 bp, synthetic construct
  source 1..933: mol_type = other DNA
atgaatagtaacaaaaaattcttctcaagaataggttttaattacttaatttatgccgtattttcattagttattacgatgattttagccaatattattgcatatacatctccagagatccttaacaatataaatacgtccactaccattaccgctatatgtaactacattttgccattacctgttttcatatatttgatgggtaagttggattcgaagaaactagaaatccataaaattaatgctcgtacatttttaaaatacctctgcattacctttactttgatgtggattgggaatattatcggtgttatcatcactaccgcccttagcggagctattcaaagcgacatctctaaccccattcaagatctgattaactccactggaatctggttgaacatcgtgctgataagtattatcggacctgtttttgaagaatttttctttagaaagctattgattgacaggacaattaagtacggtgcaagaacttcaatagttttgtctgctgtcatgtttggtctgttccatggtaatttaaatcagttcttctattctgcattaataggtggcttttttgcatacgtctatattaaaaccgggaagatcacttatacaatactattacacatgattattaacctactgggctctgttgtaagtttatttttaaactcgtccgtgactaacctcatcaccggtacaatcaatccatttgatttaattttcgtacttttgtacttggcgatacttataattacactgatcattggtttgactaaccttcttaattataaacaagctaagtttaatggacaaaaaacggaaatatcattgcagaaaccgttaaagactatattcctaaatctaggcatgttctgttttatcatattctttacaattaaaatggtcttgcaagtgataaattaa

SEQ ID NO: 73100 - DNA, 2130 bp, synthetic construct
  source 1..2130: mol_type = other DNA
atgaaatatgaggtggtgtatgataacggctctcgcctaagagttagatctggccaatgggctttcacaaaagaggaaggttatggtctcgcttcattactgttaaatcagaattttatccatgaggtgctgacttcacataggaatggtagtattttgatgtattatgatgaaggcattgataataaagataaaatttttgatattttggacaagattggtttggacgatttgttcgaagctgaacctactcaaattcagatttctaaggaaatcagtgaagacttttataaaaagatagctaaaatgattctaaataggggaatttacaagttatttctaccaattcccgtaagaaatgccttaacagtctaccatgccatgaaatatatatggaacggttttgatagtttaactagtttcaacgttgatgtggcattgctggatggtgctgccgtcgctggcgcattattaaacaaacattacaaacccgccagctcaatgatgttcttgttgtcaatctccgatgcactagaggactacacattacaaaaagctaaaagcactctaaaggatagcttagctctcaatatagacacagtatgggtcgtgggagaagacggtgaagaaaaacaatgttcagccgtagagataagtaagggggataaaatcaaggttcacatgggggatgtaatcccagtagacggaaaagtaatcgagggtgaaggtttggtcaacgaagcgtctatgaccggtgaaccactagctgttcataaaatgaacgggaagacggtgcatgctggcaccgttgttgaagaaggtaatctgattgttgaagtctactcgatgaacaaagaaacaagattaaacaaaatcattcatctgattgaaaactcggaagaattgaaagctgagagccaaagtaaggcggaaaaacttgcagactcgattgttccatactcctttatagcaaccgccttgacttactttataacaggcagcccgacaaaagcattgtctgttttgatggttgacttctcctgtgcaatcaagttaacaaccccactatctataatttcagcaatgcgtgaagcctctgataatagaatgatggttaaaggtggaaaattccttgaaaattatgccaatgcagatactatagtatttgataaaacgggaactttgacgaatgcggctcctaaggttgttgatgtaatttcaatgtctaaaaagtacgactgtgacgagattcttagaatggctgcctgcatagaggaacactttgcccactccattgcgacggcgattgtaaaggaggctgagaagcaaggtttaaagcatgaagaagatcactccgaagttgaatatattgtcgcacacggtatcgtcaccgagtatgaaggtaaacgtgcagtcattggttcgagacactttttattcgatgacgagaaagtcaaagtgactaagagtcaggaaaagaaaatcaatgagaaaattaaggaacattctgtagtttacttggccattgatggcaagcttgaaggtatcatctgcattgacgatcctatacgaaaggaggcaaaatacgttatagaggaacttaagtctctcggtatcgaaaacatcataatgcttaccggtgactccgaaagcggggctcgtgctggagctaatgccttgggaataacagattacagatcacaagtccttcctgaagataaatcaagaattgttgaagaattaaaggcagaaggcaggattgtaataatggtgggggatggaataaatgattctcctgctcttgcagctgcggatgtgtctgtttcaatgaagcattcgtcagatatcgctcgggaagttgccgatatttccttattgtctgacgatttatatgacctcgtcactcttagaaagctaagtactggaatgctggataaaattaataataactatcataacatcgttgcagtaaatggttcgctgttggtcttaggtgttttgggcataatcccgccagcaacatcttcaatggtgcataacttatccacgatgttgtttggactattaagtaccaggtccgttttgactgacgaggaatatattaaagatatagaagtgaaagctatttaa

SEQ ID NO: 73101 - DNA, 750 bp, synthetic construct
  source 1..750: mol_type = other DNA
atgttagataattataaaaataagttcatacctttgatactaccagtggttctaatatttttttggtatattataactaacgcactggccttgttctcttcatacattttgcccggaccgctagatgtggtaaattcagccttagtagtgatagaaaacggtaaactcttgaccaacactattgatacattatataaagtatttgccggtttgatcttagcatccattgtcgctattcctcttggaattgtacttggatggtacaaaaccctggaagatatatgtactttcgtcatcagcattctaagaccaattccaccagttgcatggattcccttttccatcttatggtttggaataggtacgttcccggctgtgttcattatatttatgggttgcgtatttccaattttagtgtatacaatcgatggggttaagaggacagacaaggttttagttgaatctgcgcaaacacttggggctaatgactggaatatcctgagacgtgtagtcttgccttctactataccttacatcgtttcgggtttgaaggttggtattggcattgctttgatgtgtactatttcagcggagatgatcggctctagtagtggtttaggttacatgatattaatcgcaacaaacctctttgataccgggactacggttgttggtatggttgtcattggcttgattggccttgtctttgacttcgtctttagcagagctcaggataaaatcttctggtaa

SEQ ID NO: 73102 - DNA, 753 bp, synthetic construct
  source 1..753: mol_type = other DNA
atgtcaattgaagtcaaggatatttacaaaaaatttgaaactaagaaatccgaaaatctctccgtcttggaaaatataaatttaacgattgatgatggtgagctagtatgtctattagggccttctggatgcggtaagacaactctcttaagattgattgcagggctggacaccccaacttctggtgaaatcgtggcaaacggagaagttgttaagaaaccatcgggtgatcgagcggtaatcttccaacaatattcattattcccatggttaacggttcttcagaacgtaactttcggcttggagatgaccaagccgggatcgaaggaagaaaatattgccgccgctgaaaggtacttgacaagtgttggtttaatagactttaaagatagctatcctcatgaactttctggcggtatgaaacagcgtgttgccataatcagatctttgcttaatcattcacctatcttgctgatggatgaaccattttccgctttggatatgcaaaatagacatagtcttcaagagcagctaattggtgtctggaaaagatttgaaaacacaatagtgtttgtaacccacgacgttgatgaggctatctatttagctgacaagattgttattctggacaaaaaccccggcaggatagcaaacattgtggaagtggatttggagcgtccccgcaaaagagaaagccaagagttcctagctttgcaagaatcaatagtcagtcaattaaatatggatgagtaa

SEQ ID NO: 73103 - DNA, 372 bp, synthetic construct
  source 1..372: mol_type = other DNA
atgaatagggatgacttagaagattacattgaagataactactcagccgaacctgaatttccatggctgaagttcccaaattatgaagtgtttagacatgatgacaatagaaaatggtttgctctaattatggatgtttctaagagtaagcttggtttggatggcgacgaaattttggacgttgtcaatttcaaatgtgaccaaatcctaatagattctttaacgactgagccgggttttttccccgcgtatcacatgaataaagaaaactggattaccgttgctcttgatggaagcgtatcggatgagaaaataataatgttgctcgacatctcatttgagttaacagcatccaacaagaaaatcgattaa

SEQ ID NO: 73104 - DNA, 735 bp, synthetic construct
  source 1..735: mol_type = other DNA
atgatagtaatgtctattgcaggtgtcgatccttctgctggcgccggtatctatgccgatttgaaaacatttcaagctattggtgtttacggaaccggaattgtaacagctcttactgcacagaatccatataaattcttttcggcttccccagttttaccggaatacattgaggaacaaatggattcggtgttggattcttatgaagtagagtttatcaaaactggaatgttgtattccccagaaattattaagttggtctcaaaaaagatcaaggaatacgacctgaaggcagtggttgatcctgtcatggttgccacctcaagtgggaatctaactaaagaagacattgcagatgcatttaacaagtacttactgcccaatagcatcttaaccacgcctaacatagctgaggctgaaaagctaacgaaattcgagattaaaactaaagaagatgctttcaaagcgtctaaaagaatagtttgcaataacattattacaggcggtcaccttgacggcctaaatactatcaacattgatggtgaaattaccactatcaaacaagaattaataaaaacggacaatttacatggtacaggttgtaatttaagttcagccattgttgcatacctcgctaaaaacaacgagcttgacacaagcatcataaaggccttgaattatgtgtatgaaggaataaagaatgggaactatggtacattgatagcgaagatataa

SEQ ID NO: 73105 - DNA, 222 bp, synthetic construct
  source 1..222: mol_type = other DNA
atgcccattggtgcgggcatgccatttgatttaaaagatatgtcttataaaatagcaatcattttcggagctttactcgtgatctatggtgtcttgtggctgcttgctgaattgaagataattcctgcaatattatttgttatatttccacaaatcgtattgattctaatcgggatttgtattatttactttgccttcgacagaaagaagaaatattactaa

SEQ ID NO: 73106 - DNA, 2985 bp, synthetic construct
  source 1..2985: mol_type = other DNA
atgaataaaaagggatatatattggttatatcactagttttaattatgttattttgtttatcgacagtctctgccaaggatacagatctaaatgcaaatacattggaaaaaagtaatgatgtgactatattgaatgaaggcgatagcaatgttagtcaaatacattcacaacataccgttaaggttggttcagattcggattccatccaaaatacaatcgattgtatgaacgatggagacatactgaattttgagaccgggacttacaaggatatatgtatttatgtaaacaagagcattacaataaatggtaatggtgcggaactaataggttatgacactccgtctaaaagcaacactcccgaaattatctacaacgataccggtaaggggggttatgcgattggaaatttcgctactctgtacattgttaaggctgacaatgttgtcattaatggtttgaaaataaccggcggtgctaatagtacttccacgtactcgaatgccttaatatatgcaatgaactcaaaaaacctgacgttcaaaagcaatgtgttggagggatcttcttggggactatacttccagtactgcacggacggtcatgtaacaaacaacatcattaagaatcaggcagtgacgggatttctaaactttggatctgcgcgtacctcaattgagaacaacaaagtaatcaatgctaagaaccatggcatcgatgttaggcatggtacaggaccaaacgttaaaattattaataacacagtaattggttccaaggaaggtatctatttaatgcattctacaggccacgttgcagctaacaacactttaataaactgcacgatttcgtcaattagttgttacggttctaaaaatattaaattaaatggtaataagatgcaaaagtctcgtattggcgttttactcggcggagggtacgagaacatcactgttggtgaaaacatgtttactctcgataatttgccatatcctccaacattcgcttattatattgcagaagccaaatctgaataccagaatgatgaagatataatgggtacttttagtgacagttctctatacacgccgaactttgtcgcattcactggaattgacgtccctaaagacattggtataaattatgaccccatcttagaaaaaacaggcccagaatggatagttccagaaggcgcttcaagttctgagatccaaaacatgattaataatatgaacaacggcgatactctatccttcactcaaaatgctatttacaacgaaatttcaatctacacagacaaaaacattaaaatattgggtaacaacgccactctggtcggatgctcgggtattaacttcaacaatacccactacttggataatgtagctgaaaaggttcgcaaatcaactaatgagggtggctatgcgataggatacaatgcagtattatacatattgaatacaaccaatgttgttgtatccgacttaaatattaaagcacaataccctaaatatgattcgagcaaagtggaaacaacaactaatgagtataagacagtggggatttatgccgattccaattccggattggtcatcactggttgtgatgtaaccggtgcttcttggggtatcttccaacagtattgtaaaaatagcaccattatcagaaataatattcacgacatatacactacaggcataatgaactttggttcacctaatggaattattgccggtaatacagtcactgatgctgccaaccatggtatcgatgtaagacatggtacagggccgaacgtgacgatctttaataacacaatttcaggtgccaaggaagggatttatcttatgcactctaaaggccactctgcctacaataacacgatcctaaattgcaagatcagtgggattacagcctacggttctggaaatgaagtgctttttaacaataccatctctgggagtagacttggtattttgcttgggggtggttattacaatataaccatcggtaagaatacattcaagttggattccctcccatttccccctactttcgtaacgtatcttgccagggcggataataaatatcaatctgaagatgatgtcatcagaacttactccgataaagaaactgcagcagtggatgctaacgacataacggtcggatataaaaaaggtgagtttaacattaccttaattggacaaaatggtgacaaattatcatatgaggatttatccatatctattaatggtgctaatttcacagctaaaaccgacgaaaagggcatcgcagttattcctctttcattaacaactggaatttataatatgaccattaaatttgccggtaatgacaattatgcaccaataaacgtgactaagacggttacagttaatgatgaccgaattaaaaccatcttgtctgcgactagtaaaaccctttatttgactatcatttctaaaggctattcatacaaggtcacatttaaggatatgaatgggaaggcaatcgcaaacaagaagataagttttaagattgatggtaaaacctatagtgctacgacttcgtcaactggaatagctaatattaaaataaaggctacaacaactggcaataaaaaggcaacaattagctttaagggtgacgataagtatgctccagtcactaaaactctgactgtaaaagttataaaacaatcatccaaaatcagcgcttataagaagacgtttaaggtcaaaataaaaactaaaaaatacaccattaccctgaaaaacaataaaggtaaagcaatttacaagggcacggtgtatattaaagttaagggcaaaacttataaagccgttaccaactcgaagggtaaagctacatttaagattaccaaattgactaaaaagggtaaattcactgctaccatcaagtattacgggaacaaatattacagttccaccagcaaacaggtattgataaggacaagaagataa

SEQ ID NO: 73107 - DNA, 1716 bp, synthetic construct
  source 1..1716: mol_type = other DNA
ttgaataagtctttaaatattttattcatatgttttgtggctctattggtcatttcatgtgtaaatgcggccaacgacaatccaaataactctgatgatatttccaattatcaaataagttctgatctaagcaataccgaaattcaaacaatgttggataacgcaaaggaaggagaccaatttgaatttacggacagggaatacaagaatatttcgttagttgtagataaaaagttgaatatcgtctctaaaaagaatagtaacattcatactagcaataaaatagctgataaggcaagaaatttgggactcaacaattctttcggattttatttcacttctaatagtggtggtagttttttatatgggttaacaatcatatctaatagtgactacggtatcgtggtggacaaatcggataacacgacaattaaaaatgttgttataaagaacggcaatgttggtattttggttaagaactccaacaatgcggatataattcagaataacatttcaaaagccaattccaatagtatccatttagaaaacgtatctaaatcaataattagtaaaaatacaatttcttataatggcagatctggaatccacgcttccaatatatactattgtaatgtcactaacaatacggttcatcacaataagttcaatgggatctccttgtacaacaaaacaactggaaacatcattaaattcaacttggcttacgaaaaccctaatggtatttatataaattcacagtctgattttgatgttgtcaactccaatacattcaccaagaatcgacgtaatactgattatgaattaggtgctttcgaaagcggtaacggcctgctatttggtgccgattttaaaacggcaaaagagggaaagtctagcagattggaggtgaagtataatgtgttaacccataacgagggctaccaggctaaaaacaatccggatctaccaacatttaagcttggggataactggtttgactccactgacgatgagaatacttttgtttgcccaatgcttcttgcaggtattatgaagatgggaactatatctgtcaaaaacggttttggtcttcagatgtatgatacaaatggtgaagcagtcacagaatttggtaccttcgacaccaccgttaatgttaatggaaaccaatatacagccaaattcgtaaatggtaaagcaatcattgacgccaatctggacccagataaagaatacgaaattgaagtaatcatcggcgacaagcccgttaagtttacttatagaacctcatctggtgataagaatgacgaatccgactcacaaacctcaacagatggtgacttcggcataaatcaccatgattttatcgatgctatgggaaacgatgcctcgaaaggtgttgggaactcagaaaacggcacttcaagcgctcattttgcaaactcagaacaatctggcgcgcacggtactaatgcttcgggtaacttccaagattcatcggataacggtgatagtgtactcacgaatgggaacgctaacgctggcgattccagtaaaggtgaacaatctgaggagggaaaagcatacgagatagtccctcaaagcaaaatttcaaaagaaatcactgatacttccggtattattgtattaagtatcgtgtcgattctgggaatgattatttatgggtactggaggaaacctgaaatagagaactaa

SEQ ID NO: 73108 - DNA, 405 bp, synthetic construct
  source 1..405: mol_type = other DNA
atgaaagttaaatcggtgtctttaaagataagtagtaatgagaaattcgaaataattgatatcacgtctaaaattaacgaacttattgaaatcgatgaaggcattgtatccatcttttcaaaacattccacttcagctattgtcgttaatgaaaacgaggatggattactaaaagatctagaagtttcgcttgatgatattatttcagacaagtttagctattcccacgacatgatcgacaataatgcacgttcacatttaaagtctttcttattgtctagcagtgaaaatttgcctataaagaacgggagactggacttgggtacttggcaatctgtattttttgtcgagctcgatggtccaagatacgataggaccataattttgacaatggtgggtgaataa

SEQ ID NO: 73109 - DNA, 357 bp, synthetic construct
  source 1..357: mol_type = other DNA
atgcaaatgatctggttttacgtggcgattgttttagctataagtgacatattacacaccacactcatgtggaaagtgcttaacaacttttatatattattgggtgtttttattcaacaaagcacacattctacctggcagacttgggtaattcatgagattatggaagctgcatttcattttatcattttgtcaatcgtcttcctgaatccaactattggcctgctagcagccctaattcacttcgtcatagatgtatcccatacggtattgataaggaatatgggtgaattggaacacagagctcttcattttgttgttgaatcgttgttcttcattttaatctatggattataa

SEQ ID NO: 73110 - DNA, 630 bp, synthetic construct
  source 1..630: mol_type = other DNA
atgcgttacctagtccatgttcaagaagccgtttctgaaaataagaaattaatattgcttatgagcgtgatctttatcatatctgttgcggtaggctttattttccaggacattatttataaagaaataagcccaatctttgaaaagatggtgagagagtttgttaacgatcctaacagtaatctgggatttgaaatattcattaacaatatcagagcatccctacttacgtatgtgctatcagtatttttcgctttaatggcagtattttcgttgatattaaatggtatcatccttggtgctgtaggtggtgcatacatgtccgccgacccagtttacaatgggataatgtttttggctttaatactgccccatggcatttttgagattccggcgttaattttctcatctgttgccggaattttactattcaagttcatattcaaatatctcaaaacatttgtcaaaagggatgatttgagtttgaaagagatattggatatgcataaggttatcattaaacactcaatcattttattgattctgtcttttgtcctctttgtcattgcagcagctattgaaggaaacttcactggtgctttcgctaagtggattcaaaccttgttttaa

SEQ ID NO: 73111 - DNA, 948 bp, synthetic construct
  source 1..948: mol_type = other DNA
atggtaaatgttccagaattaaaacgcggagtactagacagtgttgtggatgcgattggcaacacaccaatcataaagctgaacaatctaactaaggacttggatgcagaaatagatgtcaagatggaagccttcaaccccacaggcagcgtcaaggacagggttgctgttgcaatgattgaggatgcagaggaaaaaggtttgcttaaagacgattccgtaattattgagccaacgagtggaaataccggtattggcataggttttgccgccgctgcaaaaggttacaatgtaatattgactatgccagaaaccatgtctgttgaacgaagaaagctactggcgatctatggggctgaaatcgtattgactccaggttcggaaggtatggatggagccattgccaaggcagaagagttacatagagagaatcccaactcagttattttaggtcaatttgataatgaagctaatgtggccatacactacaaaacaaccggccaggaaattttgagggatacggaagggaacgttgattatgttgtcgcaggggtcggtactgggggtactgttaccggcattggtaaagcattaaaagaagttcttcctgacgtgaagatagtcgctgtggaacctgaagagtcccaaacattggccaagggtgcaaaaggacctcataagatccagggaatcggtgcgggctttgtgccgtcaatttatgacagcgatgttatagatgagattattccagtcccttctgacgaagcaggaaaaactttaattgctcttgctaaagaagaaggtatctttgcaggtatttcttcaggagctgcgacatgggctgctttacaattggctatgcgtaaagagaataaaggtaaaagaataatcgctatcctgccggataacggtgaaagatacctctctgtagagtggttattcgaataa

SEQ ID NO: 73112 - DNA, 210 bp, synthetic construct
  source 1..210: mol_type = other DNA
atgttgaaagttaggatctggaagttacttctaggtgtcctgattttatccaagtcttttgaaaaagagattatcagcgaagatactgcaaattcattatggattgctatggtaaacaatggaatacatttgccaaaagacttgtttctagactattgcagtagactttatgaaatagattgtgagaagttcctcatggattacttctaa

SEQ ID NO: 73113 - DNA, 372 bp, synthetic construct
  source 1..372: mol_type = other DNA
atggactactctgaaaaagtaatggatcatttcgccaatccaagaaattccaggaaaatggaggatgctaatggggttggcactgtgggaaatcccacatgtggagacttaatgaccatttatataaaggttgaagataacataattaaagatatttcgtttcagacgtttggttgcggtgccgcaattgccaccagttctatgattactgaaatagctgtcggtaagacattagaggaagcactaaagatcagcagaaatgatgtcgcagaggaattggatggcctgccacctgttaaaatgcactgttcaaacttggctgctgacggtcttcaagctgcgatcgaaaactattacgaaaacaatcaataa

SEQ ID NO: 73114 - DNA, 519 bp, synthetic construct
  source 1..519: mol_type = other DNA
gtgtctagttacagcaaattgatcatctttattttagttctattgtttatatctgccgccattttcttcattgactcgtcaatggattcaattaatagaaccatgccaggtgttagtgattctatcgttaacggggataaggagtacaatgaagccgtgcaattagtcaatgacaaaagtttcgatgaagcaaagactaaagcagtatcggcagagaataactataataatagccttattaaactcaacggtataaggaacaacttttcctctgatataaacgaagttcaggaagaatatattggcactgtcattaaagaattggaacttaaaatcaatgctgtcaataacctaaaagaagctattgactgttttaagatcaactccaactacacaggaacgaattatgcttccaaggctaatgatctgatgtatgaggcgacagagtaccagcatgaaagaaattcaatagtaaaaaataattcaaatttattcaagcaacaaaactttgttatataa

SEQ ID NO: 73115 - DNA, 612 bp, synthetic construct
  source 1..612: mol_type = other DNA
atgaaatgtaagtattgtggtattgaaaataagaaaagtgccaaattctgcacaagctgtggtaagccactaaatgaaagtcccgaacctaccggagggaactctaagcttatcataattgcattaatcgctattataataattttagttggcactattggcttttttgtattgaacaacaattttaatagccacgattctgagattccaaataataccgtttcgtctcaggaaagcaactcggcaaatatccaagattccgataacggtggggacgtcaaaactcaagtgacatcatcccagaccaccaactccaaatcatgggagccaattggcagttattcaggatcaggttcaggttctaaaacaattacggtcccggaaggtaaaataaaagtggaattttctgcttatcctataaagaactacgcgactaattatttgacagtttccggatcaaatggtgagtctggtggagtagattggggttctcatagtgctgttaagactaaatcggattcattcatctacacttccagctcttctgagacatttactatcgactattatgaaacggtaagttgggaagttcatttctacagataccaataa

SEQ ID NO: 73116 - DNA, 357 bp, synthetic construct
  source 1..357: mol_type = other DNA
atgaagcttaaggtattgccacctacactgaggaaaaacaatagatacctcacagtggacgtgaaggttacgtgtcaaattacaaaagatgatttagtcgcaattgtctgggatgcttgtatccgttttcagggcgagctaaacaccgccaatttcaatttatgggttatgaaattctttgaaatcgaaaaaagagatgactattatcgatatagaagcattatcagatgccaacgcgactatgttgatgaagtaaggtcttcctttgctttgaccaacagatacggtaataatatgataagtataactactattggattgtcgggtactataaaatcatctgggaagtacatttaa

SEQ ID NO: 73117 - DNA, 762 bp, synthetic construct
  source 1..762: mol_type = other DNA
atggatgaacatgagaagtggaaaatcaaattttctcttttaatggttgttttgataatcattatatatggaagcaattacctcgtcctaggggacggtgaacatattatctcatacgtttggacccacttaggtttcattcctgtagacattttggtggtagcattcttgctggagggcataatcgaaagaaaggaaaaggaagcaatgcttgaaaaattggacatgctcatgtccacgttcttctctgagttgggtaacgatttaataactcaattgtcgaccgctaaccgacataaagcctcaacagccagtttgaaatcaattaaaaattgggatgacgaggattatgaagataagctggaagaactgaagaactcccccattgaatttacagcgaatatcgctccagaaaatagagagaagtttttagaggatttaagggaattgctagtgaacaaaagagagtttatcctgaatttaataaataaccctaatctacttgaaaaagaagaatttactagtttgattaatgctattcttcacttggatgaagaattagagcacagaaaagatctagctttagtgaatgatattgacttcggacatttaaatggtgatatgaacagggtctacaatattctagtacatgaatgggtttattatttaaaatatcttaacaagcatcacccgtacatgattgccttgatgatacgtactaacccatttgacgaagatgcatctgtctatgttacagaataa

SEQ ID NO: 73118 - DNA, 549 bp, synthetic construct
  source 1..549: mol_type = other DNA
atgatagttgtcggtattactggagcctcgggagtaatatatggcataaagctccttgaagctctgaaggaattgaatatcgaatccgctttagtgataagtgatttggctaaagttgttattgaatcagaaaccgattatacatttgaggacgtaatcaaattgtcaaacacatattttgattttcatgacttgactgcatctatcaattctggttcttttaaaaccgatggcctagtcatagtaccatgtacaatgaaaactttgagctccatcgctaacggttacggggccaatacaataacgagagtggcggatgtcagtctgaaagagaaaagaccgactattattgtgcctcgtgaaactccacttagaagcattcacctacaaaatatgctaacattatctcaagaaggtgcaaccattttaccagcaatgcccggattctactcaaaccctaagacgattgatgatcagatcaacttcgttgttggtaaaattttagactcgttaaagattgagaataatttgttcaagaggtgggaataa

SEQ ID NO: 73119 - DNA, 288 bp, synthetic construct
  source 1..288: mol_type = other DNA
atgaaaggaagcgtgaaggcgaagttaattgtatttatggttattgctttactggcattcggtatttcatctgcctttgctagtctaataatatccgattcgcctgattcatataaattgatccccatcaaaaatgactctttcgaaccaaactacattaacaaagtcccgactattcttccaaaagttgagacgaataacactaccaatataactacaaataagactaattataacatgaccaatttgaactatacaaatcaatgggttgaaacatacgaaaattaa

SEQ ID NO: 73120 - DNA, 1218 bp, synthetic construct
  source 1..1218: mol_type = other DNA
atggttatgtttagtgcgggtgacactgcttgggttctggtttgtacccttctagtactcttgatgagtattccggcagtcgctttcttttacggagggttgagcaaaaggaaaaacgtcctaaatacgattttcctgactttcatagccttttcaataatttctgtaatatgggtcatttttggttatcaatttgcatttggctccgatatcaacggattaataggtagtcccactaatttcttcttacaaggaatcggcattgatgacttatccgggtcgatcccaacattattatttgtcatgttccaatgtgcatttgcaggattgacttgtgcaataatgtcgggagctttggttggaagaatgaagaccaaggcttgggttattttcacggttttgtgggtatgccttgtgtatgtccctattgctcactgggtctggggaggagggtggctaatgcagatgggtgctcttgactttgcaggtggtgcggtggttcacatcaactcaggtatttcagccttggctgttgccttggtattgggaagacgtaagaacacatcattaatcccacataacttaggttacgctgttttaggtgccgcactactctggtttgggtggatgggcttcaatggtggctcaggcttggctgctaatgggctggccgcaaacgcgataatagtatctaatgtggcagcggcaactggtcttattgtttggacaattattgatacctatcttgttggaaagcctaccgttctgggtgccatctctggtgcggttgcgggcctagtcggtatcacgcccgctgccgggtttgttgatgtatatggcgctttaattattggtgctgtcgctccattggtatcttactttgctgtatattacttaaaaccaaagctaggttacgacgatgctttggatgtatggggtatacatggtatgtctggtgtgtggggtgcagttgcaactggtatattcgcagtgcctgccgtaaatgaggcagcaggcttgattgctggcaacgccaatcaggtggtgatccaagtgatgtccgttgtcgctacaatcgtttatgcctttacaataagctttattcttgctaaagtgttagataaagctatggatggtattagggttgaagaaagtgatgaaattggtggattagacaataatctgcataaagaatctgcctataatttcaattcctaa

SEQ ID NO: 73121 - DNA, 339 bp, synthetic construct
  source 1..339: mol_type = other DNA
atgaagcgcatcgttgcaattatacgacctgaaaaatttgaagatgttaaaagggagcttatcgaagtcggctgtgagggtatgacagtttcagaggtaaaaggaagaggtagtcagaagggcataagggaatcctacagaggtagcaatttttgcattgacctaataccaaaaacgcgtattgaaattgtcgtcaacgatgacagattggatttaattgtggataagataattgaaggagcctataccggtaacattggggacggtaaaatcttcatacaatctgttgataatgtaattagaatcagaactaatgaacatggagatgaagctgtgtaa

SEQ ID NO: 73122 - DNA, 612 bp, synthetic construct
  source 1..612: mol_type = other DNA
atgattcaaatggctaaaaaaaatattttggctttgataatacttattctgattatcattattttcggaatgaatctgtttaataatactgtaaacatctacttagatggggaaaatgtatcagttgagacacaaactttcgaagatatcgattctaactccttaaacaaggatatctgcagttatacattgaatgttatgaataataccacctccgacgtggaaactttgaaaaatggggtagaaaagctatgttaccaacatggtttggaagacgccgaaataaacatagattcatcgttaggtcatgatcagatcccaattatagtccacgtcgacggaacgagcatgcttcctacattacagaacggccaaacagttctcgtaaataaaactcatgattttgaggttggtgacattgtggtggcggagtctaaggaatatggtggaattatcaaaagagttgacaagattgatgaaaacaaagttcacttaataagtgacaacaaaaatatttcatacgagtatattgatggcgcactatatcaaatcaagggtataacgacctgggtcgatatatctgatgtcaacggtgtggttattgattactaa

SEQ ID NO: 73123 - DNA, 1203 bp, synthetic construct
  source 1..1203: mol_type = other DNA
atgtcaaatcaggagattattgataagttattgaatggtgaaatgaagctgtatcaagtggacagggaagtttcagcaaaagaggcaacagatattagaagagaatttttagaacaaaaatattctattaaattggataatatctcaaattacactctcgatatggaaagagcctctgctcgtaatatcgaaaattccatcggagtattacaattgccaatggggatagctggcccattaaaaatcaacggtgaatgctgcagtcgggaagtcttcgtacccctcgctacatcggaaggagcccttgtagcttctattaataggggtgcctcaactattaccgcgtccggtggtgccaatgtacgaataacctcagacattatgactcgtgcaccagtaatcaagtgtgaaggggtgggtgatgcgctaaaaattaaacaatggtttattgataacttcgatgagctaaaatccattgcggagagcaccacttctcatggtaagttaatcaaaatcgatcctattttgatagttggatcgtacgtttatcccagattcgtcttttcaacgggggacagtatgggaatgaatatggtaacaatagcttctgaaaagattttggacaagctggcacaagacactagcgcagttcatgtggccttaagtggtaacgtttgtgtcgacaagaagcctgctgcgataaacattgtcgaaggaagaggcaaaagcgttatagctgatatattggtgccaaaagatatagtgttaaaaaagctgaaaacaacggctgaagcaatcgttgaggtgaacatggctaagaacttaattggttcggccgcagctggaagtatgggatttaatgcacattatgcaaacatggttgcagcaatattcttggcaactggtcaagaccctgctcatgttgctgaaggttccctaggtattaccacagctgaagatagggacggggatttatacttttctgtcaatctgccggatttgccagtagctacggttggtggaggcacatcccttgaagttgctcacgagggcttggagattcttggtgtcgccggttctgataaagcccgcgaatttgcagagatcgttgcctgtactgtcctagccggtgaattaagtcttgttggcgcgttggctgcaggtcaccttgctagagctcaccaggaactaggcagaggctaa

SEQ ID NO: 73124 - DNA, 639 bp, synthetic construct
  source 1..639: mol_type = other DNA
atgatttttgattcgttctataccttcctggggcagctggtagtctttttggcaatcctaatcataatattattcattgtcatattagttttaggcgttctcatagctaggaaaaatgaaattaaatttccaagatttattttatttgttgttgattccctatacttcccgttcaaaagcattgctaactttttgaagcttgacgaatacttgattgatgacatctcaattaaagtaagagatgaattgaacaaagagaagtttagaagtatcccttctgaaaaaacattaatctttctaccccactgtttacgtcataagaattgtcctgcaacactccaaaaagagggtttgaattgtactgaatgcggcctgtgctctattggtgtcgtcaagaagaaagccgagccaatgggatataaaatgtatattgttccaggttcaagttttgttaagaagatagtgaaagagaataagttcaaagcggtgcttggtgtggcttgtcatgaagatttgaaccaaatgatgatgttgttatctgatttttgccctcaaggagttttgcttgaaaagactggttgttttgaaacgaaagtaaatattaagaaaatattcgaaaaactagactccaaatactaa

SEQ ID NO: 73125 - DNA, 3939 bp, synthetic construct
  source 1..3939: mol_type = other DNA
ttgaacaaacaattgttgctcacttttctttttgtccttgcagtgatattatctgttagtgcaatttcagctagtgatgtcaatgttacagattcttacacaacaagtgtagcggatggcgcatccaacgtctccgtgcctattgaaaactctgatgattcgtccgtgctgtctctatcgagcgaatcagatgttggcaatgtctcctctaagaatagcgaatcggtaaagtcaaacacgttatcaacaaactcggacacgaactctctgagtaataggggaaacgatgttttagaagtgaataataccgcttctccaaccattaatgcctctgagaccattgcttcaaaagatattaccaagtactataaaggaagcacaggttacactgctaaatttttggatatgcatggtaatccattgaacgggtcggacgttaagatcactgttaacggtgtgacttacaccaaaaaaactaatagcgtaggtgttgcttctctagcgataaaccttaaacccggaacgtacaaaatagtttcagaaaatctcattacagggtataagttaaccaatacgattaaagtattgtcgaccattaatgcaaatgacgttactaaggtttatactgacggaaagaagttttatgcaacctttttgaaatcgaatggtaaggctttggcgaatgcatatatcaagtttaagattaatggaaagacatactctaagaaaactaatagcaagggtgtcgctagcctatcaatgactaaccttaagaaaggcacatacaaaatggtctcttacaacaaggatggtctaaccaaaacaaacactgttaaggttgtttctaagacgagttcaaagcttaacaccaacgcctacacgttccttaaaagcgatagtaaaaacatcaaagttaccttactgaacggtttaggctacgccccagggtcaggtaagataatcaagttcaccgtaaatggtaaaacttattctgctaaaaccaacagtaaaggtgtcgcttcacttaaactcccgtatttaaaggccggtacttatacagtaaaatacaagttttctggaaatacattttatactgcatcgagtgcatctaacaaactatatattctaccaagtaaaaccgctactttcactgtgaaaagcacaacaacttttggtaaaggtgctaacacccccttcaaggttgctttaacctccggtagcgtccctctagtcaaaaaaactattacgttgacagtaaatggaaagtcatatgataaaactaccgacagcaatggcatcgtgtcaatacctattgatttgcaaaatggcaaatacacagtaacctacaaattcaacggggattctaaagtaaatgctaagaccggctcttcttccattatagtgaaggaaagaacttccactaaagttacttggaaaagtggaacatctttctatcaaggggcgcagtcttataaagttctcttgcaggattctaacgggaaagcgttagcaagtaaagtggttaagttgactgtcaacggtaagacgtattctgcaacaacttcatccaatggatatgctacatttaatgtaaatttagcgcctggcaattactcgatttcactaaagtaccctggagataattcttatgctccaagcaatggcaacgtaaaagtcagtgttgagaaaaaggaaaacacaggctatgggtactgggtttacggcgaagacatgagcaatgtggaccttaaatcattagcttccaagggcactagcgatttattcttaaacttcaaagccattgagcttcatggccaatctaaagtcgaatcatggattgctagcgccaataagttaggaatgagagttcatatatggatgcaaatattctatgaaggtggaaagtgggtcaaccccgttaagaacggaaagccatatgaggccttttttgagaaaaaaataactgaagctcaaggatatgcaaaaatcaagggtgtggcaggtatacactttgattatctgagatattcaggtaacggtgaaagtgccgctcataagacgcctggtggtgctgcagcaataagtcaattcgtggaggacgcgaccgaagcgattcataacattgactcgaacattatcgtttcagctgccttgatgcctgaaaccacctccatcttaaaatactacggtcaggattactcggtcatcagtaagtacttagacgtcgttataccaatgatatataaaggaaattatgggaagacgtcagcttggattactacaaccacaaaatggtttgtcgataattctaacggtgctcaagtatgggccggcttacaaggctataaatctgacagtaatgttacgaaattgtctgcttccacaatcaaaactgacgcacaggctgcattagatggtaaagctccaggtgtaattatatttcgttggggtgtaactaactttgtcgatttcagttcactatctgacaagtccacatccccaagtactacaggatcagtcaccattgccgatataattgccgcggcaaataacttgaaaaatgttattaattcaaagaacacaatcccggcaacagttagcgttggtgggtcatcgtactcaacggctcaatttttgtacatgatgaccgaagccgtgaagaagattaatggtggtaaaacttcctcccaaatattgcctatatctgttggcgttcccacaaatccatctgggtcattcaaatcgggtaatatcgcatccagcgagtatgtgaatatggcaatcagtattaacagcttcattatggaaaacggtcgagctccgaatttcgcttcatcctctagtttgggcactattgattatgattctttagttgaaatgtttgctgatattctaacagactacaaagataataataaattgccaacctctgtaaaagtggacaatgggacaaaatccgaagtcataacggccaaaacaatatccatcaaggatatcgttactggtgcgactaatttgaagaaatattataacgattataagaagttgccgtccacggttacggcaggtaaaattacattcaagctgtctgaatttgtttacttgatgagtaaggctatcaatcaaatcggaaagtctaacacaaaggcaattactataatcactggtataggtaatccaacaaacccttctggagataacattaattcaaagtatctatccaaatcagagtaccttaaagttgcattaaatgtgactaattatataaataaaaataaagtagctcccaactacgtttcatccagtctggggaaaattatctactctgaatatgtcgatgccttttcccgcatcctggccttttatggtaatgaaaatcgtctaccaaatacagtaactattagttattcatcaggatcaggctctaactcgggcaccggtgcaactggaactggtctgaacgaggcactgaaaaacggtactgagttgtcacaataccttaaagctaccaaaaattgtcaggtagacaattctaagattaaagatatcgttaacaaagtgactaaaggtttaacatctgttaaagataaagctactgcaatttataattacgtaagagacaatttggactatagtttctattacaatacgaagtacggtgccgtaggtgctttaaatgctaaaaagggaaattgcgtcgatcattcgcacttgttagtcgccatgtttagaactgccgacattcatgccaggtacgttcacggtaagtgtacattttccagtggaagtacgtatggtcacgtatgggttcaggtgttagtggataagaaatggacagtggccgatgcaacatcctcaagaaattctctgggtaaagtagcaaattggaatactaacaaattttcgtttaataattattattctgaactcggtttctaa

SEQ ID NO: 73126 - DNA, 177 bp, synthetic construct
  source 1..177: mol_type = other DNA
atgaaagcttgtacagtctgcaaaatgatttcaaataaggatcattgtcccaactgtggaaatccaacgtctgacaattggagtggtcttctaatcataactgatcctgaagaatccaacgtagcaagggaattgaatattaccgttgccggcgagtattgcttaagagtgagataa

SEQ ID NO: 73127 - DNA, 315 bp, synthetic construct
  source 1..315: mol_type = other DNA
atggaaatcgaatttatcgaagaaaaagaaaataagctctttaacagaaaagagataaagttctatgttgattatgatggtgaggcgacacctaagatattagatattaaatctaagctggttgctttgttgaacaccaaaaaggatttaattgtcgttgataatgtccaaccccactacggcgagccaaaagccttgggatatgctaaagtgtacgcaactgtagacgacctaaaatacattgagacgaatcatgtacttgctaaaaatgaagaaccagaagaggccgcagaagaagcagaagacgaagaataa

SEQ ID NO: 73128 - DNA, 2049 bp, synthetic construct
  source 1..2049: mol_type = other DNA
atggggagaggcttcaagttgaaaattgataaatttttattattaattctaatattctttattttgttatcttgcgttagtttagtttctgcttccaatacggttgacacaaacctaactcatgatgcaagttctgacgctaatatcggaataaacgatattgaatcttactcttctggtgttttctctgatgatgtgaaatcaacaggtaatgttattgttaatcagagaaattataagatgtatttcgatgatagcaatgttctaaagaaggagtacggcggcaaaatcatcgcgtttagtggtaagttcactgataaaggtgtaattactatcgattccgaaaatactaaaattactggtaggaatacactctttaacaatactgttttcaacatcaaatctaatggtgtgatgttgaccaacttaaactttgttttaaacaaggaatttagtgataatgaaggtgcctgcgtacttattaatggtgacaacgtcacggtctataatgttgatattgactacaacgtgcccaagaacgttaccggattcggaatctattccaatggtttggatgaaagtttatctgatgttaaactagtcaacaatactgtccggcttcatggtaatgctttaaatgatgggtataactacggggtggtactcacgaacacacgtgatgctatagtttacggtaatataattgattgtcaacttcctttgagggctgtgaattggatggctgaaatatatggcggtataagtatggatgcagtatcagggctggctgcgggctcatgtaatggcttaagactttccaataactacatcagatgtgttgtcaatggggtagcccaaggcgagccaacattggacgctgtactgatttatgcatgtcacaattcgacaatagaaaacaatacaattattgaaaatgattatgtcacaaaaaagggtgacgtcaattatttgtacggtctagacttgtatttgtctaatgatgttgtaatctatggtaacgacattcatattcgcacatcgggaggtaaagaggcgcacggtactgcttatccgattcaagtaactggacaagcagaaaatatcctgatagcatttaacaatttgagcagttacagtaacggacctaatataggtatttattcacaaaactattatggagtaactcatttggacattatcagcaactttattaatgttacaggtcatgcaagcaaacactcttgggctttggttgctggaatagaagtgcaggattccgacgacagaataatgaacaacaccattattgttgatacggtgaataagtttgaaaaggggtacaacgtttacggcataagctactcacaacgaaccgatggggatcacaactataatatacagtacaataatgtctcaaccaattcggaccatgctgtggcactgaaaggctccggcagttccaccgtcagtaattccatagtggccaacaacatactcaagggcagaaagtatggtggaaaccgtgccgcatacatcaccggaggaacaggtaatgttattattaataatactgacgggtccaggccagtccataaaatgactgatgatgagtattccgataatttgaaattttatctttcatcgccttttaagggaaacggtctgggattgggttggcttgacggtgatggtaactcaataatcggcaatggtgacagaaatggcaattcattaaataacggaaacagcggtttggtaaacaacaaggtttatggtaataaccttaattatagtgaatcgcaagcaaggaatggtgtcttaaattcaacatactacacttacggttcttcaggtacggatatcgcctcggcctcttcatcttctggttcaggtgcgggaagctcgaactctgagtcatctgacgtgaaatcctatgaggtaaccaaaaaaattaatgataatttaatacatattccaattgtaatcatggccgtcattgcattaattctactaatcatcggatacaaaagaaaagaacacaaagaataa

SEQ ID NO: 73129 - DNA, 3300 bp, synthetic construct
  source 1..3300: mol_type = other DNA
ttgaagctgaataagataatcgttttatcattattccttgtacttatctgttttattggagcagcctccgccacggaagatgtcaacgatacagcaattgctgattcagaaattgatgaggtaagtgcggttgacattgaacaatctgttgacgataatgagataacagaaattcaaagcagtgatgaatcaaataaggttctagcaaggggaacacctacgactgcgaaggactggaatacattgagaacaaaatgtgaaaaaacaacggatcaatatataacattgacgggtacgagttacccaattggcacgtacataacttttaaaaatagtgctacaattgtgggtagcgatgtgagttacattactgggggttcgacctcaaacactccctttgtaaataacaattctgctctgacactacactttatcaatgtgaaatttttaaacgtgaatgctaagaatttgttagagctcgatggtactgtttatttggacaattgcacttttgataatgttcaaactgcaaccggacacaattctgtaatttataatacgaacaatttgatgtatttgacgggttgtaatattaccaattgtcatactggttatggtgcggtttcgaattataactctggctcgaccacatcgcccgtaatgtatgttgatgactgcaggtttattaataattcggctagtgtagaaccgggtgctattaataattgtgggattctatatgtgaataactctgaatttgatggtaaccatgcaaactggtgggctggcgccattcatactcatacaaatgcgcaaacagaaattgaaaatactaactttagaagaaacactgctggatggaatggtggtgcactattcacctacagcaagcttaaaataaaaaattgcacctttgaagacaacaactgtaccactaacaacggtggtggcgcaatcggggcatacaactatggatcaggatacaatataacaatagattcatctagatttaattataacacaaacctgtgctacgcatacacaaatatctccactacttccgttggtcgtgggggggccatctcggtactcaacggtggttatttaactgtttataattccaatttcacgggaaactatgccaaaataggtcaggcaattgcagctgcaacctataactatgaaaatggaacgggtggaaacccacacattaaaatatgcaacaataaatttacagaccacaccgccactggaattgacactgtagtcatcacgggcaatgattatatattcaacaacaatgtatttataaacagttatcaaaacaccatttatacaggaacgggaaacacctacaattctgcagctttgcctggtaatctgaatagtaaattgaacttaaaaacaaaattgagagcaactaatactgaaatcttatctgactatcaggatcatgatgttgtctatgtgaatgtttcttccgataaagatgcagaagatgacaatgtgcatggtcaaagctgggatgatgcctatggtggtttggagtgttttgtaatggcaataaactaccttcataataacgggataatttatattgcagatgggcgttacaatgaggactacggctacgagtactcaatagctcatggaaactttactatgattggtcaaggtccaaagaccaatatagagaagattataacaactgtatatggaggttcggaccaaaactctacccataattttatcaatttatctttcactggtaaggactttggtataaacgctaatttcatcaattgtacatttttgggttcaatttcaatttcaaagggtctcacctatcatgaccctaatcatgtggtggaatacggttatgctcagacgtatttcatgaactttaataactgtgttttcaaggatgtcaatactacgaatgctttagttactctgtataagtatggtgctgtgaactttactaactgtatttttgaaaatattacggctgattcaatcgtttatcgaaatgatattaattattttgaagaggatggcatctcattcaaaaactgcactttcactaactgcaaatataatggtattgcggattccctagctaattttgacgatgctgttgtcattgaggattgtacttacgatagtgaagtcgctttaggaacaactgaagttaatggtcattattatataaacgctactaagcttaaagttacggctgttggcacatcaatctcaattaagtctaatgaaaataatgtcatagttaatttgacggatgttaacggtaaccctgtggctaatgcaggtataatttacagtattgccggaaccaatgccagtgccactactggcgctgacgggactttcactctttctaatttgaaggggattgtaaacatcactgtgtactattccggcaatgaatcgtacctcgcctctaataaatctgacaatttcatatttaaatacaacactgccgtctccagtgcggttaatggtgatgatatcctaatcatattaaaagatgacgagaacaatccaattgcaaacgcgaacgtaatctatacagtcaacggcatcgactacaatgcaaccacagatgaaaatggaacagtaactgtttccaatttaaagggtaaatttgccttcaacgtactgtataaaggagacacactacacacagcttccaatgcttcaaacacattcatcttcaaatatggtacaaagatcaccgcaaaaaaagtcacagccacctacaatgttgccaaaaacttagttatcacattaaaagatgaaaacggcattgcgatcgcaggtaaaaaggtcaccgttaaagtcggctctatccgcaagaccttaactaccaatgcgaaaggtcaggctactttaaaagtcagcaatcttttgccaaaaacatactctgccaccgtaacttacgctggtgatgatacacacattaaatcctcagttaaagttaaggttgtggttaaaaaagccacccttaaagtctctgctaaggctaagaaattcaaaaaatccttgaaaaccaagaaatattctattgtgttgaaaaataatgtgggcaaggtcctgaagaagactaaggttacactaaaaataaagggcaagacattcaaagcatacaccaacagcaagggcattgccacatttaagattaccaagttgactaagaaagggaaatacaatgcttacattaagttcgctggaagcaagtactacaacagcctaaacaagaaagtcaaaataaccttaaaataa

SEQ ID NO: 73130 - DNA, 5595 bp, synthetic construct
  source 1..5595: mol_type = other DNA
ttgaaaaactcagatgatgtgttgaatatcgatgttttgaaccaaaattctactgttaattatcccaggagccacaagacaattgaaattacacaggataactatgaaaactattttaatattagaaccggaaagattatcgacgcctcctgtatttcgaagggagacactttaaagatcggcaatatctccaacagggctttcgttatagatcgtcaacttatactaatgccaatctcgtctaatgataagattagtaatggttttatccatcttattaaaggaagtgacggttctactgtaacaaatcttactattaataatacaaaagatagattaaatattttaggtggaaatgtcggtcaattacacggtatttggctaagcaatagcaataataatcttatctcatataacactataaggatcgcaaacgctgcaggcgtttacgccatgcctatgggttggtcaagcaataatagaattatttacaacaatatgaaaacatatatcacctgtaatatggtcatgggacaatgtcattataacctgatttcacacaatagtctggaattgctaagctattccgatacatcggtgacaaacttaatttattttaatccttttgggcacgccgattacagtggttcgggattgtgcaaatataacatgatttcattcaatgacttcaaaggtttctctaacgggccgatgtccattctgttacaaagtgtttatgaaaatcatgacggcactgttattgcaaataacactttctctaaaggctcatacgcgatccatttatttggtaacaatatttctgtttacgggaatgtagtactcaacagtggtattgggatttctgtgtttggcagaaatttctcggttcataataacgctgtaattggtgacagtcaaggttatggtattatggcagaagcgaacggtggttcgctgtgtaacgtgtataataataacattactttcatagatgtgtataatgcaatattcatcggtaatcacgtcaaagcttacaacaactatataaatatcaaggaatacggggtgagcatatttattaagggtaactgctccaatatccacgataataggatcaataacaaacatgatgccggtatatccgtcttgggtaataataacacgataaacaacaatattattaataccaaaaatataggtatcaccctacctgccagatcgactaactgccgctactataacaataccttcaccaataataagatcaacagtgaaagttacggtatttatattgacggtttagtttacaattgtataatattggacaatattatcgagactaatagcacgatgggcatttttaaagacataactgatgaattgtccaacattgaagaaaacaacatggtaaatggtgtgatcctggattcaacatatattatcgtcaataacactaactatcataaatattttgataaatacgggcatttaacatttaaattcgaaaaaaacaaaactaaaataatattcttgaccttcctgacaaataagaatttgatcttccaggaaaaaataaatgtcattagcaacaaaatgaacaatttgctaattaacgttacaattacttttgagaccaatgccagtggttcattgataagagattttaactttattaatcacgacaaagaagcgattattctaaatggtgttaatgatgttacagtcactaggaataatattacaaatttatttagaaatggcagtttatcgaacagtgctgtattgatccaagacgtttgcgaaaatcttataatatcctacaataacatatatgtaaactcaagaacccattgctacacttacgcaatcaatgctccttccattaacccagctactcataagatgaataacaaattatctaagagagttaatattttagacaacaccataatcatgatttcttcaggtattacagaggctatttacaccgacactctatcggagagtaactttatttctaataaaattaacatcatttcgaagaattatggatacggtattgccgtttctaatatgattggaagattgtctgatatcaatgtctcaaataatgaaattgttatccatagtgagcaaatggcatatttaatcgaacttctccaggtggataattcaacaattgaaaataacaagctttatggtaagagtaacggagtctacgctataggtatatattggtcggataacatctcggttaacaataatgccatctctgtatttggtggcaatttgtctaaaatcttggaaatatctgatgtcctcggtatcggaaattcagccatagcaatacttaggaatagttctaaaattataatctccgaaaatattatctatgctaatctttcaaagacaatattcgacaatactacggatgggattataaatgcatcttttaattcatttattattgataatgagaactataactgctattttaacgaggttggcgaattgtactctaatgttgtaataaaaaacagtactttgctaattcataatttaacaaaaaaccaactgttgattataaatgatctagtcaaaatcagctcgtatgatctcaattcaccctcttccatctccataatttttaaaaacaatgcaagcaattcaattatttccaatgcatctttcatcaattcttcaattgatctaatcaatgtttccaatatcaatatcataaacaacactttcaactcgtcaaatagttgtatattaaacattaacgggggcgagaaaaatctatttgtcaataacgagctattcattaattctactgatatctccgtgattaatctcaataagactctgttaaatattataaaaaacaataatatcaaattcaatacatccaattctaaaataataacgattaataactcgaacttcaccttgattagtaacaatgtaataataggcatatccgattcattgatttttatctgttctaagggttcaagttacgataatatctataagaacatattaaatgcgaacgcgtcgtcaatatgcggataccttgcttctaatgcaaaatggagcagtattagttacaataatatcttaatcaataaatcaaccaaccagtccgctatatattactgtaataactcatctaacaacacaatcaatgaaaactatattatttcatattccctaaacgctaatgactatgcagtttcagtcatctcaaacgaaagtttatcaaatttgataatcaaaaactacctgataagttcgaatggattcaagcgagccaacttcgcagtatacgccccattcgatttggttaaagataattctccattcgacatctacgtgtcctgtaatggaagtgatgttgtcggagatggtagcattgataacccgtatgctacaatcaagaaggccattgaaaatagtttaaatttgtatgttatacatgtcttcgatggcaactacactgagtctaacattattattgataagaacttaacccttgttgccgttaatttaggtaaggttttcattgatgtgcaaattaaccaactatttgatatacttgaagacaacactttatcaatttctggctttttgattggcaatgctcacaatgtggacggaggatcagtattcattaacaatggtaagttgttcattaataacgtagttatatttaattcctcctcttattttgacaattcgcacccaatatttgaccaaaatataacttatcatgaagacaatctgattgataaagcacacacagtggattgctcgaatacaggtaagggcggagcaattctcaataacggtgaattgatcattaattcatctatcttctttaataattttgggcatcgaggtggtgtaatagcggattatggcaagacgattataaacagctctatcttctacaataaccggggaatccatggaggatgtatttactcagatagcaaaaataatttgttcgtaattaactctatatttaacaataacacagcagtaacttccatagacttttgtaaaatcatgttacattccattggttggtcaattggcgagaactatatttataattacaaatctgaatgtgatagcccaattggtgctggtggcgtaatttatacgaaaaatactagcgtacttattaaaaatagctcttttatttataattctgctcgtattggtggtgtaatagccacacaatgtgacatctttacacaactatccaattttatttctgacgtgaatttgtacatcgataactgttattttaacagcaataaggcaaatgatactagattcaaagatgatccactttatctgaagaactatgattattttaacgattataatggtggagttgtttatgggacttacaataaactatacataaatgcttctaatttctactataatcaggttattaataatggcggagttctgtatgccaaagcgaatgacggtaagataatagactctatcttcaataacaaccgtgcaggaagtaacggtggtgctttagatatttcaaagaacttccttatcatgagatcaattatttcaaacaattcagcgagatacgggggcgccatcgagtatgattcttatacctactacgggcatattcaggacaactttaacatctacaactccaccatatctaataataaagctttaaacgctggtggggcatttaacataggttcgggaaatgtctctgttcatgactcaaacattgtcaataactttgcaccttcgggtactaccataaactctcatgggatcaaatacgctattgacatgagatacaactactggggtgtattgcccaacggtcatattggccctgacgactcagtttggaatgtgaatcataacttatttaagccatggtacaaacaatgggtcgaatggaagccaaaagtcatcgaatcaaataattctggttttaactctaattctagcaaccataatccttatatcaatcctaattccaactctggtggaaacaaccataataacccaatatctaccggaagcagttcttccacgacaacgtcaattggtggagctaacgggaacaatcacggatacggtaatgggaagtactttggttccggtgatggcaacaacttgggtccgagcagtggcaatggcggtttttacctggctattccaggttataataaatataacgggcaaaatgtgaatagtaatacctcctcaaactcacacaagtctcagaatcgtggaaatgttgattccgatagcctcagtaaatcaaacagttccaaatacaaccctgatttggtgtctgctggttttacggtgaatgctgcttcctctccctcaagttctcaaagaggaatagaacgcgctagtaaggaaagcggttctttaagcgattccgcatcttatgaaattacgaagaagattaaagaggtcttttatgatgagaaccacataacgacgtttattttatttataattattatattgtttttaataattttaggctacaagtatggcgttggtaagtttgatgaataa

SEQ ID NO: 73131 - DNA, 6582 bp, synthetic construct
  source 1..6582: mol_type = other DNA
atgtcatacactaaatttattttaatcttatccataatattcctactgtttgctagcatagcttttgtgagtgctgctgatacgaatacgagcattgtagaagaaccaatggatgtgaaacacaatctttgtgacattaacaattcgctagaaaatcaagaaatttacgtcagtccattaggtgatgatgacgccaatggtagctttcaaaaccctgtttcctccatccatcatgctgtggcaatggcaaaaaataattctaaagttatcctgatggagggggaatataaaggtgcaaataacacatttattttgattaataaaaatttaaccatcgaatcgttctcaaataatgtcgttattaatggtgagaataaacacgcattttttaagataaccccctcttcttcgttaatacttaataacattaagttcattaacggatacacagattcttactcgcaattaggtattattaacaatcttggaaccttggtgataaacaactcttcctttaataacatgaactcgattatgggaacattttttaacgaaggaactttgaaaattgagaacaccaaggtgactaatgccgtttctttgacaatggctcagatattgactaacattgggaatactactatactaaactcccaattgattgagaacaacgaatattcgtcaattgatgtggtggtttacaactacaacaggattagtattgtcaattctcaagttaataatttgttctccaataagaaatattcggaagattcatataatctggcctcaattctaattaacaattcgaagttggataacatcgaccttgaagatgcatttgtttgtatccacaactctcaaatcacatttaaatctattttcaacggttgcaacgtttcggtcgacgagagtacatttctgtataacaagtctcttttttcaataatcaatgtaatgaatagtaattttaccgcgattcattcagtgtttaactctcctatttcaactaaacggtcgcatgttaatataacatattctgccatcttaagatccatatctggcaacgcctataaatgttatctttacgctccttataattggtggggtattaactcaggtccatcttaccagtacttcacagacgttaacgtgagttattgggcaataagcactttcgaatatgaatctgactatattccaatcaatcccaattccacttttacaacaacactcaataaatggagtgacgggaacagtacatttgaatttaagacagaagaatacctgccgttcagacatttgaaattcgaatcgcaaaacggtaaattcctatactcatctgcaaatatcgaaaaagtcttttcaaactatttaattggaaacaatcttgattgccaagttcatgttatcatagacttccagagattgactcttagaattggcgaaggtttaactaactataattattttgtctcaacagaagggcatgacggtttaggaaatggtactttcgaacacccatttaagaccatcaattacgcggtttccaaagtaggtaatggaaacacgatttgcttgctggaagggatttataaaggcaattggaatagtaatgttaccatcacgaagaatatcactattgttggattaggcaatgtaaacctcctaagatctaacgattatagtatcttcaatattaaagagtggggaagtttgtctctaaagaacattaacttctctgttgatatcattgattatgcacacccattgatcatcttgaacggtgggaacctgtctattatcaattgttctttctcaaatataacttctaccaatgtcatccacacctctaatgggatagaacataacggaattgttaatatatctgattcttattttgcagatatttcaggctcaatattaatagggtcggctaaggtaagtgtttcaaattctttatttgaaaagattaaatgctataggataattcaaggatacgaatattataatgtactatttgcaatttcatcttccatagaaatttatagttcctgttttcaaaacaacttgatgggtattgtaaacttgcatccatttttttattcatcctcaaaacttagatattctcaatatagtaatgcatactcaagatatgcttatattaaaaacaccaaatttgaaaacaacgtattcttcgataagaatagttattactcaagcaatggaattggtttggatatttataatgaaaatgaacatttctacggtattatcgataactgttcattcatcaataataaaggtcaattggccatcgccaccagtgtcaactcaagcatattcatgaataatttcgagtccagatatggttatagtatggtttatgccgacttaattaataattcagtttttattaacaataaaaatctgtacgaagactacaacaatgtatttatcggtaatggcatagccagtgctggatgcatattggagtctattttcatgtacaatgaagctgcgtttggtggagctattgcagacaccaaagaggcccactattgtgtcttcgtaaataacacgtctaaatatggtggtaacgatatctattcgtatagcggcgacgtagactactctagcaattggtggggtgataatcaaaagccaaactctgacaaagtctttattttcctgggcaccttgacgttgaataattgggtcataatgacatttgagtcggtatcaaattctatcattaaagcttccctaaacgctcttaataatggggaaggtaatatttgtaaaattaaccacaacatgccttctcgcatggtgtatttcaagattaatcatggaagtctgagtccagagaatactttactgatcaataattctgcttacaccaacatgacttacaacttgaatttagactttaaagtctatgcaagaattgataaccaactattggagttggatattagaaatacaaagactctcttgataatggaagacgtgatttttaaaggtaagagcaataattttgctgtcgatttaatcaacattaatggttataaaatatttaatcaaaccttagttgttgaaatcattgatgagaataacacccagaatatattcacaattcaaactgatgataacggtcacgcagaatttaatgtagactacccagttggtatttatcaggtaaacattaactatttaggtaatggttattttgataaatgcaattctacgtctataatgaagatcataaaatcgaacacgtacctcatctcttacaatcaaacctactacggcaagaataacttgtttaaatctgtattattcggtgagggtaataagaaattaagcaacatgacgataaaattcacgattatagattcgaagggtaatttaagggaaatctactctttaacaaatcaagacgccactagtgaaattattatcaatttggatgtaggtgagtacacaataaggtctgaatttttaggtgatctatggtactcttattccagcagcatttctcatatattggtcaacccggtgagttccacactaattgtttctaatgtcacactgtatggtgtgggtgatgtttataatatcaccttaaaagatattcatggctcattgatacgcggtgaaaacatcatcgtcacaataactcagggagcatcatgtgataagttcaccttaaagacagataacaatggtgttgcaaaattaactataaactatttaccgggagtttataatgttaaagctcagtttctaggtgatagtatatatgcccccactagtggtgagggagttattaaggttgaaaaaatctttactataattagcgggttccaccattgtattttaccactcaacgggatatacaccgtcgttctgagcgacatgtatgggcgacgtgtcaataatgaatctgtaacattatccttgtacaagggcaatctaataaagaaatacacaattaacacggatgctaacggtgaagctgatttcgttataaaccttgaagaaggcacttatctaacaacttttgaatacggtggaaataagtggtattgtgatgcaactaacgcggcaactattgtgatcagtaagaaggttaatttatccaacatcaatataaactcaacagatttggttcagtactacggggaaaataagtacttcatcatcaagttcaatgatccgaatgcatatagccagtacggcaaaaaaattggagttacaatatcttctggctcctggtcccaatcttacgaggtcttcactgacatcttcggtcttgcccgtttaaaaatcaatttgaatcctggagaatacaacatcacgtacaaatattcaaatagtcactataatatatttggcacatcttccaatacgatacatgtatataaaatgcctgctgttctcatagcgaataacatcgtgatgaagagtaatgaacaacaactgtacgaaataaatctcagagatattaacaataaccctatcaaaaacatgcttgtaaatatcgatattgatggtgtgaaatataattccactacaaatgatgagggtatagcgaagatattactgagcttgggtgttggcaagcatattattagttacaattttatcaatccaaattatttgtcctcaaactcatcatcggttatcctagtggtcgatagtgacaagataccttcaaatctatattcccaggatattaacgcatttgacaaccaaatattgaatttcactatacgattgtcagacatgttaaacaatagcatatcaagctccgaagtaatacttgagctttttaccttttatggagagtcaattattaacattactggtatcacagattccaacggtagaattagctttgacttgaatttagattacggaaagtatatagctaacttacattataatggcaatgctttgtatttagctagctattcaaccaatacgattaatattgaatcagcagataatcgtacaaagaccattttattcaatgtagagacaaagctaactaactcgaaatactatgttattttgtccgacattaatggaactttgcttgttaataaggagattaaattcatcattggcaacaaaacaattacttccataactgatgaaaaaggcagagcttacttggaattgaacctaaatcctaattactatattataaaggctatctttaatggggataaggattacaaatcagtttctagtttgaaaaagatatttatttccggtgaactaacgcacttgtacgctatacccttagttaagtactataggaacggcactcaattccatgcaagacttgtgaatagtaagggtgtccctttgattaataaaatcttatctatcttattggaagggaattattacaactgcaccacggatgagaatggctggattacattaaatatcgacctgaaaccaggcttttacgatgtggaatgttactactactcaaataatactgatgaaaattcttttgataaaaccaatatcaccgtactgtcgactgtgctgggtcaaagcgaggtgaagtattatggagattatccttatttaactattaaatttttagatggtgcgggaaacctaattaagaacacaagcttcgtcattgacattgatggtaagaaatactctgcacaaactaatgatgagggtatatttaattttaaccttaatctcaattccggtagtcatcttatttccgtcaacaatccatacgacggcttatttgtgacgtataaattggacatcttaacaactatttgctccaacaatctagttaaagtctttaacaacggtgtctcatatacggcgcagctccttgacagctttggaaaccccttaaaaaataaaaacgtaaagataattatcaacggtgttttgtactataaaaagacagatgtcaagggtattttagaactcaacatggacttcaatcccaaaatttaccttgtgacagttttcaatccagtaactaaagaatatattgaaaacaccgtgaaaatattgccaacacttattaataacaagaacataaacatgtatttctcgaattgtgctttttacaaggttcgtgccattggaagtgacggtaaaattgttgagtcgggggtaatcgttaagattaaagtcaatggaaaatcttacaagatcaagaccaataaagacggttatgctttgttcaaaataaacctaaaacctggcaaatatataattactgccgaatacaattcatacattgtatccaacaagatcaatgtaaaatccctactaaccgctaagaacatcttccataaaaaggctaaaaagattaagttttcatctaaattggttgatattaagggcaaggccctgaaaggtaagaaaataacttttaaatttaaaggtaaggtctataaggttaagactaacaaaaatggaatcgccacccttacgatcaagaatttaaaagttggcaaatatactataatgtcaatatggaataaattcaggatcaaaaacactattaaaattaaaaaataa

SEQ ID NO: 73132 - DNA, 5736 bp, synthetic construct
  source 1..5736: mol_type = other DNA
gtgtctaagattctgaagataaataaaataatattagtgggtattgttttattgactattttgtcactaaatgcagtcagcgcatatgataattcaaataacactgaagagtacctttcttcggaaaattatgaggaaatacttagtgcagactcttttaacgataataatattcttgcttcagcatcgtataataaaacgatttatgtaaattacactggggatgactcagggtcaggcagtcaaaacagcccctacgctacattgaacaaagccatatctaatgtcaatgactcggataatgccgttgtatatttaagcgctggcagattctccggtgaaaataatacggacttatccattaatttggctcacaggaattataacagtagtttaactattattggagcaggtaatggtcagactatactcgatggaaatgatgaatcagccattttcacatcaatttccgctgattctatcgtcactttgataaatattacgtttacacacgggaagtctgaaattggttcagttatgactacttctggtaatttaaccatcgataattgcatttttgataacaattatgctactagctctgccgcaatttatgccgaaaatacagaagatataaagattacaaattcagtctttaaaaataattatggccatgagggatgtgcagatttttactgtgaaggctccgaatcaacgataatagatattatcaattcgacgtttataaattcaacaacaccatatttatatagtttgccctcttttctgatccagtactcaaatgccaatattattggcaataaatttgaaaatataactggcgtataccactcggggacctttgagctaaaatatggctacggtaaaaggaaggtaattaataatacctttattaattgtaattatactggcaataacgatggaggcataatttacatttcaaacacctatcttaaaaataatcaatttataaactgtacttcaaaaaaagctctgatctattctttgactgaatttaatgcatatctcaaatttaagaatgcgacaatcaatggaactgaatttaaactatattgcgaggtgacagatgatttaaacaatagtgtctccacttatggagaagttcatttcttcattaatgatgaaaagataaagtccagcagatccaacaacggtactgcttcaatatctgtgattaaactattggataacggtgattacacacttagtggaacttactactattatgaaaacccattcgaagttaacgtgaagaatgcaacgctccacgttgattttaaccatgaccccctagagttgtgggtatcaaacgatggtaatgatacaactggtaatggtagtgagaacaatccctttaaaacacttaagcacgccttaaactatggtttcgaaaacacaatagatttgactattcacatgaaagatggggtttatactggcagtgacaataaagatttatcttactctaatgttggtaaactcactatctttggtgaatcttatagaaataccataattgacgcagaaaacacaaagaagattttcaactttggtgagtatctaaatgtgacattagcgaacctgaccctaagaaatacgagtgggaatgtcatttcggcttatattctaaaaatctacgattctgttattgaacatgctgattctttaaatggcgaatactccgatacctcgaaaataattttcaataatctaacttacactaacagtggtggaatatacatatacaatgcggaaatttacaactccaagttcaagaattgtaacaacactaaaaataactgccttttacggataggttctcttggaaacaatatcatacatatcgaaaacactactataatcaacaacaccgttaacggtcgacatggttcttctattgttagcatctctggcaatagtgtattgataaataacgactacattaataacactgttattagtgagaactcgaagtatatttttcaaagttattctaataaattaatatctgtcaacgaaactttcataggcaacaatgtgtccagctatatagcatactacgatatcaatggaaataacgttgaaataataattgaaaacattacttttaaaaacaactatgtcaagaccgatgggtcagggttggctatcaagaccggtagaattaagggtgcaaaatttattaataatactgctttaaataatggcggtgctattattatcttacctcattataccggcagtcaagttccgaaatgcatccttgagaatgtattttttgaaaataatagtgcaaacaatggtaaagacatatttattgagaaggccaatatcggttatgaaaacggccagttagacaacattacagtaactttcaatagcttgattacgcacaacctgcaagatattgtgattgcaaatattagtcatgtgtccggagctgttatcggtggtggcatgattgaatttgacttaaatggctcatatatgggagttgcagaagttattaatggtgtagctaagttgaattatttgggattcaccaagaacggcaactacactctgtcgggttcatataactatgagtcaaacaccaccatttataatagcgctgttgttaacgtcattcttaatccattaaaagaaaatattacttcatatgtttctgattccagaggagacgatgaaaatgggaatggttcatacgagaatccttacaaaaccattgaaaacgccttgaacgagggttataaacaatctaaggtcatttttatcaaggtattggaaggtaactataccggtaagttcaacaacaacattacgatttatgattctttgaatatcacgattattggtgaagggattgacaaaacaatcatcacgggtaataatactaaaaacaactggttcataaccgtattacatgccggtaatggatttttgaaattgatcaatatgaccattagtgagattaactataattacaaaaacatgaatagccaaaagtctgcggtcgttattgaaaaaggtgctaatgtatttattgatagcgttaagtttactaagaaccgtgggtacaacggcggtgcaatcaataatcaaggtacattgaacatcattaactctattttctataataatggtgactcaagttatggtggatctatatataacaaaggtataacaatcattgacaattcatcattcattgcaaatcatgctaaatattgttcggatatgtttaatgagggtatcttgaacatttacaattcaaatattcaagattctatgcgtaccaatggttggacgggtaacaccctagtcattggcggccttggcaatataagcatcattaattccaaaatattcaggacgggtaaaatgcctttggaactcattgatccagacgatacatatgctgataatccagcatttactatatcaattggaacgattggaagcataacgttgataaatacgaccatcgatggtcatgatgccaagtatactggacctaatttttatatcacaaataacgctgctatatcctggtcggtctctaccaatattaaaattcacaactcctcgttcttgaatttgaataacattctaaacaatcaaatggggaacttgataataaagtcatcattcattaaaaacgtctccaacctgattatgtcaacaagcaattacaatctaactgtaataaactcttacttcgcggatggaaccatatccactgaaaaatacgatatctccaacatttacctgaataataactggtggggaagtaattcgaaacctacttacaaagtcgacaatgtggatacaactccggaaacctggttaatactaacattaaatcagagcaataaggagtcactgttgaaagacattattctgtcttttaaggttactgatggtgaaaacataaccgattacaccggatacctgtatcctaggccatttacaatgtctgctataaacgctacgttagaatatgccaacggaaatattattaatcatcttatcaatcagatcaatatggcgaagaatgccactagttattatatagaagctaaaatagataaccaaacagttaatttaacgagtaatataacccataatgttactatcattgctaatgacatagagtttgattatggaactaagacaattactgtgaatgttttattcgacaacttgtctgcagatgatgagatcattactttgaaagttaacaacaaagagtactcgactaagatcaataatggtatagctatctttaatattgacacattagttcgtgggacgtatacactcaactactccatcaatgctactgaattacatgacaacgtaataaattcatccacactaattgtcaacggtatcgatccaaatattaatgcttcgtctaaagccgtgctggttggaaataacgtgacagtcacaataaccatcccttctgacctaacgggcacaataaacgtgatcttgaacaacaaaacatatgtggcagaaatccatgataacaaggctattgcaatcattcctaacttggcccaaggaaattacttagcgaatgtgatctattctggtgacgagaagtacttagctaagaatacaacattaaacattaaagtacttgagattaatatttcagcaccgaatgtggagaaatactacaagggttctgaaaaactacgagttatcgtaatcgactccgaaggtaatgcaattgtgggtcaatccgttcagattaaacttaataacgtcaactacacagaaatcaccaaccaggaagggattgtaagtgtcaaccttgacttaaatgttggcaaatactctgcgacgattttggttaatgataaaaagattaacacagaaataactatcaagtccacaatccaaggattcaatatgatcagaggatataacagtgggcttgattatcaagccactttgttaaatgatgacgggacaccattagacaatacactggtaaaactcaagatcgggaatagtatatacgaagttagaagtaatgccaatggcgttgttaaattgaacaagaaattggccattggtacatacactgtactaattacgaatccatctaacttcgaaacacaaaccgctactttaaagattgtttctagaataaacaacaacaagaacatcatcggtgattatctatctggattcagctataaggtccgcatcattggtgacaatggtaaatccgtaggagctagagaaatagtgaagttcaagatcaacaagaagacttacaatatcaaaacagataagaacggttatgcctccttgaaaatcaccttaactccaaaaacataccaaataactgcaacatacaagggtcagagcgtcaagaacaaaataaccgttaagcaaatccttaaaacagcgaaaaaaatcaatatcagaaaatcggcgaaaaagttaactttgaaggcaacattaaaaaaatccaacaaaaagccactgaagaacaagaagataacattcaaatttaaaggtaaaacctacaccactaaaaccaacaataaaggtatagctaaaattatcattaaaaagaatgttattaaaaaactcaaggcaggtaaaaaatacacggtaaaagtgacctatgtaaaagacataatcacaggttcagtcaaagttaaaaggtaa

SEQ ID NO: 73133 - DNA, 5112 bp, synthetic construct
  source 1..5112: mol_type = other DNA
atgaagttttttagaaagaagccaagaatattcttgatacttctgattgtaatgatatgcttttgtctattctcacaactggctttcgccgaaaatatcaatgaaagtgaagtggtgggaaacgcagaaatcgaaaataatttgagcagtacgaacgacaatttcgaagtttcaaaagatataggttataacgtctctaaaaagatttcaacggataattcaaacgaaaacttaagaaactctcaacacatgactctctttataattagtgataatccgggcacaaacattctggataaggctattttggagctttccaatgaaaataagataaacggtgtaaacttaattattagaaatggaaatcaagtaaaatcaatgaatgagaatgaactatcctatctgttatctgattgtgacgcttttataggtgagtggatcagtagcgatgtcgattctgtcttgacaagtgttttggtcaaaaatcctgatttgtctaacaaaaaactatttcttgtattggaacctccttccggcaatctcaactcggggtccagttcgttgaatctaattaggaataacaccttgaattataacaagatctttacaaattactccaatgaagagttaatcaattacttcaagaacacgaagaggggcaactcatactctaacattaataactatttgaccaatggaaacggcaaaaatttcgattccatttttaatcgattagttctttataaggatttgaatgataaaaacaacttgaaaaatcaaatcttgtttatcttaaactatttgggcgtcgacgtgagttatgaacaaccaacatttaccggtgttaaaaactatggtatctaccgtgatcgttggtactccttggatgagtacatttctacttttttcaaagccacgaataacaggacggtcgggattttggaaagtaagatgtatatcgaatctcagcaactaaacacttgctactcgattataaactcattggagtcaagaaattataacgtaattcctgtctttgctgatggcggctctgctgaacaattgaaggtcatggtcgaatcctggacaagcgcgggagatgatatctcagggtttctgtctaattcttctaattttgatgtttatatcgatgcgattgtatcgatggtggcatatggtgtgggtggggagaacttcacaaaagcaacctctttttttgaagaagctggtgtccaggtatttcgggcggttcactcggaccatgtgtcaaatgaacagtgggaattgggttctacgggtttaactaccgaaaaaagtgataaatggtggcacattactatcgctgaagcgcaaggtataattgacgccacattcattggcggtaattcaagttatatatcaaacctaaccggtgctcaaatcaccacttatattccgcatgaagggaacatcgggttacttgctgacagaatcgattcttgggtggatttaaaatacaccctaaacgaggataaactgatatctataatttattacaactacccacccggtaaacaaaacatcggttcctcgtacttagatacaataaaaagcatttataatatactttatactttaaaagctgcaggatacacggttggaagtttgccagtcgatgttagtgaacttgaatatctaatgcttacatgcggtataaatgtagctacatgggcaccgggagaacttgaaaaaatagctaatagatcttgcataactctccttccggtaagtgaatataactcctggttcaattcactagacgaaattgtaagaatccaagtttctaacggtactgttgcatacattggtgagctcactaaaagagccgtggagttagattataccaagacaattggtagcacaattgacgactggtacaatcaagttgtttccctactcccagatgaaaaatccgttgaagcaaaagaagtgctatccaatatcgtcagggctttaaaagactacgctaatactcattcacaagactattatagattatatttaaagtactttgatgaatttaaggaactaaacattcaaggattgaatggatggggtgaaactccaggtaatgtcatggtagtgaataaaaatggtaccgattactttgtaattcccggcttgacatttggaaacatattcgtggctccggaacctcaacggggatgggagtctgacattaaaaatctttaccattgtactgctgttgcgccaacacatcagtacttggctgcctattactatatgcaaacgagaaatccaaatgccatgatcttcacgggaagacatgcgacccatgagtggttgccaggcaaagaaattctgttgtctgcaactgactacggatcagttgttgtgggtgacgtccctcaattatatttttacatcagtgatggcttaggtgaggctattcaagctaaacgaagaggtttcgcagttattatctctcacctcacttctccaatgtcctacactcacttgtacggtaatttaacttttcttgcgaatctgataaatgattatcaaaaagcagggagcagttcagagaagaacaaaattggagaaaagatacaagatttgataattagcaatgactattcaaccaatttaggcctcaacaagagccaaataaaaagcatttctattgattcgcttatagagaaaattaatatctttctaaagtcaactcaggatacgttacatccactaggccttcacgccttaggagagtattggtccgaagaggatattgctagtaccgtttcggccatgctttctcatgactttgttttagagaacaatcagggaacacttaacttgtttacagaactttcgaactactactattccaagtcatacggtgatttaactccattcgaaagggagtttgtattgaataagtcttacgatatatgcaaggcattgatctactgggacgttaattcggtaagtaatgtattaatcaatggcaacgttaagtttaacaattctaacttctatgcttgtttaaacttggctaaaagctacataaaccttattaatcaatccatttcaaatgaactaaatgccatgcttgatggtctgaacggcagatatattcctacaggagaaggtggggaaattgttgtaaaaccatcgattttaccaacaggtacaaacattttccaagaccaatcatctgaactaccaacacaggatgcatggaactatgccaaaattctggcattattaactttggctgacttaaatgacacgactgaaaagattatcatggggatatggtgtgttgaaacagcacgcgatgacggtgctttggtttcaactgttctgtatttgttgggcatgaaacctgtttggaccaactcttcaagcgccggcttcgatgatgaaggtaaccctactggcaaaaaggttggtgcaatgcctgaggtcattaaattaaatgatttaactcgtcctgagggttggaataagaagagaatagatgttaccataatcactagcggattattcagagatctatactcgtcgcagtctgttttaatggataatgcatttagagtcgcattggcgaggtcatatctgacattgattaataacaagactttaatgaatggaaaatatggcaaggaactaagacaggccttggactgtgtcatggagggtataaattactatagggcttctaatgaggctttaaaagataattatgtcgctcagcattggattaaagactgcctatattatttgagtattggttataacgcatcttatgcaggggaatgtgccattacccgtatattcgccccacctaatggagattatggtgcaggcatctccaaattggtgtcaatgtcatggacttggaacaacacagacgaattggctcagttttacttaggtcgaatggggaatatgtactctaaaaattactggggtgatacaaatccattagtatttctaaaggcattatctaactcagacaccataataacaagccgcaacacaaatcagtatggtgtaatggataatgatgacttctttgactactggggtggtctgtcgatggctgttgaacacgtgtccggtaaatctccaaaaatgaatgttttgatgtatgctgataaggataatgcctatatttcttcgctggaagaagtcatgtatcgtgaaattgcttcaaggtacgacaatcccgaatggatcaagggaatgatgaaagaaggatacagtggggctcgttatatgtccaacaagttcgttagcaacctattgggttggcaagtgacaagaccggattcagtttcagacgatttatggaacagggtgtataatacctattacaaggacaaatacaacctgggtgttaaggactggctgatgagcggaaataatgcctattcccttatttctatgagtggaaccatgttgagttccattcataagggatattggaatgctgatgatgccaccataagagacatcgcaaatacttgggcgcaggccacagtgaaaaatggtgttgcctgttgtgattgcagctgtggtaatgtggctatgatgcaatgggccgttcagtacgtaaatcctgacattttagcacaattattgcccaaattatatgatgcaactgaaaatccagtattcttaaacaatactcataacccaaatacgaagcccgaaaacaataatgatcctcaagtagaaccctcaactccaaatcccactgatggttcttcttcgagttcaactatctctaataatgcaacgtccacaaattctaaccagcattcattaagcaacagccaaaattcacaaggtaacgcggtttctgatgtgggcgacagttcctcctccgattcaggtacttttagttctgaaggtgctgacgtcaagaaagccattgagattaaccctatcacccaacaatctgcatcggaagttggtatgagtctcctggcagttttaggtgtcatatgtttgatccttatcgttggggtcggttacttcagagataatgggaaggagaaaaaaggcagtaatctagatgagctgtttaacgagaaactctaa

SEQ ID NO: 73134 - DNA, 708 bp, synthetic construct
  source 1..708: mol_type = other DNA
atggatgtaataaacatattgtggcaactagggattttgtctgcggtcttgatattcggcattaaactagggttagctacaggactggctaatatgtcgaaaaagtatttggcattagtctccatcggttatggtggtggtgttcttatattaaccgagataagctctttcttcactgaacagatcacaggtttaatttactcttataacttcgaattttttttgatcatggccattataatgattctagcgggaattttcaccattagagaatacaaggtctttgagaaaaatactgctgcagctacttgtatggcagttgtagctccttgtccatgctgttttggttcaatcatcgtaagcattatgctagtcgctcctgctgtgggtttgggtcttctcaacttaagtgtttatgttgccgctgcactggttttaactattgtgcttacatactttgcatcaaactatcttatcaaatttattaataaaccatatcccattgttttgggaaattttatgttatttttaggaatttacttcctgttgtcagcattatttctcccaaacatcacgtctatgatacaaaatcctatggatgccattgaaatagcctccccggaatatctggttgccgtgttggtattaatgattatcatgatgttcctaggcggcttttactttaagaataatagttacttggactaa

SEQ ID NO: 73135 - DNA, 645 bp, synthetic construct
  source 1..645: mol_type = other DNA
atggttacaacaatacccgggagcgaaatactaacttctggtttgaacatgatttctcaatccctacaagttcctgtaatcatattcttagtaatttttgccttcttcgcagttgttactttaggaagtcttatcgcagagtacacatcaagaaagaaggtctcgcctgacctacttgagaagttgatttattcgatatccagagcagattctgtggaggaattgatgagtattattaaaaatgctggcatatacgagaatcagaaagtaatcctcgtgaaaatattgcgtgcagattcattaccgaataaaaccagagaaaccttagctaggaagttaattgaatttgaagaaactgaactgggcaaaacaattgaaaaaactgatatcataacgagaatcggtccaaccctcggattgatgggcactttgattccaatgggtccaggactggctgccttaggtgccggtgatgtaaatactctggctaacgccattattgttgcgtttgacacaacggttgtcggtatcggtgctggggcggtgggatattttgtctctaagattagacgcaggtggtatgaagaagatttgtcaaatagcgatgctttggctgatgcattacttgacaaactaaaccgataa

SEQ ID NO: 73136 - DNA, 336 bp, synthetic construct
  source 1..336: mol_type = other DNA
atggctagaagaaagtgtaaaaagaggttcagtgataatgaagaagatcctatgactggaacatcaaaccttgtagacgcaatgctagttattgccgtagggtttttaatttttgttgtaatatcctggaacatgcagtctatcgtgttctcagacacaagccatgatcaatctcaaagcgttcaggattctcacatgaatgttactgaggtcagtgaaggtcaagaattaaatgacaccttggattctgttgaatcctcgggtcaaggttatatggagatgggtaaggtgtacaaagatccatcaacgggaaaattgataatggtcgaaggctaa

SEQ ID NO: 73137 - DNA, 2541 bp, synthetic construct
  source 1..2541: mol_type = other DNA
atgatagttttatccattagttctgtttctgctgatgatttgcaaacaaagtatgccggcgaagtttcaggggatgttaatgtagttacggttaatccatggaccacgagcggcagcttaacatacgatatcccttcagaagctaaggatatcagaagtgcagatgtgtatgtaaatgtttatgggggcagcgccaagaatacgtacggcgcaaacgctaatgtaagtctaaaaactgccaacggtgaaaatcaaatagctaacgagtcgctgtggatagaggaaggaagtagtgacggaacgatttatgccgtgaatgatcacatcaataaatgttactctgattatcagatgcactatgacattactaattctataaaagggcttaatggttcgtcaattacaatcaaagtggacactttcaaaatggaaaataaatcgtttgatggtaagattaagttaattgctttaatattggcgtatgatgatggggacagtgatgtaattaactattgggtcgacgcaacccaaaagtggacaaaaaccaatgttaccaccatattcaacacagaaaaattatcaaacattaacggtgctaatttaatcaatgttgctctttcatcgggtgacggaagctttaaagttaatggcgaaataataggagatcctattgtccatgactcgggtaactactatcagtataattcctgggatatttctgataaaatgaaaaaaggtcaaaatacggaattgttatccatgaacgtggggtctggttcttacgcatctcttaaaaacgtgttgtctgttcttaaggttaatcctattaaagcgaatgtttccctagcaactgagtatgctgacacgtgctacgccggtaccaataataccatctcaattaacgttatctccgacaagaaagagaaatattcgatcgaactgttggctgatggtaatgttgtaaacagtacggagattgagttagatggtgaaaaccaaacaattttattcctcactgatcctacggttcgagaagttgatgactcaaccgtcaacggggccgacaatgtgaaggtaaattatatggtaaacgtcagatttaacgacgttgttgtttccagtgcaaataagactgtgccggtgttgtacaacggtaatcttggaaaggatttgtcttatccgtcaagcggatttgcatcatttgaaaatatttcctttactggtgacattgtaatagacattaagaatgaatcgtcatataaatctggttctactggtacaattgaaattttcaacgtgaacctaggcaaggactccacgattgtaaaaggatttatttatgttccctacaactggtttaatggaaagaagtatgtggagaatgaaaccatgttcaacgtcacattcaacaatcagactatctgtccagctggattccatagggatcaaagtaacttgggaaactatggcaagtacggatatggggtcgtggtttatgatgtcacaaattccatcaaaaatggcaataacaccttcgtcttgaataaaattaacccaacacccacgatatacccaagtactttaatttacatgtacaacacaaccggtagtgaagtcataaagaatatatacatcataaacggtgcggatctactgtcaaacacaagtaacaatgctggaagagtcgttcaagccaattccaatattaacataaattctaaggatatactggatgcaaagctctatgtatttgcttctggtgctcaaactaacgagggcaatataattataaataataatgtatttgaaaatgtttggaacggaactagcaaaactacagacttgtttgccacagatataactgatattgtaaaggattcaaacgatatccgttttgttgctactggctctacaattttggctctccagcaatttatcgtcaccactaaagatgctccaatcaagactagtgtaaagccaacaaaattatccactacttacgattcaggtaagtactttaacattaaggtgctggacaatcacaaaaaatcagttaagggtctaaagcttaaattaaaagttttcactggtaaaaggtacgcaaattattacgtaacaactggttcaaatggtgtggctagcttcaagaaagcgtctaagttatctatcggtacccataaggtggaaattacaacaaataataagaattatgtcgttaaaaaaactatttcgtatattaaggtctataaagccaaaacaatcgttaaagcacctaaaataactgtaaagtttaaaaaatctaagtattttaaagtcaatgttaaaaacaaagcaactaaaaaggcggtgaaaaatatagcagtcaaactaaaagtcttcacaggtaaaaagtacaaaatctacaagatcaagaccaacaaatacggtaccgcctatttgaaaactaaatacttgaaagttggcagccataaagtcattgtatactctggtaattctaaatattccattggtgcaaagagctcaatcaaagtaagatggtaa

SEQ ID NO: 73138 - DNA, 1806 bp, synthetic construct
  source 1..1806: mol_type = other DNA
atgagtccaagaccaattaagcgaagacctcccgaaaaagctgtagataataagaaggctattatgaacatattgagtattctaaagtgccacaagttcaaattggcattgacgatagtgtgtgctgtgatctcaactgcatttactataatagccccgctgattattggtaaagccacaacgacgatttttaatggtatcaacagcatttcaaaacacacaggcacaatggactttaacacattgtttaatcttttgactattgttgtgatattgtacatcatttcttctttgttttcatacttacaaagcttctttttagtcgaagtatctaccaaaatcagttacgaattaagagaaaggttaatggataaaattctgtcgctgccaatggagtcggtggacgaaaataagagaggcgatatcctatcaagaattactaatgatgtcgactctctccagcatggcattacacagtcgtttttacaattaactacagcagtaatcaccctgattggtgtattcgtcatgatgttaactattaacatctggatgactcttgcgacggtcatcctcatcccaattgcttttttagtaattaggtctattactaaattctctcaatcctatttcctaaaacaattggtctttaaaggttcccttaatggtcagattgaagagacattcactgggcatgatatcattcgtatattcaaccaagaagaaatctcaatgaataaatttgaatctgacaatgaaaattggtttgatcaagaatggaagtcccaattctattccagcttaaacggtcctttaatgaactttatttcaaactttacatatgttataatagctgttctaggggccatattcgtgctgcaaaaggcgatagctgttggagatattctggcattttttcagtacacccaaagtttcaccagaccaattcagcagatcaccagagttatgaatcaaatacaaactgcaatggcagcctcggaacgcatattcgagtttttggattatgatgatgaggaaaacccttcagacaaacagttgactgaaatcaaagaaggaattgcgttcgaaaatgtgagttttagctacacacctaacgagaaaataatcaagaacatgacgtttgacattaaaaagggtcaaaaaatagctattgttggagagactggggctggaaagacaactattgttaaattgcttatgcggttttatgaaattgactcaggttcaataaagatagacggtgttgacatcgaagaatatgacaaacattctcttagatctcatataggtatggttttgcaagattcctggctattctctgacacgatcgaatccaatatacgttatggaaacttagatgtcagtgatcatgagattatcaaagctagcaaacaagtttatgttgataactttgtaaggaagctctcagatggttataaaaccatcttgaatgaagattccgataatatttctcatggtcaaaagcagttaatcaccatagcccgaacaattctttcgtctaaagaggtattgattttagatgaggcaacttcaagtgttgatacaagaaccgaaaaattaattcaaaaagcaatggataagttaatggagaataaaaccagtttcattattgcccaccgtctatctacaatcaaaaatgctgataagattattgtcattgaaaatggcaggataatcgaaaagggctcccacgaagagcttttgagactaaagggatattactacaatactttgaatacccaatctgaagacagccccatataa

SEQ ID NO: 73139 - DNA, 1707 bp, synthetic construct
  source 1..1707: mol_type = other DNA
atgaaaaaattgatagcccccctaaaaaacaaaatcggacaaatctttgcaatattcctgtttttagtggttcaagtatattgtgacttgacattgccacaatacacatcagatatagtggatataggtattcaaaatgctaatttccagttcattatcgatactggtatgatgatgctgttaatggttgccatatctgctcttgctactgtcggagttagttatttttcaagcagagtttcctcaggttatgctaaagatttaagaaagatagtttacagcaaagtgttaaaattctcgaatcatgaactaaacaagatttcaagatcttctctgattacaagatccaccaatgacataaaccagctccaatcggtgttggctatgattttcacaacaatattgtttgcacctctcctaggtgtgggaagtatcataaaggcattcgagttgggaacaaatttgtcttggatcatctttgtcactttcattggtgttgtaattctcttggttattgttattgtaagagtgcttccttactttaaggtaattcaggaaattatggacaagatcaacagaacgtcgcgagaaattttaataggtatacctgttattaaagcatttgtaagacaggattacgaagaagagaagttcaggaaaatcaacgaagaattttatgatgtcaacatatatgttttcagaaatatgcttataatgctgccattgatgactcttttgatgaatttgatgattgttctgatcctatatttcggcgcctatgatgcaatgagaggttctatcctaaccggcgatattatagcattcattcagtattcaacccaagtcgtaacgtcatttctaatgattggtgcctttttcattatcctgccacgcttacttgtttctggtaggcgtgtgaatgaagtattaactactgacttgacaataactgatggtgaacttacggacatttcagaaaatccaacgattgaatttaagaatgtttcatacaaatacccgaatagtgaaaaagagactatcaaggacatttcgttctccttaaagccaagtaaaaccactgcgatcattggtggaacaggttccggcaaatcaacaatacttaatttgattccccgtcttcaagatccgtcgtctggtgaaatcttaatcgacggtaaaaatataaagctatttaagttaaaaggtttgcgagataagatcagttttactcctcaaaaggctattttatttcaaggggatattaaaagcaacatgttgactggaaaaaatgatgcgacagatgaagaaatcgaaaatgcattgaagatggcccaagttgattttgtctccaatctcaaagaggaagtcagccagggcgggtccaactattctgggggccaaaagcaacgtctatctattgctagggcgattattggaaaacacgacttttacttgtttgatgattgcttttccgctctggatatgaatacggagagattaataaaaaacaatttaaagaacttaaaagattcttccattttaattgtctctcaacggataagcaccatcattgatgctgacgaaattttggtaattgataacggggagattattgacaggggtactcattctgaattagtcggcagttgtgagatatataccgaaatcgttaacacccaaatcgacagtatggaggccttatcataa

SEQ ID NO: 73140 - DNA, 645 bp, synthetic construct
  source 1..645: mol_type = other DNA
atgaaaaaacttgccatattcgattttgacggcaccatatttaattccatcacagatgtaatcatctgcttcaataaagctttatcaaccaacgatttcccgacactaacttacgatgaatatgttgaaattttaggtggtaacatcgatgagttggtttcttcctgtctaaaggataacaatactccccaaaacatggagctcgttaagaatacctataacacgatttatggcaaaagcaataaggagaatagtcttcctttcgacggaatgcacgatgtgttattgaaactgcaagaaaagggaatattgttgacaattaactctaacaggaataatgattcgattagaacttttgtcgacaaatattactctgacatcgattttcaggctattgaaggtcataatcctgtgtatccaagcaagccaagtccttttggtattaacaaaatattgaatcaattaaatgtctcaaaaaaagaagcgttatacattggggattcttcaactgatattaagacaacgcagaacgcagaagttgactgtataattgttaagtggggttatggtaaccaaaatgactacggaaatgaatacgtactgaatgtcattgaaaaaccatacgatatactaaattatttttaa

SEQ ID NO: 73141 - DNA, 351 bp, synthetic construct
  source 1..351: mol_type = other DNA
atgttattcgtacagtatccaaagtgtagcacttgcagaaaagcaaaaaactggctagatgagcacaatattgaatatgaatcaaaacatatcgtagaagacaatcccaccgcctccgaattgcgtgagtggtggaagatttctgatttgccacttaaaagatttttcaacacaagtggtatgaagtacagagaattgaaactaaaggataaactccctgaaatgtcggaggaggaacaattaaatctgttagctacggacggcatgcttgtcaaaaggccgatagttgtcactgataattttgtgttagttggatttaaggttaaagaatgggaagaaaagttgctgtaa

SEQ ID NO: 73142 - DNA, 372 bp, synthetic construct
  source 1..372: mol_type = other DNA
atgaatgccaatgctcaattaatgaatttcccaatagacaacgtaatccagcttattaggaagaaatgggtggtacagataataaatgatttgttctttggaaagacccgtttccatgaatttaaggagaacaaacctaaactctccaacagagttttatctagctgtcttaaagatatggaagataatggtctaattcaaagaattgtcgataaatacgataaaaagaacgttagatattacctaacggaaaagggccaatcgttgaataaaatcatttatgaaatggcaatttttagtgtcgactcagaaaactatacagacaaaactaaaactgaactgaagacagtttttaaagagaagttattgtaa

SEQ ID NO: 73143 - DNA, 2235 bp, synthetic construct
  source 1..2235: mol_type = other DNA
gtgagaaaactaagcaactcaacgaaggtattattgttaatattggtaacgttcttgtccctcaccgttgtctccgctcatgatgccaatgcaacagagctaataagtgataattcaaacggaacgtgtattgtctcttcagctgctgtggctgaggacaatcaaatattaggtgaagttgataaacctgatctggtggtaaacattacttcggataatattgatgattattttatcagggggcgattgaagtccatttacgcatatgctacactatgcatatctgaagatattgacgatttgggcatacttacaataaaatcaaacaatgttacaattaatgggaataatcacacattaaaaaatacggtgttctcgattgaggcgaatggcgtcaccttgaacaacatcattttaaatataactgaaaagtttgaagacaatgagaactcagcgatcctcatatggagagcgaataacgtgaacatttataataccaatatcaactatattcctccacaagatactaccgcatacggaatttattctgaaggtacaaagaggagtttaaatagtaacttaaagatcattaacaacactattaactttgaaggtaacaacccatctgaaggtagggactatgctgtttgtctggaatactccccgaattgcatctttgaaaacaatactgttaatgccagactgccattaagaacaatagcattcgatttaacaacagcctatttgtactcggaatttgctctggcgatggggatcagcaactgcaataattctacttttaaaggtaacattattaattgtgacgttaacgagagacctgagtgcagctttccaacgttggatgcaatcttcatttgtgactcaaaggactgtgaatttatcggtaatcaattgacgttaactgatttcaaatcttacaagaatcaaccaaattacttgtatggtttggatatttatagagctgataatctacttgttgaaggcaacaacattcatgttgaaacatccggaggtacttttgctgcaggcactgcttatccaatacaattaactgggcctgctagtggtataatcattaaatacaatgaaatattttcaaagtgtaatggtccaaatattggtatctactcccaaaacttcaatggtgaaaattatatcactatcctgaacaatcatatcaatgtcactggtcttgccggaaatcatagttgggccctggtcgcgggtatcgaagcacaggacgataatgatattataatgaataatattatagaaattcataatattcgcaagaccaccaaggaggataacttgtatggcatatcatactcacaagaaacaaaagggacccactcttataaagtagttaacaacactgtgataagcgacggttactacttgtctcacatgttagatgcagacaatacaacagtcactaacaatacattagttaggacatataagtatgcagacaccaattatgatccattcaagagaggggatgcaatcggtaaagacactgatgaaatcaaaaataatgatttttcaggcaatcgtgttatcacaatctttgagtatgaaattgaacaacagggcgatgagattgacgaaggcgacgaatttaactatgaaccaccgactaacactggcaaccattccaatattattaacggatctggaatttctcccctcaaacccggattccccggaggaaacccattgattcctggaagcaattctggtggaacgataaacaccggcggtaatggtaatgttggaggtttcacaaatcctgatgtcgccgacggtgataaggggtatattggtcttcctgacctaagtggcgatgatggtaaaagtttatcccgtaagtttaatcagagagctaatgtcaaaaccgttaattcatttaataatcaaggtgatgctagtaactcttacaacaatcttgtatcaactgaaaactccacctctagcgaatcgccctcggttaacggtgtaaccgcttcgggaactatttctaaatccgcatcttcagccggtgccgctggtagttctggtgccgcacaggaaagtctaaaagcatacgaaataactaaaaacattgtagagaatggtccgtacgatatgataagattcataggcttggctattatctgtgagcttctacttattgtgggatacaaacggaaagagacgaaaaatttagattaa

SEQ ID NO: 73144 - DNA, 5568 bp, synthetic construct
  source 1..5568: mol_type = other DNA
atggaggctataataaagatgaaaatcaaaaaatacatgttaataatatttattttattgacactggtgaatataacttgtatcgctgctatggacaacgatacttttacaacgaatgttagtcagaatatttccaatattaacacagatgaacaaataaatatcctaacacaaaaaacggaaaatatcaatgaaatacaccaaactacagaaaatgaccaattatcattctctatgcatccgccagacgataattattataataataaaaagggtgaaatttatcatacccaattaatattgacgatcgaaaatttcacaactttctctactgcaaatactacgatgaacgtccacctagattgggacttatacatgtcaaaagattattatgatacttgtcagatacgaatctatgaaaacaacacaaaaatccatgcattcaacgtatccgaccaaaataatgctgaatatgaacacaatgcccatcaaacactagatgtaacatttccatacacaatcaaagatagaactgaattgaaagccgtgattttacaaattgaatcgaatacattaagttttgaagaaataaaaaagattaacttgactaatttaaacaacaataatattattgtcaacaatacttatttctcaaatgaaaactggacgaatcaaatcaaatacttgaagaaggcaataaatgatgcgccaacaaattctataatttacttgaacaatatggaaatcctgaatgatgaggatataacgatcactatcgataagaacatcacgataatcgcaaacaacaccatcataaatggcttggatcacggaacaatatttacgataaactcccaagctacactaaccttaattaacctaacgttcaccaacatctccactaattacataatgcagaataatggtaacttgaagattgtgaacaataatttcaacaacaatattggaagattaatatctaataatggtaatttaactatagaagacagcattattgaaaacacaacgaaatactatgcattgttccttaacaatatcaaaacaacatcggaaaacggattaatctacaataagaaaacactcaacattaaaaatactacttttaataacattaatttgaatccattgacgaacaataataagaaattagattggaatgctattatcgttaactatggtaaggccattgtaactgactcaaaatttacaaacatcaattatcgtacaatatacaataatgccatacttgaaataaaaaacacgataatggaaaacataacctctacagacattttttctcacacaatacaatacaccaggcaattaaataacactggaaagtatttttcatatatacgggctacctcatctcttgaaggtggagcaatctacaacatcaaacactccacgataacaaacaccacgtttcaaaaaatcacaggaaaaagtggtgcaatctacaataaaaaaactctaaacatcacaaacaccacgttccaatcaatcaacaacggagcaatatacaacaacgaagatttgactatctcaaactccaccttccaaacgataagcggagaagcaatatatactaagaatgcaaatataaccaactctagatttcaaacaatcagtggcaaggcattgtacaatatcggaacactaaacattaacaatatactaattaacaagtctacgggaatacacaatgatggaattttaaccatcaacaatacgatcatcaataaatgtggaggcatatacaataataaccaattaaatgtcaataatacactatttaatagatgtagtggggttggtgccgcagtctacaataataatattgcaaatattgaaaactgtgaaattatagaaaaccatggagatgctgataccaagtggagatatgtagagcagccaaatggtcaagtattttcatatattgttgaagtatactccggtgtaatttataattataaaaatgctaaaataaacattacaaagtcgattattaagaacaatgatatttctgaggaaagcaacggtaactgggatacatattatggaatcattaagaatgatggggaaatgaaaataactggctgtattcttgacggtaataaaccacgtgagtggattgctttttggggtggtgatggttcaataaacatttacaatactggaaagttgacatataaatacaattacctgctaaatacacaatattataccggaaatattcataagccaagcagttttttatttaatactgggaatggggcttgtgatgtcaattataatttttattgtttaaaaccatcttcgatttttgcgaatgcaaattacaactattactttgtcccttattttggtgagtatattccgattaagcttaatgagaccagaaatatcactttgtcattaggtctgaccaacggggctgattacatgaccttcaatgattgggacaaattattgactccaggattaaacgccaccattaccaccattgatgaaaacggtgaatacaagaacataacgacacttctcaaggacaagtacacttttaacttcaactacacccatgttaagggcgaatacataatatactcgaacatcttgaatttcaagagttctgctttggttgacgtggggaaagagtttgcagaaatggaagtaaactacaataacattacctataaagagggcaacattacattccatattaaaattaagggcaatctcaccacacaaccaaccggaaacataactttaagatacaacaacgaaaagatcatattgaacctaaccgattccgaatgcagcttcaccattcctgaaatattaaaaccggacaattatactatgaggattgactacgatggcgatgatgaatattttaaaatactaaatcaatattttatttttgctgtgtacaaaattcccaccaatattactgtagtcgctcccgaagttaaatacggtcaaaccggtctgatcacaatcaccatcacaccaggtgaggcgaaactcaaaggtaaactctacattaacggaatttacactaaaaatgctgatacacagggccataggattttgaggattaataggaatcctggtgtgtataacattagtgtggtttttgaaagtgatgagtattacatgggtggtgttgcaaacactactttcattgtaagcaaatggaaaaccaatttaaccttaaccggcaaggatattaatgctggtgaggatgccattgtcaatattacgattgaccccggtgatgtccgaggtgacgcgatattgattattaatggtgtgaaccaaacgatctttattaacaatacagtaacgcctattactatttcgaaccttcagaacggaacatatcacgtttccgtttattatccgggtgacaagaagtatgctccatctaatgccagcactacttttactgtttcaatgaaaacaacaaagcttacagtaaatatcactaataatgatgatctgaccggcaatatccatgttaacactgactataatgattgtactggtgaggtgggcgtgtacattaataatgataatgttttgattatgaatttgactaacgggtcttgcaatttccctgttaaattcaaacgtggcaacaattacatctacatacattatattggtgacaaatattactcctacgcctcttggaacactacacgtttcattgagggcaaagcgattatcaacacaaactacaaccacacaatcgatgagcaggaactaggttattacattataaaaatatttgattcggacaataacccttatgagtatacgaatttcactgccttattccagaataaagaaatacatttgactactgacgagaatggtgttgctaaactgcctattcaatgcagagccggaacctacaacattacagtcaaatacaaaaatacagttaaaaagtctactgttgtggtgaatgctaccagaatggatattgacattaaggacattcttgcaggtgaaaacgaaactatcacaatccgtttaccctacaacgcaactggcaacattacatttaaagtcgataatactgtaattagtaaaagattgagtaatggtcttgcgattgtcaatatttctgctttgactttaggagaacataagttaacggtattctattctggcgacaataattatactgatcaaaaaatagaaaagatattcagcatcaaacattccctatctcaaatcattgcgtcatcatccggtgtcacctatggtgaggatgttattgtcacttcaaaggttacgtcaggcgcttcgggttcggtgacatttgtccttaaccatgaaactataactgtgaatttaactgatagtcaggcaaatgctgcatttactaacgttcctgcaggaaattatgttataactaccaggtacaatggtgataagacatataaagggtctgtttgcgatgttaaaatcaacgtcaagaaggctgtacccaatatcatggttaacacgagtcctttgctgttgaacgaaaatatcaggattgacgctttgctcaacaatgatgccatgggtaatgtcaccttccatattcagggtcaatattcaccaagaaaccgcacagtgaataatggtgtcagttcatggctaatcagtccattaagtaaaggttcatataatctgattgtaacttactgcggtgacagaaattatgaatccataactacttccaagatacttgtattgaatcagaatgagactgtcttgaatgttaatattggtgacgtaaatgccgatgatgatttaatggtatatgctaccctaaactctgacaataagtataagattacaggcaacattactcttgagattaacgataagtactataaggttgttgtttctgatggtgtgggattgagaaatcttggtgagtttaaagccggcagatacacttatactgctacatatacagggtcggatttgttttcaatgtctaccattaaaggttcctttaatgtaagatgcaatagctataagataacggggaataaaaatattgttcagtattacggcacgtacaagtcttataaagtgcgcttactcaacaataatgtccctgttaaaaaagcaattattaccgttaaaataaataagaaaaacattaaggttaaaactgacaataaagggtatgcgacactgaaacttaaattgaaggccggtaagtatagcattactgcttcttacaagaaagtcactgttaaaaataaggtaacagtgaaacctatcctgataacaaagaacatggtggtcaagaagggtaaaacagtaacctatactgccaaactgctaaacaaatatggtaagaaggttaaaaataaaaaggttatcttcaaggttaaaggtaagaagtatattgttaaaactaacaagaaggggattgccaaaattaaaattaagaagctgaaagttggcaagtataaaatacaaagcatctatgggaaagttaaaaacaccaacaccattaaaatcaaataa

SEQ ID NO: 73145 - DNA, 2589 bp, synthetic construct
  source 1..2589: mol_type = other DNA
atgaaatacaaaaatattttattttttagcatattcatcctgtttattgtagggatcagttgtgtttctgcccaaaacatagatgagattggtaattcatcatctgatgacacgatcagtctagatgatgatataagtactatcaacattgttgataacgagatctcaactaatgttgatggagaagtgatttgtgatggtaagtcaacccgagacacatattcttgggctgattttaaatcagaagtcgaaaatgcgaacataaatacaatagagttaaataagggaaacattgctccatcaagcgatagttccaatcagatttccataaaccatgacataaacattattgggggttatggttattacatcggtggtgacagttggagctcctcaacaaagtacaactatatcccaattattacttctggatctaacctgaatgtaaaatttgaaaatgtgacattccaatacctatctgacaatgtttttatgaaattgatgggtaacggaaattatacctttaaaaactgtgtattctctaatattaatgccactggatcacatcagtcagtaatctggttaaattatggacatgctttaatagaaaactgctcttttataaagtgtaactgtagtttcggtgcggtaactaactattattcctcctggggtactgctgtcaacaacgctagaatgacagttagggattctacatttaaagataactacgctactacggaaccgggagccattaataattgcgggcaattagttgtttatgattctacatttgaaaacaatgaggcagtgtggtgggctggggccatccatacacactcaaatgctaacacaaccatcattagatctaaatttaaaaacaattatgcaggttggaatggtggtgccttatacacgtactcctatttaactgtcatcaactcgactttcacagccaatactgccaaaaccaatactggtggaggtgctattggcgcaagcagttatatgagcaccccaaaggtggttatcaaaaattcagaatttaagtacaacactgctctgacaggtaatggtggagcaatcgttatatcctcgggaacattgaatgtggaaagttcggaatttacaaataatacggcacttgaattaaatggtggtgccatttccagcagctcctgtactgcagccatctctaactgcaagttcataaacaacactcttaacaaaacagccgggaaaggaggtgcggtttatggtacggggaagggcagactcaccgtggataagtgtgaatttattaacaatgctgctaaggacaataactctggccatgcacttgcatactactatactggaaatagcaatacggcagcatacttgacctataccaataatatattccgtggaaaggataacggtactgggtctgtgtttgtagctaatgataaagtaaacattgttcaatacaataattcgattgacgatattactaactacattgaaccggagaacaatacgaatggcactagctcgggaaatataacaatccctatcggcacggatatactttcatcttcttgggatgtgatattgggtgacaatttaaatggtacctctgttattgcgggtaactatattctaattcctgcatctcatgacttgtactgttacaactacatcacccaggatttggtttggaatttcacaaccgaatttggttatttccatgagttattggtggacggaaacattgtctatgcgcctgcatcgtgggacgcattgtacatctttaacttgacaaatggtgaatctttgacttactcgaacatttaccaaggctccagcctctataaaccagtcatttataataatacgctttatgtcagttcggaatacggttatggtattaattccaataactggatttccatgattaagcacgattctgactactactactatggcagtattttggagctcaataatgtatcttatggcactccagcaatattgtcccaaccatatatacacggcaatactttgtatgttaacaccatacaaggtttaattgcctataatttagttgacggcacttctcacaacgttagtggcacggtcggtaatcccattatcgatgccaacggcaatatctgtattctatcaaacaatggtgctgctatttcattacttaattccaatttagaagttgtggcttcaaccacactagatggtacatgcaacaagttgatttcggatgctaatggtaatatttacactgttgacaacaatggctatatctattatgctacatacaccagttcatcaataacctgcagtaaaactaaattcaacattaatcctgtttcatcagctatggcatgctacgatggtaaactgtacataggagacaacaacggaatactatgggcattcaatactagtaaactagatgaacccgtcctgaataatgctgtatatagggtcttcgacgctggttctgcgatcgtagggaatattgctgtcgataatgatggcaccatatatattggtacagataatgggcatttttatgccatagagtattaa

SEQ ID NO: 73146 - DNA, 4578 bp, synthetic construct
  source 1..4578: mol_type = other DNA
atgagattaaacaaatcagttttgtttgtatttatgattatttttttattgagtttgaatttcattgttgcaaaggatataaatgaaaccaacttaaatgcagattcttttgaaatagattacgatgattcaatttctagttcatatgacacaaatttacaaaaattgaaccaaaatgacatagaaaaaactgatgaatcattagaaaagtcagacaactcgtcaaatagactattgaacgaagacaataataatgggttgttgggtgatggtgatggtttaaagcatctctatgtggccccaaacgctactggttccggtctagatgaaaacgaccctggagattttataaccatactaaacaataccgaagataatactgtgatccatatgctggaaggaacttacctactgtcaaacattaccccaatttaccaagatggttactatcactttatttccattaaatcaaagaataatatatccattgtgggagagaatccagataaggtaaagataatctccaatttaacacctaaaaaaagaacttcgtttatattcagtttgcataacactaataatttcaaatttgaaaatattacattcagtgctattaaaaaagatcccaagaaagaaaagacgaagtcttatttcctcttgaacaagaacaattatatttttgaaaactgtaagtttatagacgcctattccaaatttgctattatagaactggatgagggtactcatctaaccattaataattgttattttacatccacggatggacacgttggaagagaaatatctccaaggttattttgctcagtccttcttaacaatacgatctttaaaaactgctgcaggtactctgactataaaataggtgttatgggcaattactccatttttaactctcaatttctagaatacgatgataacccattattgtattttcaaccatattgtaatttgatctttgagaacaactacgttgaccacccatacaattttgtctttttccaaccatctgatcattacgagggttcaaatagaatgttctgctcacatactactctcactttcttgaacggtgaggatagtgttaatgttaattgtggagatgttattaatcttaacgcttctttagtagatgacttgggtaacattctttctctttataagttgaagttcaaccttttcgaaaacgaccttacatacactaacggggtttatcaaaaggaagtcacggttcctgacgtgcctggcgaatattacattgatgtttctgatgaaatgttcactaaatatctgggcaattgtacagtgaaagctccaatttttattgttaaagaagctccagaatttctatttgacgataaaaacagcagcacttacggtgaggatgtcattatcaatgtggattcgctggatattccagatggaaagctaactttcagattcaacaattctgaaataatcaaaaacatcacagactacaggtgctctataaatttgggagtattgcccgcaggtgaatacgccataacggcttattatgcaggtgatgaagtttatggagctaagtcgtacacaaaaacatttaatgtaactaaagcaaaatccacaatcagcttgacgaaaggccacgtggatgccataaaagacaatggggatgttggtttctacttcagcacaactgaaaacggcaatgaaaacaccataggtattattttaccggataatgcaaccggcaaattaacatttaaattggacaccgatacttattcgattgacatcaccaaacgtaaagtactgctcggcaacttggactatggttcttatattattgctgtaaagtatgatggtgacaacaatttcaacgaatccgaggagtgtactttcaccctagtcaacagtaagccatccgttgatttaaccttaaattacagtaacattaattacacgaacccgtttaacgttaacgtaaccttaaatcaggatgtggtcaaagacacaatcatctttgaagtcagagacttagaggacaatctgataaactccactactggaataataagcaacaagtctgctaacgctactttcacaggtctaaatgcaggtgaatacaatatcattgcaatctatgaaggagatgaaacttattgcaattccattgcatctcaacgattcaatgttaacaaaattgatttggaatactttacactaaaagctgacaagacaatcagtatccacgataatatcaaagtggaagctctaatcccagtcaatgtagggggcagcataaccttccggataaatggtcaggacatgactgttgagatttttaacaaccgtgctgaggctattttcgataatccgggtttaggtaactatacagtttatgcgacgtttaatggtgatgataattataatcctcatgaggaaaacattaatatcacggtcattaaagccgacgctaatttaagtgtttctgcagagaacgtcgactggggcgaagaattggttgtcgttgttaaaaccgacacgagattcacaggcaatctttcggtgaaaatagatggcgtggagaaaatagttgaaatcacagaagggcaggggaatgtttcattttctaatcttaaagccggtaagtataatgtggcggttgaatttaatgagagcgaatttttcacttcatcacagaaggacattaatgtaactgtcaacaagatagattcggcattaactctggataacgatgagatggtcttcgattatggtggatctgcttcagtaacatttggttatgatggtgccgttaatgtgacagcggaagtagttaaccatcctgaggcggtaattaagattaatgaggattgtattgtggtctctgatttggatgctgggcaatataccttgaaagtcaccactgtgcctgacgaaaaccacactggtgtagataaagaatttgaagtgacggtcaataaaatagattccgcattaacgctggataatgatgagatggtcttcgattatggtggatctgcgtctgttacattcgattatgacggggcagttaacgtgacagctgaagtagttaatcatcctgaggctgtaattaagatcaatgaggattgtattgttgtctctgatttggatgctgggcaatacaccttgaaagtcacgactgttcccgatgaaaaccacaattctgtggataagacaatcagcataacagtaaataaggtaaatgccaacatcaatattgaggatattgttctagactatggttctcatgacataacagtatttacaggcgaaggcattgaaagtgtcaatgcgaatatcctaaatcaatcctatgccaatgtcattgtttcaggcaataatattagcatctacaatctcaacgtaggagaatatgttttgcagttaatcgttaatccagatgaaaaccacaatagtgtgagtaagaatgttaaggtaactgtgaataaaatagactctgttattgatattaggaatgaagtggtcttcacctacggtgatgctggttattgtgatgtttatagtgagggtgctgttgacttcacggtaaaagtaatcaatcatccagaagcagtgattaacatcaacaagaatggtattgtcaaggtttcggctctcaacgcaggaacatacattatggaagtgaccactaatcccgacactaaccataattcagtgaccggtagagttaacgtcactgtaaataaggctgattctaagatcattattccggatatcatatttgattatggtaattcagggtcagtgaatattctggtttacaacgcaactggaataggcaacgtcaatgttgttggtcatcctgaagccataacaaccattaacggcactaaaatcagtgtaggtggtttgaatgctggatcgtatattttaacggcgactgcacttacaggtgacaattataaccctgtaaacgtctcggccaatgttattgttaataaattaaccaccattatcggtgttaaaaaggtgaatggtgtttacgggtcctccggtaagcttatcgttactctaaaagacagtaatggcaatctgttgacgggtaagttgttacgtgttaaggtaggcagtatttcaaagactttaaccactaatcgccatggtcaagtctctgttaatgtcgcatacttaattcctaagagctacaacgccaaaatcagctttgctggggacaatgacttggtcgaatcatcaaatactgcgaaagtggtaatcaagaaagcaactcccaaattaacagccaagactttaaaaacaaaagttaaaaccaagaataaaaagcttaagataacgttaaaaaacaaaaaaggaaaagcccttaaaaatacaaaggttaccttgaaacttaaaggcaaaacttacaaagcaaagaccaacaaaaagggaattgccacatttaaaataacaaagttaaacaaaagaggaacatttaaaggaacagtcaaatttgcaggaaacaagtacttcaaggccataaacaaaaaggtaaaagtaatagttaaaaagtaa

SEQ ID NO: 73147 - DNA, 486 bp, synthetic construct
  source 1..486: mol_type = other DNA
atggagcgtgaaaacttatcgggtatttttagtattgttctcggtttgatattcatattattcccaatgtttagctccaatctaattagtataattgtgggtttgagtttactattctttggtctgtcagcggcattcatgggttttacaatgagaaggaatggtatcccttactctttaatatcaataataatcgggatcgttgcagttattttgggatttggatttatcttctatctggatgctctttcatttttggtgggcttccaattgtatattgtcgggtttattatgattgtatttggcataaccggcttaatcagcaaactaaatagaatctcttcttttacttccatactggttttattgatgggtattgtatcgattgctcttgccatatttgctctcaaccagcccatctacattgccattattattggtatcgtcttaattatcgaaggagtatctttccttttgaatgactaa

SEQ ID NO: 73148 - DNA, 981 bp, synthetic construct
  source 1..981: mol_type = other DNA
atgataataagagcaccctcacgcatacatatgtctttgattgatctaaatgggtcatataggagagttgatggaggtattggtctagcattagctgacccccaattcgttttagaagttaaacagatcgaaaacggtatagagcttgaatttgcagacaacgtaacagacgaggaggctatcgaagaatgcagggaaaaaatccctgatgccgccagaaaaactattgaacactttaatattgattccggttttaagttcatcgttcatgaaacataccctccacactccggttttgggagcggcacccaaattgctatttcaaccgcccatctaataactgaaactatggatattgaagtagaatctcgtgtcctgagcagtgttgttggtcgaggaggaacctccggtattggaacatatacacatgatttgggtggatttatcttggatggcggtcatagtaaggaagaaaagccattgtttttaccttcgggcgcttcgcaagcaaaaccagctacgttgatagcaagatacgactttccggaggaatggaacattttaattgcaataccagagatagaaaagcacatggagggggatgacgaagtggatgtgttccagacttactgtcctattccaaaggaagaggtggagcaagtgtctcacctgatcttaatgaatcttgttccgttcatgttggaaaaggacatcaaaaattttggctgggcggtaagtgagcttcaaaaagtcggatttaataaactggagcattctctcgatgcttcatatttgccaactatgcaggctattgaaaaagctggcgcctatggtgtcggtatatcttctttcggccctgttttatacactttctttgatgaatcaaatgaggatatcgtagaaaagacaaaagaaattattggtgaaaacggtaccgtctttgtaacgaaagcgcaaaaccatggtttcacgattgaataa

SEQ ID NO: 73149 - DNA, 993 bp, synthetic construct
  source 1..993: mol_type = other DNA
atggaaaataatagaacggtgtttattgattacttaaaagtaataggtcttctatgcattatcttagcccatatttcgacagatgaaagtatcttgcagattcgaaactttgacgttcctttgatggtgataatttcaggatttctggcagtaaattctttcaaaaggaatcttaaacaaaacagatcatttttgagatactactggaagaggatttcccgtttattgtttccaacctggacttttctaataatatttttcattgtgatggcttttttgccaataaacggcatctatcattatgatgccgatttcatactcaactccttcttattgctggatggtcttccatacgtttggatcatccgtatctttctcatttgtactttcataacgcctgtaatctattatttcgacaagattgaaaacgactacattcaattcttaattttactattgatctatatcttatacgaattatcaattttcttgaagataaatgaaacaaacatcatttttgagtttatactagcttatgttatcccttatggcataatctacttgcttggaatgatttcgacaaaaactagtcccaaaatggatcgcaatgtctccattatctgtttgattgcatttattattcaagccgtcataatttatttgaatactgggattttccagccaactcaaattatgaaatacccgcctacagtttattacataagttatgcgctgtttgtctctttcatgctacttagcatatttaaaagaattgacttgaagccaaacagagttatagagttttgttctaaatctagcttatggatctatttatggcacatactgttcctgaccgttatacccttaatttttggtgaactaaattggattctctcatatatcattattgtggtctgcgctgttggtgctacatacattcaaaataagattcttgatttgaccaatgcagatatcaaggtattaagaggttaa

SEQ ID NO: 73150 - DNA, 711 bp, synthetic construct
  source 1..711: mol_type = other DNA
atggatatgataagtgttctgtggcaagtcggaatctttgcttcagtccttgtttttggaataaaaatagggctggcctctggtctggctaatttgccaaaaaagttgttcgcagtaatttgcatgtcttacggtggtggagtgatcttgatttcctatattgcttcttttttcgcggaacaactagtgcaagctatatactcttataacacaatattttacattatcatggcctcaatcatgattatagcaggtttatttacaataagggagtggaagatacatgataaaaatacatcaactgccacgtctctagcgattattgcaccttgtccatgttgttttggttccattattgcaagtgttttaattgtggcaccaactataggtatcagcagtcttaatctaagttggtatgcttcggcagcactcgtcgctgttatggtagtgacgtatttcgcctccaacaccattatcagatttactaacaagccgtaccctattgttttaggcaatttcatgttattgctcggtgcctatttcttgttgtcagctattgtaattccaaatatcgcttcatcgttgaccaaaaataccagccctattactattgcttctccccagaacatactaatggtaatcttaacatttgttatcttacttgttgggggcatggtcttgaataaaaagggcagaaacattttagactaa

SEQ ID NO: 73151 - DNA, 645 bp, synthetic construct
  source 1..645: mol_type = other DNA
atggttttgaacatcccaggtggagaatttttgactggttctctcgatgtcatctcacaaagcttaacaatacctgtacttgtgatactacttgttattgttattattagcatcatcacattgggaggaattatagcggagtatacttcgagaaaaaaagtgccgataggcaccataagagatttgatatatgatattaatctgagtgaatctatagatggattgaaaaatataatttccaaagccaaaatcccaaatagtcagaaaaaggttctaatcgaaattgcatcagctgaatccctaggtgtaaattcacgagaagctttagcccgtaagctgtttgaatttgaagaggaaaagactatggagacattaaagaagacggatatcataacaaggattggccccacactgggtttgatgggtacgctaattccaatgggtcctggccttgcagccctcggtgcaggggatattaataccttagctaactccttaactgttgcattcaacactaccattgtcggtattggttcaggggctttatgttacttcattggcaaaatcaggtcttcgtggtatgacagatacttatctgacttggacgctttaattgatagtgtattggattacatggacaaataa

SEQ ID NO: 73152 - DNA, 324 bp, synthetic construct
  source 1..324: mol_type = other DNA
atggtcagaaaatcgaataggagacgttcaaaaagagttgaggaagatcccatggcaggtacatctaaccttgtagatgccatgctagtcattgctgttgggtttttggttttcgttatcataagttggaatatgcaggctatgatagacccagaccaatcaattcaagaaaaaatgcaacaacaaaagacaaccgaggtggatcagggccaacagttaaatgaaactcctgatacctccaacagctctggtcaaggatatactgaaatgggaaaggtatacaaagatccagcgacgggtaagctgattatggtggaaggttaa

SEQ ID NO: 73153 - DNA, 816 bp, synthetic construct
  source 1..816: mol_type = other DNA
atgaaaaatacaaaaaagatagttatagtcgcaattatcattgttattgttgcaggtatcgccctcctttcgggtgttggaagttcagaaaatatagatattgtaggttctacatctgtgcagcccgtcgctgagaagcttgtcgaaacttataaacaaacccatcctgatgctaatataaacgttcaaggaggaggttcttccgtaggcattaagagtgcccaagatggtagtgcagacatcggaaccagttccaaggagttgaaagaagatgaaaaacaaggattaactgaatataatataggccaggacggtatcgtcatagctgttaataatgaaaacacagtaaacgacttgtcaaaagatcagttaaaagatatattctcaggcaaaatcaccaactggaatcaagttggaggtcaagatggggaaatcaatattatcacgagagaggaggggtctggtactttagatgcgttcgaaaatattgtaatgggcaaagatacgaaaattaggtcggatgcggttgtgcaaagttctacagaagctgtgaaacaatctgtaaagcaagattccaacgcaataggttttgtatcatttgctcacatgtcaaatgatgtcaaggctttgtcgattggtggtgtgagcccaagcactgacactattgccgacggctcctacgaattacagagaccatttttgttcctggttaaaggtactccgtccggggacctaaaagaatttattgactgggtgaacagctctgaaggtcaaaaggttctaaacgaggaaaagattattaagtcaacaaattaa

SEQ ID NO: 73154 - DNA, 864 bp, synthetic construct
  source 1..864: mol_type = other DNA
atgtcagaacagtttattgagaaaggtttgctgataaccgccatgttctcaattttcatcatattgatcattttaggctttattataattgaaggcttacctgcttttcaagattatggtttcattcaatttctattcggacaaacttggtctccgaatgaagggcaatacggtctatttagtatgataataggaagcatttgtgttaccatatttgctttgattatcgcagttccactgtccatcctttgttctatatttatggcagaggtggcgaacgaaaacatcaaaaattttttaaagcctgttatccaaactttatccggaatccctagcgtcgtgtatggatttttcgggcttattgttcttgttccaatagtaagattctactttggcggtaccggttttagtattttcacagcaggcattatcttgtctgttatgattctacccactattatttcagtgtcctttgactctttatgcgctgtaccaaacgaatataaggaagcctctcttggtctgggtgctacaaattggcaaacgattaataaggtcatattcccagcttctttgccaggtattgtgacggcaattatcctcggtatgggtcgtgcgattggagagacattagctgtaattatggttgccggtaatgtccccggtatccctaattcgatattctcgccggtcagaactctcacttcaaacatcgctttggaaatgagttacgccacaggattgcatcacaacgcattatttgccactgcaaccatattgtttgtaatcattttattgttactggtaattgctaattacatacagaggaaatataaaatggatgttgggggtggcacactataa

SEQ ID NO: 73155 - DNA, 852 bp, synthetic construct
  source 1..852: mol_type = other DNA
atgaaattcaattatatctctcctaagagatctcaaaagataatgaacggaatattcatattttcgggagttcttaccttaagcatcctcattattatattaggttacattttgattaatgctgttcctatactgagttttgattttatcttcggtcaggttatcgacgccggtaaatctggtggaatctcccccatgatcgtatccagtctgtatgtcaccttcatttctattttaatagctactcctttaggtgtaggtgcagctatttatgtgacagaatactctaaaaacggcctgttgatcagattgatccgatttggtgctgaaactttggcttcgattccgtcaattgtctttggactatttggattgacattttttgtcgttttcttaaatttaggctggtccattctatcaggtgggcttgtacttgcgataatggccattccaacaatcttccaagttacggaggtgagcttatcatcagttccgagttcatacaaagaaggcagttttggtctaggagccactaagtggcaaaccatttgtcatgtgattctccctgccgctattccagggatcgtgacgggcattattttgggtcttactcgtagcatatctgaagctgcagctgtgatgtatgcagtaggttccgccactacaataccaatatcgatgtttgatccaggtaggccactgccattgcacctatacgtcttggcgaccgagggggtttctttgcccaatgcatatggcactgcagcagttttagttattattgtattaataattacgtttttcacaaactatatcgtcaacagataccagaagaaaataatgggtaattaa

SEQ ID NO: 73156 - DNA, 753 bp, synthetic construct
  source 1..753: mol_type = other DNA
atggacagaattatagtgaaggatttgaatacctactttggtaattctcatattcttagaaatataaacgttacgtttccagaaaataatgtaactgcattgattggaccgtcgggttgtggtaaaagtacttttttaaggtccattaacaggatgaatgatttgatatccacgttccaccatgacggttatatctatatcgataataaggatatttacgactctgatgtggatgtcgtcgaattaagaaagaaagtagggatggtgttccaaaaacccaacccttttccaaaaagcatattcgagaacgttgcttacggtttgcgtatccatggttatgatgatgaagactttataaaagaacgagtaatcgagtctcttaaggcgtcggctatttgggacgaagttaaagataagctggaccaatccgcaatgggtctatcaggcggccaacaacaaagattatgcattgcccgcactattgccaacaacccagaagttattctaatggatgaaccttgttctgctttagaccctatttcaaccctcaaaatcgaggatttgatgcatgaactgaaaaaggattattcaatcattattgttacacacaatatgcaacaggcatcaagagtcagcgattatactagttttttcttaaatggcgaaataatcgaaagtggaaaaacagaacagatatttgttaacccaaaggaagaaaaaaccgaggagtacattacagggcgtttcggataa

SEQ ID NO: 73157 - DNA, 1299 bp, synthetic construct
  source 1..1299: mol_type = other DNA
atgagcagaaacgcttatattaacaaagatattccactttctaagattcatgaagttaaagctgacttaaagcattatatcgaagtttacgagaaaataacgttcattgaagatatttatgctggtgaaacagtaaagtatgctatagaaaagcgtgggaaaaccattccaactggtcacacttggttgaagtcttggaatgaggaagggttcgatggattgctcagaaaggagggttctggacgaaagaccaaactcactgaaaatcagttcaagcaactaaaggagaacatcataaaaaaacaattgacaagtgttcgtgaggtaaaacatgaaattttcgaagaattttccgtcagctatagtgataggcagattaggcgcattatgaaaaaattgggttttggttatggaaagccttatgtcatacccgccgaagctccaaaaaatgcctcagaacagttaaaaaaaaacacggaaaaaattgacttaaaaaaagacattttgatattcactgatcaaacagcggttcaaaataaagacaatacgaacagaatttactacgaactaggtactaaaaaccggcagactaaaatcactacaagaattaagttaaatgcaaatggctatcaagcagtaaacggcaattcattaatcctatttcaacaaaatacccatacatttgaggaaataaagtccttgatcaatcttagaattgttaattgcataaataaggagttgaaatcagaacttaagaacattttgaccgatgacgagctagatgaaaataagatttacaataaattaaaagatgagaatacattagaaactttaaaaaacgaatttaacgaatttatatcgaactctaattcgtctgaaaagcaatttttggtgaaaataaagaataaagccaacaagctgaaccctaaaaagcacaccaacatagaaaatattcaaaaggagatcatcattaagctgctaaataaagacaatattatcaataatttgcaaaacgaaagaaagcttgtcgtggtattggataattactcagttcataaagcgaatttagtgattcaagcatgtgaaatactaaatataaaacttattcacttacctccccattctccgcacctgaacccaattgaacaggtctggaaatcaatcaaaaagtatatggcatattacctgtttgatacaataaagtttatggaagagttattcgaaaaagagttttacaggatcgtgaacagagattcctactataaaaattggatcagtaaattcatcatggttaactaa

SEQ ID NO: 73158 - DNA, 1557 bp, synthetic construct
  source 1..1557: mol_type = other DNA
atgaagaatcttgaaaaaacattgaaatcagtgactgaaaatcccaagtatattttcagattaactgtccaaggattaatggttggtatattcgctggtttgatggtctgtctgtatcgattcttattatatggtagcgaacacattctaagagattacttgaatattatacatggaaatatactctacattattctatttttcattgcattggccataatgggacttctcgtcgattggctcatcaaatgggaagttgattcggctggcagtggaataccccaagtttatgctgaggtcaaagggcatatggaagctaactgggtcaagattcttttttctaaaatggtgtcaggtgttttgactgctctaggtgggttgtctctgggtcctgaaggcccttcagtgcaaattgggggtatggcaggaaagggtgtcgcccgcttattcaaaggctcaaaaactgacgaattaagattaatcttagttggttctgctgtaggtattacagccgcatttaatgcgccattggcgggagtactatttgttttggaagaaatcaatcatggctttgataagacgttagtatttattgcactggtgtcggctattgtatctgactttatatcaaaagttatctttggtcaatccactgctctaacctttccaatccacaacattccattaggcaattactggttacttcttgtgttaggtgttttgatcggattattgggttacgtttataatattgggatgataaaaagcagtgatttcgtaaaccagcttaagatcccatcttggcttaaatttgtattggttttcatggtttctggcgtcgtagcattgttaatacctgaaataagtgatggcggccactttatgatggacatgttggatgtggccatgccatcgctgggtgttttagtattcctgctagttttaaagtacttgttctccttgttcagtttctccagcggtgcgcctggaggtatatttttacccatactggtgttgggggcatatattggtgcagtcttcggggttgtcatcgtttctgtatttggattggaacatacattaatatacaaatttgtggtcatttcaatggccggatttttcgccgcaacagtaagatctccgattaccggtgtcgtgctaatcgctgagatgtgcggttccaccgaaagcctaattgcaatgatcatcgtgtccctaatagcctacgttgttcctacacttttgggtaacgagccgatctacgagtcattgtatgataggctgctactcaagaaaaacagggaatttgttaaaaaacctagtaagcatgttttatccgaatatctggttccacttgactgtaactacataaatttcaaagttaaggatattccatttccaaagaatgctattgtagtctctgtgatccgtaatggtaagtatgtaattccgacggaggactttaaaattaaatatagtgatcagattcatattttagctgacgttaacgattatccatttgttagagaggaaattgaagagttgtttggcggttaa

SEQ ID NO: 73159 - DNA, 714 bp, synthetic construct
  source 1..714: mol_type = other DNA
atgtataaaaggatattttcaatattaattgtcatggtctttttgatgttctcagtcagtgccgtctttgctgaatctgacgcagttcaggacacgggtggtgagagtacttcaagaatcattaatgtcaaggtgatctggaatgatgacggccaaacaaataatcgtcccgactctgttactgtaagactactcaataacggaagcgtggttgattccgtaatattgaatgagtcgaacttctggaatggtactttcaaaatcttggataacggaaactacgacgttgaagagacaggtgacctgtcttcatattcgatctctttaaccggggatatggataatggttttgtaattaccaacaccatcaagcaagcgccaaataacggcagtgatgatatgattgttgatgaaaattctacggataacagctcagatgatgttaatggtattattgacgattccaaccatactgttgatcaaaatgatgctaaagacgaaaaccaaacagaaaatatttcccaagcaaaaaataccacttacaataacaatgataaagaaaaacaggtaataaaaaaagaaaataagtctgttaaaaagaacaatacaaacataacggggattaagctaaaaaacacaggacttcctgtggtggttcttgttgtagtgttatttatcatagtcattactccaattagtagatggaagaagtaa

SEQ ID NO: 73160 - DNA, 846 bp, synthetic construct
  source 1..846: mol_type = other DNA
atgaaggtgtttaatatggaaataatagatattatcaaagaagcgtttattttcccatctaacaatttagaaaaattggcaatttatatagtgctgacatttgtaatgggcatgttagtcgttgggggaatattttctttcgtcttctcgagtcagtctagtgctctgttaattgttggtttgatactatgtattgctgccataattttggcattgataatatccggttaccaactgaaaatcatgaaatcgggtattgatcaggatgaagaggctccggcctttgactggaagaacgatgggataaatggtattaaagttatcgttctcggtattgtatactttattattcctgccatcattgttggaatcgtcgccttgattactaacgtcccaggcaatttagtgcaaatcattcaagaatattctacaagcatcaatgcaactgctgctgttaactctactgcatccgccatgcccgctgtgtccagcgcttcatgggccgccttaggaacttcattagctattaccgctattattgcttttgttttgttcataatatttgcattcatccaaaccatgggtcaggcaagactagcaaatacgggtagtcttggcaacggacttaatattgtcgaggcagcgaaggacatctcaagaattggtgtaggtaaggtaattgctgttattcttctagtgtttatagttatcatggttatccaaggcattctcggatatatctacggtcaaatcccacaactatcaatcatttcaattataataacgccttacttcgtattctttacacaaagggcgtatgggttattgtattctgatattgcataa

SEQ ID NO: 73161 - DNA, 1410 bp, synthetic construct
  source 1..1410: mol_type = other DNA
atgattgagaataacatatgcctgttaacagatagctacaaagtgacacatcattatttttaccctaaagggaccgaaaagatctattcataccttgaaagcagactgggttctgaatttaacaaaaccatcttctatggcctacaatatattattaagaaatatttagagggttctgtcgtgaatcagcagaagattgaagaggcggataaacttatttccaaccacataggtgaagatatcttcaataaggatggctggtattatattttagacaactacgatggttaccttccaattgagataaaggcagtacccgaaggaactcctgttaacgttagtaatgtcttgatgagcgtggaaaacactgataaaaaatcattctggttagttaattacttggaatctctgttattgcaagtctggtatccatcgactgttgccacattatctgcagaggtaagaaaactatcgaaattctaccttgaagttactggttcttctaaagacaatttggatttcatgttgcatgatttcgggtaccgcggggctagttctacagagtcatccatgttagccggttccgctcatttactcagtttctccggaactgacactattccagctctactaattcctaagaattattataatgactcaaatttatacggattttcagttcaagcaacggaacacagtgtcatgacttcgttaggtccaaagggtgaatttgaccaaattttgaatgtaatcgataatgctaagaatggaatattgtctatggttatagactcatacgactataaaaactttctaaccgaagctggaaagtcggatagccaattgaacaaggctataaacgatttcttggcagttgagggaaacaaagttgtatttagaccggatagtggtgaacccgtctccacaacaattgactgtttgaacatcctgggcaaaggtttcgggtcttacctaacggacaaaggttacaaggtatttgattcaaatattgggcttttatggggtgacggtttagactatcataaaatcagggatatattatttgccatgaaatctaatggctgggcggctgaaaacattatcttcggtatgggtggaggccttcacacctatgtgaaccgtgatactcagagaaatgcatttaaatgtagcgcacaattgcgagatggcaagtggtttgatatttataaaaatccattggactccagtaagaaatctaagacaggtaggtttaagctcatcaatgaaaataatagttttaaaacaatatccatcgatggctatggtgatgattgtctcagaactgtgtttaaaaatggaaaattgctaattgaagatacctttgccgatataaaatcaaagacgctgaattattcaaactttttgtaa

SEQ ID NO: 73162 - DNA, 3657 bp, synthetic construct
  source 1..3657: mol_type = other DNA
ttgcacaagattagaaaagctattatcatatgcttaatattattgattgtttttattccaacggcatatgctgcggataatcaaacaaatttaggtttgaacagtaatgatgtaatgttatctgactcatattatttcgatgctaatgttgatgatgatttggggaacggttcgttggattttccttataagcagttaaagagtaacagagttatcgataattctacaatctacttaaatgacggcatatactacggatttaataaagaatttagtaacctcactgtaatcggtaaaaacagtgaaaaaactattataaaaaacattcaattcgatattaagggttctttgataattcaaaacgtaacgctgattaattctaaaataaccaataacgccaatataacattggtcaattcaatttttaaagattcttcctcattcattggtggagttctcaagtccaacccaaatacttttgtaactatcacgaactgcacctttttgaataatcatgcgaacaggtatgctggagttatctatagcaacaattcgaatttaaacatctgtaacagcagtttcgttggaaattacgctaattattacggtggtgctatttactgtgagaaaaatagcaagttaacaatcataaatactgatttcacaaacaatcatgcaaaaaatgacgctgggggtgcaatatatggtatggattcagatattcttgccaattatttgagtatttcaaattcttcatccacgttcggtggtgccataactgcactcaatacaaatttgaatttaactaatttcaatgcttggaataacaaagccaagtatcgtggcggggttatttattcagtttatggttactacattgttatgaactccacatttgaaaacaacaccgcatctgatgggggtgcgttattcattgactcaccacattccgtgaatgtgtcctcaaacaagttcattaaaaacaacgctttaaatattggtggagctgtttatataatttctaataaaaattacttcatacctgataatctgtttttaaataactctgcaagctttaataatgatttttataaaactatgttgtcgaatctgactattggtaacaacaattatgtactaattaattataatggatcgcacataggtaatcttccaagcagttacgacctaagggaattgaatcagacaacttctgtaaaaaatcagggctctgggggtaattgttgggcctttgcagcaatagctagcttggaatcctgtatcttaaaggctacaggtaacgcctataacctttctgaagaaaacatgaaaaacctaatgacactatactccaactatggatggaaggtgtctcctaatgacgggggctacacttcaatgggcattggttatcttacttcctggttgggtgctataaatgaaagtgacgactcatattatgagtcatctgcattatcacccgtacttgacagttttattcacgtgcaaaacattctattcttaaaaaggaacagttacacggataatgatgaaatcaaaagagcgatcattgaacatggtgctgtctcaaccagtgtattctggaaagtagagaaatatgcgaacggtgagaattactacaactatgaatatgcttcgggttctaaccatgctgtagtgattgtcggctgggatgataattattctaaaaataatttcattaaaaaggctccaggagacggagcctggataattaagaacagttggggtactggtagtggtgatggcggatattattatgtctcttactacgatgcacgtctcgcacccataaatacgtcatctgttacttacacctttgttttagcagactcgattaaatatgataaaaattatcaatacgatatcccaggaatgactgactacctattgaatagttcggatcgcgtctggtataagaacaagtttacagcgactgacgatgagtatttaaccgctgtttctacatacttccaaaaagaaactagctgggacttgtcaatctacgtcaataataaactgatgttaactcaatcaggtaactctagcgcaagctactcaacaatcgaattgaaccgattcataattcttaaaaagggtgacatttttgagatcgaatttaaaataactgtcgacggtgacgccggggttccgatctccgaaatagcttctcttaataatctgttttatggtgagaacatttcgtacgtgagttatgatgggaaaaaatggattgatttatttgacgtacggtggacatatcctggccatacctacaatgattcgcaagtagcttgcattaaggcattcacggtattgaataaaatcaactccactattgtcctaaccatcacagatgagaataacccagttgaaataacggctaaggtcctaaaccagtatggtaaccctattaagacgggtaaggtcacgtttaatattgaaggaaaggattacattgctaagattaacaacggatttgccaaattgattcatatttttaacggcaatgaaaataaactaatcattgcttcgtttagcggtgccggctttatcgaatctttctcagatataactttttgtccagagcaggtgtcaattaaagcaagtgacatggtttcatattataataaaaattcttactccataactttgcttgacatatactccaagccggttgcagataaggaagttaagtttaaaatcaataacctggaatacgtcgcaataaccaatgaaaatggtattgccgcaattacatttaacttataccctaatgtgtacgatgttataattgggttcaattcgatcaattttgataattataacgttaccaaaaaaatcactatcaagtctacaatttccattccagagaacaccgtgtatacctataatagtaagtacccaattaagttgttaaacaacaacggaaatccgttatccaattgtaaattcaaacttgtgattaatggcataacaaattatgcccatactgattctaacggtgcttttaaatacaatattaacttgaaacccggaaaacacacgataacagtgatcaatacaaagacaggtgagaagtctacccaaaagatcaaagtcgtctcaagaataactcaaaacaaagacttttcaatgtattacggtgctggtagaaattacaaagttaaggttgcagatgattatggaaaagttaagaaaaatcttaaaatatcttttagagtgaacggcaagacatattacaggtatacgaacgaaaaaggttacgcctacctaaaaatctctctgaagcctggaaaatacactataactgccaactataaggggtataaggtatccaacaaaattagagttaaacccacaatcatcactaaaagcattgcagtcaaaaaaggaaaaacaggcaaattcacagccaagctgttgaataacaaaggcaagatcctcaagtataaaaccatcaatttcaagttcagaggcaaaacctacaaggttaagaccaataaatatggcatagcgactctaaagattgctaagaaatacaaaatcaccagatattccataattactagctatcgtagtgaaaagataaagaataccattaaaatcaagagataa

SEQ ID NO: 73163 - DNA, 156 bp, synthetic construct
  source 1..156: mol_type = other DNA
atgtttgagatagaattaaagcaacaaaagatttccaacggtttaatcagatttttcacttcaatactggatcttcattctttgctcctatgtttgcaagaatattttacaagtatgaataatgtcgaaattaaaaaaatggaggttttccagtaa

SEQ ID NO: 73164 - DNA, 3609 bp, synthetic construct
  source 1..3609: mol_type = other DNA
atgaggaaaaacaattatttagtatttctattaatattttcattgtttctaactatctcttcagtctctgcactgaacgtggatgacaatgcgacaatagaagacacgaatttgaacagcatggatgttaattttgatatttccaatggcgaatttaatagtattaacatcgataaaacgttcgatacaaatatagatgctgatgccggaaaagacacaaacattgaggaaaaaacgattagtattacgaactctaataattccattctttccactaaagagaataatgtcaagaataactttaaactcaattccggttcattaagagccggcaatataatctacattagctctgacggtaccggggacggtttgacttccaataatccaacaaactgggctaatggatacatcaacgctcagtccggcgatacaatttctttccttgacggaacttataatcttgtaaatgtaaatctgaataaggatctggttttgaaggcttttaacgaaggaaatgcgataataaatgcaaaccgagctggtaatgtcttttctattaacaataatcgcaatataaccataaatggtttaacatttatcaatgggaagtcgactggaaatggtggagcaatttcctttaattcaggagccctaactgtaattaattgtaggtttattaataatactgcaagttcctacggtggcgcaatatatcttagagatggcaagttaaccatagtcaatacaacattcgtaaataattcagctgatgttgggggagccgcaatagcggacaccattagcatcacgcattctgatttcattaataacaccgccgatggttctggtggagctataagagcttatgataacctaacaattgtggactcgatttttactaacaatacttctataaatggtcaaggtggagctttatatactccaaatgttgacataaataattcaatttttgttaataatacttcattaaatggtggaggggcaatatactccagcaacgaatatttgatcaataattcggtcttcgtcaataactctgctatcgatggtgatggtggagcagtttcatcatacagaacaggcaatatcaacaattctaactttaccaataactctgctaagaaaagtgggggagcagcctatgctagagagtccattgaaattgataattctagcttcaataaaaactatgctggggctggtggagccgtccgtgcgcaatcagaagttaacattacgaactcaaactttaccaacaatgttgctaacaatgagggtggagcaatatattctaatggaaaaattgttgttaataatctaacttttatcaacaactcggctatcgaaagtgacggcggagcaatattctctgtagaagacgttgaagtagataattccaattttattaacaattacgcaggtgaacttggtggggcaataagtgcgtacaatgagcttacagttaacaactctaatttcaccaacaacaacgccaaatactatggtggcggcgtttatgctaacgtgttgaacagtaatagagacaattttgttaacaataccgcagaatacaatggtggcggcgcttacgtcttctctaacgctaacattaacgggtcaaactttgattcaaacactgcagtgaacggtggcggtttattcagcaccggcaattctagcgttaataattctaatttcattaataataatgcttatgatggatcggccatcattagcggaaacttacatttgaataataacaatttagagaacaacacatcgcggggttatggaatcgtctatgcggaaaacgcaaccatcgaaaataacaaattcatagataacgacgccttagaagataaagaaatctacgtattaaatgaattgagtcaaagcaataatactctgagcccaaatcaaatagaaaacattaatgctaatacagtaaaagtgaatactatcaatggtactacctatttggtcgacttagaagatgggttaaagggatactgtctgcaaagaacactaaatttccccgattatgtctatttattaaataacctgagtttggcacataaccaattgaccggtgaagatgtgagtgaatacttgaagattttgatttataaatattacttctcagataagaaagacaacataacgtactcgttatgggactttacagacagtgacttcagaaatagtaataacaatttaacgaagaaagtaatcgcattatacaactctggattccgtgtacctgattctaatgctagtttgatattggataatgggacgcaagtattgtttgatttttactcggcgggcagctcaacaacacaaaatttgttcctatttaatattacatatatgggcaacaattatgacatgaaagttgagaaaattacactgaacaaatctgtaatcaatggcaataaaacaaagttcataattagagtcacaaacattggtgatacaattctccatggtgttaccgtatttgaaaaggagtatgatggtctggtttatgattcctacattgatgaaggcaacaattggaattataacaatggtaaatggatttacaagaaacaactaaacattaatgaatctgccgaatttactgttgtatttaaaacaataaagtccggtaatttcacaaatatcatcatctcatcatccaacgaaactacaaataaaaccactaacaataccactacggtgtacactcctaatctaactgttgagaagctttcgttgaacagaacggtttatgtgggtaatcagactgtctttactattgtcgtccgtaataccggggattgtgatttgggtgaggtttttgtcgttgaaaaggctccagaaggtcttgcttacagttcatttaaaggcaccgactggtcatacaacaacggcaaatttacttatggcaagacgttaaaggtcggtgagtcggttagctttgagattgtattcgatgctgtgagttctgggaactggactaacgttgttgtggccggttcaaacttaacaggtaataaaactggtaataacactactaaggtttacaaccctggtttgaaggtggaaaagatcacgttggaccctgttgtgtctgtgggtgagattacatcttttgaaattatcgtgacgaataccggtgattgcaaacttggtgatgtctttgttcacgaagattcctatgaaggtctgaggttccatagtttcaggggtgatatgtggaaacagaaaggtgatacattctattatcagggtgttctaaatcccggtgagtcagcctcctttgtaatcctctttactactttgaaaccaggaaacttcacaaacattgttacagccggttccaatgtcaccaacaataccactactgaaaacaaaaccaaagtaatagaaaaccacactaacaataatactaacggtattaacaaaacagttaacaatgaaaccaaggaggtgaacgttcacaaggttgacacttcaagagccactggtaacccgttgctagcattactcatggttcttctcatgattagtgtgacgtctgtgaggaaattcaagaagtaa

SEQ ID NO: 73165 - DNA, 1131 bp, synthetic construct
  source 1..1131: mol_type = other DNA
atgcaaaataaattcgcttggatatctacaccagatgaattatgggatgacaagaaagagatgatcactacggcgctagaatctggtattgactacgttttggattttgatgatatcgaagagattaggaaattgggcaatgtgaaaatcattgcaaatactgacgatgcagatatctatttggtaggtattaatggtgagggtgatggctttgtcgaattaaacgatgatttcaccgattcaattgatattgctaatgcaaagaaagcaaaaagcgaaggaaaaacggtatgcgcctatataaagataactgacaaagcccacgagcaattggctgtaagattgggtagcattgtcgattacattattctaattggtaccgactggacaattatcccacttgagaatattatagccgacttacagaagttggatgtaaagattattgcagctgttcgggatgtggatggtgctcgtgttgcccttgaaacgttagagcatggaacagatggcataatatttgaagcgaacgacttcaataacattaagaagatcgcccagaacgttattgaagcatcccaagtaaagtatgaattaaaactagctaccgtaactaaggtcaagcccttaggtagtggcgacagggtgtgtgttgatacaactgacatgatgaaacccggtgaggggatgttgatcggttcctattcaaaatccatgtttctggtgcattctgaatcgcttgaaagtgaatacgttgcttcgcgcccattcagagtaaatgctggccctgttcaagcatatgtgatggtccctggaaataagacacgatacctctctgaacttgttgccggagatgaaatattaatcgttaacaccgaaggtgaaactagaactgcgtatgtcgggagaagtaagattgaaagaaggcctctattattgctggaagcaaaatacgaaggtaaaactatcagaacactcctgcaaaacgctgaaaccataagaatagttgatgaaaacaacaatccattgtcagtggctgacgttaaaccgggagataaagttaaagtctatatagaaactaatgcacgtcattttgggattgctatagacgagacaatcattgagcaataa

SEQ ID NO: 73166 - DNA, 4830 bp, synthetic construct
  source 1..4830: mol_type = other DNA
atgaagttatttaacaacaatttcatatctgtattattaatactgttcgttctcgttcttgccgtcaattcagtgtcagccacggataacaatattacggatataaacaatgtcaactctaatttgtccaatgtattgaaatcctcgtcttccctgaacgatggagatgccatctcatacgacctcatggacaataaagacgtcatctcgcaaaaattttcttcaaatagtaacacaaatgataagtcaaatatgtcggacgtggttgactctatcgaatctgtagcagaaccaacctccttggattcacctatactcaggtcggttgtacctagcggcattacattcgatggagttttccatgtgggtacgggacaacaatattcaaatatacaagacgcactggaccaatgcaggagaggcggatataattatcaaattatcatacatgaaggcacatatactggatacggtaataaaaatctagtgattgagcctactacttggtggaacccaaattttgggtacttggacatcagaactgcaaatgatggcgacgtggtaatattaaatgcagaaagatcgccaagcattctaacaatcaattctagaaacgtgcatataacaggattgacattcatgaacgcttataattatggtagtggtggaacatctggagctggcgttgctataaatataagaaaaggaaccgtatctatagataactgttcttttattaataatgaagctagaaacctatggggaggtgcagtccatattgattcaagtataacaaaccgaatctctaatatagatatcacaaactcgttattcgttaataactccgctgaggtaggtggagcattccggtctgaaagatattctagtaatatcaacataattaatacaacatttatcaataatacagctactgaacacggtggtgtagcatgcctattttcaacagatgtgacatttgcaaattgtacgtttataaacaactctgcgccttcatcgggaggtattcattttcacgttggcggatcacacatcgacaactgtaccttcataaataatagtgcctatgggaccgggtcttcggaagaagggtatggtggagctattgcgttagtttatagcactagcgatggtgttatcatttctaactcttccttctccaataactttgccgggaaatatgggggtgccatcgatgtaaatggctctggttcaaatgcgaaaatattgaactgcaactttgaaaacaatacggccggatatggtggcgccatcagggttcaggggtcgaacactgtgattgacaataacagcctgatcaataacaaggccattaacactgatggtggcggaatccacgttgaaggtagtaacacgcaaatctcaaatactatttttagaaataactctgccgccgcaaacggaggtgctttggctattgttgctggtgataatacattcgtatccaattcagtcattgctaataacacggctgtgaacggtgcgggtgcgtacatccaaggaagaagagtaactatatccgattctattgtcgctaacaatactgcagaccagaatggtgcaggagtttacattgacggaagttatgcgacgataaaagactctactatctacaacaacaacgccacagttaatggcggtggagcttatataaatggtagggacgcgactatctccaatgtgaactttgtgttaaacaatgctatccctgatgaagaagctttggacgatggtcttggtggagccatttttattgctggtagcaatagctacattgaggattccaactttacctataatactgctcgtaacggttctgctatttatatagatccgacatcatcgatagcaaacaattatatttacaactgtaatttcacagaaaatcaagcttggagttactggttaccaattttctataacgatgtaactaaaacgattgaatctaatttaacgggcggaaataacatactaaatgctatttacaataacggaagtaacttacatattttcattgatggcgtaaaccccgttttgggatgggaaaactctcagaacggtacaataatgtatcaagataaccgagagttcaatcaaactattgtaacacttgtttgggacaggcatggcaatctagtatttaatgaaactgcagttaccgatctagcaggtaatgtctgctacgacattccacaagacacacatttatggtttatagttagtatgactcatttagaggatacttactataaagaaattaccaacatcacgggtattaatattaatcctgggttgaccatcactgatgtaactatgtacgagggtaattcaaccccgcaaacaatatacatcgttctagctgatgatgatgcaaaccccataccaaatgaaggtccaatcatgatttacgtcatggttaacggcaacaagatactgcttggtagtggtaatacaagtaagaatgcagtattgattcttaatgaatctgccgtattcaagacactgaatcccggcaactacaccattattgcagaatgtacatacgcatattataacgaaaccactcaatccatatcgaataaaaccgtatcaactgaaggtatcctagaagttctgccatacatctggagtcttaacaaaactatttctcacgttaatgggattccatatattgagggtatggttatccagataaacgacaatgttacctttaacataactgtatttaatgaagtgaacaccacgttatacggactaaaattaatcgatttaaataccgaaggattaagttacgtttctacgttgccatccaattggaattatgaaggtaacaacgtatggacattagataacctagtcaattatggaaattcatcattatttgtcacttttaaagtactcaagactggtaatctaacgaacatagttaattgtagcttccttgacggcttcaaaaacaaaagtgctaacattacttttgcagtcaatttaaccgctgatttgggtgttagtaaggtggtaaatgtgtctaatcctaactacggagactttattaagtatactgtagtcgtctctaatgctggccccgatgatgcaaccggtgttgtcgttaacgagactttgcctgtgggtttggtttatgttagtgatgatgctagcgttgggagttatgatcatgttgctggcttgtggactgtcggcagcttggcgaaaggtgattccgcgaccttgattgtcgtcgtgcgtgttggtgggactgggaacatacagaattttgtgaatgttagcggggctgagtatgataataatactggtaacaataaggccaatgtcactgtggctgttaacgcgagcgccgatttgggtgtctcaaaggtcgtgaatgtgtctaatcctaattacggcgactttattaagtatacagtagttgtttctaatgctggtcctgatgatgctaccggcgttgttgtgaatgagactttgccggtgggtttggtctatgttagcgacgatgcaagcgttggtagttatgatcatgttgccggcttgtggaccgtgggttccttggccaaaggtgattcagctactttgattgtggttgtgcgcgtcgggggtactggtaatattcagaattttgtgaatgtgtccggtgcggagtatgataataacacagggaataataaggccaacgtcacagttgctgtgaatcagcttaaaacttacattatcgtatttaataacaccgtttacccaggtgacgatgtcacagtcatcgttacagttacgacccaaaacggttcattatttaacggaaatgtcaacgtcgctttaaatgatactgcaaacaccactaaagtggttacgatagtcgacggtaccggtagttttaaggttacagtcgacaagaatcttgttaatggctacgtaattggcattaatgcatcgtacgatggtaatgacacatatattggatctaaaggttttggctggattaaggtgttaccagtcaaattccatgttgaaaaaactattgtaaaaggtaatgaatttttcattggtgatgagataatattcaacattaccgtctacaatgattgtaatggtacgttatacaatttagttgtcagtgacgttcttccaaatggtgtcgtgcttattaatagtggctttgggctatggacatatgatggtggctcttcttggtcctatggtgatctgtccgcaggcgcttcggcaaccttgattattaagtcttccgcagtcaaagctggttcattcaccaatgatgctaaagccacagtaaatgatgtccttgataattcatcattggttgatttcagtatctcaaaattaaacactagcatctcggtatctaatgtgacagggcaccctggtgatgtagttgttataaccattaaagtttccactggagacaacgttccgtttaatggtgatgtagacgttatcctgctcgatggtaagaaaattattgttcacgtaactaacggtattgcaaagtttaagtggacgatccccaagaacgccaagaataatacaatattctccattttcgtatcatttgcaggctcctcaaaatactttggatctaataacacaggatttatcaaagtaattgacaacaaacaaaacaaaactaaccatacagataacaatgatttcactgacaagtgtaataaggggattatcaaaaataccggtaatccattactcgttttgctgatttcaattgttatcttggttatatcattaaaacgtagaaaggactattaa

SEQ ID NO: 73167 - DNA, 1743 bp, synthetic construct
  source 1..1743: mol_type = other DNA
atgaacataaataacaatatgaagttgggtctaatcgccgctatatctattatagctctattcgttttatctttatggatttcccaaacaccagccaatgatgataattctattcgctttggtattttaacattattgccgcctttggtagctatcggtttggcgtttataactaaagaaacaatcttgtcattgtttatgggtgtatttgtgggggagtttatgttgtgtgtaaatgatttaaacattgtttccacagcaattaatgcatttctccaaatgggttctcagatcatctcctgcatggctgatccttggaatgcaggtattattcttcaatgtttacttattggaggcataatccaacttgtaacaaagatggggggagccaaagctctagccgataccttcgccaggagagcggatacgccaagaaaggctcagttgttcacctggtttttgggattatgtgtcttctttgatgactacgccaactcgttgattgttggtccgattatgagaccagtgatggacaaactaaaagtctctcgagaaaaattggcattcattgtagacgcaacggcagcccctgtggcaggtattgcgattatttctacttggattggtttggaaatcagtttaatcgccgctggctttgaatcggtcggcgtaactaatgtcacaggtttcggtatatttctgcagactatcccatacaggttctacaacattttcattctacttttcatagtgattagcagtataactttatatgaatttgggccaatgaaaaaggcggaacagactgcacgtaagagaaaggagaacgaagaaatcattgttccaaacgctcccggttttgatgaggttaagccagttgaaggaattaaattatctatatggaacgcaataataccgataggtactttaattataggtgctcttattgcattctattggagtggatacaccaccattctaggcggagaggatcaagctctcatcgctataatgaaaagctctccattatcatttaatggggtctttaccgctctgtcacaatctgacgcttccgtggccctgttccaagctgcacttctggctagcattgtggctatagtgatggctgttggggagagaatactcactattgaagatgcaatctctgaatggataggaggaatgaaaacgatagttattactggtgtcatattgcttcttgcgtggagcttaggtggagtaattggtgacgttggaacggctaattatttggtgggtgttctgaagaatacattgcctcaatttattgttcctgccttaatctttattctaggtgctttaatttcatttgcgacaggcactgcatatggtaccatgagtatattaatgcccttggcaattccattggcctgggccgtaggcagtggggacatgtcatttaccattgtctgtacgagtggcgtcttgactggagctatctttggcgaccactgctcgcccatctcagatacaacaatattatcatctatgggaactagttgcaatcatattgatcatgttcagacccaaatttattatgcaatattcgttgcctcggttgctatcttcatcggttacatcccagcaggtctgggcatcccttggttcatctccattcctatcggtgttgttgtaatgtatgttggcctgaaaattctaggtcaaaaagtcgattttgatgaagtggaggaatcatcctcataa

SEQ ID NO: 73168 - DNA, 507 bp, synthetic construct
  source 1..507: mol_type = other DNA
atgaagagattatacgccttacttattatactcattgttatctatattgggatcaattcattcagtttgattttcaacgataatggcaccaatgatgcgaatgatgttaacgaatccatgataacggtaggagcatcttctttgccagaaattgaaaactttacagacaatactctaaacgatacaactattagtttagttgactcaaacaaaaatatgaccattctagtgtcagagatagacaattcccaatcaatttctgatatcttcaacaattttgtaagcagtaatgatatcagctcaactcagaccattgatcaaaatggtgtcacaacttatttggcatacagcagtggttcggattcgtataatgctgacatcttttttaacaagaacggtcaaaattattgcatttctggagataatatcctgtcttccgactctgattactttataaatcattgtaaaggtataatagacgctatttcgataaactctacgtcctaa

SEQ ID NO: 73169 - DNA, 297 bp, synthetic construct
  source 1..297: mol_type = other DNA
atggattttttactagttctcgccaaaattcagccaaaggagggttgtcaagacagtatccttgagctggcggaggaattaatctatgaatctttactagaagaaggaaacattgattaccaattgttgaagtcctctgaagatgattcgttgactttcgtcgaaaaatgggagtcacccgaatatcttaagaaacacatggcttcacctcattttttaaacttcaatgcagactgcgaagaatttatagaaagcaatgatattcaattgattgaagctaataaaatagagatataa

SEQ ID NO: 73170 - DNA, 567 bp, synthetic construct
  source 1..567: mol_type = other DNA
atggagattactgcagatgaaatgaaaaagacaataagaaagatatatgaccgtctagataaagtatcgcccgttgattttgactgtggaaagttgtgtggcgaaatctgctgtgtctatgatgctgacgactaccataatgaagatttggccctatatcttctgcccggtgaagaactgatgtatgaggacagtgacagctacaagttgtattatatcgattcatctgaaattaaataccctcactcttggaaaggtcaaatttaccttgttaaatgtattaaccctccaaaatgtgatcgatccatcaggcctattcaatgcagaacgttcccattaataccgcacttaaataagaaaggggagttccatctcatatttgatgagagtgaatttccatacaaatgcccaattgtccagaaccatattaagttgaatgatgattttattcaagtgacttatgaaatctggtcaatcttaatagctaatccattagtttatgatttggtagatatggattctaggatgagagacaacagaaaaaccgattacgaaattataatttaa

SEQ ID NO: 73171 - DNA, 1386 bp, synthetic construct
  source 1..1386: mol_type = other DNA
atgaagattgaatttgaaacatacgtaatatttgtatcatttataacttcgttttttgcagtgtttttatctaatggtataatcataggcgttccagctatcgctcaggattttgctatgaataacgttattcaaaactgggtgcctactatctttttccttgttgttgctgtctttacagtgccggcagggcaaatttcaggaaaatttggtgttaaaaaatctctacttgctggaattactgtattcctattgggttcaattggcgcttgtcttgcgtttagcactgaaagtttcttgatctttagaatcattcaaggtgccggcgtggcatttttgaatgtatctgcaatggcaatggtcgttcacgcagtcaaacctcagaaccgaggtaaagctttgggttttacggtgactggtgtttatctggccacatcgctttcacctgttatttgtgggtttttagtacataacttgggttggcgtgccatgttttacttcgttattccctttttggttttgtgcatcatattgttgatattaaaaataccacaagaatggaagacctatcaacatgatacaattgataaagttggatctatcatctatgctattggcattttgttattcatttacggcttcactactttaattacgacgaatggtaaaatattgaccgttactggaattattttactcgtgatattcggtgcatatgagttgaggcagaaatccccagtattcaatatgaatttatttaagaataaaaagttcaccagctccaacattgccgcgttgtgcagttatctggcaatcatggtcgttaccaccattctaaactaccacttacagtatgtaaggggttgggatgcgcaaatgtctggcatgatactgatcatcacaccaatcattatggcaataatggctcccaacgccggtaaactaagtgacaagatacatccgcaaaagctggctgcgactggaatggcaattgccaccattgcgcttggaattttaacgttcttaaatggggaaacacccatttatttcgtcatcatagctatgattctacaaggtattggtatggggctcttctcatctcctaacatgaatgcaataatgagctccgtcccacctaaggatgccccaactgcttcggcttcccaagccacaatgagaacaatcggccaaaccatgagtttaggtcttttgactctagtctttgcttggataatgggtaatttagagttatctccacagtacacaaccatgattatacaagcttcccaaactatttgcggaatctgtacagcagcctgtatactggctattttcgcatcactcattggaatcaagtctagtgacaaattcaatacgggtagataa

SEQ ID NO: 73172 - DNA, 687 bp, synthetic construct
  source 1..687: mol_type = other DNA
ttgaatagaaagacaaaaataataattattgcaatttttttaattatagcgagcatattattcgttggaaacagattcttcataccgcattatgaaaccattgcagacactgatataggtacggtagaagtggctacttacggaaatgccaacgctacaaagtgtattgccctaatcacgggaatccatccaagggagacactggctattaatcccgaaatcgatgccgccaaacaatttgcaaacgatgatgttaaaataattcattataaggtcacagtgacaaaaaacgcgcaggactatagtaaaggccgtgcaaacggggagtccctcgttcacaattatgtaaatcctaatgttacggcttctgacgcggatgctgtcattatatcacactcacatattcctgaatacggtgaaggtttttacgtagctactccagcaatggacaatgcatctgttaagatcggtgagaacatcaaccaatcgagtgattttaattattatcctgtcaccggtaatgaaacatacaaatcaacttctgctgtgcttgtttccaaacccattgctgaagccggttacccaacctttgtatatgaagttccagagaatgtcatggaatttatcatcactggcaaaaccaaggatttgttccaattgattattgaaaacacttacgataattaa

SEQ ID NO: 73173 - DNA, 2955 bp, synthetic construct
  source 1..2955: mol_type = other DNA
atgaataagaaaatactgattttacttctgatagctattttgacattttccgtcgcgaccgtctccgcatcagacaatacaactgatgactctgtcattgattcatctaaccgagatgttgtgagcgtagatgataataatgtggtctcggatgagtatgcggtgaacaaagtttccaatggggcgctggctgatgtcaacggtgaagaaaacgtaaataatgatgttgatatggttatagatcctataaacaacgtatcggtacttcaaggcgataatgtggacgtgaacatcactgttaagaacataggggaaaacaatgcttctaacgttaccgttaattttgaactccccgatggattttcactaatcgattctaataatgtatcagataatacgtggcatataggcgatttgcagtcatcgaaatctactaacatcactgttaagctaaacaattcgggaattaataatggtgattatgttattaacctaacactaagagctaacgaagggattgaagaaatttttaagcagaatgtaactgttaatgttataaagaaacttattcaaacaaacttaaccattgatttcgataaggagtcatatgtatatggtgatgatgtgggaattgatgttaagctacctgacgatgctactggtaacgtgaccataaaaatcaatggcaccgaaaataatgccagtattaatgaggtattgattttatctaatttgacgcccggcaactatgaagtgaacgttacctacagtggggacgacaaatacaatgggagctctggtaaggctcgtttcacaatatccaaggccaacacaacagctgcaatcgacattgtcagtattaaggttgacgatgagctgaatatcactattaactatgactctgagatcaatggtaatgccactatctatgtggacaatatcaaaaatcaaacaatagaaatcatcgatggtaacggtaatgtcactattaaaggattatccaaaggaatgtatgacattaaagtagcattcgatggaaatgactgttataattcatccgaaactaacaagacgattgaaatatctaaaaacacagtaaacatgttgatcaacgtaggagatattgtttacggtaatgacctggttattaacctcaaacttccagataacctgacgtcaaatgtcactgtaagtttgggtgacattaacagaagtattaactgcagcggcaatgtaacattcaaagacatgaatgctggcaattacaccgccattgtctcgtatggcggtgatgagaattactttaacgaaacaaagtacgtggactttaagatatataaagctagtacacaaactactgtcaatacctcagacattaatataggcggtgtgttaaatgtcagtgttgatcctaaaattgatggaacagctactgtctacttaaacggaactaaatactcagatgatatcgtaatagttaacggtagtgggaatgttgttatctccaacttaatcgagggaacgtacaatgtcctagctgtctttaatggcaatgacaactacaattcctcattaaccaataagtccattaaggtatcaagaaatgtcttcaacattacggttaatgtgactgacgtttgttacggtcaagatgtaataattaacattaccttgcctggtgacgtcaccaacaccgtagacgttgtttttggttataactctcaaaatatcaaccttgaaaacggtgttggaacggttaagtttagtgatttggatgtgggcaattataatgcaaccgtgatatattatggtgatgctaaatacctaaagagcacgcaaatcatttccttcaatgtgactaaggcgaaaccaacagttgatgttaacatttcaggcaataagcttggtcaggatttagttataaatattgcattgccatcggatgtaaaaaataatgtgaccgttggcatagacaatatctctcaagatgttaaggtcacaaatggtgtgggtaaggccatatttaaggatttaacaattggagagcacgttttgataattgattatagtggtgattctaactacttgaacacgactgaaggtatctatttcaatgtatctaaggcaataccggtcattgacattgacgttaaaaacatatacgtcaagggtaaggaagttatagatatagctcttccagatgatgccacaggttctgtaacgatctttattaatggggtcgaacaaaaaacagtcaacgacaacatcagcagcattgttttaaccaaatctggtttggctgccggaacttataacgtgatggtgagctatactggggattcgaaatatgaatctgcaaatacaaccgttcagtttaaagtttcaaagtacaaagctaaattgaccgcatcatcaaagacgtataatgttaaagtaaaaaccaaatattactacattactttaaaaaacaacaagaataaagtaatgaaaaagatcaaagtctatttgaaagtgaatggtgtaacatattccgctacaaccaatagctatggtaaggcatctttcaaacttagcaaattaactaagaagggaacatacgatgcactaattacatataaaggcacttcctactataataagttaactaaaaaagttactattgcggttaaggcaactccaaagctgactgcttactctgcaaaattgaaaaaatctgttaatgccaaaaaatacagtgtcactttgaggacagacaaatacaaagccatgaaatatacaaaggttaccttaaaggttaacggtaaaatctatactttaaaaacaaatagtttaggtaaagcaacgtttaagattactaatttgaataaaaaagctaaattcctcgcagttatctcctattctggtagtaaatactattactcggccactaagaaagtgatattgacagtcaggtaa

SEQ ID NO: 73174 - DNA, 1650 bp, synthetic construct
  source 1..1650: mol_type = other DNA
atgaaggtgattgctagtaccaggaacgatgatctcaaaagattaaatgaaatatataaggttcttaagaagaatgactttggttacttgattgaggaaaatacgttctttaggaaattcccatttttaagaaactacaaaatagagaaggaagataatttttccgatgagtctgtccctttgagaattagaaaagtactggaagaattaggtccagcatatatcaaattagggcaaatgctaagtacaaggccagatttagttggcttggaaatcgcagaagaacttcagcagttacgagataacaccccaataaccccttttgatgaaataaaggaagtcattgaagaggaactgggcaagcctatggaagatatttatagtgatattgaccaaaatcctctgggatcggcctctatcgggcaagtttttaaggcccaacttaaaagaaatggtgaagaggtagcaattaaagttcagaaaccaaactcccgtgaaatcatagaatctgatatcaaaataatgaaattccttgcaaagaggattgataaatacatttcaagttctaaaacttttaatctacccacaatagttaacgagtttgaaagatctattctaaaagaaattaattatttagaggaggttatgaatatgcaaaatctttcaaaaaacttcaaaaatgtgaattacatcaagattccaaacgtctatatcgattattgcagtgaaaaaataatcactatggaattaataaaaggaatcacagtcactgaactaattgaaggggactatcctcatattaataagagactgattgctaattatggtctcaagtcctacttcaaacaaatcatgattgatggttacttccatgctgatccccaccccggaaatctgattgtaacgcgggataataaattgtgttacatcgacatgggtatgatgggcattttatcggaggatttcaaagaaaacttagctgaatttatgttgctattgatatccggcaatacagacaacattataaaacaactaatttatatgaatataatttcgccatcacaaaatacaccggaattacgtgcggatattaatgacttgttgaatttgtattatggtgcggagttaaagaacatggacggtgccatggaagatctgcttaacgctatggttaagaataacgttgtgcttccaaacgagtttgtcatgattggtcgtggtattgctttgattgaagatacgggtaaaaagctcgaccctaactttaacgctgccactgagttgaagaagttatctagaaagattgtagtgaacaaatacaaacctgaacgcttggcaaaggtcagcttgaactaccttttgcagttggagcacctagcaaaagacttgccggacaccataaatagcactatctcaaaattggaagaagggaatatcgaggtaaaattaaagcatgaaggcatcggtcatttgataaaccaattatccatatctctgatcctctcatcattaattattggttcatctttggctctaatcactgacgttggtccggatttattcgatttcccaatacttggattaatcggatttgtttttagcggagttctaggcgcctatttagtgttgataaatgtaattgaaagataa

SEQ ID NO: 73175 - DNA, 1338 bp, synthetic construct
  source 1..1338: mol_type = other DNA
atgttgaatgaatttttcaaattatctgaaaacaacaccgacgttaagactgaagttattgccggactcactacattcttggctatgtcctatattttgggagtgaaccctgggatgttagctgagggaggaatgcctgcaacgggagtcttttttgctactgctcttgcgtcgggtattgcgtgtattatcatggggctagttagcaagtaccctgttggcctagctcccggtatgggtatgaatgccctttttacttatactattattttaggtatgggtaacacttgggaagccgctctcgctgccgtattcatttccagtatcatatttttgctaataactgtttctggacttagggaagctattcttaatgcaatcccgcataatctgaaactagctataggcgcagggattggttttttcttagcattcattgggttgaaaggggcgggcataatcgtcgctgatccatcaacaatggttactttgggttcattgttctctgctccagcccttttagccttgatcggtattgcagttacgttgattttatatgttagaaaagtgcccgccgcagtatttataggtttagtaattactgcgatattgggcatcatatttactgctgcaggatttggtgttggagacatagctatgccatcagttccaactgaatttgtctctaccacaattgatacatctgtatttggtgcatttgcatcgggatttagccagctattcacaaatatccctaacctaattttaatcttattctcactactttttgtgacatttttcgacacaaccggaactttaattccgctggcaaatcaatgcggtttcattgacgaagagggcaatgctgatggcatagacaaggctttccttggtgatgcaattggtggtattataggtgcgattttaggcacaagtacattaacggcatatgtagagagtgccactggtattggtctgggtggtagaaccggtttgacggctatagtcaccggcattctatttttaatttccatcatctttgccccaacagtcttagctttgtttacatcgagcgttacggctgctgcgttagtgatagtgggcatcttgatgatgattcaattaaaggatgtggattgggatgatttggttgtcgttgcatctgtattcatgaccataatcatgatgcttttgacctactccatctcattggggatcgcatttggttttgtcacatacgccattaccagtattgctgccggtaaagcaaaagaactgaattggttggtttggataatggtgctggtatttatcatatacctgttcttcggactctaa

SEQ ID NO: 73176 - DNA, 3186 bp, synthetic construct
  source 1..3186: mol_type = other DNA
atgttgataacattgttgtgcttatttacggttagtgctaaggaaatatatgtgtcatctgatggttccgatgatttgaatggtacagatctgaataatccctgcagctttcataaggccattaatatttctgaagatggtgactcgattaagatgaaggcggggaactattccatctctgaggaggtagacaaatctctgaatatcagtgcatatagtgatgatgtggtcaatataaagaacaaattttcgtatgtgttcaaggttaaaaacaacaacagcctagttctcaattcgttaaatttcaaaaattttaacacagctatcgaatcatattcatatccaaatataatgatcaaaaattgtttatttgaaaagagtagctatatgtgtctaaatatgcggggaggcacgactattataacagactcaatatttagaaataataccggtagtcaaggtagcgcaataaacttccaaaacacgttgtacaaaaatagatcttatttacatataaacaacacgatttttgactcaaaccacgggacaaacctaggaggagtcatctacatctctctgtcaaatatgtacctttataacaataccttcatcaacaataaagccggttacaccggtggagtaatcttcaatgacgtatcgaaagtttatgataaccgttctagatacatcaataatggggcactatactcgggtggtgctatctatattagaggtgacaaagatttgggttcgtactatggagatcatgtggaatttataaataattctgccccatataaaaatggtgactctggaggttatgggacttctggaggagcttttactgcagtagatggtggagaaatagttctgaagaatagtgtgttagaaggaaataaagctatgtccagagggggtgcaatctggtccgaccaaaaagtcagtattataaatactctgatttcaaataattcggcttacaatgaaaccggtctaacggtgggtggtggattgtattgtcctcttctgaaagtaaatataatcaattctacattttcaaacaatcatgccaaagaatatcccgatatttttaacgatataacatttccttcagtggacattgtggaaaatattaataacactgatggtaaaaaaattagtattaaaaatttaaccaagccagtatcatattgcttgcaacctggaatattaaacattgccagttctccaataattgaaacaggcacaaataaattgcttggttctggaggctacttcaatgggaagcctattggtgaattattgaaaatctttatagtccaaaactaccagagagttcttgataagaagatttccgaaaacacctttaaaagcatgttgggttttatatccagtggctgttcctcactaccttctccatttaatgattcttattacttatcccatagattaattaaggaaactttagatgaatacgaaaaaggcgtgagatacccagatgtaaacgcaaccggtccaattaactggttgacaaaaaagtatttaacattcgatttctatcaattctccaatgaagatcaccaagatttgattgtgttcacattcaatgagagcaacacaactcttaatccaccaattaatgtaaccaaaaaatcaaacactacaaatcctgactttaatacggttgtatcttacgttatcacggtaaagaacactaataagacatcaatggtgtttgacgctttggttattgatactctgtccgaaggattggtttataacggtgcttcccataatggagtatacaacaatacaactaacaccgttacctggattctcaacattcctgcggatagtgaaattaaccttttcgtgaatgcaacagtggaaaaattcggcaagctaaacaatacagttaacgtttttaataagaccgcaaatgttaccgttaacgttccaaataccgatgtaacaaaagctgtgaacgttacaagacccagcttcaacgatacgatttgttatactattacagtgtttaaccgaaatccaaatgtcgacctcatgaatcttgtagtcagggatgttttagacgatggtttagttttcaatggagcttccagtggtggtgtttttgatcctatttctcgcactatcatctggacgataaacattactaagggggggcaagccgttatttatgttaacgtcacggtcaataaatatggcatgttggttaacaaggtctttgtcgataataagacggccaattctaccgtatatgtaccaatcgaacctccagttaacccggatatgactgttgtgaaactctctttgaataggactgtttatgtagggaaccagactgtcttcacgattgttgtccgtaatactggtgactgcgatttaggggaggtctttgtggtggaaaaggctccagagggccttgcgtacagttccttcaaaggcaccgactggtcatacagcaatggcaaatttacttatggtaaggtgttgaaagtcaatgagtctgccggctttgagattgtattcgacgcggttagtcccggtaattggactaatgttgttgttgcaggctcgaacttaacagataacaaaactggtaataatactactaaggtttataagccggatatggctgtcgagaagttgtctttgaataggactgtttacgtcggtaaccagactgtatttactatcgtcgtccgtaatactggtgactgtgacctaggtgacgtctttgtggttgaaaaagctccaatgggacttgtttacaactcatttaaaggcaccgactggtcatacagcaacggcaaattcacttacggcaaggttctaaaggtcaacgagtctgctagctttgatatagtatttgatacaatcagtcctggtaactggactaacgttgttgtcgcaggttccaatgtaaccgataacaaaacaggaaacaataccactaaagtctacaaacctcctgtaaatccccccgttaagcctccagttaacccgccggtaaatccacacaaaatagaaaaaccagataatgagaaagacaagattattaagaaagattcgtcaatcaatataagaaaaacaggtaactcaatattcttaatgatgttatctgttattatttcaattccgttaatccgaaggaatcagaagtaa

SEQ ID NO: 73177 - DNA, 576 bp, synthetic construct
  source 1..576: mol_type = other DNA
atgaacaaaaaggttgtagttgcaattgtggttgttgttattgttgctattctggcgatattgatgttcatcggatcatctaatgtgacattaatggcaggtgacagttgtatcacactcccttcagattacatgttagataataaggggattgcctacaagaatgatattggtatcttttttatttccgtatcaggtaattcgccaaaagatcaaaaggaactatttgatgccatcaaatctaacggtaaatcctcaggctataaaaacgtcactaaagacaaggtgaatggcttcaaattgtatgaatacgaagctaacccagacaaacttaagaatgtctcctcggatagaaaaataagcggtagctatgaaacttggaagacctactctccgtacactccctatgaagacgtctctgatatggacgtgactaagttcaggtatatcgcttacgtaaatgaaaacacggacgatataagtgaattgtatatatttaccaacaatacaaatgtcgatttatattctggagagataacgaaaattattgatagtattgcagttgtagaggagtaa

SEQ ID NO: 73178 - DNA, 357 bp, synthetic construct
  source 1..357: mol_type = other DNA
atgatgattataacgactatattgggaaccctggtagccctagaatttttttatataatgtatcttgaaacatttgccactaactccgacaggacaagcaaagtttttgatatggataaatcggaattagaaagagagtcagtcaacactttgttcaagaatcagggagtttacaatggtttattggcggtgatgattctgttggctcttttcgtattcgtttcaaaaaccgctttatctgtcttaatggcatatatcatactcgtggctatttacggtgggattacaagtaatccaaagattattttcatgcaaggcggtttggcaatcattactctaatctcttgtatcttttaa

SEQ ID NO: 73179 - DNA, 222 bp, synthetic construct
  source 1..222: mol_type = other DNA
atgtttaattccaagttcttgatattaatcctcggtgtcctaattattggtttagcattatttggctatttcggtttgtcagataacgctcttgagtctgattctagtcttaatgaatcacatgacgatgtagtttacctatggatgttggatgataacgacaatctgaaattgataccaacaactgaaacctattccgaagggtctggaagcaattcgtaa

SEQ ID NO: 73180 - DNA, 1029 bp, synthetic construct
  source 1..1029: mol_type = other DNA
ttgataaataagagattcattttagtttttgtaattatcatgatcttacactgcagtgctgttagtgcctatgaaaattatgatgacttcgtttttaataatattacaatagatgattcaggtcatgacgatactaagctaattgatgaaaaaagcttctactattatgaagaggatagcggttacctttctgacaatattgttggtggcaagaacattaagaatacgacaggggtagtgatggctgacgacgaatatagttgtggtgccgctagcttcgccaccgttttaaacaacctcgggaataacattacattatatgaagctaaaatcgcaactaacactacgttgaatggcacgaccatgaaaggcataattgacgcaactaaaaaatacgatctaatgggagttggtgttaaattggaaacagttcagcttaaggaaaattatattgtgaatatgaacatcttgggtattactcattggtctgtagtgaaagaaatcaacgaggagttcattattctggcagattctaatttgggtaattacaaatttgatataatggaatttaaccaatactacactaatcaaactatagtcatactgaacaagcaacaatacaacaatcatatttctattgtatcaaataataccaactacatctccaacatcgatcaaaaatatatctcgggtaatggctatgcgttttacgtatctaaatctatgtcgtatatcaatgcaaaccctaaaggttatgcatttaagtatacaattatcgtaccaaaatggggaggaaaagtcgtcaagctatcgacaaaaaaattaaccaagcataggataaccgtcaaggtgatatacaagataaaggtttactccaagagtcattttaaaggaaaagtggagactattcaccagccagctatttttaatttggctcataaagcgggaaccaagttttctgtctcaagacctacatccttccccattcaatcaataaaatatactgtttcatattcccacttcccgtaa

SEQ ID NO: 73181 - DNA, 1512 bp, synthetic construct
  source 1..1512: mol_type = other DNA
atgattctagctgtcgcgtttcccgaatcctttagacaaataactaatagcatcagggattttctcggtatacacttcggttggttctatttaatggtggttttcttatgtgtcgtgattagtgtcattgttatttttcatcctatgggtaaaattcgactaggggacccaaattcaaaacctgaatatagtacattttcatggatagcaatgttattctcggcaggtatgggaataggtcttgtattttatggagctgccgagcctttatcgcattatgctgttatggctccggaaaccaccgtttttacacaacaggccatgttggatgctttgaaatactcatttttccactatggtatttcagcgtgggccgtttatggcatggtagctttggcaatagcctacttcaaatacagaaaaaaggaagttcccaatatctctagcactttaaagccaatcttcggcaagtatactgaaggcaatataggttatgttgtggatgcccttaccatttttgcaacagtagtgggtgttgcgacctctctcggtttgggtgctgttcaaattaacagtgggttaaactacttattcggtataacccaatctatcaatgtccagattattatcataatcatcgcctcaatcctatttctaaccagcgctgtctccggaataaataagggtgttagaatcctgtctaatactaacattttgttagccatccttctcatgttgattgcatttgtgattggaccatcgcttgatattgctaatttcttcattgaaagtatcggcgcttacatgaatgacttcatccgtatgagttttcgtacggccgcatcaggtactgtagctcagcagggttgggtacaaagctggactatatactactgggcatggtggatttcctggtcaccttttgttggagtctttattgctaacatctctaaaggaagaacaataagggaatttttgacgtacattctactggttccatctatcttctcctttgtatggttttctattttcggaactttggctatgaatgggacaactcctgggagtcccatcatcaagatgccaatatctaatatgttatttggcatcttcaaccaatatccactggcaataattttatccattttggcaattattttaattatcatatacttcatcacgtctgcagattccgctacagttgtcttggccattttatcggagaacggtaacgaagagacgtccaagaaaattaaagttatttggggcataatattgtctagtacagctacaattttgctaattaacggtggccttgacggattacaaaacatattgataattactgcatttccattttcaataattctgatgcttattgtcgtttcagtgtttaaggaattggtgtatgaaaaagatgaaatgagactgtttgtaaaggcggaacgccatccgactgtagacagacctttcaaatcttatgagaatcaaaataaagaggatgaagagtaa

SEQ ID NO: 73182 - DNA, 237 bp, synthetic construct
  source 1..237: mol_type = other DNA
atgtctggtacggatgagctgctactcaaaatctttttcagaaactatgatgaagaagaaagaaggaatggattaatagacaacaagaatagtcagatgattgttctaacaggcactatgttgactttacaagcaacattattttccgtgggtttgcttaacgagtttgtctacaataagattataatcaatccagttaaattctggatttatgctgtattgaataactcaacctaa

SEQ ID NO: 73183 - DNA, 345 bp, synthetic construct
  source 1..345: mol_type = other DNA
atggaaaaagtctattgtactgagtgtggtaatgaattggaagggggctctaaattttgccccaaatgtggaaataaggtagatgacgaaaccttcagcatagaggtttctccatcaaaatcgtacaagagttatattattattggatatattttagctatcttaggcataattttacctattctcgccatatttggtgctatagtcggtttttacctaatttacagaaactatggtgatttgctttccggtaagtttaataaaacaaacgtgaacgcgttgctaatcctgattttctcaatctttgcaatcgttttcatgttcaatgttggatttataaggtaa

SEQ ID NO: 73184 - DNA, 516 bp, synthetic construct
  source 1..516: mol_type = other DNA
atgaagattggcgacttcgagattggtttgaagaccattattttagtaatagttgccttgatcgttattttcgggataatctccttttttagcggtggtgattcagtgaatgtcacggatgttggcatgacggtaaactacaactacaaaactaatgtggcttttactatcatcccaactgacacaataactgaggttaataatgttcagctaaagaacattgaagttacttaccacaatggtaaaacccaacatttagaagacgttacatttaactccaaaaatacctatgttaaggataatgaatatgggttcaaattcgattatacaatctctgatgattgtattgatggtcttgatgaatatgattttggacatgcaacacaccatattaaaggagacatagtaataaacactgtcggtggaaatgaaaaagtggtgggacatattgattatgacgtccctgcttcggcgacagtatataagtactcttctggcagtggttcagtcatataa

SEQ ID NO: 73185 - DNA, 477 bp, synthetic construct
  source 1..477: mol_type = other DNA
ttgtcaaaaaagatctttgctatactaatcgttgtaatggcttttgtctcactcgcgagtgttttcgcagtggaaacaacaacgcacgacttcgatggtttgttcaacatgagtgttccctctgatgaggaatttgttactcttgacagcaatatcaccggtgcttcggtctttggatataattttaactacggagacccaattggcgataatataatcgtgtactacttcaatgaatccattgtggatgataatgacaccaacataactgagtatgtaattaacattttggatgaaaattctacgtttaagcatccttccgttgaagatggtttcactgtattatataatcagatggttcaacatgatggtggctacatgctgattgcatcaaacgataacgaaactgaggtcgtaggtattgttggggacaatttagacgatttaaaaacatatgccaattctatagaattttaa

SEQ ID NO: 73186 - DNA, 552 bp, synthetic construct
  source 1..552: mol_type = other DNA
atgcagagggaaatggacgaacaaaaagagcaatatgaaaaaaagattcgtcatgtggaaagtgtcaattcagctctttcttctcaagtcttggacatccaaaatcaattagataatcttgccaacgctaacgacctcaagagaatacaggagtatatttctggacacgaattggttgagaaatataatttggcttccactattatcggttattacaaggaggacgttaaaaaagaagattttacgggtgttactgattattacattgaagatttgataacacaggcgttcaacacaacctccgcatttcaatcgacagcaattagagatgaatattaccgaactgatgataactggaagaggatttactcagaaattggcctatatgaacatgattacatcgaaagtaacgggtatgttttatcgaaatcccaaagtaaaaagataaccgatgaactggagagctactcaataaaattatgggaagacaatgagaaggtaaaaaaatctaaggtgcaaagcataatcgataatattgtactaagacattaa

SEQ ID NO: 73187 - DNA, 258 bp, synthetic construct
  source 1..258: mol_type = other DNA
atgagcaacattgtatatctatataattatgtgctgatatacatttacgtcttttacaaggagattcatttcaggcatattaaatatttcactaacagaatccacagtaaagataatgactcgatgaagctatttttcgataacatgtctaagtatcttattttttccttaatattgctctacttgaatgaattgaacttaataatcatcatttcatttgttttaacacatataaatgtttatgcttttaaaaattaa

SEQ ID NO: 73188 - DNA, 555 bp, synthetic construct
  source 1..555: mol_type = other DNA
atgtcttttaacatcatatctatttcattgatcgccgttgctcttgcaatggatgcattcagtgtatctatgacaaaaggtttcactcaaaagaatctatcgaagtcccagatattgtattacggtctgttctttggtgggtttcaagctttgatgcctgtcttaggctatttctgtggtaacgctatcgcgtccattgttgaaaccttggcctcaataattgggttcatcttgttgttaggcattggattaaatatgattagagaaagtttaagctcagatgacgaggagatcactgatgtcttttcgtttaaggaagtaacgctactggcgattgcaacatccattgatgcttttgctgtgggcatagctattgcactgttgaaagacccaattttaatcagctcaataattattggtgcagttgccttcatattcagtgtgtctggaatatttattggtaaaaagattggtcattttgttggagataaatttcaaattcttggtggcgtaatcctcatactaatcggtattaaaatacttttaggattttaa

SEQ ID NO: 73189 - DNA, 342 bp, synthetic construct
  source 1..342: mol_type = other DNA
atgaatgcaaagagtatcttttccatattcgttttctttgtgattcttatagcttgtactaatgttgctttcgcctcagaaaacattgacgattcaaaatttagtgaagaatcggatctggacgaagttgattccgatttggacgaagtagactcagatctagatgaagtcgacagcgatctcgatgatttaaacgatgattctgacctagacgacttaaatgatgattcggaccttgatgaatttgatgatgattctgacttggatgagttcgatgatgacagcgatttagacgagtttgacgacgattctgatttggatgagtttgacgatgattctgat

SEQ ID NO: 73190 - DNA, 195 bp, synthetic construct
  source 1..195: mol_type = other DNA
atgataaccattaaccctgaattaacaaagatgcaaaaggaatttgagcagaatttaaaaaaaatggatctaaatctctcggacaaccaaatcaaagaaaaattggctctgtccgatttggtacttatgtttagtttcgttgatttctgtactagctttgatccatcagacgtcgtgaagttttattctgattaa

SEQ ID NO: 73191 - DNA, 2664 bp, synthetic construct
  source 1..2664: mol_type = other DNA
atggctgttgtgatgccggcctataattccgctaaatatattcaaaaggctttagactcaattatagatcaatccctggatttcagggatattcaaatcattgtcgtcaatgacgcaagtaacgacagtactaagagtgttgttgaagaatacatcaaggagtatccgaaaaacatcactttaatcaacaacgatgaaaacaggggtcccgcttattcgagaaacgtgggactccagaatgtaaatgctgaatttgtgaacttccttgatagtgacgattgtatttcaagaaatgcctttgaaaaagcatatctgttcttaaaaaacaatgaagaaattgacattgcttcaataccaatatactattttggcatcaaaaacaggcctcacaatttgaatttcaaattcagcaaaacgcaggttataaacttggatgagcatcctgagtacatccagctatcgggtccctcaagcttttttagattcgaaaagttaaaacactaccgattcaatgaaaatttaagggtctcagaagatccactattaatcaaccagatgcttattgacaaccctaacattggttttataaatggtgctaagtattactatcgtcaggatacccttcaaaattcactcattgcaacttcgacaagtcacaagtcttatttcacgtcacgtgttgataattatttcatcggtctcattaattatgcaattaacaaaaagggatatgttcccagatttattcaacatatattgatgtatgatctgcaatggatagttgaaattcgttttattcacttgttgcttagccaaagcgagattgatgagctatatgataaaatattctttattttaaagtacatagacagtgatgtgatttatcatcagttgtctcttccaattgaacttaaacatcatttggcattgctaaaagaccacggtactgcctatagactgaataaggataactttcaggaagacttcaacttaaatactgtatatattgacaattacgaatttttggacaaggacaagatctacatatctggtgtattgacgaactttttaagaagcaccgatgtctacgcgattgcggatggcaagatttacaacacaaataagctaaatttcacccaaagacgtaatttttctcttgactttgactatggttacaatcatagttttgatgtggtgctaccagtaaaacccggaatgaaaatatcatttaaaactaatgcttctaatctattgattgattataatcaaacttcaagactttctggcacttccagatatagattttctaaggattacttgtctatcgattgtcgcaatcatatccaaattattgaaaagacaatcaccaagggagttaagttggaattatctgtgttaaagcaaattttaaaggagaaaaaacaagggtggcgtacaggtattctattaagaatattgtacttcatgttctatttctacttcaggaataaacacatatggatatttatggatttgccgaatagctccggggataatggatatttcttatttaagaaagcaattaaatcagataagcttaaaaatattaaaaagtattatgttttctcaaagtccaagaatctacatgaaacatttgccgagcaagagaacaaatatgttgccagttcaaaatttatgaaagccagaaccttatctggctttataactccaaatgaagagtttgaaaggttgaaaaagataggtaatgtcctacaatacaagtcgatcaaacataggctgtacttattatttgccgattacatcattgcttcccatccagacaatgggatcatttatccattttggggaaactaccatcacttgtctggtctagcacgatccaaaaccatatttctacagcatggtgttacaaaggacgatatctcctattggctcaaccggtatgataaaagaataggtttgattgtcactgtatctgatctggaaaaagaaagctttttaaaccctaaatatggttacgacgaaagttgcatccaggtacttggttttccaagattcgactttttgaaaaagggcgaggataagaaggaaatagttttaatgccatcttggagaagacaacattctcaactcagtgaagacgaatttattcaaacagattactttaagtcgataaatgaattgatgaataacgaatacctgattaaattcttaaaatccaaaggatacaggttaatattcaaacctcacagaaatgttttgaaattcattgactcatttgatatccctgatgaagctgaattgggcattgaaatgtcatacaatgagatatttaaccatgcgtccttgatgattacagattattcttctgttgcattcgactttgcttatcttaaaaagccattaatctattatcatcatgatgatgattaccacttcaacctggatgattcgtactttaaatacgatacaatggggtttggtcctgtagcaacccaaatcgatgagttaaaagatgaaatcatacgactggtagaaaatgactgtcaaatggatgagaaatatattaaacgcgtcgatgacttcttcaaatacacggacaaaaacaactctaaaagagtcattgataagatcttggagtttgatgaaatgttttattactaa

SEQ ID NO: 73192 - DNA, 396 bp, synthetic construct
  source 1..396: mol_type = other DNA
atgagtgaaaagtctttaattgtaaatcacgacgctattgatgaggatttaactgagaaattcataaacatgcatgacggtcttccagttttgcttatgaatattctagacgattttgatgatgggatctggattagaaggtatgagctatacctgaaatatcctgaattggaaaatctcgatggaaaggaaatggaaatcacatccgaattattaaaagaaggtaaaataaaagaagccgaggattttcagataaattatgcattggactttttagataagcatccccaattcaaacaaatgattgatggagtccatagacaaggcagcaaggacttggaaatactgttgaactcaattaaggaagctttcatcggtgattttgactacttttaa

SEQ ID NO: 73193 - DNA, 549 bp, synthetic construct
  source 1..549: mol_type = other DNA
atggttgataaaaaagcacctgcggaaggctggcctccaatttcgggagattatattgttggcgatcccgaaagcccagtagctgtcacaacactcgcttcccatatagaggctgacttatctggtgccgcaattgcaggtccatgtaagactgaaaacctgggtatcgaaaaagtcgtagcaaatgtgatatcaaatccgaatattaggttcttaatactagctggtgccgaagtgcagggtcacattactggtcaaagttttaaggccctacatgagaacggggcggacccagacaaaaagaaaatagttggcgcaacgggagccatcccttttgtcgaaaatgtaccacttgaaggtgttgagagattccagcaacaattggaaattgtcgatttgattgacaccgaggatattggaaatattcaatctaagatcaacgaatgcatagaaaaggaccctggggctttagaggaagatcccatcgttatggaagtggatgaagaaaaccaaaaattggttatcgttaatgatgatgctgaggattaa

SEQ ID NO: 73194 - DNA, 354 bp, synthetic construct
  source 1..354: mol_type = other DNA
atgaataattgtcaaagctcatccgtcaattggagtgaaaaggtgagaatcttagatgagaagattcgtagagaaattggtctcgaaggtgaaagtgaggcaaaacatattttgataaaggttcaaactaaatccgccgaaaccatcgaaccagctttcatagtaggggaggatgagacttttctggatctatttgttttgtctccccaggaatcaaatattatttctacagcggtcttgaaaaacaacatacagtcaataggtgttattggaggcatgtctgctgaaaaaacggacgcttcggaaatccctgacaggccagcccttgatgatgcaagcacattatatcaataa

SEQ ID NO: 73195 - DNA, 609 bp, synthetic construct
  source 1..609: mol_type = other DNA
gtgaagcaaaagttgattgcaaaagcccaggaattaagacaacacggttttacaaccggtgaaatcgctgatgaactgaatgtaagtatggacacggccagatggttgactcttcaaaaagcggaagagaaaaccgaggtaccagtagattttgctattaattggaagtcaattggtggcaattccacccgtttaagctatgtttcaggtgctttgtctgatatggcattatcgcatggtgaagtagacactgttgtaggtatagcagtttctggagtgccctttgcgacagtgatggctgatttcatcgaggacatgactggaatagacacatcaatagctatcttccatccgaacaaacacagaaaaaatcaggactcctcggatgatgaaggtgcaataagcactaactttggaacggttgagggcaagaaggttgttattgtcgatgatgtcattactagtgggaaaacagtgagggaagttattcatacagtcaaagatctaggtggagaaccaacttgtgtcaccgtcctcatcgataaggccgggctttctgaaatagaaggcattcctgttgaatctctaattaaaatcagtcgattgtaa

SEQ ID NO: 73196 - DNA, 354 bp, synthetic construct
  source 1..354: mol_type = other DNA
atgattttaaataaatatctatcaatgattttatcggcttgttttttcatgctattgatgatgatagtatctgctgttactgttgtgttctttaatgggggttccatcccatatgtgggcattgtttttgttgtaattttttattttatggcaaggatgttctataattatctcagaaacgacgaactttacaagaacaacaaaaattacacaagtgatgcacccgatgaggaatacatgattaagggtcctagagatgctaaaaagatattcataatcttctgggtaataattgttctgatcttggcggccgtctctttgtggttatactcatttaatatgggaagcgtctaa

SEQ ID NO: 73197 - DNA, 1164 bp, synthetic construct
  source 1..1164: mol_type = other DNA
atgaaacataatcctttcagaaagaggaccggaatattaccctcttatttcactggtcgtgaaaacgaattgaacgaacttaacgagatctactgctcaacaaaaagaggtatccctgggcatttgatattatacggtccgaaaggcattggaaagacttcattgctgttgaaattccaagatgaaatttccaattttgatgatgtatattccgttagaatccctttaatggagggtaattttgatgatatctacacgttaattatagaaaagtgttccgatgcgttaaacattaacattggtcacttctgggagaagatcaattcgttgggcattaacattccgctgattggaggtatttctttttcaagagaaattccaaaaaccagccctgctgttgcctttgagaagattttaaatgtcatttatgatgaactagactcagacaatcctgtgctcattctattgcttgatgatcttcaaagaattataggcgatgacgaaacaatgaagatcttgagcatattgcagaatgcacttgttgaattgaatctacaagggaaaaatataatgtttgtggccacgggttctgaagacattttctataaaattcaagacaaacttgactctgcggtgcgtatattcgaaccatatttaatcggtcccctatcctatgatgaattatgtgaagcaattaatgttccaaacaagaaacagaacgtcagttttgaggaagatgttctcaaggagatatactacctctcgaacggcatcccatattacatgcaaattttagcttacagttgctttgaagagataaacgcagacaataaagtaaccatgactgagtttaaaaaagcctctgtccatagtttaaatattctagctcaacgcgaatttaaagtattgtttagcaaatcgactacagaagagcgaaagatcctatgtttgatggctgaaagtgacaaaacagttttatcatattcttatatcaaggataatgctaacctaaattcagaaccatctgcattattaaagaatttgatcaataaaaacatgataattaagccaagtagaggaaagtacaaactgaaaaacaatcttttcaaattgtatttgcaaaacctgaggataaatcaggatactggtctgatcaatgaataa

SEQ ID NO: 73198 - DNA, 237 bp, synthetic construct
  source 1..237: mol_type = other DNA
atgatgaggcatgaattatttgaagtgggttcatatgattattctgacttggatgatagacttgacaaacctgtaatatggtccgaagatgatctgaagctaattgctgaaaactatagaggtggtatccccttaactagtgagcacgacaatatatacgtcggcatcgggaacaatattgaatacgagaaaggaaagctcttcattgaagttccagacgagttggatatggaataa

SEQ ID NO: 73199 - DNA, 1668 bp, synthetic construct
  source 1..1668: mol_type = other DNA
atgacgttgcagaaaaagttacaaattaatattgtcatgagcaattacaaccagaggagcagttcctattcatccggccacgattatatcttcctggacaatttggccagcagttcttactccaattatttcagaagtgacttgaaaaacctgaagatcaaaacttccaatggtactgaatgccaggtagtatacattccatcttatggatcacaaggcgcagcgatactggcaagggtttctgttggtcagatttcacaaaacacaaagctactattggacgttcatgatacaggtacagcattcgcaagcactttatctacgggtaatgaagtgctgatgtttgatgcaaataatgatacctactcacaatttttcatgaactactccggtttatcgtcaaacaatgactctaccgatgggggccaatttttaagagctagatttgtgcccaacctagaaggaacttctcccactgatttgtttaccacatttgcttcaggccaaccattagccaacaaccgtgtggttgtagccagattcaaatatattaacggtaatgtttttgttaatgataatgcgacctatcacggttcgaccataggtggcatcatgatgcaaattgatggaacgctatcgcctgatgagtctaatgtcaaggctactgtcaactattggggtggggaaaaagattattgcatgttcactggtgctaagactttagtattggccagttcttttgatgcttacaatcagggaagtgacgaagagggtaactggaagcaatatcattttcataatagagttggaacaggaacatcgaatacatcagattatattgaagggttcagccgaaataatccaactaagatttacttggggtgttttaaaatgattattgattacgatgttaattcgacaatcggacatgggcgcggttacccaacaggccttgaacataccgagaaaatggatgtaatagcttgtcttttagatgagggtgaaagaacctatgttaatgatgaacatactgcgtggatttgttccaaccaatgtgcagtcggcgatatggtgactttggatatgtcttctacaatggaacatacgattgttagaaaagctcaagcaggagaattggctttcggttatcttttaggtaaagtccaggttaagacttccggactaacactagttgctgtggccgtgttaggtgatgtctttagattaaaactcaaaaggccagtggctgaagacatattgccgaatacaagaatctatatagacagtgccggtgaatgcaatcctgttgaaggtcacgacttaaggctgttgtcaatcgttaaccttcaaaataatgaggatactgactacattagagtttatcgtcaaatgtctgaggttgaaatgtaccgggaatctcaaaactgtatagacttgggtgactgcagttttgaacaggatgagataacgcacgttgtgaacatgatcgtgccttcagagtcaaacatcatggcccaagcaaattacgtaaaggacgcagacggtgtcacctattgtgagcttcctgatgtagctattgtcaataacgtccgtttcgtatgggaagacaacaaactctacatggaatgggaaggatgtgatgatggccaaaatgtatattttatataa

SEQ ID NO: 73200 - DNA, 192 bp, synthetic construct
  source 1..192: mol_type = other DNA
atgaccataaggaagcttgtcgggactttggaaaataaaggtccttacattgaccaatcaacaggtcattggttctactggaacggtactagatatgttgatagtggctatccatacgctgtaaaactaatcattgaatttaagatcgaaaatggaatattatattattctattacgtgggaggcacagtaa

SEQ ID NO: 73201 - DNA, 150 bp, synthetic construct
  source 1..150: mol_type = other DNA
atgaaatatataaagtactttgaaacaatagaagagtatgaatcctggatgaaagtcgaagaaaatgctgaagaggtgtatcaatcagaagagaagattttggttgatggtgtaatcatttctcatacttacaaagaagaggaaatttaa

SEQ ID NO: 73202 - DNA, 252 bp, synthetic construct
  source 1..252: mol_type = other DNA
atgatttacgaatttctggaagcaaaccgtaaggatatcgatattttaacttcttttcttgttaccgctattccaattgtcatgctctattcagaagcattaggaattacggaaaatacaatcccctactgtattctaatgataatcttggggatagctagtcattatgcgtccaggataagaggcgagggtgatgtggaagacgccaagcaaaaagctaaaagagtattgggtttccctgaagagaaataa

SEQ ID NO: 73203 - DNA, 270 bp, synthetic construct
  source 1..270: mol_type = other DNA
atgaacaaaataaaaaagaagatattcatatgcaactttacgaaaacaatttcatctgccgttctcactgcggtagcaatcaatatcataatgaccaatgcaacaaaatacgctttaattgaaggcttattgccatttactttagctattgttattgtcggtctaatcgatctttatgagtatagatgtgagagagaagacaagattaatttggatgaattggaagagcgtattgaaaaactggaaggtaatgtggatggagaaaggtaa

SEQ ID NO: 73204 - DNA, 603 bp, synthetic construct
  source 1..603: mol_type = other DNA
atgatgaagtttatgatcactatcaccattaataatatcgaaaacaaagaattaaaatcgaagttaaaaaaaataatcaataatgatgaattactcctagaaaacatattgaatactataaataaagagaagaactataataaattgttgttgacgtttaagaacttgtctgagaagaataatacaattaaaaaactctacgaaaggcttgagaaaaaccctctgagctttaaaacaaagagtaagtcagttctggaaaaccttcagaagggtatgttgttggctttcttctccgacaacgaactaaaacatgaattaatcctagaaaaaccaatagccgttattttggacaattatagcgtccaccatgcaatttttttcaccgaattatgtaagattttaaatatggatcttattcatttacctccgtattccccaaaatacaatcccatagaacaagtttggagaacaataaaggctaagatttctagaaaatatatttcatctattgcgcaattaaaatacctattcaagactgagtttaaaaaggtagtggataattcaagtttttggaaaaactgggaggaaaacttcctgcaataa

SEQ ID NO: 73205 - DNA, 384 bp, synthetic construct
  source 1..384: mol_type = other DNA
ttgtttaaaaccacatatgtttctaattttggtgaaatcaaccacatcttgaactactgctatgaagaactggaatggggcgagctaatcaaattgtcgaacgagttattggatattgaaaagaatcatcaaaacaatagaagaagtgataatatacaatattcagtaatcctaattgcaatcgttactctttgttctcagttgttgatttactattccaatttcaaggacgtaatacttttcattggtggaattgcttttttatttttcctaagcttaattttcaaggaaaaaatttactatgtctggcaaatacttaagttagtgccaaaatttatttacaatctgatagttttactcctgaaaaggataaaagatttataa

SEQ ID NO: 73206 - DNA, 570 bp, synthetic construct
  source 1..570: mol_type = other DNA
atggatttgaattttatttcaattattttagatataattctgacgatcgtgacgggttttatggcattcgcaacttataaaatggcgcgttcgacaaatgaatctgttgaggaaatgaaaaaaacaagggtcgaggccaatagcgctgaggtaataatgtattttaaagtagaaaacaatagaatgtatttgattgtcgaaaatataggaaacacagttgctaaagacatatctattgaagttgaacccgagctaaaggactcacacaataaggattatgaacatttgaaggaaatttcattcctccctccaaactaccaaattaaagctttctttgacatgggctttaattacttaaaaaatgaagacaatccagtgaaatataaattcatcattacttttaccaacatctataatactaaaataaccagagaatatatcagtgatttgagctacatcaagagtgtttcttacttaacctcggaatccgattccatagagatgtctcttactaagattaaagatgaactaaagaacacaaatgattacttaaagaagcttaacaactaa

SEQ ID NO: 73207 - DNA, 729 bp, synthetic construct
  source 1..729: mol_type = other DNA
atgaataaatacgttacttttgtttcagacgagatttttctagaagaggtcaagaaggttgtcgatgcctatgccacggatgaggatttgtcaaaaacaccttgggaagttttaagcaattctagagaaaccattgaccaatttaagacattatttgatatttattcgaataggttcagcctgtccgaatggattaattttgaaatccccagacaacatgataaaactgcatctaatagggttggtgatttccaccagaaccttttagggcgtgttgatggttgggtaaacctcggaagaggtcatccatccggaatggacttgaagaaagaggatgatacaatctggattgaactgaaaaataagtacaacacaatgaatagtagttctttaagagatactcgattcaaatgtgaagagttggctgagaaatatccaaatgctaaaatatattgggcgtatatcgtttcacaaaactatgaatctttcgacaagacttgggtgtaccgcgacaataaggaaaacgtggtacacgaaataaatgacaacatcagaaatattgctggtaaagatgtgtacaccttggtcaccggcgatgaaacggctttcgaacaattgtttgatgcacttcctaacgcaataaacgatattaaaaagtcgaaacatattttaactccgaaagaccaggtagtatttgaaaagtacaaacaactaatatttaaggactaa

SEQ ID NO: 73208 - DNA, 495 bp, synthetic construct
  source 1..495: mol_type = other DNA
atggcagattctataattctactagaagagcgtaaggaagtcacgaccttccttctggatgaaggtacaatcaccgccactaccgttacaactcctacaggtgagactcctgggtacgaatacgcaggaacaaaaataaaggtcgacgatgtggttactttgtcggttaattccgacatcggcaaaccaacggtcaagaagttcactggtgcggaaggcgaaatcattttaggcattgccgtaaacgatccggttacgatgaccgggggtaaaagaaagacagctattctcgtattgggtcacctttttaggttgaaattagcatctggaattagtaacattgctgttaataatagaatagctttaaccagtacaggtgctatcaaatcagatgagggagaatatattgccatgcatcccgtaactagctctgatgattacaaatatatagaagtgtttagaccatatgacattggaactacaggttcaacttaa

SEQ ID NO: 73209 - DNA, 939 bp, synthetic construct
  source 1..939: mol_type = other DNA
atgattacaaaaggaaatgataccaaggtgcaaaatgaggtaatagctcaaaccattactgacgaaactgcaaagagattgaagctagctaggttgtttcccaaacaagaaatcaaagagaactccgattactacacgtacttcagacagaacatcaatctcgatgaagccatcaagaagggtttgcttggggaagcaaaggacatagctccaggtgcaagcctccaagaactaaacatcagaaaacctgtaaccgacaccatcagtatagatactgttggtggggtgttgaatgtcaataaggatgtttttgactcagatattgtttcatttgaggacttattaggcgatgtggctaccgttattgcgaatcgtattgaatacaatatttatgatacattaataagcagtccgaatgttccacaatataacacaactcaaacagatgatacaatggatgctttcggtaactttgtcatcaaagcccaagaagcattcaaaggcaatgctggtgcgggagcagatttaacgataatggcggaatcttacaagacactgtcgtatgttaaacagttggcttattcctcaaacaaattggttcagcctgtagaagacattaaggaatactatggtattgacaacattgatcttttaggcactacacaagctgacggcggttctctaataggtgaaaaacagtatattggtttcgatctaagaaatgccccattaactgtattgtattccaaatcttcgggaactactgtcgcacctattacgtctgatgagaacattgccgatttttatcccatcattgaaatcatgcgaaaggacatttacgatgagttacctcaatataccaaattatttatacaaagtaaagtcggaatattgctgaataaaccaggacttgccctgaaaggtacttgtaggccataa

SEQ ID NO: 73210 - DNA, 927 bp, synthetic construct
  source 1..927: mol_type = other DNA
atgttaaccaaaggaaatgatgcaaaagtccaaaatgaagtgatggcacagattgtggccgatacttctgctaagtggatgaaatttacacgtttgttgccaaagcaggaaattgaagagaactctcaatattacacttatatgtctcaaagagtcaatattgaggaagctattcaatcaggcgttcttggtgaagccaaagatattgctcctggcgctacgttacaagaactaaacgtcagaaaaccaataagtgaaactatcagtatcgacacgataggtggggttttaaacgtttccgctcaaatgcttgattccaatttaatatccgttaatgatatgctacaggatgtgggaatccttatagggagatctattgaaaaggcggccattgacatgattatgaatagttctaaagtagctacctacaattttgaaagtggcgatgacactggtatgacaatactcaaagctcaagagaaattcaaggaatcagcaggttcttatgcgaatttaaacagcatggccgtaagctacaagtctttgacaacactgaaatcagatatattttcaagcaatcgacaagtcgaacccgtagaattgatcaaatcgtattacggtgttgacaacattgatattttagggacagcagtatgtgatggcggttccgagatgggtgacaagacctatataggtatggattacatcaacccaggaatgaagttgttgtactcgagaactacgggaactacagttgctcccttaggtcctgacggtgagatgtatgatttctatccattgattgaatttatgaggaaggacattagggatgagctgccgatgtataccaaactctttatcctgtcatcggttggagtgctaatgaatgcacctaaccgcattatcaaaggtaatttcagagcataa

SEQ ID NO: 73211 - DNA, 819 bp, synthetic construct
  source 1..819: mol_type = other DNA
atgtctgataataaaaataataatatttcgtggactagtttttgccaagctatgaatagtattgcatactggctactccaaaataaaaagaagtataagaaacgtgaccactaccagatactaacgttaaaaggtagttgtagcgatatagagaagaaagcgaagaagttgggtaacgataaactagtgtcaatgtatacaatggctttaattaaagacaatacatctttggatttcttaccaaactacgttacattaaagaacggcgaacagattgataaagccgaatatgtagatatggccataaggaccgaggcatatatcagagcaaataaaagacttccggctattgtgtatagaatgtcaacccttccagattacaaagattccacaatgaagctgtttatcaatgtctttaacttcaaaggtaacacgatcgatgaagccttggctattatttctaagatgaagttatatagtaaatactttgattcccaaaagactgacaagaaaactatcaacgatgcttcactgggtaaaggttcaaattgtgttgactggggacaagtatattatcgaatagcgaaatctttagggtatgatgtacaatttgtccatgtcaaatgcagggtttcgggaactggccatattaaattgagattgaagcataaaaaacacactggaggcaactggattaaccgcgaccccgctgcagttgccgacaccacttcagggaatgttaagtctatctggtgtgaagatggttaccttatagcatacgatccttcctggatattcacagacttgtatagctcttaa

SEQ ID NO: 73212 - DNA, 267 bp, synthetic construct
  source 1..267: mol_type = other DNA
atgactgacaggtcggcagaaatcagcaaaatcaatgacgaaaatcaagaagaagatgaggaactgttcaattcattagatgaaataattagtcaaaacatagatgaaatagacggtgtcgtaatttcctttccagagaaaattaactctaagaatggaattgctcatacagcgagagcctttatgtggatttgtgatttggctctaaagtctatccttgatgagaaatattcacagcctgtttggattttaatgaacaatttgtaa

SEQ ID NO: 73213 - DNA, 348 bp, synthetic construct
  source 1..348: mol_type = other DNA
atgacaaatattgaaattaatgctgaaaccaaaaataagctggaagccatcgggaaaatattatctccctacctagatatcggctatgatgattttgatgaaattataggtattttaataaataacttcaataatcataaactcaaggcagagtatgacgagaaggaaaacataattaaaattggatatgaaaatagtaaaatatactcaatccctattttgatattcgagcttaagaagggttgctacgaaaaaattggtatttggatgcaaaagaacaactttattccagaaatcaacactgacgttacggaatatatcaaaaaatgtgaggatacttttttgtaa

SEQ ID NO: 73214 - DNA, 105 bp, synthetic construct
  source 1..105: mol_type = other DNA
atgttagaacaagaagtaaacggaaaaactcatgttctagtcccaaaggatatatgggacgatattatggctatgtttaatgaacacttgaataaaggtgagtaa

SEQ ID NO: 73215 - DNA, 558 bp, synthetic construct
  source 1..558: mol_type = other DNA
atgatttccgacaaggcaggacaatacttagttaagctcgctggaaatgcgatccgtcaatatctggagactggtgaaaaaattaagaaatcggaggactacccaattgaattggatgaaaaactaggtgtctttgtaacattgaacaagaacagtaatctgagaggttgtatcggatatgccgaaccaattatgagtgccattgaagctaccatagatgtggctattgccgctgctgttaacgacccgaggttcccccaagtttcattagatgaattggagacacttgatttggaggtaaccgtgcttacaaaacctgaattaataccagttgcacattacaatcagtacttcgacgaaatcgaaattggcagagatggtctaatcattcaaaaaggttattcaagaggtctattgttacctcaagttgcaactgagaatcgattttctgtagaagactttttagaacacacgtgcatgaaagcagggatatccactgattcttggatggatgaaagctgtgatgtctataagttccagggccaaatatttaaataa

SEQ ID NO: 73216 - DNA, 1791 bp, synthetic construct
  source 1..1791: mol_type = other DNA
atgtccaacaatcaaaataagaataaattcatacgattgcttaattattcggggaattataaatacttaacgattttgggtatgatcttctccggtttaagtgccatttctcttctggtccctttcatatacatatggaacgtggtaaatgcacttttggttgtagctccagactttgctaaagcacagaatttggaaagctacgcggttggtgcgtttttctacgcatttttggggattgccctgaacttttgcggtcttatgtgcactcacttgtctgcatttaagaatgagaagaacatgaaagatgctaccatcaatcatctgttgaatttgcctttaggttatttctcaaaccacactagtggcggcttacgtaaagttattgattttagcactgcaaaaacggaaggatttttagctcataatttatttgatctggtaggagccatagtcaccccaattgtattcttaatattgttgttcagttttgatttgttgctaggcctaatatgtattattccaattatactatgtttcttattcatgtatccaatgttttctaaggattcacaaaacattatggcccagtatcaatcctacttggagaaaatgaatagtgaagcggtcgaatatgtaaggggtatcccagttaccaaagctttccaacaaactgtatattcatttagaaacttcatagatgcaatcaaaaattacggtaaattcgctgccgactattctctatcaacacaactaccaatgaccgcctttacagtctccatcaatggattttttgctttattaatccctgcaggcatactgattgcaggcactctcgttgatgttaaatttttagctaattttatcttctatgtgattttcacacccatatgtgctgtcatgatgaataagataatgacaatctcacaggactggatgctggctagttatgccttggatggtatcgaagctatcctgaatgagaagcccttagcagagccggccaacccgcagaagcctaagaaccattcgattaagtttgaaggtgtttttttcgactacgaagagagtaactctgaagaacatatactcaatgacattaacctcaagataaacgaaaatgattctgttgcgttggttgggccttcaggtggaggaaaaaccactattgcctccttaattccaagattttgggacgtcgatgaaggttcaattaaaattggtgaagtcgacgtgagagatatatccacaaaggacttaatggagaacatatcttttgtattccagaatactaggttgtttaaagactcgatctacaacaatgtagctattggcaaaaaaggcgcttcaagagaagaaatcctaaacgcattaagccttgctcaatgtgatgatattattgatgagttgcctgatggaattgatacagtcattggaacagaggggacttacctttccggaggtcaacaacaaagaatcgctcttgcccgcgcaatcttaaaggatgctccaattattattctagatgaagcaactgcattggcggaccccgaaaatgaatacatgatccaaaaagctatttcggaaattaccaaagacaagacggttataatgattgctcataggctatctacagttaaaaatgtggataagatttatgtggttgaaaacggtagagttgtggaagaaggtaatcacagcacgttagttgagaatgaaggtctttattctaaaatgtgggatgaatttaaccgttctatccaatggaaagttaagagtgaggtgatataa

SEQ ID NO: 73217 - DNA, 1746 bp, synthetic construct
  source 1..1746: mol_type = other DNA
atgttgtctgaattgtttattgaaagatttggactaacaaaggagggttctgataacctaattaagggcatcatttacactgcccttcaaaatatctcattcatgtttccagtggggttatatgctgctctgttatacatctggatcaatcctctgatgggtggggagataatcagtcctgatttaggcatattcattttaggcattttgattatacttgggattatattcgcatttagctggaagcagtatcatttcgtatataataccacttatgttgaaagtacaaacagacgaataaacttaggtgaaaacttgagaaaattgcccctatccttttttgaacgtagggacttagctgacttaactgcaacaatcatgaacgactgcactgatttggaacacgtgttctcacatgctataccacaattgctgggttcaatattgtccttaattctagtgtccatcggtctcctgatcttcgactggagattagccgtagccctattgtgggtcgttccagtatcattcataatactgtatatctcaaaaaggatgatttaccgaggtagtaagattgtaaccaatgacttgcttgaatgtggcgattcaatgcaggaatgtatagactcgatccgtgatttaaaaagttacaactacgaaaatgagtatttatctaaactgaacgatattaccagcaagatagagaaatcgagaattaaaagtgaattaatgctatccagtggagttattactggcaaagtcatcttgaatcttggaatagtttctgtcatattattaggttctaacctaatcatgaatggtcaggtaacaatttacacttttttaatattcctgatagcttctgcaacgatttatgctccagttgaaaatggactaatgttcttgtctgaaatattgatgatggatataaaaattgaaagagccaaggaaatagaaatgctagttacagaagagggtcttaaggactattctctagatggttatgatttggagttcagaaatgttaaatttaactacgataatttaaaagatgttttatctgatattgattttattgcgaagcaaggtgaagtgacagcacttgtcggaccttcaggaggtggtaaaagcacggtttcgaaactcgcagcaagattttgggaccccgtgtctggtgaagtttccatcggcgggcaaaatctggctgaattggatagcgaaaaactccttgaaaacttctcgattgtatttcaggacgtaattctctttaataataccatcatggagaatattcgtgtcggcaagaaagacgctagtgatgacgaagtgattaacgcagccaaacttgcggaatgtgaggaatttgttcaaaaacttccgaatggatataatactattatcggggaaaacggtgagttgttatccggaggtcagagacaacggatttctattgccagagctctccttaaaaatgccaacattgtcctattagatgaagctacttcatttttggatgttgaaaatgaatctaaaattcaaaaggctatttccacattaattaaaaataagacggtcattatcattgcacataggatgcgcaccatcgcgaacgcagataagatcgttgtcttggatgatggtaggattgttgagcaaggttcaccagatgaattgttggctcaaaatggattgtttaaacacatggtggagttgcaaaagttaagcggtaagtgggagatataa

SEQ ID NO: 73218 - DNA, 582 bp, synthetic construct
  source 1..582: mol_type = other DNA
atgtccgaaatcttaaatgtcaaagacttgattactgttggtatcttctcagtgattatggtggtcttgatattcctgtttgggatgttgggatatattcctatattgatgttggctcttccgattattgctgcgttaatatgtggagttccatatatgctgtttctcacaagagtaactaaatttggcatggtcacattgctgggtttagttctcggcattgtaatgttcctaagcggtcacacctgggtccctatcgtcatcttcacgttattcgcattcgttgcagactgcatacttaaaatgggcgattactcttctgttaaaaactccattatcagttatagttgttttatagtaggtattatgggtaatatgctacccttttttgttttaagggattatttcattggatctatacgtaattcaatgggtaatgattacgtgaacgtgattgccccatttttaaactacgaggtttttatcattctagttattttaacctttatttttgggctaatctcggcataccttggtaagatagtattgaagaagcattttgaaagagccggaatagcttaa

SEQ ID NO: 73219 - DNA, 723 bp, synthetic construct
  source 1..723: mol_type = other DNA
gtggaattaaaactaaataacaatccaggtttaaatgtggaccccaggacaaagatcatccttctgattattataagtttcatggtttttaatgaggctcctttgtacgtcagcggtattctagttttgattccattcttctgtttatttttttcagactataaaaaggtagccctcatttacattgctgtatactcaatggccatctatgtccaaatttacttgattccgacatccactggtatcttatctataatcttgataactttttcctatacctcctctaggatgttgcctattttcatgatggggtattatacgatatcttcaacaaaagtaagtgaatttataacttcaatggagaacatcaacgtcccaaaagagattattatccccctttcggtagttttccgttatgtgccaagcgtctatgatgaaatcaaatccataactaatgcaatgaagatgcgaggcttcggcctgaccgttaagtctttaaaatcgcctttgaaaatgattgaattttacatgattcctattttaataagtgctgttaagaccagcgatgaattatcagcagcttctctcacaagaggactaagtaacccaagaaaaagaacgcacctgcttgaagttaaattctctaagatagattattttttgattatgattgcggttatcggttttataatttttgcatactactttataggaggtcattaa

SEQ ID NO: 73220 - DNA, 1434 bp, synthetic construct
  source 1..1434: mol_type = other DNA
ctaataaacatcaataacgtttcattttcatacaacgatgatattaatttggagaacattaacttaaacattaaaaaaggtgaagtgattttactttgtggcgaatctggctgcggtaagaccacactgactcgtttcctaaatggtcttattccaaacttttttgatggaaatagaaagggttcagtatatatgaatggcaatctgattgatgagatgaagatatatgaaatatcggaatacataggctcggtcttccaaaatcctaagacacaatttttcaatgtggacacaacttcggagctggtttttgggtgtgaaaatttagcaatcgataaagatgaaattgaaagacgattggagatggttgtcaatgattttgacttggaacacttattaaataagaatatcttcgaattgtccggtggtgaaaaacaaaaaatagcatgtgcatctgtttctgcggtctttccggatatattggtcttggatgaaccatcttccaatttggactctcagtcaacttggtatctgggagaaataattaaaaaatggaaatcacagggaaagacggttattatcgctgaacataaactgttctttttagaaaacgttgtcgataaagtaattttcataaaaaacggtaggattactaatatttggccaatttcagaatttaaaaacatctctcataaagattggggtttacgccaattgaatttagggaatttaactgcaaaatgtggtgaatattattccaacgcccaagaatttctcgaatttaagaattttaaatttaaatataaaaaaatccctgtgttggatatgggtaacttcaaggtacctaagaacgagataattgctattatcgggaagaacggtgccggaaagtctacctttgcgaattgtttgtgcggtcttaagagatcattcaacggtgaacttatttttaataataatagcctaaagaggaaagacagattgaaaaagagttacatggttatgcaggacgttaaccaccaattattcacagaaagtgttcttgacgaagtattgttgagcatggacgaagaagatattgattttgctgagtctattttgactaatctcaatcttatccatctaaaggatgctcatccaatggtgttatccggcggtgagaaacaaagagtggccattgcctctgctattgctagcaaaaaggaaatattgatcttcgatgagcccacaagtggactagacttaaataacatgatgaaagtaagtgaaaatttaaagtaccttcaaagcttagggatgacgtcctttataataacccatgattttgagctaataatggaagcatgctcccatatcattcacctggaggacggcaaactcatcggaaattacaagatcaacggagaaaaactaagtgagttcttcttaaattaa

SEQ ID NO: 73221 - DNA, 705 bp, synthetic construct
  source 1..705: mol_type = other DNA
atgagtacaattattgaatttaagaatgtctgtaaagagtataaatctggagatcacatattaaaagcgatggataacgtcaatttcacaattggtgaaggggagtttgttgtaattctcggccctagcggtgcaggtaaatccacactactaaaccttctgggaggtcttgacagtgttacttcaggtcaaatcattgttaacgataaccatgtcgaatcgttcactgacaatcaattaaccgaatacagggccaagaacgttggttttatctttcaattttataatttgataccaaatttgactgctttggaaaatgtggagttaatgaaggatattgtggatgtaaaaatcaatggattggatgtcttaaactcagtgggcctagaagatcatgctaaccagttcccagcacaactgtccggtggggaacaacagagagtctctattgcaagagccgttgctaaacagcccacaatgctcttatgcgacgagcctacgggcgcacttgactcaaaaactggagttttgatcttaaatttactgcaagacatgagcaataacaagaatactaccgtggttattgtaacgcataatgctatattggcggatgctgctgataaggtaatacgtatcaaaaacggtcaaatagaatctattgccataaatgaaaatccgaataaggttaccgatttggaatggtaa

SEQ ID NO: 73222 - DNA, 2271 bp, synthetic construct
  source 1..2271: mol_type = other DNA
atgcttgcaaagaagatgttaagagacatcaaaaagcacaagactcaatttttatctatctttttaatggcttttttgggagtattcgtgttcgctggtgttggcggtgagtccgtcggtcttgaagtaaatgtaaataattactacaacgacactaacttggctgatggttggatttattcacctaacttggacatgaattttatcgatgatgtgaataatttgactccaacgactcaaagtgagagacaactggttttagactcgattgcggatttcagtaacaatcctgagattaaactgcattttatcgagaacaatacgatatctaaattttatttgatggacggtgaaccattgaatatcagtgatgaggatggtgtgtggcttgataaaagtttcgcggatgctaaaaatttgaaggtgggcgacaacatcacttttgagtttaacggatttaaaatcaaaaaagaaattaagggaatcggctattcgccggaatatgtatatcatgcaagcacttcaagtgtaataccggattttaacaaaattggtttcgcttacatgtcttacaaagccttccccacagataatatcccatataacgttttaaatgtaaaattcaccggatctcctgaggaatataacaacttattgtccgataaacttgatggggagtataattcatttgttgaacagtctgaacatagcagtgtttctcaattttccgaagaaattaatcaacacaagatgatgggggatatttttcccgttgtcttcatattgattgccatgctaatccttttaacaacaatgactagaattattgcacatcaacgaacgcaaattggtatcttaaaagccagtggattcacaaataaaagtatcatgatccattatgtttcttacggtttctggttggttttgattggttctattttgggtttaattattgggccagtgacgttgcctcagctattttatccatcaatgagttcaacttacaaactaccttcatggaatcccgcgtggagtatggattttgtttatgttgctgtcgtcatgattataatgtctctcttagtatcttactttgcagtgagaagcatcagcaaggaaaacccagccgacaccattaagccaaaaattcctaaaatttcatcatcaggtttagttgaaaagataggcttctggaagcacttatctttcaattctcgttggaattatagagatgctaaaagaaataaattcagggcattaatgaccataattggagtcattggttgtactgcccttctagtctcagccttcggcatgtatgacggcatgaatgatttgaaggaatgggaatttaatcaaataaatcattacgattcaaaattggtcattgataacgacgcatccttatccgaaattgatgatgtggcccgcgatgtggatggggacaaaataatggaatcagctattgagattgaatcggattcggctaaaaagtccggttctctgatagctctgaaccacacggacttgataacaccaacagattatgattggaacaaaatggaaataggagatgacgaagtttctatctcacaaaaaatggctgacatgttggacatcagtgttggtgacaccgtcaaatggcatattattggttcggataaatggatcaagacaaagatcgataagattcacgcagatccgacatcacagggaattgtaatgtcctctgacaaactagaaaatcttgacctcaattacacgcccaccagcattgttactgaacagcatgtcgataagaattactctattattaagacagttaactcaatgaaggacataacctctagctgggatgaattgaccgagtcaatgtggctattaatttatatattgatattttttgcatcccttctggctatcgttgtactttacaacttaggtttgctatcgtttaccgaaatcgaacgtgaaatagcaactctcaaggttttaggattcaaaacaggttccctgaggaaactcctgctaacccaaaacctatggtttacttttgcaggctttatattgggtcttccagttggttactatgtcttaaagatgatgtgggattcttccggcgatagcttctacatattgccaagcatatctcctatgaattttattctaactgcgacaataacattcactttatcgatactggtaaatctaatgttttccaggaaaattaagaagttaaacatggtggagtccttaaaaagtggggaataa

SEQ ID NO: 73223 - DNA, 2259 bp, synthetic construct
  source 1..2259: mol_type = other DNA
atgtcgttatctaagaagatgttaagggatataagaatcaacagaacccaatttattgccatatttctcatggcctttctaggtatttttgcctactgcggaatctgtagtgaatactatggcttggaacagacaagtgcggacttttacaacgaaactaatctggctgacggttggatttataagaccagctttgacaatgcggatttggataaaataaataacctggccatgcaaaccgaaagacaacatgtaatttcctctgttggggagttcgataacgatcctgacataacgctgcactttgttgagaacaacacaatttctaagttccacgtgttccaaggaaaagactttgatatcaacgacgagtccggtgtctggttggataagcgcttcgctgactcaaaagagttgaatgtcggtgacaatattacttttaaatttgatgggaaaacgattgaaaaagagattaaaggtattgggtattctcccgagtacgtatacgagtcatcggctacttcaattactccaaattttgaggatgtcggtttcgcatatttgtcatataagtcatatccagataatgttgaatttaatcgtttactggtaaaatacaatcagtcggatgattcttttaaagaaaagcttgatgactccataagctacttgtcatttacaaaacaggaagaccatgttagtgtggcacaatttagtgaggaaatggcgcaacataaaatgatgggggatgtttttccaatcctttttattctgattacatttttaacacttttaaccacaatgacaagggttgtaacatatcaacgaacccaaattggcatcttaaaggctgtgggtttcaaagatcggacaataatattacacttcatctcttacggattcttcccagttctcataggttcgattttgggacttattgcaggaccgatggttatcccaaagatgttttacccgtccatgacgactagatatactttaccttcatggaatcccggtttcgatatgagctttgtctatgttgctgccgcgctcgtgatctcttcagttatagttacgtacttgacttgcagacgtatctccaaagaaaaccctgcaaataccatgaggccaaaggctccaaatgtatcctccaatagcttttttgaaaaatctaaattatggaatcacttaagtttcaatttccgttggaactggagagatgcaagaagaaataaattcagggccctaatggcaatcataggtgttatgggttgtgtttccttattaatcgccgcttttggtatgaatgacagtatggatgatttgaaaacctgggagtacgatgacattaaccattttgagagtaagctagtgatttctaacaatgcatctcaagaagaattgtattatgtaattaatggcactaatggcagcttcataatgcaaatgcctatcgaaattaagtcgaacaaccatgaaaacacgggtgtacttctagtttcaaacaataccgacttgatatcttacacggatagcaacaaaaacccaattgaaattaaggaaggcgatatttcgatctcaacaaagttggctcaggattttaacttaagtattggtgataaaattaaatggcatattgtgggaaatgacgactgggttaagtccgaaataggccaaattcatgcagaaccgatttcccaaggtttaataatgtctcccgatactttagaagatgaaggtttaaacttcacaccaaccagtattctaacttcagaaaaattcggtgaaaatatcaattcaataaagtctgtatctactttggaagacatggaggaaagttggagtgagatgacgtcgtctgtcatgatgatggtttatgtcataactgttgtggcctgtcttctagctattttagtcctttataatctaggaatcctttcatttactgaaatggaaagggaagtcgctactctaaaggttcttggttttaaaaccaatttcctaagaagattgttgttgactcagaatctgatttttacagctatcggttttattttaggaatccctctcggattctatttcatgacattgatgatggatgctgcaggggaatctttgtattatgtccctatgttgacttggggcaatataatgctgtctgctgtgataacattttcaatatccatcgcagtgaatttaatgttcagcgataaaattagagatttgaacatggtcgaagctctaaaagatgtagaataa

SEQ ID NO: 73224 - DNA, 717 bp, synthetic construct
  source 1..717: mol_type = other DNA
atgaaaagatcgaaaaaactaattattgccatcttgctcgtaatcttgttaggtttggtagcttttattgtcggtacattatttatgaccccggacttatctcatgaaactaagaatatattagtcttggcctctgataaggaagaacagccaaacggtggcgtagatatggcattcatgatcagattagaaaacggttcattgaagaactataccccaatatatcctggtggaatgacccaccctacgaaatcagcgccagggggcctgcagggccccatgatgcttcacgactgtctatggaatgggctgggtgagggtatgcaaaatgcaaaggagattgtggaggttcgtactggcatgcatgctgatgcagtcgttgttgtttacgataaaggtattgactctattattgattcaattagaccattgaaaataaacggtactgaaacaaaccttagtgctaccgacatcattcgacaaaacgatgcatataatggataccccggaaatgagcatgttcaaggtacaatgtctaggtccgatgcggtgatggtattggctaaagcccttgctaatacagctaaagatcctgttaaaaaaagtactatggtgcaaacagcactaaaggaatactccaatgggaatatcataatggaaccacaaggaagcttcacgaagttactggccactaagggatttgaaagcataacttaa

SEQ ID NO: 73225 - DNA, 2355 bp, synthetic construct
  source 1..2355: mol_type = other DNA
atggtaaaaaatagatgctatgatgctgattgtgataaggataactgtcacaatccagaacactacaattatatctgtttcgatccaaattgtgatgaaataaaatgtaatgattctgaccattatgataaacaattgctaagagattatcaaaagaataccgatttaagtgtttatgaccatggagaagagatagattatgatgaagatgttgatataagtctttgcggttgccctgattgtgcagacgaccacgaccacgatcatgatcatcaccacgaccattcgcatgaccatcacgaacatgatgaggatgactcatgctctgatgaaagttgtagttgccacgaccatgatgagcacgaccatcatgaccacgacgacgttgatataagtctttgtggttgccctgactgtgcagacgatggccatgaacatggtcatggagatgaagaattgttggctgaaggcaaaccattgattgccaatcgcccaatacaaatcatagtttcaagcggcatattgtttgtcttaggtcatgtttttgaatggttgtcatttagccccgcagtcgttacaataatttatatgttaggtgctttaattgcaggttacgaaatagctgttttagcatacaactcattggttaagcgacatactgtgggtccggccatgcttatgtgcgtggcatgtgtagctagctttattattgggcatcctgaggaaggcgctgccgtaacatttttatattacatagcggaatttttggaagattatgcggaacatcgtgctaaacgttctattaagtctttggttgaaattgctcctgaaactgccagggtcaagttaaatgattctgaggagttaagaaatgtggatgacgtcgatatcggggagatcgttatagtcaagcctggagataaagttcctttggacggtgaagtcgtgttgggatcttcatcaatcaaccaatcttccattactggtgaaagcgttccagtgctaaaggaaactggtgatgaggtattctcgggaactgttaacgaagatggttacttggaaattgcggtaacgaaaaaggctaaggattcggttatatcaaaaattgtcactttggtgaaaagatctcaactcaacaggtctgagaccgaatcattagttgaaaaggttgctaaatattatactccaatcatgatggttgccgctatatgtgttgccttaataccatcgtttgtatttggtcaaaacctggttgattgggtttacaaagcgctttcacttttagtaatctcctgtccatgtgcatttctgatctcaaccccggtcggtatggtatctgctattacctccgctacgaaaaacggtgtattgattaaaggcagtacctatgttgaagagatgcgggatgtaaaagcagtcatctttgacaaaactggtacgctaacagagggaaaattaatcctaagtgatgttgaggttctggatgaaaacttctcaaaggaagatattatcaggattgcagcatctctggaaaaccaatcgtcccaccccattgcccaggctatcgtaaattacgcaacagtaaatggcataaagtttagtgagattaatgacttcaagaatgtccccggaaagggcattgtagctaacattggggaagaacaatactatgcggctaatgaatccttaatagaggacgggtcctttgaagtctccagagatgaaattaatagatacagcgccgagggtaaaacaattgtctttatcggaaactcaaagaatgttctcgccataattactgtctctgataaaataagaccaaatgctcatgaggtcatttctgatttgaaagaacaaggtgtacagacaatcatgctcaccggtgataataagcttgccgcaaaaagtgtggcgtctgaaatcggaatggactacgtgtatagcaacctaatgcctgaagataaactaaacattctggatacaattagaaacaagttcggtgacgtggctatggttggggatggcattaatgacgctccggctctagcaagggcaaatattggtattgccatgggtgccgccggctcggatgtggctattgaaacggcggacgttgcattaatgcaggatgacatttccaaactcccatacctgttcactttgagccgtaagacaatgggtataattaaacagaacattactgtggctattgcagttaaattgttatgcgtcatacttgcaatcctaggcatcatcacattgatgatgtctgtaggtttcggggatttaggactgaccatgcttgtgatcttaaattccttcagaattggaatggtgaaagaccccctattctaa

SEQ ID NO: 73226 - DNA, 1371 bp, synthetic construct
  source 1..1371: mol_type = other DNA
atgttaagtaatgatttggtaaacggtgtggaactgatgcttcaaaaccctaagaaagcattaattgagatgtccataccattgattatctcgctactcattactagtttttacaacttgattgatgctgcttgggtttctggtctgggtgctgacgcacttgccggtgtgggatttttcacaccaatcttcatgattttggttggctttggaaatggattaggttctggagctgcttttgccttatccaaatatctgggtggaaataacaaacaaaaagcggataatgcggcgatccattcaataatcattgatctaattgcatcattgattataactcttgcattactagttctattgaatcccatattgaatgcgatgggggcgggtcaaacgattggttatgctactgactacggcatgattatcattttgggctctgcatttattatactttctaatgcattgtatggcattagcagaggagaaggggatactacccgtccaatgtatgctataattgcctctgctatactaaacatgatcttggaccccatctttatctacaatttaaatttaggtgtcaagggagccgctattgccacgattgtgtcttccgttttcgtaattttaatcttactgtactggttttatataaagggcgatacatatttaaaacctaacttaagcaattttgattttaaaaaagacattagcatagatataatcaaggtcggagttcctgcaagcattcagcttttgaataatgctttctttgctgcagttttcagtgccctcttgacctttgtcggttcaactgattcggttgcagtctattcgacaggttggaggatagtgactattggcacaacaccgctaatagctatcggaacggccttgatcagtgtaattgcagcaaactacggtgccaaaaactacaagaacattcaaattgttcaccgatatgcaatgaaagtttcaatcgcactggctattatcgtggctatcttaacaaatgtattcgccggcgatatttcctctgtattcgcttcttccggttctagtgtaagaatagctgcagagcttaccggtttcctctcatggattgtcatttactatccaacaatggctgtgggtgttgcttcaacttatgttttccaaggtatcgggaaggggattactgcaatgtttcagaccattataagagaaacaggtttcaccataacctttgccgtcttgtttgctgtggttttgaattacggtgtatggggcgcctggatggggatcgttttaggtgaaatagtctcaaacaatctgactatgctatgggcggactatcttgttaaaaagttaatagacattagtggttaa

SEQ ID NO: 73227 - DNA, 615 bp, synthetic construct
  source 1..615: mol_type = other DNA
atggaacttaaaggttcaaatatttcgtttaaatatccatctactaagaagtacatattgaaggatatagatatatgtattgataacaccaaaatcaccgcattagtcggtgacagtggtagcggtaaatctactttgtgtaaaatcttgtccggatacacaaataattttgagggtgctgttacgttggacggtaaagagttgcctaagaaggaattttgtcctgtgcagcttattttccaacatcccgagaaagtaatgaaccctaaatggaaaatgaaccatattctagaagaatcatggatgccggacgataatctcttaaaagaatttggaatccaaaagacttggctgacacgttttccacaggaactgtctggcggagaacttcaaagattctccgtgttaagggctttaaatccaaagacacaattcatcatagccgatgagatgaccactatgctagatgcgataacacaagttcaaatcctaacttcagtcattgaaatcgttaaaaagagaaacatggggatgttgattgtaagtcacgatatgccattagttgaaacgatttgcgacgaaataatttatttaaaagatattaatggcatttaa

SEQ ID NO: 73228 - DNA, 960 bp, synthetic construct
  source 1..960: mol_type = other DNA
atggagaagttattagatgtcgagaatgttagcatttcatttattcaatatacgcaaggtttgaatcagcgcgatctgaaagttatcacagacctaactttagatgtctttgaaggtgaaatattggccatcctaggttctagcggatctggcaagagtttgctcgcacatgcgatattcggtattttaccagaaaatgcgaatttaaatgggactataaaatacaaaggtaaagaattatctcaaaaagataaagaagaaatccgtggtaaggagatagcacttattccacaatctgtgaacttcttggaccctttgatgaagattagtgatcaagccattggtgaaactaaagatgatgctgagaagaaggaaaagaagcagaaacagagagaaatttttgagcattacaatttgggtcctgaagtagatgacatgtatccctttcaactttccggaggcatggccagaagagttcttgtttcaactgctctattgtccaatccaaaactggtagtggctgacgaaccaacaccaggattagatcaaaaaaccgtcaaagagaccttaaatcacttcaagcatatgaaggaagatggcgttggtgttttgctaattacccatgacattcatgctgcattagaggtggctgataggatcggtatcttctattcgggatacgtaatagaaattgccgaaaacaaagacttctcaggaaacggcgaaaacctcctacacccctacacaaaagcattgtacaaggctttacctgcaaacgggtttgaactgacagaaggccaccaaccattgcatggggaaatccctaaaggttgtccgtattatgatagatgcgaaatgcgaatgggaatatgtaaagaggaaagaccggagctgacggaccttggtaacaaaaaggtcaggtgttttaagtatgaaggcggtcttaaaaatggtacttaa

SEQ ID NO: 73229 - DNA, 855 bp, synthetic construct
  source 1..855: mol_type = other DNA
atgaacaatagcaacaaaagcatctatagtccaatttccaagatgaacttaagaacaaagaccttgttaacgattgggcttactgtatctttattaataattgttatgataacatctttgctgattaattctacagacataacgactaattttagtgcaatgaatctacctccctcatttgagcacttgtttggtactgattggctgggtagagatatgttcatacgtactttgaaaggattgggcttgtcggttcagatcggtgccggggcatctatactaagttccttaattgctattattttatcctttgtttgtagcattaataaaaaatttgattcatttgtcgcgtggatagtggacttgttcttatccataccacatattctgcttatcattctgatctcaatctcgctaggtggtggcgcttttggtgtcactgttggcgtggcacttactcactggaccacgctaacacgagtcttaagggcagaaattaaacaaataaaaacctcagattacgttaagctatctgaacaattcggaaaatctaaattttggattgcgagaaagcatatattgccgcttgtaattactcaaatcatagttggcaccatattgatctttccacatgccattatgcacgaagcttcggtaacattcctcggtttcggattggccccccatgaacctgccattggtattatcctatctgagtcaatgaagtatcttgctacaggtaactggtggttggctttattcccaggactcgctttgttaatcttagtgttactgttcgatatcgctggagaaaacattaaaaagattcttgaccctaccagtgcaaatgaataa

SEQ ID NO: 73230 - DNA, 996 bp, synthetic construct
  source 1..996: mol_type = other DNA
atgttaaagaatgaaaagattttaaaatttttgggtaagaaaattatccgatttatcatcttgctaatatttgttatcatactgagcttcatactaattgacatgtcccctatcaatccggttaaaacatacattagtgctcttggctcagtttcttctgaaaagatagctatcttggaggcctattggggggtgaacgaaccaataacaacaaaggttatttcgtggttgggtaagatagtgcaaggcgattttggaacttccttaattttcagaatgcctgttatcgacgttattaaagaaaggttcattgcgtctttggttttaatgttgacttcatggctattttcaggacttttaggtttcatactgggtacgatagcaggctttaaaaaagataccatcattgacaaagcaataaaagtctattgctacattctgcaatctgctccaactttttggattgccttgcttttcctcatgatatttagcgtctatctaggttggttcccaaccggtttgggtgtccccatcggtactttatcagaaaacgtatctatttgggaatggttgcacagattaattcttcccatgattacattaagtgtcgttggtatagcctcgattactctgtatacccgtgataaattaattgaagtgatgaatagcgactacttcttgtttgctaaggcaaggggcgaatctggttggaatttgattaagagacatggtataagaaacattctactcccagcaataacgatccagtttttgggattttcagagttatttggcggtgctgtacttgtagagcagatttttacatatcctggaattgggcaagcagctgtatccgctgggttaaaaagtgatgtgcctcttctgttgggaattgtcatttttagtgcgatcttcgtttattgtggaaatttaatcgccgatatcctatacaacttcgtagatccaagaattagggaaggtgaggaagatgaataa

SEQ ID NO: 73231 - DNA, 1629 bp, synthetic construct
  source 1..1629: mol_type = other DNA
atggagcaaaagtacattatagggataatagtcctaattttaatcgcaattattggtggaactctttttatgagtggcggaaataccagcacaagagctgataatgaattagtagtttctgcttttgtacatggcagcgagccagaaacaggttatgacccgatgtatggttggggagaccgtggagaacccttgattcaatcaactttgatgaaaatgaataggaacatgacctatgacaatgatctagctacgagttggtcttctaataataactttactgaatatactgtcaatatcagagatggggttaagtttacggacaacaccacactggatgctgaggatgtcgccttttcttataaccaagcaaaaagtactggaaatacaattgacttgagtagcttggacaatgttagtgcaattaacaaaaccactattaagttcaagttaaataaaccagatagtacatttacagacaagctgttacatgtcggtatcgtaccttcggattcctatgacaataatacgtatggtagtaacccaataggatctgggccattcaaacttgctcaatgggataaaggtcaacaggttatctttgagaaaaaccctaactattatggcaagcagccaaaatttgacaaattgaccatctcattccaaaaaaatgaagcttcgtttaatgcagctaagaatcatgaacttgatattgcagccgttcccttatcttatgccaatgaaacaatagatggttatcactcctttttgtccgaatcaaatgatgtgagaggcatttcgctcccaatgaaaaacaatactggtgaaactaatgaggatggcatagctctggggaacaatgtgactgcggacaagtcaatcaggttggcattaaactatggtattaacagagaagacatatgtaaaggtgccttaaacggtgccggcgttcctaactacgatggtatcgctcacttcctcccatggtacaataatgattccactatcaaagatgcagatattgacaaagctaaggatttcttgaagaagggtggatggaaggatacagatggtgacggaatagtggagaaagatggtaagaaagcctcattcaacctatactactcatctgatgcaccggaaagacaagcgattgcggttgcagtttcagagcaagcgaaggagtttggtattgaaataaatgccaccggttctaattgggatgaaatagacaagatcaagtttagtgaacccgttgtgtggggattcggttctactgatccttatgtcatgtacggcgaatactattccaatcaagccggtattgggtacaacaacccatcacttgtaaataacagcgctgtagattcacatattgataaagctatgtctgaacctcgagaacagtcctatgctgactggtctgcagtttcgtgggatggtcagaccggcatttcaccgaaaggtgacgctgcatggctatggataagcgaaatcaaatacacgtactttgtggatgattcgttagatatttccaaagatacattcaaattgcaacctcacggtggagacttattcggcaacatctacgattggacgcgcatatctccaattaatgctacaaattaa

SEQ ID NO: 73232 - DNA, 1620 bp, synthetic construct
  source 1..1620: mol_type = other DNA
atggaacaaaagtacattataggtatcatcgccgttattctaattgcaattgttggtggcgctatcctaatcggcggcccttctactgaacgagccgacaatgagcttatagtggcggcttacagtcatggtggagagcctgaagctggttttgatcctatacttggatggaactactactcagaaccccttatccagtccactttgttaaagatgacaagaggcatggaatatgaaaatgatttggctaagagctgggaagccaatagtgattttacagaatatacagtaaaaatcagggacgacgttaaatttacagacaacacgactctagatgcagaagatgtggcattcacatataacgaagctaaaaagagcggagcaagcctggacttaagtagtatggaaaatgccacagccgttgacaagcagactattaaatttgaactaaacagaccagattccacgttcgtagataaatttgcatacattggtattgtgccctctgattcatataacaatgaaacctatggtgccaatcccatcggatcgggcccgtttaaatttgtgcaatgggacaaaggccaacaagtaatcttagagaagaacccagattattatggaaaagagataaaattcgataagttaacaattttgttcgaacaaaatgaggctgcattcaatgctgctaaaaataaagaagttgatatagctgcggttccattgtcttatgccaatgagactgtagacgggtacaatatgcacctcatggataccattgatgtaagaggactttctttgccagttcagaacaacaccggtaagttaagcgaagatgggaatccaataggcaacaacattacggcagacaagtcaataagagaggctttaaattatggtgttaatagaaccgcgatatgtaaaggggcgttaaatggtataggtgtgccaaactacgatggtatcgctcatttgttgccatgggccaataatgagtctgcaattgatgatggtgatgttgataaagctaaagacatcttgaaaaaaggtggctggaaagatactgatggcgatggaatcgtggaaaaagatggtaagaaagcaagcataaatgtctattactcctccaacgctcctgagaggcaagctattgcagttactattgctgaagaagccaaggaatttggtattgaagttaatgcaacgggttctaactgggatgaaatggataaaattaagaatactgacccggtcgtctgggggttcggttcaaccgacccgtcaacaatgtggtccgaatactactcggaccaagcgactgtcggttataataatccagccctgattaacaatagtgctgtagataagcatattgataacgctatgaagtctgatcgtgaatcgtcttatgcagagtggtctgctgtctcatgggatggtcagactggtatttcacctaagggtgacgcagcatggctctgggttggggaaattaagtacggatattttgtagatgaaagtttagacatatccaacaataccgaactgatacaacctcacggaggtgatatcttcggaaacatttatgactggtcacgcgtctcttcgattgagaaataa

SEQ ID NO: 73233 - DNA, 615 bp, synthetic construct
  source 1..615: mol_type = other DNA
atggaacttaaaggtaacaatgtttcgtttaagtatccttccactaaaaaatacattcttaaggatatagatatttgtatcgacaataccaaaatcactgcattggtcggtgacagcggctctggaaagtcaactctttgtaaaatattggctgggtatgtgcaaaacttcgaaggcgaggttacgttaaataataataagttgccgaagaaagagttttgccctgttcagttaatttttcaacatcccgaaaaggtaatgaaccctaaatggaagatgaatcgtattttggaggaatcatggatgccagacgataacctcttaaaagaatttggtatccaaaaaacttggctaaccagatttccacaggaactgtctggtggagagctgcaaagattctccgtgttaagggctttaaacccaaaaacacagttcataatagccgatgaaatgaccacaatgctagacgcgattacacaagtacaaatcctaacaagtgtcattgaaatcgttaaaaaaagaaatatgggaatgttgattgtaagtcacgatatgccattagttgaaacgatatgtgatgaaataatttacttgaaggatattaatggtatttaa

SEQ ID NO: 73234 - DNA, 960 bp, synthetic construct
  source 1..960: mol_type = other DNA
atggaaaagttattggacgtggagaatgttagtatttcatttattcaatatacgcaaggtttgaatcaaagggatctgaaagttattaccgaccttactttagatgtctttgagggagaaatattagccattctaggttcgagcggttctggaaaaagtttgctcgcccatgcgatcttcggaattttaccagaaaatgcaaatttgaatgggacgataaaatataaaggtaaagaattatctcaaaaagataaagaagaaatccgcggtaaggaaatagccctgattccacaatctgtgaacttccttgatcccttaatgaagatatcagatcagtccatcggtcagactgaaaatgaagaagaaaagaaggaaaagaaacagaaacagagagaaatttttgaacaatacaatctaggtccggaagttgatgacatgtacccttttcaattatccggtggtatggcaagaagagttcttgtatcaacagcgttgctatctaatccaaagctagtagttgcagatgagccaaccccaggtttagatcaaaaaacagtgatggagactcttaaccacttcaagcatatgaaggaggatggcgtcggcgtattgctaattactcatgacattcatgctgcattagaggtagctgatcgaatcggtatcttctatagcggctacgttatagaaattgctgaaaacaaagatttctcgggcaacggagagaacctcttgcacccctacacaaaggctttgtacaaagctttacctgctaacgggtttgagctgacagaaggtcaccaacctttgcatggggagatccctaagggctgtccatattatgacagatgcgagatgcgtatgggcatatgtaaagaagaaaggccggaactgaccgaccttggtaacaagaaagtcagatgttttaaatatgaaggaggtttgaaaaatggaacttaa

SEQ ID NO: 73235 - DNA, 693 bp, synthetic construct
  source 1..693: mol_type = other DNA
atgagcctatctctgaaattgaagcaatatctaacagaccagggtgctgatgaagtaggttttgcagacatcaccaattttactccaaaaaagaacttaaacaaaggcgtggtcttttacatcacataccaaaaggaaaccttaaggcaaatgcagaatgcccctaccaaagagtatcttaatgaactgataaatttaaatctcaaattggatgaattaggtatgaaatgtgaagagttcttgattgaaagaggctataatgcttatgcgcaaacaaagaaacgacttgggtacgattttggtgagttcaactcattcgaattacctcataaaactattgcaacaagagcaggaattggttggattggaaagagtgcgctattgattacggaaaagcacggttgcgctctgagattaagttctgttttgactgacgccccattaaacccgggaaagcccatacttaaatcaaagtgtggtaaatgtatggaatgtaaaactgcttgtttcgggggcgcaatatccggtaagaagtggaactataaaattaatcgtacggatttttacgatgataaaaaatgtgaaaaatatgccttgaaaatctcgaaggagaatttgggtaagtccgatacagtttgcggaaaatgcatatatgcttgcccatacactcaaaagtacatcaaaaaatcttaa

SEQ ID NO: 73236 - DNA, 1617 bp, synthetic construct
  source 1..1617: mol_type = other DNA
atggataagaagataataattggcgcgattgtcgtggtgttggttgttataattggtgctttcgcctttatgggcgggtcgcatgacagtgatccaacccatctgactgtagctgcacacagtaacatcaaggaacctgaggcggggtttaatccgctgactggttggggctgtggacaccaaaactacaatccattagttcaaagttgtttgtttaaaacggacaaaaatggtagtatagttccagatcttgctactggttattcagtaagcggggatggtaaaacatggactgtgaatgtcagggatgacgttaaattttcagataactcgactttcgatgcagaagatgtggcatttacatttaatacagcaaagcaaacggaaagcgagttggacctcacaaatattgcaaatgtcactgcagtaaataacacatgcgtcaagtttaatctagttgaagctaggtccaccttcatttacgacttgagatatttaggaatcgtgccctctgattcatatgataattctacctacggagagaatcctattggtacgggaccttacgtattggatcattgggacaaaggtcaacaagctatatttaaaatcaacgataattattatggtgataaaccgtacttcactcaaattaccctgctgttccctgaagaagctacatggttagaattagctaaatccggcgaaatagacgtagttcccgttgcgacttctgcattgaatcagacagtagatggatatcaatttattgagaaatcagcaggcagagcacagggtgtctcgttaccatatcttaatgatactggcattatgtataatggtacgatgaaagttggtaacaatgtgactgcggataaatcaataagagaagctttaaacgttggtattaatcgtcaaactatgtgtgatgaaatttttgccggacatgcctctcctgaatttaccggtgtggatacacgaacctacgccaaccctgacgctaaggtagctgatggggatgtctcaaaagcaaaacaaatcttgaaagacggtggctggactgatacggatggcgatggaatcgtcgagaaaaacggtttgaaggcatcattcgacctatattatcctccagattacttggatcgccagtccatgtctaccgtttttgccgaacaggcaaaggaattaggtatcgaagttaagcttgtcggtgctgactgggacacaatctacaagaatctatatagttccgctgctttaatgcaacaaacttctccagatccatacaagtcgatctaccagcaatatcacagcaaagagatggatggattctatatgaatcccaacttatataataactccgcctctgacagactaatggatgaagccatgcatacaagtgatcttaaccaggcggatagcctatggtctcaatctgccctcgttaacggtggagggtggggtccggccggcgacgctccatgggtatggattgctaattacgattataactacttcattaaagacggtatagacattggtaagcaaccagacggtttaggaaacgatgttttgattaacatatgcgattggtcaagaaccaattccacagcttaa

SEQ ID NO: 73237 - DNA, 990 bp, synthetic construct
  source 1..990: mol_type = other DNA
ttgaataaaaaccaactgttaaaattcttcggttacaagctaatacgctttctaatcttgatgattgccgtttcaatcttcagcttcgtattattagacttatcccctatagaccctgtcaatgcgtatttaaaacaagctgccgtcagcgaagctcaaagacaaatacttcaggagtactttgggactaacgtcccattaacgactaaaatatttcattggcttattgatttatttcagggtaatttaggcacttctctgatataccgtgctccggttgtcgacattattttggaaaaagcttccgcttctatcgtgctgatggcgatttcatggctcttaagtggaatcatcggctttttgttgggggttgttgcaggtaaaaataagggatcatggattgacaaggcagtcaaagtttattgttatgctattcagtctgccccatccttctgggtgggtatgcttattttaatggtctttgcagtttatttgggatggttccccattggatttggtgttccaattggtgtgaggtctacagatgtgacctttgcagaatgggcaaccagattggtacttcctactttgacgttgagtctagttggtctagccccaattgcaatgtatacacgaaatgaattaattcaagtgctctcgtctgattttgtcctgtttgctaaatctaggggagaaaagggttggaatttagttaaaaatcacggcataagaaacatcttattgcctgcaataacattgcaatttttgtcatttagtgaactgtttgggggtgccgttctagttgagcaagtattctcgtatccgggtatcggtcagaccgctgttgcggctggtcttcaaaatgatgtgcccttatttttgggcattgtactattcagtgctatatttgtattcgtaggcaacctactcgccgatctttcatactacttgatcgatccaagaattaaggaaaaggagttcaacgattaa

SEQ ID NO: 73238 - DNA, 852 bp, synthetic construct
  source 1..852: mol_type = other DNA
atgatcaagaaagctgacgacaaaaagcaatggtttttatatcctgcaaacctaagaacaaaaactattgtaatcattattctttcggcattggtgatcctaagcattttcatatctgggtatttcataagagatataccaacaagttttataaatgcaaaccaaatgccttccttagaacacctcttcggtaccgattggatgggtagggacatgtttcaaaggactattgcggggctcggactgtcgctgatggttggttttattgcatctattgtgagtactgtcatttcaattatattaggattattttcaagttttaataaattcaccgatgaatttgttgccggcattatcgatctgttcggttcaataccccatattcttttgatcattcttatttctatgatgttcggtggaggagtcattggcgtagtgatgggtgtaggtttgactcactggacgcctcttgcgagagttctacgttctgaggttaaggaaatccgaacgaaagaatacatatccttagctgagaacttggggaaatcaaagatgtggatagccataaaacatattttgccattggtcatatcccagatcatagtcggcgttattctaatgtttccccatgccatcatgcacgaagctgctatcacattcttaggttttggtttgcctccacatgagccagctattggtgtaattttatctgagagcatgaattacttgtcctctggctattggtggttagcattttacccgggtatgtcattattgattgttgtgttactgtttgatttcatcggagaaaatgttgaaaagttgctaaatccagaaaccgctcaggaataa

SEQ ID NO: 73239 - DNA, 693 bp, synthetic construct
  source 1..693: mol_type = other DNA
atggatctgactcaaaaattaaggaagtatctgattaaaaatggagctacggaagttggtttcgctgatatcatcaattttactccaataacaggtttaaacaacggcatcgtcttttacataacttatcctaaagagactattagaaatatgaagaacgccccgacgaaggaatataacgaggaatatgataaaattaactacaaattggatgaactaggcatgaagtgtgaagaatttctaattaagtatggttataacgcatatgcccaaacaagacagagacttgggaatgacttcggtgaacacaattcattcaagttacctcataaaactattgctacacgtgcaggtataggttggattggcaagagcgcgcttttaatcaccaaaaaatatggcagtgctttgcgattgtcgtccgtgttgactgacgccccaatcaaaacgggactccccaccattaaatctgaatgtggaaaatgtatggaatgtaaaaatgcttgttctggtggagcaataagtggtaccgagtggaattacaaactaaacaggaatgatttttacgatgataagaaatgcgaaaagtacgcattaaaagtatcaaaagaaaatttgggggacgagaagacaatatgcggtaaatgtatttacgcttgcacatttacccaaaagtacattaagaaggcgtaa

SEQ ID NO: 73240 - DNA, 1089 bp, synthetic construct
  source 1..1089: mol_type = other DNA
atgaccaaagagaacgaatctatattggtattcgaatacttcactgcttctggtgaaaaggataaatgtattatttctgaggctgaagcgttattattctcacttctggatgatttaaaggaatttaacgtcgatttgattatcaatgaatcgtatggcagtgttgtcaaaaattacggtaatgtaaatccaatcttgattaatcaggatgtagtttcctggcttgaggagaacgcagatcaatttaataaagctattttcatctcagccgaaaacaataataatctctacaacattactaagattctagaggaaaatgatgtgaagatatacaattcttcagctgaagcttgcttaaagtcatctgataaatatgaaacttatgaagcattaccgaacaccatccctcaaccacgatcctttagatttaaaattgattctaaaggctattggaagagggcaatcgaaaacttacatgaaagatggcaagctgaagacccattaactcctcttaaactgataataaaaccactaatgggtgtggactgtgaggatatcgtaatcatagagaaaatcgaagacctcacgttggacttggataaaatttttacaccaggctctcgtgttctagttcaggaatacattgaagggagcgacatcagtgttagccttatctccgatggtaaaaatgcccttcccataagtttgaatgaacaatatgttgaattgaaggagaataaaggaatttatatgggtggccgcttgccttttgagtccaagttcaaagatgaagcatttgatattgccaccaaggcgattgaatctatagaggggatgaaaggtttcgtcggtgtggacttgagaattaactcggatgaaaaggacatatattccctatacctactggaaattaatagtagattcacaacgccctatgttggattaagcaaaatagcaaactttaacataagtaagacaataattgatctgattgacggaaatatcaacattggtgatttggacatttcgttagatggtgaaatcgagtttaaaaagtcaggaaattcattagaaattaggagaatataa

SEQ ID NO: 73241 - DNA, 567 bp, synthetic construct
  source 1..567: mol_type = other DNA
atgactattaatattcagatactccttattgcctgcgttacaacgctatatttcatacttcccgcatattttagcaacggtgcgggcttattgttcggtggtggaatgcctgttgattttgcaaagtctgataggtacggtattcgatggattggcgacggagtaacctggagaggcttattcgcaggcactattattgggattataactggtatcgtgcaaggtttcattgctccgcatatacttccagcttatggacaatacatcataactccaatagtaacaaacattaattccgggatcttgatcggatttttactgggttttggggccctattaggtgacgcaatgggcagttttctgaaaagaagattgggtattggtcgtggaaagcctgctccattattggatcaattagatttcttaattattgctttgattctagtttcattagtggttaaaatagatttgttgtttattgcgatctcgatcatccttacattggtcatacacttgatagccaatacctgtgcttatctactgggtatcaaagacgtctggtactaa

SEQ ID NO: 73242 - DNA, 486 bp, synthetic construct
  source 1..486: mol_type = other DNA
atggatattattaaaggaaaaacatggacttttggcgagaacatagatacggacgttattatccccggaagatacttaagaaccttcaatcctcaagatttggctgaccatgtcctagagggtgaaaggccggattttacacagaacgtccaaaagggagacattatagttgctgacgaaaactttggctgtggttcaagtagagaacaagcgccagtagctattaagaccgcaggtgtgtcggcaatcgttgccaaatcatttgcacgaattttctatcgtaatgccatcaatatcgggctcccagttattgtttccgatattgaagctgaagatggggatgtaataagtatagatctgtctgaaggcaaattggtgaatgagactactggtgatagcaagaactttgaacctttcaaagagttcatgttaaatatattggaagatggtggtttagtcaatcactatcttaacgaatctgactaa

SEQ ID NO: 73243 - DNA, 1278 bp, synthetic construct
  source 1..1278: mol_type = other DNA
atgaaagtatacattgaatcgtacggttgcacattcaacaaagctgatggccagattatagccggtaatctacaagaaaatgatattgatatcgtagggtctatggaggaagcagatgttattattgtaaacacatgttacgtgaagctgccaaccgaaaataaggttacgtacagaatccaaaagcttcaaaacgactttccagataaaaaaatcatcgttggtggatgcatggtcgaaatcgaccctgaaaagttggataaggttgctcccaacgcttcatggattggacctcatcaattgaataaatctgcagaggtggtgaaatccacatactgtggtgaagtcgtgcgtgagtccggattttcaaaggagtctaaggtggatgttcctaaagtcatggacgacagtctgattcacattatccaaatatgtgaaggttgtttgggtgcatgcacattctgttgcacaaggtttgctcgcggcccattgaacagctatccaatagaagatattaaggaagaagccagaaaagctatcgagcagggtgcctgtgaaattcagcttaccgcccaagatactgcagcgttcggtaaagatagcggtgaaaaactatctgatctaatcaaggaagtggctaacttagacggggactttcgtataagagttggcatgatgcatccgaaaaatatattgaatgatgttgacgaaatcatcgatgcgatgaagcatccgaaggtatataatttcatccatttgcctattcaatctggaagtgataaagtcttatcagacatgaggcgagggcattcggttaatcaatatctcgatattgtctccaaattcaaaagtgaaattcccagtttaactttggctgttgacattattgtgggttatccaactgaaagtgaggaggattttaatttaactgttgaattacttgaaaagataaagccaagcttaatacacctatcaaaatatcaacacagaaaaggtgcagtatcgtcttcacttcctgagattccacatgaaaccatgaagagaagatcaaaatttttatctgagattaaatcaaagataacggaagaggaaaataaagaattagttaactccaaccagaaagtcttggtcattgagaaaggttctaagggaggatttatagcaaagactaattcttatattcccgtaatagttgataatgttagcctcggcacatttgttgacgtaaaaataaccgatgccacggctacttatttaaaatccgaactgttgggctaa

SEQ ID NO: 73244 - DNA, 1077 bp, synthetic construct
  source 1..1077: mol_type = other DNA
atgacaaacgataactatacctgtgtaacaactggtacagtagcaaccgcctgctctcttgcagcattagacgcgattctgaacactcctgatatagcttgtgtcaaagttgagacacccaagaaagtattgaatattatcatcgacgaatgcaaatgcatttctaataataaagcttacgccattgctcacaagaatccatataacgatcctgatgtgacagtaaatttggatatcatttctacagtggaattattggataaaaatgatgaagaatccaatgttatcataactggaggggaaggtgtcggagtaattaccaaaccgggtctccagataccagtgggagagtacgccataaacccagttccacgtagaatgataatcaagaatttgtccagtaaaatccctaaggggaaggtagctaaggtcacgatctcaattcctgaaggtagaaaaatagcgaagaagaccatgaacccaaaattaggtattgttaacggcatttcggttcttggaactactggtatcgccagatcaatgtcgagtgaagcttacaaaaattcaatcgtgacacaaatcgacgttgcaatagcctctgacatcgatgatttaattttcgttcccggcaatatcggtgaaaaattggcattgaagcaactagacgttaaaaaagaacagattattcaaactggtaactttgtgggtttcatgtttgatgaggcggctaaaagaggcattgctaagtttacgttctttggtcacattggtaagctaattaaagtcgctgggggcatatttgatactaaacatgccattgctgatggcaggcgagaaataatggttacgcatgctgcactgtgtggtgtcgacaagataaatctacaaaaattatttgattccaagaccactgacgagatgatgtctattctggatggacttggagtttcagtggaggttagcaatagtattgcaagcgcaattcatgacaggtgtatgcaacgcttcgatttagatttaaatgttatattggtcgacatggaaggtaattatctcaacaacaatttcattatataa

SEQ ID NO: 73245 - DNA, 1272 bp, synthetic construct
  source 1..1272: mol_type = other DNA
atgaagaaaatatactcgatgttgctgctgattgttatgctgtgcagcctatcaatcgtttcagcctctgagaatctatcgacttcagataatcccgttgtagtggacaatgtggatatgtcctctaagaacattggaagcatccctgacgtgacatctgcatcaaatgatgttgtagtttcagaaaactcttcggtcgaatggaagtcttatgaaaacgagaaggatgataatgtatcagataaccaatctaattcatcaagtaacagcacgtccaacggtagctacaaagaggagtctgttgtaagtaatgtcgtaacaaagaatgtgagctccagttatggtacggttgtgaactataatattaaggttcttgatcagtttaaaaagccaatggttggtaagaccgtttcagttaccattggtaaaaagaccgtcgaaaagataactgatagcgatggcatggttacattcacactcaattgccaagcgggtaaatacgtaatcaaatataaagttgataatataaacggttctaattcatatattgttaagaataagatctccttaactgtcttgaattggaatcttaaaggtgacgtctctaaaattaatcttattaaaaagaacatgcctaataatacttgggtaaaaaaagctgttgcagcaacgaaaaaaggtattcccttattaaaatttaagggtggcaaaggaaagatcgtcttcatgactgctggtgtgcatgggaacgaattatcctcccaggtcgccgcaatgaaaatgattaaatatttgtctgacaacccaattagtggaacggtgtacataatgccgtttgtgaatgttaaggccatcgctaaaaaagtcagatataccgataaggactacaatagaatagcttcgagttctggcactataccaaacaaaattgttaaattggttgtaaaatacaaatgtaattcttacggtgacttccacaccacaaaacctggtggagctccagggaaagatattgtaatgggatctaagagtttaaaatccaaaagtgcagacttgactaactatattgctaagaaatgtaaagtcaacaagaggatatatagtcatatcggccaagaataccctggcgcgttgtttgaaaatgttaataagaaggggattacttcagtgatctgtgaagtggccttgccacataacactgtaacaacaaagaccgtcaaaacatcgtttaacatgatgaaatatctattaaagtataattccgttatataa

SEQ ID NO: 73246 - DNA, 741 bp, synthetic construct
  source 1..741: mol_type = other DNA
atggcaatcactaaaaaacatgttttctcattgctaatcattttgataattgcgcttggcactatttctatatcttctgcttatgtggggaccggtttctcacatgatattcccacgtccaaatatcatgatttgtcggctagcgatattctgaataaatacaacacgacaaattgtcatgtagaagaaaatggtgtctgcacaaaggtggtcgacggagacaccatctatctcgataacggtaagaagataaggtttgttggtgtaaacaccccggagcgtggagttgaaggttacattacttcgaaaaattttgtccagaagttatgcttaaataaaaaggtaggtcttgatatcgatgattcaaaattcactgacagatatggaagaacattagcagttgttattgttgacggaaaaaatgttaatgaaatgctattaaaggaaggtttggccgagatcatgtacatgccacctagtgaatttaatccatttgagtggggcaccaccaatacccatgtagatacaacacacagttcatcttctacaactcacacatcgacagaatccacgagctcttcagactctgctaaatatattggcaatgcaaacactgggaaattccacactgctggttgtagtagtgtgaatcatatgtccgagcacaacaaggtctttttttccagcagaactgatgccataaaccaaggttacactccatgtgaaatatgtaacccttaa

SEQ ID NO: 73247 - DNA, 1548 bp, synthetic construct
  source 1..1548: mol_type = other DNA
atgttaattaaaatcaatggcgaagaaatggatgtggcagaagcttccacaatacaggatgtaattgaggaaactaatgctccatatactcctggtagtattgtttgtttaattaagggtaaaaaagaacttgaaaaaaacatttcaaaatataaaatcagaactaataaaggctcgattgttatccaattagacgaatctgacgaagccaagccacttgtggacatatggaaaaaccagtatgatgaatttgtcgatttaaacatcagatggtctactacaactgaggtggcaattggtccaattgtaactgatttggaaccaacgtcagaagaatacaaatactacgagggcgatgttgtcttgagtttatcgagtttcagcaatgagtctactcatctaatattgctgaaggataataccaccaatgtctacagtgtacctccatttaataagggtatttttgctcgcgtgataggtggtaagaaaaccttagacaacttaacggatgacgactcagtcagtagcatcgaaccaataattgagagaagcacaacaaaggatattgtatcagtatctgacttaacgaccgttttagaagagggcaatgaattgtatacttacatgtccttcgacattgacgaagaatcccccgtttgtgtggaacatctatttgcactgataaaggatggcaaaatgaaggtttcatatgaatccgaatcattcttgggtttttatgaactagcctcgctagaaaagcctaaggagcatgtcacaaagagaaatcgtggaacaatcactgttagaagtgatggtgtaggtgttggaaaactcttcatctatcgtgaaaatagagtgttgtctccaaaccacaccaccgttggaaatgtagtgaagggtatggaactcattgatgctgcaaaggaaaatgaatttataacagttaaggctgaacaaggtaggttgatgttgctaaacaaaacgcaagccgaggctactgaaatgctttcggcggcaggtgttgagcatatgatagatggactggttgacgacaatgcgatcatcgttgagcaaacacctcaacacacaatcgatatcctaaaagagggtaaagttattactaaggccattaacaaagatgatttgtgcacaattaagtttaccgataacgctcccagatctgtcaggtactttaaattactgtctggtcttttggaaaatcctgtagggcaaataaagattcacttcgcagtaccggggatgcatatagtcatttttgagggggataaaaaagcagctaaaggtttggtccctgaaaacaaccccgttgataaagttatacgaggtcagataggaatcactaatatggcttcaaaaagcgccgggttgattggaattaggtttgaagataattctgatttcggaccgaccgctgaaactttcgatgcgacaaatataattggagatattacgtccgactatgactatcttgaaaatttaaaagaaggcgtcgtggtgtacgttgccgagtctaacaacgagtcctaa

SEQ ID NO: 73248 - DNA, 561 bp, synthetic construct
  source 1..561: mol_type = other DNA
atgctagttgaatgttacgacgaaagaggtgcagaggtctatgaaatcatcattaagcagatatttcaagatctggttctaggcagttcggttgatgatttgaaagcttatgtgaatccagacgaccctgtcttcgtcttggctattaaaatgcgaaagacgtctaacgttataaagtttgaagatgtcgccaatttaatgtacaataaacaaaacgatgtgacaacaattctaatcgacaatgagaattaccttcccaacattctcaaagaattatggaaaagattttcaagagatgaaatctatcaaccaaacagataccagcttgaaataaaaggtgatttcaccgagttagggtctattgttgtagacgatcctcattccaatttaaggaggcgtatttatgacgccgtattccgcatattgccggaaggatttaagatcataaaagatttgagcaccgaagatattgtgactgttgtagcgactgatgagttaattaaagacgcatggattgaaaaggctctggaatttatagatgagttgaacaagggtatttaa

SEQ ID NO: 73249 - DNA, 447 bp, synthetic construct
  source 1..447: mol_type = other DNA
atgaataaaaaaattgtaatattggttatcgtcgtaattatagctgttcttctcctatttttagtttacgctaacaatgactctagtagtaactcaaacaggacgatcctgaatgtgtcttctgaaggtccaattgaactttcgaaaataaccgatgatatcaaaaacaattcctactatgagggatatgatgttgaaactttaagatggatggaatcattaggcgacaagtacgtcttcaaatcaaacgatgaaatagtaattatggacaagtgggatgcagacaaaattccttccgcgtatgtttgtgatgcctacttccgtgagatattcagctgcaatgtgttggaaaatagaacattgggtgatgggaatcattttaaggacgtcctatttattaagaatgttgaatttattgatgaggaagtgcactatatccaaatttaa

SEQ ID NO: 73250 - DNA, 936 bp, synthetic construct
  source 1..936: mol_type = other DNA
atgagtataaagaaagtcgttgtcgctggcggcggcgtactaggtagccaaattgccctccaaacagcatactgcggttttgatgtgacgatttggcttagatcggaaggctccattgaaagggctcaaccaaaattggaacgttttaagaacatctatgttgacactcttgagaaaatgaagacggacgccagtgcatactgtagaggtttgtctaaaaaagccgatttaagttctgaagaattagatgctttaaaagagcaagcgcagaatgcttatgattccttgaagttgacaacctcctatgaagaagcagctaaggacgcggacttaattatcgaagctatctcagaaaatccagaacaaaaaattgcattctaccaggagttggcaaaacatatggaagataagacaatactggtaacaaattcttcaactttgctcccaagcatgtttgctgaatatactggaagacccgaaaaatatttgtcattgcacttcgcaaacaccatatgggcaaataatactgctgaggtaatggggcatccggggaccgagcaaaaatactatgatgaggttgttaaatttgctgaagatattaacatgatccctttaaagcttaagaaagaacagccgggttatatcttaaactcactgttagtgccattcctaaacgcaggacaagctctattggccaatgatgtggccgaccatgagacaattgataagacttggattctagccacaggttctcctgccggtccattccacatattagacatcgtcggtcttgaaacggcatacaatattgttataatgaatcccgaatcgaaagatcctgaaactacccctggaaaaattgctaagatgctgaaggagaaaatagatgcgggtgaaactggtattaacgctggaaaaggattttacgaatattaa

SEQ ID NO: 73251 - DNA, 267 bp, synthetic construct
  source 1..267: mol_type = other DNA
atgtttgtagcaacattagacggaatattcaaatactccgaccttccagaagaatacgagccttatgttcaatttaaggccacaatagataagagagagttgaaacccactgatgaaatggctattctgaacattgcaggtacctctactcatcatgtcctattcttagatgcttattcaagtatcgcggagatcgaagctgaattgaaagaagcagatgccaagattaatcacaccacgttgaaaattataggtggccatctctaa

SEQ ID NO: 73252 - DNA, 387 bp, synthetic construct
  source 1..387: mol_type = other DNA
atgctggacaagaaagtcaaggaaatcatgacatctgatgtactaacaaccacttcagatgttgatgtggtatttgcctttgaaaagttgatggagaacaaaattagctctcttccagttgtggaagatgatgaattaattggcattatcactgcaactgatgtcgggcataatttgattttagataaatatgaattaggtacaagtgttaaggaaataatgataacccctgtcgtcacggtttccccagacagtactatcgaggaagctgtgtgtattatgaaagacaacgtttcttcaggtatattgaatcaactacccgttgttgaaaatggaaaactcgtaggtattatttcggatggagacattatccaggagatattctaa

SEQ ID NO: 73253 - DNA, 909 bp, synthetic construct
  source 1..909: mol_type = other DNA
atggatgaactgagaaataaaggtggtaagaaggctgtaactgttgccataattgcaaacactttcttaaccgtttttaacattatcgtaggaatgctgtctggtagttacgcattgatctctgaaggggggcatactttgagtgatattaccacaactataattgcttatattggctttaaaattggtcagaagcccgcagataaggaacacccactagggcatggccgtgctgaggccatatccggcctcatcatcatgttgtttttaacaatggtcgcttatgaaatcatgagtggcgctatcgaaaagctgtttaatccctctacaatcaccacgccagacatttatgctgcggtgatggctattttcggtatattcatcaactacataatatccgagtatattatcagattaggtaaacaaataaatagcccagccatcgtggctgatggaaaacatcaaaagacagatattttttcatcgattgcaatattaattggagtacttgtatcaaacataggttaccctatactagaccctattattggtttgatcattggttttttgattctaaagacagcatacggcattggtaaagagaatcttgacaatattatgggtaaaattccgtctgaaaaattcgttaatgaaataaggaaaatagccaacgaatcgagcgattatgccaacaatgcgcacaatataaaagttgactatcttggttcctacgctgcagttacgttacatattgaaatcgatggaaatatgactttaaatgagtcacataagattgttcatattgtccagaacaatattattgaaagaatccctgatgttaaatatgtgaatgtccacgcatgtccaaaaggattggattacaaccacaaccaagaaatagacaaataa

SEQ ID NO: 73254 - DNA, 2877 bp, synthetic construct
  source 1..2877: mol_type = other DNA
atgttcttcctagttttgggggtagtcggtgcaacagaatttaacaatgcctcaaatacagaagatagcaacttaatgactgataacgttgattcattgtcggtcgaaaataaactcgaagtttctaacgaggacagcatctcagaggctaacctcgttaactctcacgatgacaatttgaacaactattcggatagtgatgttttaagtaactatgaggacgattacggaaatgttcaagcttcgaattatgctgaaataggtaatactaattctgtccgcagtgatgtgttatctgtctctaatgacgataacctggctgctagttccaaggtatctgcaaaggtggacgtagttgacacacattattccaaatccgctacatacttcaaagtgactctgaaagatactaaaggtaactctatcagcaatcaaaaaatttcgttcaaggttaatggcgtgacttacacggcgactactgataaaaacggtattgcatcagtcaaaactgcagctttgtctgtaggaacatacactgttgcaattaaatacgccggtagctccaaatacgcagcagtagctctttcaaagaaggtcaaagtattgtcatctgttagtggcagtgacatcacgaagtattacggacctgttgtccagtactcagtaaaattctggaaaaattacaatgccctcgcaaatacaaaagtatcatttaaagttaacgggataacctataccaagaccactgacaaaaatggcgtcgccaagttacctgtgaatttggctcctggaaagtatgtcattactacaattaatccatattctggtgaaaaattgtctaacaagtgtatttccctaagagatggtacaacgctaacccatggttcaactaatacatatatcactcctaataagaagcattcctttactgtaacgttaaaatctaaacacggtattctgatcaagaacaagaatgtagtcttcaaatacaataacaagaaagtaactgttaagactaattcgaatgggaaagctacgttgtctatacccgctctatctaaaggtacctattatattagttattcatattcaggagacaaatattactcaggttcctctggatcgggaaaactgtacgtaaaaaatccaaccacgaaaattacatctagcaaattgaagatgcaatataaggatggaagcaaatttgcggtgaagttaacaaagaatggtaaagttctggcgaacaaaaaagtgaagctgacatttaatggcaaaacgtataccgaaaaaaccaacagcaagggtatagcttatttaactgtccctacagtcaagccagctacctacaatattaaatatcagtacctaactccaagctattttaactactgttatggctccaataagatcgttgtttctaagcaaaccgctaaggtatccgccggggacttagtgatgaactataaagatggttctgtttacaaagtcgttgtaaagaacaaattcggcaacccgcttaaaaatatcaaagtcaaatttacaataaacggcaagacgtacacgaaaactacggattccaacggagtggctaagcagtctatcggtctaaatattggttattattctgttaagacagtactttctaataattattatgcccatggcgctatatataagcatatttcagtcaagggcaccaaatttgtaggcggaaatatccatgtcgccgtaggtaagactgcatattattcagtcaaattattggattataagaataatccgattaaaagcacagaagttacttttattttggatggtaagaagtacacagcgacaaccagctccaaaggtgttgctaaggtaaatttaggtgttttatcggcaggtactcataatgttaagtactcccaaggagagtattccggttcatctaacatatacgttgctgacaaggtgaccatcaagcaaattatcgctgcatctggcaacgtgcaaaagtacatacaaaaaaatcaccgattaccctccacagtgaatattgggggtgtcacttactcaactaaccaatatttatacttagtgtcaaaagctattgtaaatttgaaatctaacgttaaatcggccatttatgttaaaaatgtcgacggtccaagcaacccttcatcaacatatgcggcaggtaacctgtatgattatctttcagttgcaaatagtgttgtgaaaaattcggatagtaaaggtagtgtccccaataccgttagttctaaagttggaaccattggttataagagcttagtttacgcgtttgctcgtgttgttgcattttacggtgatgatgacagattgccatcctttgtggaaataaaatcactaagcggtaccagttcagacagtaacataaactctaaaaacactatatccaacctaaaagcctatttggccgcatcaacgaattgccaggttaataatgccaaaatcaagcagctcgttggcaagttaaccaatgggttgaagagtgaaaaatctaaagcaactgcaatttacaattatgtgagagatacaatttcatacagtttctattacgataccaaacacggtgctgtgggcacattgaacgcgaaatctggaaattgcgttgatcattcccacttgcttgccgccatgtttaggacggcaggtcttgccactagatacgtgcatgggtcgtgtacattttctagtggaagtacatatgggcatgtttggactcaagtattgatagataacacttggactgttgctgatgcaacaagttctagaaactcgttaggaaaaatagctaattggaataccaagtcgtacaggcttaatggttactactccagtcttccattctaa

SEQ ID NO: 73255 - DNA, 183 bp, synthetic construct
  source 1..183: mol_type = other DNA
atgtttagaaaaaggattgactccaagggacaaggctctgctgagttaattttgatcattggtggtctgattgttgtcgtactcctaatagcaagttatatatcaaatatcactgaaaagacccagacaaacattcaaaatttgttaaaaacggaaagagatttccttatcaacaaaatataa

SEQ ID NO: 73256 - DNA, 207 bp, synthetic construct
  source 1..207: mol_type = other DNA
atgaaaaatatgaaaaagctcatcaaggaaaactctggccaaggtgctgccgagtatatattgttgtttggaggtgtgcttgttatcgcgctactggcattaacaatttacaggtcatatatggaaacttccgatgtcagtttaaaggctaaagatgacattattgatgtaagaaatacgatattggacaacagaacccatgtttaa

SEQ ID NO: 73257 - DNA, 1149 bp, synthetic construct
  source 1..1149: mol_type = other DNA
gtgggaaatacaataaagttagtctcaggttttatactgtttgtaatcggcgttctaatagcttatgaggcgagcgtgtataacctgttggatatcttattgataattggtttaatcattgcaattgtaggaataattatgatgatcagccattttgtggaatctaatgcggataggacgacaaataaaattaaagagtttctggagtcgaaagaaagtaattcgagtttcgaaagaaaaaattttactggtgaagaacctttaaaaatccgtcatgattataatgattttgacgatgcagaatatgatgacctcggcattgaagattacaacgactcaactccctccgagtactacggagatagctttgaagacaaccctaacagagtactaagaacggttccaaggcaagaaaaagagctaaacttagataaccagctagttttcaccccaaattatggcaggccattgaaggttactagaacgccgaaaaagcgccaatcagattatttcgaaaaagaaatgcctccgttcgtcgtcgaaactgataaatctgacgaaatcaagcgggctttggaagaaccaaccccagttgaaaaggctgtaaacaatcatacattggctcctgaggtgaaacaacctagagatattaagattgatattaacgacccagagagtcttcccgttccaaaatcactcagtagccacatactttgtaatgattcggttattaccagtcaagaagctttcgaccaattggcaatttatgttaataaggaaatcatgttggaaattccctctttaaatgaattgtcagatagattcttgtcgcatgtgccaacatcctactcaagagtaataattgacgaatttgatacatccgacatgtcttacatgtttttaatttcatctcttcttaaacaaggtgttcatattaagaccgtccctaaagtccacacagttaatttaatcactgatgattcccacgcaatgattatatctgaaggtcagaatgatatggagtatggtgccatatacgacgaccgaaagtccatatccaacattcgtgccagtttcgagaagacttggaatattgcctctaacttagatgagaatatcatcatgggttctgtcggggggtctgcttaa

SEQ ID NO: 73258 - DNA, 720 bp, synthetic construct
  source 1..720: mol_type = other DNA
atggagataagatggttgggtcattcggcatttgaaataatcagcgacgacaatgtcagaatattaatagatccctttatttcaaataatcccacttgccaagtcccagtcgaggaactgaacccagatattattttgcttacccatggacactctgaccactttggtgatgctttggaaatctccaatagtactaacgcgcctattgcctgtattcacgaaatttcacttttcctagctaaacaaggcattaggaatatttcagttaacatcggtggctctttcgtatatcgtaacattaaatttacaatgctcgaagctaaacattcttctgatatcgacatggttgaagagatcgcccctggtggaacggctgcaagctttttaatcaccttcgaggatgggactaagatataccattgtggtgatacaggactatttggcgatatgaagaatattattggtgcaatatacaagccagatgtggtaatgataccaataggggacaaattcactatgggtccttttgaagctgctttagcgtccatgtggatgaatccgaaagttgttattccaatgcattacaatacattcccaccaatcgaacaagaccctgcaattttcgccaattttgtaagtcagttcaacccgaacatcgatattgtggttatgaatcctgatgaatattttgaatataaccccgaagattatcaggattaa

SEQ ID NO: 73259 - DNA, 273 bp, synthetic construct
  source 1..273: mol_type = other DNA
atggacataactgtgaaagtcacaagtattcatatcgttgcaggtataatcgctgctttaatttctactgggttaacccttggctggtttggatttaagaatgatatttttgcatttttcattgctgtaattatattgtatttcgttggtcaggcgtgtcaaaaaattgctggtgatgaaatttccggtttttcacaatggttgtgggatggaattgcaccattctattttacatgggttatagcctacacgatcttcgccatctacctataa

SEQ ID NO: 73260 - DNA, 1821 bp, synthetic construct
  source 1..1821: mol_type = other DNA
atgtcgtcgatgtcttcggttgcaggattatcaaaatatattaagaccttgccaaagaccaaattctccataataggtatgctaattatttcttttttaattggaagcatctattacttaatcgatttgaatccgactatgggcattctcgaagattttattgcaggtgggttgtttggtttaatcgtatttggtatctcttccataatgagtggtgcattgaatcagcagacgattagtgtggtgcacggtatcaacttaaaaattaagcactcaatgtttttgtctgttctttctatgacaatacttggaataatcataattatcggatgtataatctcccaaatactaaaaatcgatttgtttttaaactcaatgctattcggttgtgtgctaatttatggtttcggcacattggttttctgggccacatcaaaagttcgatttgtaactgctgcgattacgggtcttatccaaccattactcatattagcgatgtacacattaattacattcttattcatcgacacctcgtttattggtcctgcgattttgcaaataactctaaaagccatagttgctgccataatatttgtgatggctatctatgcgttcattaaagttattgcatccccattcaagaagaacctcggtatcggtgtgttggatctcctgagtttatttattgcccatatgaacgaaggaagcaattccctggaaggattatttgaaaatatgagtgaggctattgatacaatcgtcacctttgttagttttaaaactgaaaatgggataaaggccttatttatatctccttctgttcaccccgggcctctaggggaccttgggggatcaaatatgccaacgttgttggctaataaatttgaccatttcactatggttgctcatggtccctccacccatgattttaacccaatcgcagtatcagagattgataaaattgaagagtctgtaagaaacggcttgaaaactgtagaatactcatctaatgccagtagattcataaggtataatgttgaaaaggcaaatatcggtgttcaactatttaataagggtatggttattttatctacttttgctccggatgctgttgatgacatcgaatttggtgtggggttgacgatgatggctcaaagccgtagccgttgcaacgttgaggattcaataattgtagattgtcataactccttcactcccgagtctggtgaaatcttgcctggaaattcagaggtattccaactgattgatgttattgacacaattaatccaaagcagggcagatacgacgtcaaagtgggctgctatgaagataaccttgaatccttggataaacacgatggtgtcggcgacagcggtatcaagaccatgattgttgaagtcggcaatcaaaggaccgcttacgtacttttcgatgcaaacaatatggagatcggatttagacaagaaattattgatgcagtcagcgacttggaaatcgacgaaattgaggtcatgaccacggacacacatactgtgaatacactttctagaggatacaatcctattggaattgctaaaagacctgaaattatagaatatgtccgcattagtatcgaagaggcaataaaggatctggaaaaagtagaagtcggtactggcactgagaaaatagaaaatcttaacactttcggcccaaagaactcaactgaattaatttcaacaatttcttcggtcgttgctgtgagtaaaattatagctccagttctgttgattacagccttactaattgcatttatatggatattctttggtggtctgtaa

SEQ ID NO: 73261 - DNA, 279 bp, synthetic construct
  source 1..279: mol_type = other DNA
atgattacttcaaataacttggtccatcatgaatttataggtttaagaatccacgctatgaacccaaagaatccgtctcttaatttgaaggggacggttattgatgagacaaaaaataccataatcattgaggaggaagataacaacgaaaagatgattcccaaaaacggaactttcttcgtatttgaattaccaaatggcgaaaaaattaaaattgacggtaatatcctatccatccgtcctgaagatagaataaagaagaggtttaaaaaaatataa

SEQ ID NO: 73262 - DNA, 1362 bp, synthetic construct
  source 1..1362: mol_type = other DNA
atgtcctcactagagtttttagagcccgtctttaaaattgttccagaagtaaaatctcctgtgcatcgagaagattttaatgaaaagcttaagtggacagcccttgtgttagttttatattttatattgactcaaattccattgtatgggttggctcctggagctattgactcatttgctcagttgagagccgttatggcaggaagtttcggttccatcctaacattaggtattggtccgattgtgacggcatctattgtgttgcagttgctcgttggttcaaatctgttggatttggatttatcttcgcacaaggataaatctcatttccaagcgactcaaaagattctatctatagtttttacattttttgaagccagtgttttggtactaacaggtaacttagtcccaatagatggatcttacacgttaatattgatcatccaacttgtggtcggggccttagtaatcatatacctggacgaagtggtttcaaaatggggattcggtagcggtattggcttgttcattgctgcgggcgtctgtcaggccattattgtagggaccttcagtatcttgaacggctcagacggattattagcaggtattatccctaaatttatccaactagctaccggcggtactttcgacttctcaatattagtgccattaatagcaaccattatcgtctttgtagtggttctctacggtgaggctatgaaagtcgaaattcccatatcgcatgggcaagttaagggtcacggtagaatcaggggatctgttggtaagtatccactaaaatttgtttactcaagtaatatgcccgtaattttaacttctgcattgcttgtcaacgtgacgttatttgcaaacgttttccaaaagattggtgttccaattctaggacatctccaaaatggcaaagctgttgatggtattgcctggttattgtccacacctaacttgaccatgtttataacagaaccgattcatgtcctggtatatgcactatttttcatcgcttgttgcatactattctcctacttatgggttgaaatcagcggattgaatgcgaaaaagatttcggagcagctgcataaatccggcattcaaataccagggtttagaagcagtaaacgtcaattatataaaattttgaaaaagtatatacctgcccttaccattataagcggtgtttacgtcggtctcatcgctttcctggcagatttgactggtgctcttggcggcggtactggtgtattgcttactgtaggtatcctgcacaagctttatgaagaaatggctcaagaacagctgatgtctgcaaatcctgttcttaggaaagttttaggaggagattaa

SEQ ID NO: 73263 - DNA, 579 bp, synthetic construct
  source 1..579: mol_type = other DNA
atgtttgacatcatgggaatgatctatggtgttttgaacactattttcgacccaatacttgctatggacccgaatccatccaaccctgcattaacagttttgattattgcatttatagtatcgttaataacaacgattgctaataagtacttggtcgatcaagatgccctcaatgaaaaacaagcaaaaatgaaagagttcaacaaggaactgagggatgctcagaagagaggtgatggaaaaaaaattgctgaactgcaagccagacaaactgaaatgatgaaggaaaatacggcgatgatgtcagagcaatttaaaccaatgatagtgacctttgttcccattattttaatatttttttggatgcgtgcatctgccattcatgatttggtaatcatattgcctaccactgtctattgggttacattaacacctctttggcacgtgatcggcagtatgttctacggtggccaggctaccattccatatgggatcggttggctattatggtacatgatctgtactttcggtatgagccagattctaagaaagtttctaggattcaaacaaggtttttaa

SEQ ID NO: 73264 - DNA, 1767 bp, synthetic construct
  source 1..1767: mol_type = other DNA
atgaatgttaaaaacacatttgttatcatcttactgtttttaatcttattctcaacagttacctttgtatctgccgatgatgacagaagctactcaatcgatcaagtgataacggacctaacagtgaagaataatggtctactacatgtcgaagaacagtatgattattcgttcgatggcgcttttaatggagtttatagggacatccctctaaagtccggtgaaagcattgagaatattaaaattcatgttgatggtgcttatgccacatatgaagagagtgacgatgatggatataaacatgtaaaaatttatttatattccgacgcagcccatactaagggtataaaggattgtaacgtaaaggtctacattagctacgatttgattggtgcggtcactattttcaatgatgttagtggacttcaatacaaactttggggtgaggaatgggatgttggagctaacaatttaaaagcgacggtccatttacctggcaataatggcaacgagtattatttaaccccatccgagtacaatgatacttcttccctgaaaggaaacacaataactgcagaaagttcttacattcccaaaggcgaatactatgagttgcttgttttaatgccagtggatgattttaataaatccccaaatgcaaaacacgtaaaccaaaacggtcacgacatgattatgaaaaacttaaaaaacaccattaacgagcgtgacttctggaataccacttatttggttttgggtttattgactcttataagccccatatcggctataatagtctacttgaaatatggtcgagaaccagaagttaattatgatggtatttacgagagagatttgcccacgaacgatcctccggaaatagtgaacgccctgattgaaaataagatatccattggccatccgaatattaaaggtttcgaggcttcaatcatgaatctgattgatcgtaaattcatcactctctcctctcaagaaaatattgaaagcaacaccaaagacttgatgttaacattgaataacaaggcaggattgtcggccagtgaacaaatcgtctttgacactcttaaccacttttcaactaataatattttgaatctttccacacttaatgggcagttatctagtgaaacaaatggtaaatggtttatggaaaagattagagaatgggaatcatcagttgaaaatgatatggatgtatcacgcttttttgatgacaggggttcttcaatcatgaatgtaatcggtttgttgggaatacctttcgctatagcattaattgtgctgggctttataacaaatctaaataacggtttatatagtatagctgggggcatctttttaatcatattttctatcgtaatcaccatgtcagatgatgatatctttggcagatggacggaagagggtagagtctactatctcaagtggaagaatttgaagaactttttggaagacaacagtctaattaaggaacaccctccagaatctataattatttggaagaagtacctaatttacggtgctgctctcggtgttgccgacaaagtttacgaatctatgaaactgcaagtgccaaacatttcggattatgataacgacggcttgttcatgtaccattattacgggggatatgggatgatgaatatggcattctcaactggtgagatttcggcaaacccatctgactctagtggattcggtggatctggagggggttctgggggaggtggtggtggcgcgttctaa

SEQ ID NO: 73265 - DNA, 558 bp, synthetic construct
  source 1..558: mol_type = other DNA
atggattttatcctaactatagtcattataatagtagtcttattcattatcgttaccttaattcacatgtacaataatctggttggactgagaaaccgtgtgaagaactcttatgcacaaattgatgttcagcttaaacgaagaaatgatttgattccaaaccttgtggaaaccgtaaaaggttacgcttctcatgagaaaggcgttctagaagaggtaacaaaagccaggaatagtgttatgaatgcttcatccattaaggaaacaagtgttgcagataaccaattgacgggggcattaaagtcgttattcgccgtcgcggaaaattaccctgacttgaaggctaattccaatttccaacaattgcaaaacgagttgtctgaaactgaagataaaattgcttactcaagacagttctataacgacgtggtcttaaagtataataacgcctgtcaacagtttccaagctcaatactcgcgagaatctttggttataaaatcgaagactattttgaagctcccgaagcagaaaggactgttccgaaagtagagttttaa

SEQ ID NO: 73266 - DNA, 423 bp, synthetic construct
  source 1..423: mol_type = other DNA
atgattattgacggagaaggatgtgttttagggagattagctagtgtgacaagcaagaatcttctagaaggcgaggaagtcattatcataaacgctgaaaagataatgttaacaggtaataaggattgggcttatgccaaatacaaacaaagggttgacagggcatcaatttcgaacccacgtgatctaggtccaaaataccctcgcagacccgatgatatatttagaagaacggtacgaggtatgttgccgttcaaaaaatctaagggtaagactgcattcaagggtcttaaagcgtttgtgggcgtcccagctgagtatgctgatgtagaactcactgccgttcctgaagcagagtataaaaatattaaaaagggtatcgaattgggggaaatctccaaactgttgggagccaccttttaa

SEQ ID NO: 73267 - DNA, 171 bp, synthetic construct
  source 1..171: mol_type = other DNA
atgatccctataagatgtcttagttgtggcaaaccagtatcagcagtttttgatgaatacaataagagagtggctgccggagagaagtctaaagatgttttagatgacctaggtctgactagatattgctgtaggcgtatgttgatttcccatgtccaaacatgggaataa

SEQ ID NO: 73268 - DNA, 1656 bp, synthetic construct
  source 1..1656: mol_type = other DNA
atgggtttggagaataaaaaatttttgagcgcactgaataagaaatttaaaggcgaggatcaggaaaatgaccacaccagtttctattgctttgacgggtggaaacaatctgctaggaagagagaatttaatgaagctgctgaaaagttggctaaggagcgtaacattcctttttataatccggatatcggtgtacctctaggtcaacgacaattaatggcctataaaattagcggaaccgaagattatgtcgaaggtgacgacttgcacttttgtaacaactctgcaatccaacaattggttgatgatataaaaaggacaattattgttggaatggatactgcccattcagtacttcaagaaagattaggtgtagaagtaacgcccgaaaccataaacgaatatatggaaaacattaaccatgccctgcccggtggtgccgtggtacaagaacatatggtggaagtccatccgggtcttgtcgatgattgttatgcaaagatatttactggcaatgatgatctagctgatgagttagataaaagactattgattgacattaacaaggagtttccagaagaacaagctgagatgcttaaaagctacgttggcaataaaacgtatcaagtatcgagagttccaacacttgtcgtccgtgcttgtgatggaggtacagtttccagatggtcagcgatgcagatcggtatgagttttatcaatgcctacaaattgtgcgcaggagaggctgcgattgccgatttctcttatgctgcaaagcatgcagatgttattggaatgggtgcattcctcccatcacgacgtgctcgcggacctaacgaacctgggggtgtggcattcgggacattagctgatatggttcaaacatccagaatatctgatgacccctgtgaagtttccctagaggttattgcggcagctgcggccttgtacgaccaagtgtggttaggatcttacatgtcgggtggtgtaggcttcacccaatatgccagtgctgcttatactgatgatatcttggacgatttcctatattatggtaaagactatgttgaaaagaaatacggcatgtgtcaggctgatttaagcatggacactgttcgtgacatatcaactgaagtcactctatacggtttagaacaatatgaaacgccaaccctcctggaaactcattttggaggttctcagagggcttcggtcgtgtctgcagccgcaggctgttccactgcattcgctactggaaattccaatgcgggggtgaatggttggtacttaagtatgattttgcacaaggaaacacattctcggctgggattctatggttacgatttacaggaccaagcgggtgcatcaaattctctgtcaattagaagtgacgaagggttgatccacgagttgagaggtccaaactacccgaactacgccatgaatgttggccatcagccagaatacgctggtatagctcaggctcctcacgccgctagaagagatgccttctgcacaaatccattaatcaagattgcctttgcagatcatcaccttacgtttgattttagacatccaaggaaagaaattgcaaagggcgctttaagggagtttatgcctgcaggcgagcgcgaaataataatcccatcaagataa

SEQ ID NO: 73269 - DNA, 1332 bp, synthetic construct
  source 1..1332: mol_type = other DNA
atgaaaatatatgatgacaacttggatttatacggtccagatgggaagattattgaagaatcggtacctttggaatctattagccctctaaaaaattctgctatacaacagatgatatatgatataaagagatcagccgctgttaatttagtaggcatagagaaaggtttgaaatccggtgcgatgggtggcaagtccacttacattccaggccgtgagctagatttacctattgttaaaaatgcagaattaatagccacaaaaattaagaagatactacaggttaatgaagatgatgacaccacggtcaacctcattaatggtggacaacagttattagttcaactcccatttgaaagattgaatgtcgccgcagattacagtgtatctactttacaaacgagtgcggcaaccattcaaagcatcattgacagctttgaaattaacatgtttgacgcatcaaccatcaaaactgcagtaatgggagcatacccaagaacagttgacctttctgggtctaatatcagtgccttacttggccctcccgttcttctggagggtttgggatatggtttgagaaacattatggcaaaccacgtcgtggctattacaaacaaacaaactttgaacgctgctgcgttgtcttcaattatggagcaaactgctatgttcgaaacaggtgatgctacaggggcttttgaacgtatgcatttgttgacgctggcttatcagggtttgaatgcgaataacctggtatttgatatagttaaggaaaacggtaaaggaacggtcggtacagttatccaaacactagttggaagagctatcgaggataaaatcattaaagtagctaaaaagatgccgtcgggctataatatgtatgaacctattgattgggccttatggaacgcctatgctgctgctggtttactggcagccgtgataattaatgtcggggctgctagggccgcacaggctgtcgcatcgaccgtcctgtactataatgacatgctagaatatgaaactggccttccgggagtggactacggtagaacagaaggtgttggtgtgggattcagtttcttctcccattcaatttacggtggtgggggtcccggaactttccatggaaaccatgtggtaacacgacacgccaagggcactgccatcccatgtgcgtcagcagcaatgtgcttagatgcaggtactcaaatgttttccgttcaaaggacctctgcattgatcggaactgtttatggcaccatagacaatcttcgcaatccaatcccaaatgtggccaaaattgctggtgagatcaaggataagctataa

SEQ ID NO: 73270 - DNA, 786 bp, synthetic construct
  source 1..786: mol_type = other DNA
atgaaaggtatcttgggcgcgatctgtggagacatcattggttcaactcgtgagttcaacccaattaaaacaaaggactttaaacttttcaaaaggaaatccaccttcacggatgataccgtaatgacattagctattgcgaactggctgatcgaagatacggcctcggaaagtatattgattaagcagttacaatactggggaaataaatatcctgattcaggttacggcggaagatttagaaattggttaaaagaaattgacccgaaaccttacgggagctgggctaatggatctgccatgagagtttctccctgtccatgggtggcaaattccctacaggaatcccaaaaattagctaagttgtccgctatagtaacccacaaccatcctgagggtataaaaggggcactagccactagcgacgcaatttatcttgcaaaaactggtgctggtaaagagaagataaagcatcatatagaatctcactacagttatgatttatctcgcagtgtcgatgaaataaggactaattattcttttgatgtttcatgtgctggtagtgtcccagagtctataatctgctttttggaaggcgtgtcgtttgaagacacaattagaaatgcagtttcactgggtggtgatgcggacacacaagccgctattgctggcagcatcgcctctgcatattgggatattccaaagaatatttcgtacaagtcaattaaccgattgaactatgatttgctaaacgtcctcgttaattttgaagaaaagttcatgtaa

SEQ ID NO: 73271 - DNA, 783 bp, synthetic construct
  source 1..783: mol_type = other DNA
atggatgagaatatagctatacttaaaggtattggtctgactatgtatgaagctcaggcatacgtaacacttgtttcattaatctcttctaatgccacagaaatatctgagaaatccgggattcctcgaagtaaaatatatgatgtgctcaaaggcctaatccaaaaaaattacattgatgttgaagacggaagacctttgacgtacaatgtgaagtcccctgttgaagtactaagcttggaaaagaacaggttgactaccgaactggatgataccataactagactaacaaatgtatatgaaaatggtatgagccaggttcaagcccccatttggaggatttatggtgtcgataagatcatcaaccaagaattagaaatcattactcgcgctaaacattcgattaacatgagaatcggttttttgtttgaagaagaaggcgaagcattggttaaaatattaaaaaaaagaaaaaacttaaatatcaatatattggcttcaccgacgtgctgtattaacaataagacattcaacattatcaaatttttcaaagacaatgacatgccagttcacaaggcggacattccatttgtcaaggtcttaatttctgattcaaaggagatgatgcatacatatactaagtttagtgaagacaaaagaacggtgcttccagagaccgcaattggaatttggaacaagtacgaggatattgcccgtaattatgatgagcgtttcatgaaccaattacataaaatacaaaataaaaagaaaaagactacctaa

SEQ ID NO: 73272 - DNA, 1005 bp, synthetic construct
  source 1..1005: mol_type = other DNA
atgaataccgacattaacaaagcccaaaaatacatcgatgatgagaattacaaagatgctattattctagctcgcaaaaaacatagcaaagatgatgttgaaacttatttatcgattttggacttattgattgaggcggactacatcatagctattgaagaaaagggaatgtactatcaatattatgataaaacacacgacaacggtgattatggtgaaaaatactttgatgaatatctcaagaaacaacccaaatccattaatgccctgtgtgacaaagcgatgtccaggtttaacaaagggcaaatcgacgaatctttgaagtatatggacacggcatataaaaattacaagaattattctaaaatcgaaaaaccacgtatctctaagaaagaactattaattgccaaaattgagctcctaatgcaggcaaagagatatgatgatgcattgaagtatcttaacaactacgagaatcaattcggcggcaatcaaaagtcagatttatacaaaggtcaaatgctgcagaagaacggtaaaaataaagaagccctggtatacttaaacaagtcattgttagaagaagatacactagttgggtttaatgctaaaggtgatgctttgttcgaccttggccgatatgaggacgcactgaaagagtacaaaaactgcctaaactatgagagtaagatagaaggtgatttagagttgattactaatttcaattacaaatctgctttttgttgtgtcaatcttggagatgatggtgaagctataaagtacttaaacaagactattaacatgttaaatgaacatggaagacttcctaggaatattgaagcaatatatcagaaatgctcgtttgaaaaggaaagaattatgaaaaagggaaatgtgaccgatgaagaatttagaaagagtaagttcttctcaactaagacaagcttgatcatattgttcataatctttatattttttatcatattaaagttgaatggttattaa

SEQ ID NO: 73273 - DNA, 1476 bp, synthetic construct
  source 1..1476: mol_type = other DNA
atgaacggcataaccatattaatttggataactattgtaataattggtgtaatcgcctgtatcttagttaagctgcactacaaaggtaatgaactcgaacaagatgaaggatcgataattccaagcacagacaagttaaatggcatattgtctcaaggtaaggaaaaaattaattccaagaaccttactaacagtttgtcttcaaaaacaacccgaacccaaaattcgcaaaataccaagagcctatacgggaacaagcaacacacctcacaagactatgacgtttacattgtccccgaggttaataataaaaaaacgtatgagtatgagtcggaaaaccaggttctaattgattacggtgataaggtcaaaaagtttcaagaaccgattaaacaaagccagatggacattatgaatcaaaataaggatgacaagacagaattaaaggacttgttcacaattgatgaattgattaaagagtctaaaagaaaagacaacgaaagggaaaaagagcagccaaaggtggaagatagtgaattgactgagttgaaagaaagtattgctaagaaacaagaaaacactatcgaaaaatcttctagtgaagaagacattggtgagtttgagacaattgaaagtttgttgaacgaagaagaactgaatgaggatgagacatctgaagaaatcgaaacatccaccacctcacaaaagactattgaagaagcaatttcctctgcttcgcaagaaaaaaaggaagaaatcgagaacctttctgaaaacgaaaacataactgatgtcttattgcatgcagatgatgatcaaatggatatacccaatgaagagattaaagagccaactctaaagactccaacaaaggtcgacgaatcaaacgattctgaatttaattcccctctgaaagaagacaatgaagaaactatggacttagattatagaaaagatctggataagtttacacaaaaaattaaaggctcaaaactattcaaggatgttaaggaaaaacttacggctgagccagaagaatacattgaggaaggaatccccaaagatgaaacgtatattagaaatgtgaaagaatatgacgactttgagcctattataaacgagacgcatgccgattatgtagatcctattggggatattgaaccggcattcgaagataatcagtcattaaagctcgaaaataaacctaaagcgtttgaggtgatcaaggattcttcaaaacctgaggtcacacagcagaagatcccaactatcaaaagtaaaccttcaaggaacaacataaagataaaattaaataataatgaggtagtgcttaaaaaaggagacgaaatcatattcaatcatttaggtgaaacttattccagccaagtttatgccattaatggtgatgatatctccgttaaatacagacgtcagaatatcataatcaaaccagctgatgttaaaaagatatactaa

SEQ ID NO: 73274 - DNA, 585 bp, synthetic construct
  source 1..585: mol_type = other DNA
atgaacactagatctttaaaattaattcgagaggttatgatcaatagcggtaagtggtcttccattgaaatatcccaggacagtatctacctgcaatttagagatgtcgaactcggaaccccaaaaatcgacgaagatttttctctggtcgttaggtttgccgatgatagttttttcacagtattctacaacaacatttgggatattgattttctatcgaaatacgattttaagaatcagttgttaagtgaggaagtaagcttcaacattaaagatattaaattcatcgactttgaatatttaaatacgttcttcacaaattataagaaggagaaatcagtgtctgtggtcgaggattttaatattcataatattcgcaatgactttttcatgttgctagaaactgatgaaatagctatagttgttggtggcaaccaaatggatttcttttcaccttttgaaagattagacgacgcatcgcttcgtgaattgtcaaatgattggatgctttattttttgaggtatcatcaaaaaagaaatatagttagagaccccatgtgtgaaaaccacccattgaagctataa

SEQ ID NO: 73275 - DNA, 939 bp, synthetic construct
  source 1..939: mol_type = other DNA
atggataaaaagattatcgcaattattgtcgcattcatagctattgtggctatcggaggctatttcctactgggtggtggtagtgataatgtaacgatagggtacttgccatctgaccatgacgcggccctgtttgtcgccgacgcgcaagggcaatatgctaagaatggaattaacactaagcttgttcaatttaacaatggcggcgatttgatgacggctatggctagtggggaagttgatgttggttacgttggaatcaccccagtgttatcctcaatcgaaaaaggcgtgcctgtaaaagttatttcagccgctcagactgagggttccggaattgtcgttgccaaaaactctggaattaattctgtatttgacttggagggtaaaaaaatagcgacaccaggtgaagcatctatccaacacatgttgctccaatactacttaaagcaaaacggtattgatattaaagatgttaaggtatcggcaatgaaggttccttcaatgaatgatgctttaaaaacaaataatatagatggtatgattacctttgagccatatgtatcaattgctgagaagaacggtgcaaaagtgttggttgattcctcggaaatactgccgaatcatccatgttgcgtcgttgtggcttctgataaattccttgatgaacatcctaatgaaacacaaaagatcttagatatacacaaaaatgccaccgattatataaacaataacactgacgaagctgcagaattacttcctagtgacatcgttagcgatgtggatgttgaaaaacaggcactagccggattccccttcatttctggtttaaatgacacttataaacagaatgtaatggaatttatgaacttggaagtcgagttgggcgtcttaaagaagcccctatcagaagacaaaatattttggaacggtagctaa

SEQ ID NO: 73276 - DNA, 1047 bp, synthetic construct
  source 1..1047: mol_type = other DNA
ttgagacaatatatctataacaacgttcctaatattaagtattacaatgaatttaagttgatcgacggtgagaaaatgaataaaaagattacatttgttttagtgtttgcactggctgcctgtttagctatgggttcagcgagcgctgggcttttcgactttttgggcgggggagacgacactgtaaagataggctacctaccctctgatcacgatgcagcattatttgttgctgatgccaaaggtatgtataaagataataacattacaacagaacttgttcaattcaacaatggtggggatttgatgacggctatggctagtggcgaagtggacgtcggttatgttggaattacgccagttttgagctcaatcgaaaagaatgtccctgtaaaggtcatttcgtctgctcaaactgaaggatcaggtatagtggtaacagatgattctggaataaagtcccctgctgacttgaaaggaaaaacaattgcgactcctggtgaggcttctattcaacatgcgctacttgtttactacttaaatcaaagcgacttaaccgttgatgatttaaatgtttccgcaatgaaagtcccatcgatgaatgatgccttaaaaaccggtcaaatagatggtattgtcactttccaaccgtatgtgtccattgcggcaaatcagagtaatgctcacatactcgaaaattcatctgaaatattgccaaaccatccatgttgcgttgttgtggcctctgacgactttatcaagaaccatgaggatcaggccaaaactatcgtaaaaatccatgaaaacgcaactaagttcatcaacgacaatgttaaagcaggcaacgccgataaaattgtaaaactcctaccggaggatattgtatccgatgcaaatttggaagctgattcattagctagtttcccatttatttctggtatcgataacgatttcaaagcagatgtggatgaatttcaagccctggaagtcagtattggtctgctaaacaataccataccccaggacaagatatactgggaggcataa

SEQ ID NO: 73277 - DNA, 2097 bp, synthetic construct
  source 1..2097: mol_type = other DNA
atggtcgatctcaataagatgtttaaacctgagtctgtggccgttataggtgcttcaaatactccaggcaaagttggctacataattgttgataatttgattaatgacggctttaagggtgaaatatatccaatcaacccgaaaggtggcgagattttaggtaaaaaagcgtacgcgaatatagaagacgtgcctgggaaggtcgaccttgcaataattactatcccctccgtatttgtcaatgcagtcgtgaaagaatgcggtgaagctggtgtggaacatatggtagttattactgctggttttaaagaagtaggcgatgaaggtgctaagttggaagctgaattaacagcgattggcaaagaatatggaataaacataatcggtcccaactctttgggaataacggattcgcacactcctatgaacggttcgttttcacaaatgatgcctcccactgggaatatggcatttatcagtcagagcggagctatgatggtcgctatcattgactggagtgtaacctccgggattggattttctaaggttatcagtctaggtaacaaggctggagtcaatgaaattgaactattgcaatacttagcagatgatgatgaaacgaaggttatcatttgttacttagaatctatttctgagaatgaagacttcgttagaacaatgagagaaaccgctcgtaaaaaaccaattatcatacttaagtccggttcatcttcagcaggggccgcagctgcttcttcccacaccggcgccctggcaggcagtgacctggcctttgatactgccttccgacaatccggaattatcagggtggacactatggcggagttattcgatttgggtttggcattctcaaaggccccactaccaaggggagaccatgtcgctatcataacaaatgctggtggagggggagtcgttactgtggatgctatggaaaaggccggcctaaagctagtgcagtttgatgaggaaaccactgaaagattaaaaaaatgtgttacagaggaaggtagtgctaaaaatcctattgatgtcttaggcgatgcgccagtcagccggtacaaggaatccttggagattgtattgagtcaggatgaagttgacagtttgattgttatggtttgccctacagcttctgcggacccagacgggattgcgaatgccatcttagaagaaagaaaagaatttgataaaccaattattgtagtgaacatgggcggtccatcattcgagaaggctaacgatgctttaagagaaaatggtgttccaacatatgtattccctgagacggcagtaacagcactcaaagcaatgacagattatgccaagctcgaggataaatcttatgatgatgttgtggagaacatagatgatgttgacaaagatgctgtcaaagccatttttgagaaagtgaaagcagatggaagggacacgttgctgggttcggaagcatatgcagttgctgaagcatatggaatatcagccgcccccataaaactatctacaaatgctgaagaagcggcttccctggccgaagaaatggagtttcctgttgtacttaaaattgcatccgataaaatattgcataagtcagatattggtggtgtcaaagtcggtatcagcagtgctgaagaagccaaatcaacctatgatgagattatcgctaatgcaaaggcagcacatccagacataatccctgacggcgtagaagtacaaaagatgatggattctggtgaagaggttattgttggtatgatccgtgatgaacaatttgggccgatgattgcctttggtatgggtggtatctacgttaatcttattgaggatgttagcttcaaccttgctaagggtatgagctctcaagagattgatgaacaaatcaacaccaccaaagtatctcaattgcttgcaggataccgcggagaagccgcttgtgatgtggaagaagttaaggaagctattaagagagtagctagattaactttagacttcccagaaatatcggagttggatattaacccgatattcgtttatgaagagggttcatcggcactggacataaagattaaattataa

SEQ ID NO: 73278 - DNA, 2628 bp, synthetic construct
  source 1..2628: mol_type = other DNA
atgaaaaggcatggactttttattttaatcttgctcattgtcgtattggctataatgaatagcgcatctgctgaaaattcgtcagctgatttgatttcagacactcaatacgagaatagcgttgatattgatgttgctgatgataatttaaagtcttatcaaagcgtttcttctgacttggaagataataatgaggtctataaccttaagttaaatgataattctcaagtggataatacatttttgaaggataatgcttctgtctctgattcgaagatctataaattaggttatgatgtgacccatgttgcagataaattgcttaacttctcatctgctgacgacatattggtaatcacaactgcaggtatggcttggattgataacaaaactacggagtccgcccttggcgggatcgtcgatgcttcaaataattatgtaagctatggaaaaggcaatatattgacattgtcttccacaaggaacgaccctaccaatattgcattttttattaaaaaggacaactcactaaccatggcattctataagaatggatctctaactccaattttccatggcaacgcgggtccaacactaagtgctggtgaatggaagaaactacagaaagccttaggtgacgaagatgcctactcctacatcagtatagctaacgcgtggtcagccggcatgcctaatgatgtgttaactcaagctacgtaccatggacatgtgtgcacgggtctgataagtggtcaggctatgatccaaacactattgacttactatccacccaaggatgaatttggattgcccttggagcacaccgcatattacgtacttggcgttccgggcggctctgaggatgatgcatttacctggtccttagacattactccaggtaaaagggcgtacataggtattgataccatggtaaacaaggccatgactggctttatccgatggaacacaacttcaaacactggaattatcattataatgagttacaatgaaaccgccataaaagaaagctttaaaaaagtttctggtttaaatcctgacgccagtgcaactaatgacttgaagtaccaaaattggctgatctcgaccctccacacaaacccaacatcacttgtcacaatactttatgaatttaagggactgactaaagataatcttgaatatttgatgggattggaaattggtaagggtaacgtggttaaaagtgctcatggtttggatatgaactatattcttggattaaacttaactaaggcaaatcgtgaggctaatgttaatattgctgaaataaagttaagcgatgctaaattaaagcagataggtatcgacgcttgtaacaatgcaattgaatactttagttcacaggggattaccattagcaaagatctaaacaacctatatgttttaacttctgcggggtatgttagaataaatggtacgcctacttcaatggtctttgatggtatttacgaagtcttaggttcagccctatacaagaaaacattgttcccagttcatacgcctatatggaaagatttagtgttcgatttttactgggtagacccaaataatgttacaaatgattcttccttctcgttgaagtatgatgttgctaaagacgaattaattgttataggcaacaccactagaaacgcaaattacattctgcaaaatgctataaagtatgaccctccatatgacgtattaatcgggtggttgttccacaaccacgtctgtggtggtagtgcccccggttatttaatcgctgactacatatatgaaaacttccccactaatgaaaatgaatcatatatctacttaacaaccaatgcgaactgtaaggatgatgtgatttccagagttctaggtgtatcaccaggtatggggacatactataatttacgctacgataataataaaacaaactcaaccaatgtaggtattgcaatcaaatggaatagcaaaaccaagacgggagagttaattattatcaacctggataattggggttccggagcaatattcaaaaaagggtcgaatatgtatgaggaatatattaaactatataaaaaagattattcctctccgaatctcatctcgagaccgcaaatttccataacagcaagaaaagaaatcaacgaggagatgctgaacaaaattattggtggcgcaacggatactaaggaaggtaattctatcgcctacattatgaatcttccagacaagctgccaattaataatggagaaaacaacaacaaaaaagacaataagaagacaaaaatcactggaaacaaaaagaagacggatggcaagcatataaataacagctcgtcctcttccaattctattgactctaattcgcctacaactgggacttatggaaagtccaatgcgggtttgtccgtcggcatctcaaaaaatatcataaacgcaaacagtaattctgaaagttcagatgaaagttctggtgacggaaaaacgtacgaaataagtaaaaaaagtcctaacaaaaagattaattcaaacaacgccatttttgctattttggccgtgctggttctcggcggtattgttgggtatggttacattcgtaaaaacagaggtaaataa

SEQ ID NO: 73279 - DNA, 480 bp, synthetic construct
  source 1..480: mol_type = other DNA
gtgattagtacggtcttatcggtatcttatgctcatcccggacatggtcactacgtagatgagattacatctgaagatgtcggccattccaaccacccttcaagtgattctcatgacagttccggtaaagaactcagctctaaaagttcatcaaatagcagaatcgcttcttctcatagtaattcgaaatcaaataaggtttcaagttcggacacctccaattctgatttatcaaataagcacacttcatcccaaagcattaaatcttccaaaggtgacgtcgaaccaataaattctcaaaacgaggaaatgccaaataacactcaagttaaaaacacaagcaatattaccaaccatacgatcactgaggaagccgaaaatacaaacttgctgactcagtccaacatattgcttttcattttggtggcaatcgttgggttttgtatagttgttctatttgataagttcaagaataggtaa

SEQ ID NO: 73280 - DNA, 231 bp, synthetic construct
  source 1..231: mol_type = other DNA
atggataaagaaattccttattatgttctagatgagaatggtcagataggttcaatcaatgaaccatacatagatgatggagacttaaaagaattacttttaagtatcttgggcgatgacattccccaagaagagattcaaaagattctggatgcttctgcagacgaaaaactcactgaagacgaatttgataaattggtcgatgagtttatattgaaaaacaagaagtaa

SEQ ID NO: 73281 - DNA, 1380 bp, synthetic construct
  source 1..1380: mol_type = other DNA
atgaaactaaaaaaatcagattatattataattatctctttcatcgcttcatttattgcagcattcatctccgctgcccctgctgttgcccttccccagctagctaatgaatttaacctcaataatattatgcagaattgggttgtgaacatatttttgtttactgttgcgatcactgccgtgcctcttgggaagttctctggaaagaatgggatcaaaaaaaccttaaacctgggtttgattttgttcttaattgggacaatcattactacatttgcaaattcttacatcactttgttaattttccgtgcaatccaagctattggtaccgccatgatttataatacacaaacgagcattgttgtattagctgtagaagaaaagaataggggtaaagctttaggaataatcatatctggcgtttacattggactggcgattgcgcccttcattagtggcatcttaacttataattttggttggagaactatcttctactttaccattccatttacattacttgctttgttcttatcactgtataaagtcaaggacgaatggaacatgtatgaagatgagagttacgacaaatttggttctatcctatacatgattggaatattcttctttatttatggttttacgatattaaaccaaaccaagggtgtgatattcacagtcattggtatagttttgttaattggattcgccgttattgatttgaagattaaaaaccctatattcgacctaaaactattcaaaaacaagagattttcctcttccaatattgcatcgctaataagttatattgcaacatttgtcgtcacctatatacttaattaccatttccagtacattctcagcctaaactcacaaacaacaggcatcttgctggtcgttacgccggttatcatggccattatatcgccattttctggcaagttttcagataagattgattcacaaaaattagcagccattggaatgggctttgtaactattgctgtttttatcttgatatttctggattattccacgccattatgggtaataattattgctatggctttgcaaggtttgggttatggcatattttcctctcctaataccaacatgataatgagtagcgttccgcaggaggaaacaccaagcgcgtcagtatctattactgtgatgagagtaatcggtcaaactatgtcgcttgcaatgttgactatcatcttttcagtgataatgggtaatgtgccaatcattccagagtactttagtttactcacaaagagttctcaaaccgcatgtataatatccacgttgttatgctttattgcagttatagcttcgcttgtcggtattggtggaaaaaacgatttgactaattaa

SEQ ID NO: 73282 - DNA, 396 bp, synthetic construct
  source 1..396: mol_type = other DNA
atggtcagtatattctcacgtagaattattgcatattttgttgatttctttgtagtttcggctttcatgtggatcgtgagttatttgttgtcactcgtaatcggcactaataatcctatatatcattattttatataccttgtgcccattctaataatgatttactttgttttatgtgaaaagattgtcggggcttccgtgggaaagtctttattgtacttgcaggtcagatcccaaaatggtgcgcacatctcttggtctcaagccattgtaagaaacttaacgaaaatttactggataccaataatttttgattggggtatcggtaaagttctaaaaaaggacaggctgttcaatagcatcacaaaaaccgttgttattgatgagcttaactaa

SEQ ID NO: 73283 - DNA, 450 bp, synthetic construct
  source 1..450: mol_type = other DNA
atgaacaaaaaatctatctcagtaattttgctaattattttttcaatcaccattatattcactactgcaaacatactcattaacgacaatactcctctagaaaatcaagcgggcaccttgaaaatcaacaataagaccatacattatgagaagtccggtaaatgtttggaggtaatcgatgggaatacaataaaggtgtacggcatcggtaaagttcagcttacacaagttggtagtccatcgagcgaagctaaggacttcgttgaaaataattgccttggaaagacggtctatctggatattgatgataaaaaagtagaagatgaatacggtagagccttagctattgtgtatacggacactgttgatgtcaataaagagttaattaacaataacttatctgaaatatcttactttacacccagtgaatttaagaaaggagatatttaa

SEQ ID NO: 73284 - DNA, 1104 bp, synthetic construct
  source 1..1104: mol_type = other DNA
atgaacgataagatatctatcattttacctattttcaatgttggtgaccacctaagaggtggaattgactcacttatcaatcaaacaataggaaatgaaaatttggaaataataatggtcaatgattgctcaacagatggatcagataaaatcatagatgaatatgcggaaaaatacgactgctgtattgccatccatcacgaaaagaacagtggtgctgcctacacaccacgtaacaccggcattgatgcttgtaccggggattatataatgtttttagatccggacgacaggtatacaccagatgcatgtgaaacattataccatgcagctaaaaagaacaatgcagatgtcgcttttggtcgttttcgcagaatatttgaatatggtggtaaggttcaaaagtcgttctcgccctacattgacacgctagaaaatagctatccaaatgaaactttcgatactgccaacttcttagatgtgccagatttcatatgggataattttgttgaaagatttctatatggcaaaacattagaggtaacttatcccagggacgtaccaattgacactatccacgttgagaatatcgagcaggaaccagacctcttgaagatggctcctgctgtctggagtaaaatctataaaagagagttgattacggataataacttacgattccagccttttgtttccggtgatgatatggcgtttagtctcgaagcactattgaaagccaaggggattgtgtttttaaacaatttcatgtgttataactactacatcagggacttgcctaacgataagtccattaccaatactgttaatgtgagacttctgtatgaactgatggagtcttacatttactgcagacaatgtactgagggcttttctaaggaagttcaaacggtctccataaaccctcatttgctgcattggactaactcttggaaaagctctccgtttaccaaagaagaaaataaattgttacttagtgaggtaaataaacttaagagcattcataatacagatttaaaaactaaaattttgttgtcctcaatttcaaccgcaatcgaatctaaaattcaaattcaaaaggagtaa

SEQ ID NO: 73285 - DNA, 468 bp, synthetic construct
  source 1..468: mol_type = other DNA
atgactaacgttttaattgcatatttcagcgcttccggtgttaccaagaacttggctgaaaaaatagcgaatgacaatgattatgatatatttgaaattgttccagaagaaatctacactcctgaggaccttgactggaccaacaagcagagtaggtcaacaattgaaatgaatgataaatcgtttagaccaccaatttctgagtcatgtgatgtaggtgaatacgagacggtggtaattggctttccggtatggtggtatactgcacctacaataattaacacattcatcgagagtgttgatctaactggaaagaaaatcaaaatattttgcacttccggtggatctggggtcgacaagtgtgtcaacgatttaaaggccacctaccccgaactgaattttacaaaaggcattagattcacgggtaatgtgtctaatgctaaagaatggatcgaacaagatttgtaa

SEQ ID NO: 73286 - DNA, 696 bp, synthetic construct
  source 1..696: mol_type = other DNA
atgatttgtgcagccatcctggctggtggtatagggtcgagactcaaacaaggaaagccaaaacagtttgtcaacattaataacaagccaatcttggttcattctgttgaaatatttttgagtgtggacgagttagataagatcattgtatcctctccgaaagaatgtgtcgataaaacaaatgacctaatggatgaatatttccctaaaaatgataagataattgttattgaaggtggagaaactcgtaatggcactatcttaaattccattcaatacatgaagggtcaaaattgcgaaaaagattcgattctggtaacgcacgatgcatcaagaatatttgtgtctaaaaaattgatcaaagatagtattaaatacgcgatcgaagttggtgccgctagcgctgcgattcctgcaacagatgttatatttgagacagagatagatggaaagcttaccggtgtcccattgaggaagtatttatgtcatgcacaaaccccacagtcatttaacattgacaagtttttagatatttatgaagacttgtcagaagaggaaataagcaaactagatgaagctatggtgcttttccatttaagaaacgccgacgtaaaattgttccccggcgaccaaaacaatttcaagatcactcgacctttcgatattaaactagctgagtctatttttaagaattaa

SEQ ID NO: 73287 - DNA, 1068 bp, synthetic construct
  source 1..1068: mol_type = other DNA
atggacaatttcaagtgtggtagtatggattttaagattagcgttattgcccccgtttataacgcggttgactctctggaaatagccataaatagcatcatcaaccaaaccattggttttaagaatattgaattaatcttagtcgatgataaatctaacgacggatctcaagacataattaaaaaatacgctgataaatatgaaaatgtgattggaatatttctaaaggaaaattcaggccttccaggcaaaccaagatcacttgggatcaaatatgcatcagcaccttacttaatgttcttagacgctgatgacgaatatctgcctaacgctttcgaactgctttacaataccattgtcaatgagaaaagcgactttgtaatgggttctcatttctggaatatgaacggggagcgaatgaaaattaacatcttgcatgattgcaatgataaatcagatgtcataaatattaatcccttcctcaatcagagaaatttcatcttacttagttacaaccatgttgcaccatggggtaaaatctttaacaaagagttaatattaaagaataatatttctttcccagaagatacattggctgaagatacttatttttattttaaaacgctaatcaactccaagaaagttacattattgcctaacgattccttatatatgtacaatgtatttgaaaacaaagattctgtaattcatactcacaacctatccaaattcaactattttttgaaaggttttgctaacgtgatggagttgatcaaggatattccattttcgaaggagcgtattttgattagtaatatgggaagtttgttgttgatattttcgaatctatccatgaaggaaaaaaaagaagccgtcccgaagatttattatttcgaaaaatcactagatgaggaggttgtgcttaaaaggaaggaactcatattactaaataagttgatattaaagaaacacttttacttggcaattataatctctgacatatactcgattctgtacaataacgaaaagattaaaaatttgtatagaaagtggggtcacaaggaataa

SEQ ID NO: 73288 - DNA, 999 bp, synthetic construct
  source 1..999: mol_type = other DNA
atgaagaccaaaaaagagagaatattctactacgattttttaagagcatttgcaattattgcagtgattatttgccatgtggactacttttttggcccgctaacaagtacaacacagataattgttcaaatgactttccatgacattgggaggatcggtgtgccaatctttttgatgatctccggagcccttctattaaatcgtgaatatcctgatttgtcgcaattccttaagaaaagattcgtaaggatcatttacccattcatcttttggataatacttattttggctcaaatatactattacgggggcaatccaacgtatctctggaaagtattcatcggtgaaccctcaattacttggtatttttgggttttgattggcatttatctgttcctaccgatcctcaactcatttgtaaaagaatatggtgaaaagggtttaaaatactttttggctatatggttctctattataattttacaaacctttaatgtttatccattgtggaccaaccttgatttatcctattttgctggttatgttggttatcctgttttgggttactacctagaaaataaggagtttaagctaaacaatgaaaagatttgtattctgggagttatcacgcttttgatctcattgtcatgttttgtctacctgaattacataaatagtactgctatccattctatttatcagaatatcccaattgtatttatgggattaggtttattcatatctattaagtatgccgataaattaaacaaatttaaagcgataaaagataacttcatcggcaagagcattatttctttatcgatatgtagttatggaatgtacttttcacacgtcattgttactaaattcttgtcttattacaatccccactccaacctaatgtttccactgatgttcataatgataattttcttatcttggttgatgccttatattttaagcaaaatcccttatgtccgaacatttagtggtatataa

SEQ ID NO: 73289 - DNA, 732 bp, synthetic construct
  source 1..732: mol_type = other DNA
atgtcaagatacgcaattctctcggatattcatggaaatctatttgccctaaaagaagtcttcaaggatttaagtacacaaaaaaccgattacataatacttttaggtgacctgattgattatgggatgcagtctaatgaagttgtggagttcatccgtgacaatttatctagtaaaataatctgcaatatctggggtaaccacgaaatggctattttgacaaaggattttaaacactttagtagctcaagaggtgtcgagtcagcaaaatttactgattctattcttaccaacgattccaggagctatctgaacaatgaattggtgaaagagggtaagttggacttcgaaatatgtgaaaagcaagttttagcagttcatgggtctttaacggattactattggaaagctatttttccagataacttgaatggtaactacattgactatgacattgttttgtcgggccattcccattatccgcacgtatttcaaaagttctacgaagtagatgatccagacatgaggaacaagaaatccgtattgttcataaatcccggatctgttggccagcctagaaatcataatcctaatgctcaatacgcgatcctagacactgatttgatgaacatcgaattaaaatcagtcaaatacccaaaatatgacgccatggatctgtatgatggtaacatagatgatttttatcgaaagagacttaagaatggaatttaa

SEQ ID NO: 73290 - DNA, 1005 bp, synthetic construct
  source 1..1005: mol_type = other DNA
atgaacatattatacataattagcggtgttactggaatgactggtaacgagctggttcgccaattgctaaatcagaatgaagatgaagtgaagatcatcggcttcgataatttttatgcatcttcaattgatactgtaagcgactgtatcaatgacggtaggtttgacttttatgaatatgacctgaacagtaacgatgatatggacaagatagaagcactggttctaagtattaaagacgacttcgatgaacttgtatatatcaactgtgcagctgtcgtccataccgaacacttctataaagtttacgagacgtaccaaactaatgttgcttccatgaatgacttcttacaacaggccatacgtgtgggtgctgaaaagtacattaactgctccacatcagaagtttattccatgaatagttggaatgaggagggtggggttaaagaatctgatttcatcaccatggcggatgccgaacactcgcaaagaacctcatatgccacaggtaaattgctcacagagttttttatgaaagattcggtagataacggcaaaatcaagggatgttctattcgatttgccaatgtttacagtaaagatgaaaagtatccaaaacatataattccacatattatcgatagctttaaaaacaagggcgaggtggtcttacttgaaaattctaagaagaattgcagaacattcttaaataattatgattcgtgctcagcagtaatagaattagctaagactgattctgcacttgatgggacaatatataatgtcgctacagatgaagaaatttcaattattgacttggcgatattaattgctaaaaaaatgggaatcgataaacccgtgattaaatttgaaggttacagggaatctgatcctgaaagaagactattgtccactgaaaaaattataaccagaacgaactggaaaccgatcattgacttggataagggattggatgagtgtattgagaactacacgaagaattaa

SEQ ID NO: 73291 - DNA, 771 bp, synthetic construct
  source 1..771: mol_type = other DNA
ttgaaaatctccattattacggtggcgggtgtatccagcaggttcaacaaggatatttccgaggaagaaaagatgttaaaatgcatatattatgaagagaatcccaaggacaccctgatttataaaatgattaataagctgtcatattgtgataaaatagttgtcgttggaggttacaagtactctgatctcaccgaatatgtcaataaagagattcctatagagttacaggaaaagatcatgcttgtggaaaacgacagatatgcagatctaagctcaggttacagtctatacttaggcatcaaagaatctttaaataattttgatggtattgaggaactacttttcgtagaaggtgatttggacatagacagtgaatcattaacaaaggtaatcgactctgataaaaacgttttgacattcaacagagaaccaattttttcaaataagtctgtggttttatatcaaaacgagaatgatgaataccattacctgtttaacagtaaccacggaatgttgatcttaaatgaaccattcaaagccatttttaactcgggtcaaacttggaaatttagagatattgaattgcttaaaatagctaatgactatttttacgagaattgtatagatgatacaaacttgggcattatccaaaaatatttcgattcggtcgaaaataaagacactattgagattatcggattggaacattgggttaattgtaatactcgtgctgattatcagtatataaaggaatactgggggaaataa

SEQ ID NO: 73292 - DNA, 1488 bp, synthetic construct
  source 1..1488: mol_type = other DNA
atgtcggataagaacgaatggggcagcaacatgtcattcatccttgccatgataggttctgctgttggccttggaaacatttggagatatccctacgtcctttattctaacggtgggggtgcattctacatcccttatattgtcgccatactcttaatgggaatccctttcttgatcttggaatatggtgttggatataattataagtcgagctttgccaaagccatcagaaagattaatgccaaatgggagtacttaggctggtttttaccagttgctgtctttatgatcatgatttattactctgctatcttaggctgggatggaatctacatggttttgagtttctttaaaggttggggggcagatccgaacacgtactttgcgactactctcttacaatctagtgattccatgaatgggctattcactttcatccctgttattgctattgcgatgcttgcaggctgggtcattatatggtttatttcacataaagacctagagtctggtctgggtaaggtatcaaaaatattggtgccattattgttcttgatcatggtggttattgtcgtattttcacttaccttgcctggatcttcaattggtcttgctgagctattcaatccggactggtcactcttaactcactttgaaatatggatggctgcattcggacagattgtattttctttaagtttgggcatgtctattgcatttacatatgcaagttacacaaaagacggttccgatttgattacaaatacaatctctattgctcttgccaattccatatttgagaatttcgcagcattgggagtatttagcattctgggttatatgtccctgcaatccggaactgcagttgcagacctggtaactcaaggtacgggtctggtgtttatagcatatccaacggtttttaatgtattgggtgattgggcgttagtgctaggcccattattcttcttaaccgtgtacctggccggtctcacaagtattttatcgacaattgaaccattgtctttttcaattcaaaacaaattcgggctaaccagatccaggacaatgaccatattgtgtgttgttggtgctgttgtctcgatgctatatgccactgcttacggcggatcattattgggatatgtggatacatttataaaccagatagcattactaatcggggttgtagctgaatgcattgtatttgcttggatatttgaagctgaaaaattaattgatttcttaaatgcgcgaagtaaaaccattaagctgggtaagtggtggttgggtattgttaaatacatattgcccatttttgtcacggtgatatggattggtggtatggttgacgtggtcaacaatggtaccatggatcaattaatatttacaataatcagcgccgctgttttgctaattgctactttgatctttactgttcttcctgctaagactccagaatgggataatgctgaagaccgtgtataa

SEQ ID NO: 73293 - DNA, 369 bp, synthetic construct
  source 1..369: mol_type = other DNA
atgaagaactacgttataatcctaattggggtaattatcgcattggtgattgttggtggagctattgcatacacttctatgcatgatgacacgagtgataacaacaataccactattaagtcttgtatccccaatataacaaatgctacgaatgacgctccaaatgcgacaggtgatgataagaataccacttcatccgaaccttatgttgtcagtgaagtcgtgaaatttaacgcccagcaaggcgaaggatattacagggaggtaacatactccgacggtaacttcagacaatatgatgttgatactggcaaattaataggttcttcatatgattcggaccaagataaacttccaagcatggaataa

SEQ ID NO: 73294 - DNA, 1896 bp, synthetic construct
  source 1..1896: mol_type = other DNA
atgtttaacaagaaaattagtttgattttgttaacactagtttttatgttgtcaatttctgccgctgttgccactgatactaattctacggatgatgtgatttctagtgacgaggaggctgaaccaccatcggttgtctctcaggacatatctataaacgaaggaaatgattcaaaccctcaagaaaattatactttgaagggcagcgatgtaagtatgtattacaactccggatctgggtatgaagcatcattatctgacggaaacgattctgtggaaaatgcaacaattaatctaaacattaatggtgtcgattataataaaagtactgacgcatcaggtaaagtttttttaatcataaaccttaagccgggcgattatgttatcacagcgagctacggtaatttaacgacagaaaacaagattaatgtattgcccgttataactggaaatgatgtttccacaacttataaacattcagtaccatattcagctacatttttaaaaagtgatggtagcccattgtccaacacctacgtcaaatttaagttgaacggcaaaacatattccaagaaaaccaattctaagggaatagctaagctatatgtcggttcgaagatcggaacgtataatatttatgcaatgcatcctaatggatactcgatttccaataaaataactgtaaaaaattcgatcatatcaagcaatctgaagaagcactataggagctccaaaacgtttaaagcaacattttatggtaagaatggtaaactattgactggtaaaaccattaaattctacactaaaggatcttacttctacaaaaagaccaattccaaaggtgtggcttatattaaagtaatatcaaaacctggaacctataagattacttcaatcaacacaaataccggtgagaagaaatccaatacaatcactgtgttgagtacactggaagcgaaatcaatgaccgttttcaccggcaccacttctaaatttaaggtgaaactttacaagggtgaaaacattgctaaaaacactaaaatgacagtttacgttgacggtgttaaaaaaagagtcactaccaactcaaatggtgttgcaaccgttaagttcaaattagacaaagggatttataacatcaaatcggtcgatccttttacaggctatgttctgaacaaaaaagtcactgtgaaactcgcttctatcagtgctattaacgtcaatgcaatagaagggaaggaagggttattccctgccaagcttttacaacagaatggtaaggtagctagtggtacttacatggagatgactattgatggtgtcaaacataaagtcaaaactgacagtagaggtatagcaggttacaagttcacatttaaggacgccggtgtgcacactgtagtttgtaaagatttatctacaggctataaggtaaccaaaaagataaatgttgtaaagaagggtgaaggtaaatcttacgatcaatttggtgtttcagaagatggcaagacaatgcttgtgattggccgaccatctgcgtctggtgaaacagctaagtatggttacacgtattataaaactgaggtggatagaacctgtccgatctgcgggagcaatgaattgtactggagtatcttttgggcttccgggaatacggacggcggaacgttcccagaaacacccagccgtcccgcccattatgacgagggcaatctagatggcatcattatttgcatgcactacacgggagatgatgagtactgtgatgccgactggtctgttttcgggcataaccatgacggttcgggtagggatttaaagctcgtatcaaaaccagtcagatcgtcagaaatagaagcatatctgcttaagtccggatactacgttaaagtataa

SEQ ID NO: 73295 - DNA, 1428 bp, synthetic construct
  source 1..1428: mol_type = other DNA
atggctaatcaggtaaaaaccatatttgcaaacatgagtttcatgctagtctcccaaatcattgctagtgtctgtgcttttgtgtggacaattgttactgcttggtatttgggtccatctgattacggagtattcggtgcagccgtctcttttgccgcacttttcgggattgtaattgattttggactctcgacttatgttgtacgtgccatttctacggactttgctaatgagcataaatatctggacaatgcaatttctctaaaactatttctctccgtattttatgtaattgcagtgtacctctcggtattggtcatgggttggcaacctaagttggtgttagcttgcgtgttccttgcttttgaaaatgttataaaatcttatcatgctatattatttacgtcattccaagcacatgagaagatgaaatatcaagccgttaccaatactgtcatcaacgtattcacactgatatttatattgttggttgcatgtactgattatgccttagttggaattttaatggcatacattgtggccaatgcattgggtttgttttacgaagtttatgcacttagaaaacacattataaaaccgaaattgagctttgacttcagcttttacaaggcattattaaaagcgggacttccttttgctctaaccggtcttttctataccgtttattactcaatagatctagtcatgattacacagttttcaactacttatgctacaggcctttataactcagcatataagttaataacggttctgaccttattctatacaatctacacctctgttattttcccagtaatgagtaagttgttcacagatgagaaggacttattgaatttaagctttgtaaagtcaatcaaatatctgatgctggtcactattcccattgctgtcttcactagcttttactcataccaaatcattgcaatctacggggcggaatatattgaagccggtggtgttttacagatactgatatggacagtatgcttcttgtttgttaatggtgcgtgttccttggtattgaatgcgtcccaccaagaatactcagttacaaagatttacacaatcgccgctttatttaacgttgttttgaatttagctttgattccaaagtactccgtttacggcgcttcggttgccacggttttaagtgaaatcttaatcttggtcttggaactatacatgctaggtaaaatcaaccaacttcctgacaggcacctcattcatgatatcttaagaattattttcgcctctttggtcatgggcactgttttatatgtgcttgatctaaacatatgggctgctatagcggtgtctgtggtggtctattttgctgttattgtgctaataaaaactgttgatagtgaagataaactgataattcgacaaatcatcaacagataa

SEQ ID NO: 73296 - DNA, 1038 bp, synthetic construct
  source 1..1038: mol_type = other DNA
atggtaggaattgtcggctacggggcatatgttccctcatatagaattaaagtagaggaaatagccaaggtgtggggagatgaccctgtagctttatcacgaggtttgatcgttaatgaaaagtccgtaccttcttctgacgaagatacggcaacaatcgcagtgaccgctgctagatacgccctagcacgcgctcagatagatccaaaaaacatcggtgcggtttatgtcggttccgagtcacatccttatgcagtgaaaccaactgcgtcaatagttgctgaagccgtgtgtgcaactccaaagttaacggctgcggatctggaatttgcttgtaaagcaggaactgccggcattcaaatgtccatgggccttgtgcaatctgatatggtcgattatgctctagctattggtgcggatacatctcaaggcgcaccaggtgatgctcttgaatacaccgcatctgccggcggggccgcatatattataggtaatgacaacactgttgccgatattgaacacacgtgcagctatacaactgatactcccgatttctacagaagggagggtgagccctacccatctcatggtggacgttttacaggagagccggcttactttaaacatgttttaagcgccgccgaaatgttattcgacgaaaccaataccgctgctgaagactatgattatgcttgtttccaccaaccaaatggtaagttttacttaagggcaggtaaaaaactagggttcacttcagagcagattgaaagaggactgctcacacctaacattggtaacacatactccggtgccgtaccattggcgttgtcgaatattttggacgttgcagaacctggagataaaatatttgttattagttatggctcgggtgctgggagtgatggttttgcaataactgtcaaagatgaaattgaagagagacgtgaattggctccgaaaacagaagacatcatcagtaagaaaacctatgttgactatgctgtctacgctaagttcaagggtaaaatcaagatgtaa

SEQ ID NO: 73297 - DNA, 1191 bp, synthetic construct
  source 1..1191: mol_type = other DNA
atggatgaaattgcttctataacggatacaaatttgaccgaaacacaatttttcaatcgaagagatgagatcaacatattatcgaatttattgatcagcactgagtttaactccgcacccacaatactattgactggtattagaggtgttggtaaaaccgccttgataaaaaaaattagaaataaatttgagagggaatacttagttgtagatatcgatttatccagatctagtgcatatcaacagaaaaatctcactagggcctccatgataaagattatttacgactcaatcatcagatcatctaaggaatttggcttaaaaacgatctctaatcaaattgaaaaatattttaaaactaaaaatttcaaaattgataaattgttatcatacgagcacattccaatcccaatcttcgaaagtgaagacaattatgagcgtttggcggaatttgtaatggaactgcctcagaaaatttatgaagacaataacgataagataaaaggtgttttcatattcattgatgaaattcaattaattaaggatttgggcgatgaattgaatggctttttatggtacatgcgctcgttcattcaaacccaaaagaatgttgcttacatcttttgtggtagtatgagcctgaaagacagtttaataaatgacttaaatggtaataagggggctttcggtgggaggatgctgacaattgaggtgcaacctttttcaaaaaagaccactgagaactatattaaatcgatgagaagaaacatccaactagaccatggaggttttgaacggttttacaaatgcacacgtggaatcccttactacatcaacatttttgcaaaatatcttccagaaaacctaacgttgtctgaaaataacatatctgagttattcaaggattctattgattatcttgccatccatttcgtctacatgtggtccaagttgacattccaggaacagaagattataatttcactacttgaaaatccaaagaagaggatagaagtggctaattccctcaaagtcacttctggatcactaaacagacccctaaaccgtcttctggactatgatttgattgaatatgctaacgacaagtatcaaattactgatccgatatttggatattggcttaagaacagttatgaaaaaaatggtatatacccatttagaagcatttaa

SEQ ID NO: 73298 - DNA, 918 bp, synthetic construct
  source 1..918: mol_type = other DNA
atgcctatatataatattgacggagaaacattgactcccataaagcaggtaaaatttaaaaacgagagggaattacagattctgaccgaaaaaaaccttgaggaactattcggtctcaagttcattgcaacagagtttcaggttgacaatttaagaatagatacattagccttcaatgaagagacaaattcttttgtaattattgaatataagaacgtaaagaattacagtgttatcgaccaaggttacagctatttatccctattgcttaataacaaagcagaatttgttttgaagtataatcttgtgtgtaacgccgcactatccaaagatgagtttgatttctcacaaaccaacgtcatgtttatctcgccaagctacaccacttatcaactaagaagcgttgaattttctgatatagcttttgaattgtggaaagtcgtcaagtactctaatggtactgttttattcgataaagttaataatactgatactcaagcttcaataaagcaaataaccaaagaaaacacgagtaaagacaaggtcaacaaggaaattaaaaaatacacggaagaagatacgttaatgaacaaatcagatgacattaagagtttgtacgataatttgaaggaactgatcttgtccaactatgatgacattgaaattaaccattggaaatattacgttgcgatcaaagtgaataataaaatggttgctactgtaagtgttctgtcaaaatcgttgaagacatggattaatttaaaagagacagaacttagagattccgaaggcaaggtgcgtaatgtgtctaatattggacaccatggggtaggtgattatgagtatgtcatctcttcagaggatgacctctattatttcaataagttatttaaacaatcttacgatgaaaaaatctaa

SEQ ID NO: 73299 - DNA, 456 bp, synthetic construct
  source 1..456: mol_type = other DNA
atgagcaaactgttaatcgatagttcattcatcattgcattgtttaggaaaaatgatggtcttcaccaaaaggccattgaaaacaaggacatgcttaacaatgattgttacatcacggacggcatattggctgaagtcatgactattattggtcagaaaacaaaagatattggtttggttagaacagtttacaactatctaaaggacaacttcaccatcattcatgaatctgaaatatcgatgtacaatgacaatgtattatccgtttttgaaaaatacaatcaaaattcctttaaggtatctttcatagattgctcacaagtcattatatataatcattataatttggattatgtgatctctttagataacgggtttggactctttgaagagatagagttaaaaaatctaagtgagcagaagagaactatacaattcattaaatataacatttaa

SEQ ID NO: 73300 - DNA, 1188 bp, synthetic construct
  source 1..1188: mol_type = other DNA
atgagtattgttccattgcatattcccattaatgaaatcgacagatacttctataaccgtactgaagatattaaaaaaattgagtattacctaaattcgttggaaatcgggatatctcaatccttactaatacgcggtgtgagaggtgttggaaaaacttttttacttcaaaaactaaaacaggactcaaaaaagaattttctggtttcctacattgatatttcgagaattgtgggcattgatgatacgcagttgacggctcaatcagtcctattggaattattggacgaaatgaacaacacaatctatgataagatacatgacggtaagaaagtaacttttcttttgaaaaagttaattgacaagttaaagattaaggatttcagcttttcaaaaggcattcacatggctgagataccgataccagcaaccgaagataattacaaaaaaatcagtaaatttgtaatggaataccctcaaaatgttgtcgaatctattgatggcattaacgggttcataatcataattgatgagtttcagatgcttaaaaagttgaaaaatccagaatcctttttttggctgatgagatcgtatagtcaattccaatcaaatgtcagttatgtgatgagcggttctatctctcaaacatctgatgcgattgaaatgttgaatggagcaacgggtgcattcggtggaaggatgatgcaaataaacatcgatcctttcacaaagcacgaaaccaaatcttatttcaacgacagatttcccgaaatcaagttcactgacgatggttttaatcgtttttacgagtatacaaaaggaatcccaatgtatattaatagcttttacaatgccttgtcatcccatgaaacatatgatgaaaaatcaatagattatatcttcctcaataacatggaccaaattcttgtaatgtggattagaatatggggtaccctcaacaagtacgaaaagaagataatatgtgccatgttaaacaaagagaatatttcctggtctaaactggagcgaagtttagacatgtctccagctactttgaccaagtatattaagactctacaggataagggcatcatcaaataccatgatggaaactataactttgaagatttaatgttaaaaacatggctgaataatgaaaaagagaggactggtgtttaccctcaataa

SEQ ID NO: 73301 - DNA, 1980 bp, synthetic construct
  source 1..1980: mol_type = other DNA
atgaaatttgaagaagtagaaataactgaagattctcctcaagagctggttgctgagcccgtagtggaaaaagaagatcatggcgaagagaccaaaccaatgcttgattatgacaatattaaaagttcacaggatatagaagttccccctctattaatagaccaggttatagggcatgaagactccatagaaacaatcaagaaggccgcaaaacaaagacggaatgttttgctaattggtgatccgggtgtgggaaagtcaatgcttgctaaaggaatggcgcaaattttacctcacgaaacgttgaaagatgtcttggtatacccgaacatggaagataataaccacccgttaataaggacagtgcctgcaggtgaaggtaaaaagatcgtcaaagctactaaggggtccgctaagagccatgaagaaaagaaaacaattataacaatgtttgcgattggcggtatactggtcatcggatttatgtatggtagattactagaatctataattgcagccgctttaattttactgatttcaatacaaattaaaccaaaaaacagtaatatgtctccaaaattattggttaataatcaggattcaagattcgcaccattcatggatgcaaccggttctcatgctggcgctctcttgggggatgtacgtcatgacccataccaatccggaggactcggaactcctgcccacgagcgtgtggaagcaggtatgatccacaaagctaatcgtggcgttctgtacattgatgaaattggtacaatgtccatgaagacccaacaggagttattgtctgccatgcaagaaaaacaatatgcaatcacaggtcaaagtgaaaactcaagcggggcaatggtaagatcacaggcagttccatgtgacttcgtgcttgtagcatccggtaacttgcaagttctagagggcatgcacatagcgatgaggtcgagaatccgaggctacggttatgaagttttcatgaaggattacatggaagacaccacggagaacagagaaaaactggtccagttcgtcgctcaggaagttaagaacgacggaagaatccctcattttgccactgatgcattggatgaaataatcatggaagccaaaagacgctccggcaaacagaatgctttaacgttgagactacgagacctcggtggacttgtaaggtcggccggggatgtggctatagaaaagggagcgaatcttgtcactgcggagcatgtctttgaagctaaaaaatatgcaagaacattggagcaacaaatagctgataggtcgattctacaaagaaaggactacagtatggtttctgctcaaggtggcagagtgggtttgattaatggccttgcggttataggtgacaggagcggaattgtatcccccattgccgcagaagcagctcctactcaatctaaaactggcggtaaaatcattgccaccggtaagttaggtgagatcgctaatgaaagcgttcagaatgtaagcgcattaataaaaaaatacactaataaggacatttcaaattatgacattcatgtccaatttatccaaacctatgatggtgtggaaggggattctgcctctgtctcgattgccacagctgttatttcagctatcgaagagattccaattgatcaaactgttgccctgaccggttcacttaatgttcgtggtgatgtaatgcccattggtggagccacggctaagatcgaagcggctgctgaagctggaatgaagaaagtgttaattcctaaatctaacttgaaagatgtcatgattgagaaaaaatatgaggatatgatcgagatcattccaactgagacattaagtgatgttttggaaaacatcctaattagtggttcttcgaaagataagttgattgcaaagatgaagaacttgagttctaaggttgcagacaaggttccacaaacaggtttaaacaatccaactataaattaa

SEQ ID NO: 73302 - DNA, 369 bp, synthetic construct
  source 1..369: mol_type = other DNA
atgaccagactatgtaaaaattgtggatttgaaaaccaggacgattacgatttctgtgctaagtgcggtaccccattggttgaaggtctaaaacctaatcaatttagggtctacagaacacaagatttggagattaataaaaaggccttaatcgcagcttatatagctacgatatttttatcgtggagtggtttctttattgggttgattagcaagaacactgtttttgcaacatttactttctttggattcttcatgccattcttcttagtgcaatccaaacaccccgcactcaagaaacatggtctgatcatgatggccatttcttttgtaggcgttgcgctttcattttatgtaatgatgcattaa

SEQ ID NO: 73303 - DNA, 513 bp, synthetic construct
  source 1..513: mol_type = other DNA
atgaaaaagctgaacgtcgcacttatcgccttggtactcatagttgttgcatttttagcttcaacgattgtaagcccggtcctaatcgtagctgaagatgcttctgaagacaatggtattgatatggctgcgactattggtttgaccggttttaactggatttatccaggtaattctgtgaacgctcaaggccaaacattacataatgtttatgcggactaccctgataatccttacggtgctgccagagacataatgagttatacataccatgtcaccccacatatcatcatcagtattaacaatgacgcagctgcagccattttcggcgaaaacatcatagatgatattagggccaatgatggttataacggatacgcaggtaatgataaagtttcaggctcgatggatagaggagacgctgttggaactgcaatggccgaaaatgggattaatataattgagattccaatacagtttttgatagggaacatttccccccacttcgtgtaa

SEQ ID NO: 73304 - DNA, 1209 bp, synthetic construct
  source 1..1209: mol_type = other DNA
atggtcttgagtacaggcaatactgcttggatgcttattgcaacgattatggtcctgttaatgagtgtccctggtattgccttcttttacggtggtttatccaaacgtaaaaacgtattgaactcaatgtttctatcgttgatagcatttgcgattgttagtatactgtgggttatgtatggttatcaattcgcatttgcagacttgagttttgcgggtttgataggaatcccaaagaccttattcatggaaggaatcggtgtaggttctctgaccggcactattccaacgtttgtctttgccggatttcagctaacatttgcaggcttaactgctgcagttgtatccggagctattgtcggaagaatgaaaacaaaggcttgggtaatatttatcatattatgggctaccttcgtttacattcccatctgtcactggatttggggtgggggatggttaatgaacattggggccattgatttcgcaggtggtgttgccgtggaggttaactctggtttttcggctctagctctagctttaatacttggaaagagaaaggacacaagtttgcttccacataacttaggctactccatcctaggtgcaggattcctatggtttggctggatggggttcaatggaggatctgctcttgccgctaatggtcttgccggttctgcaattctggtgtcaaatacggctgcagctgtggctatgattgtttggttgctcttagatgtgctcaatgatggcaagccgacagttttaggtgccattactggtgccgttgcaggccttgttgctgtcactcctgctgcgggttttgtttcactgtctggcgggataataatcggtttgggcgcctcgttgatttcatattacgcagttttttacattaaaagcaaattcggttatgatgatgcattggatgtattcggtgtgcatgggttgtctggtgtctggggattaatcgcgactggtttgttcgctgccccatcaataaatggtgtggctggtctattttatggaaatcctgaacaattgattatccaattaatagcagttgttgcggctatctcctattcatttaccgtaagctatttcatcgggaaagtgttagacattttgattggcttaagggtagatgataaagaagaaataatgggtcttgactctgccctccatgaagagagcgggtacagaatttaa

SEQ ID NO: 73305 - DNA, 339 bp, synthetic construct
  source 1..339: mol_type = other DNA
atgaagagaatcattgcagtaatacgtgaagaaatgtttgaccctgttaagctagcgttattggctgccggatgcgaaggaatgaacgtgtcaacggttaaaggtcgtggcagacaaactggtattaaggagagttacaggggttctagctattgtatagatctgattccaaaaacaagagtcgaattaattgtcaacgaagaggacttggataggatcataaatattatccttgagaatgctcgaaccggggatattggtgatggaaaaatattcgtttcggatgttgaagaagtaatccgcattagaactggtgaaagaggctccgacgcagtgtaa

SEQ ID NO: 73306 - DNA, 774 bp, synthetic construct
  source 1..774: mol_type = other DNA
atgccttgcaatataagaaaaaagttctttgcagaactattgggcacctttttcttggtatttttcggtacaggatcagccgttgtaaccctattagtctctcaatccatcaatccagctaatgtcggcattggtgttttgggcggtttgggtgactggattgccatcgctttagcctttggtttaaccgtgatgattggcatctacgcgtttggtaggatatctggtgcccattttaatccagctgtaacgataggattgctggtaactaaaaacattcctttagtggatagtatttattatattgttgcacaattgattggcgcctgtctaggaagcctggccttattcctgtgtcttggggctcaggctgtcacaatcggaggtttgggtgcgacagctccgggtcttggtattggatacatgcaggctatgtttgctgaatttatagggacatttttcttaatgatggttataatgggtgttgcagttgataaaaaggcagagcctggttttgccggagtctcgattggtatgactgtaactgctgtgatcgtcgttttaggttccttcactggggcttcaatcaacccagcaagaacgttcggaccctacttgatggatatgattctcggaggtcaaaacctttggggcttcttcccaatatacctagttggccctatattaggtgcaatttgcgcggcatttgcatatgcatatcttgctaagaatagtggggtgtgtgagctcccccaaccatttaaagacgaataa

SEQ ID NO: 73307 - DNA, 849 bp, synthetic construct
  source 1..849: mol_type = other DNA
gtgttcttaatatttgttaggggagtcttgatgggttctgctgatattgtccctggtgtttctggtgggacaatcgcattgattacgggaatctacggtcacttggtcgaagcaatttccaatattcgtttcgggttcttaaaacccttgttcaagggtgattttgacggctttgtaaatagtattctcgatgaaatcgactttaaattccttatacctctaatattaggtatcggggttgcatttttgactctggcaaaagtggttacctattgtatggatgtttacactgcatttacttatgcattctttttaggtttgattatagcttcggctgttatcttattcaagaaactcaatcatattaactttaaaaacatattattcgctttaataggctgcatcttgacatttatatttgtaagcttgaacccgattgccaccaatcattccctacttgtattgtttatctcaggaatgatagctatttgtgctatgatattgccaggtatctcaggtagtttcttactattgctgctgggccaatacaagtacatgctaaatgcccttcacaattttcatctttctgagattattgttttcgtagttggtgccttaattggaatcctgggattttcaaaaatcttaaattatttacttaagaatcatgaagagataacaatggcttttctaattggtgtaatgattggctctctaagagtgccatgtgtcgaaattgcgaactcgattagtataaacattgctagcctgttcccatgcttaattgttgccgtgattggctttgcgataatcattgtcttggaaactagatttgattatatcgactaa

SEQ ID NO: 73308 - DNA, 2049 bp, synthetic construct
  source 1..2049: mol_type = other DNA
atgatagatgaaataactgacttcctatttggattaaaaatgaccatcgtttcaggtatatttttactaatagcggttatcttcatgattttcggcgttaacacgccaatttacttaaaccctgcatggggaaccgtgataataagcggtatcccaatgttgaccttagcaatgtcaagattaatccgtgagaaatggatttcgtctgcactgctaattgcgattgctatggtggcctcactgttgattggtgaagtttttgcggcaggtgaagttgcatggattatggccctaggtgctattttggaagactggacagtggaaagagctaagaagggattgaaaaatcttattaacctaactccacgaacaggcaggagaataattaatggtaacgaagagatgatatttgtcaacgaaattaaaattggggatattttgagaatcttgcctggtgaaagtgtccctgttgacggtgaaattgtacgcggtacatcttcgcttgatcagtcgattatgactggggaatctctgcctattgataaagaagtaggtgatgaggtcttttgcggcaccatgaacatgtatggcgccattgacattaaggcaactagtttggatgaaaattcatcacttcaaaagttgattgatcttgtgaaggcagctgatgagaaacaagctccaacccaaaggatcgctgacaaatgggcaacttggctcgttcctgttgcactgataatcgctgttgtctcttggattgtaacgggcaatattgaacgtggagtaaccgttttggtagtcttctgtccgtgtgccttaatacttgcaacaccaactgcgataatggctgctataggtcaggcgacaaaatatggggtactcatcaagtctggtgaggctcttgaaacccttggtggtctaaatactttggtattcgataaaactggcacattgacttatggtaacctagaagtgagtgacgttatctccttaaatgagcatttaactgatgaagacttgctaaagatcactgcttcatgtgaaaaattgagcgagcatccattggccaaggctatcgtaaataatgcaaatgaagttaagattcaaattgaggaaccagaagagtttaaaatgtatcccggtaagggcgttacatgtataaactcctatggtagagtctacgtaggaaactccaaattcctatccgaaaacaacattcatataaatatcgatagtcaattagacaaattgaagcatgaaggaaaagcctcaattataatcgcattaaatggtgaagtcatcggattaatcggattatcggatgtggttagagaggattccaaaagcatgatcgataaattacatgatttgggtaatgagactatattgctaacaggggataacacagaaacggctaattactttgctgccaaggtgggtattagcagagtttatggcaacttactgccgcacgaaaagctggatcggattgaaaagctcaagaatgatgggaaaaatgtctgcatgattggagacggcgtgaatgatgcgcccgctttgaaaacgtctgacgtgggtgttgcaatgggttcagtgggaagtgacgtagctatcgaggcagccgatattgctctgttaggcgacgatattggtaaaattccctaccttaaaaaactgtccaattctacgttatttaccattaaggcaaacatagccatatccatgacaattaatgcagtcgctattgtctgttctgtactcggtttattaaatcctgtaaccggggctatcgttcacaatgccggatcttgtcttgtcgttttaaacgccgccttgttgtacgacaggcactttgatgattcagttaaaataatggatactgaaagtgttgaacattctcattatcatttccacaatgatggtgaacacacacattctcatgaccacgttcatataattaacgagataagaacagataatggaatcaagcatattcatgctcacaaacatgcttttagaaggcaaatctgcaaaacttaccacagttaa

SEQ ID NO: 73309 - DNA, 480 bp, synthetic construct
  source 1..480: mol_type = other DNA
atgaaatattcggatgatttgtttgatgacaagaaggatttaaaatttgcctcagttttcggtgttttgtgtgctatcgcatctgctggcgctaccatttatagtacagaagcagcgtatatcttcattgcaatcctgttaggaaacctgatagccctaaaagtcgacggcattcatcacattataacgttgcttttgtttgttttgttatgtctcgtattcgggattccagagttaagctacgtcatattactgatctgtattctcgcagctcttggtgatgaggttggtcatgaattgatctcaaaagttactgacaataagtttttaaatctatttttcgaatacaggttcgtaatgaaagtggtgatattacttttggctattggtggtgtattttctatttggatattcctatgctttctatcctttgaaatagcgtacgaatttgccggaattattttcgaaagatttaactaa

SEQ ID NO: 73310 - DNA, 246 bp, synthetic construct
  source 1..246: mol_type = other DNA
atggccaacgaagtaaccaaattagtcatggaaacgatcttaggattgattactactgctttcgcctttgtagcaggtctagcttggaatgatgcaattcaaaaattaattgcgacaatcattggtactggagacgccctgccatctctctttatatatgctatcatagtgaccattgttgctgttgttgttacagtccttttggcaagagtggctggtaagatgggcatagaattgggggagtaa

SEQ ID NO: 73311 - DNA, 666 bp, synthetic construct
  source 1..666: mol_type = other DNA
atgcatattatggaagggtatttaccattgacatggtgtattgtgtggtttgtcatatcattcatcattgttgcctttgggatttatcaaataaaaaaaatagttgacgagaccccagaatccaaggctctccttgctgtgagcggtgccttcatgttcatcttgtcatctttgaaacttccttccgttacaggaagttgttctcacccttgcggtaatggattgggcgcggcactatttggtcctgcagtaacggccgttttagccacgattgttcttctattccaagcaatcctgcttgctcatggtggtttaactacattgggtgcgaacatatttagcatgggcattgtcggaccatttgtcgcatggattgcatacaagggtttgactaaagctaatatctcttcgaccattgcaatattttttgccgcatttttaggagatctcttaacctatgtggctacttcattccaactagcatttgctttcccagctccgactttcagtgcagctctgggcaagtttttagttatctttgctgtcactcaggtaccactggctattggtgaagcgatattgacagtaatcatttgggatagattaaaggcttacaaacccaaattgttgaacaagctaggtgccttagctcccaatgaagcctaa

SEQ ID NO: 73312 - DNA, 288 bp, synthetic construct
  source 1..288: mol_type = other DNA
atgaaaacttctacattaattatcttagcagtcgtttgtattatactgtttgtagccccattggcaatgtataatggtcatggggaagatgacggatactttggtggcgctgatgatgctgcgggcgaagctattgaggagagcggatttgaaccctggttctcatccatttgggaaccacctagtggggagatagaatcgctattgtttgctcttcaagccgctatcggtgccatcataattggatatgcattcggttactggagaggtaagggtaaagaagaataa

SEQ ID NO: 73313 - DNA, 690 bp, synthetic construct
  source 1..690: mol_type = other DNA
atgaaatttgacatggattacattgcgcataacaatgctttaactgaaacaaatccttattttaagttgttcttaacgataattctgttaattgttacattggcattcgataatctgtattttgatgtaacagtttttgtgataatgtctatcgtcatattaaccattgctaaaattaactacaagtcatatttgaaatttctatcaattccaatggcctttcttgttatcacgtgtatctttttaatattcttctttggcaagggagatgttatatatgagacaggaatattgggtattgtagtcactaccgattcgtggcactatggcgtctacaccttcatgcgtgtgttgggttgtctgccctgtttgggatttttagccctaaccactccaattgcaaagattttaaattgcctcaggactttgaaagttcctaaaattctaattgaaatcgctcttttgatgtataactcgattttcatctttttaaatgaaatcgatacaatgcaaaaagcacaagagactcgacttggttatcattcctattggagctccttcagttctttgggggctctagtaagtatcatatttctgagatctcttgacaaaagtgaaactctacagtactctttagactcaagaggttacagcggtgaactcccggtgtacgaaccaaaaaagagataa

SEQ ID NO: 73314 - DNA, 843 bp, synthetic construct
  source 1..843: mol_type = other DNA
atgataaacatgttagaagtgaaaaatattaagtattcctataattcaaattatcaggcccttaagggagtaagcttaaaggtggacaaaggtgagatggtagctctactgggtaaaaatggtgcaggtaaatccactttatttcttcatttgaatggaatctacaggccggatgaagggaaagtgttcattgacggtgaagaactcaaatacgataaaaaatctctgctaaagtttagacaaaaggtcggcattgtattccaaaaccctgatgatcagatattcgctccaacagtcgaggaggacgttgcgttcggtcctctgaatttgggcttgccaatggaagaagttcaagaccgagtggaagaagcgttggttcgtgttggaatgtcgggttacgaaaaaaccgctcctcatcatttaagtggcggacaaaagaaaagggtagctatcgcaggtattctcgccatgaagcccgagataatggtgttggatgaacccactgcaggtcttgatccacagggtgttgtcgatttatctaaattattgagagaactgaacgacgagggaataacaattataatctcaacacacgatgttgagttagttccaaattacgctcaaagagtattcgtcctagtcgatggtttattgatcgcagaaggcactccgaaagagatttttgccaagccagaaattttggaaaaagcaaacttgaaagttccaattgttacggaactatttcaaaagcttgaagatgaggggtttgacatggaagggaattatcctctaaccatcgatgaagctaaggataagtttttaaaattattgcacgaaaactaa

SEQ ID NO: 73315 - DNA, 348 bp, synthetic construct
  source 1..348: mol_type = other DNA
atgctgttttattcaattttattcccaataatatctttaattgctattatttggcttttgtggagatatctgaatgaaaaagattctctaattacggtcatcttatgggcggttttcttgattattgttagtgtattcgcaattttccctcatgcctcgactacatttgctaaattgtttggtataactaggggattggattttataatcataattgtctttgcagtgttggtgtataccatttttaagttatactacaaaatcgacaaactcgaagacaacataaataaaatcgttaaggaagtagctctaagcaacgaaatctcccttaaggataaggaggattaa

SEQ ID NO: 73316 - DNA, 672 bp, synthetic construct
  source 1..672: mol_type = other DNA
atgttgtactttaggggatgtactgcaagggaaaaactcaataatattcaatccgccactgaaaagctgttaaaactggcggatgttgattatcatatattggatgatgaaaaatgctgcgggtctgttttacttagaacaggctttttaaaagaagctgaagaccaaataaagaaaaacactgaaattctaaaaggagaaaccataattacttcatgtgctggatgctataagaccctaacagaagactacgacggtttggacgtaatccacatctcgcaattacttgatgagctaatcaaagagggtaaactcaagttaagtaagatggatttggatgtcactttccatgattcctgtcacttagggcgacattgtgccgtttttgaggaacctagagatgtgattacatctgttgctgacatcgttgagatgaaaaatattcgtgaaaatagtttgtgttgtggtgctggcggtggcgtaaaatctgcctatcccgaaattgcagatcaaatggcaaagagcagaatagaacaggctaaggaaacaggttgcaaaacgttggtaacgtcatgtccattctgtaagctgaacttggagaacggtgatttggaggtccttgacctaaccgaatttttagtgaaatacggtggtttaaatgaaagacagtaa

SEQ ID NO: 73317 - DNA, 180 bp, synthetic construct
  source 1..180: mol_type = other DNA
atggcaatcgttggcactacaatatttagccatattcttccagtaatttgtggtttctttggaattgttatgatcatctctggttcgttggaaaagtccaatagtaaattggggttaggtattgttctctttattatagcttgcatattcccttatttaattctgtcagtgctagtctaa

SEQ ID NO: 73318 - DNA, 849 bp, synthetic construct
  source 1..849: mol_type = other DNA
atgagaatcgacacacatcaccaccacaaaaaagcaggtgaaaatctagcatttgtgttcttcatgaacttgacgttcaacataattgttattgccggtggtcttgcaaccaatagtatggcgatcctggctgattgtatccatgatatgtccgatactatttcaattgcttttgcatggtttttagaacatgtggctcagaaagattcaaccgataagtacagttatgggtaccaaaggttttcaatcctgggtgcggtaataatttctatatttgttataattatggctttattgatcctccaagaggctattcccagactattcgctcctgaaagtgttgacgccaatggaatgcttttgatggccattgtcggattggtattcaaaagcatttccgtttatcgtctccatggtggtgaaacattcaatgaaaaggcaattttattacatcaactgggggatgtccttgaatggataactatcttaatattgagcttagtgttgatgttctgggatggcgcaccgtatttggacccattcgtatcgatcggtatagccttgtggttaatatttaatctgggaatgaatttatataagtccgttgaggtcttactacaaaagactccaaaccattttgatgttaaagagtttaaggtaaacgtcctaaatattgagggcatcaaatcatttgacgattttcatgtttggtcgcttgacggcattgattctgtgttgacactaaaagtttctatcgacgattggaacaatcaggaaaaaataaaaaatgacatttacaacattgcttctaagtaccacattgtcgatattactatagaatttgattaa

SEQ ID NO: 73319 - DNA, 540 bp, synthetic construct
  source 1..540: mol_type = other DNA
atggtgaagtgtccgcgttgtggttacgagaactcgtccacagcagtatactgtgataactgcgcatatcttctgactgattccgaaggaaacaggattgataactctcccagagttagtagttggaatataagttttgcaaagaagattgttatcgtcttgggaataattgtgattgccatgctactattctcattcatctataataatacacagccttcccatgaagattcgcttaatttaataacggacaatgggactgtgcataaaactgcctcttacccatataaagcggtaatcgagtatgaaggtagctggggtgctaagatgggtgacccaaattatttggtaagcgaagatggttatggcaccaaatcatttgtcctcgattgcgctgcctgggatagagtatctatttctgctcaaaaatacgactacggagaaggggagttgcacgttaaattattaagaaatggcgaagttgtcgctgaaaattcaaccacaaacgttactggtgctgttgtcgttaactataattaa

SEQ ID NO: 73320 - DNA, 1704 bp, synthetic construct
  source 1..1704: mol_type = other DNA
atgataaaagtcgagaacgtatcgaaggattatgaattagccgatggaactaaaatcaccgcactgaagaacgtttcatttgaggtcaaagaaggtgaaattttaggtatcatgggtaaatccggttcaggcaagactacgttgttaagagcgcttaggggtgttgaacatatagacaacggaattattgaagtaggtaaggcaaaagtgacttctgaatcatctcaattttattacaataatcttaaaaaagaaacagcaatacatcttcagagatctttcggtatatggccggacactgttcgtgagaatgttttgcgaaaattgtacgcaagaagatactttgacgaaggggatactaattttgaaattgctgaaagcgagttcggaaaagaggctgatgaactgttggaactagtttccctaaccgataagcaagaccattacgcctctgtattgagtgggggcgaaaaacaaagactaatcatggcgagacaacttgccaaacaaccaaaggctttgttgctggacgaacccgcaactatggcctgccctaagacaaaacaggaaatattggatgcggttaaaaagatcaacaaagaattaaacataactgtggtcgtcgtatctcatttaccagatgtccaaaagtacctagccgatagggtgattttgctggaaaacggcgaaatagccgaggagggttcggcgaatgaaatttgtgataagttcatggatgaaatggacgatattgtggatatagacaacattgcaacggatgaggatgttattcaagtaaatgatatatataagagatttttcttgttaaccggtggggaagttttgcaaattgaagatgtgaattttacggtgcaaaaagaaaacattctaagcattattggtccaagcggtgctggtaaaaccgttcttctaagaatgctggggggattggaggacccagacgagggagaggtcttatataacgttgatgatgaatggtcagacatcgatattcccggcatgggccgtatgaaaattagatctaagttaggttttatgcaccaagaatttgcattaaatcattattcaacagtcttaaatcaattagctacgaggttgggttataaaaatcagaatatcgttaaggaagctcaacagcgggctaggaaaatcggcctgagtgaagagttgttagattcgttctacctcctcactgatctgcctgaaatagaagcaagagacagattgaagaaagttggtcttgattcagatatcttagatgatttgttcccaagatttcctgaaactgctacaaaagaagctgtcgccgacatatttgagagtcttgacttggatatgtccatcttacaccgcaaatcttacgaactatccggcggtcagaaggttcgtgtaatgctagctttaattttagtttccaggcctaagttcctacttttagatgaaccatttggagacttggacccggtgaccttgcgagatgttacaaatgctctcaagaaaatatcaaaggattatggaattacaatcgtaatgatctctcacaacacagactttataaaagagttaagtaatcgcgctgtatttatggatgacggaaagatcattgatgacagtgaggatattgataaaattgtggataatttcattgatttctgtcatgcagactatctcaaaggtgaataa

SEQ ID NO: 73321 - DNA, 894 bp, synthetic construct
  source 1..894: mol_type = other DNA
atggagaatgagagtcatgaatcaaaaatagacgttcgtataatagtatccggtttggatattgcccaacttgtttccaaggcggtcaacaatattcacttggagaacgattataatatcgtcgtttcgtctataattcctaccgtagaattaagcatagtaaaaaaagtggctagcggtgccgatattcttttaattggtggatatggtagtgatgaaacttacaatattctgttcaatgaactgaaaactgattttaaccacatcggattattcgattacaataatatcattgttgaagatgaatctattgactttaagctagctgaaaaggagattcttaattcaataataaaatcaacattgtcttactctctgaatttgatcaacgtgcatacattagaaaacaagctaatgaaggtgactcataactataataacttactagatgattacaatcaagtcctcaaggaaaacgaagttttatctcaggagaacaatgaactaatggaagacattaaggagttaaaatcggactttaatgcatttaaattgagatatgaagatatctatagtaaggagattcttgaaatattcagtttagatgacctgtggcaagagacatttagacaagatttattggatggtgacaggattgttattgccaccgataaatttaaacccgatgacatcctcgttggccagggtttcattgcttcacaatctaaagaaaaagcaatcgaatggttgaaaatcattagaactgcattgatatttgtcgatgataatgctggggatttgaagaaggaatcaggcattggagaagaagaaaatatcccagaggacaaagatgactatgacatgtccaacacgtttgaaaacttctgggattaa

SEQ ID NO: 73322 - DNA, 1248 bp, synthetic construct
  source 1..1248: mol_type = other DNA
atggtggaattgttagcgcccgcgggtaactttatatcactcagagctgttttagagaatggtgctgatgcagtttactttggccttgacgattataatatgagagccaatgctaaaaacttctcattgaacgatttaaaagaagtgtccaagatagctaatgagtatggagctaaaacctatttgtgtacaaataccattttaaatgaaagattggcttgttccttagataataaattgggcgatattgcatctagtgaaattgacgggctgattctaagtgacatcgggttaatagagaatactgtatccaacggtctcgaagctcacataagcgtacaacaaaatgttactaattcctatatgctaaaaacactgaaaaagttgggtgccaaaagagcaatcctttctcgggaactatctttaagggaaatcatggatttggctaagaaatcaccaattgaaacggaaatattcgttcatggtgctatctgcatggcaatttccggacgatgttttttatcttacggtttgtatggtaggagtgccaattgtggggattgcctgcagccttgccgcaaaaactggacactgacctacgaagagggcgatgataatgttataaacttctcggatgcggaagaggaatcatttattataacctcaagtgatgacggaagttacagaactaacttcttttcacctaaagatttgtgtatgattgaatacatcccggaactaatgaaaagcggtgtcgcttcatttaaacttgaaggaagagcacgttctccagattatggtgcaatggtcactggagtgtacagacaagctattgacagctacattgccgatccactaaactataaggttaaggaggaatggatggaagagcttgaaaatgtgttcaatcgtggatttgacactaatttttactttaatactccattcgaaatctctgaagataatcaaagcaagtatataaagaaggacattggtcaagtcgtaaactattataataaggttaaagccgcagagttaagaatttgggatgacttgaaaacaggtgataaaattatcatccagggcaagacgacgggttcgattactcatacaatcgattctatgcaaatagacggcaagtctgtctcgagtgtaaaaaaaggttctaacgtagcaattgccattcctacaaaggtcagggaaaacgacttcgtttataagttagtggagaggaacgttgatgattaa

SEQ ID NO: 73323 - DNA, 540 bp, synthetic construct
  source 1..540: mol_type = other DNA
atgaacttacctttaaatatcgttataggtaatgcaatatcgctaattgcaggaatttttattctgttcagtatgtgggttaacgatgaaaaggaggtctacaaacatcagttttcaaatgcctttattttaacgatctcttctgctttcttcttttcctggacaggtgttgtaactatggctatagccgcaagcagaaacgctatggtgtataaggatagactcacttttaattggaccatatttttcattatagtttccttgaccgtcggctgtttggtcaatacaatgggtattgttggacttttgcccattattgcacttgttcaaattacattgtccaactactatctgaaatcgatcaaggcgatcaaaatcagcttcattgttaatagtataatttacataatctatttctttgccatatgggacttttcttctgtagctattgaaagtgtgactgtagctgtggggatgatctcattattgaggttaattaacctaaataaaccaatcttttgcaacaatgaagtatcataa

SEQ ID NO: 73324 - DNA, 183 bp, synthetic construct
  source 1..183: mol_type = other DNA
atggagaaatactatgaatctatcatgaaaaatcttgaaatatatagaaatattgcaaatttcgtctccaactttaatatttatggcacttcagaaggtaaatacttaattatattatggcaaaaaacagttggattgaagaccgaaaaaagtcataacaagttggctgtaccaaagctataa

SEQ ID NO: 73325 - DNA, 858 bp, synthetic construct
  source 1..858: mol_type = other DNA
atgagaaagatttcgatactagtattactgttgatcctcgttggtatgctaattccaaccggattcgccacagactcaaatgtcgtgataacctatggggagactacctattcaaattcaaattacaaatctttcgttgacaatttttttgttaaccaggccaatgttgatataaacaatgtaggtgttaaaacaatcactgctgaccaggtgaaccaagtatcgagcggaatcactggtaaatcttataatagtaatcaaatattgtcttcggcgcttgttgacttaaatgataatggcaatttaaaggtaagcgttgataaatccaagatcacgacaataacgggtgatatgtatatctcagctttgaaatctgctggaatcacaagtggccatgtgtatgtgaccagtcctgttcaagcaactggtgaatctgcgcttgcaggaataatgaacagttatgaggaagtcactgatgttcaaattcccgactctgtaaaagaagcagcaaatgatgagatttacacccaagctgagattgtgaataattcaggtgtcaatgctgatgatttgtccaatctggtaaatcaggttaaagatgaagtaagcggcggcaatgttactaaccacgatgaaattgtcaatattattaacagtcatgttgaaaacaataacattaacattacaaacaatgatattgaaaacttagccgattctatagaacaagtccaaaacgtgcaaggtgatgtcaactactacaagacgcaggtcaacgaatttctagacgacaactccacaggaggtttttcattggatggtttatttgactggattaagtccttcactgatgggatctaa

SEQ ID NO: 73326 - DNA, 609 bp, synthetic construct
  source 1..609: mol_type = other DNA
atggttgttaaacattgtccaaaatgtggaaatgatattgacgatgaggatattgaattttgcaccgaatgcggtcacaagctgagtaataagattataaaaaatagttctaaaggttttttcgacaatttaaacgaaaaaacgagtttttccgttatcatattctcgtttatcatcttcggcgtattcttattcatcggttccgtagtctggtcatctttcatggccaacggtagcatagatcttgttacatacctcctgctagtgattgtcttttcagtcttcttcggtggcatatttgttgggtacttcgggtgtatggacgaatcttatattattcccaacttctcaatatatttgggaagcattttttcagttgtgctatgtggtattggtttgatatttacatttctaatgggagtaatctcgatcttgagctctatcgctccatttggctcctcaaactcgatatctcaaacttcaacttccagttacgctcagtctgttgatttgagttttatttttaaattggtcttatttattcttttaattcctgtggcatcttatattggtgtatatttgggatactttttaaagaagaatatttaa

SEQ ID NO: 73327 - DNA, 456 bp, synthetic construct
  source 1..456: mol_type = other DNA
atgaaggttagaaaaatcttggtcatgctgctaattttagtgactttgggttttaccttgaatgcagtagtggctagcagtccagatcctatcaaattaggagacatcaaaaatgatgacttggttattacggaagtcggtcagaacaaactgaattttgaatattccgttgaagttgacatttctgatttgtctagtgaggataagaaattgtttgaaaaggcgctaaacaataacaatacctcattcattcttaatctcacaagctcaactccaacgaaaattgccataactatgcattcattacccaagaaggctgagattataggcaacacattatacattaaaaataacaacatgtttagacttattaatggtatacaactagataacttaaagatatctgcagtatcgttcaatacaacttccgggcaattattcatcgctaggaaataa

SEQ ID NO: 73328 - DNA, 957 bp, synthetic construct
  source 1..957: mol_type = other DNA
atgaatttgggtaagttggttggtaataccccaatgataaaaattaactatgaatatggcgggaaatcagggagcatatattcgaaactcgaattttacaactactccggtagtataaaagatagaatcgcattatatattattgagacagaaagaaagaatggcaacttgaaagaaggacaagccgtggtggaagtcacatcaggaaacactggtattgcattttcagctatcggtgcgttattcggtcatgaagtccacatcttcatgccggactgggtgtctctcgagcgacgtaaacttatcaggatgtatggcgctcatgttcatttagtatccaaagaggaaggtgggtttaagagggctctagagcttgcagaggagttcgctataaaacatgacgcatacatgccactacaatttgataacaaattaaatatagaagctcaatacatcacaggtcaggaaattattgatgagatccctgatatagatgcgttcgttagtggtattggaacgggaggtaccttgatggggataggcaagaagttaaaagaaaacaatcctgactttaagttatatgcattggaaccaagcacattgtctatccttaagatgggaatggaagaaggtactcacatgattgaaggaattggtgatgattttatacctggaattgttgataagaacctgattgatgatattgtactaattgatgatttggacgccattaacatgtctaaaagaatagctaaggaatttggtttaggcatcggcatctcttcgggtgcaaatttcttggccggtgttttaattaatacgagtgatattaaaatagctactgtctttgccgatgacaataaaaagtacatcaccactaaactatccgaggaaattgacgacgaccccaatctgatatcaaataaaatcaagctgattaatttcgaagtaatttaa

SEQ ID NO: 73329 - DNA, 885 bp, synthetic construct
  source 1..885: mol_type = other DNA
atggttcagtattgtagaaaatgcggtaaagaactagaagatgacgctgaattttgcgatggatgtggttttaaccttaacaatcatcctacagaagataagcaagaattgaataaaaaaattaaacaaacgtctcaaaaagataaaaacgacttcataaccaagttgcccctatctttagcaataatcagcatcattgtggttattgctgaggggttgggaaccccgatgattatgggttgggacaatattatgctggcaattgctatcggaattattgggggcattattgggataattttaatggagaagatagatgaacctctaatcgcctctgttgaatttattgccactggagctctagtttactcattcattggtaggtttggtgacatatcccttatcatattcattataaccgcaatcctgacattatactttaaaggtcactctgcgaataataagaagctctggacgatcccaattctgactatcgtcttgttatttgtattattgatagcgagtggtgcattatatcagataaatgctgaaaattcagtcatcgtaggtaacttaagccaaaacataacaaatgatggttatggctactacaacggttatgtgactggcgacattaaagtagattctagttttgattacctctgtgttaatgtcaacttccttgacaacaacggaaaggttattgattccactatcggttggaatgatttgaatcctcagtccggcaagacctataaaatttcggcttggtatttcgagcaacaagcaccagaaaaggccgaaatatcagtggtcgattctgccgattcaacgacaccattgtatactgagaatatcactatttcaacatcgagtggcgtttaa

SEQ ID NO: 73330 - DNA, 1125 bp, synthetic construct
  source 1..1125: mol_type = other DNA
atgtccgaagaaaggttggtccccaagctacgatttagcggattttcggatgtatgggagtcttataagattggtgatatcagcaaaacttattctggtgggactccttctacatcaaaaagagaatactatgaaggcgatattccatttatcaaatctggcgagatctgtaaggacaagacggaacattatattaacgaaattgccataaataattcctctgcgaagaaaattaagaaaggggatttgttgttagctctatatggtgccacaagtggtgaagtagccatttccaaaattgatggtgctattaaccaagctgtcttaaaaatagataataatatggataattatttccaatacaattactttctgaaatacaaggataagatcgttcataagtacatccagggaggtcaaggtaacctttcagcaaacattattaaaaaattggaatttaagttcccgaaattagacgaacagaagagaataagtcaatttttgttactaatggacaaaaagattgatttattggaaaacaaacttcaatactatcaagacttcaagaaatatctgatgcaacgtatattcacacagaacttgcgctttgattttgataatgttaagttaaaaaatatctctaaaattaataaaggtaaacagctaaataaagacgacatggtcgaaactggcatattccatgttttgaatggtggaaaagaaccatcaggttacaccaacgcatggaatactcctgaaaacacgattacaataagtgagggtggcaattcgtgcggttacgtgaatttcaatactgagaaattttggagtggggggcactgttactatttagacaatttagctgagaaagttgatggatattatctttatagctacctgaagttcatcgaaccaaaaataatgagattaagagttggctcaggactgcctaacattcaaaaaggagacattgagaacattaaggtaaaaatagctcttccaaccgagcagcaaaggatatccaacctattgtattcaaccgatgaaaagataatcaacatcgcaaatcaaaaagataattttgaactcttcaagaagggtttgctccaacaaatgtttgtgtaa

SEQ ID NO: 73331 - DNA, 120 bp, synthetic construct
  source 1..120: mol_type = other DNA
atggccaaattcaaatgtaagatttgtggttatgttactgaagaatttgaagaattgccagaagattttaagtgtcctatgtgcggagcaacagctgacatgttcgagaaaatagagtaa

SEQ ID NO: 73332 - DNA, 420 bp, synthetic construct
  source 1..420: mol_type = other DNA
gtcatattcctgcctggctcgaagtctgcgacctttctagttatttttatagttgccattgtagctttctgtattgcatgcgtttgtgcatctatgacaggacaaatcagcatcttgccaaatgataatgaatcagagagcatattagacaatctttcggctattacaaatgatacgggtaacagcggtcaatcgtacggttctaaagattatagttcatcctcttcaagtagttcttctaacgatgactcccaggtggaaactacaaccgaccattccggtgataaccaaggagactcccagaaggattcagacgatcacgaccatgaaaacagtaatcaaaataataaggataaagatactaaaactgattctgggcatgccggtcaaggctcaggagatgctaacgattttgactaa

SEQ ID NO: 73333 - DNA, 231 bp, synthetic construct
  source 1..231: mol_type = other DNA
atgagtggtcaaaatgttcaaagacccctggatgccttgggcaagtctgtggatgctcctgttttaatcaaactaaaaggagatcgtgaatttcgaggtatactaaagtccttcgatttacatatgaacttagtacttaacgatgcagaagagttgcaggacggggaagttactaggagactcggtgtcgtcttgattagaggagacaatatagtatatatttcaccataa

SEQ ID NO: 73334 - DNA, 1392 bp, synthetic construct
  source 1..1392: mol_type = other DNA
atgaagtatgataaatcgctaatcgtacttttcataatacaaatttgcgaaggttttagcttttatgggctgggagctatattaacgttattcatgacgcaatttctcaatttaagcctttcatttgcatttttagtttatggtacctatttcgggttagtttacattgctacgttatttggtggatacttgtcggataaatacatcagaagccgctgtcttattaacgcgggcataatcctgatgggtttaggtttcattgtcctgagttactttgcctcatgggctaatcccctggtgcagacccattcttatttctactttaatactccagaaatcatgctgataattagtttaatgtctattattttgggtgaaggcctattgagagtaaacatctcctccactgtaaaacaggtttacgaagataacgaaaagaaagttgagtctgcctttacattgttgataatggccctgaatattggtgctgttagttctgcaataatccttggcttaacaattggtgagggaaatttaagtttgtataagtatggcttcttaattcttgcagttagcttattcattggaatcataatttacaacctatttcgtaataagtatttggttaattcaaaaggcgagattgttgggattaagccttcaatcaaattggaatctgtgatggacaatgcggaggaaaaattgaccaagcaagaaagaaatcacgtgaaagctattataattatactttccatatcgttaattttcttcatcggttttgaagttatcgattcatcattaatgttttttgcaaaagattatgttgccaacaccattccatttgtcccattcaggattagtcctgaaataatcaaatttatagagcccttcggtgtaattatattctcaccatttattctaacatactttaatctaaaagacggtgatgaaaatgaatcgttgatatttagaattatgctgggaattattgttttgcttgtcacttatgctgtatttttcatcccgtgtatgatggtcgataacaacatgactgatgtctccatcattttcattataatcatggagctaatcagatccacttctgaaatcttaattcttcctataggtttgagtattgtctccaagttatctccagcaaaatacctctctcgtttactcggattgttctattgttctttggccggcgcatatgtggtgtccggatacatggcgggtttctatcctaatgctgaaagtatggcacataagttgtttggtctaatacaaatcaacgactttaagatctttgcttcagtatttattgtgatgtatttgacattgtttacagctacttacatttctcgaaacaaaattagggacctaatggaataa

SEQ ID NO: 73335 - DNA, 408 bp, synthetic construct
  source 1..408: mol_type = other DNA
atggtagaactaaaagatatagcgcaagagaacgaagtggatttggaaaactgtgtcgttttcgttagaggtgaagatgatatccttgccgttgatgtttctaacgcaaagataaggcaaagaagcgacgacactatggggttcacgttttccattacaccagaacagactttaaaatttgaagagtactttaataaatttgcaaatggcgaaaagttctactttgatatttcacaaaccggataccgtcctgcttattatagaggtctgtctcagatcaataaagaagtcagtgaagagtatgacacaaagttcaatgtgaccttatttgcccaaaaagctattgtagagcccgatgactcgtattttgcaccaacttgtgcttgttgccaattctgccatttgtaa

SEQ ID NO: 73336 - DNA, 624 bp, synthetic construct
  source 1..624: mol_type = other DNA
atgggtatcgggtacgctgctattgcaataaaagccggcatgacgccactacaaacaatttctatgtctgttctggtgtacgccggtgctggccagttcattgctgccagcatgatactaagctctgcgtctgtcttggcaatcgtcctaactaattttgtagttaatttaagatattttgtaatgtcgacctgtgttctgaatcaaatagaagactccaatttacctttaaatgtcttggcagctcatacgactgttgacgaatcatttgcagtgttttcattgagtgaggattccagtatatgggtctacttgggtattgctgtgactgcctggctaagctggattctgggagctgcaataggtgttgtcgtattggatcttcttcccgtaatagtgacaaacagtttcaacatttctctttatgccttgtttgtagccatcctcactccagctatcaaggaaaacaaacagattgcaattttggttgcaataacagctgttttaaatatcatcttatcccaattcttaggaaactggtcgttaattgtgtcaaccctcgttggtgcggcgattggaatgtatattgttgatgatgaatatttgttatcaggtgatgcttaa

SEQ ID NO: 73337 - DNA, 315 bp, synthetic construct
  source 1..315: mol_type = other DNA
atggattacatgatgttggttattgtcggttgtacccttgtcacattcattcccagattaattccagctctatttatagacaagctcaatttctctccaaaattcgaaaaatttttagatttaattccatatactgctcttgccgccttaatatgtcctggtgtattgacggtagataaccaattgtggtacattggcttgatcggagctgtggtagcggcatgcctggcttggaagaaagcaccgatgggggccattgtgatcataactgtcgttgttctaatagcagtttattcaatcgttccttttttttaa

SEQ ID NO: 73338 - DNA, 237 bp, synthetic construct
  source 1..237: mol_type = other DNA
atgcgtaccatgatcaagtatttgaggcaagagctgaagatgtcacaaaaagaacttggtaacaaagtaggagttacaagacagacgataaatgcactagagaacggtagatacaatccatctttatttttagcttacgatataactcaggtgtttaataagatgttgttcaaaggcgacaaagaacaatactttgtcatggaagacattttcatttttgatgaagattattattaa

SEQ ID NO: 73339 - DNA, 732 bp, synthetic construct
  source 1..732: mol_type = other DNA
atgattttagatatatataaggatgcatttgaatattctgctaaagattggaagacattattgatattgggtgttatctgtttattcagtttcttgctcatcccagtctttttactagcaggatacaattacagggtggtcggtacggccgtgagaggaattatcaatggcaaagacccattgcctgagttcgacgatcttattgggatgttcattgatggaataaaagttgtaattgttcaaattgtctatttgattgtacccgccgttacgtttatcgtatttgttctcattgctaaccatttgtccggtgttttagcgtctgctgtagtactgctgggctgtctggtcacattaattcttggtattattgcatgtttaatgattcagatgggtatatgccacatggcatacaatgatggggcgtttacaaaggcctttgctgctgaggaaataaaagccgtcattaatgaaatcggtctatttaaatgccttttgacttatgttggcattataattatatgtgtcgttttcggagttgtggtgaccgggatagttggtataatctttaccatattcggtctatcaggtgctatgttgggtgtggacgcaggtggcatccttgtgttaggtacattggttaacagcctgattactacctttgttgtaggcccgtatttatcaatcttcactggaagatcgattggactactatacactatgcaaatctaa

SEQ ID NO: 73340 - DNA, 825 bp, synthetic construct
  source 1..825: mol_type = other DNA
atgacaagtataacagattgtgttgttgaagggttaaaatatcctttcaatgatttaaagaaagtattaagcttcggtgtattgtttgcattgatcaatttaatatctttggacattactaccaaatttattgatgccgtcatcaaatattctaaactatacccttctgccagtaatgtgttccatctatcccaattgccagccaatgatatttatatgatcattgctttgctgattattagttttataattgtcttgtttataaatggttatgaatggaatattgttagattctcaattgataagaaggaggaccttcccgaattttctaacgtgctaaagatgtttgtcaacggtgtaaaatacttccttgtcaatgttgcgtacaatattatcccaattgtacttttaataatcggcctggcattgtttaacgagtcgtactccccaattattatattgatttcagtgttattgttcttaattgcttattttatcctgattatggctctaaacaatatggttgcacacgattcgattaaaaaagcatttgacctcagggaaatcactaagaacatttcaaacctcggatggggaaaatatataggtattatagtgtttactttaatcgtgtatcttgttatcatggttgctgttggagttatcctattttttataaccgtcttcatcatatctgctatcacggatcagtccatgattatatcaatttttttagcgataatcgagggtctgttcatattgccgtacgttgaaatattcttcagcagagtatttggctctatttaccgtgaatcaattaagtaa

SEQ ID NO: 73341 - DNA, 633 bp, synthetic construct
  source 1..633: mol_type = other DNA
atggatgttttccagcaccctatttttttattgggtgaactcatgaatattaatgttgaactcttttaccttttcaatcacgcatttcaaaacccattttttgactatataatgccggttttcactcacttcggagggttcaagtttttgatattggtgttgatagcaattgtgttatacgctcatttaagaaacaagagaacactgaggaagatcatctttctaaccctaatcgctttgctgttttctgacggtattgcgtttgtcttaaaacatttgattcatgaaccaagacctttcttgagtttagataatgtacatcttttaattgctgaagacgatccactttcgtttccttcaggccatactacgtccacaattgcaatagtcacctttcttgtatttaacatgaaagagctggctaaaaagcattataaaatcataaatgtttgtctaataatcttcgccatcctaatcccattctcacgtatgtacattggtgtccattatcccggtgatgtgttagctggtgcagccattggaattgttggcgccgtaattgttaaccacttcaaatgcgaaatattgaaccgaattgatatattaaataaaattaaggagtctatcagctaa

SEQ ID NO: 73342 - DNA, 216 bp, synthetic construct
  source 1..216: mol_type = other DNA
atgacgatcgagaaagatgccgaagatattatagaaaagtttagtaaaattctagaagatattccagattcagacgaaacctggtatataacagataatttaaatctgactagagatgataagtctcaagaaaagaatcctgagaagatccttaggaacgctagaatagacaaagaaggtaacttgattgttaaaaaagcagactggactaattaa

SEQ ID NO: 73343 - DNA, 636 bp, synthetic construct
  source 1..636: mol_type = other DNA
atgaaagtgttactagtaaacgggagcccgaacaggaaaggctgcacatacacagcattatcagaggttgcaaatgtcttaaatgaacacgatattgaaacggagattttttggattaaaacaaagccaataacaggttgcactgcttgtggaacatgcgccactatcggaaagtgtacctacgatgcggatagtgtcaatgaatttgttgaaaaagcctatgaagctgacgcttttgtcttcggttcgccagtttattatgcaagtgccaatggttcaatggtttcatttttggacagagcattctactctaattctcatggtaaaggcgcggaggcttttaaacacaagcccggtgctgttatatgttctgctagaaggggtggcaccactgctacttatgatcaactgataaaatacctcggaatttcccaaatgcctattatctccagcttctattggaatatggtgcatggtaacactcctgaagaagtacttcaggatgaggaaggattggggacgatgagacaattggcacataacatggcctttttcttgcagtgtcttgaagcaggtgctgaaaagggtctaaaagtaactgaagagccaaagcctcgaaccaacttcatccgttaa

SEQ ID NO: 73344 - DNA, 1356 bp, synthetic construct
  source 1..1356: mol_type = other DNA
atgaacatatttaaaactcccgaaggttacatatattcaaacaaggcattgctggctttattcataccacttttaatagaatatgcattggaatttttcgtaggatttgcagattctataatggtggcgtccttaggtgaggctgcaatcagcggagtttctttggttgattttttaattcaacttcttattttttctttttcagctcttgctactggtggcgctgttgttgccggacaatacttgggtaacaagcaaatagataaagctcaggattctgctactcaattagtttggttctcaacaatcttatcagtcatactcatgatcattgttattattttgaggcagtacctaatcgggatcttatttggacaaattgaagttgatgtttggcaaaatgccgataaatatttatatattgttgcattgtctattccctttctcgctatctacaatgccggtgcatctattttccgtaccactaacaatgcctccctgccaatgaaaatactattcatttgcgatatattgaatattgtaggtaatgcgatttgtatttactacttaggatgggatgttcatggtgttgcaatacctacggtaatatccagactgctatccgcaattctaatattgcactttgttgttaatgaggactataaactgcacattaaacgcactttaattcataaattcgactttaaaatactgagaaaggtcttgcaagtcggtatcccttacggtattgaaaatgggttatttcagctaggcagagtgttggtgctcagtatcgtttcgaccttcggaacaatggcaatagctgctaactcagtagggtatgccgtcgggatatttagcgtacttccaggttttgcaattaatttaggtttgacggctataattagcagatgcgttggagctaatgactatgaacaagtccgatactataataaaaagtgtctaattattgtctttgtctcgcatatcgtcatcaatttgattatcttcgcagccttaccgctaatcttgaacatttataacttaagtgctaagactgcggccatgacaagtgagatgatcatttggcatggcatattcggtattataatttggccactttctttcaccttgcctgctacatttagaggtgctggcgactcgaagagtgtgatgtatattagtttgatcgtaatgtttacctgtagaatcgctctttcatatgtaatcgcggattttatgggtgtgggcgtattcggcacgtggattgcaatgtttattgactggtatgtgcgtgccgccatttatatttacaggtacttctccaacaagtggacagaatacagggtgatctaa

SEQ ID NO: 73345 - DNA, 408 bp, synthetic construct
  source 1..408: mol_type = other DNA
atggatgggattgtctacaagaatacacataacttcagcaagagagaactcgaagagttatttttatctctagaatggtcagcaggtcattttcctgataaactgataattgcaatgaagaacttcaaaacggtcttttccgcatgggatggtgaagaccttgttggtttggcctgtgctatggatgacggtatcatgaatgcttatgttcactacttgttggtaaagcccgaatatcaattaaaaggcattggaaaagaattgcttaatagaatcactactcattataaagattacatgaggatagtggtagttgcctatagtgacgagattaagttttacgaatattgcggatttgagaaagcggatgatgcttcgccaatgttcataaccaaactatgggcttaa

SEQ ID NO: 73346 - DNA, 774 bp, synthetic construct
  source 1..774: mol_type = other DNA
atggtattgttcagaggagatatcaagtgtaagagcttgcaaagacgtacctcaattagcgtgatattgcctgcggacaatattcacttcttaagtgatacagaagagatagttcctcaaccctataagacattgtacctgctccatggactgtacggtagtgatgacatatttcttgcaaatacttctattcaaaaatttgcagaggatcatggaatagctatcgtaattccatgtggggaaaatagtttttatttggataataaaaaggctcatgcatattacggtgaatatgttggtcaggaacttttagatatcaccagaaatattttcccattatctgacaatagggaagatacgtttatcgcaggcttttccatgggtggctatggggctattagaaacggtctaaagtactcaaagaacttctccaaaattggtatgatatcggccgcccttataactgatgaaattgttgattatacagatgacgataacgtgttatggtcaaactcattttacaaatcctgctttggagatttggataaaatcaaaaactcggacaaagaccctaaatatctaatcgaaaacactgccgatattccagatatattcatggcttgtggcgtcgatgacttcctatacgataagaatgttgaattttatgagtttttagagtctaaggacattaatgctgaatttatgcagtctccgggtgaacacacttgggacttctgcgatcgatacgtcaaagaatttattaaaaggttataa

SEQ ID NO: 73347 - DNA, 444 bp, synthetic construct
  source 1..444: mol_type = other DNA
atgaagtgtccagaatgcggtaatgaactggatgaggacaactactgcagtgaatgtatggaatttatagataatcccattggaggcaggttatgtccatattgtggtgaggaattggatgaagataattattgtaatagttgcatgcagtactactatgaagaggagaatacacaagagcttgaagaaatagattatgactctatggtaaataatggtgattcaatttgtttaaactgtactttctggtctgtttccccgtacgggtcggctcacggaatgatctgtagaaaaggtcagatctctgatggtcctggagactcatgcgggctattcgtccaagaatataactttgctaactacggcgacgcaggtcaatatcaatttaatgaaaccaatagagccatttccaacaaattgtatcattggaagaacagcggctaa

SEQ ID NO: 73348 - DNA, 867 bp, synthetic construct
  source 1..867: mol_type = other DNA
atgattattactactatcttcctgattcaaattatcataacagttttattctctataatggcggcaatttatgatataaaaagtaatattgttccaaacaaattaaactattctttgatatttttcggcctcttctcaaatcttattctatccataatttctaataatattaaatatatcctggcttctttcatttcaatgtttattacctatgctgttacttatatgttatggaaattaaatatctggggtggaggtgatgtaaagctcttcacagccattgcaacagttatcccatctggtcttaatatcaacttcttgaatatttttcctcaattgtccgtatatccattttcgtttagtgttgttattaactctattttggtttcatttccttttttggtaatctttgtcacgcatttaatcttcaaaaataaggtgtttatgggtaatattgattttctagtcaatatctttaacattgaaagtctgaaatacataaaaaactcgactttaaacaaattaattcctatcaaggatttaaaggaaggaatgatagtcaatgactactactttaataacgaacacattattgaacttctaagcgagatggggggtaacttggagatctacaaatcaaacagaaatgacttcaagtactattttaagtcccagagtgcaggcggtataaccaatgaagaagtctggcagcttaagattatgaatagccaagatataatttccgacaatatatcaattaaattaagcttcccctttgctccggccatatttctaggattggtaatagctatagtgtacggggatatgatgatgttgatcattaagaacatattcttggtgatctaa

SEQ ID NO: 73349 - DNA, 429 bp, synthetic construct
  source 1..429: mol_type = other DNA
atggttaaagaaagtggtgctcagatttctctcgagtacatgttgattttctctatatccctggttattttaattgtctttacattgcctctagcggaaaattcaataagaaatactctagatgtttccgattctttgaatgtgaaatctgatttatcaaaaatagctaatgccattaagcaagtttatggtgaagggcaaggatcgaggcaaacaattaaaattgaaagtaacaagaagcttaaaatcaacatcgcaaacagtcacgtttcaacgagctttaagcttaagagcaactccaaaaaggacataaaagagcatgtaatgtcaaatatcggcaaaactaccatctcgttaaacaagggtgaaaatgtcataattgtggaatggccagtcaattctaaaaatatgttgatctataccgtataa

SEQ ID NO: 73350 - DNA, 804 bp, synthetic construct
  source 1..804: mol_type = other DNA
atggatataataactacaattatttacctcgttttgtttatagtcatgatggtctttgtattctctattggaatgttaagacaatacatgcctaagcgagaggtcatcctagtaatccttgtagctttcttaattggtagcattggaggggcatttttccttgacccaatttacgatgaattaccaaatgttgcaagtgttattgaaaagaatatgcccaataatgaagaaacgctgtatttggatttaagttcctcaattaacatcgatgatttgaaaaacaacttatctgcaactgacggattcataagctttgacgaaaagtcggttaatattcctatgtggacatttaatgagagagaacacaattactttgacgaaatagttggcaatatcgattcgaactataaggcttataatataagtacatctgagatccaaatcacccttgccgataactatacttctgctcaagccttgaaatccttttccgattggtacaagttggtttatggtgaaactatttcttacgcgcaagtgcatgctgtcttggttgttgattcatcatctctagatacgttcgagcatatcctgctgcagaaaggtattgttgctagtaaaatagaagggccgattcaggacacagtaaacaataccaattcatcaatgttaactaacatcgaatttaccttggtctgtggtggtattggtgtggtggtagcattcatgggcatatatgttgactccgtggtgccagcctataggaaatttagaaaattcctaagggaaaaacgtagacgctaa

SEQ ID NO: 73351 - DNA, 384 bp, synthetic construct
  source 1..384: mol_type = other DNA
atgaaaatcaaattggcaataatatttggtgtactaatctggattttaacttttgtgctttctgccaccttcaacccaattttcacgacaaatgttaggaacgtcaacatagtggtccctattattaccataattgtaactgggttctttggaatcctatatatcagagctattgatactaatgagattgtcgaaggctttttggttggtataatcttcgttatcatagacattattctggattacatattcatcatatcccttcaaaagaatctctacatcattggtaattataccttgcatgttttttcaatgattacaattacgttattaattacaacatttctgggatatttagctcagatgactattgatttgaagtaa

SEQ ID NO: 73352 - DNA, 1032 bp, synthetic construct
  source 1..1032: mol_type = other DNA
atgatggaattaatgagagagctatcactgacaccaggcgttagcggttccgaagaaaaaatagcagaaattattacacgcgaattaaaagatgtggctgacaaaattgagactgactcgatgggaaacatcatcgccaccaaaaaaggtgaaaaaaaggctcctacggtaatgctagcatctcacatggatgagatcgggttgatggtaaggtacattgatgatgacggttttattaagttctcaaacatcggtggaattaatgatcaaatgctgatgaaccagacagtaactgttcatagctccgttggcgaaccgattgtgggcgtcatagggtcaaaaccaccccatgtaacaactgctgaagaaaagaacaaggttgttaaatcgaccgacatgtttattgatatcggtgcaaaagacaaggaagaagcagagaagatggttagaataggagacaagatgacattcaattctttgtttgctgaatacccaaataacctcatcatgggtaaagcattagacaatcgtgtaggttgctatgtcatgatggaagttctgaaaagagtcgataccagagctactgtttatggggtgggtaccgttcaggaagaggtgggtcttaagggagctaagacctccgcctttagattaaaccctgatcttgctattgcccttgatgtaacattgtctggtgatcatcctgggattaagcccgaggaggcgcctgtggtgatgggtaaaggtccagctattatattggcggatgcatcaggaaggggtatattgactcaacaatctgtaaaagatttgctcattaatgctggagatgaaaatgaaatcccatatcaattggaagtcagtgacggcggcactactgatggcacggcaatacatctaacgcgagagggaatcccaacaggtgttttatctgttcctactcgttacatacacactccggtcagtgtctgtagtatggatgatgttgaagccaccattcaattaattacagaagccataaataatttataa

SEQ ID NO: 73353 - DNA, 711 bp, synthetic construct
  source 1..711: mol_type = other DNA
atgaacaaaaagatgcaataccaaatattacttattgtgctaatagctatcgtaatatttaacctctcgattatcgtttcatccatgatgaacactccagataatgtgtacaatattacaaatgtagggcacaacgctaatggtacggtttataaaatcgaggccggtaatatgtcctctaatgaaaccgttggccttatcttgggagtccatccaagagagcatgaaatccacgaagcggtgaataacaccatttacaatatcactagcgaaaatggtactaataacctaactaaaaagtatgtaatatattatattaaaacaaaagataatttgacgtctcgtgaagatacaaggcctgctggtgaagagctggccaacaagttcattgtcccaaatattgtcaaggataagccttttattgtattggatgttcatgagataaacccagattatgaatattcaaattttatatttagtttgtcgaacagaaccaacacagttgactcctacatttcacatattgctaatgacgtcaatttagtggattaccagttcagtgaaggcacaagccctgaaaaagttacgaaaccgatagcatctaaaggagttactacattactgatggagacctcaattactgatgcactaatggaaaagcaaaagactgcagacaacttgattaaatctttagacagtttagaaccctaa

SEQ ID NO: 73354 - DNA, 675 bp, synthetic construct
  source 1..675: mol_type = other DNA
atggaaaacaaaaacatgatcattatatttgcggcagttgctgtggttattattgctatcgccggcattttatttgctaccggattcattggcggtaacgatgtcgaaacgaccccctttaaaatgagttttatggaaggttccttcataggtaatgtaagtcttgaaaacgataaggagaaattcatgcactcctatgaggacaaggagaataaaataacttacaatatttccactgtggacaacagctcagtcttaatggaaatatatcaaatccaaggtttgggtaatcctgaggtaagatcattcaacggtaatgagtggaatatctacttcacacaggctgttccaaataataattcaagcactaattcttctaatggggatgacgcaatgaacataataatcggagaatcacaaggtaagaaacaaggttatttgatttacatgattattgatggcaaatctaagatcaatgccaccggtaaaatgtatggggaagcctatacaaactactttgaaccgctactcgaatcgttaactttgaaagaaagtaagaacgttccacatatttatgatgaatttggccttacaaaggaacagtttgattatcaaattgatctgataaggcaatacaaatcgggaaatacgtctgcactacagggagctcaataa

SEQ ID NO: 73355 - DNA, 1074 bp, synthetic construct
  source 1..1074: mol_type = other DNA
atgctcaactcactgtacgaaaaagccatagctaaaagagggttcatccatgatattgacagccaaactgacgttgaatctcagttggagtacaaatggttcaacagagacattctagagattgataacggtttttcgatcgctgccggcgatggtagtttcaacaagaagaagttcctaacaactaatttctgtgcagtaggcgctgaatctataatttatgatggtaaaatcaagaagatagacgactccgatattttcgatattccgcatgtctcgtttttagacgaattgctcagtaattatatggctatctatgaacttaaatgcgcactgagaaccattaaggaatacaacgttgattactatatgattgatggatctatattaggtgatttacaaaacccatttcctagaggtgctaaattgccctccaaacttaagaacaatttggacgatattctacttaaagaatttgagcgaagattgaacataaaaaaatacggattaatatttccagaaattagggatagtctaaatctggttgaatttcctaaaaatgaaaatagcaataaaatcgaagagtataatcttcaccttgcttctatcgaaaagataattctattgaaagaaattttacaatttcgcaaaaagatcatttccatctcaaaaacttcatctgataatgatttgtttcactggaatatcccagatattgcattcttggacaaatttacagagaagcagggaatatcattaattaaacataaaacagtatataagaaaacggcctttccctactttaacgatttttttaagagtataacattcaccatcttttacattcgtttgcaagataataagaatgtcttgaaagttgaattgccttataaggcgtctaaggaggacgtcttcgaattaatcaaaaagattaatgcattaaccgttcaaggttatccatatttattaaacaaagcacataatgatgtggtaataactgataagaacattaaggaattactgaaaatagcgaaaatttatgaaacgactaatagggaggtgatgtcatggtaa

SEQ ID NO: 73356 - DNA, 1281 bp, synthetic construct
  source 1..1281: mol_type = other DNA
atgaaggctgcagtcattggtttgggcgtcgaaggaaaaaaagcagtaaactcgctattaaaccacggttgggaagtctatgccactgacttgaacataaacgtggatttatctggtttaaatctaccaaatttgtcacttgatgtaatcgatgaaactcaaaccgtttcaatcgttggagatggcataacccttgatctcggtttcacaaatccatatgacattgatcagtgtgatgcagtcgcgattagtcctagcatgtttggaggagagtttgcaacaaagctgttaaaaaactcaaatttactaagtgatgttgtagacaagcataaagacatttttactatcggtattacagggactaatggcaaaacaaccactgtccacatgttaaaggaaatcttggaaaatgctggtaaaaatgttttagtgggaggcaatgggggtggaggtttctcaggttattacgacttaattctcgaagctaatgaaggtgaatatgatatattgcttgtagaggtgtgtgatatgactctggatttctgcaaatactgttttgattttgacatgattggtcttactaacattggtaatgatcatatgaatgttcataaaaccattgccaactataaaaactctctagttagattctttgagggaaaaacagtattcacagcatttaaccaagattttaacaccgatttcaaagaatctagcgataagaacataccttatttcgaataccaggacgaattaaagttgttcggcaagtttaacttattgaatgcaggtctggccacagccatagcaagggaattgaaaataccgaaggatgtcattaaatcaacactgtctgaatttaatgctgttgagggcagactagacgtgtacaagattaataatgtttcggtgtacgttggtaagactgataattccgacgccttgacgagtattctatccgaaaaagatttttacgctatatttataggcacgccccgacataacgagatccacagattggacattttggatgctgctgttaggtataatccagaagtgattgtactattccctggattggacgatactctggacatggcggtttatcgtttaaattccctcggttatatggggaacatcattacggtaaattctcttgacgaaattatcgaattagttgctgagtacagtcatgaggatgctatattaatagggggtaatggtcaagatacccttatcaacatccaagaaagaatcaagttgatttctgagaatttgtaa

SEQ ID NO: 73357 - DNA, 1188 bp, synthetic construct
  source 1..1188: mol_type = other DNA
atgtccagcggttggagacgtatatcaattacaatatgtttggcacttattgttttaagcatcttattcgtcgccttttccgcagccactaacgcgccgtataccgctcaatccgttgccgatgagtataatcttcctatagggcagtccatgttcgagaaccaatctattttaggtcaacaagattccatatctgtacccttgatatcaaatgttggattcttgcaacaccaaattactgcactcgacattcagggactgcttatgactttgacgacaggtatggtgccatttgatttttcgactgtatctagtgagggtatagactcatatggggacgtggtgaatgtcgaaggccccggctttctaacatttgagggagataagttggctgtaaaatcaccaaataactacgtctgggggtacagtaccccatataaatggttagttaaaaccgacaccggtgtggatgttgttgaaaatggtacagttgttaagtcggttccagaaaatgaaatcaagaacctagattatcataacgattattataatagttctactattagatcctggtacaactatgatgctcataacgggtctacatttactttagaaaaaggaatgaaaggcttttcggatggcaggaacaatattagtgctgctgatgtgccagtaatattcggtcacgatgttgttgattatgcctctgaatacccaactggttctcctattctgctgtactctggaaattacacggaggaagatggtgaagcttacggcacttctttaggaagccatgctgaatatggtgactcaattagggaagtaaacgcccgacaatttgtggatgcctggaatggaacggtcatcccacctaattcaacatcaagtggtaaggactatgtgtactttgaaagcgctgttgacccaactgcgcctggaggcagtgcagcgcacggtgtctgtccgcctgctcgcgctttaagagcagcagtcaccgctgaaggtttcggtctacctgtcggtatgacctgggacgaagatgcagttttgttcgggtacaatcccgcacaggatatcacagttacaaataatcatgactatccagtattgattaaaatgtggacggaaggtgagggtactggcatgggtatttactgccaaatcgtaagatatatcccgaagtaa

SEQ ID NO: 73358 - DNA, 654 bp, synthetic construct
  source 1..654: mol_type = other DNA
atgagtatcagcactattatcacagcggctggcaaaaactccagaatgaggaatgatcagatctctcgaaatattgaactaaccaacaaacttatccttccatttaagaacaagaccgttatagagacaactatagataacgcattatctgccgacatagatgagtgtattgtggtactcggtcattatgccaatgaaattctagaaagcatattcgacaactataaagattcagttaaatttgtaattaacaatcctgttgatgtcggtttgtcagtttcgctttacaatggtttgtccaatatctcttcggatttcgcattgtgcataaccgccgaccaaccgactgtctcaacggaaacttttaaccgcatgatcgaagcaagtcaaaactccaagaatccaaataggacgatttctattttgagaagaagaaaaattggattactggatagtgctgaggggttgggcatgccttttgtggctcaccgtttaaatttgatgaactacttggaaaatgaggacgacaatataaaccccattttaagaaagattttcaatgatggttatacattttatggaataaaggaaaaaaataaaaaagaactgttaaatattaattattacgatgactacctggctctattagattaa

SEQ ID NO: 73359 - DNA, 1236 bp, synthetic construct
  source 1..1236: mol_type = other DNA
ttgaagttgccaagcaggtcaaaatcgtatatgatcccagagtactctgtaacgggtgacctcttatcatacttgacttgcaacttgcaatatcgttaccaaaataaaggtacactaccaccatccaaacctgtccaaagatggtttggggaatttattcatggtgttatcgaggaagcctacatacaatgggaacaaaacaacatgcattttccttgggactggaagaaggatatcaggccaatcgaggatttaatcgatttgagattacaggtacgcggcctttacccattcgatgaggatctgtttttctcgattcataatcaatcagatgaagaactaaccattgatgatttgaatgaacacgaccataagaaactggcaagtgctagagctgaaaaagcaataaatatttggggtaaagatttgttcccgttaattgacgcctctgagcacctcataaaaggcatacgtgacatgcccaactatgatgaaaacacgagtcgatccaattactatgggattaatggtgtggtggatgtttcatcatctgtgaaaatcaataaaacattagaacaatctaattttgataactataataatcggattatagaatacttgaagaaagatgagaatttccagaagaggattgcgaagtttgacaaagatgacgagtatgaaatacttattgattataaaggaatgaagaggccccctgaaaaagttaacaatcccaaggtagaaaataagtgggagactcacgaacaacagatactgacctattcttggcttagatctgaacagaagtcctctaaaccaataatagctggaattattttttacttaaatgaactagttccgagcaaagaggacttgattttaataaaggacgaattaaacaatggactaactgatattggttatgaatatgataaggacatcgagctgatcaacagctggcaagaagatgataaagctcctgaattgagtgacaacttcaaaattgacagatccatcagaattataaatgttgatgaatatgaaagagaaaaggcacttttaaaatttgatagtgtcgtttccaatattgaagaatcactaatcaaggagatgaaaggctgtaaaattcaagatgcctggaagggtgattcggatgaaagaacctgctctgcttgtgatttcaagactttctgtaaaaacaacagtgtcaaaacaaaagactttaaaattccttaa

SEQ ID NO: 73360 - DNA, 1083 bp, synthetic construct
  source 1..1083: mol_type = other DNA
atgttgttgattgctcaaaaccatctacaattaattttagaggttggcttaatgttgtttgtgacattagtcttttgtcttaacttgataccattgtcacttagtattgttaccttcttgtctctattcataatggggggattgacactgctttttggtgcggatattgccctactggtgctattttcaagtcaagcggaatttactcatccatttggccctatcgcattacttggtgctgtaactgcgcttgcttcgttaaaagtcatgtcggaaagcggtgttgatattagaccactgcgtaggtttgttatccttttcttagctgggataaccgtattcggtggattaatgcacagaagcttcttgatcttatggctcctgggtttgttcctaggctacttaatgatctccaaatctttccgagaaaagtctgtttttaccttaaagaggatcatgatgtttttcggtgcagctggtgccggttttatttttttggaagttcttgctcgtgtctctggcatgacaattttctcccctctgctcagattgggtagaattgagcaatactctttaagtagtattaaaatggtattgaacaatattcagttaatagggcataatgccaatgcttcttattggggcgccgatgggactgcatttgctgaaggatatatcactttgccaatgcaattgattttattttttggattgcctttcccgctattctttggtgtgcttgtaaaccagaaggatactattgactatatgcttcccggtatatttggatggggattcgacttcggcatattgggtctcattggtctgatgatatttgttctgggcacgatcatcattggatttaaagtattaaatatgtatagagaaaagagagagaaaaataataagaaatacttgggtagggaagttctactaacgggtgcactcgcagcattctgcgcacaatcactaataggattgtttatatttaaccgctccatcaatggtatggccttgttaacattcttatttgtgggtgccttaattttggctaatgtcgtctccttaaaatcaagatcataa

SEQ ID NO: 73361 - DNA, 432 bp, synthetic construct
  source 1..432: mol_type = other DNA
atgtacttcggattctcgtttatcggactgctatttttaataatgttgttcattccgaatgtgttgtggaataaattccagccaacggattatgagaagtactcaaaaagagaaaacatcattctacttgcttttgaaagggttggccaagtattggtatgcatattctctttattttgtggtgttaattttaatttgtctatttgtgttgccattcctttcatcatcttgatattatatgaattttattggattaagtattttaaaagcaacaagacaatgggtgatatgtacagtgactttcttaaaattccactccccggtgctaccttgcctgttttagcatttgtctttttagggatttgttcagataacatccttttaatattttccactataatttgggaactggtcatactagtgttcatttaa

SEQ ID NO: 73362 - DNA, 732 bp, synthetic construct
  source 1..732: mol_type = other DNA
atgaaatttctagttataaatggatctccaagaaaacagaatacttataatgtgattaaacaagcaaaggttaacttaaatggtgactttgaagagatcaatctaattaaggagaatatccccatgtgtaacggatgttttaagtgtattcttgaaagtgagaccgaatgccctcattacgataaaatcgatccaataatcgagaagttgcacgaatgtgacggtttaattattggttccccagtctatgcgatgaacgtgaccggccttttgaagaacttctttgatcatacggcttacttgtaccatcgtcccgaatttttcactaaaaaagccttggttgttgttacaactgctggtgcaggacacaaaaaagtcgctaagtacattgatgaaacattaaggcattggggcgtaaataaagtctataaaataagtttcgcttgcggtgggaacgattcattggataacgataaggttaataaagtgtctcaaaaatttgccttcgatctaatatcgaacaaactccacagccctaagttcacagacattatattttataatgtatggagagctatggcgttatccaaagaccctataaaggcagataaggaatattggtttaatactggtttagtgaatcatgacttttcaccggaagtcaaactgaatattccaaagatcgtattcgccaagattgtattcaacgttctgaaaaaggcaattaaataa

SEQ ID NO: 73363 - DNA, 1029 bp, synthetic construct
  source 1..1029: mol_type = other DNA
atggttttaagggaaaaccgtatcttctatttagatgaattgagagctattgccatcctatgcgtcatattcgctcatacaattcaaaatttcccgacgaatatggattatctaacctctcccactcttctttcttatctcacagtggctcgaatgggtgtaattcttttcttcatgatttcgggcgcgttgctgattggcagggaatacaatttgtctgactttttaaaaagaagatttgccagagtcttaatcccaacaatattctggcagatcatcggatatttatcagtgctaattttcataggttttacttatgataatttagttcaagcatcggttcaagtgggttttccatggttcgtatgtgcaatcttagggatttatttcgttatccccatatttaattccttcattaaagaatatgggattaagggtgccgaatatttcttgatcatatgggtatttttagttatactgaccaacatgcagctaaatgaaacttattatatcgacttcatattcaacaacgtaggaatatacattggatacgctgtgttaggttattatctcgccaataaagagtttaatatatactcttttcctatggtcgtaatatgctccgttctttttattatttctcttgctttgaacagttactacgcatttaacttcagtcatgtcttttacatagagtcctattcaattattgttcaatgtgctttgctgttcttgatcctgcgctatatgagtaaattagctaaatttagaccaaagtttgtgttatcaaagctacattcatttgttcaaaactcatttattggtagctttatctactatttgagcattttttcctttacgatttacttgatgcacggctttattgtcaatgcaattatcaagtacatgcctgttactcaatttagtatgattccagcaatatttctattgatagcggtaatttctattgtcattgctgcagttttgtctaaaatgcctattatcagcaagttgtgtggtatatactaa

SEQ ID NO: 73364 - DNA, 396 bp, synthetic construct
  source 1..396: mol_type = other DNA
atgaacgatagaggttttgtctcagttgagtacatttttaccctttttatactcttcacaatcggatgcggtttattgttctattccagttccctaattaactcgagtattaatattgaagactctgtatcacataggatcattttaaatgatgtgtcttgtgtaatcagccaagtcaactcaaatggtgttggctattcaaaatacattaagctgccatcggacaagggttattttgaaattactgttgataagtccaaactaacgatagaatatgataataagaaaggtgaaactatgttgcctcttttgaatatggattctaaatacaaattaatcagcgggagaggctactatataagtaagtctgatgacggaaaaattgtgataacataa

SEQ ID NO: 73365 - DNA, 498 bp, synthetic construct
  source 1..498: mol_type = other DNA
atgacaggtgacaatggacaaatttccgcagagttgttatttctgtttggaacactaataatcgttttaatgatttctattgtgtttatttcagatgaaaatgaactaaacattgctatggcagccgcccacagcggtgtcatagaagggcttgctacatcatccagcggcatttatcccgcggatgcttacagtgattattcgaactctaagatgaatgtattggaaccatattctgttgagatagtgaatatttcatatactgaacttggtggcgacaacaattatgataagaaacaaatccagttcaaagtctacgctaaaacctctgacagattcaacaacaaggaattaacttcaatcggtgataggatcaactataacctcagaaaatccattgcagtcagtttcaatagtataaatgccactaataagttgtacaatccagttttttcgcctcattacgtttacacgaccgctaatgttaaatgggtataa

SEQ ID NO: 73366 - DNA, 717 bp, synthetic construct
  source 1..717: mol_type = other DNA
atggatatttctgagatcaatctcgatgaaacgcatatccgtttaacaacagacctaagctgtcatgatttaaaaagatacatattttctataagaagggacttgaagaattacattttcaaaaaccaagaatttgcattgagcttagaaccgattaaatctgaagataaccttccattgattgtaaaaacaatgatcgatgcatccaatattgctgacgtaggtccaatggcttgtgttgcaggtgccatatctcaattgtcgcttaattatctaatcgaacaggattctaaatattccattgtggaaaacggtggagatattgcccttataaatgattcgagcttattgtgtggaatctattccaacaaccaagttctgggaaacgacattgctttcaagattaagcctagaaaaaagcctctggggatatgcacttcatcaggaaagatcggtcactccataagttttggcaaatcagacagtgtcaccgttattagtaaatcatctgccatctcagatggcattgcgacccgagtcgctaatgaagtgaatggtagtaactctgaagaaaaagtctcgaagggtttggagtgcggggaggattacagtgaattttttgacggtctattaataatatcagaaaataatgtgggtactgttggcaggttacccaagatcattgagactaaagagttcgatgtaaagattgtttaa

SEQ ID NO: 73367 - DNA, 570 bp, synthetic construct
  source 1..570: mol_type = other DNA
gtgtactacttgaagttgagtattggtgacaatatggctagaagagaagctatcgaaaacataattaactgtattgacgatgaattagtcgtttgcaatattgggtttccatctcgtgagttgtatgatatcaaggataggaaagaaaacttctatatgattggatctatgggacttgcctcttcgattggcctaggtctggctttagcacagcctaacaggaacattgttgtcatcgatggggacggtgcgctcttaatgaatatgggctcactggtaaccatattcgccaataatccgaaaaacttaacgtggatcgtcatagataatggtgcctacggttcaactggtaatcaagatacttatgctcaaaagcttgatttggtggacgttgcaagaggagttggttttaaaaatagttacgattttgaagatataaatctaaaggagtttataaaaagcgacgacgcatcctttattgtatatcatacagaacccggcaactcaaaagctcctattatcgatttgtccccagtagagattaaaaatcgattcatggatatagtttaa

SEQ ID NO: 73368 - DNA, 585 bp, synthetic construct
  source 1..585: mol_type = other DNA
atgaagaagtttattgtcatagacggattagatggctctggtaaagatacgcaagtgaaattaatagccgaaatgtatgaaaaacaaggtcgtaatgtcgttattaggtcacatccttgttttgacaacaggtatggtagaaaatcaaaggaggcactattgaagaccggtaagattaatcacttgcttgctactgtttatttcgggttagatgctatcagaagcgttgttaagtacacccatgatgataatgttgatgtactcatattctccagatacattttagcggtgatgtacttgccaaacggaataaatactatcgtttacaaaattgtggcattcattttgccgacatccgattgtatgttctttttggacgtcagtccagaagagtctctgcgcagaatcggttcacgaaatgaaaacactgaaatgtttgagaatatcgaatgtctgagaaaaaaccgtctaaaaagtcagaagtttacatataactggaatgtaattcccggcgacgattcggctgaggtaatctctgaaaaaataaaaatgaaatgcattgaaacagacaagttacttaattaa

SEQ ID NO: 73369 - DNA, 630 bp, synthetic construct
  source 1..630: mol_type = other DNA
atgaaattaaaaaattttaagcgtgaaaacatgattcctctacccgtgacgttaatatctaccgcaaataaggaaggaattagaaatattgctccttatagctgtgtagtcactatattgagacccacaaaccttgtttgcatcgcttccgcaatgatgagggatacatacgtaaacattgaagaaaccggtgaatttgttattaacatgatatcagccgatatggtggatgcagttatcccaactagttctcatgtctccttcgaggtggatgagtacgagctcgccggtttggaagctactgaatcaaaaaaggtaagtgccccaggtattaaaggcgcttattcgcaaatggagtgtaagctaacgaaaatctacaaagacaaagatccaattggaatcccatacttgctaataataggggaagtagttcacctggaagttgacgacgactgcttggacgaggaatatggtgttttagatttaaataaggtcaagccgttaatgatgctggaatctgataagggaatgcatttctgtacaattgaagatcttaataaattcgaaacttttggtgcgatgttttcagacggcaaagatcctttggaatggatgtatgagggtgattaa

SEQ ID NO: 73370 - DNA, 2727 bp, synthetic construct
  source 1..2727: mol_type = other DNA
atgaacaagaaactgttgattataagtgttctcgtaatatttatattcattaatgcggtatcggctgaaaattcgacagacattaacctggaactcaatcacaacaatgatgagtgcattaaggaaatatctgatgaaagtagcacagatattgatctaaaaatcaactacgaatatggggatgaaatcaaccccgaaatttccatatctcactgcaacaataatatgaactatacaaagaatataattcattcaaacaattacagaattaccatgaataaattgaatgacggcgccgaatgttctgtttcagtttcagccctagggtacataactcaaattcaaaatataaccataaactcccaatcaaacaaaactactattttcaatctaaaggctacggacatttacaaaatgggatatgacatgacaaaatctgcagacagactccttaacttctcatctgctgacgatgttctggtcattaccacggctggaatgacaaggattaatgatataacgacagaaaacgcattggatggtatttataacgccgctgatggccatataacctatggaaaaggtaatcttttaacattacatgccataagaacagacccaaccaatttcgcattttttattaagaaaggaaacaggttgacaatggccttctatcaaaacgcctctacaactcccgtatacactggtatcggaggtgttggattaactacaaatcaatggaaaaaattaaaagggctcataggtgctgatgacgcttacacttacgtaagtattgctaatgcatggaacgctgggttatattcagatattctgactttagcctcgtatcatggacatgtatgcaccggtttaattagcggtcaggctatggtgactaccctaatcaaatattatccgccacgcggtgaaacgggcgcccagcctcttgaaaatactgcctattatgtgttgggagttccgggtggttctgatgacgatgcattcacatggacacttgacattacgcaaggcaaaatgtcatacatcgggtttgacacaatggagaacaagaatatgaatggtttcatcagatggaacagttcatcaaatacgggtcttttaattataatgtcttatgatgaggcaaagataaaaaatacattcaaaagcctatacccaaatattaatccagacaattcagttactgaagacctgatataccaaaattggttgatctcaaccttgatgtcgaatcctgaatccttagtcacaatcgaggcagcttataaagatcttacattggagcaaaagaaccagttaataggaaaccaattatggagtgcgtcgaatattactgcccggggattggatttggattacattaacagcttaaatttgccagacgccgagatggaaactggaatcttcaacaatgtacatctctctgattcacagttaaaacaaatcggtgttgatgcctctctaaaagctgtcgattactttaagaatatcaatgttactatagaaaaagacatgtcgaacttttatgttttgactggtgcgggctttgtccgtataaatgatactgcaacatctatggtatttgatggtattgaggacattttcggtgctagacttagtagaggtaacctattaccagttcacactgcattgtggaaagatttgataatcgagttttattggttgaatacctctgatatctacaacagcgtcacttacagcctaaaatacaattcaacaactggtcaattatatgaatgttcacagcaatacaatattcaggaccgtagcttaaggtatgaccctccttatgatgctttaatgggctggttattccataaccacgtttgtacgggtagttctcccggcgtattgttggcggataagatatttgacgatttgcctctaggtgaaaacgagtcctacgttttggtgtcaacttacacctactgtaaggatgatatgttatccaggttgcttggcgtgtctcccggtatgggtaattattataacctggcttactccaatagtgacgtaaatgcaggagcactttggaccgctgattctgatataattatccgatggaacagtgagactaataccggaacggctacaattattaagtttggttatccaatctttaaggatggtgctgatgaatacgcggagtggatgagatttgtcaagggcgattattcgtctgaaaatatcgtctcgctgccaactttgagctttgaagttaccaaaccaattaccagagacgattataataagattatctccggcaaatccgacgatgaaggaatcaacgtcttgtcgtatattagagcgctgccagataaaattcctgctgttctaatcgataacaatgggatttctaatggtaatgacggtaactccattaataagtatccaaaaaagtctaacaacaatagtgcaaacaccaatagtatcttttcatcttcaaataattataactccccgagcaagggcttaaaccctaatgtgggggtctcttcctattctctttcaggcgatagtgatgtggaagataaaggtgaagcaagttctaatgggaagtcctatgaagtgtccaagacgcctgcaactaaatccattgattctaatagtttaatttacgcactagttggtgtgttggctattggtatcttaatcggtctgggttttatgaaacgtagaaagtaa

SEQ ID NO: 73371 - DNA, 1014 bp, synthetic construct
  source 1..1014: mol_type = other DNA
atgatgattttgccacaaatccctttgtatggaatagccataatctgtggattactatcgttctttgtcagccgattgactatgccaaggattataagaaaacttgaagcggctgatattgttgggaaagatattcataaatcctggaagcccgttgttgctgagatgggtggattcggtattctttttggatttataataggaatattttccggtatatacatgcacgacatcttaacatttaatttggttgttgtccttgtagtgatattgctcgttgggataatcggtatcgtggatgacttgcttgccttgtcttcaaaggaaaagttctttttacttttcctggcaggtctgccattaatctgggtggcaccacctaatgtaggattattatacctgataactattcctatcgcactatctgtcggatctaatctaacaaacatgctcgccggtttaaatggcatcgagtcgggtctgggcataatttcaatggcttcactaacaatagcctgtattattctcggcaaatacgacgtaaccattattagtatgagtatgctgggtgcattgattgcatttttatattataacagatatcccgctaaaattttccctggggacaccggtactttaataatcggtgctgcaattgtttgcattgctttcattggccgcgtgaagttaattgcctttattgtcttaatgccgaatattattgatgcggctttaaagttctactctgcgggttttatgaatcgtcagcagcaaaaaccaacgcaattaaacgatgaaggtaagttggtaaggcctgatgttggttttaaaagtttgatcagattgatcctaagaaaaccaattgcagaaaaagatgccgttagattgatctgggctattggctttgtatttggcatattgggtattgctgtggctctaactatgccgggggtccttgaaagcaaaacgctaatgaacttcttacaaatcaaggaaatgttgtatcatatttaa

SEQ ID NO: 73372 - DNA, 4047 bp, synthetic construct
  source 1..4047: mol_type = other DNA
atgaagattaagagcatatataaaatattgatattttcaatagtcttgctgattagcttgtctgcagttgcagccgaagagagtatggataataccacaagcaacgatgacgtgctaacctcagattcgcatgatgacgtcttaaccctgaatagtaatgacgatattttgacttcttcggaaaaaacatggtatgttggaaaaaatacgactgtaggagggagcggaacacaagaagacccatttaataacattgaattggctttaaatcattcatcaagtaatgatacaatatatatcaaccccggtgtttacgacggtccacacaatacgaatttgaaaattgatattgataacctaactattaaggcgaaaccaaattccgtattattaaatgcaaatattaataatacaagagtattcgaggtgaccggcaacgatgtttcaatctcaggtttaaacttctccaatgtgtacatggaatatggcggtgttattaagtgggatggtaatggaggatcactaacggattccacgattaaaaactccaagtcccgtgttggttctattaggtgggaaggcaataatgcaataatcaacaacataacgattctcaattctacgtccgaaaatggtatacttgtcatctcaggtacctcttccaatataacaaattccacgattagagataccaaaggttactatggtgcagttatgtttggtggtaaattcaatataattgataactgtacttttataaacaacactgcatggatgaacggtggtggagtctacgactggggtgcgaataacacggtaagtaattctttatttatagctaacaacggaactcggggtggagcaatcctgacgtatgaaaatcaaccaaacaggatgaacataatcaacaatacttttattaacaatattggcggacaagccggtgccattgtagtaagaagagccggggcaaacattgataactgcactttcatcaataactcagccggatctgctggagctgttttaatcttgtctgaagcaaacatcaccaactccatttttgagaacaactcggcttcaacggtcggtggtgctgtatatattacaggtgatgggtccacgattgacaattcgatatttatcaacaataccgcgaataacgatgggggggccatctactggagcggcgaaaacggtactgttaccaatacaatcttcattaataacacagtaaacaatgggacgggtgaagccattggttatattaataacgtgacattaaataatgttactttggtaaacaataatattgaacaagtaattgtcaacgaatcaacaccaacattcgaatatgtgtttaaactaactgaaggatacagtaacgttaaattaacagacaattataccgccttttgtactgaaaagactaaatggtcctcgtcccctagaaccccactgataccccataatgatctttccatattgaagaaccatataactggtgaatcggtagcggagtacttgaaaatactgatatacaaatacctgaaagatccagacagaataagaaatttacaacaaaaaatctggatattcactgatgacaattacattgatagtactgattctataatcaaagaagtcatttctgattataattctggtttccgtattccgaatcaaggattttctgaaattatcaatgatacaaccgtacttagaatcgactttaaatcgtataatattactaagcaaatccaaaacatgataggatttaaatcgagtatcgaaaatatcacctacaatatgagtgtcgttaagaatacactaactccagctgttattttgggtaatcaaacaacttttgaaatcaaggttactaacactggtagttactatttgacaaatgttagtgttattgaagatggctacgatgggttaatctacaacagttttagcgatcccagcggaaaatggatattttcaagaaacagtgatggaaaaccaatgtggacatataacggtactctttatgttggtattagctacagctttaatgtaacattcaatactacaaaaactggtaatttcactaatttcgtagttgtcacatctaatgaaaccgacaacaaaaccaccaacaatacgaccaaggtgtataagcccgatatgactgtcgaaaagctttctttgaatagaacagtctacgttggtaaccaaaccgtctttactatcgttgtccgtaatacaggggattgtgatctaggtgatgtctttgttgtggaaaaggcgccagaaggacttgtttacaactcatttaaaggcaccgactggtcatacaacaatggcaaatttacttatggcaaagtgttaaaagtcaacgagtctgtgtcttttgagattgtattcgatgctgttagtcctggtaattggacgaatgtagttgttgccggttccaatgaaactgataacaagacaggcaataataccacgaaagtctataagccggacatgactgttgagaagctttctttgaatagaactgtgtacgttggcaatcagactgtctttactattgtcgttcgaaatactggtgattgtgatttaggtgaggtcttcgtggtagaaaaggctccggaaggactagtttacaactcatttaagggcacagactggtcgtatgacggcaataagttcatgtatgggaaaaccttaaaggttggtgagtctgctagctttgacatagtatttgatacaatttctcctggtaattggacaaatgttgtggttgcaggctccaatgtaaccgacaacaaaacaggcaataatacaaccaaagtttataagcccgatatgaccgtggagaagctgtctttgaataggactgtatatgttggtaaccagacagtctttacaatcgtagtccgaaatacaggcgattgcgacttaggtgaggtcttcattgttgaaaaagctccagaaggactagtttacaactcatttaaaggcacagactggtcatatgatggcaataaattcacatatgctaaggtattgaaagtcaatgagtctgttagctttgaaattgtattcgacgctgtgagtcctggtaattggacgaatgttgtggtggcagggtccaatgaaacggataacaaaacaggtaacaacacgactaaagtttataagccggatatgactgtggagaagctttctttgaacaggaccgtatacgttggtaatcagactgtctttactatcgttgttcgcaacactggtgactgcgatttgggggaggttttcattgtggaaaaggctccagaaggacttgtgtacaactcatttaaaggcacagactggagctacgatggcaataaattcacatatgctaaggtcttaaaagtcaacgaatctgtgtcttttgagattgtattcgatgctgtcagtcctggaaactggacaaatgttgttgttgcaggttcaaatttgacaggtaataagactggtaataatactacgaaggtttataatcctggtttgaaggtggaaaagatcactttggaccctgttgtgtctgttggggagattacatcttttgaaattgttgtccgtaacactggggactgtaaactaggtgatgtttttgtgcatgaagatagttatgaaggtttaaggttccatagtttcaggggagatatgtggaagcagaaaggagacacattctattatcagggagttttaaatcctggtgagtcagtgtcatttgtaattttatttactactctcaaacctggaaatttcactaatattgttacagctggttccaatgttaccaacaatactaccaccgaaaacaaaaccaaagtaatagaaaaccacactaacaacaataccaatggtactaacaaaacagtcaacaacgaaaccaaagaggtaaatgtgcacaaggtggatacttcaagagcaacgggcaatccattactcgccctactcatggtacttctgatgatctcggtgacctctgttagaaaattcaagaaataa

SEQ ID NO: 73373 - DNA, 789 bp, synthetic construct
  source 1..789: mol_type = other DNA
atggataataggaaagtaattatcatagctctgatagcggttattgttgttttaggtggtttaattgcttattccttgtttactcaaaaccaagtccaataccaaaccatagctgtttccaatgcaactactatggaagtgcccgtctctaaaaattcaacattcttcaatgacgcactaggaatcaaatactatcaggatgacaaaagcggtgttcaggtgattagctggaacggccaggaacaagcatcagctaaaggtgcagtaaatattgcctctcaattcgagaagcaaaaggcaggaacaacgcagtcaattgaaaacggggtgccagtttatgaaaataaaaaattgagatgttttataattgaagttaagaacgctaccacgaatgacaacattataatcgttgcaaaggataagaacgtggctttgcacatgcttaagtccatcaaattcggcgtaagcaacatcacaaatgcggctcaagtcgaaccttacgctgaatctggtggaaaccatctcaatgacaataatgacactgtctttgtcttttatccatggtacgtatatgatgaaggtgattacgatgcctacgatgactattcttcgagagattcagaatacgccgatgatagttattacgattactcttcaagtgattccgaatatgccgatgatagttactatgactattcttcaagtgattcggaatacgccgatgactcttatgatgaggaatatgacgagtcggatgaagattatgagagttccgaggactttaattaa

SEQ ID NO: 73374 - DNA, 507 bp, synthetic construct
  source 1..507: mol_type = other DNA
atgaataccacaaaaaaccaatccatcgtatatgatgagaaaacaatattcaaagttaaggaaatgatagttgccggattgaacaagcttaagctgtttaaatgcaaaaaatcagggaacttagacttctacaatgatttaaaagaaacgtttactgaaattgctttgaatctaaaggaactgaagttgtggaacgagttggattattttctttcaatttcactctatattgaatacattgtctataaaaattcgatcgacagctctttcggccactgttcttttgcaattgagttgttaaatttttacatcaatctaatcaagactagttctgattattatctaaatttaaccgaaatgtccataaaagatttcggtatatatcaaaacgaaacaaaaacgagataccgtcaatataggagaaagtttcatactgacgtttacgtgttgagcggtaatttcactgaagatcagatgtacgaaattcatgctagtttaagagagtaa

SEQ ID NO: 73375 - DNA, 1059 bp, synthetic construct
  source 1..1059: mol_type = other DNA
atgtcggagaagatctgtagtaactgtggaaacaaagtggatggcagtgcgaacttctgtccaaagtgcaaatctcaatcattcagaaacattaatgaagttgcaaaaccaaaaagtggtgttgttcacaagttattctacaaatatcaaggtggttactttgcagtgtccaagtcaaagatagctgcaatcactacgtttattttattcgcttcattaggctttgaatccccaaacctaatcatatcctcagtgataattgccttcttggtttatatcataggttttgctataagacgcatcaatattattaaccaaaattcaaaaatgtttttcaggaataataatttaggtctgatcaccgatctaatgcatctgtttgctttttggcaggaccgtgaaacgggtaaatttgcattgtctaaaacaaaactaatttccattttgatattttttgtttttgcgacatctggactttcactgccaaacgctacacctattttagcagcagtattcggtttgatatttgccttgcctgtattcgtggtcgggtatggaatccacagacttacaacttctagacctgttaaaaagatagtcaaacaagctgaaccagataccgggaaaaaacatgatgatgccagcaatgcaaaaaaagacattcacatacatgaatttgacaagtacagggccaaattaaatgaattaaaggtcagatatgagattaaggaaaagaatgcccgtaatctcattgccaaaagatttactccgccccaattgacctatgataagttcattgcgtctgttgacaagtcgactatgatgtttaacagtcatgctgaggtaatatcgaacatccttgatttggcttcccaggacagcaagaagatcgatgacgaactcaatgaccgattcgatattctggaagctcttgttgaaaaaattgatgagttgattgatgagctagtcttgagcttaaacgatgatgaaaaagaaggcaatccctctaatctattaaatgacttggatgatttaattgattctgtaaaaaattactaa

SEQ ID NO: 73376 - DNA, 519 bp, synthetic construct
  source 1..519: mol_type = other DNA
atgaatggtgccggtgctatcgactctgctaactggactagtgctgatgtaggttatgaaacattcaaaatacctccccaatatgaaaatccatactctagtgacttcgacatgtatgaatttgatgaagacattgatgtttttacgatcagatacgtaaatccgaatctcatggatttatatgggcattttctaaatgaataccacggaaaaaaggtcaacgttgcaggccatgatgccgttcacttcacttattatgataggcatgataagaccaacaattcagtgctttggttctcagcgggtgaggaattttactatatcaattggattggcagcaatattacccctgcaattaaggaagtggtcaaatcttccttaaaatccaactacacgcataaggagttttacagcatattaaacgataatataaaaattacaatactgtcgattccattgaacttgaaaggattgattatcctactttcgtctactcacacaacttcagagatggtttaa

SEQ ID NO: 73377 - DNA, 891 bp, synthetic construct
  source 1..891: mol_type = other DNA
atgactaatcataaacacctgaggacagttattgaagatatatactcgaatggaaacaagctaaccgaagaactcactgcccgcctaatacatgaatttcgttactccaatttgtatataccatctaaaaaagaagacaataagctgaacttcataatttatgaggatgatgactccaagctaacaccattattcactgatttggatgaatttagaaaattctataaggatgaggatgttcgtgcattgcaaaacccttttgaattgtatcagaatgtcttgaagacaacggatattgaaggttacatcttaaatcctgcttctgaaaagtatttgtttaaaaaagaatttattttagctatcaacaatattccaaagactgacttttacactaccaacccctactcggaagaggaattattaaacatgaaaaggagtgtggataataaaaacttggaaagatttatagaaaaccgagctaatatcggggacttcgagggattattcgaacaaatggctaattcacagttatttgctttaatgttgagcgatttgaaactaaataaggagatgatttcacttaaaaaaagtggtcctgttgcggccatgtatactgataatgtaggtggcatctatgcaacgttatttacatctgagagaaaaatggatgcagtaaagacaaaaaaatacaagtattcccaattagttaatctggcaacacttgtcaactttatcctgacggaggacatggacggccttattgtaaatccggaaagtgacaacgtgttggttccaagaaccaccttgcttagatactctcttggtttcgagatgtatgccaatgatgaaagactaagcgaatcaatgttttatctcttcaggattgaataa

SEQ ID NO: 73378 - DNA, 306 bp, synthetic construct
  source 1..306: mol_type = other DNA
atgtctaaattttgtcctaaatgcggtgaagagctcgttgatgatgcgaaattctgtaaaaactgcggtgaaactataaagacggagcaggaaacacaaaacaatgaagttcaaaatgttgaaaatgaccataaaatcgctttaattcttggatatgtctgtgctattctaattccattatttggcctgatattcggtatttacttggtgaccagaaaggatagttccaaggccaattatcacgggaagatcatcattggaatagcaattgtaatatggatcatttcatttttgttgatgatgtaa

SEQ ID NO: 73379 - DNA, 339 bp, synthetic construct
  source 1..339: mol_type = other DNA
atgaagaataagaatattttgttgattgctatagcggttctagttgttgcactgatcgccgtgggagcttacacaatgtttaacgggaatactcatttaaacgttacagacaacaccactggaatagacaatagtaccggcattgataataatacgactgtggtcggtgataactctccacttgagaacttaaccaacaataatacgacatataaagtatacaatcctcaatccgattcatatgtacccgttattggtgaaaaattcgatgaagaagtaaacagatggtatacttacgatgaccagggtgtcaggtactataatacaagaatcaattaa

SEQ ID NO: 73380 - DNA, 1092 bp, synthetic construct
  source 1..1092: mol_type = other DNA
atgactagacaagaaaaaatcattaaaacaagtgtgataggcatagttgttaacctaatcctcgttgcctttaaagcaaccattggaatgctagttaattcaattgccattacattggatgctgttaataacttaactgatgcgttatcttccatcataacgataattgggacaaagttagccggtaaagcgccggataagaatcatccttatggctatggtcgcgttgaatactttgcttcggtaatcattgcagctattgtgttgtgggcgggtattactgcctttatggaatcatggcctaagatactaaatccagatgcaacgtcatatactgctgttagtttggtcataatcgctgttgccgttttggttaagtttgctcttggcaaatacgttaagaacgtaggtgaggatattaactctcaggctttggtcgcatctggaagcgatgcatttttcgatgcagtgctgtctctttcaacattaatagctgctgtcatttcggtatttttccatgtttctctagaaggaattttaggtgtggtcatttctatcgtcattatcaaggcaagtgttgacatgcttagagaaacaattgacagcatgattggttcaagagtcgactccgagctctcccgtaaactgaaagagtacatctgtgaaattcccgaagtgtatggtgcatatgatttgagtttacataattatggtccagaagatatgcgagggtctgtgcatattgaagtggatgacgatctgaccgccttcgatatacacagcttgaccagaaatattgtatataaggtatacgacgagttctcgatagttttaactattggaatctacgcaagaaacaatgattataaggatgtccgtgaagatttatacaatatagcttcaaaatatgaggaaatcatagaaatccacggttttattgtaaacaaagatgaggactatgccactttcgacattatcgtcgattttgatgctgacagggagaaggtaaaagaaaggatttacagtgaaatcaaatccaaacacccagaattggactactatataattgatgactacgacatatccgattaa

SEQ ID NO: 73381 - DNA, 2688 bp, synthetic construct
  source 1..2688: mol_type = other DNA
ttggaatcagacaacgtcagcaagaatatttctacttcattaaataagacgcaaaataaaacattaattaataacgaaacgtacaaaaaaacaacgttagaattttcccctataataactgaatatacttcaggcaacataatttacaccgttaaagcttattcattattgaactataatggaatgaaatataaagatcctaaatacaactccctgattaagataaagctatatacaggtaactcttttaagagttactcatcacacatagacaataacggcatagcttctatcaaggtccctgatctatctattggctaccacaaggttgagatcttcattgataacgtgcaaggcgccacatcatacataaaagtgatcaagtctactactaaggtatatgctccaactacaattataaagtttaagaagaatatgaattataaaatcaaggtcgtcgacagtcataacaatcctgtcaaaaatatcatacttaaagttaaggtttatactgatagcaaatataatatctatagcattaagactaattctaaagggttagcaacacttaaaatcaataaattatctttgaagactcataaaattgtgattaccactaacaataaaaattataaaattaacaaaaactcaaagattttaattaagaagacaattccgaagaagatcgaaaccctaacggtatcctcgcccaataaaaccatacaaaggggtacttctttcacgattaaactaacagatgactataatgatattgtgaagaaagtttcgatcaaagtcaacatatacacgggtaaaaagttcaagacttttaaaattacaacaaataacaacggtgtggcgaagctgaaaacagacaaactctcattgggaactcataacttgaaaatagcctccaacaataaaaattacaaatttcataagacttttaagataaccctcgttaaaaccattatccatgacgatattaaaactctggtgttgaaaaacattacttactaccagacaaaagatggaaaattcaatgctaaattaggttggtactctaaggttggaagttcataccaaattttaaggaaaacgaatgagaactacaacataatatctaccgtcaagtccaattcatcgtttacaaccttctatgataagattgatggaaatgcttcatacacctactctgtcagagagattattgtgaaaaataatgatattatactagggccatatgataaggaaggtttgaagttgttgaagagcccgaatattactgctgattttcagaatttaaaagctgaaatcacttggaataaagttgaaggtgcaacaaagtatatcatatttagaaagatcggtagagatgctaattttaaagctatcggtattgttaatagcaatgtattaaattacactgatttttactataagaccccaaagcaattgagaagtatcctcaacagtaatactttcgttgatccatcgtttaataacttgttttatacagtacgtgcatgtactgtcaagaatacctctggtatcaaccaaataagctacgggtcgtacctaattgatggggatttccacctagaagcaccaagtattatctccctgaaggataatgaaattaaatggggtaaagttccaaatgcggatggttatttgattcttaaaaagaacagtgacgatgacgaatggaccattattaaccaggttgcccaaaatgagtccaacactatcacgttgaagttgaataacatcgaaaacagttcttattactcggttaaagcattcgctaaaaaaaatggtgaaatcatttacagtaagtttgattctggctttagtctaaaaaattactccaaggacaactcgaaatataaaatcttatatttcggagatagcattacgtacggttccccttacaaatcaaattcgaacaaacacattttttctattccctatagagtaggagagttacttggatgcgtttactataatccctctattccaggttccacttatcatgacctagggcaaaaagacggaaagaatattgagaatacaaaatattatagatatcggatttgtagagaggtggttgaccagatatctataggtgaacttccgggcaactggaaagagcttgataacttaaaaaatagtgaaggtataacaaatacatatattgacgactataacattgttgtactcgccgcaggaaccaatgattacctggataactccatattaggctctataaattctgttgacacacatacattcaatggtgcccttaaccatatcctgaataaaatagagactgcgagcaagacccgagtggaaagaggtgaatcccctatcaaagtaatattcgtagacttgtgttattcagatcgtgcctatgacaagacgataaaagaaaatagggatgtaaccaaaaacaaaatcggtttgacattgaatgattatcaaaacgctttaaataagcagtacaataaatggaaaaacaataactttttaaccttgtataactttaaaacgcgcgattataatattgttaatcaagaaaactgcccatatactacatcagataatctgcacttttcaaaattcacttacggccaatatggtaacgcatttgcaagtttccttaaagaaaatatcttctacaactaa

SEQ ID NO: 73382 - DNA, 1203 bp, synthetic construct
  source 1..1203: mol_type = other DNA
atgaaatcaaagcaagacattcagttagaactgcttcaggaaattgatgatatatgttccaaaaatgacttaaaatatatcttcgtcggaaagaacgcatttaacgcttacgttaatcatacaataaagaataataatgctcacgtgtcagtcgccatgacgttgggcgatattaaccgattctgcaatatcattgagaaacaaaataaccctaatcgttacgtagagagtatgtttaccaacccaaaatatattcccttgtatatatcttatggtaatgaaaacacgactgattaccacatgatcatcttaaacaataacctccatcatggaatcaatattcgtatttatccaatcatcaaatccgttacattggatgacgaaaaaattaagataatggatagtaaaatatataaggaatataaattcaggaaatttttgaataagaagattataaacaagaagttcttgcctataaaaataggcatctcgttattaaataatatctacaacatttctggttttagaaagaagtaccctgacaaaattttcaacaaaatatacattgacaattgggatgacatacaaaactattccaaagtaagaattggaaaaaagataattaatagcgagtacttcaaggaacttacaagatacaaagtggacaatatagaactaaattatccgaaggataccgataactattttaaacaaatttacggtagaaatatagagaatgtaaatgtagtgcttaagccagaaagaaaaaacgcaatcgttgatactgaaataggttacaagaagattattaatgagacaaaggatttgttagatgaaattaggtcgactcatgaagaattggtctgggggagatttaaagttcgcagagaaaaaaagtgtgttgatgatgtttggaaactcgtcaagatgactaactctcagattaaatatattgacttttttgaggaaaatatcgattacctgctgagtttggatctaaatgacaaatctcaatttgaagaaatggaaatcattttaaacccaattatcaaaaagttacaaaagtatgcgaataaaggtatgacctttagcattgatgagaaaactgattcactgattaggaaatttttgttactaaaaaacaatgaaaaactaattaataagatagacgaaatcaacaaacttaaatatttcgttgagtaa

SEQ ID NO: 73383 - DNA, 387 bp, synthetic construct
  source 1..387: mol_type = other DNA
atggatctcaaaaagattgcaattgtagttagcatactgcttatcatagctattggtagttttgcgtacatctctttgaacactcaagaaacaaaagtcgacatcattactcaaaacaccatacacaatggtgatattattacagttcagttgaaagatttatatagaaacggtatcccaaatcaggccattgatttgaagattttagatgactccgggtgggctcataactataatgccactaccgatgaacttggtatcggtcaaatacaaatactaggcttggagaatggaaattatacggctcatgcaaagttcaatggcactctatttttaaaagaatcggcaaaccatgtttcattcgaagtgacagacggatacttttaa

SEQ ID NO: 73384 - DNA, 1071 bp, synthetic construct
  source 1..1071: mol_type = other DNA
atgtataaagtggtcaatggtaggaaaaggattttttacttggactttatcagagcattggctattattttagtagtattggctcacgttactcgtgctttttttcaaaattcccctgccggctcctttaacatgtgtttcgtttcgcagtttatcgattttggtgttattggtgttccattattcctcatgatcagtggtgctttgcttttaaacaaggattacgaacttggagatttcttaaaacgacgctattctagagtcctggtcccattccttttctgggcgatgatatttccgattagcaaaattctatttgaaggccaagttgcaacggttgctaattttataaaaatgtacttcgattctaacttttggtttgtttggatgatcctgggtgtctatctgttcattccaattataaactcgtttattaaggagtatgatatgagaggtgtagaatactttttattgatctggggaggagtgatgtttttgaacacaatcgggcagtacccttttcatcaacttgaacttagctattttgctggatacttgggttattttgtactgggctactatttagccaataagaaattccgtttgtccgactcaaagctactagtgatttcattgctgatatttctaacattcaccttcattaacattgattatacaatcacgatgtgcatcttaaaaaataagttactctattacaagtatgaaactattgtcactgtagtgcaatctgcgggattgttcatgtttatcagatatttcgcattggttagttcaaataaaccagagtctattaaaaacagaatttacctattctttaaagattctttcatgtttaaaataatcttctcaataagtactttctcttacggtatttatttagcccattataatcccttgtttttccttaaatacgaatataagatactattcacctttaatcccattatatggttaccaatcatgatgattgcaataataggtagttcatggtttattttatggatttttgacaagatacctggcttaagaaatataaatggggcacattaa

SEQ ID NO: 73385 - DNA, 819 bp, synthetic construct
  source 1..819: mol_type = other DNA
atgaataaaaagataggtttcattctagctttggtagttatatctttaatgatgtgttcgactgtaagcgcaggtttgtttgactttatgggcggaagtgattcatcaaatgacgataatacgttcgtggttggttttgatgccgaatttcccccatatggatacaaggacgatagtggcaactatacggggttcgacctggatttagcaaaagaagtttgtgaaaggaataattggacattcaaagcccagcctatagactgggatgctaaggatgtcgaactcgattctggttctattgactgcatttggaatggctttactatggatggcagagaggacaactacacatggtctaacccttattttgacaacaaacaaataattgtggtcaaatctaactcagggatcaacactccggccgatttgaaaggtaaaatagtcgaaacacagaaagattcctcagctttggctgctcttcaaggagataacaaaactttagccgatacctttggaactttaacagaagttgctgactataataccgcattcatggatttagagtccggggcgtgtgatgcaattgctatggatattggtgtggcagagtacgatattaagaataagaatgcgactagtgattaccaaatcctaaaggagtccattaccagcgaaaaatatggtattggtttcaagcaaggaaatacggatttgaaagacaaagtacaatctaccctggacgatatgtttaaagatggtacagttgccaagatcgcacagaagtatggtatctcggaagacgctcttatccaaccataa

SEQ ID NO: 73386 - DNA, 651 bp, synthetic construct
  source 1..651: mol_type = other DNA
atgatcttatctaacgtgattgggcaattgctcggcggtatggttacttcggttgaaatattcttacttacattattattctctcttcctctcggtttggttgtagccggaggaaggatgagtaaattcgccccattaagatggctaatgaagatttatatcagtataatgcgtggtacacctttaatgttgcaattgattatcgtctttttcgcaccgtattatgtgtttggtatgagcctatctgcagactaccgatttatagcagtcattattgcattcacaattaactacgctgcgtactttgctgaaatctacagaggtggcattgaagctattcccaaagggcaatacgaagcggctcaggtattgggatataataaatttgagacctttttcatcatcgtgttgccacaagtatttaagatagttcttccttcaataactaatgaggtcattacgctggtaaaggatacttccctatcctttgttatcgctattccagaaatgtttaccgttgccaaacagattgcggctgctgatgcatcaattgctgccttactggttgccggtatattctactatgtgtttaatgtaatagttgcatttgtcatggaacatttggagaatagactggattattatgactaa

SEQ ID NO: 73387 - DNA, 684 bp, synthetic construct
  source 1..684: mol_type = other DNA
atgagtttactggaaataaaaaacctaaagaaaagctttggggataacgttgttttaaaggatatatctcttaacgtggacaaaggtgaggtattgtctataattggtccaagcggctcaggtaaaagtacattgctaagatgcataaccgatctggaacaggaagacagtggaattatcaactttgatggcgcattcggtttggttttccaagactttaatttatttccacaccattcggttattaaaaatattacgaatgctcctctacgagttcaaaagagggataggaccgaagtgttcaatcacgcccgccatttgctcaagaaaatgggtcttgaagataaggaagacgcatatccctgtgaattatccggcggtcaacaacaaagagtctcaattgctagagccttggcaatgaatccggatatcttgttctttgatgagccaacttccgcgctggaccctgagttgactggggaaatcttagctgtgataaaacagttagctgctgataatatgacaatggtcattgtcactcatgagatgaattttgcccgtaaagtctctgactcaattattttcatggaaaatggagtaatcgttgaagaaggttcgcctgaggaagtattcacatctaataacaaaagaatgcaagaatttcttggaaagtttaacgattaa

SEQ ID NO: 73388 - DNA, 723 bp, synthetic construct
  source 1..723: mol_type = other DNA
atggtaaaggtttcagtcatactgactgctttcaatgaggagaaatatattggtaaagctattgacagcatattgaagcagaccttgaccgattttgaattaattatcgttaatgatgggtcgacagacaacacgctaaacattatcaactcttttgaagatgaaagaattaaattaatcagtcacgacaacatagggcctggagcctccagaaataaggcactgaatattgccaagggtgaatatataatgtatcttgatggtgatgattggtatcgagtcgacggcttggaaatagcttacagtgaagcaaaggataaagatactgactttaccttctatcaaatgatcaattatgatgaaaagactggaaagacatatgagaatgattggttcaacttaaatatctttgatgaatcatttgaaaacactgttttcaacattaatgattttaaaggtagcatatttgacttgtctgtgggtgtttgtcaaaaaatatacaatacatcattcctcaagcgtattgatgctaaatttccagaaggaatcttatttgaggatatgccctttttttactacgtactattaaaagcggacaaaatttccattattaaacaacagctttactacaggagaaaacatgacggttctatcacacatgtggttgatgagaaattcttggatacggtcccagcaggccaagaactaattttccattattaa

SEQ ID NO: 73389 - DNA, 273 bp, synthetic construct
  source 1..273: mol_type = other DNA
atggaaaatggctggtacgatacttacaaatttgacctactcgcctataagattaatggaccaaggtttgctttaagagatatcgaggaaaattataagattcctctttacatgttaattaagaaagactaccatagtataaaacaatccaaatactatcaggattatttggataacttgggtcccgttaagaaaaaattcttcctggacataatcaaatcaaagaattataacgactatttggcattaaactctgataaagataattattaa

SEQ ID NO: 73390 - DNA, 1698 bp, synthetic construct
  source 1..1698: mol_type = other DNA
atggctttgataggaaaaattaataacttgaaggaatgcttggataacaccaaaatttatgacagctactactctgccgaaatcgatgaaagcattatttatctggagtcaagaaacggcatggatttcactggaaatatttttagaataactgaagagttatccacaggcaagtacggtaactttaagatatatgtttatgcagcaaaaagtattaaggctaaaattgagctctttaagcggaattataacttgaaaataactaaaatcataacggatgaagatgaggcgacgaagatcctacataaagctaaatacatcttcacagattcaggcattagatataaatatgttaaaaaacccgggcaaattttcgtcaatacctggcacggtactccattaaagctaatgggtttcgacaacccatcagaaaagcataacgtaggtatcatccagagatcttttcttttctcagattatattttgttcccaaatgaatatatgttggacagaatgtctcacgcctatatgatcgataaagtttatggcgggacattcctactagagggatatcctagaaatagcgtcttcttaaaggataactccaactacaaggaaaaattaaacttaaaagataaggaagtttttgtatacatgcctacatttaaaggtattgtgaacaataggaaagatgaaaaacaaaagaatgacgtcaacaagttcttgaacaagttaaactccaagttgaatgacaaccagatattgtttgttaaatttcacccttacaatcaatccaaaatcgacttctctaaatttaaccatattaaagagtatccaaaaaactttgaaaattatgatatattaaatgctgctgatgttctcattactgactattctagtgtattttttgactttgcctcgactagacgcaagattattatctttaactatgaccaagatgaatacctcaaggataggggattatactttcctcttgaagatcttccattccctaaggtccaaaatattaacgatctggtatgtgagttaaattctccgaaaaattatgacgatacaaagtttaccgaggaatactgcaaatatgattcgaccaatagtgctgaacatatatgtgaaactgtgattaatggtaagatcgaatgcgattacaagataatcagtaatgcaaataagaatatattgatttacctgggttctatggagaataatcaggcaaagtcgcaacttattcaaatccttgaaaatacggatgacaatatcaatattttcctgtcatttaaaccttggaataaaaatattaaagaaaaccatctgaatttacttaaggacattccaaatactattgaatttttaccgctaagctacaacttaaccccaacattcaaagaaaaagtggagttgaacagattcataaaaaaaggtactgatttgaacttggaactaacagaaatgtttaacaggaattataaacgtcaatacggtgattttaaattcgatttgattattgactttataagtaacgatcccgaacagtcactaacatatgcatgttctaattcaaagaatgcgattatcataaatgaagaaacccaacccaaagtttacaatcaatttaataaaatttaccgtttatccgagttcaatataaagaatatatgtgacgaaataatccgataa

SEQ ID NO: 73391 - DNA, 855 bp, synthetic construct
  source 1..855: mol_type = other DNA
atgaacaggctaaaagctgctaaaaccatatcggcgatcaccaacccccctatcatctgcattccattatttttgatcatatgtatcattctatccaatggaaatttcaattctttcatcgttttggaatccatttcactggttttcacatccattctaccaatgattattattgtctattgggctaaaagattggatactgacagagatatttcaaatcgtaaggaccgattcactcctctcattgttggtatcatatcatatttcatcggttttctggtctccttaatattggggactaacgactttctaacagctcttcttttatgctactctataaatacgggagtggtactgctgataactgtaaaatggaagataagtgtccacacaacgggactttcaggtcccgttggtgcattgattctacttttaggcccaactggtgcattatttgggataatttatccaattttgatctggtctagagtaacattggaaaagcatacctcggcacaggctattgcaggtggtgttcaaggtttttttttaaccgttctagagatgtacatgttcatttcattgtttaacttcaacgttggcaatttagtgccgttgactgattgtatatggtacattttggctataatatctgccccagtgattttaggcatcctcagttacgctcatatgaataaaatcgtatttagtgccgccgtgatcattggatttacagtctttttagaatacgcgcctttaagtgcatctgtaatatatattcttgtctgtttgacgagctgtctgattagcttgtatgccggtgaagattatgagtggtctgatgttttaatttaa

SEQ ID NO: 73392 - DNA, 1386 bp, synthetic construct
  source 1..1386: mol_type = other DNA
ttgagcaaaaatgataatatcaagataataactggtgatcctaaaaaagctattgttaaattggccatcccaatgatgatttcaatgttactcatcatgatgtataatattgcagatagtatctgggtagcgggcctcggtgcagatgctttggctgcaatcggatttattacgccactgttcatggttttagtgggtctgggcaacggtataggtgccggggcaaattctttaattgctcgaaacattggtgctaaaaattacaaacaagcaaataactccggcttacatgccatcttattgtctgtcattgtatcggtgatatttaccattttaattgaaggctttatggtgcctatattgcagtttatgggagccggggatacgatccaatatgcaatggactacagttatattatattcggattcctgttcatatttgtatactcgggagttgcttctgccatatttaggtcagaaggggacatgaagcgttcaacaattgcgattgctatcactgccgttttgaatattattttggacccaatattcatttacattttaaaccttggcattgcgggtgccgcctgggcaacagtaatatctgcaactatgtcctgtgtcattatgagttactggatatggggtaagaaggacttatacttggatttgtccctaaagaactttgattatcaaacaagtctaatggtggataccctgcaagttgccattccatcaactttagaaaatatagtattttccgcccttgctatcattattaacagcatgctagttctagccgctggtaccaccgcagtcgcagtttataccgcttcaatgagaattgtgcaattagcgatgattcccctaatcggtcttggtacagcggtgcttacagttgcaggtgttgcttatggtgctcataactacaagaatttaaaaacggctcactcttactcaataaaagttggtttcttaatctcaatcatacttggggctatcatgtttgtcttctcgagcccaattgctacaatattttcgtatactgcagccagtgcaagtctgtctccccaaatcgctactgcaatatctgtattgagcctctttgtccttgcaattcctcatggaataatgtcttccatgatgtttcagggagttggcaagggaacttattccctattgatcacattgcttagatctttaatcttagagacagtctttgcttatctattctgtttcacttttgggtggggattgactggaatttatgcgggtgttgtatttggttgctttgttggtggtaccattggctatgtctgggctaagttgttcatcaggagattcaaacagattgctattagaaaatacgctccgcaagaaaattaa

SEQ ID NO: 73393 - DNA, 651 bp, synthetic construct
  source 1..651: mol_type = other DNA
atgtactgtccaaactgtaactctgaaaataatgactctgcaaaattctgcaagaaatgtggaacaccgttaaagaaagaggtgtctcataagaaaatcattaactccattaacgatgaaaaatcaagtaaggatgatattaccaagtacataatcattgctttaattataattgccattgcccttgctggtgcatttgcttacatcggttttggaaatcacaatgatgatgggcaaacgcaagtccaaaataacgcatcatccagtcccaatcctgttcagtccacgcaatcaagccagcctcagcaaagctcgtctgcgcaaagtgctgctatggatatactgggtggttctttttcaactggcagctcgttgtctgcaaaaacatatgccagcatctatgttggttcacagcattccggtgaaaaagtaataatacaaattaagtattcaagagacgggtcttccctcaataatggcaatatggtgccaaaaacagtagactcgtcaggatacattaatgtcaaatctgcggattccttcaaatattatcctgactttgctgagatcaacttgtttgacactaataagaacttgttagatactcaatcggtttctctaagtccagatagtagtactcaaaccttctaa

SEQ ID NO: 73394 - DNA, 480 bp, synthetic construct
  source 1..480: mol_type = other DNA
gactctgacttggatgatttaaatgacgattctgatttggatgagtttgatgatgattctgacttggatgagttcgatgatgacagcgatttggaagatgtggacgactccgattttgaggattacgatatggaaaattacgatttcaagcataacctacttaacttaaatataacgtataaagcctgtagttccagattaggcgctacttctaatctaaataaccattcagtcaatgaaacaaaaaaagactcaaatccaaataccgaatcaattgaacacgctaaaaaggcgaaatcggttctcaaaagtataaatttaccttcggaaaaccagagcaattatgacaagaacattagtggtaataataacgaaaagtcaaacaatgaggaaaacaaacaaggaaacaattatttaactatcatctccattattttggttcttatactggtaatcattgcatgcaaaaagctgtactaa

SEQ ID NO: 73395 - DNA, 165 bp, synthetic construct
  source 1..165: mol_type = other DNA
gtcattataggagaaggccatatattctcagataacgatttcaaggaggatttgctaaatgttggttttaagattgtaaaatttaataggggtgaagctacttacgacttcgcatttatcaaatctgactattttaactattggccattacttaaaagagaataa

SEQ ID NO: 73396 - DNA, 2571 bp, synthetic construct
  source 1..2571: mol_type = other DNA
atgggctttaaggtctccatcataataccagtcttcaacgttgaattttacattgagtcctgtatattatcattgcaaaaccaaactattggttttgaaaacttagagatcatctttattgatgattgctcgacggataatacttcaataatcatagaatactatgcaaagaaatacaaaaatatcagggcgatctactgcaacgaaaatagcggtgttgccggcaaaccccgtaatataggtatggttaatgccacatcagactatataatgttcattgatcctgacgataccttctctaaggatgcgtgcgaagtcctctatgataagatctctaaatcgaaggtggatgttgttagtgggttacattccaaaaagattcacggtgatactgatattatttttccaggtttgctgataagtactttcacaaatccaaatgacagctggcaaatcaggaagaagcagttggctgagtacctaaaagattttgatgagctttactttgaatcgttggacgaaatgccatatctgttaggcaactttgccataatgagcaagatttatagaaaatccttcctattttcgaacaatattaattttccggaagaaatacccggtgaggattcagtctttctgttaaatgtattcctaaatgctaaaggaattattttcattaacaaaataatcttctcttattacacctcccgggacgatgaggacaacgcatcgttgacacatcaaagtgacttgtcaagaaatttgggtagattaaaggcatacaaaatgatgttgaaactatccaaagaccacgataaactagacgagttcgttaactatcttctttgtggtaagatgaattatttcttgaaccaatatgttaataataaaaacttatctaaaaaggagatcagcataattattaatgaaagctacgatttgttcaccttgattaataattctaactgtaaatttgactctgattataaaaagctcgttgaacttattattgataaaaatgtggatgagctttacaaatactcagagaatgatgtatttcatattgtgacaaacaatcatgaaactaagtatatcaaggacataaaagtagcagttataatggacccattcacatacacttcatacagcaacgagtttgaagatattataattgaaccatcatcttggttagaaactttcgaaaacgaaaagcctgatttatttttttgtgaatccgcatactctggagttaacaagaagagtgtgataaatggggttgccattgaagacaacattacgccttggcagggaaaaatcgggctaaacttgattagtggcaatgacaatagaaagattctctttgatatactgaattattgtaacaaccacaatattcctacaatattctggaacaaagaagacccgacatctttcgatataaagcaatataatttcattgatacctcattgcactttgattatatttttacaacggatgaagaaactattcctcgatataatgcaagaggacatgataatgtctacccgttattgtttgcttcacaaattaagttgttcaacccaatagagtataaaaaacgtacgaacgatataatctttgctggcagttggtataaccaattcagtgaaagatctaacgtcatgagagaattttttaataaaataattaacagtgactacaatttgaaaatatatgatcgtgcttcagagatcaattctatcaataggaagttcccaaaggaatattctcgctacgtcttccccaaagtacattttgataaaatgccttccgtatacaaagagagcaagatatccttgaatatcaacactgtaacaaattcgtacaccatgtttgctagaagagtgtttgaattaatgtcatctaatacattggtgttgtctaactactctaagggtatctttgacttatttaaagataatgttatttatttggataaactcagttctttaaacctcgataagattgatattgagaatatctgtgaaaataacctatatgatgtgcttgagaatcacacttattataataggttcaaatacattttaaacattatcggatttaaattcaaagaagaaaataataatcttatcataatttatggtctgaataataagaatgagctggaaatcattctaaatgactttgaatctattaagtatgttaataagacctgcttaatctatgtaaaagataataacctattgaactccttaaacgaaagattcattgaagatgttaaattcattggtataaaagaattaatcatgatctcagaagaatttaaccagagttatttctttattattagagacctatttcatccacttgaaaaagactttattagaagggcttttttgcattataactatcttgacaagaacatcggtgtcaaacagggaaatcctaagtacaatttggctaaaactatagaatataagaatattttatttaacattgaactgttagataaagtactggaaggtttactaaaataccgattaaataaattaaccattcttaatatctaa

SEQ ID NO: 73397 - DNA, 438 bp, synthetic construct
  source 1..438: mol_type = other DNA
atggataaaaagtggatagtattaacgatctttttggttatttttggcttcctgatcttaaatggtttgaacaatagtatacatgttggtgactcctatttttcgctaccagaagggtacgtcgagggtaatatagttaagtataatgatgtgaatataaccaatggaactacttcactcagaattatagaatacaatgataacaacatccaggagcacattgacaaatatgtgaactatagcaccaatcataactactctacaaagattaataactttaacgttgacggtatgaacgtctataaatctgaaattatccaaaataacaagacattccattattggtttattaaaaaagataaggtttacgaaattgtaacatgggatggaaatagttacactgataatactgtattcaatcttattaaatcaaattaa

SEQ ID NO: 73398 - DNA, 867 bp, synthetic construct
  source 1..867: mol_type = other DNA
atgaagaatcttattaagattaacgttgattttgaggaattagataattacaagttcataatggatgaaccattttctttggaagttaactacaatcatgtgaaatataactttattattaaattctccagtaataataacaatctgatctgctgtgcgcctggtgcccaagatcgaaacaagagaacaagtcaaggcgaacttattaaacctccgtactttgacagatggtcctggtttaaatacttcgaggaatcattcattgctttcagcgatcccattttttactatgataaagaaataaccttgggttggtgcgtaggtgataaaaatcagtggtacgccgaaaatatctccttaattattcaaaagttagctaagaaccaggaaataattaacgagaacattctattttttgcaagttcaggaggtggatttgtgtctatcatcttggctactttgataaaggggtcaaaatgtgtcgttaataactctcaattttctatctttaatttttatgaaacacacataaatcgtctttttaaattcttagaaaacagcttcagactaaataagtcggaaataactgataaaatagactataggttagacttgataaaattattcaaaaaggaaaattacatgccctctattacgtactatgttaatgcatgttcaaagtatgacattaaatatcacgcaatgccattcatagagaatgtcatgttcatccctcaatttaaggataacttgaatgtacattattatcatgagtataaagacttcccacataacccaatgagcaccgataaaattctggtcattctcaaaaactttatcaaaatcaatctatataataatttttaa

SEQ ID NO: 73399 - DNA, 534 bp, synthetic construct
  source 1..534: mol_type = other DNA
atgcccacgtggagactacaattggaaagtgaggatcttttcttaaactctaaatattacgaaactttgaataattttttaaacaacaaagaactattggagttactaaataaaaatgactataaacttgtattcaaacctcacgccgagttaatggaatatcttgacctgttaaacgtcgataatgatgtttatatatccattaatgaaagctatcaggatttgttcaatgaatcagcaatactcatcaccgattactcgtcagtcttcttcgattttgcttacttaaagaagccagttatatattaccaagataataacgattatcattatgacgagggctactttgactacgaaacaatgggatttggtgaagtaatttctgacgaaaatctgttgatcgaaaaaattaagttttatctggaaaataattgccaaatggaatataaatacaagtgtaatgtggagaacttttttaaatttaacgataagaagaactgtgaaagggtttacaattggattttgaataactaa

SEQ ID NO: 73400 - DNA, 1926 bp, synthetic construct
  source 1..1926: mol_type = other DNA
atgaagtacaattttaagttttctataatcatcgcagtttataatgcggaaaaatacttaaatgaagctatcgattcaattattgaccaatcttttgattttgaaaaaaatacgcagttaatccttgttgacgacggtagttcagataattcactagaaattgctttgcagtatcaaaaggacttccccgacaatattttagtcttgtccaaagagaatggtggccaagctagtgcccgaaatttaggactaaagtatgccactgggaaatacgtgaattttctggatagcgatgattacttgtcgaataatactttagaagaagtttataatttctttgagaatcactttgacgaaattgacatccttgccatacctatgattctatttgagagagttaataagcctcatagattgaattataagtttaacgagaataaaataattgatttgattgaagacccaaataatcctttgttgtcttcatcttcttcattcattaagtccgatgcgatcagagattataaatttgacattaaccttgtgaatctagaagatgctttagtaattaataaaatattgctcgataaaaagaagtatgctatcttaaacacatgtaaatattactataggcagaggaacctacgtaattctacagtcgacacaataaactccaaaaaagagtattttacagatagattgaagagtttttattgcaacataatagattactgtttatctaaagaaggcaacattccaaagttcatccaatacctgatggcttatgatttacaatggttattgaaattaccgaatttggatgttttggaaaccgagattgaagttcaagaattttgggattgtttgtattatgtcctgggtttcatatcaactaacgttgtctatggaaataaaaacattcttaacgacgtgaaaccattctttctgtacttgcttggtgaagaaaaatatatctccttagatgatgacggttcggtgctattgaatgtgggcacacataacgttgataaactaagcagacataaaatctggctcgatatcattgacataaaaaaggatatactcaacatctcggggattttcttaacgaatttcccaaatcagaatatatcgataaaggtgattaaggaaagtgaaaagcatgataaagaatacttctgccaatataaaaaatacaactcttttgaacgtaaaaataggacctttctcggatttgattggatattcccatacaatttcgatgtaaaaatcccactagttaaaaacgagagctccaagttaaggtttgtcgtaaactaccaggacgatgaacatttattttcttttgagtccagcctgggtttaaactatggtgtaagactgtccgacttctcagcatgtatctccaaaaagcactacattgttctttttaaatactcaaaactttttatcctaccgtataagtactcttcaatgttacgttatgagtttagtaatattaaaaagactattaaggataaacccaatttcttcttgagttctattttcataagacttgcatactacattttataccctctgttttctaataagaaaatttggattttcagcgaccgcccagattttgccgacgataatgcaaagcatctttttaaatatgcaattaatcaagatgatgatgtcaaaaagtttttcgtattgaacaaggacagtaactcatttaacgatatgaagaacgagaataagaatgtaatatccttttctagcttaaaacaccggttcttgtatttgtacgctgaaaaaatcatttcatcttatgttaacgaagatttcataaaccctttctttaactataacaaagatttgttcgacggtctaattacttcgcaaagagttttctttaccgcatggagtaaccaaagataa

SEQ ID NO: 73401 - DNA, 771 bp, synthetic construct
  source 1..771: mol_type = other DNA
atgagcctcatcaaagaaaatgaaatttttctatttgaagagattgttaaaaaaaatttcgcttcaaagtacaaaggttcagtattaggtatattatggtcggtcctaaaaccattactcatcatgattttgttaaccataatcttttctactctatttggcggctccattaagaattaccccgtttatttcttgtctgccaaatgtatttttgatttctttactgctgggactaatagtgctatgaacgcgatcaaaggaaacaagaacatcttgaaaagaactgccgctcctaagcatgcttttgtcttaggtagcattatcgcggagtttatcaactttttgatcacacttgttattcttgtggcagtcatgattgtaacaaaagcaccattcaacattaatacgatccctttcaccatattgccgattatctcattactgatgatgattacgggtattggtttcatattgtccatattgtgcgtttattatacagacatacaacatctgtggagtgttgtaactcttatggccatgtatgcttctgcaatattctatccaatggatattattccagaaccctaccaccagtacatgattttgaatcctattttttggattattgatcaatttagacatatgaccctatggcaaagtatgccatctacattaaatttaataaattcgctggttctttccacaataatattggtgattggaataatcgtatatatagtgtacgaaaagaaggttgcaatgaggttctaa

SEQ ID NO: 73402 - DNA, 1110 bp, synthetic construct
  source 1..1110: mol_type = other DNA
atgaacaaaagagataaaataaaaacaaatctaattaagaagtacaatatttccccagaagaatctgagattctgctcactaaaattgagaagaggattgcaaaggaaaatgctcgaaagagagaaatcctgtcgaagaacatgttcaacgaatctaaggaagagtttaatcaacctgagcataaaataaggaatattaattcagaaacgaataaatataacgactttgagactataactcaaaacatctcatcaaaagaaagtgaaaagttaaaaaaggaggaaaataataatgttgatacaatcctatcgaatattattcccaattatgatcaagagattagcatcgagttaaataatgtcgatttgatctttgaagttgaaacagacaagattgacaatataaaggagaacataataagaacgttgaaaagaaacaagtctaaaaaaaccaagtttcaggccttaaacaatatttccttcaaaatcaacaaaggagaaaaggtaggtattattgggtacaacggggcgggaaaatctaccttgttaaatgtgattaccggtatttacccgataaacaacggtactgtaactacacatggaaagatatcaccattacttagcttgggcgctggttttgaccataactattctggccgtaaaaatatttatttgaatggggcagtgttaggttacagtaaaaagtttttggaagagaaagaagaagaaatcattgagttctctgaattaggcgaatttattgatttccctatcaaaaattattcatcaggtatgctcgccaaattgggtttctcgatcgcaacaatcgttgaaccagatatcctgataatcgatgaaattctaggagttggcgatgttaatttccaaagaaaaagtagcgataaaattaaatccttaatggatggtggtaccactgttcttctagtctctcactccatacctcaaatccgcgaaatatgcgacaaagctatttggatagacaagggaaaagtacgtgaaataggtgaagtgaataaggtctgtgatcactatcttaaagatgctgaaaaggccagtaacaaacagttggctaacattaaatttagataa

SEQ ID NO: 73403 - DNA, 519 bp, synthetic construct
  source 1..519: mol_type = other DNA
atggtcttccgtagatgcccacagtgtggttccacatcagatgaccagtatggtttttgtataaagtgcgggtgggaatttgcaaaaatagacgccactaagaatttgtgtcctttatgcggtcatgaaaatccgaatgaggcggatttctgtgttaaatgtggtgcgccactcgtttttaagaatcatccaaatgaagagcaaaggaatataacgccaattgtaataaacaaagaagtcgctggcactcctattcaaaagaacagtggcggatggattaaatggattataatcctgggttatatcttttctattttgggcggtttgttaggattgatcattgctgtgtatttagttacaagaaaagaagctactgtgagaaaacacgggatcatccaactagctatatttgctttctacatcgtactaattgccgcactttacgccaccggtatgattcctgcagatgcaattacaaactaccaacaattaattgctggaaacatgacccttccctaa

SEQ ID NO: 73404 - DNA, 2430 bp, synthetic construct
  source 1..2430: mol_type = other DNA
atggaaaagcttctaaaaaagtacaatacaactcccgatggtttaagcgaaagtgaagttttgaagaggcatgaacgatacggtttaaacgagcttgacgaaaaaaagccaactccaccaataatattgtttttatcccaatttgctgatattttgatagctctcctaattattgctgccattgcttcttttgctattggtgatacgatagatgccggggtgattctacttgcagtgcttttaaatgtaataatcggcttcattcaagaatatcggtcaataagagcggtcaatagccttaaggatttaatggtcaagaaagccattgttaaaaggaataatgaggtccttgaagtcgatgctaggttcttgaccattggtgatattgtaattcttgaggagggtaataaatcaccagccgatttgatactaattgaaagcaacgatatcaactgtgatgaatcattcctaacaggagaatctgaagcggttatcaaagaagaaaaggatgctgtttttatggattccaatattatttctggccatgggctggggattgttacggatatcggaatggatacggaaatcgggaaaatcgcagaaattgtgcacgaggaagatgagaagacgccgcttgcagtgaaggtcggtaagttaggtaaaatcttatcggccattgcgattttggtttgtacagttatctttattttagaattaatccaaggtgctggtattgtggaaacgtttatgactgctgtttcactagcagttgcagccattcctgaaggtctgcctgcagttttaacattaacacttgcacttggaatgtctgagatggcatcatctgatgctttggtcaaaagattgttatctgttgaaacattaggttcatgtaccatcatctgcagtgacaagaccggtacattgactgacaataaaatgagtgttgttgagagttatttattaaacaaggacaaattgttgttgatttctaagttgtgtaacaatgcgataattaaagacaatgcccttatcggtaatcagactgacggagctattttaagatttgcacaaaattatgaaacttccctcgagcgcattgatgaaatcccactggactccaaccgtaaaatgatgaccacaatccataggttagacagtgaaaataagattgtattgtccaaaggtgcaccagaaataattctaaataactgcaaatatatagataacaacggttcgatagagatcctggatgaagaaatcaaggaaactgtcgttaaaagaattgatgaaatgagtgatgaagccttgagagtaatcggattcgcatacaaaatcaatgatgatgaacgacccgaagaaaatctcatttttactggcctgctgggcttaattgatcccccaaagaaaaatgccaaaaaggcagtgaaggaatgcattaatgctggaattaaagtaagaatgattaccggagaccacgaaaaaacggcctctgcaatagcaaagcagctgggaatattaactgacggccgtgtaattactggcaaggaattggagaagatctctgatgaggaatatctggccattgccgatgatattcaggtttatgctagggtaaagcctgctcaaaaaatgagaatagttgaggctttaaaagacttaggaaacatagttgctatgacaggtgacggtattaacgatgcacctgctcttaaaaaggcgtcgattggtattgctatgggcgatggtactgatgtctctaaagagtcatcggacatgattttacaggacaatgatttttctacaattgtaaaggcgataaaggaggggcgtaaaatttacgacaacattaaaagattcgtcaaattccaagtatccactaacgtgggtgctatcctaacaatagtcggaacatccctactcaatttacctctgccattcaaccctgcacaattattgtggttgaatatagtcatggacggcccgccggcccaaacattgggtatggaaggtgctgaaaaggataccatggctagaccacctgaaaccggagacatcttgaccaaaaaaacattgactgaaatattcctattgggtttggtgatggctaccggcaccatcctagtatttagctgggagatatatagtggtgccccaactgaaaaagcgatgagtgttgcattcacattatttgtagtttaccaattatttaatgcatttaacgggagatcaaactcgactaaatctagcaaatatttgtacattggactggccttgtcattcatgctccaattgctaataatatacatcccccagctacaaatcatatttagaaccactgctatcggcattgctgagtggacgatcataattattgttgcatcaactataatagctgctcaaaaaataatgaataaagtgataaaataa

SEQ ID NO: 73405 - DNA, 291 bp, synthetic construct
  source 1..291: mol_type = other DNA
atgttactctatattaattttttgactcaagttcatttccaatttaacaataatataaatgtccaagcagatattcaggaaggtaagtcagaaagcaaattggaagatggcgatttaacatggatattcactgacgaaaataccaagcaggtggagctaaactccaagagtcttattttggcttacaggaaaggggactatgagggttttaaagaatttttaaacgatgtatctcttatcttggctgccctgagatggtgtacgccatttaacttaacattcctaggataa

SEQ ID NO: 73406 - DNA, 933 bp, synthetic construct
  source 1..933: mol_type = other DNA
atgaacaacattgtaatatactttttaaagctctttatatgtttgataatcatagttgttatcatgaggctctggagtaaaaatcaagagaagatattttttatcaattcaagaaaagttgcctttccatcgcagcttttctacaaaaccgatgatggcaggtatttggcatactggccaaaagattacaggggcagaaaatccaccctacaatcaagaaactcattgattggcaaattcacggaagaatgggtttgcaagctatttgggagactgatcgtggacgatgatttgtatttggtcaaacaagcgataattccctcactaggtattacatcccgttctccagtagacttggtcatttccactgctaatagaaaaattcttaaggcaagtgaggtaaaagttatttttgaggtcaagatgtctattgtctggaattggcaatatttcgacgattccaataacgtggtggaaatcggagatttcagaactcatcaaggaaagcccagtttcacacgttcggactctattctgaaagccattgggaaatgtattggtataagagttagtagcttcgaatcaagcaagatcccaatcgttgtgataggtaacgctccattatctaacggtttctgtaaaaaggcagatcacttaaagcgcgttggtgtaattcaaggtttttggtctttgaatccgtttcctctaaaccatggaaatactcgaaagacaaccccttatggaggttatatcagatttaataatacttctgagctgaaaagaaatcttgacaacttattctcgcaggatttaaactttttcagcggcatggaaaatcctaagacgttaggtaaatacattgaaattgctaacaatgaaaataattatgaagataaaggtttaaaatttttgaagttaatacggaggtattaa

SEQ ID NO: 73407 - DNA, 783 bp, synthetic construct
  source 1..783: mol_type = other DNA
atggaagacgatagctattttgagaatgaagaattttccccgataaagtcgctgttagggcttctaactttttcgacaattttaccaatcaatgtgtacacctcaattgagtacatgacaaaattaacatggtgttggccattcttgcatgtgttagtaggtatattggctgctgtgtgtggctatgtatcttttgaggtcctacatttgaacgcgttgttcaccgcagtcattgtttatgcgttcttgatgttgatcacgggttacaaccatttggatggtgtaatggacatggctgatggtgtgatggttcacggtgatcctgaaagaaagatctccgtcatgaaagattcttctgtaggtgcaggcggtgttgcaactttgtttttggttgccagtcttactatcgcaggtctctataatattctcgattattactttatacttgggattatagtttgtgaaatggccgctaaaacttctttaataacgaccgccctgttatcaaagcctctaattcccggaattggaagttacttcattaaagaaaccacaattgttaattatttagtgagcacaattcttgtaatctgcatcgcttttttactaggtaacctaattggcgttgttggtgtccttggagctattgttgggggtataattatagcaactatatcaaaaagaaatttcattttggctaacggcgacgtcctgggaatgagtaatgaaactggaaggttatttgcattactgtttatggccatcgctttgtatttcatctaa

SEQ ID NO: 73408 - DNA, 999 bp, synthetic construct
  source 1..999: mol_type = other DNA
atggccaaagaggatagatccgaaataaatccattcactggtcgaaagcattatgacaaaattaacgacgataaattcctcaaggaatcatacaaggaatattattcaatgatcgatcaagtccagctattggacaatactcaaaacggtcaaattgtcattaacgttgctttaaatttaatcaatgccgtcaacagttatttgtctgaaataggtaggcttgattacgtggaggattactatgattgggatgtgcatttggttggagataatgcggtaaatgctttttgtatgccggggggtaaaattgtaatgttctcgggtatattgtccgttgcaaacactgaagaaaaaatcgctttcattctgggtcacgaaatggctcatgcacttctagaccacgctagaaccagaatcagtgcgcaaaacactcaaaatgcaataacgtcggcagcttggattggtagtatagccatggatttttttggtttaggcgaacttggcagcctaacaagagcagccacgaacgttgctagcattgggtctcagttcctgttaatgaatagttggggtcgtgaccaggagctggaagctgacagattgggcatgatgattattcattgggcaggttacgatgtctctcgcatccccgccttttggagggatatgtcaatgcaaaattctaatgaacatgatttcttttccacacaccctgcagactcaaaacgtatagctacaatgcagcaattgattgtagaaatagccaacgacaacgatttttattccaagccagtaatcggtgatgtgaatcaaaccaacgtgaagtctgtttcttctgaggggggtttttgttcaaattgcggcaatcctgttgatattgacgctaaattttgtacaagctcgggaaccaagttagatgttggcttaagatgtccaaattgcggatcagcggttggaaataacgatgtattctgtattaattgcggatttaaattgtaa

SEQ ID NO: 73409 - DNA, 216 bp, synthetic construct
  source 1..216: mol_type = other DNA
atggtgaatccaattattgctgcaattatctcatttttcctacctggcattggtcagataatacaaggtgcagacgtcaaaaagggaattataatgtttgttattgctatcattttggggtggttactggtaaacttcttgggttctttaggaaatatcatctattgtatttatgcactttacgccgcttacgatgcctataaaatagaagcgtaa

SEQ ID NO: 73410 - DNA, 846 bp, synthetic construct
  source 1..846: mol_type = other DNA
atgaacccctatatagaaatcttgagacccggcaatgcattaatgggtgcaatatctataattttggttgctcttattgataagacgatcagcattccagttatccttgcaatgattgctgtattttttgaaacatcagcggggaatgtgattaacgattactttgattataaaattgatttgatcaataaacctgaaaggccaataccgtctggaagaatttcactaaagaatgggcgtaactacggttattcattattcgcggctggtaccgtgtgcggttttttaattagctatattaccaataactggataccatttggcattgttttatttgcagacatcatcctttatctctatgcgtataccttgaaaacaactcctttaatcggtaacttgactgttggtttcatgactggtttcggcttcgtatttggtgggttctccatcaataatccaaacattatcataacttcgctgttcttaggattttttgcttttgttatgacgacagcccgagaaattgtcaaggacattgaagatattgaaggagataaaacagatggtgccaaaactttacctattctgattggtgagaaaaagccagctatacttgcagctatcctaataataattgacagtgccttgtgtcctctgttgtattactaccatatttttggaatcttatacctagtagtgatagcctttgcagtcatgctgttcatttactccgcaatcttaatattgaaaagtcaaaaaagagagattgctgccaaagtttctaagaatctcaagattggaatgctaatagctttcgtcgcttttattttcggctctttgatataa

SEQ ID NO: 73411 - DNA, 1578 bp, synthetic construct
  source 1..1578: mol_type = other DNA
atgttcaaagagtttaacataaacagaaaggacaagtattatttaatagctattttaattttcagtgctattctagtcggatattatattaattttaataacgcaatcggcatttcatgctcagatgtttatatttatcttataaattctctttattatactggtgagaaggtcaatataacaaattttatccatatatctccggttgtctgttttttgacttctctgtttttcagagtgggttttgttgataaattggctatttatgtcgttactggtttttttgcgattatcggcaatattggtttctacttactgttaaagaaattctttaacgaggagttgagcttgaccggtactatcctgtactcctccttttcgctttatctaatttggctggccaacggaacattagacattcctgccaccggagtgattatctggatagcattgttcacaatgattgccgttcgagaaaacccaaaatactaccagtacctaatcccattaatggtaatcggcctttatacgcgctacacggtaatcttgacccttccagcttttttcttattctatgtgctcgaaaacggtttcaaaattaagccggaagattggaagtacatcaaaagaggtatcatcatcgccactatcatagcaataacggtattcctaatagtttttactatgggaaacggcaggtttgatgccgcttctcaaatggcgaatggtgtaaaaggtaccaacggtgaactcactgatcctgcatacaatccagatagttcgtattattttatgaattatataaattacatatcaaactcacacactgtatttgaaatcaaccctacattatactcccctactattttggcatatgctatctatgccttgctgtttattggggcagggttctggttatatgaccataaaaaagtaaatttccgtaagacagatgctatttctattataataatcctaatgggtattataagttttactagggttacctcggtgattacatccatattgatttatattgggatttacttgcttgccagagatagagaatacaacgatggtgtattcatgttaggctggattttagcaaatgcaattttcctctctttcaacatcgtgaaagttaaccgttacatcattcccacatttccaccatttatattctttgtcttgacggctatagaaactattcacgcgcatgtcaagattaataaaaacatgatacccctagctttgattgtcttgtttgttattcaggcttttgctttcacggcaacagttgaaccaacagataaatacatgagtcccgaggaaatttccaattacataatcgacagcaatccggactatgaaaatatgaccattggtgtttacaacataagaccatactcttggtgggttggatcaaataccattggaatcccttcatcacatcaatctgaaattgagcaaagcaatattagttattacatcgtgaataagcctatggacaatttaacaaattttactgaaataaagaatattaatgaattatatttgtataaaaataacaatttttaa

SEQ ID NO: 73412 - DNA, 1575 bp, synthetic construct
  source 1..1575: mol_type = other DNA
atgttcaacgaatttaacattaataaaaaggataagatttacttgatagctattttgatcttcagtgccattctagtcggatattatattaattttaataatgcaatcggtatttcatgttctgatgtgtatgtatatctgttaaatgctctttattataccggcacgaatgtacactcgattgacaacattttcttgtctccggttgtctgctttttgacttctcttttctttagagcgggttttgttgataagttggctatttatgttgttactggtttttttgcgattatcggcaatattggtttctacttactgttgaaaaagttttttaacgaagaattgtccttgaccggtactatactgtactcctctttttctctgtatttaatttggcttgccaacggcacattagatattcctgcgacaggggtgataatctggattgctttatttactatgattgcagttcgtgaaaacccaaaatactaccagtacctaatcccattgatggtaatcggactttatactaggtacacagtaattttgacccttccagcatttttcttgttctatgttctcgagaacggattcaagatcaaaccagaagactggaaatacataaagagaggcatcatcatcgctacaatcatcgcaataactgtcttcctacgcgtctatgggatgggtaacgggcaattcgaagcaggctcccaaatcgctaatggtgtgaaaggaacaaatggtgagctcactgatcccgcctacaatcccgatataagttattatttgacaaacttccccaactttatatcaaacagtcatacgatatttgagtcaaatcctgtcttggaataccctactccattatcatttgcagtattcgcactattatttatcggaatcggtttttggttatatgataataagttaaaagctgagaaaagagatgtgattcctgttatactaattttaattggcattatatcttttaccagagttacctccgtagctacaaccttattaattctaattgctttttatttaattggtaaaaattctgaacataaaaatgaattatttatgttgatctggatactggccaatgctatattttttagctatcacattattaaagtgaaccgatacattcttccaatagttcctccattcatatttttcatattgctcgcaataaacaccattcctgaacacatcaacattaataaaaatgtaattccgattgtcctaatcgcactgttcgcgattcaagcttttgccttcactgcaacagttgaaccaacaaacaagtatcttgccactgaagagatatcaaattatatcattgacagtaatccggactatgaaaatatgacgattggagtttacaacataagaccatactcgtggtggattggtccaaatacgataattttacatgctgatgcccctggtgaaatagaccagagtaatgttagctactacatctcacaaagcaggatagataacctaaagaattttactgaagtgaaaaattcgggtggtttgcatttatatgagaacaataatttctaa

SEQ ID NO: 73413 - DNA, 1545 bp, synthetic construct
  source 1..1545: mol_type = other DNA
atgaaagttgtctgctgcaagaactgcggtgccaaataccaactcgatgatgatgatgacatctccacattcgagtgttcttcatgtgccggtgacttggaatacctagaaaactattctaatggaaaagaatctaatcaatcattcgttagttcaaccaagtataatgattcttacattgtacaatgtcaggaatgtggcctgaaatacaaaattaagagtagtgacagcatacttgattatgaatgcgactcgtgtggtgggtctttaagatatttagatgatgagatgaataaagaattagattcataccttgaagagagacatgccgagcttcagaacattagaaaggaatctaagcctaaagaaccgacatctgaagagataaacacagaggacaacactccctccataaagtcgattactgacaaacttgaaaatttcttttcggaagagcatatgttgcaaatcgcagatattgagaagaaagaagaggaagaaatccaagaacaggtcatctccaaaaccgcacgaacgaccatcccacagtccgtgttgtcaagatttggcaaggagtttgcaacgcccaaaacggaagattacgacatcctaaaaaatttcctgaaaacagaatttttcaagggaatggatgaatactatccaaaggataataagctaaagtctaacaagagtttcctggataaaattagcttgaaggaacctgacaacggtgagtctaaacctgtcaagagttcaattattaataataactcaaaatttaacctagaaaattttaatgtggaaaacatagaatccaacaataccatcataataataggtgtagttatttttattttaagcatcattgaggttttgactataaacagtggtataggaattattgcgctgtttattggtgtaattatcctatgttatggtatttataaaactcgcgatgtaaagcaagatgaagaaaggacacgtataatcagggaacacttgttaagtcttccagaagagttctatgtattctacaatgtgaagatcccgacttccacgtcaggcattaatcatgtggttgtcggtccaactggcatttatgctttactgtctcaaaaatataatccaaagcttagattggaatcagaaaacgaaaatctaaatttgattggaagcagtgaatctgaagaaaataaattggaagagttttccagctatgggaatatgcgtaaatttagatacactacaaagcaagctaaattttcacaagataacaaagttaaacagaaagctttgtcgttaggtgaagatttaataaacttcctcaatgaaaataacattaagaattgctttgttgaaccattagttggattcataaacaatgaggtcgtggttataaatatgcctttaactgatgaagacttgtttattgaagaattattgaataaaatccaaaatactaccattaaattagattctgagacaatcgacaaatgtgctgttttgattaacaaatattctgctgactgttcctcggagttttaa

SEQ ID NO: 73414 - DNA, 939 bp, synthetic construct
  source 1..939: mol_type = other DNA
atgtttaagtttgataaagaacaagaagtttttgactttgctggcgtcaaaatgggtggacagcctggagaatatccaactgtattggccggaacgattttctacggtggacataatatacttaatgatgaattaaccggtgattttgataaggataaagctgagacattagttaacgatatggcctcaatttctgatgtcacggggaatccatatatcgtacaagttttcgggcaaactgttgaagcgctaccaaagtacatcgagtatattggtgaaatttgcgatgctcctttcctaatagatagcacctccggcgatgcacgtgttgctggtgcccagtacgctgacgaagttggcttaaccgaaagggcgatatataactcaatcaatatggccgcagacaaatctgagttagatgctctagcttcaacagacatttctgccagtataatcctggggttcaacccaatgaatgcgaccgtggaaggtaaaatgaacatgtgggaaaatggagacgatggtgcttacgaaaaaggtttgcttgaagtagcagcagattgtggtatagacaaatttatgatggatactgctgtcacaccattgggccaaggtgcaggtattgctgctagaacttcctttgccgagaaagctaagtggggatatccggttggcagcggtatccacaatgtgccctcggcatgggactggttgagagactataagaaagagggtaataagacagcctttacagtctgtgatattggtgcaaatatagtgcaagtaatgtgtgggggagacttcgttctctttggtccgattgaaaacgcaaaaattgccttccctgcggtagcacaaactgatatgttcattagtgaggctgcaaagcccttgggcactgaacctgtggattaccatccaatgaacaagttactgtaa

SEQ ID NO: 73415 - DNA, 1704 bp, synthetic construct
  source 1..1704: mol_type = other DNA
ttgcaagagcaggatgttgggaccgattggagaaatgattttaaaaacttgactccatctgagttctttaggaagaacaagcaaatgctaggttttactggtaagatacgttcattaaccattgtatttcacgaattgataacaaatagtttcgatgcagctgaagaagccggcattttaccggaaatagatattgagttaaaaagagttgagaaggaacattacatactcaaactcaaggataatggtccgggcattccagaagattatgtcatgcgagtgtactgcagtatgtttgcagggtctaagttcagaaacatacagtctagagggcagcaagggttaggttgtagtggttgtgtgttgctttcgcaaatgaccactggtaagcccgctcgcgtcatttcatgctataaagaaaatggagacatcaagggtgtgaaaatgaaattccagatggatgttaaaaacaataggggtatattgatggaaagggaagattatcccgcagaaagcacaggtgtctgtatcgagttacaatttaaagaagtttcatattctctagcagaacaaggtgcatttgaatacatcagaagaaccatgattggaaacccacatgctaagattacgttcagagatccatctggacacaagtacatattcaaacgcgcggcagacatagttccaatccttccaaaagaggtattacctcatcccaagggtgtcagcgctgacgacttaatgaccatggcccaaaatacggactccagaagatataaaagcatgttaacatcctcattatcaagaatgtccaataaaagagtggacgaaatttcggaattaactgggatcgacatgaataagcggccaaaagacctgacattccctgaggcagagactattgtacattgctttaagaaaatgaaattcatggcccctcccacagatggtctaatacctattggatctgagcaaatcgaaaagggtatgaaacaaattctgaaacctgaatttgtaacaacaattaccaggaaacctgtaacatatcagggcggtgtttcgtttattattgaggcaggccttgcgtacggcggagactctggcagagtcgtaaaagaacaaagaaaatctgaaattatgagatttgcgaacagggttccattgacttttgatgccggaagttgtgctattactgaggctttgaaatccattgattggaaacgttacggcctgaaggacttagataatactccattgaccttgtttgtgaatatcatatccacacaagtcccgtacctgtcaactggtaaacaaagtgtatctccagaacctgaaatcgttcatgaaatcaggcaatccactatgaaactagcccgtaagctgcaaaaacacctacgagctaaaaaggccgctaaggaaaaggagaaacgttcaaaggtcttcgaggattatatgcctgtgattattgaagaagctgcgaaattgggagagacgggagtgccagaatatcaggaagttttagcaaaggttactaaaagggctttggccgaattgcttggtgagaaagttgaagaagaagaggaagaggaagaacttgacgctataatcatggaagaagttgatgaaagaggttatgctgttgatggtaacagtacgctagatagcttcgaagaagatgatgttgatgacgaatttgaagattaa

SEQ ID NO: 73416 - DNA, 1869 bp, synthetic construct
  source 1..1869: mol_type = other DNA
atgaacctaaaattcaaaaacgaggagaaactggaaatcatatttataatagtatcgtcgatcagtttagttttgggatttttattatctattgactacttgtcttggatttcaatcataatatgtgggattccaatattcaaggaatgtattgaaggcttgatcaccgagtttgatattaaggcggatttactcgtgagcatagctatcattgcgtccattattatcggtgaaatatttgctgccggggaaattgcaactatcatggccattggtggtttcttagaagagtataccgtcgcaaaagctcaaaatcagatcaaagagctcgctaagatgactcccaagacagctactagaataaaaaatggcacagaggagaaggtacctattgaagaagttaagattggtgatattttgaaaattcttcccggtgaaagcataccgaacgatggtattataatcaatggagaaacttctattaaccaagctactcttacaggggaatcaataccggtagacaaaacacgtaacgacgaggtctatagtggcactattaacctgtacggatcgttcacaatgaagaccactaagattagtgaagatagttcccttcaaaaattgattaaacttgtggaatcatcaaaaccagaaaacgccaacattgttcgagcggctgataaatgggcaacaatgattgttgttatcgcctttaccgccgcaatcttgacatacttgtttacatttgaaatcacaagatccgttacgatactcgtcgtcttctgcccctgtgcattagttttggcaactccaacagcactaatggctgctgtaagtaatttgactaaatatggaatcctagttaagaatggagaatctttagaagaattagcccatattgatgaagtcatttttgataaaaccggtacgttgacttacggcaatccaactgtcataagggtgatctccgagaatccacaagaaatgatgtatcttgccgcctcccttgaatctaagtctgaacatcctttggctaaggctattgttaagtattataataacaacgatttagcagctgttaatgaatttaaaatacatattggtaaaggtattactggatatataaacggtgtgcagataatagctggcaataagaagttcttagaatctaaaaatatacctctaggttccaatgagaatagcagtaatggtgaaatagaaatttttgttgccaaaggtaataagatcatcggtaagattttcctggccgataccataaggtctaatgctaaggcgacgattaaaaatctaaaaaagctgagaattaaaaccaccttgctgacaggtgataatgaaaatactgcgaagtctattgctaatcaagtccgtatccacaatattaaatttaattgcttacctgaagacaaaatccaatacattaaggacgagcaaattcgcaaccatagagtggcaatgattggtgatgggataaatgacgctccatcactaagaaaatccaatgttggaatatctatggggaacattggaagcgacctttcgattgagtcttcaaatatcactttaatcaaagacaacatagaaaatattcctcacttaattgaggtatcgaagaaaacgattaaaacgatcaacatcagcatcggctttgcattaacactgaacataattgcaatggcactagctattttgggcattttgaatccaattgaaggtgcattgatacacaacatcggttcagtgattgtaattatttactcttcaatcttggttaactacaaaagttcaaaaatcgattatagaacccaacagttcgatgtaaacaaagctttaaatataacgatgttctaa

SEQ ID NO: 73417 - DNA, 1068 bp, synthetic construct
  source 1..1068: mol_type = other DNA
atgagctttagaactaggagaatattaatcatgacgcccttttatatgatatttcagttctttttactaaaataccttttgttgctgttcggtgggcttgatgacggctatctaattattattgccataatcgtcgggttattgcattgtatgccaatgttttttgaatctaaaaagagcactgtggcagggcgattcctgaccacaattggtggtgtatggatgtggatgtcgctaatgtttttgtttgatctcatgttcatttacttaattaagatgtttgtaatattgcctttcgagataatagtcgatttggtcttgattgtgccgttcctgggtatttataatttttataaatctcataagctagttattaacgagaaaatattggaattaaacaatttatcaagagatattaacattgtgcacctttccgatgttcattttggatctgtacgtcataagaaaattatcaacctgttggtcaataagctaaaagaacttgaagatacatgtgagctagctattatttcaggtgatcttgcagacggttcctctgctgtgggaactgatgatttcttggcctttaaggacgttgacatgccaataatcttcacgcctggcaaccatgacttctatccaggtattgataacgtcataaatgcgtgtaaaaacgctggcatcattgttttggacaatgagaaaaaggaatttggtgatttaagtatctttggtttaacatttagtttcgaagataggtgcgttccaaaaatcgatgaaagttggatcaatcctaatctgatcaatatcataaattatcacgttccttactattgggatgaattttcgaagttaggattcgatattcaactttcaggccatacacacggcggacaattttaccccgctatttggttcgcaaatatattattcaagtacaataagggactctttaaaaataacttaggaaaatacttgcacgttaccactggtgtaggttccatggacactccaatgagatggggtaccgactcagaaatcgttattttaaaattgaaaaaagcctaa

SEQ ID NO: 73418 - DNA, 1125 bp, synthetic construct
  source 1..1125: mol_type = other DNA
ttgaaaaatgataacaaaaaagcagaaattaagacaactaatcaaaagcaaaagttgaaaaaagctgaaagtaaagaatgcgctgagtgtgtcattttaaagcctgttggttatccattcgaatttaatttgatggatgaacatattgaaattacgaacaagaagctatttgaagagtacgctcgtgaacaatggttgggattggttgtaaaggagaactcacacttatttgaccaaaagataattccggactacggttttgaagtcataaaagcaaagcccaacaactcaataatctctgaaacaactcgaatccagctaattaccagcgatttagaaaataaaaatgacaaactcacatttaaatccaacatctctatctcggatattgttggacaaacaaatgcaaaaaataaggtgaaggttataatgaaatatttagagcaccctgggaagttcggcccctgggcaccaaaaaacatactgttctacgggctaccaggtaccggtaaaaccatgctcgtcaaagctcttgccaacgaactggaagtcccgttgtatcttattaaggccacgtctttgattggagatcatgttggtgatggtgcatctaaaatccatgatttattcaagaaagctagtgaaaattcaccatccataattttcatagatgagatggatgcagtggcgcttcatagatcattccagtccttaagaggcgatgtgtcggaaattgtaaactcttttttaactgaaatggatggaataagtgaaaacgaacacgtaataacgattggtgccactaatagccctaatagtttggattatgcgattaggagtaggtttgaagaggagatcgaatttaaattacctgacgatgaggagagattaaccattctgaaaaataacctaaaaagcatgccattggattatgaactggatttggaaaagattgttaaacttactaaaggtttatctggcagagacattaaggaaaaaatactaaagactgctcttcataatgccatcgctaatgactccgactcaatcacaatgaaaaatattgattactcaatcgaatcttcgaaaattaagaataaagacatcaagggtatgtttgagtaa

SEQ ID NO: 73419 - DNA, 1602 bp, synthetic construct
  source 1..1602: mol_type = other DNA
atggatttcataacacttaagaatattactaaaacgtttgacggtgttgatgttcttaagaatataaatttgaaaattaacgagggggaaaccttaggtattttaggccgtagtggatcaggaaagtctgttctaattaacatgctaagaggtacatcagactataagcccgatgcgggccaaatattagttaatgtagcagtttgtccggattgtttggcagtagattcaccatcgcacgttggtgaaaagtgtagttgcggcgctacgctggaagcgaaagaggtcgacttcttcaattctgagagaaaattatttgcatccattaaaagaagaatttccatcatgttacaaagaaactttgccttatacgatgaagaaacggtaattgaaaacgtaatgagggcaatgcccgagggcaaggattatgacgagaaaatctacgaggccttggaactattagagatggttcagatgaatcacaggattactcatatcgcgcgtgatctgagtggaggggaaaaacaaagagtcgtccttgcaaggcagctagctaagtcgccaatgatgttcttggctgatgaacctacaggaactttagatcctcaaactgccattaagctgcataataccttgaaagaaggcgttaaagataagggaatcaccatgttaatcacgtctcattggccagaagtaatgatagaattggcagattcagtaatctggttggaagagggtcaaataaaggaggagggcgagccggagaaggtggtaaatgaatttgttgctacaatccctattccagaaaagccagaaataccagagttcggggaaccagaagttgttcttgaagatgtcaagaagcattactactctatagaaagaggggtggtgaaagcagtagacggtgtgagcttaaacatcaataaagaagaaatttttggtatagtgggcctctcgggttctggaaaaaccactacaacaagaatgttaatgggactaacagaaccaagctccggtaatattcagataaaacttggggacgaatggattgacatgacaaaagttggacctttgaaccgtggtcgcatcatgccttatataggtctcttacatcaagaatattctttgtatccacataggactgttcttggtaacttgaccgacgcaatcagtctaaacttacccgccgaatttggtaaaatcaaagctattcacgccttgactactgtgggttttgccgatgacgtcgctgccagcattcttgataaatatcctgatcaattgtccgtaggtgagaagcatagagttgctctggctcaggtgctaataaaggaacctaatttaattgttttggatgaaccgacaggtactatggacccaattacccgggtcattgtctcagattcaattctaaaagcacgaactgaattggaacaaacattcattatcatatctcacgatatggactttgttttagacgtctgcgatagggctgctctgatgagaggaggtaaactgttggatattggtactcccgaagaaatagtggacaaattgaccgctgatgaaaaagaggatatgctcaaagaaaatagataa

SEQ ID NO: 73420 - DNA, 627 bp, synthetic construct
  source 1..627: mol_type = other DNA
atgtataccggtagaattttatcaacggggatgaactgtgaaggtaaacctttcatagcatatagggtaagcagcagatcgtttcccaacaggcagtgtctgaagtttgaaaatcgtgcagctattgttcctaaagagggatttgagaaggatattttcgaaaacccttacatcacctacaactgcattcgaattgtagatgatgtggcaatcgtctctaacggatctcaaactgacgttatatcagacaagatttctttgggaatgaatttgagagatgccatggcatattctctacttactatggactatgagaaagattcctataatacgccaagaatcgctgctgtcgttacagccagtactgatgaagatggttacggttgctatataggcatagttaatgataataagattttagttgaacaagtgccacatggtaaagcggccttcatatcaacatacggcagtcaagtgccagatacagttgacttcgacgcaaaaactgctaatgaatgtgccaaatttatctttgacgaaggtgcttttgcagattacgagaagccggtaacctcgtccgctgcgatcttcgatggggaatgggctattgatgtctataatccataa

SEQ ID NO: 73421 - DNA, 411 bp, synthetic construct
  source 1..411: mol_type = other DNA
atggcaattgacgtgggtaagcacaaaaagaaaatatcggacagcaaaccatctatcaatttagtgccgtttattgatatacttttcacaataatgatctttttggtcgtaaccagcaatttctccgcagatgttcaaactgatgattccgatgttacagatggtggaagtggcaaacctaatgttacttctgtctcaggtgactctgagtactatgtaatgcccgtagctaacttacataaagtaaccgttaatggggttgataagtcagacacgatactaaatagtgctgttggtgttcaagccaacgtcattgataacggtaagattacaatcaaacctggcgaaattgatattactactcctgatggagtctcaccagacaaggcggtgcagagaccacaattgtaa

SEQ ID NO: 73422 - DNA, 840 bp, synthetic construct
  source 1..840: mol_type = other DNA
atgattattgagtcaataatgccgtttgttgatgggatagtggatatatttacccaaggcggatttatcacatacataatactcttcattgggatttacggtctaataattggattaagaaagatagcctaccttcgaaagattagtaaagtggacacaactgaaatatttggagtggtaaccgcgtctatggagaggggcggggctgtagaggctttaaaacagataaatggcttcaaaaaccctatttcgagaattatttctgaaactttaaaaatcggttataaaaacaagactgaagttgaagaatccatggagcaaatattcattgttgaagttggaaagatgacgaaaggattaagtaccatcaaaacactgacggaactagcaccattcttaggcttaatcggtactgttatcggtatttggttgacttttaaatcactgggtgtccatcccgactccgctgccatggcagaaggtatttatgttgccttgactacaacaatcatgggtctactcgtcgcaatcgttttgttgcctattcacacttatatccaaggtcttattgaagtggagatggataaaattgaactggctacgaagatgaccaactggggttatgctgtagtaaaagtcagagtagattcaaatgtcgaatgcgcacttgaagcattacaggaagcggaaggtgttgtcaacacacgtttgatttcggacccatacgccaatatcaaggtttcttttaaaccaagcatgttggataagagcatttctaatatcatattggagaagtgtaatgtgaatgctgaaattaccgagagtaaactaaagcaataa

SEQ ID NO: 73423 - DNA, 696 bp, synthetic construct
  source 1..696: mol_type = other DNA
atgaagattgagaacaccaatatgaaaagatttattgccctctcagatatcatatctttactaaatatgacatctggatttctgtccataatctttagttttaatcatgaatttaatatagctgctatccttcttattattgcaatcatgttcgactctgcagatggttgggtcgcgcgtaagataaacaggcaagacgaattaggttttgggaaaaatattgattccttgtctgatatcgtctcatttggtgttgctccagctatattcctgtacagttgcattaacaccactcctggcatttttcagattatcgtaacaattgtttgcttgttgattgtggtttgtggagttttaagattgacgagatataatgtaattgccggcaagataaacactaacgattttattggttttccaattccagggatgagcctcatgatcggttcattctatctaagtggaatattcaatccgcacattgcaattttgttgtcgattatagtgtcgttacttatgatcagcaatataaaatatcctaaattcgataacatggccttgattggtatctcctgtatcttgatcataatcttaattctgcctattgacatgattttatttaacataaatattcccgctatacttttactattcttctgtttgtactacctaataatcaatttaattaaaaagtaa

SEQ ID NO: 73424 - DNA, 1170 bp, synthetic construct
  source 1..1170: mol_type = other DNA
atgaacgataaaaagcctcgcgatccactatatccaaaaggttttgaagagacccgaaagttgaagaaccaactaactaaggaatactcaaagcctaataaaaaggaagatgaactcacgcctcttaaaaagctaaatcataaacttggtgtttatttgagcccaaattctgttgaaatctcaaatgatgaaaagaagaagaaaataggcattataataactacattaattttaattactttaatttcatcagcatactacttcttaatctacgagcccgctcaagaagagctgacccttgctaaaacgactaagctaaatgaattgcatgaaatctacaacggacctttaactacctcccagaatagtattttgttggaaaaccaaattaacgatggcaaaactcccgaggaaattgagcgtataaacatattaacaccggcgacaaaagactggcaaagctttcacaaaaaatcgatttacaccaataaagacaaatataataggactatggctatctattctaatgaaagtaaaaacataattctttctacaactaaagccattaagattgtaaatgagaacaatgcagaagtcttgtcgaagattaaattcgaggaaccaaatactgtctccgtccccattttaatctcaagactgcaggccggggcaggcctcgtaaatgttgggagcgtggtggacatttacacaaacaacaataacaccaatgaaaattatactccgaataatacaagtccaaacatcagtggttgtacagttttagccataatgagatatgaggacaatggtgaaattgattccaaatattctaagtctaatactataataaagggtaaccataccaatccaaaagaaaacacgaaagaattttcctctgatgttctggaattgataaagggatcgatcattaatggttatgatgaagagaaaaccattgaaatcctgaaaaattatggaattaagctatcaaattacgagagacaaatcaatttgggtgatttaaatgctcagtatatgttgttgattgaaacaccacaagacaaagtggagtatgtaattaacaacatggaaaatatcatattaacgatccctacaacaaaagctcctaactggatggttaacgaaataagttctacgtaccaagattaa

SEQ ID NO: 73425 - DNA, 720 bp, synthetic construct
  source 1..720: mol_type = other DNA
atgaataaaccaactatttcaactatagtcattattatttgtatcttaatcattggtttgtatgcaatgggtgaggttaactacttttcctctaaaattgctgtcgaacgtaacattgacagtcccactattctgatcccgagcattggagtgaatgagaagatcaacaatgttagtttgaatcaaggtgtacttagtgatcctggtgaaaacatccccacgaaggattacgtcgccttgtatgggcatagaactcttcaaggttcaccgtttttcagattaaatgaacttagcattggcgattcaatactattggaatggccaggcgttggtgaactaaactacaccatcacaaatacaacaattgtgcctggtacggctgatgtacctatcggtggaaacgactcgttgttcctaataacctgtgatccaattgggtctactgcaaataggataatcattgaaggaacattagaaaagcagaaccctattaacaacgaaattattaaagagaatccacaagagtctaatgcgataataataaccgctatattttttatagttggatgtatcttctcctatttttatccaaaagacaatagaatatatatcttagcagttattttaataatttcggccctcttattctattcctgcattaatccaatcccttctgaaatcatttacgaaaaaataatttttttgaatggcggtctgtaa

SEQ ID NO: 73426 - DNA, 228 bp, synthetic construct
  source 1..228: mol_type = other DNA
atgaacgtcaaaggaaagatatacttagactacaacaataaggaatctgctgaacttatattcaattccttggaaatcgataacaaaaattatctaaaatcaaaattgaaggaagataaaatcatctatgagattaatagtgaaaccctcggtagctttttggcaacagctgacgatttaattgcctcggagattgttattgaaaagatactggatgcgactcaataa

SEQ ID NO: 73427 - DNA, 1137 bp, synthetic construct
  source 1..1137: mol_type = other DNA
atggaatgttattatcatcctgaaaaagaaagtacagctaattgcgcaatatgcgggaaatctgtttgcggcgaatgtagtttggagattgcaggtaaagtttactgtaaagaatgtctagagaagattgtaggtcttggaatccaaaataacattccggaagaaaacaaatctgatgagcaaaacccaatcgtaacagaatcacctgaggttaatgctcagtcggtcgacgataatatctaccaaccacaagaggaaacagatttcgagataccgtatactcctcaagaggaagtgccttcaaaggaatttaaaggcatctctgatgattcaccctacaacattaaggaaaatatcgaatatactgggggactggaatcttcttacacgatagactccgacatttatcaaaagcctcaagtcgagcagcagccacaagtggctcagaatgagttagacataaagcagccaacattgaatagcatgaacaaggatgactttatatatcctgatcacgattatgagccaccaaccactagtgccagacaagaattagaagataaatatgaaaaatatcttgatgatttgtacttcgatgagaacgaagttccattgggcgaacaactagcaaaagacgaagcccaatacggatcattaactcgtaaggaatatgcttctaagcctaaaaacattgttgaaccccagataccaactcaaaaagatgagccaataatagaaacccccgaagagatggaagcacgaattagggctgaaattttaaaggaacagggtttgatgaccgacacacaaagcattgattcaactcttaaggaagaacttgagtccagcaaaggtaagaaactctttggtttgagaaggaacaaaaataatgaagaggaactgattactgcctccgaagataaaaacatccataatttaaattataaagacgaaaaggaacccatgggtgttgtcgacatactattaacaatcattctagttattgtaatcctcattgtgatatactacatcgtgtacttgttcttattgtcgtccacgtatccaacgtttatggatgcggtctttgcgattagaaatccgcaaaatgtaattaatagtattctgacccaattataa

SEQ ID NO: 73428 - DNA, 1236 bp, synthetic construct
  source 1..1236: mol_type = other DNA
atgattgtgtttaatgatgatggctgtattaagtgtggggcatgtcagggtacctgcccgacttcagctatagaagtaacacctaatgcgattgtacattgtgacacttgtggtgaagagccaaaatgtgctgatgtttgtcccaacggtgcattgaaggtcgaagaatatgaaatcgctgaaggtatatcccaagccagattagtgtttaactctattttatgcgaccaatgtggtaaatgcgaggaagtgtgtccacaggagactattaaggtcacgggtacaaagttgaaagaagttgaaggcttctgcgtcatgtgccaaaagtgtgttgacatatgtccagttgatgtgattggtgttccaggtgttaaggaaccggcagagtatgacttagatctcaaaggaaaaggtccagtctacataaaagattgcgttggatgtggaacctgcgttgatccatgtcctgtaggagctatcactctagatgaagtcggaagcccagttacggtcaatgacgattgcattaggtgtggcttgtgttcccaaacctgcccatggaatgccatatttattgctgagaaaaaacctatcaagcgaacaaaagaaatcaagagctttacattcgattcagcgaaatgtattggatgtaatacgtgcgtagaagcctgtcctggtgattttatcgctgccaacagttcttctttaactgttgctattcctagtgtctgcgcagcctgctcgctgtgtgtaaacctttgccctgtgaatgccctagaaattgatgttgagtggggtgagggttcacctgtggacgcggaaggtattggcagagatgtcgaaaaatgtgactttattggcgcatgtgctaacaaatgtccgacagaggccattcgtgtagttaccaaaactgggatgtcctgtccagcgttggtagagactgatgctgagccctcgttcactagttgcataagatgtggagcttgcgcttcagtgtgttctaatgatgcactaaaagttgaacagtacgaagtaaccataaatggtgaagctgttgctagggacagaatagcattcaacccatctaagtgtaatcaatgtggggactgtatcgaagcatgtccctatgatatgatccacaagacagaaaaccccaaacttccaatcgcaggcttctgtacattgtgtgggcaatgcctggaagcctgccctgaagatgcattatgctacaagtaa

SEQ ID NO: 73429 - DNA, 933 bp, synthetic construct
  source 1..933: mol_type = other DNA
atgtttagatttgataaggaacaactggtagttgatgttgccggtatgaaaatggggggccagcctggtgaataccccactgtgctggcaggtacgatcttctatggtggccataatattattagtgatgagaaggctggggtcttcgataaagatgcagctgaagaacgaataaaaacaatggaggagatgtcggatgtaactggaaacccttgcgttgtccaaaccttcggtgctaccgccgaagctatggtcaaataccttgaatttgtaggagacgtctgtgacaagcctttccttatagactcaacggccgctgccgcgaaaattgcaggtgtggaatatgtacaagaggtcggcttaacagaaagggctgtttataactctttaagtatggctgctgaaccagcagagattgaagccgttaagaatagcgacatagatgcgtccattctattaggttttaacccaatgaatcctggggttgccggtaaaatagaaatctgggaaacaggtggagatgttatagacaagggtattctagaaatggctgaagaatgcggcattactaagccatttatggatgtagcagtaaccccgttgggtcaaggcgctggacccgcggtccgtacatcttttgccgttaagtccaagtggggttacccagttgggtcaggcatccataatgtgccatctgcctgggattggttgagaggatataaaaaagagcataaagaagcatggcccgtttgtgatatcggttcaaatatcgttcaacagatggctggtggagactttgtgttgtttggacctatcgagaatgcaagattggcattcccggcttgtggtatggcagatattatgatagcagaagcggctaaagatattggtactgaaccagtggaggaccacccaattaacaaactcttataa

SEQ ID NO: 73430 - DNA, 240 bp, synthetic construct
  source 1..240: mol_type = other DNA
atgagtgaagaaaattcaatcccacaagtgatggtgtcctcggacgagtttaacgatgttgtagctaaactcgatgcagcggaggaaaaggttgattttaccgtcggagaatattaccaaaggctaggccaacagactggtagagacgttggtatattatatgggattatacttggactgatgattttgatcgtcgccattaaattcggtgtagctagcatgttgtctacattattgtaa

SEQ ID NO: 73431 - DNA, 207 bp, synthetic construct
  source 1..207: mol_type = other DNA
atggtacaaatctctaataagccaaacataggtggaatgaaaacagccgccgacgatgctgaatatagttcaaagctacttgctagggagggaaagttattcgctggtttactcgcaaccagatttaaagggtttgctattggtatatgtattgccactctgttgatcgttattattcctttcatagcgaaagcagcaggcttgtaa

SEQ ID NO: 73432 - DNA, 717 bp, synthetic construct
  source 1..717: mol_type = other DNA
atggctgataaaaaagcgcctgccgatggctggccggttattagtggggattacatagtcggtgatcctgagagccctgttgcagtaacaactctagcttctcatatagaggctgagctttcgggcgcagctattgcaggtccatgcaaaacagaaaacttgggaattgaaaaggttgttgcaaatattatttctaaccccaatattcgttttctgatacttgccggtgctgaagtacaaggccatatcactggtcaaagttttaaagccttgcacgaaaacggggctgatccagacaagaagaagattgtgggagcaaccggggctattcccttcgtagaaaatgttccactggaaggtgtggaaagattccagcaacaattggagattgttgatttaatcgacactgaagatataggcgcaatacaatcaaaaattaatgaatgtgtcgaaaaagacccaggtgcgtttgaagaagaggccatggtgatttccgtagaaggcgacgacgctgatgaagaagaaggagaagcaatcagggttgtctcagccgagacgggtctcatcgaggccagaatacgagatattaacacaaagatcgatatggtcggtgctgtgcagagaaatatggcgggtaattatgcaggtaaagtccaaggtataatgatcggattagcttttaccttaatcattggagttttattcttgctattttaa

SEQ ID NO: 73433 - DNA, 330 bp, synthetic construct
  source 1..330: mol_type = other DNA
atggctcagatgcttcctatggtgcaagtggtaccagaaatgaattttgcctacgacccggtctctggggttatcggctcatccttaggttcaggtgttgttctcctatctatggatgaagtaaacgaacaagtcgccaaagtagagttggcggctgatgaacttatggcttctctagatccatacacaagtcctgttggatcgtatcccggtagagagggttcctatgtgactgcaggactgttaaccaatattgtctatggtttcttgttggcaagcttcattatatttgctgcattaccaatattgcaagccatgggcgttttataa

SEQ ID NO: 73434 - DNA, 816 bp, synthetic construct
  source 1..816: mol_type = other DNA
atgtctgctggtggcagtgcagatggggcagctgccggtgccgttgacagcatgcatttgttagtgttggggatagttgggggattactaggtatttacctaaccgcttttttaggagaaactataggctcattgtttgccggtcttggtgctgtatgtgcgattgtctggggagctgatgctatcagaagggtagcatcgtacgggttgggtacgggtgtcccctctattggatatatgtccttgtctgttggcgttatttctgcctttgcaggtataagtctcgctgcgatattaaagatgccaatggtaggccctatcgcagcgttattggttgctgtaattattggtgcggttattgctcttgtggcaacgaaaattgtaggcatgaagatcccgattatgcttcaatgcaccatcgaaatcgccggtgctgctgccctgtcaatattaggattctctgctgcaattgcgggtagtttcgatatggctgcagtttatgaaaatgtggtggcaacaggatttattgctgtcctgtttatactatgtactatggcaatccaacacccattcaatgcatgcttaggacctaacgaagatcagttgagaacactaaaatgtgccgcatcgacagcatttttgtccatgactatagtcggtctcatgtccatcacaactggtggactgggttggtttatagtgttcatcgtcggtttaattggttggattatttcattcaaggcctttgttgttgctagcatgaatgacgctgcctcaaccaaatgggctggcctttggccaaaagttgagaactaa

SEQ ID NO: 73435 - DNA, 702 bp, synthetic construct
  source 1..702: mol_type = other DNA
atggacccaattagcttaatattattcatcgcaataggcgggataatgatcggtgcaggggtgcacttcattcccgtgggaggagctcccgcagctatggctacagctacaggtgtcggtactggaaccgctatgttggcggcgggtgccggtttaacaggcttgattacggctgcaactatgacaggcgaaccattttatataatcgggatcggtggtgcaataggtgccatgattatgatgggtatcactatgctcattgctaatataatttatatatttggcgttggtattgttcctgccgcctctaaggtacctgttgactggattacaaaaaggaaccaagaagcgtacaagactcctggtaccgaaggtcatggcgtaccagttacttccttcgttagtggtctaatcggaggccttctgggtggttttggggggggacttgtgtactatggtattgataccgccataaaccagtcatcatttgtttctgatccggctgtcagtattggtctagctgctataattggtgtcggcgtcttctttattaattcggtaattgcttcctacaatatcggaggtactattgagggtatgcatgatccaaaattcaaaagaattggaaccggagcaattgcatgtgcaatagcctctatcgttgtagcaatcttttgcattattttgacgggaggcatctaa

SEQ ID NO: 73436 - DNA, 879 bp, synthetic construct
  source 1..879: mol_type = other DNA
atggaccctgtaacattaggtgttgttgcactaatgggtgcagttgctaccatcggaggggctgcggaggatttggagtctgatattggttcgcaaagtaaccccaactctcaggtgcaacttgccccacaaatgggacatttgcatagaatgataaataaggcggcttcaggtgaacccgtcgcttatggcgtgtggtgcggtgttgccggggctattgcatacatagtcatgtccctaggtatgttgcctatcgttgctatcgcaatgggtgcttgtgtcgctgcctttgttcacgctatttatactgttacatcccatatgggcaggatcgttggacagtctcaatttgaacaaccattgtttatggatgtattaacgcagtcattaggaccgatagttggtcacggatttataaccagtttttgcatagttggcatatcatacttaatgactattccaattaatggtacggcattgcatgtattcccattaccactgttggcaatgctttggggtattgccctgggtgccatcgggtcttcgacaggggacgtgcactatggtgcagaaagcgaatatcaaaaattcgaatttggtggaggcactcctgtggcgattcaaggcgatattgtgactaaagctcctatgggtgctaagaactccatggatgtcgtaaatttttgtgccaaattcggtggaccattaaccggtttctgtttcggcctcgttgtattctttagcttctggaatacagtagtctttggcgtctatggtggtattattgtagggattatcattgtgatcctacttgttataatggacaattacctggaagtctttgcaagaaaccaatatggaccgtacgaggaagaataa

SEQ ID NO: 73437 - DNA, 1332 bp, synthetic construct
  source 1..1332: mol_type = other DNA
atggcaaagtttgatgataaggtcgatttatatgacgataggggctcattgattgcatctgacgtaccaatcgaagccattagtcctcttagaaacccggcaattcagagcatcgttaaaggtgtcaaaagaactgttgcagttaatcttgagggagtagaaaaatccgttaagaccggatcagttggtggagacaagtcgaaaatattgggacgcgaactggatttagacatagtttctaatgcagaagcaatctcggagaagataaaggggactatccaagtttctgaagatgacgatactaaagtggagccaattagtggtggcaaaaggctattggtacaggtcccatctcagcgaattgatgttagcgctgagtactccgtagctcctctagccacagctacagctttggtacaggctatcatagatgtttgtgacgtggatatttatgatgcaaacttcgtcaaagctgctgtacttggtagatacccgcaatctgttgaatataagggatcaaatattgcaaccatgttagatattccacaaaaactagaaggacccggttatgccttgagaggagtcaaggcaaatgatttcgcggccgctactttgaagaatacctttcaagctactgctttagcctcgatttttgaacaaactgccatgtttgaaatgggtgatgcaataggtacatacgaaagattacatttactaggcttagcttaccaaggtttgaatgccgataatatggttatggacttagtgaaggacaatgcggctgaggggacggttggttcaattgtacaagcaaccattgctcgtgccgaagctgacggggtgattgcgccccaaaaagatctgaccgacttttctatctataacacagatgatgcagctaaatggaacgcatatgctgccgccggggcggtagcggcaactatggttaatataggtgccgcgcgtgctgctcaaggtgtgccatctactctgctctacttcaacgataatattgaatttgctacgggtcttccaagtatcgactatggtagagcagagggcgtcgctgtcggcttctcattcttcagtcattccatctacggtggtggaggtcctgggttattcaacggtaaccacgttgtcacaaggcatagcaaaggcttttgcataccttgtgtggctgccgctatgtccttggatgccggaacacaactcttttcaccagaagcaacgtccggcttgattaaagaagtgtatagtcagatagatgaatttagagaacctataaatgcggttgcaattgcagctgaagagattaaaggtgacatctaa

SEQ ID NO: 73438 - DNA, 1173 bp, synthetic construct
  source 1..1173: mol_type = other DNA
atgaaaagagaattattgaccataattggtactgctcatgtctctgaggagagtgtgaatgaagtaaaggatgccatttatgaacagcatccagatattgttgctatcgaactggacaggggcagatatgcaaaaatacgaaataaaatgcatggtatcgaagaggatgacaatatctctgtcactagaatcattaaggagaataaagttggcttattcttggtaagtacgctgcttggctatttccagtcaaagattggggcagaagtcgatgtagacccaggttccgagatgattggtgctattgaagcgagcaaggacctcggtattccaattgctctcattgatcgtgaaatcaataccaccttgcaacgcgcgttgaacaagatgggatttatggaaaaagctaagtttgcctacggtctaatcgcttcaatattgggttttgataatgacgaagaggaaatagacattgaagagctaaagaactccgaaaatattgatgacatgatggaaatgtttaaagatgaagcccctagcgtttatgaagttcttgtacacgaaagggatgcttacttagcagggaaaattatgcaaataccttatgataaagttattgcagtcgttggtgcaggacataaacccggtattgaaaagtacttggataacccggaaacattgcctgatttaaaggagctagaaatcataaatgataaaaagggaatcccttggcttaaaatatttctggcattgataccgatattatttgttgtgatattctttctggcttatttcaacgggataaatattactggaaatatctacgagtttatagtcatttctgtaatcatgggtttcatcggctcaattctttctggttccaaaatacaatcagcaattgttggtggtatcgtggcgccattaacgattatccacccattattggccgccggatggttttctgggctaactgaagccaagtacagaaaagtaaagcaaagtgacattaaaaatctagtgaagattgaaggctttaaagatttatggaacaacaacatctttagaatattgcttgtcgttattggcacaaacttgggagtgtcgatcgctacattagttattttaccctcgaaagttttcattccattattcatgaaaatattcggtggataa

SEQ ID NO: 73439 - DNA, 1320 bp, synthetic construct
  source 1..1320: mol_type = other DNA
atgatcggtacgacactcaaaatagttataatcataatcctaattattctaacgggatatttatcaatggccgaactggctgtggtatctataagaaaggcaaaaatgcagaaatacttagaagatggtaataaaaatgcacaaattgtctttgatttattggaagatccaaatgaatttttatccacagttcaaattgggatttcactgattggtgttttgactggtgcatttggtggcataacactggcggaaccattggctaaaatcatctatttcataccatatagtgacatgataagcgtggtgttggttgtgttggtaactacatacttaacattagtaataggggagattgtaccgaaagtcatcgctctaaacgaccctgaaaaagtttctttaaaagttgctaaaagcatggtaattctttctaagatttcaaaacccgcttctttcgttctggccaagtcatccagttttctcctatgggtgttgcgcatcgaaaacaagaatgatgaaatagttaccgaagaagaaatagaattaatgattaaagaaggcagggaagacggcactattgaaaaagaggaggaagacattataaaaagagtcttcaagcttgacgataagaaagttgaaagcatcatgaccccacgtaatgagattatttggattaacttggaagattcgagggacatcaataagataaaaattgttgagagtaaacgatctattttcccaatagctaaaggagagttagatgattttattggtgttgtgcaggcgaaggacattctttcagtgatgttttccgaggaggaatttgatatcaatactataataaaggaacccttggttgtctccgagcacctagaaaccttggaattgttgaaagaatttaaggagaaccaaggttacgtacatatgtctcttgtaatcgatgaatttggttcggttgaaggtttaataacattaaacgatttgcttgaaggtattgtcggagatattccgggaattgatgaagaagatgaacctgaagcaattaagagagaagatggaacttggttaatcgatggaagataccctattgacaaatttaagaagctattcaagtttgaagacccattacctgatgaagaggaagacaattatactacgctggccgggttcatcctctcgatcagtggcaccatccctgatgaagaggacaaatatgagtgtggtagattcatattcgaaattattgacattgatggccatcaaatcgataaggtccttgtcactgatttgggtccacaagaggatattgaggaggaataa

SEQ ID NO: 73440 - DNA, 945 bp, synthetic construct
  source 1..945: mol_type = other DNA
atggatagcgggataattattcaagttgtattattgattgtcgggtttgtttttttaattaagggatcggacatttttgttgacggttctagctctattgcgtcactgctaaaagtgccgacaataattgttggtttaacgattgtggcatttggtaccagtgctcccgaggctgccgtctcaataatatcttctattaatggcaataatgccatggctgttagcaatatcatcggatcaaacatattcaacatcttaatcatcataggtgttggtactttactgggcgatctattgatggaaaaaaatgttttaaacagagatttgcctatcctaataggcgtgacattgctattaactgcatttatcattattggctggaacatctccactattgaaggaataattctactcgcaattattgttgtttatgtcttttcccttattcactcttcaaagaaagatagtcatgcacatgatgtagataaaccaaagttgtcgactaaaaagagcatatcctttatcattatcggcctggtgggaattattcttggtggtgatttagtcgtcaagtcggcttctacgatcgccatctcctttggaatgtccgagacattggtaggattgaccattgtagctatcggtacctcattgcctgagcttgtaacttctcttactgctttaaaaaagggggaaaatcagttggttataggtaatgtaattggttcaaatattttcaacatgttatttgttttaggtgcatctagtgccataagtgaaataccactcgattcaagtttgcttgtggacgtcatgtttatgatcttcattacattgttgtgtttcatattcggtaaaacacaagaaaaatacgacaagaaagaaggtattatattcatagctctatttattgcgtatatggctttcgcaatcctgaggaactaa

SEQ ID NO: 73441 - DNA, 1167 bp, synthetic construct
  source 1..1167: mol_type = other DNA
atggaagaatataagatcaagactatcgaagaagggttaacgaaaatcgagtttcctgaatttgataaggtctcttctgatgctccagttttttacaatccccatatggaattaaacagggatttgtcaatactggcaatacaagtgttccaaaaagaacaaaaaagagagataaatatttgcgacctgtttggagggagcggtatacgaggcatccgttataagaatgagattgacggagtaggtgaaatatccattaatgatataagcgagacggctaatcactacgaaaaacacaacataaaattaaacaacttggaggacattgaagtatatcagcatgacgcctcgatgttcttgagaatgaaacgtggggagtttgatgtaattgatattgatccgttcggaacaccatccccatttctggattcatccggttattgcgctaagagaaattccctactatgtgttacagccacggatacatctgccctctgtggaacctataaggaaccttgtatacgcaaatataatgccaaaccctacaaatcggaatactgccatgaaaccggaattagaatattagcaggtttcgttgccctaactctttcaaaatatgcgaaatgcatcgacgtcaaaatgtctcatagtactgagcattacatgagattataccttgaaattaagaaaggttcaaaaaggactgatgaaacattgaacaatattggttatattagccattgtaaaaactgtcttcacagacagacatcaaacggcctagctagttctattgatgcaatctgtccagtttgtggtgaaaagctaattcacgcaggccctttatggttaggccctatccaaaatggtgaatttattcagaagatgattgaagaaactgaaaacaaaaagatcaattcggaaaaggaggctttgaaattgcttaataaatgtcatgatgaagctaatgctccggcaaccttcttcgatattcacctcatctgcaaaacattgaagatcagtgctccaaagttcgacttgattttggacgaactgaaaaaagagggttttatagcggtgaaaacccattttaagccattaggtatgaaaactgatgcatctattgagaatattaagaacattttgatccaattacaaagtaagatataa

SEQ ID NO: 73442 - DNA, 2370 bp, synthetic construct
  source 1..2370: mol_type = other DNA
atgtacaagtgtataagtgcttataaaattaagattatcaacattaagaatatgacgaattttacgaagaatgattcatttaaggaggaaaacaaagtcatgaaacttaaggactcttatatcttattaatagcaatggcaatcttcctattaatgtccataggttctgtttgtgcttctgaaatatctgcagacgataccataggcctagctgatgacggttctgatgtggttatggatgacaagccaattgaaccgtccaatccaacaacaccccacaaggtggatacaatgattgtttctagcgatactgtatcaataaacgaaaaagagaaaataaaatcaattgatttaactgtaaacgataccaataaatctaaagtcatagctggcattacagtaaaaaatttgaccgtgaaggaaggtacaaaaacaataaagtttgattataacaattcgaaggtcattattaaggacgcattggttctgggtaagcacgatttacttgtcagctatctaggtaatgaaaattacactaattcttccaaaaacattgtcttaaccatcttcggaaactatacaatccaagcacccacttcggttgatgtaaacagtaccaaaattgttgaagtgcctatcaatgtcaccaatggtatcgatccaaaggaactcgtaaaagacgattttaatgttacacttacatataaagatggcaacatcactaaggctattaatataactgattttcgtattataaataatacaataatattcaattatccattatcaaggaatattacgacctcaacaataacccttgtttatactgctaatgagactgtgaaatctaagaatgttacaataaacagaatctacaatgttaaaattgaggggattaatacgaagaatcaatacaagaatggtaatttcacctttagactgaccgatattgataatgcaactgagaatctaactggttttaaattgaacttacttattggtaaaaatgtgataaaccagattacaggaacagctgacaagaatggtattgtcaactttaaaacatcgaagatattcggatatgatttcaacaacaatacaattgtaattaaatacttgaatgttggcaataacacggtggaattgaaaagtggcgacaatgtgaaattgacaacaaataaagttaacctgacgattgaaaaggccaaaatcaacattactatcgataagtacaacgaacagtatggtagtaacaaaaatttaaccattactgttataaatgcggataatggggaacctgtgccaggaatcattctacatttgaacatgcctcaaaccgccggcaagaactattacattcagactgacacaaatggtatcggcataatctctgttaaaggcttgattcctggaaagtacaatttgactgtaagcaacaatgacactgtcaacattataaataataaggcaagctccaagattattattacaccaaagccagttacaataaagatcacatctggtctgactatcaattataacacgggaaacactgccgccatcaaggttactgataagaaaggtaagggtgtgtctggggcctatgttctggtccaattgtatacgggttccaagtcagcaaactatctcttccaaactgacaagtatggtaatattaaatttaaagcgccgctttcagttgggaaacataaaattgtcgtgagtggtgcggtagggtactcgtcaagcaaagttaccaaatatatcaaagttaaaaaagctactgcaaaaatcagtgcgccaaaggtaaccgcatactacaaacaagggaaatactttaccataaagttaattaacactaaaaaaagcaatgcccccatttatgctgcaaaagttgacatccgagtatacatctcaaactacaagtactacaaatttaatggaaagaccggagtggacggtaaattgaagctatcaattgatttaaaaccgaaaacgtataaggttgaagtgagaggtgccgattccaagaattatgctgcttccaaagtagtctccaaaatcgtagttgttaaagctccaactaagttgtatcctgccaaattaacggctaaaaaaggtacaaacaaatacttcaaagttactgtaaaaaacacaaaaaccaagaaagttattcctggcgtcaaagtcaagatcaaagtttatacgggtaaaaagttcaaaacttatactgtcaagactaattctaagggaattgcacaatttaacgtaaaatcattgagtgtcggaaaacataaggctattgtaagttctgccaacaagtattgcattgctaaatcggctaaaaactacataaaaataactaaataa

SEQ ID NO: 73443 - DNA, 1023 bp, synthetic construct
  source 1..1023: mol_type = other DNA
atgggaattgaaattgagaaatatctcaactttcccgttctgttaatttgttttttattaataacctccttaatattcatatttcctgctctcaagatgatagtcttgggtgctattttggcttatttagttagaccagtagcctttaagattcagtcaaagctcaaattttcctcggtttctatcttgatagcaatggttattgttttgattccactaattgctctggtagggtatatttcatacgaactttcttcagtcgcctcaactatgcttgcatcgagttctacagcggacattaatgaatccatcttaaaattaataacctatttgcatattgatgtcaatccaaatgagatttcccaatctattatttcttcattcgaaacaattgcaagctacgttatgaattacggtgtatcctttttgggtaaatttgctaaccttacgttggacttgtttattttggtttgttcggtattttactttgttcgtgatggagataattgtctaaactttatcaaaagtttcgttccagagggttctgtggaattttttgataagactgtggataacataaaggatgtgttgaaaagcatattttatggtcactttttgactgcagtcatcattggaatcttcggatgcattggctattctattttgggttatccgtttggaatattcctaggtgttttaaccggtatcttacaactgatcccgatattcggcccttggccaatctactggactttgttcttcatcgacgcgctaagtggcaattacccacgagccataatggtcctactattcggttttttcctgagtacgattgacatgtatataagacccgctctttcaagccattatgcagatatccatcctttaatcctgcttgtaggcttcttagccgggcctttagtatatgggattgttggtttcatcgtgggtcctctaattttaggcataacatacacagtcttggatagttatagaaaagaataccttatgagggtggaataa

SEQ ID NO: 73444 - DNA, 549 bp, synthetic construct
  source 1..549: mol_type = other DNA
atgaagaataatgttttaaaaagaagtctaataatcatttcatttatattccttattatttgcgcattctcatgtgtaaatgctcaggaagataacagcgacatcacgatgatgactttgtctaaaggtggcatcgttattcattacccttctaactggggttattcccaatccgatagcaactatagtataatgtcaatatctaagctggacagtgttgattccgctggtgtgggtcaagttaacattaattttgagaaaaaagccattgaaggagatttttacacttacttgaataacacatacaggtcaatgcaaagagattcgtctttcaatttaacctcctcaggtgaagtcatggtaagtaatattcatgcatacgaatatatgtattcttcgaatcaaaacggcaccgtgaaggagcacaaggctgtttggttcgaaaaagggggacaggcctatgtcatgttgtatagcgcgccagtaaatgactttgaagataacttatatgtctttgactacatactctctgatatccaaattacataa

SEQ ID NO: 73445 - DNA, 726 bp, synthetic construct
  source 1..726: mol_type = other DNA
atgccaaatgatagagataaacttctaaaaataatggatagcttggaagttgactaccgttctggaaagatttctccagagaaatatagttactttcgctctaaatatgaagacaaattaaattctatcgacgcaaaagaagctacgcaaaggattaggtccatgcagggtaagtcaaatcaaacaacctcaattaagagaagcagaaagcccaccaaaaataaaaaggaaaaagaacaggatttagttcaaaaatatataatcaacccgaagaagggtgatgctaagtacaacaagaaggaaaaaaaatcaatgagtagtggcacatttaagttagtgctgctattggtgttggttgtagcgttcacggttggtgttgggtatggtgtctttaatctcgacttcaacaacatttctgagacatctaccgtagccatggtccatgatactgcatttcctgatataactgaagatattaaaaatactacaaaaaccacatcttcatctaatactaactattcatctacgtcctacaacgtaaaaactactgaggactcgtcatcagactccgactactccgatgggggtcgaaactctggctccagtgattctacatattcaggttcggattcgggttccggatcgtccggtagcgattctggatcaggtagtgggagctcaagtaatagcggcggctccgagtcgaatggaagaagtgatgaataa

SEQ ID NO: 73446 - DNA, 597 bp, synthetic construct
  source 1..597: mol_type = other DNA
atgtccatcatacataagcatattgatgaaatattcgaatacgacggcagccaaatcaatccatcttgggctttccaggaatttggtgtttatggttcgtcgattataacttggattggtcctgtcaatatcacgcccgacaacttgaaagattttgctgacgttggactagagataaaatctaactatatggtcaatttcatttgtgaatttttcgatcaacagcctccaaatatgaggattgcgtacttaagacaaagacttattgtaatgatttttcgagaaatccttaccgagtatggtatcaagactaagcgtgaaggtgatgacatttttgtagacgacgggaaattatctatctcaatagctagtatttcactaagctctgcaaaaatacactttgccctcaacttggaggataagggaactccggatgatgttgaaacaattggcctgtttgatattaaagatgaaaacggaactcaaatatttaataaagataacttgtcagatttaatcaatgaaaccgcatccagattcattgatgagttgcaaacaattgaaaatgacataagtaaaacaaaggtgttaggttaa

SEQ ID NO: 73447 - DNA, 1479 bp, synthetic construct
  source 1..1479: mol_type = other DNA
atgtctgagaagagaatagaatggaatagtaattttgcttttatgatggctatgatcggttcagctgtcggacttggtaatatctggcgtttccctaatgttttatattccaatggtggtggctctttcatgatcccttatatcgtttcgttgttcttattgggcatatcgtttgttctagttgaatatgcagttgggtttagatttaagaagtcaatcggaagaatactattctctattagtaaaaaattggaaccaatagcttggtttattgtgttgatcgtctttctgatcactacatactatgtttgtgttgttggttgggatttgatttatgttgttttaagtttcacgaaggcttggggtgcaaacccagatacattctttgcaagcaacgtattgcaagcgacagattcaatatctggcatattccaaattgtcccgattgtgctggccagcgtatttgctatttggtttatgatatggtttatagttaagcgcgacttgaatgatggtattggcaacgtcagtaaaattctgttaccaacactttgtttgatggtcgtgataattgttgtgttttcactaacccttcccggggcttcaattggatacacacagatatttacccctgattggaatgccctaactaacttaaatgtgtggttggctgcctttggtcagattgtattctcccttagtttgggtatggcaattgcaatgacctatgcaagttacttgccggaaaaatcaaggttgattgactctgccgttacggttgcattctctaattccgcttttgaagtgtttaactctattgggatattctccattctaggtttcatggccttgtctacaaaaatcccctttgaccaactagtcactgagggcacgggactggcttttgtagtgtttccacaagtattcaacactatgggcccaatgggttctattattggacctctcttcttcatatgcatactctttgcagggattacatcagctatagctcttcttgaggtagtcacatatgcaatttctgaaaaatttaatattgagcgaaaaaggactgttaccgtgatttgtattgtcggatttttaatctcgaccatgtttgcaaccggtattggatcaacgatccttggagcgttcgatgcgttcttaaacaactttgcgttattactcggtatcctgattgaatgcataatcttcggttggatttacgactttaacaagttgatagaaactttaaataaagattccagaatcaaagtgggtaaaacttggaaagccgtcatcaaatacattttaccaatttgtattgctgttctgtggatacaaggtgtttattccactattacaagcagcgataatttatcgttaactattatgggcatcctaactgtaatattaatcgtattgccaatcgttttcgccaagttacctgccaagaatgaagattactacaaggtagactaa

SEQ ID NO: 73448 - DNA, 999 bp, synthetic construct
  source 1..999: mol_type = other DNA
atgtattcaaatatacttacaaactcaatagttgcagtcattcttacagttattgtttgtttcgtaatttccaccttgcttccaggcattgaacgcaaatatgttcacgccagaatccaacaacgagtgggtcctttggtattcgcgccgggtattatggctccattaaaattcttatttaaggagaatgttgaagtttcatctcctgttcccaagctctacaagatcttgccgatcctgtgtttcatcgtgatattatgtgtgttcattgccttaactcctcaagcgtacaaaattccagcactgtccagtttagtggccatcgttggttttttaaaagtagaggagatatgctatgtgttaatgggagccctatctaagtctgtaatgtcagttagaatgccttttcccgatcgtataaaaggagcagcacatattaaggctcctttgtcctttatcgaagatataagtgcaaaaaggtctctaagaatgattacttatggctcgttcccattgtacttagcattgtttgctcccgtcacggctgctagaagcatcttcttaaaggacatagttgcctttcaacaggttcatgggccatttttatttactgtcgctggtggaatcgccgctattgtcttttttataggttatatgataattttgaatgaatacccgtttagtattattaaagcgaaatcggatgtgattgaaggtccatatatggaatatgccgctaaatacaggtctatcgtcttcataacgagaggatttttcatgtttgtcttgggttctgtattttccgtattgttcattggcgtgccaccaagtatatttagcctaggcattttagttaatattgctgttgctctaatctttgtcttcatgatgggtatcttctcagcatttgcacctgtatttacaaacaagcagctactgccaaccattttgggaaccactctgcttggtatattggctattgcacttgggctactctaa

SEQ ID NO: 73449 - DNA, 447 bp, synthetic construct
  source 1..447: mol_type = other DNA
atgggaatcaaatcctttagcagagcacgagcaatacatgtcatgttggtttacaccggcggatgtaacggatgcgatatcgaaattgttaattcgatattatctccaagatttgacgctgaacaatataacgtgttccttacttggaatcccagagaggccgatgtactcgttgtgactgggcctgtcacacatctaaatcgtaagccattggaggccatttatgatgcaatccccaacccaaaattagttgtagctgccggtagttgtgctttgatgggtggtgtctacaagaattgccacggcgatattccttctgaagaaattgaaggtccggttgataaaattatacctgtcgatgcaaaggtaccaggttgtgctgtaaggccacaggatgttctggctggtgttgtgtcacttttacctacgctattggacgcggactaa

SEQ ID NO: 73450 - DNA, 492 bp, synthetic construct
  source 1..492: mol_type = other DNA
atgcgtaacttaataaaaatagctttagaaggtgcatttacaaacttcaaaagaatcttttttgcagctgatagagttacagacatggacatgaaaaagcaaattgcaactctctcggtcgaagtagacgatagggtggacgaaagtgcctgtattggatgttctggttgtgctaatgtatgtccgactaatgcgattgtcatgaaacctttggcccatccagttaagttgacggagggttgggttaaggatcaagtgcctgagattatcctagaaaaatgcgttgtatgctattactgtcatgatttctgtcccatatttagcttgtatggacaaaaaggcgctatccacccatcttgcgttggtgatcaggaagtcgacgtttcagaatttctagaacagccattcaagatatccgatgataagcttaaaattattgcccaatacctgtcagataagaccgtgttaaaaaataaagaggatggggattaa

SEQ ID NO: 73451 - DNA, 252 bp, synthetic construct
  source 1..252: mol_type = other DNA
atgatgttaagtttggggccaatcatattcggaataatattgggtgttattattggatcgcaaatcaaacttaaatgttgcgattcaaactttacctggacatcatttgtgataatcattattgcgggtatcattattgcctggcagtctggcaattatcctttctacacggacttacccatttccactgcatttgtctctgctctgataggtattttcgtaggtaagctactctttgctagaagcaagtaa

SEQ ID NO: 73452 - DNA, 477 bp, synthetic construct
  source 1..477: mol_type = other DNA
atgagtcagagctcaatcattttgaaactagtttctttgccaatttcaatgatattgatctgtttgggtattatgacaatacttggcggtcacataactcctgggggaggtttccaaggtggtgctatgatagctggcggtgtcatattatccgtcctggtgtatggccttgataattctccgttggaattttcacatttatacattgaagttcttgaatcgatcggggccttaggatttatcattttaggtctaattggattgtttgtatccggattcttcctgtacaacgtgggtaccgatttattgaatgtggttccacctacgatccaaaacgtactgcattatcccgacgttactaatgcaggtattattccatatctcaatatatttgttggactaaaagtctttgtaggtttatctgcgattgttatcgctttcgcaggctttaagaagattacagaggagagtaaataa

SEQ ID NO: 73453 - DNA, 282 bp, synthetic construct
  source 1..282: mol_type = other DNA
ttgtcttctcacacaaccgttaggaatttaatcgcatccgtaatggccgccatattttcagtcacactgctagatgctgtgtttcatttatcgagcatgattaacgcaggtgtaagtaacatttacaatgttctcggaactaaaatagctccaaatatggtcactgttgtcatttttgatttcagagcttatgataccttgggcgaatcaatcattttattgacggcgggtctagttgtgttacttatattcggtagaggacttttgggggacaagcaataa

SEQ ID NO: 73454 - DNA, 336 bp, synthetic construct
  source 1..336: mol_type = other DNA
atgagcttatacgacaagatatttgatgttgtgaaacagttcagaaaattgttctcaccagggcctgtaactaatgcagatgtttccggtagtatcacggctgagatctttttgatcgtgtctttagtcctagctaccatattattgaggcatatttcggttttgctcgcaggattagttattctgtttgtggctgttgttctgatcataaacattccattgattcccaagtttaagattgaacaagaagattctctagacaaaatgttattctatgcgattgtaacacttgccattataggcgtagtcatgtattggggtggtaatcttgtctaa

SEQ ID NO: 73455 - DNA, 1455 bp, synthetic construct
  source 1..1455: mol_type = other DNA
atgaatgaattaattccgcttatggtgatcgttccattgatggcagcgttaattattagcgccttttcaaagttcaataaagcaaccaagatttttgcatttgtcattgcgatttgtctgccattgattccattattgtcaaattatggcctccattactttggcgggtatgaacccattttggataatgtgacaaacgttgtgtatcatcctgctatcacatattcatttacattcttccaacagatcttcattgctatgattggtctgcttacctttttagttgtctttgtctatttaaccaaatataaagagatttcgggaccttacttattcttgttgttcctaggtactgcagcggttactgctatgattctaactgacgacatatttcacatgtttgtatttttcgaaatcttggcccttgctcaagtgggtatagttgccgcttccagtattgattacagttacgaaatggctttaaagtatatgattttgggatcaattggcagtccgataatgcttctagggatcggcttcctacttgcattgacgggtagtgtgaacataacggatattgtgactgcagttcataacggtttagttaatgccaaatctcctgtatttttgttgtcactcgggttaatcttctttggttggttatacgcttctggtttgccaccgtttcatactataaaatctggcatctattcaaaggccgaacctcacggggctgctctgcttcaatcctttactgtcatttccatgatttccatcgtattgatcatgtacagaatctattctgtattgccaatattcgaagtcctcatagtatttttctcgatcctagctatggtcttgggtgtttcactagcgttaacgcagacagacttcagaagaatgattggatttttggctgttggtgagttaggttttattggtttgggtattggtcttggcactaactttgccattactgcaggacttttccaagccctgaatgaaatcataattactgcactactgtttattggatttggtgcaatagttgaagcaaccaatgaagttgataccaggaagctggggggtcttttggcttaccatccaaaggtatccatcatgcttttaattggtggtttggcaatggccggcgttccaccactatcgggttttcaatctaaattaatgctggttcaagcttctttaagttgcggcttccctgaattatctatattggccatcatggtcagcatagctacatttgtagtgttcgtcaaaacattctatacaatgtttctaaaacccaaacccgttgagttggatgttgaaaacaaggaggttcctcgtgctatggtctttgtaatgggaatattattaataataatcgtgctcttaggtttattcccaaatctgattatacacggaatttctagctttgtaggaggaatactataa

SEQ ID NO: 73456 - DNA, 387 bp, synthetic construct
  source 1..387: mol_type = other DNA
atggcccaaactcaacttgcgatattgttgacttccgttgccttggtcattgtcggactttactctgcaatctttattgataatatcataaagaagataattggaattagtttcattgaagaaggggctaacttattcattgttgctattggttataaagcaggcggtgttgtgcctattataatgcccggtatggacacatcctggtttgcttcaaatgcggcctatccattgccatttggcttagtactgacttctatcgtgatcggtgcatcgaccttagctgtaatgctagctctggttatggttctctacaaaagatatggtaccctaagcacgagtgtaatgttagcagatacatcaaaacaggaggaatacgatgaataa

SEQ ID NO: 73457 - DNA, 234 bp, synthetic construct
  source 1..234: mol_type = other DNA
atgattgaatttatattatgtttaataacggtcttgtctgccattcttgcgctcatccaaaaagatttgctaaaagcagcaattttaacaggcttctcaggtggagctctggcagttcttttccaaatattgttggccccagatgttgctctaacccaagccatcgtcggtgctgcaattgtacctgtatttattgctttagctgttaagaagactcagagagtggacaattaa

SEQ ID NO: 73458 - DNA, 423 bp, synthetic construct
  source 1..423: mol_type = other DNA
atgatggagtatatccaatcggcgcttctcatcatatccgctatattgaccataatttctgcgataggcttgattagtttggacaagaacacaaaggatgttgtttatgccagaatccacattgtaggtgtcttcgatattgcctgcgttattgccatgattgcaataggtcagtatttacttgctgggatttactttattctagcacccttcatagcacatgcaatcgctaacgcttactggaaaaaagaagatagagaaaataatttagatctacaaaatatcggagaagatgtcggtgaagatcatccatttttacatcctaaagaaaaaattcaagctctggaatgtgaggacagcgaaaaatttaaggtggacgaaaggttttcagtaactacgttggaaattgaagaggatgagtaa

SEQ ID NO: 73459 - DNA, 267 bp, synthetic construct
  source 1..267: mol_type = other DNA
atggatatactctttgtcagcaattatattgtggtcattgccttgatgattatgatgttggctgcgctaagggcatctgcatatgaatccacatctatggggctgttaggaagttcaattgttgtaaatgcctttgcagttgccttattgatcatcggtggactatacaaccttgagttttttagagatatatcgcttgctttaatattcttcggttttgtgggcactgttgctttcgctgtagttttgggtggtgacgatgaataa

SEQ ID NO: 73460 - DNA, 315 bp, synthetic construct
  source 1..315: mol_type = other DNA
atgtttttgacccgtattggttatggcattatttatttcttagatcttatctacgaaatcctcaagtcaacatttgatgtagcattcaacggaataatgaggagaaatattaatcccgtcgtctttgacattgaaacggttctggaaagaccggtttcgcagacaatattggccaatagcatatccttaactcctggtactttgtctgtggatctagacagtgaaaataacatcatcaaagtagctaccatttctccaagaaaaaaggaggatgttattccatttgagcaatacataaagaaaatgttagaataa

SEQ ID NO: 73461 - DNA, 966 bp, synthetic construct
  source 1..966: mol_type = other DNA
atgaatttagttgaaaaactcgaaccgataatcatcttttctgccgtcctgattggcattttagccagtaatattaatatcgctcagcataccaattatctaatcaatatattcctgtgtttaatgatatacggtttattcttggaggttaatcttaatgaactgaaaaacagttttaggaacattaaattcacactcaccagcctaataattaacttcatatggactccactattcggttactggattggtagtatatttctaaacggcaatctagacattttgattggattttttatgttgattataactccatgtactgattggtatttagtatttactaagcttgcaaaaggtgatttgaacttaaatctttcaattctgccattaaacttgattttacaaatcattttactcccaatttatctaatcatcttcttttccagcaaaaactctattgactacacgcaaatcatttattcgattttgataataatcataattccatttattaccgcacagattacaaagtttgttttgataacatcgttgaaggaaagagcgataaatataatctccgatctagaaatttggtttttatcacttgcagttttttgcatattttcatctcaaggaaaacaattgtttgaaaatctaaacttcttgattacaatcttcctgcctttgatcatattttttattgtaaattctctggtggatttattgatttctaagaaaatcaacttcacttatcccgagtacgtgagtttaacgatgacaacgcttgctagaaattcacccttggccttggctattgctataatttcattccaaaatcatgagttggtatccattgctcttgtcattgggcctttgatagaattacctattctttatattatctctaaattctgtttatggatcaagaacaccaagttattttcctttcacgattacactatctaa

SEQ ID NO: 73462 - DNA, 705 bp, synthetic construct
  source 1..705: mol_type = other DNA
ttgtcgtcttataagggtcattcaatattcgcatttctacttgcgtgtatgtttttccacaatcctctgttaatttctttgacgttaatcggtgccaacattccagattttgaccataaattcaagaaggacaatgtatataagatgatcatcttggggctaataatttttatatcactctacattcttaaattaccttattatattggtctgattattgtatttctgggtatcacattttatttctctgaacatagaagttttacccattccctttttggagtcttgacactaactgctgctgttagtttaatattgatctgggccctccaactcataaccatcgtgactaccttaaataaccattacctgattttagccatcttgatttcccttttgagctttttattcctaaacaaaaaactgttgatggtttttttacccatatttttcatttccttgttcgtaattaagacaggcgatattgcatatactgagatagttctaagtttattgttaggcatattttcacacattgttcttgattcatttactccgtcgggtattaaactttttgctccattgtctagcaaaaaagtgtataaaaatttcggactaacggtcatcttcatcttggctattttatctatattctaccacgcatcatctttattcaagttgtttgaaatgtacattaaatactaa

SEQ ID NO: 73463 - DNA, 1134 bp, synthetic construct
  source 1..1134: mol_type = other DNA
atgagaaaaataacaataagacttttgaccagattgcccacaaaatatgtgactatcggactactattaattatcgcattgtttgtttacggtatactgggttcatattttataatgcacctgaatattattgattctatttattattcgattattaccatggcaactgtaggttatggagattatacgccacatacgggcatccagaagattttcgcgacaaccttagctctgtcaggtgttgccctactcgcttatgtcttcaatatcatgttgacaagtttccaggaaaaaatgagcacttattcaaagggagcaagaaaaatgaagacaatcgaggatatggatgactattatatcatttgtggatttggcagggttggaaaagtggtttttgacgaattgaataaaagaaagcagaacattattgtaatagaaaagaaggaagagatttgtaataatatcgaagagagttcctctgtcgtttcgattcataaagacgcgtccgaagacaatttgatatcaaaattggctggtgaaagatgtaatagtgtgattgtgtccactggcgatgatgtcaacaacttgtttattgtattaacaatccgtgaaactaaccctgatgcttggattgtaaccagggcctcaaaggttgaaaacattcctcgtcttaaaaaggcaggtgctgataaggttgtctcccctgaaataagcggtgggcaagatatgtttttcgagtctacaaacccgtaccttttaagaataacagtaaaacacactgtggaccaaatatacgatgaatttaaggttattaacaagtacgactgcagtttagaaaccattgattaccacattccaggtgttgaaaccccactgacccgcgaaatatacgtcactcgacttgcagatggcaaaaaatattacaactacctacaaacgcatgatgatcaaagacaagccttagacacactctaccggactacgaataatatacattctcatttaatcctaggtcaagataaagagtctttcgagaatttaatcaaagacttaaaggaaatagaggaaattattgggatcaacttgactaatgaagaaatagctaaaatcactaggaaagaggattctaattaa

SEQ ID NO: 73464 - DNA, 1062 bp, synthetic construct
  source 1..1062: mol_type = other DNA
atggataagaaatcagtcttttttcttggtataagtgtctttatattaatcataatgttgtggttggttggcatagaagacattattgatgcacttaatgtagccaaattagaattaatagcgttagctattggtgtacaaatattcacatacgctttgtacacattgagatggcagatactaaataatctagcagatataaacaccagctttaaaaaattgctcccaatgatcttggtcggtcttgccgtaaataacataactccatctggccgtggtgggggagagcccgtgagagcatatattttatctaaggaagaagactacccgatgagggagacgttcgctactgttgttgctgatagagccttagacacttttccatttgttgtgctgacagttataaccattattggtatgactttttatttcaattttgatttatggttacttattgtcatgatttcagctgttatatgtattgttgcttttttactgatgatcatatacatgtctattaaccctaattttggtaaacgcgtagatggatggatcatcaagttggttagaaggttctataagaagaactccgaggaattggaaaataaaatccacgcagtaattttagatttccaaagtaccatgaagattgtgatttccagcaaaaaagtcacatattatgcattgccattgtccttcatcatctggatcttcgaaattttacgagtctatatcgtattcctagcctttggagcggacattagtcctatcgttattggggaagtatttattatcgcttcactggttggtatgataccactactccccggtgggctgggtgccgtggacggcattatggttgtgttttactctgtggcaggaatatctgctagcataagtgctgcggcaacggttatcgagagactaatttcgttttggatggccactattttgggaatgatcattctacctcattatggctcttcaattttggataaaatttcattcggttcctcgaacgatgaaattgaagaagctcttgagaatgaaattgataactaa

SEQ ID NO: 73465 - DNA, 1434 bp, synthetic construct
  source 1..1434: mol_type = other DNA
atgaggtatataacgaaaactgacctattggttattggtctaaattccggttatttattaatcggtattggaataatgtgtttgattccattaatttttgatttgatctatttcgaatttgatttgattagctttattctgcctggtgccatatcaatctgtcttggtttctttttgacaaagtatctcgatgaatattcaaacaaaaatgttcgacttaagcacggtatgattattagttctcttggatggatctgggccgctcttattggcggattagttttcatgctggccaccaacatgcccccaattgatgctatcttcgagagcatgtctgctctaactgggactggtgtgacgatgtacacgaatttagaaatattgcctcactcgatactcttttttagagcttttgaacaatggattggtggtttgggcgttgtagtcatggtaattagtgtgctggctaaacctggtactgccacctcaacgttataccattcggaagcacatgatgagcgtataaagccatcgactaaagcgacccttgaaaaaacaatagagatttatattatttatactgttgtgggaattgtcttgtacgctatcgctggaatgccccttttcgattccctatgcaacacattttgcataatttcaactggtggtatgaatgttaaaaatgcaaacatgggctattaccataacgacttgatttacttcatatccattgttttaatgatactgggtgctaccagttttttagtacattataaagttattaaaaccaagggcaaatccttgttggaagatttgcaatttaaaatcattatctgtgtgattgcaattgtaacattgatgctgtactacgtatcaaatattgtcccgatggaattattattcactgtggtctcagcaattacaacgacaggggccagcatctccagctctttgacaatggcgagttggccatcttttgtcataatctgtttgatctgtttaatgttatctggaggttctaacgggtctactgtaggagctattaagcttatcagattaataacatttttcaagggtatctacagaaacatacgtgagatcctgtccccgagtggtagagttgttcccataaagttacagggcagaccattgcctgaaaatgcatcggagcaatctgggaattatatcacattgtatctaatgtttataatgtttacctgggcattgttctgcttcttcggccatgatccatttgacagtctatttgcaactgtatcacttcagggcaacaatggtttagacctggggattattaccaatcaaatacaccctgtcctaaaaatagtgtctatgctcaatatgtggattggaaggttagaaatctacccagttctaatcacattaagaactgtttttgaaattttcaagcgctaa

SEQ ID NO: 73466 - DNA, 660 bp, synthetic construct
  source 1..660: mol_type = other DNA
atggattacgtcgtaattatgggtggaggtcgtgtagggttggctcttgcaaacttgttaattaatgaaggatatgacattaccctaattgagagtgatacgaagttatgtgatgaagtcgcatcagagctcgatgctttggttatttgtggcaatggtactaattctaaaatattggaagaagtgaacattgaggatgccaagtacttcatcgccacaactggcaatgatgaagcgaacttactttcatgcatattggttagaaagtataatgtggaacatataattgcaagggtaagcaatccggaccacgaagaagcgtttaaggaggttggtatcgaacaggtaataagtccagaaagagctgctgcatcttacctgcaaaaaattgttacaagacctaacactgccgaactgatgacaatagggcaaggagatggtgaaatcttagatatgaccataaccaataacaaaattgtcggtaaaaagttcaaagacgtgtcaccaacgaaagactttatgattatagctacttatcagaatggtacactaatcatcccccaacctgacaacattatcagccgaggcgagaaggtttctgttctagttaaaaggggatcgttttctaaagtctccaaaaagttagaaaataaatcctaa

SEQ ID NO: 73467 - DNA, 807 bp, synthetic construct
  source 1..807: mol_type = other DNA
atggtggaaaaaaagtcttttgtaaaagattacatgacaaaaaacgttatctgtgtttccccaaacactcctactgaagaaattattgaattgatgcgtaccagtcggcacaacagttatccggtcgtcgtaaatgatagactcgtgggtatggtaactgcatttgacgtggtatctaaaaagtggtcagacacggttgaaggtttgatgagcactaagttagttgtcgctaaccctgaattatccataaatgatgcctctagggtaatgtttagaaggggcatctctagaatgcccgtggtcgatgaaaatcgaaaaatagttggaattataaccaacacggacatggttagatcgcatatcgagaggtcaacaccaaataaagttgagtatttcaagaagactctagaacaattatacgatatcaaggctacattgagacacatgcctgttgagaccaataaattacgcccaacacaagatagagtctatgctgatgagcttgaaggtaggacttacgaattgaagagaggtttagcagaaccagccatcgttgtaaagactggaaatagatggatactggttgacgggcatcatagagctgtcgcttcctcgcagcaaggttacgagacagttgattcatatgtgattgatttgggccaagacataaaactaggtatggagaaaacggcagacaaagcgggaattaaaacattctcagacattgaaattattgatgatgataagcatcccctgatagccctaaccgaaagccttcaggatcaagaacgtaaaagtgatgactaa

SEQ ID NO: 73468 - DNA, 768 bp, synthetic construct
  source 1..768: mol_type = other DNA
atgtttgacacattcacggaaaagaaatttttattaaaggaattggttaaaaaagatttgacgtcaaaatacaaagattctgtcctaggtatcctttggtcttttttcaatccccttttaataatgttggtatttaccgcgattttttcaatgctattcggtcgtcagatcgagaattatccagtgtatttcctgtccggcagaattatttttgatttttataacagtgggacaaaaggtgctatgaaatcgataaagaggaatgccaacttgctcaagaagatttatgttcctaaatacatgttttccgtcagtactatttgctacgaatttgttaactttttgatttcgtttgtgatattgttcattgtcatgatacttaccggagctacattccattggactatcgtgttaagcatcattcctatgtttttcttggtttgcctgatcttcggtgttggtctaattcttgctgtctgtaacacttattttagtgacatcggtcacttgtacaatgtattcactctcgtattaatgtacgcctccgcattattctatcctatggaaatagttccagcaatagtgcaaagaatctttaccttaaatccagtttattcagcaatttcttgtttcagagagtgtattagctacggcatttttccgaatacttctactttagcttatctagccatattttcatttacaacactgggaattggactgtacctattcaagatctatgaaaagaaattggtattagaaatataa

SEQ ID NO: 73469 - DNA, 1425 bp, synthetic construct
  source 1..1425: mol_type = other DNA
atgaatttgattaataaaatcaggaatttatttaatgataacaccaaacaagaaaaaaacaagcatattcctctggatgccaagttccagagcagtagatttaagaatatcaaaatccatgcaccggattatgtcatgagtactgaaaacagataccacatgcaaatattggacaattctaacaaccctattaagaacgaggccatcactttggttattaatggtaaatgttacgagaaaataaccaataaggacggatacgcatcggccaaaatttcacccaataaaaagaagaaggaaatgaaaatatattatctatcaaacgaggagtattgtccttgtatcattgccaaattgatacacccagataacataaaccctgaagagaacaatgaaaacccaaagttgtatgctccagatatgtctatctactcaaaagatgaacccgaatacaatgctagattgctagacagtgaggataatccaatgattggtgaaacactaatattcaattttaacaaccagacatatgaaaaaatcactgatgaagaaggcttcgccagcatagacctcaaattagatgaaggcacatattcgattgagacaatattcaaaggtgagaaagactcaaatcccattacgaaaacatcaaccataaacgttaaaacccggaatatcgatcgtaagatcatgatcgaagtcaagcatcttgcaatggaatttaaaatttctaaagacaagatcgatacactaaaagaatatgttattcgaacgattaagagaaccaaaaaagaacacgagaaaattaggatattagatgacatttccttcaacatttaccaaggcgagcgcgtgggcatattagggtttaatggtgctggaaaaagtactcttttaagaataatcgctggaatatatgaacctactgaaggagaagtaataatcaatgggagaattgcaccattgctcgaattatccgcagggtttgataagaattatactggaaagaataatatctttttgaatggtgctctgttgagcatggaggaagacttcatcaaagagaaatacgatgaaatagttgaattttctgaactgggtgaacatattaattatccagttaagaactactccaaaggtatgagggcgaaattaggtttttccattgctactctggtcaatccggaaattttaattattgatgagattttagctgtgggtgacattaagttccgtaagaaatcgtctgaaaagattaagtcaatgatgaaagaaggtgtcacggtacttcttgtatcccattctatcagtcaaataagaaacatttgcgatagatgcatttggattgaaaatggccatgtgtacatggaaggtccagctaaaaaggtttgtgatgcatatgttaaatctgcgaagaagaagtaa

SEQ ID NO: 73470 - DNA, 501 bp, synthetic construct
  source 1..501: mol_type = other DNA
atgatattaatatttctcattatagggtgttgttgtctattttatgttgttgagacaagtaccactgtcggtaacgctatcactgtcgtaaacaagactgtggtcacacttccaaacgaattttcaattgaaagtagagaaactggctacggaacattaattaataaaaatacaaaggaaaaaatcaccattaaggatttaggtaaaggtaaccttgctctaactaagttcaaaaacgccttgacggatttgacgaaaaatcccgatatcgaccatgttaaaaattctacgagcaacattaataatatcactgcatataaaatagattaccaggatattacaaaagagaacaactcggatttgtccaatgtttacgtgttcacttgcaatcacacattcttaattaagctggaaaattataataataacgttaagtcagataatgacttggattatgtaattacccatatgacccctgactttaaacaatctcaagactaa

SEQ ID NO: 73471 - DNA, 3489 bp, synthetic construct
  source 1..3489: mol_type = other DNA
gtggttttgttatcgactggagttgcgtttgcgatttctgaaaatgatgttgctgtaagtaatgatgtgggaatcgttaacgagaccgtcctagaagtaagttccgatgattcggatttgtcagaagccgatgttttggaaacacaaaccaacgttgtaactaaggataccttccataattatttcggaaatgacgggacattattagataatgtttccagcgatgagttaatattcaagggagacttcacgggaatcgatgtcagttacatgacaataggtaaatctgtgaagttatcaggaggtaataccactcttaataacgttactttcattatcggggccgacaacgtggtgattgatgggttcgttcttgaccattccgatgtttatttatttgatatagaaaatgtaaatggtgtcacgttgtctaacaatataattaacttcaaaacacttgaagggacagagggctatgctatttttgccaatactgtaaatgattttaagatcatcaataatactataaattatgttggtaatactaaaggcacgatggttaataatgctattcgagtaactggtgatgaagattctgcaattgcttccaaaaagattattgtggaaggcaatgtcattaatataaaaatcccgtctgtggacgtggggtatgaccctgttacctgggaatcaaaagttttttctgaaggtatcgtgttctattattgtgaggatgtaaaatttatagataatcgcgtcgatttaaagtacaacaattttagcggcggtttcgacacgatttatgcattgagtgtaagaggaaacccttataactttgagaatacaattgtttcttctgacatcgaaattatcaacaatacaataaacgccaatggacacaattacatttacactatcttcctgtctgcgaatgattttaaactttttaacaacgtaatcaactcaacagctgatttttattacgctaatggaattaatattgacggtcctgcatccgaaggtattgtaagcaataatttgataagtgttgaatcaccatatgatgtgtatggtatctatagctaccaaatgaacggtcccattgaatatatctcatacgtcaataacacaattataggtaagtcttatgttggctgcggtatggaaatcgtggaatgcaatccatacatcgcagacaacctcataatcatgaacggtaactatacttttggtgttgtggcatccattagggataatggtactatttctaataactcaataagctcgttaggaaataataatggtactgatggcactggtgaccccctgttgcccctgaatagcttgggtattagtgtaaagggtagtgtattaattgaaaaaaataagattaactcggggggtatcggtttgaaccttgtcgaaaaaggcaatattacgattaacgacaataacatcaatgtgaatacgactggtggtgttgaaagttacgccatttactctgacaagttgtcaaacttagttatatctaacaacaacatcctatttacgggaaataccaatggaaccatggtcaacaacgctattcgtgtaaacggtgatgaaaacaagaaaataatcgctaaaaacatcatagttgacaacaataatatcaatattaatatcccttccattgatgtgagttataatcctgtaacatacgaggccacagtttattctgaaggtattgttttctactattgtgaggacgtaaagttcatagataatcgtgtggatttaaagtacaacaattttagtggcagcttcgacactatctatgttgttagtgtaagaagtaatccatacaattatgtttttgatgaagaagacaatataatttattcaattgtcagttctgatattctaatttccaataacacggtcaatgctctgggtaataattatacctacggcatttacatttctgcggagaacttcaccgtcggagataactttgtaaatatatcttctgatggtaagtatgctaatggtgttaacgttgatgccttgtcaagtaacggggttataaaaaataataatgtgattgtgaacgcggatattattgtttatggtgtttattcggcaaattttatgggaccaattgaaaacatcacctacgataataacacaattagagtaaatgcttatgctgcttgtgctatggaactaatggagccaaacccatacgtctttgataacacaataatagctgctggtaattacacctttggcgttgtcgcaagtataagggataacggtaccataagcaacaactcaatatcctccttgggaaacaacaatggcacgaatggcactggagactcaattctcccgttaaattctttggccatcagcactaaaggggatgtgataattaaagataacgagatagttacatcagggattggtgttaaaacactgaaaggaaatgttgacattctaggtaacgacattagaacaactggtaaccacactattgaggctataaactccaatctaaccgtaaaaaataactatttggtatctaaaaaagccgtcggtactgattccatagtctcagacaaggaagtgatatcggctaacaatactcctgccttgaaaactattatatcggcaccaaatatatttactgaatacattaagggtgctgtcttcccagttgctgcattagatgaaaacggagatccaatttcagatattgtcctctttttaacaatggacggcattgtttataatgtaaccactgacgcaaacggctatgcagccttcttacttaatccggattccggtattcataatgtcgtggtctcatttaatggaaatgaggtctatggccctaaatccgtaaatagcataatttcggtcgacgcatctgccagtaaaatcgttgcaaaaacatctacaactgtttatctgacatcagttaaatctggttcatactttaatatagctgtaaaggatgtgaacggcaaaggcttggccaataagaaggtttcgatctacttcaatggcaagactaagagctacacaacaaattcacttggagtaatcaagttcaaactttccgctaacaaaatagggaattaccagttgaagatgaaatttgcgggggataagaactacaccgcatctacggccatcgcaaagatcaaagtcattaaacaagcaacaaaattaacggtcgctaaaaagacttttaaagcgaagacaaaggtgaaaaagtacaccatcactctaaaagacaataaaggtaaggcaattaaaaaggccaaggttacaattaaagttaaaggtaaggtctacaaagcagtcaccaattcgaaaggtaaagctacttttaagatcaccaagctagctaaaaaaggtacgtataaggcttatgttaagtttgcaggtaacaaatattacaaagtatcttcaaaatccgttaaaatatcagttaaaagataa

SEQ ID NO: 73472 - DNA, 4065 bp, synthetic construct
  source 1..4065: mol_type = other DNA
atggttaaaaaattcaacatttcattattgctattcctcatcttcatatcaatggctactgtttgcgctagtgataatatggaggatactttaaataataacggttctatcctgagtaatccatcggatgaaagtattttgctttcgaacgacgatgtcctagctgaatttacaacacatgaaataaatgtagaaaagtactctatttactttaacaataatggtgacctaatttcttctaaggttaagtctggggacacactgaacttcactggagattggaacgaagttagctctaagactttcaattttaataagactttaaatatcgtttactcgggatcaaagccaatgaaaaacggtgttttcacattctataatggtgccacaggaagttccatcattggcttgaatattgctaatacggaggattataattatggcatcttcttgaatggtgcaagcaactgcatcgtaaaggactgttttattaacaatacaggaatgtcctcctatgcaatttgcatagccaataatgccaattacaataacgtctcaaataacttcttctgtgattacggcatgaattatgggggtcaaggaactagatccacaccacctgtcctcctttctggtgctcaccataactatattgcaaacaatcacatcgaatgtgatgatgcaaacgggatatatttgtcctactatgacgggggccctttgcacggtggtgtgtctaactacaatttaatctacaacaacaccgtaaagtataacgtgttgccaacttcatggggttatggtattcagataatgggtggatacaacaagatttattccaaccggataattggtgccttcagaggcatctcaacttcaaatggtgcatttaatgagatatttaataacagaattattaatattactggtgcggattttaatcaccctgtcgtggaagtcggaggggagtacggaatcgttggttccgcaaatgcgataataataaacaactctatcgaaaatgccagaatacttcccggttctggtgcgatttatgctattgataatgcaataattgaaaataacactattgacgttgtgtcatcaggatatggtattcaggcaagtggcagtaatatttctatcaaaaacaatagcataatcaccgaatccggtgctggcgtcttttggaagggcgagtattttgatttggttgtagttggtaacaacataacaagtggaaacggcgttggtgttttagtgaaaaaagaaagtgtcaagaaaatgccagggaacataacgattgtggacaactatatttcgactggaaataagtatgccattgacgccattgaggttaacgcggatactagttatgttatcgaaaataatactatccctaagggtaaaggtattgttgcaacccctgaagggtcctatgatccatcaaaaccacgttacatctttaagggaacaacttacagcattacccctgaaaactatgacgactatttcgatgtgggaggcactttaaactcagttgttaaaaacggagatattttgtacttcgatggtaattttgagaataagggcgtaatatatattaactcagcagtcaagatcacgggtaaaaatccgaatttttataatgctacttttaggatatccgaaggtgtctggattgaaaatttaacaatcaaaaacaaagattctgaaagaataaatgcatggggaatccttgtatataataccggtggcgcgataatctctaattgcaacattgaagtcacagatccaaacgcagcctatgcaatttatgttgtagaatcaagcgacattgatgttttgaataataacctgacatctaatggtaattacctaacgtatacattactcgctataagtgtctacgattgtaattttatcaacaatagtattcataccattggaacaggcattgagcacgtatttgaaaatagtcactgtgtcgatggcaactctaattgtatagacggttccacctgtgttggtggcgataccgtctgtacaagcgggaatactataactggaaatcatgtgttaaacgaggtttataggacttacggcatcttgatggcttacagctctggttgcaatatctcgggaaataaagtaaatgcgacttctaagctgaataaaacatctaatacattcaattcaagctggggaaataactatcataataacatatctacaaatagcattgttggtatagatttgtattttaatagccataataataccttctcaaataataatatttatgtaaagtctaatgataattatatatacggtatgggtgtattaggtagcaataccgggcatgatgctcccgaaggaaaagatgcatctaacaaccaatttatcaacaataatatagtgttggaaggcgattattttgttcaaggtctggttattggccatgaatcaaaaaacacaacgctcatttcaaacaccgttaatgctaaatcgaacaacttttcatatggtatcaatttagaggggtctcaaaagtcaattattaaagacaacaatctaaagctaacttccgatatcgtgtacggacttgaagtatttcgatcgaacggtaattttattaaagggaataatcttgacataaaagctaagcaggcatatgctattgcactttcaaatgctgagaataatatcatccttaacaacatcgtaatgaataatgttactggtgaggaaataacctataatgtgtgtgactccctaggtgttggggtggctggaatctgtcttaaatttaattcgtccagtaataatatatcgggcaataatataacctctaaaaaaggttatgccattgttatcgacaagttggccattaaaaacaatttattctacaactatctaaattcggaaatgggtatcggtgataaagctatcaataacacaaacaataattttgttaaaggcaattacatctatattttaaacggattgattccggaggtcacgattaattatttgggtacggccgatattgttttgaacgtgggcgtggatggggtcttggtcaaattttatatatgtggcgaagaaattggtaatgccacttcttcaaacggtgtagccaaactgagatataaatttgatgatagttacactccagcgggttattcgattaaagctattgcatctaagaaggactacttgacgaaagagttcatttcttacttaaccatcgaaaaaggtctgctaaatattaactacaacgatgtaaccgcaattccaacaagcaagggaaaatttgtagtggtggtagaagatatctttggaaactctgtaagcggaattactgttaaattttatagacttcaaggaagagacgttttcataggcaaagtaaagaccgataaaaacggtgtagctactctagtcgctgaagtcccttccctgggtaactacaaattacgtgccgatgttgttgaaaatgacaatttcaagtcaaacagtggtaaggctaatttgattgtggcttacaaaccgtcaatttatcaatataagaccaaagctgtttactacggtaacactataaagtacacggtgcgcgttaagggtattgacggtaagtatgttgctgggggtaaaatcgtaacgattaaagtcaacggaaaaacctacagggttaaaactgacaaatatggcaaggcatacaaatccattaaattaaaagccggttcttacaaagtaacggctcaatacggggtcacgaaagtttcaagtaagattaaattcaagcccatcttgatagctaaaaacattgttaaaaagaaatctaaaaaaatcaagttctcggtcaagttagtcaacaagcatggtaagatattaaaatacaaaaaaataatttttaagattaagaacaagaaatacagtgcaaagacaaacagtcatggcgtggcgatattatctattaaaaacttaaagataggtaaaaatactattacatccttttacggtggttgcacaatatccaatacaataactattaggagataa

SEQ ID NO: 73473 - DNA, 4815 bp, synthetic construct
  source 1..4815: mol_type = other DNA
atgtatattgatgtaaagggggtgaagataacgaaaagattagacaataagttgttattcacactatttgcagttatgtttatattgttttcattaaactgcgttttcgctcagaacaacactacagtaaccgacgtcctatccactgttgaagatgacgttgggattcaacaaatacagagttttcaagtagacgaacctctattggctgcgaccaacaacaacattcagattaatgttaagcatcattataatgaaacggctaatacatgggatgaggatggttataatttagctaacgcaacagtcaaattatatggtgcgaatgataagttaatatcaacacataagacagactcaaaagggtccgtcttgattaaaaatctcaaatcaaccaaatattacgttgaagtcagttacgcagattatgaaccaaaaaaatctaaagtattggattttactaagaagtccggaactctaaaaggatcattcgactttattcccgacattctattatttgtagactacaaatcccataatgaaaagctaaacgtcttgatgaacatgtctaagagagtggctttcattagcactgggcaagactacgatgtgtcgcgtgaatggttagtcgggtacgcacgtttcatccatattgacatgttttccgaaggagcatatgccatattcactgctgaaaaattaaaaaagttgcttgcgatctcgccagctaacgcaaattataatgttgcctacacattcggtgtttatagtaattcaattctaaacgctactggtttacacattgttggcgccaactcgaagaacaatactttcaataccatcgagaacacttatatcggttcgtatttccaagccaaagacattaacttatcagatgtgttgtatcataacatggaaaactacttgaaatatgtgtattacttgatcaatccgtccaaatacgaaaatcccacacttaacgattctaatgcccctcaaatgggtccagaatgcggattttatcatccagacttaggtattttcaccatatatcctgaagggagcttaataaataattggatcaagactaatcctggatacggagtcgatggaattggtagtttaaattggatgatacaggattacccaaagtggtttgtagatctattggaccctacgaccttatttgaacagtttgagaatcaatttattgacagattcaaccctaataagaaattcatagctattgtttcttactactgtggcggggaagtcgttgattctctaattcgcggttatgaagaaattggcaggcccgcattcaatgtgtttaagttttcgacagatccttccatgtcttcaatattaaataagatcaataacgtctccaaaataggaatttcttctataacttcattgtatagctggtcgctcagttatgctaatggttctgctgaaaaagatttgtctgatatcgatgtggaaatcctcaaaggtgtaaatgaaatttcaaagtacagctacgaaagtgaactgggaccccaagttgagtggacttactctgtgacctacccgagttttgaaggggtgtttagccctgtcattttatcgtacctagacgaggataaggttcatgtaatacaatcaggtgttgataagatggttcagctcagtagtaggtgggctgacttgaaagatttaaataactctgaaaagacaatagctatagttctttataattaccctccaggtaaagccgaaatcggcgcctcttacttggacgtaatgcaaagcacctatgatttacttattaagttgtatgagaatggctatgctattggggatatcaggaaaatgatgaatattacagaatttacaaacctgttaattgacagcggtaacaagggctcatgggctgggggtttgttgaaaaaatatgttgaaaagaattgggacgaactggtcaaacataaccaattgatctcaatggatgagttcattgatctaacttcagaccttccagatgagctgtatgaggaaatggttactcaatggggtgctggtctgggtaaatccatggtttatacagccagcgatggtaaacagtacttggttattccgggtgtctggtttggcaacatctttattacttaccaaccaagcagaggttgggaagaagccgatattggtgaagtgatccaaaactaccatgatttgaaattaccaccccatcagcagtatgtcgcattttatgagtggatggataaagtaacaaaggctaacgcaatcgttagtatgggaacacacggaacattagaatggctaccaggcaaaaatatcggtgttggttctggagactggtcctatgaactgacaagaatcccaacaatatatccatacattgtatctaatcccggtgaagctatggtcgccagggatcggggtttggccatgcttatcactcacatgacccctgctatagtatcctctgagttatacggtaattattcgattttgaataattatatcaatagttataacaaccagattaaactcaacgtcacttctaatgctaatatatataaggaaaagattcttaaactggctcctaatctaggtttccgcaagatgtctaaaggcgagtcgtttaatcactggctggaggaattgcacctgtatcttgaaagtatgggtgatgacctaatgacctacggattgcataatttggggaaggttttaacaggtaatgaactatctgaagaggttgtcacaatcgtaacgtctcaaactaagatctataatcaaataatggaatttttatatcccaacctgaaaggcaaagatttttataaggatattcaaggagacgtaaagtaccttaatgaacgtcatactatacaggcattcctcagaaactatgttgatggcttagtcaacggctcttctgtgttggatttggttaataagctaggtgtaaataaagatagttcattattctcctcaatgaaatatgctcaggatgtaattataaatatccaaaataacaatgaatggaacgccattctcacggccttatctggcggatacgtcaaggcaggtttatttgcggacccagcatatggtgactccattccaacaggatatgacggatatgcatccgatcctactagaatgccatctgaagcagcctatgaatcggcagtcaatatagtgaacctgttgcttgcggattactacgaaaaacatggtaaatggcctgagatgactgcattgatcttatggggtacagaaatatcaagaactgagggaattggcgttgcagaatttttgtacttcttaggatgtaaaccgaaatgggcagaaaacggtaaagtaatcggcgttgaactacttcctttaaaggacttaaaagttaaattgcacaatggttctgtggttaacagaccaaggatagatgtatatgcaagtttagttacaagcaataaggattggataacgtggatggtaactgccacgaggttggcggcaaacgctggcgaaagtgaaaacgataattatgtgataaaacattataatgagtacccaacccttgacaggctgtttggtcttccgggcaatatactggagggtaccggtatgagtacgcttattccaaataccgcgaattggaacatttccacagttaatgtggaaggtatgaacgtttatttggataccgtttcattttcatggactattgatgagaagggtaatatcaatatcactaaacaaaaggatacttacaaatatctccttacaaaaacagagctgataacacaaaacctagatagcacttggagaattttggattctgatgactactacgattggtttgggggattatacaatgctgcttcaattctacgacaaaaagcaggtttaagcagacctgacacgtcatttgtggatatccgtgacaagaataaatatgttacgagaacttacgaggaagagatggagttcgaaatccgtaccacgcttttgaacccaaaatatcttaaaccgctgaagggaactgctgcaggtatgaactggatagctagcagaatgcagaacacattcggcattttgactattagtggtaacaagttgaataaggaattaggtaaccaaatgtccaacacccttttagacttagctagtggcgttcgagacgccagtacctcttacggtatccaatctgctatcgcgcacatgatttacctagcaactcaaggtacctgggacgccgatagtgaaacccttcagaaactcgctgatgaatatatgagacaagtgttaaagtacggtgttgcctgttgccaccacacttgtaaaaacttggacttcaataacaaggtcattcaggtatcatccctgaccccagctcaaaaagcagaatttgcaaaaatattggcccaagctactaataccgatcctttgtacgaggtggaaaaagattccgctaataatgataataatgcacaaggaattgttaatggaactacgaaagacaaacaatcagattcagagtctggggataaaacatcttttggaggagattcctcgcaagccggtgatgccaaatcggcgtcacaatctcaagattctagtgattcatcaggtgattcaggtgctgatgcatatgagttgtcccaacagtccgcgtcgaaatctacgagcggcgctgaatctagcatgccaatatttgtgataattgctattattattttgattgtaattttcttagttggctatgtcagaaatcaaaaggatgaagatttcgatgattactaa

SEQ ID NO: 73474 - DNA, 843 bp, synthetic construct
  source 1..843: mol_type = other DNA
atgcataagaacagcatcatcatcatcattttatcaatcaccattataggtatgctgattccagcgggtttttcggctaatgattatcaaattgttataacatacggtgagactaccaaaaacaatgctgagtataagaacactgttgattccttctttgaaaatcaagcacatatggatttgaaaggagtaaactccaagataatcactgccaatgaagtgaataagatttctagtacaataactgggaaatcttataattcaaatcagatttttagttcagccttggttgatttaggtgataatgacaaccttaaggtcagcgtagacaaatccaaaattaccacgataactggtgatatgtatctctccgcattgaaatcagcaggaattacaaatggccacgtctatataacaagtcctgttacggccactggtgaatctgctttagcgggcattatgaatagttatgaagtcgctacggatgttgaaattcccgcaccagttaaggaagctgcaaacaaggagatctatacacaagctgaaattgtaaaagagtcaaacgtttctgccgacgacctgagcaacttggtggacgacgtgaaagaaaccgtcaaagaagaaaacattactgattaccaaacaatagtaaatataatcaataacactaccattaattacaatatcaatttaacatacaatgatattgaaaaccttgctgagtctattgaacaaatacaaaatgttcagggcgatattaactcttaccagacagaagtaaatgatgtgctaaatactaccgatacgtcgaacactggatttttggacgggctattcaactaa

SEQ ID NO: 73475 - DNA, 531 bp, synthetic construct
  source 1..531: mol_type = other DNA
atggatgctattgaagcagttgcaatcctgattttagttgtcgctatttttattctagtttactactatttgctaaacagtccatcttctatggataagctaaaaaacattgtacctgaaagtgctgacgcgcacatggacgaagtgttaggtaaaaataatgtggactcaagctatgatttgtcgaaagaagatgttctcggagataaagaggaatcggagtcaatgggcaaaagaataaaggtcaaattatccgatatcgatggttccactattaacaccagcgccttctcccataagcttgacgcatttctggatcaaaaaagtgatcaattgataaaagactggtctttagccacaacaaacgatttggataatcttcaggctaaatttgatgaaacgactaataatgtagatactttagaaaagaatttcaatgagttcaagcaatcatctgaagaatttcagaagatcaccggggaaagattggacgatttggacaaaaggatagagtcattagaaaacaagtaa

SEQ ID NO: 73476 - DNA, 411 bp, synthetic construct
  source 1..411: mol_type = other DNA
atggaagctatccccacaataccggatcaaattttctacttgataatactggtaatcgtcgctattgtattgatagttattgtgtttcagtggaaaaaagttgcacaatccaaaaactcaattttgattcttgaaaaagaaatcgaacttaaaaagatgtctatggtggaaaaagatatagaatcgaaacgtttaatggataacccaattccattacctcaagagcaacaggacagtctatcagcgattaggcaatccacgactgaagtcagaagcaatgttggttatttgcattctgagatcaatgaacgattagccagactcgaagctgaaaccgagcaaagaaagttagaaaagatgctaaaggaaattgaggcaaaagagaagaagctgagtaaaatgaataagtaa

SEQ ID NO: 73477 - DNA, 570 bp, synthetic construct
  source 1..570: mol_type = other DNA
atgccgtatgattcggatataatcgtcattggctgtggaaacatactgtttaaagatgatggctacggtccaatagttattaatcttttgcaaaaatacttcaatgataaaaatgactattacgatccggcggttacttcctatgtcgaagatgaatttgataagaacgttttaaatcaaatcaaagaaaaattcgagggtgtaaccttaccagatagtgtgcagtttattgacggagggacagccgcaccaatgaacttctttcccttatacaaggagtatgactggaaaaaattgattgttattgatgtggttgaatcaaatgccgaacctggtactgtgggcatatttgatcccaacgctatgcaagtaggaaaatatgacaatcctcatggtatgacggttgaggagccactacagaagattagcgaaaagtgtgaagttgtaattgtcggttgcaagccagcttcaatcccaatacctgacatcgacgtgggtttgtctgaatctgtagaaaaggcaattcctgaagctattgatataattctcaaagaaatcggggtcaagtaa

SEQ ID NO: 73478 - DNA, 1215 bp, synthetic construct
  source 1..1215: mol_type = other DNA
ttgaaagatagagtagttatatcacccacaactcgtcaggaaggccatgccgaattagtcatggaggtggatgatgaggggatagttacaaaaggtatgtatctgagcataactccggttaggggtttagagaagatggttcttgacaaagcgccggaatctgctgtggttttatgtcaaagaatctgtggtgtttgtccaattccacatacattggcttctgccgaggcaatggatatggcgctgggaatcgaaatccctaaaaatgctaaattgttacgcaaggctactttggccgcacataacattaacagcgcagccattcatcagtttttgatagcaaccgattttgtacccgaaaatcttttcgctacagctgttgactctgtcagtgaagtcagaaagacagtccaatatgttgtcgacatgattgccggcgaaggtatccacccatcggatgtaagggttgggggcatggctagaaacattacgccattcacgaaagagcggttgatcgaaagaatgactgcactaagaccaaagctagaagaacacattgaactaatcaaaaactgcgtggttgaaaagggtttacctgatgatctcggtgtaataaataggccactgatggcaactgacgcaacctacggaaccaatgatttcgatatggacgttttttcagaagttttacctgaagcttggtatgatgacccggaaattggtaagaaggcttgttctgtaataccattgattaatggtgagaatgttgagactgggcctcgtgcaagaatggaaaaatttgctggatttaaaggtaagggtgtaaatgcccaacatgtggctcgtgccgatgaaatgttaaaaaactacgatgcatgcatggaagctttggatgccattgatcccgctgctcctgcaaaagtaagttatgacaaacgaggcactggcgaacttggttttggtgtaattgaaggtcctaggggcaccaatgtccatatggcgaaggtggtcgagggtaaaacgaagttctactccgccattgtcccaacaacttggaacattcccacaatgggaccagctaccgaaggattccatcacgagtatggaccacatgtgatcagagcatacgatccttgtctatcatgcgcgactcacgtgatggttgttgacgatgaagacaaatccattctcaagaatgagatggtgagaatataa

SEQ ID NO: 73479 - DNA, 528 bp, synthetic construct
  source 1..528: mol_type = other DNA
ttggataaagcaaacataattatttcaatcattatcgtgctatgtgttgcagctgcggttgcggcctacggtattacgaatagcgataatccaatcttttctgacttatccagtatgtcagccaatgataatgatgctggaaacggtataggtaacaatactgtcacaggcaatggttctgggaatacaatagcaactacatccggttctggaagtggttcgtccagttcgtcaagctccggaagcggtagtggttcagggtctgggtctgggtcaagcagttcctcaagctccggatctggatcgggttcgggctctggtggtggatctaatagtaactcaagaacgcatctttcctattcagaagctaagtctattgcaaatgatgctattgaagaggctggctgctatgcaggttctggctcatattctggaggctactggtacttcactgtatatgatgccaatggtaacaatgtcgacaccataagtgttaacgacaacactggtgctaccggcaggggttaa

SEQ ID NO: 73480 - DNA, 402 bp, synthetic construct
  source 1..402: mol_type = other DNA
atggatttaagaaaaataggcatcctattaatatttgttggtatctttgttacaattttttttataaatgatgataaactttttgttcctgctttgaccgtgaccgttctcggattctttgtaactgtcgtaggtttcgtcatagaaatcagaaaacaaaaaattaaaaacgacagattggaaaaggatatagagtctattctacaaccattgattactgaatattcaaatcttaacaagcaatatcgtatggacttccaaggggatgaatacacgcaaaaaaggattcagttaaatcgagatttggagaaggaaatcacagataagattccctacctggaaagtagggagatcaagaaaattgtgattcagttctcccaagaacaggacaaaatgaattaa

SEQ ID NO: 73481 - DNA, 777 bp, synthetic construct
  source 1..777: mol_type = other DNA
atgtcttcccttaacgaaaagcttaaattagtcaccctaaagggtttattgatatttatttttttcatattccttattaacgtgttgctgggttctttgaaccttattcagataaataatgcttggatttatatctttgtaatcttctactttattttcaaacttagggagggattctccagttttaagcatgactttctaaaagttttcactttcgaatcgttaaaaataatttcagccatcgtaatattaaatgtttttatctcttacggcctgctctatttgagtgactttattctaaatgtttttcccaacctcaattcaattgttatgtcttctgaatatattaacaattccctatttgttttttacggggtgataacaacggtcttcatttcacctatttcagaagagttaatctttagaggagtcttgttgaaccgtctaaatttaattattccattggattttagcattgtaatcacatctattttgtttgcatcgctacatagtttcggtagcataactgcagcctttatttttgctgtttgtatggctgttttgtatttgagaaccgataatatattagtcccaattttcgcccactttctgaataatttaattgcggaaattatcgtaatcgctgatgtgggtaacatgttgttcacaaataacgtggttatgctgataatgtcagtcttggcaatcattagtactttcttaatcttaatactgatcaaaaagcaatggaatatattaaatataaacaaattataa

SEQ ID NO: 73482 - DNA, 2493 bp, synthetic construct
  source 1..2493: mol_type = other DNA
atggcttatctcaaaagaatggatttgccaattgaaggaatgcattgcgcttcctgtgtcttaagtgttaataagactttcggaaaaattgaaggggtcgaagaagttgatgctgatttggcggcaaataggctgcatataacaataaatcctaaaaaaatctcttatgaagagatggaaagactggttaaaaacttaggttttgaacttcactctgacgagatgacgttacgaatccagggtatgcattgcgcctcgtgtactatgaatgtcgagaatttcttgattcgtgtagatggtatatttgacgtgaaagctgacttaacatctcagactgctaagataagatacgattcctctaaactggacatgaatgaggttgaaaaagtaattgaatccttgggttttgaacttttaggtatagagggtcaaaccgaaattgatgaggaagcaatctaccaacaggacctaaaagacaaactcactagaattatcgtcggcgtcgtatttactgctatattgatgattctgatgtttagtggctgggacccattaatggggcccattgctagtttaaatcaagtcaccggtctacatatttccgcaatgggattgctgagcttaattgtaagtatcggaccatttatttacattagcttgccaatattgaaagccggatggaacggcttaagccataaaaacttgaacatggatgtcatgtactcaatgggtattatggttgcttacgtttcaagtattttcgggacatttggtatagtcttggatcacaccttcatgttttatgattctgcggttatgcttcctgcgtttctgatgatcgggagatacttggaagcaagggctaagaagaggacctcggattcaattcgtgagttgatagggctacaacctacagtggcgatttcaattgaagtcgacgaaaacggggaaattacatctcaaaaggaagtgtctattgcagatattgtcctcaacgacttattgctggtaaagcctggtgaaaagattcctgtggatggtgatgttgttggcggcgagtcttgtgtggatgaatcaatgattaacggtgaaccaattcccaaggttaaaaaggatggtgaagaggtgtttgccggcactataaatcaggatggcgtgttatatattaaagctaaaaagatcgggaaagaaacggtactatcgaacataatccgtttggttgagaaggcacaatcttcaagaccgccagttcaaaaattcgccaatactattgtctcatactttattccagttattttaacaatagctattgttgtattcttaatctggtactttgtacttggagaaacattgctattctcacttacctgcttgatctccatattagttgtggcctgtccctgtgccttgggtctagcgaccccaactgccgttacggtaggtgtgggaagggctgctgaatttggcatcttaataaaaaatggtgacacactcgaaaacgcaggacagctcgacgtagccgcgtttgataaaactggcactataactgaaggcaaacctgaggtggatgacattatcgcctatgctacttcggaagaagatttaattaaacttgtagccagcgttgagcaaaactccacccatccaattgccaaggctattgtcaataaagccaaagagttgaatatcgaactagatcagaccacgagcttcgaaaatgtcactggtaagggtctaaaagctgaaatcaattccaaagaaattttggcaggtaacttagctttgatggaatcggaaaacgtggaggtttcttcaaaactagctgataagtattatgaacttgagaagttatcgaagacaataattttccttgctgaagataaaactgttaaaggtatcctaagtctatcagacaagatcaaggaaaattctagacggaccatcgaagaattgcacaaaatgggtgttcaaacatatatgctaactggagataacgaatccaccgccttaaacgtggctcgagaagttggtatagataatgtaaaagcgagtgttcttcccgagaataaattggagatcgttaaggatgctcaatccaatcacacgaagaaggttttatttgtgggagacggaattaacgatgctcctgcactgacacaagcagatatcggtgtagctatgggtaatggtacggatattgcaatggaaagcggagacgtcgttgttatggaaggtgatttggagaatgttgtggcagctatacaattctctaaaaaagtaatgcgcagaattaaggagaatatattctgggcattcgcatataattcaatattaatcccgatcgcagcaggaatcttatatccggcttttggcataacatttgaacctgccttggcaggtctggcaatggcaatgagttctgtaacagtcatatctctttcattaatgcttaaaagatatgttccagaaataaagagaaagagtaacatttaa

SEQ ID NO: 73483 - DNA, 438 bp, synthetic construct
  source 1..438: mol_type = other DNA
atgctagatgaaaagggctacttttatatcattgatgctatacttgccgtcattcttgtttcaatagtatttctcgtggtaaatactgcaatttccattccaagtcctgattattcttatgattcatgcgaatttagaactgcgcaagatgtcatggaaattctaagcggaaaggtgaacttcacagataggaccttcattggtgagatatccaaaatcttgaaagataacaaaaactcgaaagaatctattaatttggtttcgaaaatctgtaaaaataaattcaaaagtttaaatctgaccaattatagatttactgagaataagatcttaaaggaaaagatattggacagctcaggtgactattccaagagtaacatggtttcagttgctacacgtaactacgacgactactcttacacgttatctgtatggtaa

SEQ ID NO: 73484 - DNA, 402 bp, synthetic construct
  source 1..402: mol_type = other DNA
atgatgaagctagataaaaagattttagaagaaaagattagagagtatagggatttcaaaagctgttccgaatcaacattgatggggctttgtgaagctgccgagtaccccatgagtaaagcagaaatgtgtaaaatcgcctgcggttttgccggcggcataggtggtacgtttgacgaagggacatgcggtgctgtaactggtgctctgatagcgaatggattggtattagacaatcctgttaagatcaaagaaaacgcaaaagagatttttaactcttttaaggagaagtatggaaccgtttgttgcggtaaaataactaacaatggaaaagataaatcgccatgtgtcgactgctgtgtgttcattgcaaataaggttgctgatctctgggatgaataa

SEQ ID NO: 73485 - DNA, 486 bp, synthetic construct
  source 1..486: mol_type = other DNA
atggatgagaaacatttgccgctatttggtgtaggtccttatttaatgggcttaataattataataacctttttgtccattgcagcctcgatttacaaaattatccccgtttataatataaataaactcaatatcttccttattacattgggaatcattagtatcattttcgctatagtcttatggttgttggcaatacttaatagcaaattaatgaagaacattaaaaacaataatctagtgacaactggtgtttactcttttgtatctcacccaatctacgcgtgttttcttttcatctccattggactgattctgatttcacaaaacatcttgttattcttcttaccatttctattctgggcttttttgactattagtctgatcaagacggaagaaaaatggttatttgaaagatatggggacgaatacataaagtattcaaagaaggttaacaggttcattccttttaaaaaaatattttaa

SEQ ID NO: 73486 - DNA, 906 bp, synthetic construct
  source 1..906: mol_type = other DNA
atgatagaaacaatcataataatcgtcatatttttagtttacattgctatgaaatacgtgaagattttgaggccatatgaaaaaggcgttgttgaaagactcggaaagtataacagaactgttagcagtgggatagtggtattgattccattcctagagaatttagaaagggtggatttgagagaacaggtcgtcgatgttccgcctcaggaagtcattaccaaagacaatactgtggttgttgttgattgtgtaattttttatgaagtggtagacccatttaatgctacttataacgtagttaacttttatcaagcaattacgaagttggcccaaaccaatttaagaaatataatcggggatctggaacttgaccaaacactaacttctcgtgaaatgattaatgccgaattacgagaagtattggatgaagctacagataaatggggttccaaagtagttcgtgttgagatccaaaaaattgaacctccaaaggatatagtggaggcaatgtcgaaacaaatgaaggctgaaagaatgaaacgcgcctccattcttgaagctgaaggttataaacaatcagaaatcaaaaaatctgagggcgataagcaggcagcaattctggaagccgaaggcaaggctgaatctattaaaaaaatggcggaagcaaagaagcaagctttgattttagaagccgagggtgaaagtatggcgatcgagaaggtctacgctgcaattcatgagggaaaccctgatgacggtcttatagcgattaaatacttggagtcactggaaaagatcgctgacggaaaggcctctaaaatcttcttaccctttgagtcaagcggtgttttaagttcggtcgcaggtatagctgagctattcaaggaggataaaaaagaataa

SEQ ID NO: 73487 - DNA, 408 bp, synthetic construct
  source 1..408: mol_type = other DNA
atggagatctttatctggataatcttggcaatcctgttcttcctcttggaaatacttacaggttcttttattctagtgtggtttggtataagctcaatagttgccgcggtattaaattatttcaaattcgatttctacacacaatttggcgcttttatagtaatatcgatcattttattggtgtttactaaaaagtttgcaattaaagtcaccccagaaattaataagaagaccactgccgaaaggctaattggaagaaacgctaaagttgttagaaaaattgatgataagaacattattgtcaaggtatgcggtgaagaatggtccgcttatgcaaaaaataatgttgacattggggacacggtcaaagtgtgtggaattgaaagtattaaattaatcgttgagtaa

SEQ ID NO: 73488 - DNA, 216 bp, synthetic construct
  source 1..216: mol_type = other DNA
ttgggtattattattaaatccttgaaatacttcatttatttacaaatcgaagcatttaaccatgagtttttcagatggcctaagaggatggaatactggaagaaagctttatcaattatcatattcttttgtatcggactgatacttatggacatgatagcttgcggcgatctaccagataagaatactgcctctagttttatgttttatatttaa

SEQ ID NO: 73489 - DNA, 2121 bp, synthetic construct
  source 1..2121: mol_type = other DNA
atgaatactcataatatcataacttcaacaaaaaatataattaacttgattttactggttttactgaatatcctagttataatattgatgtcagatttatatggggatttttccatcggtccttggtacaatgcctttttcatcgtcctttcgataaccatagccaatacattactatggccaatttttaaacggttttttatgaagttcatgatacaaactctcggcattggtacaatattcattaatgcattgatcttttatattgcttgttacttcattccgaatgtcgatgttggtttctatgcttctattaaagtgccgttcttcatgtcaattgccaccaccgttgttacgaacatgaccaacactaattattacaatcgacatcttaagaacatcgtaaagtacgcccttaataagaaaatcgattccaagagctacccgggcatcataatgcttgaaattgacggtctgtccataaatattctaaaaaaagccatcgacaataacataatgccaactattaaagaatggattgattcaagtactcataatctaaaagagtgggaaacagatctatcttctcaaaccggagcaagccaggcgggtatattgcatggaaataacgagaatattgtagcttatagatgggtcgagaaggaaaatgacaataagatcatcgtctctggtaaattgagccatgctccactaatagaaaagcgtataagtaatggggaaggattgcttgttgatggaatctccgtgagcaatatgttttcgggagattcgaagagtgcaccattgacttcttccaagctagggaccctaactagaattaaccataaaactttaaatacagtatttttggacacttacaactaccaaagaatattcacgttgttcttgtgggacatcttggtggagttgaaatcacaaattaagcatttaataaaaaatatccaaccaagactgcgtagaactgtcgtttatgctgctgtgagagctggtgctaatgtcgtgcttagagaagttaccacagatattctgacaagtgagatattaaaaggtgaaattgacactgcgtatgcgacatttatggggtatgatgaggtagcccatcactctggtacacaagatgaggatgtgtggccagtattaaaacaaattgacactcaaattcaaaggttaacaaatgcaattgatatgagtaacaggggctacaagctggtaatcttatcagaccacggccaatcgaacggggcaacgttcaaacaaaagtatggcataacgctcggtaattatgttagaaggtttcttccagatgatttgaaggtttatagaaacgagtttaatattgaccactttagagacgcagttttctctgaaaacatcaaattgaagattgtcaaagaaaaaataggtgattttcgtgacgatatctttgacgaaaatacatactttcagaatattagggatgaactggaaaacaagaaacctgctattattttcgataatgaacaataccaaaacttgagaaagaagtattcaaattccctagaatacatcaaaggccatgaaagtattgaacagagcactaagaaggcaaaagactctgagttgattgttttgggttctggtaacctaggtttaatctatcttactgagtggaagcagcgcttgacctatgaagaaattgttatgttatttcctgagttgatccccggcctcgtaaaacacccaggaattggtttcattttagttcactcaataaccaacggaggcatggtgattggtgaagatggtatatactatttagatacggataaaataattggtgaaaaccccttaatcaactatggaaaaaacgctgcaaggcatttaaagcgacagaacacgtttaacaatatgcccgacatcatggtcaatggtttttatgatgaaaaatacgatgaagtaaacgcatttgaagagctcattggtagtcacggcggtcttggaggggatcagacaaaacctttcattttatatccttctgaatgggaagatcctggtaaattaattggagcttcctcaatttacgaatttttgaaaaaagaaattaacgaattaaaatcttaa

SEQ ID NO: 73490 - DNA, 852 bp, synthetic construct
  source 1..852: mol_type = other DNA
atggataatttcaaacagcgtttaaacaagtccaaagaagctatcgataatgcagattatattatcattggtgcaggcgctggattttcagccgctgctggaatattatattctgggaagcgatttgaagataatttcaaggatttcattgaaaaatacgatatgaaggacatgtatagcgctggtttctacccattcaaaactcaagaggaaaagtgggcgtactggtgtcgtcatgtttatgtaaatagatattctgttggcaaaacagagttatacaagaagctgtttaatttggtcaaagataaagactattttgtattaaccacaaacgtggaacatcaattttggattaatgactttgaggacaaaaggatattcgccacgcaaggggattacggttcaatgcagtgtgaaaaaggttgccacgacaagctatatagcaacgaggattttgtttacgaatcgttgggaaaaatagagggttgcagaatcccctctaatctggtgcctaagtgtccggtttgtggaggtaatatggatcttaacctaagaaaggaccaattcttcattgaagataaaaaatggcatgaaatggccagtaattaccagaactttttgtccagaatagatgaagataaaaacatcgtactcttagaattgggtgtcggctttaacactcctaccattattaggtatccatttgaacaaatgacttataataacaaaaatatgactctaatcagattgaatagggactacccagacgcaattgaccaaaacaaagatagaacaataagttttgatgaagagatttatgaaatatttgattattggctttcacgcttctaa

SEQ ID NO: 73491 - DNA, 2811 bp, synthetic construct
  source 1..2811: mol_type = other DNA
atgaatgcgaaactaaacaccacatgtttcattttattgtttatttttttaatcaccgcagtatccgcggcggataataaaaacgaaactttattaactcaaaaggaaacagattcatcgcagaaattgtgtaagtcgagtgttagtaaggaaacttctaaaaaggaaaaggtcactcttaaagcacctaatttgaaaatgtattataaggatggatcgaaattcaaagcaaccgtgaaaaataagaataaaaaagctataacaaaggctaaggtggattttactgttaatggcaaagtttataacaagaaaactgacagtaagggtgatgcttaccttaccattagctccttaaaatcgggaaattatccaatcaaaataaggttcgctggtacaactaaatacactgctatatcaaagaagagcaccattactgttaaatctacaataaagagtaatgacttcaagaaatactataaaaacacgtcgccctacacttctaagttttataatcagaagggaaatatactgaaaaataaggccgttaagttcaagttaaataagaaacattacactgtgaagacggacaaaaagggtgtgggtaaactaccgattaacctgaaacctggaacctacgccatttccattataaatccaaagacatctgaaactgtaaataagaagataactataaaatcgttgattaagactaaggatctcagcattaatgggcagaatgatggtaagtttaatgtcaaagtctttaacaataaaggcgaagtttatccaaaccaaaaagttacatttaagattaacggtaagacctactcaaaaaaaactaacaaaaacggcattgctacattggacatcaacctagatgttgggaaacactcaataacaaccgaatatatgggtctgaaaaatactaataagatcaacataaacaaaatagtgaaatcaaccaattatatccacacaacgttaattccaaattatgttaatgtcacggctaaatatgtggttaataactctgtttactgtcttaaatctggaatcaacggcatcataaaaatgcctaagaacgagatctttaaaattcaagttgggggtaagatttacacgtttacaacgacttccattaacggcatcaattccataactcttagatacaataataattacctagtgccttttgatgggtctggagtaaaatcatatacgaaccgaaacaagctcacctcagatggtatcattattagcaaagtaaatgattacacacaaattgactatcagagtaagacaaaagataatacggctttatttggtttttatgcatccaaaggcctggataaatcggaaacgctgacatatgtggagaacgataaaatcactgcgaagattaacttcaacaccttgtcgtttgatgaatttagcttacggtactctttgtctgctttgcatggcaagacaatttacaatttcaattatggaaactacaatgacacaattagatttgcaaacaccaacactcccgtgacattctcctatttcggtaattctatagtaggttatgcctcacaagaaaccatcataactaagtttaaggttgatgaaattaaagaggtcgaaaaagaagagaatatctcttacggccttaataagaaatatcgtactgccatgggttttgaggttctgcaatcatatactctgattaatgaaaaaatcaatcagaagactctagagaactgggtcttgaaaaatccggactatttgagtagatttggagtcatgaatatttatggtatgcatttagcttctcttgaagtagcttggattgctgatataatcgcagataagagctccaaagaactgaatgtgaattggaaaagaaacaataccctaactatattgggtggaatcaacttggaagacacttatttgaatatactaaacgcagacatgggtatgaaagtaacaggcaagttcgacaatgccttcctattcaaattattaaactctatgaatctcccgaatattgaggagtatgccttattgaaagtcgcatatagatacttggacaaaagttcaaactctttggataatgtatttctctccattctaaaaaacaactttagtatcgcacaattagatgacatgatttacatcttctcagaagcaaattcaaaatctgccattatattgaatacaagcagcggtgtttcaagtgtagttctagctcaaaactccgtctataaaggctcatcacttaagaccacccatgactgttgcggtgttggtattataccaaaagacataataaagggaattaaagaaacattcaacattattaataatggattgtcaaacatctaccccaataagacacatccaatttctaaattgttctatatggctgctaatttacttgccaaaccattaaatggggtcggttctttaggtatgaacttaattaccacaatggcccttatccaatccggtggtacaacgtataggaacgaaatggttgagaaaagtgattggcacgaagttatggataaaattacttttaccagaccaggatatttacaatctaaaaagatttacaatattcctaatgaaaagggtggttgcgattttatcgaagtaaaaatcagagatgatatgacattggatcgcaacaatgcaatctacatatctgatgggaagacacgtaaattaagtaaaactgagacttacaagtatttcattgatgactactggacgccattttccatgcctcaaaaatactgggataaaagttggaacaggtaa

SEQ ID NO: 73492 - DNA, 330 bp, synthetic construct
  source 1..330: mol_type = other DNA
gtgatcaagatcaaaaaagagagtaaatttaccgtatcaataattataatattatgtgctctaatagctatcacccttgtttatccaaagtactctgctatatgggatgttgcatttctaattagtattttctacacatccacacaaacaattctggacacttccaagaagtctaaaagaaagttaaatattaacattgtcattatcatcatcttcgccactattattgccttttatgaaatgtctattggtaatcctttgattttttcaacggcgcttttaatactcgcaaatttgttggatagcactttgaacaaaaaatcgaattaa

SEQ ID NO: 73493 - DNA, 957 bp, synthetic construct
  source 1..957: mol_type = other DNA
atgaaaaacacctggaagttaaagttaagaatgatccttacatcagttgtcatgttcactattgtctatttcttgatcatgcttgtagggttgtacctgggtgtgtcgagctggaaattatactttggagccagcctggtaatcgtatttttacaatactggtttggtccatcattggtgaaacgttcaatgaatgtacgacccttatcggaagctgaagcgcctcatattcatcagatggttcaggaattagccgacgcagctggcatccccaagccagagataggtctatctgagatcaatataccaaacgcatttgcatacggcagatccagcagaagtggacacatagcgattacgcgtccaatcttgggtctacttgacagggatgaactgaaagccgttattggtcatgaaatgggtcatattaaacataatgatatgattgtcactgctgctgttagtgtcattccgatgatttgttattacatagctctatctttcatgttttccggcgataatgacaatggtggcggaattataatcggtattttgggatatgtgttctatttgataggtcaattgctggtgctctttatttcaagaactcgggaatactatgctgatgaagccagtgttgattttgggaacaggcctgcagccttggtgtctgctctatataaattatcttatggtgctgctagttgcgacaagcaaacaatttctgaagtcaatacaaaccgcgcattctttataaatgatgtaaacaacgcaaggcacgatgtttctgacttccaacaaattgactttgatggtgatggaaaaatatctaacgatgagctaagaagacttgcaaattccgatgttaaggtttcaaggaaaaatgggctcatggaattgttatccacccaccctgattcgttaaagagagttaaaagattggcggagttagaataa

SEQ ID NO: 73494 - DNA, 1446 bp, synthetic construct
  source 1..1446: mol_type = other DNA
atgttatggactgataaataccgaccgcaagaattaagtgcagtggtaggtaataagaaagagattaagataattactgattgggttaatgcctggaaatccaataacccccagataccactactcttagttggtccgcctggtatcgggaaaactaccctatctcaaattatagccaaacaattttcagaacatatcgagctaaacgctagtgataaacgtagtcaagagattatcaaaagcacaattggtgagtcctcttcttccagatccctttttggggacgaatacaagttgataatcctggatgaggtagacggcattcacggaactaacgaccggggaggagtaaaggctattggtgatataattaagtcgtcgaaacatcccatgatcttaatagctaatgatttttactcaaaaagattgcagtctataaaacctaaatgtcaagtcattaagatgaaaaagtcaagatggaatagtatcacaaaactgttaagagaaattgctcaagcagagaacgtggatgcaaatcctgcagcattgaaagagattgccttaaaatcacaaggtgatgtaagatcggcaatcaacactttgcaggccttgtcctcgaaagattctacacttgaagtccaagatgtcgaaaacatgaagaccaaggacacccgatcagacatatttaatgcaattacaggtgttttaaagtccaagacgccagcccacgttaaagaagcgatgtggatcgaagaagatccaacattggtcatggaatatatcgcggaaaacattccaagagagtacaagaaaaaggatgaaatcaaaaaagcttatgactacatttcaaaagcagacattttctttggtaggactcaacgcagcagaaattacggctattggaagtatgccagcgactttatgggaattggtgtgagtaactccaaacatgaaacgtataagaaattcacaaagatacaaactccaaccatattcacgttaatgagcaggaataggggcaagaggaatcttagagatgaaattgctgaaaaaatgtctgtaaaattgcacgtttcacattcaatagctatttctatgttcccatatctcgagataatgtttaagaacgatgaacttgcttgggagatttctgattatttggaactagaagataatgaaatcaaaagatttagatctaaaaaaatccctaagaaagtgattaataaaatggagaagcagaaagctcaaatgagagttgaagaacgtgacaggcgtgctgaagaactgaagaatcaaatgataaccgcggcagttgaaattgaagattcttatgaaatttcaaaacctgatgaaactaaagctgaggatacagtcaaaaaagaacccccaaaagagaagaaggaaaaaaagaagactgacaagcaggtttctttgttcagtttctaa

SEQ ID NO: 73495 - DNA, 1386 bp, synthetic construct
  source 1..1386: mol_type = other DNA
atgaattacctggtggtcggtgctggaaatgccagtaggcctgttgccagattgttaaattatttgggtcatgacgtggttgtaacagatcttaaagacatttcggaatttaaaatagagttccaaagaagtttgattgaaatggaaaaggaaggggtaagattagatatggctaacaagaacccttccgttgaaggtttcgatgctgtgtatatgccacccactttgcccgaaaccgcgccaatcgctcaaaaaatttacgagtctgacttaaaaattttaactaacgaagaattttctaaaatcgtaaacgatctaattgatgtggatattattggaatcaccggaaccatgggaaagacaactactacgtttatcacaactagcctatttaaacaagcaggctacaaagtgtggtcatgttcgtctcttgtaaataatttagtgtcagaagctatcgttgacggtattgttaaaggtaaggtcaatgaatgcgatatagctatttttgaacttcctcatggtactattggtctattaaacaaattaaacattaaaattggtctcttaactaatattgcggaggatcatttatcagagttcggtggttctcttgaaaagtatcaaaaacgtaaactgttgttgcaggcaatgtccgagatcttcatatcgaataactcatgtcatgacataattgaaaaagtccgcgatgacgccatattttatgctctagatgaagatgtggactttaagggtacggttggtgataagtcattaacgatcgcctatggtgataatgaatttacaacaccgtttaacatgatgtcctatttctttgaaaacagcgtcgccgcagcctctatcgcactaacatatggagttaatgaaaaagacatcatcgatgctttgaaggcatttaagggtttgccagcgcacatggaggacgttggggagtataatggcagaaaagtaatcttggattctgcgttcttatatgatggaatgaaaattacccttgattactttaaagatgatagtgtcgtattgttcttggatcacttcgacaccttgtctgtaagggacaaggcagaagtcggcaatctaatatcagaatataacctgaaagcagttatagctagcggatttaatgaggttacacaggctgttgaaatggacgctgcaaatgagattctggatgccataactaatataaacattgaaaaggtcgctgttgaaacaatagaaaaggcagctgaattaacgttcaaatactccgagccaggcgatgttattctgcacatggggccacttatagcatacgacagattgaccactgttgataagataattaaaggcctcgagcgaggcagtaagaagtacgaataa

SEQ ID NO: 73496 - DNA, 834 bp, synthetic construct
  source 1..834: mol_type = other DNA
atggatatattacaggctataataattgggattgtgcaagggctgacggaatttttaccagttagtagctcagcccacttagtattcgctcaaaaattagtgggtgtggaaagttctcttacctttgatgttctgcttcatttgggaacattgattgctgttctatggttcttccgttgggacataattaaaatgcttaaatcttggtggttgtccatcggtgacttattgcaaggccgatttaaacaaggtttttatgatgatccttacaagagactagcctggtatgttattttggcaactattccagtcggtatcgttggcgtcctctttgatgatgctatcgaatcattatttgccggcgcactttatgttccggcattctttctattcgtcactggtactattttatacttgtctcaaagaatgaatagtggaaagattaacatgaataacatgtctaaggtcgaggcattggtaatgggactaggtcaggcttgtgctatattgcctggtctatcaaggagcgggaccacaatcgcagccggcttggtaatgggtcttgataaggagttcgctgctaaattctcgtttatcttatccattcccgccatttttggagcgttcatttttaaattaaaagacataggttcggcgatggacgttaattttttaccagttttcataggtttcattgtatctatcctcgcaggctacctggctatcaaatggatgttggatttaattaagaatagaagcttggacatctttgcatactattgctggctgatgggtattatagtgtttatgggatcaatttcccatatattttaa

SEQ ID NO: 73497 - DNA, 1557 bp, synthetic construct
  source 1..1557: mol_type = other DNA
atggcaaacaagttaattcgtggtagtttaataattttaataggtaacgtgatcttccgtattgggggttatatttaccggttcttgatggccattttacttggacctactgcatatggtattttaggcattactttaccattccaaggaatctttcagactttgtctgctggtggcctcccccccgccattgctaaatatgtggcagaatacgaagccatcgatgaaaaggacatggctcgccaaacaatctacacggccttgaagattatggtttttctaggtttattctttggtgtattgatgattttcattgttgctccatatttggcttatggttatttgggcaaacctgaagctctaatccctctacagattgtagggctgatcactccattctccgtcatcgtgggtgcatttagaggagcattccaaggggtgtacaaaatggagtatattgtatatactagagctgtagagcagcttggtatgattttatttgcaactgccttcgtattgataggtttgtctacagttggagcgctatggggtacggtgttaggatattcgctctccgtcgtagcggcggtttacattttcaaatatcatatgggcaatttgataccggaacctagtgatgattttgtttttacaagacgagatgaactaaaactggcaacagtcctggtcaagttttcgattcctgtaattattacagccattgctgaaatgcttatatataatatctgtacaattgtcatgggtaaatttttaaccttcgatgacataggatttttcgctgcggcagatccaattgcaaggctgcccctgattatctcaatttccatcgccaccacaattttaccggcttcttctgaggcattcaagttaaaagacattggcatgcttcaaaaatacgtctcagaagcctataagttctcattgttgtttgtcgttccaatgtgcgttggtcttgccttgtttgccgaacctaccttaagagtgctctactttaaaaatcctgcttatgtggctggtgcgatggcattagccatactatctattggaatgaccttctacagcatatttgcgatatcaaccagcatcgttcaaggtatcggaaacccaagaatcccaatgtatatattggtcggcggggctgttgttactggcgttcttaattggataatggttccaactcttggaatcgctggtggtgcactggctactagtgttgcttgctttttaatgatggttccatgtatatactttgtatttagattaacaaaaaccaaagctcccgttgtggcagtagctaagatattggtcgcttccgcagttatgggtatagtggcatactttatcccaaaaagtacgctatttttattccctgggatagtattgtgtatggtcgtttacttctttgctttgatacttgttaaattcttccaaaaggatgacattgagagcctaaggaaattttcatctaagtttggcccgttttctaagctgattaacaagatgttgaattttgttgaaaggatcgaatttagataa

SEQ ID NO: 73498 - DNA, 585 bp, synthetic construct
  source 1..585: mol_type = other DNA
atgaagattttcggtatttgtgctagtcctagaaacaatacaactgagtatgcgttgtcgaaggcaatgaggagactgaatgaagagggatttgaaacggaaatgttcacttgccaatcaaaagatattaaaccgtgtatgcattgtgactattgtttggaacataagaaatgcataatccaagatgacatgggggacgtttataagggtcttttaacagctgacgggattatcctggctacgccagtccagaatggtggtatatcctcttatctctccgctattatggacaggaccagagcattagaagcaatcgattacaatattctaagaggtaaaatcggaatgagcatcactgtgggcggcgatcgtacaggcggacaagattttgcccacttgaaaaatataacttacttcatgatacatggtataattccagtaagtggaggtccctttggttctaatttaggcgcctcattctggtcaaaagattctcttgatgatattaaggaagattactacggtatggatagcttaaaccgaaccttgcacgagtttgaaaactttctaaacaaatatatttaa

SEQ ID NO: 73499 - DNA, 339 bp, synthetic construct
  source 1..339: mol_type = other DNA
atgattaggagaaagaagggaaagtttctaagtcaaggtgaagaagatcctatgtcgggtacatccaatttggtggatgtaatgttggtcattgctgttggactcctgatatttttagttatttcatggaacatgcagaatattgtattcaacgaaaatatggatgaacaacaaaaagaaaaagtgaagaacgcaataaaagaggtttcacaaatcgaccagggcaatgaattaaatgatactccagatataagtaaatctagcgggaaaggtttcaccgagatgggtaaggtttatagagactctgacacgggcaaacttatcatggtcgagggttaa

SEQ ID NO: 73500 - DNA, 642 bp, synthetic construct
  source 1..642: mol_type = other DNA
atggtggcgattcctgggagtgagtttttgactgctgccttgaatgtagtttcgcaaagtctacaaatcccagtaataatcttcctattgatttttgcagtgtttgcagtgtttgctttcggaggtctcatttcagattatagaactcgtataaaattaaatagggattataaagaaaagttgatattttctctcgtcaattcgaaaacagtcgatgaacttaaacacgctgttgacggtagtgagatttacaattctcaaaaggaagttctattgaaaatagctgatgcacatagcttaagctgtgaatctagggaatcatgggctttgaacttaattgaggaagaagaggtcgtcatggccaagtccctggaaaagatagatattgttacacgaattggtccgacgcttggactaatgggtactttaatcccaatgggacccggcctggccgcattaggtaacggggacgtgtccacattggctgctgccatcattgtagcattcgacaccaccgtcgttggtatcggctccggcgcggttgcttacgttatatcaaaaattagaagaagatggtacgaagaatattcatctaatcttcagttattcgtaaacgcagttctggagaatttaaacgattaa

SEQ ID NO: 73501 - DNA, 684 bp, synthetic construct
  source 1..684: mol_type = other DNA
atgagtttcagtctactgtggtctgttggctttgctgtttcaatagtggttttcgccatctctattggtttggttattaattctaagattaattcgaacaagaaccttgtcaaactggtattcgtactctttatatccaccttaatccttatatattcgatttgcatttttaaaattcagttaaactcaattataggtagttacaattatgttctcctatttctgatcgcattcctattaatgttcataggatatattattatcaaagaaaacgggtgcggccgtacttttataaatgtccttttgttatcttacttaagctttatactggtgatgttaatttgtataggttctaaggagtctatttttggtttggacgatctgcaaatctccctcctagcaacactattgtttaattcattgatccttgtcgtattcttcgcttgtagaaagttaaagctaattgataggtcctacagaagttttggaagcttgtatttaatattgggaatttattgtttaatgatttcattattgcttccaaacatcatcagcttgaatatgggtgatatgaaacctatcaatattgtctcaattgactccatagcgtttatttttattttattgatcgtgataatggttttaggtttgttgtattacaaaagaaatacgcttttgaaataa

SEQ ID NO: 73502 - DNA, 516 bp, synthetic construct
  source 1..516: mol_type = other DNA
atggaatgcaagaaattagcattgttgatttcagttatatttattatgtcattcgctgcatctggcgtattcgcgcatcccggtcacggttctgagtacgtggaggaagtgacttcggatgatgttggttcatcaagtaattccggaagctcttcaggtagttccggctcttcaagtaactctggaggttctaccgttccagcttcatcctcttctagcagctcgagttcttccagaagttcgagttactctagttcggacccttattctagcagctccagctcctcaggagctcatgactcaaaccatgattcctatcaaggttcctcatccaattctgtcgtcaaggataattcttctcttaaagacgccaataagacaaatgaaaacttaactaacgattcaggggaaattgataatgatgaactttttacggtaaacaatatcctattattgattatcgtactgttctgtgggtttttcataagtgttatactatttaaactcttttcgtaa

SEQ ID NO: 73503 - DNA, 2931 bp, synthetic construct
  source 1..2931: mol_type = other DNA
atggggggtaagaatattaacaaacacttgatttcactgttatttttttgcattctagttttgctaatggcaggtggagtgtatgctgaagacatcggtaactccgatgttttcgaaaatccaatctctacggacattcagcaggatgatttatctgaagatgatttggatatatccaacttaaacgtgaaagttaactatcaatatgctgatgacaatggaaagataaacccaacgatcaaagttaatgataaacatataatatcaaaagaatttaatagttcatatcaaaactacaatgttataattaattcaacaaatattgcagacaagcttaatatttctatctctgcaccgggctatttgactcaatataaaatagtcactccaaacatgggtaaatctattttggctaatgtcacttttaatatggaatcttcggaaagttacaagttaggtagagacgtaacagcggaagccgacaaattactagattttaaaaatgctgacgatgttttggctattacaactgcgggtgtggccaaatataatggtaagactagcgaagatgcaatggaagcaatggttaattatggtaagatatcttacagcaacatattaatgttacgtcaaagtgctattgatcccattgactttgcttttattgttaagaagggaaatgagttaaaagctatcattttccaaaacgcctctactaaatattcatatttgggaacaatttcggagaacatgacaaaagctcaatggaataagtactataagtcacttgtgggtgaaaattcctgggcctttgctagcttggccaacggttgggctgcgggtgtttccagagaaatacttcaagaggccgcttttcatggccatatttgtgaagggactttgggtggatatagtattattcaagcgttgttgaaatactacccgcctgagcaagagaacaatcctggtggaatcggttctcccgcagacattaccgcgtataaagtactcggagttcctggcggatcggatgatgacgcagccttattctttctagatgacacaatcggtaaaaccgggtacgcgggtatgaataccacgaatacgggggctactgagaatatgattggtttcatcaaatggaatagtaagcaaaagactggcgatctcatcatcatgtcattcaattccacgaagcttaaaaagcttttcaaaaaggaaactaagataaatgccgacgctggcagtttggaagaattaaaatactgctcttggtggattaataagatcaataataatcctgaaaaattagttgattttctttacgaatttacaggtttaaaccaggaacaatataactacttgatgggaactaccgagaacataacctatgacggtgaacctgcagagtacggtctggatggtcatgggttagatctaaactatattttgtcgttgaatctccccactgccaagagaacaatcaattccgttgctcatgctaaattaacagatgctgaactgaaacaaatcggtatagatgcagccaataaagccaaaaaaatattcaatgaagaattgggcgtcgaaatagacagggatgatatcgattttctagctttaaccgatgcgggatatgcatttctgaatggccaggatactgtcgttgttcgcgacggccttcacgaagtcctcggaggaacattgtatagtcagaacctgttatccctacaccaggctgtctggaagccgttgtggtttgcatttgcaatcagatacccagactctgatttagttgatatgatttacctgagatacaatccagataccaaagatttctttgtgggaacgcttgatggtaacagagtggtggatattggttttgaaacattaaacaacagcgacaaactaaaggctatcgccaaatctttcgttcccgatggaaactggttcaatatacaaagtattgtaaacgcctggaacgaacaccctctatttgatcagatggccacattcttgtatcatgctcatgtctgtccaggcgttcaaccaggcttcttcataactgattatattcaggaaaagtatccattaggggagaatgaatcttacacctacattgcatctagcatttactgtaaagacgacagtctaacttacctattggacttatcgccagggttagggacattctatgtacaaaagttaccaaagaatgagactgaaaatggaatatctcaaggtgttctcgtcgtatgggataaaaaccttaaaataggtaaggcagtaatcgttaattttgatgattggggtacaattgacacaagtatgtacgtcacgagcgaagcaaaacgagctagccaaattaaagcttatattgacatatatggtaataggaacaatccaaacgtgaaatcgaaaccaatcgtctcaaccgtcaatgagaaatggattaccgaagaacagtttaacatgctgaagcaaggtgccggcgatgatttcaatgtactgtcatacttgaaaagccttgatgatatcaccaaagaagatttacttaaatcaataaatcaaaattccaatagtaattcaaattcaaactctaagccgaacattaaccctaacagtaactcaaattccaactcgaactccagctcaaatgctatagcatcccatacaaattccaatccatcatcttctggcagtgttggcacttctggtgcagtagtgtcgtccgcatatgtgggcgagtttactaaagacgctgaatctgaggattcacaaaacggtcctgatgacgccaagtcatacgaggtatctaagtctcctgcagcaaaatccgctgattcaaatagtttgatttatgctctaatcggtgtattggcgattggaattttgctgggtgtaggttatatgaagcgtgacaagaagtaa

SEQ ID NO: 73504 - DNA, 624 bp, synthetic construct
  source 1..624: mol_type = other DNA
atgcatttacctgatggcataattagtttcgaacaagcaatcatctattggacaatcactttgataattgtttcactattcttttacaaattttctaatgacgagaacaaggaaaagagaatcatatcgatagcgttgtttagtgtttttactataggcattacctccttatccatcccatcaccgcttggggtgccaatccacttcttcatcatacctcttatagctatgttgttaggtcccttttctagcacaatcgtatcttttgtcactttgattatgcaagcattaactctgaatatgggtggtataacctccctaggtgctaatttcattgtaattggattcatcttgtctgttgccacgtatgggttttataaactattcctcaatttaaacaagaaatttgcaatatttggatcaaccgttattggtattattattgccacattcggacagattggcattctgttaattagtggtgccatgaaccttgatgtattactgagcacgttgttgccattttacgtcttcatctcgtttattgaaggttttgctaacgtgattataatcacagctattgaaaagataaaacctgagataattgaaattaataaaatttaa

SEQ ID NO: 73505 - DNA, 483 bp, synthetic construct
  source 1..483: mol_type = other DNA
atgaaatatttgaaaatatcaattttgttactcatactgttgctaggtatttctacggtgtcatctcacggggtagatgtaacagcagacaccatggttgttgctaacgattccaatggcaagatggtcaaaagtattgccgaatcaaataatattaacattagcgtttacaagttcacatctgaagatgaagttactcatatcctggagcattcgataaacaacacaaacaaaaggatcttgtttactgcatatcaggagactgctaatgatttcctaaagaagcatcctgacatgtccaatagaataattgtcatcgataatgtcaacgacaatacgactcttgaaggtcttcaaaatattatgaacgtgcccgtagaaaacgttaatagtgaaaataattttggattgccattaaccatcggtatcataattggtttattaattggtattggctgtggagcgtacataatgaaaagataa

SEQ ID NO: 73506 - DNA, 1062 bp, synthetic construct
  source 1..1062: mol_type = other DNA
atgaatattaggaaaattgattttttcaatccattgatcgttgtagtggccatcgtcgtgtttttattgatggggtatgccggttcgtttgactacagatttgaagatcctctcaacatgaatgtattcttaactattatttttgcatgtattgtgtttgcgactggctttttagtcatggaaaacaaaattattgttgataagactaaggaaatcaattttatttctgaaaggttgttgataattctcgttttaatagctttgatattacagactctaaatataatcttgattggtggtattcctctttttaatagtgttttgaagagcaattcgacaacaaacatttggcgaatagcatatccgctattcttgataatgataaacctgttactggcaaaatattacaacaaaaaatatttaattctagttgctcttggagctttaatctttggtcttaacggatatagaacgtctgttttgggtattttaggtagttcttttattaccctatactatttgaatagaatctctaaaaaaatagggatcttattcatagctataatagctatcggtttcatggcgatcggttacattgcctcccaatcaatcgctaatcagcattggacattgaatcctggtcaattagtactgtatagagctgcatttaccctagaggtctttgaaaaaatcatcccactagccggttcaactaatggacatattcttagtatgattttctcatcaggcagcccccgtacgttcatcggcgaatatgtcctgcactacaacgtttgccttacttccacgttgttcggtccagttaccctcgatttcggattgattggccttgcaattcaaatgttattcatgggtgtatttattggaataatctataagttgaaggagggaataggggtcggcgtgtactccatcattttaacacacacactgatttggatagagaccggtccaacagacattatgatttggtttttatatttccttgggttgatcctgataataattaaccataattacattaagctaaacaaaaattaa

SEQ ID NO: 73507 - DNA, 903 bp, synthetic construct
  source 1..903: mol_type = other DNA
ttggaaaaaccacaattaattaatttcatagccaaggtaatggaggactctggtttcaaggtttacaagaattttaaaacctctcagagagttatagacatatacgctattttacctacgacaattggcgattttggtgtggtggtagcctgtaaaaactacgacaaggattttaaaatcggggtcgatgtattacgtgaaatggaagaagttcaacagagtattaaagcgtctaaggtcactattgtttcttcctcttacttttcagatcaagcaaagaactatgcgttgagaaaaaacattaaactagtagacagggataatctccttgaacttgctaagaaataccaggacaggaccagccagacgacattggataatacaccttacgatggcggggcatcccaatatatcgaagatgaatatccggaatatacctacgatgcttctgatatggagtacttgatgagaagacgtgagcaaaatcccgctgtttataaaaatacattgtatcggcaaatcgatgaagatcgccatactggtttttcgtcaattctgaaccgaggaagttcgagaaatagcagtctatccggtgtcactaatctgtataactaccaatccagaaagagtacttttggtcaagactcattgttgtttaatttggttaaaaatccaatagttcttattatcctagttgtagcagtgtcatatatcatctcttatattgcaggtaacctactcaaagtcgatgctggcatatcgggattaatagagatgattgtggccttattccttagctatggtttatcattgtatactgatagaaacagggactttatcgtcaaaggaacattcatattcttcatctcattaattattctgattatattaatttttgtttaa

SEQ ID NO: 73508 - DNA, 333 bp, synthetic construct
  source 1..333: mol_type = other DNA
atggaactaaccaaatatatatgccatcgtaagccagagcgatcattccatatcaaaaatcatcaattccccgtctgtgcaagatgttgcggattttacacgggattaattgtttacttaatttgttatcagttttacaatcacaattatgatttaaatatgctattgatttctatgatccttatgattcctgtggctattgacggtttcactcaatattttagtttgagagaatccaagaacaacctgagatttataacaggtcttatcggtggcattgggctcataatctttttaaaaataattataaggtggattttgtacgtattgtaa

SEQ ID NO: 73509 - DNA, 834 bp, synthetic construct
  source 1..834: mol_type = other DNA
atgaataacatgcctaaagatttagataaaatcaaatttgagttgtctgagaagcttgaatttttaaaagagaatgccgaatcggaagaagaaatagaaaaattaaataactttgcttcatatttggccgacaagtactctcaaattgacgatgaagatataaagactgaaaaattaaacagaatcaatacaggtctaagttattatcaacgttttaaaaaggctctagagaagaatatagatattgatcccggaagattaatgggtttgacggacgggatcttcggcatggtaatgactcttttggtatttggtattgcactgccagaattacagataacctactattccacatttttgagcttcttctcaagtttggctccaacaatcggtgttactgttgtcagtttcgttttactgtcgtctttttggatttaccaccatgaatttattaaagtgaacaaccttaacatcccgtacttatggttgaatgtcttctttttgatttgtatatcctttgtgccatttactacgtctctgattggccattactcacacttcttcctctctgaagtcattttcggtatcaatattctattaacaataatttccttccttttaatgtaccactatgcaaattcaatgcattttcttgaaaatgcgcctagcaagaaagagcgaaattatgtttaccaaacttttggaatgataatgggactaaccatcgttgtgaacctcttggatttccatgtctcaagttattttatttatttgttcctgctagttcctgtaatatctaccattagggacattagatttaagatgaatgaataa

SEQ ID NO: 73510 - DNA, 1365 bp, synthetic construct
  source 1..1365: mol_type = other DNA
atggaaaaaaattctaatatagaaatgataacgggtgatcctaaaaaggcaattaataaattgtcgatccctattatcgctagtatgtttttaattttcgccaacaatattattgacagtgtttgggtagcaggcctgggtgccgatccattagctgccctagggtatgtaacaccattatttatggtgctgatcggcattggaaacggtataggtgctggcggtaactctttaatttcgcgttacattggggctgagaagagacagtcagccaacaatgccgctattcacaacctaatccttggaataatcttatctatagcagtctcaataattttgcttacatttttgaaaccattgttgattgtgatgggtgcatctgctgttttaaaatacgcaatggactacggaattgtaatttttgcttttagctttgctatgttgcttccgccaatcttcggcggtgcattcagagcagaaggagatgtcaagagagcgactatacccctggcaatttccgcaataaccaatatgattattgaccccattttcatttatacattcaatttgggggtcgcgggtgcggcatgggctactgttattgcccatatcttcgcagtcgctgcaatgctttattggatgcttgttaaaaaagatacctatcttaagtataatcgtgaatcctttaagaatgatttgactatgtacaaagatattttagttgtgggtatcccagcctcattggaacaactcatcttgtctgctttaactatcgttgtaaatttcatgcttacaattgtgagcggacctgttgcggtagctgtttacacagctggttggagaataataaacatcggtatgctcccggccattggcgttgggactgccgcaatatccgtttcaggcgttgcgtatggagctcgcaagtatgagaacttaagaatcactgcaagatatgctgtgaaggttgccttgatagcttcaattattgtttgtattatattaaatatattcgccaatcaaatcgctttcatattttcctactctgagagtagcgctcagttagagcctttaatcgcaagtttcttacaaattatgtgtttatttatattgtatgtcccatttggtgcgagtgctggaaatgtcttccaaggtgtgggaaaaggctcaatttcttttattttgacgtcatttagggaatttgtactagtcttgatctttgcttatgtactgggttttaccctcaacatgggggaatttggaatatactgcggtatgctgctaggtggtggtattggttctctaatatgttacatctgcattgaactatatatcaaccgactaatgaggtcgattgaatcctaa

SEQ ID NO: 73511 - DNA, 426 bp, synthetic construct
  source 1..426: mol_type = other DNA
atggaaatcgactataaagaaattgcatcatatgtagttatcctaataattgttttgatagccgctcaacatcttaatgttgttgtatctggaagtatggagccggccttctataggggcgacattgtgctcgttgaaaaggcagatttctttggtatacacgagtttaatgcatctgacgtcaaagtgggtgatgtagtggtttatgatgcggcttggtataaccagccagttatccatagaatcattaatattactgatattaacggtactacgatgtacgtaattaagggagataacaataacgctcctgacccatactacgtgaccagctcgcaaataaaggaaaaagtcgtcacagttgatgataatttagtcgtaatacccaaaattggttacttgtccctgtggttgagagggttataa

SEQ ID NO: 73512 - DNA, 1113 bp, synthetic construct
  source 1..1113: mol_type = other DNA
atgagcacactagaaaaaatgaaaattttgactgattcggctcaatatgacttatgtgattatgttagccatcacaaaagttctcagataaacttacctggaatttacgaagcaataggtcataatggttgtaaaattccactttttaaaacactcatgaccaataagtgtaaaaatgattgcaaatattgtattaaccaatccaaaagaaactttaccaggttggagctatcacctgaagaactggcaagagcgttcctaggatactataatagaggattagtgaacggtttattcttaagttcaggcatatcggatgatgtagactccactatggaaaagcaaatagaaaccgtgtcccttttgcgaaaaaagtatggttacgatgattacattcatctgaaagtcataccaggtgccagcagagactcgatcaaacgtgccatggctttggctaatagggtcagtatcaatattgaggctgcaacatcttcaggtcttgccgagttatcctcaacgaaggactataataaagatatcttaaaaagattgtcatggatcaattctctacagcataagagcacgacatatccaaactctacacatactacccaattaatcatcggggccaacaatgaaactgataaagagatattgagtcggatggaaaagatatacaaaaaatcagacctgaagcgcacttacttctccgcattcactcccattgaggaaaccgaatttaagaataaggaagcttgctccactgatagaacatcaaagctgtataacgcggatactttgattaactcttacaagtataatgttaaagagttaatatttgatgagtctgacaagttgtctcttacacaagatccgaagattctagctgcaaagaacatgaatatttttccagtagaaataaatagtgcacctatcagagaactcatcagggttcccggcattggggtaaaatctgctcacgaaattgtttctattcgtaagaaaaagccttttacgcacaaagaacaattgcaagaattgggtgttatcacaaacagagctgacccatacattaaaattaatggcgaatatcagaccacttttaatttctaa

SEQ ID NO: 73513 - DNA, 843 bp, synthetic construct
  source 1..843: mol_type = other DNA
atgtccgaaataatagcagtgatgaaccaaaaggggggttgcggtaagacaactactgttgttaataccgcaacatctctagcagtaatgggtaaatctgttttggtagtagatatggaccctcaagctaatgctacaacgtcctttgggattgacaaaactaaaatagaaaacacaatatacgatgctcttataggcgacatctcagttaaaaaggcaacaattcctacgttcattaagaatctgtttattatcccatccaatataagcctaagtggagccggaatggagctctctagacgagaaaattaccatattgttttacaagaaactctgaaggatgttgtaccattatttgattatatattcatcgacttgcccccgtcattaggtgtcataacagtcaatgccttggtggcttcagatagtgtcttaatccctattcaggctgagtactatgcactagaaggagtggccgatttgatcaataccattaaattggttgaaaaaaggcttaggtcaccaactccgatcaaaggcattttgctcaccctgttcgacaaacgcactagacttagtaaggatgtccgtaaagaactaaaaaattactttggcgaaaccaacttactttttaaaacgattattccaagaaacatcagattagctgaagcgccttcgttcggtaagccctgtttgatttatgatccagatagcactggtactaaatcgtatttgaagttagccaaagagatcattcaaagagatgagaatgtccagttaaacattgcgaaaaccaacattgacaaggtgaagaaagattctgaagttgctggaggtaagtaa

SEQ ID NO: 73514 - DNA, 1542 bp, synthetic construct
  source 1..1542: mol_type = other DNA
atgaacgcaaagaatattgaaactttaaagaaggaaaacatgaatctagccgaaaaaatttatattttcgataccactttgagagatggtgaacaaacacctggtgttgcccttactgtggatgaaaaaattcaaatcgcacagaaacttaataacttgggtgtagataagatagaggtcgggttcccggcaagctcgcctggagagatggaatctgcaaaaagaatcaaaaatagagaactggactcgagacttgtcggtttggcccgctcattaacaggagacattgacgcagtcattgatgcggacttggattatatacatacattcattggtacctccccattgcatcgggactacaaactcaaaaagtctaaggaggacataatacacagctccgttgtggcaatagactacgcaaaggaccatggccttactgtcgaattttcagcggaggatgcaacaagaactgaacgagattttctatttgagatattcaacgaagtggtcgacgctggtgctgatttcttagacattcccgacactgtcggcgtcctaactcccatcgtgaccagagagctgatcacagatatcaagaataattttaagacgccaattagtgtgcattttcataatgattttggacttgccacagctaacaccttaaccgctatcgaatgtggtgccaaccaggcccatgtaacaattaacggactaggcgaaaggacgggtaactgttcgctcgaagaattggtaatggctcttaagagcgcttataacattgatttaggactcgataccactagattatacagcttatctaatttggttggtcgtctgacaggagtaaaaatgccggttaataaaccaattgtaggggacaatgcattcgcacatgaatccggcatccatgtccacggaattttaaataatgcgtctacatacgaaccaatgtccccagagatggttggtcactcaagaaaaatcgttttaggcaaacacactggcgctaatgctgttaaggctaaattaaaagaacatcacatagatttgaatgagaagcaatttgacaaggtatttaaaaacatcaaatcactaggggataatggtaaatgcgttacggatgatgatttaatagctattgcgataacagaacttgcttctgcccgtgagaccccaattgttataaaaggtttgagtatctcaatgggtgctaatgtttctcctacggccactgttaagctagagattgacggtgtagaaaaagaaactgcaagtactggagttgggcctgtggatgcagctctaaatgctataagggaattgattcaagatacaatggatattgaattggaagaatataacctggaagctattacgggtggtacagatgcattggcggaggtgtttgttatcagttctgattctgatggtaacaaatctactggcaggtccaccaaccaagatatcgtaatggccagtatattggctgttttagattcaattaataaactgttgttaattaataggtcaatattataa

SEQ ID NO: 73515 - DNA, 1206 bp, synthetic construct
  source 1..1206: mol_type = other DNA
atgtataagaaattatttatcggaatattgatttgtcttttagtaatctccccaattgctgctgcaaactggaatagtttcgctggtggggtggatcacaacgcatttagagaagaaagttcggattttgtaactaatctgtggacttttaatatggaatcacctatccatagctctccagcagtgtataaagatttcatatatgtggtctctacccagggtatattgaaggttatcaatatggagacaggcgaaaaggattgggattttgatctcgaatcaaataccaattcttcaccaataattaacagcaacaaattattcattgggactgaagacggtattaaagccatcaacataaacaaccataacgagatatgggattatgattgtgacgatgttgaatctactccctttttgtataaagatacaatttactttggaagtgatgacggtcatctatacggactggataaggataatggaaaagttgtattcaataagaaattagatggagagcttaagtcctccccaattgtagttgacgatacaatttatattggctctacaaactgcaagttgtacagtatcgggaccgacaaggataaaaattgggaatttacgaccggtgatgaaattttatcgtctcccagcttcatcaatgacactattgtgttcggaagcaatgacggcaatatctattgcttgaacgagtcggatggtgccttaaactggaaagtggatttgaataataaagtcctatcttcacctacggttgataatcatgacaataacatttttataggttctgacgaaggtaacttaacttgtattgataacagggacgggaccataaaatggagtcattcagtcggtggtaaaatacaatccacgcctgccattaaggataatctagttgtttttggttcggataacggtaatctgtacgttttgaataaatacactggtagtgaagaatttacatataatccaggaacaatactcttcaattcagcgattaattcatcacctgtcattaacggtaacagtttgatatttggcgacgactccggcaatgtatactctctaaatattgacaagcacgaggtcccgggctccactcaaatgtacttctccatctctgttttaataattattgtcatcgtggctcttgttatcgttcacaaagtaaaaggtagaaagtaa

SEQ ID NO: 73516 - DNA, 1155 bp, synthetic construct
  source 1..1155: mol_type = other DNA
atgctagaatttaaaaaattctggtggatgattaaaaaggaggtactcagtcttaaaagacatcccgctaggttagtgtctattatcgcctttcctataattatgattttactatttggttacggcatgggtggcgaaatgacagatctgccaattcttgtggtttcgcaaagtcatgggaatttgaccgacttaacattagacactattaaaaccactgaaacgtataaggttatcgaggttattgatgatttggatgagggtaaaaaacgtgttgattcgggtgaagtcaaagcagctataatactgccatccgattatgacgataattcaacacaacaaaaatcggttactttgtacttggactcaagcgatcagatggcgtctcagattttagattcaagtacacaagcgatattctctagactctccaatatggttgcttcccaaactaacgtggaaaataaggacgctaatattaatccatcaatatcaaatagctttaataactttaaggatgatattagcttgcacatcaatagaatctatggtaacattaagtacattgactttttggttcctgcaattctcggtatgacggtaatgatgagttgtatgatgggaatgggtgccaccatcgccggtgaacgtgaaactggcgaacttgcaagactattcatgactccaacctctgtttccactgtaatcggcggtaagatcgccgctaagctgctaattgagttattacgagctttgatattgattttcatggctgtcttacttttcaacgtcagtataaagggaggtatactgcaaacgtttatcgtccttgtcgttggagctttgtgcttcgtgggatttggaatgatgttgtctgcaagaacatctactcaagaagactatgttcagatggtcatgccattttcaatgcctatgatgtttatttctggggtattttatccgattgaaaccatgccctggattctacagaaattagcatacatattccctctgacttatttgaacgatgcaatgcgcggaatcatgcttaaaggtcaaacattaggggatgtatggttggatctagccgtgttattaggcttcacattgttattctttataatcggtgttaaaagatttaacagggacgtataa

SEQ ID NO: 73517 - DNA, 1047 bp, synthetic construct
  source 1..1047: mol_type = other DNA
atgaaaaacgcaatcgaaaccaataacctaacgaaggtgtacggtaacttcactgcggtaaattctttaaatctcaaaattccaaacaatagtattttcggaatgttgggtccaaatggtgctggaaaaacaacaaccattaagatgcttacttgtttgatccaaccgacttcgggcaaagctgtcgtcgggggctatgatgtagagaaaaatcctgacgaagtcaggaatctcttaggcatggtgccccaacaagttagtttgtacaaggatttaaccgttatggaaaactcacagatgtgcgcagactattacgggataccatccgatgagagagatgcccgtatagaagatctgatggaattggttgatattaaatacgctaagaataaacgagttggtcaactatcaggtggtcaaaagcagaaagcatcccttgttgccagcttagtccacagaccagatattttatttttggatgaacccactataggcctagaccctactaccaaacgcacgttgtgggatttgattagggatttgaacgacgagggccatacaataatattatgttcccatgacatgcatgaggtagatatgctatgtgataatgtcggaatcatcaacacagggaaccttgtggcatatgatacaccacaaggtctgaaagattctcttttagaagcgaacaagaaaaagatgacagaagccttaggaaagatttcggacgaaaccaaaatatcaacttctactaaggaagacatcggaaatctaggtttaagaaaaatgtctattctgttgaaaaaccagaatgaggaaattattgaagctattaaaacaagcgattttgtgaagacggttgagatcgctcacaacggtcgtatcaatttgagaatagacagttatgatgacatggctgttcaaaatgttttaaaggatatcaattcttttggtggtgtaataaagtctatttatactgaagaaccttcactggaagacgtatttattaaagcaactgccgaggtggatgaaaatgctagagtttaa

SEQ ID NO: 73518 - DNA, 408 bp, synthetic construct
  source 1..408: mol_type = other DNA
atgacggataaagaaatttatgatactcaaacaatgttgataaagcactattccaatggtttgaccaggaatctaattctctggattatttcgaaagaaaagattcatggttacgggataatgaaaaagctggatgaatttttcaactttgaagacgtgaattatgagattaaaaatactagcagtaaagtctacccaatcttgagaaaaatggagaaaaacggacttatcattggcgaatgggacattaacgaaaacaataagagagtaaaatactactctataacagatgaaggattaataatcttagacaagatacgttctataatcaacttcatctcaaacaatcctgcttggttaaatttttatggtgatatgggtgttgagattaatgaaaagagaaattaa

SEQ ID NO: 73519 - DNA, 795 bp, synthetic construct
  source 1..795: mol_type = other DNA
atgaagaaagctgtggtattcgataattctgggacattgattgaaaggtatagagtcattaaggatgtcttaaatggtaacttattcacagatatcaacagtctggacttaattgacgctgccgatgcgttggccttagttgtacttcaatttaataccaacaagttgttggatttagatcaaaatacccttatttcgggtgtgatcagagaatacaacattgatttcgatgtcagcttctcaacaaatccaatctcgaaagccgaagtgaaagagattattgataatgaaaagtctgcgaccatagcagacattactgatggttttgacattttaagagataaagttcccaatatggaactatgcaatggatctgcattgatcgtagatatggacttgggggttatagcatacactataacgtccgcaggtaaattctttcctaaggtctttgaaactatagaaacgttaaagtcacgtggcatagaaatatttattgctagcggtgatcgaaaaggcgccattaacagactggcaaacctgcttgatatcccagaggataatgcttttggaactgtttcaacaaggggtaaatgtgaggttgtttctatcctaaaagacagtggatataaggtcatgatggtgggcgatggtattaacgatttgctagcttttaaaaatgctgacgttagtgtactcacaatagaacaacaggaagagatatccccgaaagtaatggacaagactgaccatatcattgaggatattttcgaagttactatgatcgacttttaa

SEQ ID NO: 73520 - DNA, 1644 bp, synthetic construct
  source 1..1644: mol_type = other DNA
atgaagataaaaactatttcaacagacgtactaattatcgggtctggtggagcaggttccagagccgctatcgaagttgacaatgctggattaaaggcaataattgtctccaaaggtctatcatttaggtctggttgtactggaatggcggaaggtggctacaatgctgtatttaagacagtggataaagacgactcgaaggaagcgcatatctatgatacactgaaaggtgggagttatcttaacgatgaaaaactagtagaaattttggttaatgaaagcccacaaagattaatagatttggaaaattatggggctttattcgatcgccaggaatcgggtgagatcgatcaaagaccttttggtggccaaacctacaggcgcacgtgttatcaaggagacagaactggtgcggaattattaaacgccctgaaggaagaaatcattaagagagatattgaatgcattgaggaggtgatgattacatccctcataactgacaagaaccaggttattggggcaactggtcttgatttaaaggattctagtttaatttactttaaagcaaaatctaccatccttgctagtggcggtgctggccaattgtaccctgtaacatcaaacaccttccaaaaaaatggagacggttatgcaatagcctacaaagctggagctaaattgattgatatggagcaggttcaattccatccaactgggatggttgctcctgaatccaaaaaaggagttctagtaacagaagctgtcagggctgagggtggaaaattgttaaacaaggacggtgccagatttatgcgaaaatatgcaccggaaaaaatggagctggctacccgtgatattgttgcccgttcaatttaccaggagatcatagaaggtagaggcactgaaaaaggtggcgtgtatcttgatatctcacacctggatgatgactatatagatgaaaaacttgagacaatggttttgcaattcaacaatgtcagtattgatattaaacatgaaccaattgaagtggcaccaactgcacatcactttatgggcggtttgaaaataaacacggatgcctctacctcactaaggaacttatttggtgctggtgaagtttgcggaggagtccatggtgcaaatcggttaggtggaaatgcattggccgacactcaggtgttcggtaaaattgctggggaaagcgcatcgaaagcctgtgctgatacggaaattaagacagattatgaacaagtcaaaagagagtcttccagaattgaaaatttgatcaaaaaaggtaatatcaaaccccaaaaattcaaagagaatattaagaacttaatgtgggagaaggttgcgatagtacgagatgaaaaaacgttgaatgaaggcttaaaggatctccaagacatgcagaaggaattgaataaccttgatgttagcgacaaaaagcaatacaacaccgagctagtgactgcactggaagtaataaatatggttgaaatttgtatcttgattgtcaagtctgccatattgcgtagagaaagcagaggctcacactttaggtctgatttccccgagtctaaggatgagtggaagaagagtatcatatttaataaggacaagatagaatttgaagctagataa

SEQ ID NO: 73521 - DNA, 1305 bp, synthetic construct
  source 1..1305: mol_type = other DNA
atgaatgacaatactattctgatcaagaatgcattaattttgtcgccaaatacaaattttgaaaataagcagtctatactaattaaggataatttaattgcagaaatttcaccagatattgatgagagtaatgtcagtaaaataatagatgcaaccggtaaaattttacttcctggcttaatcaacactcatactcatttgtccatgacattattcagaggtctcgctgacgacctaagtttggatagctggttaaacgattacatatggccgatggaagcgaatcttaacggagattactgttatattggggcgcttttgggtgctgttgaacttattaaatcaggcacaactactttttcggacatgtatttctacatggaagacgttgctagggctgtcgatgagagcggtattagggctgttctaagctatggtatgattgattttggtgatgaagataaaagaaaaaacgagataaacgaaaatctagaattgtttaagtcttgcgagggaatgggaaatgggagaatcaaggttttcttaggaccacactcaccttacacagcttcggaagagctcttgatccaggtacgtgagctggccgacgaatatgacatgggtatacacatacatgtctctgagactcaaaaagaaatcgtagatatttcatctgaaaagggcttacgaccctttgaatatttggataagatcggattcttaggccctgatgtggtggctgcacattgtgtatggctaagtgataacgagatcgaaattattaagaagaataatgtaaaaattagccacaatccctgtagtaacatgaaactggcctcaggcatcgccccagtttcaaaattaattgaaaacgatatatgcgtgtccatcggcactgatggtgcttcgtccaataataacttagatctcattgaagaactgaagacagcttccctgcttcaaaaagtttctacgttggaccctaaagttttgacctccgacgaaaccttatctatgggaactattaaaggtgccgagacgttaggtcttgaatctgaaatcggttctatagaggtcggtaaaaaagcagatataatcttgattgacaccaactcagcgaacatgattccagacagctcttctttgagttcaaacattatttactccgcaaacggtttgaatgtggacacaaccatatgtgatgggaagatattgatggaaaataagaaactaacggttttggatgagggtgaaatctatcaaaaagctagacaagcaataaaggaactaaaagaagccatctaa

SEQ ID NO: 73522 - DNA, 495 bp, synthetic construct
  source 1..495: mol_type = other DNA
atgaagattggcataatatactctacttccaaaaagtctacaaaaaaggcctgtaaaatattagctagtaaaattaacactgacgtgcaattaatccctatagagaaagcaaaaacgacctgcattttgaaatacaacttcatcatcttcattgcttctgcatacaacggtaaattccagagcagtttaaagagatatatcattagaaatattaagacaatcaaggaaaaacccattgcgctggtcattaacagcgaagaaaatattaataccgaagacatatttaataagatatttacagaagaattggtaaattcatcctgtattaactcaaattttggatatgagctcaatattaatgagggtaatttctttgaaaaaataaagactaaaaataagattaaaaacaaagaaaaccttccatcactaaacattgatgaaatcaataagttttcggattatataaacaatttgatcgagaaaagggttgattaa

SEQ ID NO: 73523 - DNA, 1035 bp, synthetic construct
  source 1..1035: mol_type = other DNA
atggtgtacaatgaattgataaataatatcaatttgataaacataaataatattatttccttttacctattcctattcataattttcgcattgttactttcccttgtaatagacgtcctgttcggtgaactgccaggaaaaatacaccctgttgtaataatgggttcattgattaacttctttaaaaaaaagttcattaacattaaaaattgggcttctggtttgatgcttgttttatgtactagtgttatctcaagtgtcttattactaatcatttatactatcattaagaataacattatcttattatttctagtattttcgattcttctatcgtcaaccttttctgtcaaaatgcttctgcaaacagctattgatgttaaaaacgacttagacaacgacattaagaaggcccgtaaatccgtctcatatctcgttagcagaaacacggaagatttgtcggagtgtttcattgtttctgcagtcattgaaagtttgactgagaacataactgattcttacgtggccccaattttttattacatcatttttgctatcttcattttattttatcctgtgcatttgaagttgtatttgctattgttagtaccaatgttgtataggctgagcaacacgcatgatgcgatgcttggctataaaacacaggaattgatctacatcggttttctgccggcgaagatagatgatattttaaattatatccctagcagaatcgcaggcttgtttattgttatgtctgcctatttacttaatctcgatgggaagaatagttttaaaataatgatgcgagatgctagaaaatgcccatctcccaattcaggttacacaatggcctcaaccgcaggagcactcaatattcaattgataaaaaaagatacatacattttaggagataataataagataatcactgctaacgacatttccagtgctgttaagttgtctaaattatccattattctatttacactaaccatcatttgtttattcatactgatctatgtgatattataa

SEQ ID NO: 73524 - DNA, 177 bp, synthetic construct
  source 1..177: mol_type = other DNA
atgtccgacataagtaggacaaccatcaatttaccagttgatttgaaaaaagaattaaagaagcttgctattgatgaggatacttcattgtctggactaataattaaaatgatcaatgaaggtatggaaaacagaaagaactcgaatatttcttatagcgatgaagacaattcataa

SEQ ID NO: 73525 - DNA, 501 bp, synthetic construct
  source 1..501: mol_type = other DNA
atggcgaataaatttgtgagaatcattcttatcgtcgttttatttgttatatttttcgaagtaggcctcttttcgtcatatactattgtcactgccgaagctcctaatattcaagggctgattgacatgcaaatacagaaaatctcctctatcttgaaccctgaaactgttaatgaagctctaataaaagatccaacgccaatcaacattactaataagaaagacgttgcactaaagatgcaggacttgtctaaggtcgatggtgttaatgtagattccatgaatataagtacaagggataatcccagtaacgataaaaacttcaccgtaattatcgaggccttgggttatgcttccccgaacagcacctcaggacaaattattattagtcaagaaccatcttacaagattatagctagcgcacctgcatcttacagaggtgagggaattatggccgatacaaattcaatgacaataacgtcggtgttaaaattatattaa

SEQ ID NO: 73526 - DNA, 603 bp, synthetic construct
  source 1..603: mol_type = other DNA
ttgtctattaaaaatcttttaatagaaatgaaaaatatgtccgaactgatggtggatttagcctactcggcggttttgtttaacagtaaggacgcagcagaagaggtgatcaccttagagaacgaggttaatagcatgaactatgaaataaagaaagaatcactggttgcagcacgttcatatgaagacgctgaaaaattgaccgcattgctggaaattgctgaggctgctgaaagcatggctaatgcggcaaaagatctcgccgatttggtcatcactggttttaaaccacatcccgtattcaagatggtaatggaagagtctgataagagtattgttagagtgacgattgacgaatcatcggaactagccaataatacattaggtgatttacttctagttaatcgaactggcatgagagtaatagctattaggagaggggtctcttggatctacggtccagacaaaaacacaatgctcttagccaacgatgtcttgatattgaagggtacttatgaaggagctgagttattggaaaaacttgcctccggagcttgttctctagaagatattcctgaagaactagaagaagagttagagtaa

SEQ ID NO: 73527 - DNA, 1272 bp, synthetic construct
  source 1..1272: mol_type = other DNA
gtgatatacgtgaaaaagcaacagaagaagatacgaagttccctatctactcgtaccttttctgagtttttctcggaacatgactatgttataaaagaaggcttaattgctcttctgatctgtgctgttggggatttgatagcaggtattgtcttaggtaagatgacttttttccttgagtcgttcccaggtttgttggttgtgatccctggcgctatcggcatgaggggaaatattttcggaagcttcgcttcaagattatctacgagcttacacatcggtctgatatctccacatttcgaattttcagatgatttaaacaataatatattttcctcatttgtcttgaccctggttttgtctatattcttgggtattgtagccaagatattctgtattttactacattatcactcaatggatttaatcgactttatactaatttgtacaattgctggcctcatttcaaacttaataatgctaccaataactatgtttatttctttcaaatcctttgaacatggttgggacccagacaacattaccagtccgattattgccgccttcggtgatttgtttactttgcctgcaatcattgtatccattttcattttgaaatctttgaatttcaatctcatcgttaaggatgtaatcttggcaattattctcattgcggtgttaatgagttttattcattgctataaattgtcttacgaaactaaaactatcctgagacaatctacacccatattacttttgtgctcgtttctaggaggatctgcgggcggaatcctaaatagttctgttgaaacattacttagtaatcctagcttacttaccttaattcccttattttccggtgaaagcggaagtctcattagtattttgggtgcaagaatatcatctggtcttcattcgggtttgatcgagcctttatcgaaaccagaaggggaaacaatccacaactttgggatttgttatatactggctattgtcatatttccattaatcggcatccttgcagagacgtcatccatttcatttggaaccattggtgttggttttgataaaataattctaatcagtgggctgtcaggtattattttagttacagtcatggtatttcttgtctactatatatccacgagttcctacaataacaacctggacccggataatatcgtaattcctatttcaacaagcgttactgattcaatatctagcttaatcctaatctccatgtctttgttgatactaggtactttgatttaa

SEQ ID NO: 73528 - DNA, 867 bp, synthetic construct
  source 1..867: mol_type = other DNA
atggataatactggcaacatgaccatagaaataactgtcgtgttattgatagttttattgattatttctgttactattacctcctacgagaacatcacggacaagctaattaaaactcaagaaaaagaaaatatggagatattgacctctgagattgtcgacaacttgatcaacaaccctggggtaccagaaaaatggtttgaatatggtaagggtacacccggccttgccatcataaatgagggtggtgaaattattccaaacagcgtctcatattcaaagctgatctcgcttaaggaaaattataaaaagctggttgatgaccagcttttcaaatctaagtttcactcctcaatggaattgatcccgcagaagaggactatttccagtgtaaaaattggttctaattctgaatcaaataatatattttcagttaatagattggtcaagtgtgatttctacaaaaaatatgtgctcaaagactttaagaatgacggaaagtgcaaccacaatcatgaccaaaaatatcatagttgtaattatttcaaaattttcaagggaaacctaaaaaattcggattactatttgttaatcgaggatagtgaaaagtatgatttaaagtacattgtcgatacaacgagagtggttaaagaaaaatattgggaaaacgcaataagcaataaaatttacctgaatgataaaattaacttctacgatgatacaagtgctatcgtatttatccattttaacaaaccacaatctaaggttgttttagtatccgttcctaaaaattttgataaaaataaattaaattatgattacttcataacaaacgaatgtcaatttgtgctaaaggtatggtactaa

SEQ ID NO: 73529 - DNA, 939 bp, synthetic construct
  source 1..939: mol_type = other DNA
atgaaaatcaactccaaaggtaatctgatcgtgggaacgacagctattttgataatagcattattgtttatttgtattttcgttgtaacttctataaattacattcaaaacaagaatatcggcattgaaagtaacgataatttcaaatacattattgatgattatacacagaacttagaacttaattgcagagacgctatcgacgaagcgacccagaaggtttttaacggccttcctgtgacaaacagtgaaaaccaaattaaaaagaacctaaataaaattctagataagaagaataaggaatacgaggaaaaatacgacgtaaaaattaattcagaaactttgtccgttgaaaataccaaatcaccatggaagatactctttaaaattaaattgaacatcaagaagggtgatgagaaatattcgaaaatagttgaaaagaatgcatctgttgagggtctgagggaccccttacccatagctaaactaaccattatgtctgggattttaacttatgataatcaaattcattataaaactgccttatctacatatatgcttttgcaccacttggattcgccggaatcatatatcgaagctacagccccgttgtacatcaagaaatgcccatatgatccatatatccatcatggagaccctggagtcattgaggactgtcttaaacatggatactttcatgagagtgcagatggcagctgttatttatgtagattagaaggtaagggtaagtgtcctcattatggtctcgaagtattcatacaaactcatacgcctctaaaaaatgagtctttatcttgcccagatcacgtcgtctttgccgaccactacaacggtgaaaaaataaatccagatgattggaatagcctgatcttggattcatcccatcgtaagaaatacgggttgataaatgatggttaa

SEQ ID NO: 73530 - DNA, 426 bp, synthetic construct
  source 1..426: mol_type = other DNA
gtcattgggcgacaaacaattaacatcaacaaaagtagagagcttgaagaattatatcaaattatggagaaaaagtgggataaggaaaaatataatactttctttctaggtaaaccaaatccgttatccatagaaaaatacatctgtttgcccgcaactcagaggtatatgataattgcttaccctagaaaaggtggcaagttcttttctagaaatgataaagtggttttgacaatttgcgatactccagactcgatgaagaatcaaatagtaacctcattagccagagacaacatctttaaactcacataccagatttcagaaagcaagtctaggaatgaagaacgtaaaggtcctactgaagaaacgctacaaggatataccgcttacatgaagcaaatacttgaggaggaagatttgctgtaa

SEQ ID NO: 73531 - DNA, 1698 bp, synthetic construct
  source 1..1698: mol_type = other DNA
atgtactggttttttgtcatcctatcttttttgctggcaggtataaaaactcaaaagcctaataaatataaaaaagtttcagttatcattccagcctataatgaggaagagactgtggccaaggttgtaaatgtagtgaaaaaggtatcctttgttgatgagattatagttgtgaatgatggtagttctgacaatactgagatggaagctttgaaagctggcgctattgtaatcaaccatgaggttaacaagggcaaaggagaagctctacagaccggctatagggaagcagaatgtgatatcatagcctttatagatgcagacatctataacttgacatcaagtaaagttgaatcaatgattaagcctatattggacggtggcgctgacattactaagactaaattctctagagcaagcgggcgtgttactgaacttaccgcgaaaccattactcaactttttcttcccggaaatatcatttgaacaacctttaagcggtcaattcgcagctcgtaaggaggtcttgaagaagataaacttcgaaagcgactatggtgtcgatgtcggtattgtgattgatgcggatgttctggggataagcattatggaagttgatattggagctattgaacacgacatgtctccactttccgatctaaacttaatggccaatgaagttgtaagaactattataggtcgagcaaacaagtacggcagagttaccatgattgatgatattgggtattacatcagaatgtctatcgttggtttgtctttggtaattcttggtttatttacaatattcttcgtaaaatttgttccactggctattggcgtcataattagtattataggacttttaatcgcaatcttctacatttttaaagttatcatcaagtccatagtaatgtttaaaaagacacccggccgcaatttgcttaaatcatttgttaaaattcattttccgatgattatttccataattatattgctgcttatgatttccacattcctcggtgcagcccatttcgaccatggagttttatccatagagcccaactctagaaatctaattatctatgctgatgactcgccaagggacactatctcggtgagaggaccatatactatcgatacggccatcgaaaacgagtctggtcaaataaggatgccttcggatgctatgatgacattaggagtcaatattaatgatacgattaagctgggtgcgaacacctacaaagtcaatgaaaccagattaggggagcctgatattttaaggttaccaattgaagtgaagaagctattgcaagttgaaaatggtgaagtgatccagaacagtcggttaaaagatgtgtttgatggttctctcattacgcacgcttatgaatacaataatacaaccattaaagaaaaatactttataacatcaaatgagaaacagtcatctacatatgaaatattcttggataatgaatctatcgtgaatagttatggtacctttaaggacaacggaacttatgacatttctgtagatgggaattacctaacgagctttagttacaaaaacaatttgactaaatcatttaagtttgacggtcacgatttagaaatcgtctttagagatacaaattccacatcaattaaacaattttcgagtggaaaccaaggtgtcttcttgaacttcaatttctaa

SEQ ID NO: 73532 - DNA, 102 bp, synthetic construct
  source 1..102: mol_type = other DNA
atggattttaaaaagttaactaaaatacaattcgcagccctatttatcatatttattatggtactgtctggtgttgctggattccttttgtatattatttaa

SEQ ID NO: 73533 - DNA, 1245 bp, synthetic construct
  source 1..1245: mol_type = other DNA
atgccaaccatgtccgagaaaatactggctaaggcttccggcaaagaaaaggtagaggcaggggatatagttattgcaaacatcgatgtagcgatgacacatgatttgactgggcctctttcggtggaatcttttgaaaaaattggagctgaaaatgtttgggatgcaagcaaaattgttattcctttcgaccaccaagttcccgcagattctattgactccgccaataatcatataataatgagagaatttgttaaaaaatacaacatcgaaaatttttatgacgttaatgctggagtgtgtcaccagattctaccagagaagggtcatgtagtgcccggcgaggttattgtcggtgccgactcacatacatgcactcatggagccttaggagcattctctacaggtatcggatcgacggatatggcaatggtctttgctgagggtaatttatggctaaaagtacccgaaacgaacagatttaatatcaccggagatttaaaagaaaacgtttatgcgaaagatgtcattttgcacataatcggtgagatgggtgctgatggttcaacgtacaaagcctgtgagtttgctggtgaaactataagcaatatgagtatttcagaccgcatggtattatgcaatatggccattgaaatgggtggtaagaccgggttagtagaaccggacaagaaaacaattgattatgttgaaaagcattctaacaaaccttacgaaatattcaaaactgatctagattcctcttcgctgaacatgattgacattgatgtgagcaacctggaacctcaaatagcatgtccgcataatgtggataatgttaagccaattagtgaagtggaccaagaaatcgaccaagtcttcttaggttcttgtactaatggtaggttgagcgatttgagggatgctgccaaaatattgaaaggcaaaaaggtagctaaagacacccgaatgctagttatcccagcctcacaagagatttatttgaaggcattggatgaagggttacttaagatctttgttgaagctggtgcacttgtctcagctccatgttgtggtccatgcctcggcggtcacacaggcataattggccctgatgaagtcagtctctcaacttccaaccgtaacttcagaggcagacagggtagtcctgatggaaaggtgtttttgtcttctgctgcggttgccgctgcgtcagcaattgaaggaaagatcgtcagtccagagtaa

SEQ ID NO: 73534 - DNA, 450 bp, synthetic construct
  source 1..450: mol_type = other DNA
atgaataagaaactaattttaatcattgcatctattgtcgcattgtttagcatcgcctctgtatctgcgggtttcttcgatttcttacattgggacgacgactcagataatattaacgtcgttgaggatggccaatattgcacggtgaatcaggtttcagcttatattaaggaatttcacaaacttcccagtaattatataactaaaaaagaagctcaatccctgggttggcacggagggccattgaagaagtacgctccaggtaaatcgatcggtggagacacctttactaacagacaacatatactccctgattccgattataaatacatagaatgtgatataaatgccaacggaacatttagaggtgcagaaaggattgtttacaatactggcaactataaggtatactataccgatgatcattacaacacatttacagaggtgtaa

SEQ ID NO: 73535 - DNA, 867 bp, synthetic construct
  source 1..867: mol_type = other DNA
atgaaaggtatagtgctagccggtggttccggaactcgtttgtatcctatcacaaaagccgtcagtaaacaattgttgcccttatatgacaagccaatgatttattatcctatctctgtactgatgcttgcaggaattaaggaaattttgattatctcaactccacgagatttaccaatgtataaggacctcttaggtagtggagcaagctttggcattaaattatcgtacgctattcaagaaaaccctaatggcctagcagaagcgtttatcataggtgaggacttcattggcaacgataacgttgctttgattttaggcgacaatatatttcatggtcacagatttacggaaattctagaaagagcaactaaactggatgaaggtgccataatattcggttattacacaaacaatccagaggcttttggtgtggtcgaatttgatgataattggaatgtactgtctgttgaggaaaagccaaaaaaccctaaatcaaactatatcgttccgggtctatacttctatgataatgatgttatagagatagcaaagaatgtcaaaccctccgacagaggagaagtggagatcacttctgttaacggggagtacttaaagaggggaaaacttaaagtagaattgttgggtagaggtatggcttggctggataccggcacgcatgaagggcttttagaagcagcgaatttcattgaaaccattcagaagaggcaggggttatatattgcttgtctagaagaaattgcctatctcaaaggatacatcaataaaaaacaattgttaaagaccgctgaggaacttaagaagacagattacggtcaatacttgttcaatttggctaaaatgtaa

SEQ ID NO: 73536 - DNA, 1008 bp, synthetic construct
  source 1..1008: mol_type = other DNA
atgtccaagatacttgtaactggtggcgcaggatttatcgggagtaactttgtcagatatatggttaataaatactctgagtacgaaattgttaacttggatgctttaacctactgcggcaaccttgaaaacctcaaagatatcgaaaagaacgataattactcattcgtcaaaggcgatattcgtgataagaacatcgttgacgatttagttcagcaatgtgattatgtgatcaacttcgcagctgaaagccatgtagataggagtataaccgacccagaaatatttattaagtcaaacgttctaggaacacaggtcctattgaatgcggctaaaaaatatggtgttgacaagtacatacaaatttccactgatgaggtttatggtactctcggtaagacaggatattttaaagagaatactccattacaacctaattcgccatactcggcttcaaaggctggtggagacctgataacgcgagcctacagcgaaacattcgatttgcccataaatattacgagatgttctaataattatgggccatatcagttccctgagaagttaattcccttgatgatctcaaatgccttggaagacaaaaaattaccggtctatggtgacggtaaaaacatcagagactggctgcacgtttatgatcactgtagagccattgatttggtgttgcatgaaggtaaacttggtgaagtatacaatattggtggaaataacgagaagcagaaccttgaaatcgtaaaattaatattaaatcaactaaataaggatgaatctttaataaaatttgtgaaagacaggttgggtcatgatcgccgttacgcaattgattcaaataagattcaagaggaactaggctggtctcctaaatatacctttgaaattgggattaaggaaacaattcaatggtatctggacaatcaagaatggacttccaaggtgaaaagtggtcaatacaaagattattacaataaaatgtattctggcagataa

SEQ ID NO: 73537 - DNA, 318 bp, synthetic construct
  source 1..318: mol_type = other DNA
atgattattgtatacggtaaatattcgatatatttattgggaggaatggaaatgttagagcaatacttgccttttgttgggcttataatctttggaaacattgaaaatctcgtgttgagctcccaaggcgtcgttgccggcgtcaatccagttaagcttgggatcgtaagtatcctgttcgttatgggctggctattcataggtacagttggtacttcaatgctaatgcagtatgtcgacttcatagattttattggtggtttagctatttttattttgggtttacaagcaatggtagaatctatcagaggtgtgtaa

SEQ ID NO: 73538 - DNA, 279 bp, synthetic construct
  source 1..279: mol_type = other DNA
atgaaagaactaaagccatttttagcattgttagtttttggaaatattgaaaacttgattctggccgcccagggtgttgctgctcatgtagatcctatcatactttccatcctgagtttaatagcagtggtctgttggcttttaattggaacttttggtaccaaactcgcaatgaagtactcaagatatattaatttcatcggcggtttcgcgatttttatattggggatacaagctatgattgagtctttgcccggtatgctaacatttttccactaa

SEQ ID NO: 73539 - DNA, 1080 bp, synthetic construct
  source 1..1080: mol_type = other DNA
atgagatactttaaacatagaatatatggtgctttattcaagctgttcaaagacaccattattaaaaaaaacagagttagttttattgtcgattctaaggagtcattcaagggtaacttggattatatccaaaaagaatttgaaaatagagggaactttgaatttcattatttctacaagaacaaactttctataggtagctttcgtaaattatcaagttctaagtttatattcttaaatgacaacttctttccattagcgttcatggaatttcaccccgaaaccacaatcgttcaattatggcacgcaccgggggcttctaagaaattcggcggatctgtggatattcaaaacagggaaatcctggagaaaatttctaagaatactgactacttgattactacatcagtgaatatcaaagactattattcggaagcctttcagatgcctctgaacaagattaaatccctaggcattcctcgcattgattactattttgaaaaccatgacgtcaacactttgaaatccaatttcctaaataaatataatatttcatcaaataaaaaaatacttctctatgcaccaacatttagggatgaagaaaaatacaataacgtattcaattacttgaatttggaggaatttaatgagaatttgggagacgagtatattttggctctacgacttcacccaaaaattgagaatttctataagaatgatatttcggataatggtaactacattgatgttagcgattacgaaagcgagcaggagttgatgttaataagtgacatactcataacggattattcctcgataatgatcgaatttgccactttaaataaacctataatcttctttacatacgacttagatagttacttgtctaatgaacgtggtttctattatgactttaaaaagacggtccccggtccaattgttcatacttcacaagaactaatcgatgtaatcaagaagaacgaatttgataagagtaagatctccgaatttcttaacacccaatttgatctgatagatggagattcctctaaaagaattgttgatttcctattaaagtaa

SEQ ID NO: 73540 - DNA, 960 bp, synthetic construct
  source 1..960: mol_type = other DNA
atggacaatattaacgtcagtgtcatagtgccagtatacaataactgtgaatatatagagagtaccctcagctcgataattaaccaaaatttcgataacttcgaaataattgttattgacgatggatcaacagacaattccttggagattgttaaggaaaagttatcggcttcagacatctcttatctgattatccatcaggaaaatgcaggtgtgtcctgtgcgcgcaatcgtggaattgaagttgcctgtggtgattatttagtttttgttgacgccgatgactatatttctcaaaaccatttatcagaattgtataatggtgaaacggattttagtttgattcagctagtgaaaagggaaggcaacgatttatctatcccttaccatttttcagaaagctcaatttcctgcaatgatttcatcaagatggagctgaatatggaaatcccgttcaacttctgccaacttatgtataaaacggacatcgtaaagaaaaacaatatcaaattcactcctaacattatttacggggaagacacagaatttgcccttaaagctttgagctttggtgatagaatatccataagtaacgaagtaacttactattatatccaacacgagcaatctgcaattagaacatctgaatttaagaggttcgagatcgtaggcatttttgagaacctagctcaatactacaagaatcagggaaaaactgatcttgctaatctgataattacttctcgaatccccaaagcaatatttggtaatatgaactattttttctacaataattatgattttgatgatgtcattgctaagatgcaccaactaaatttatttaccaaattgtctaagtttgaaggtgatttcaaattcaagtttaaaataagattgtttttgttaaatccaaaaatttattacaagatatggagaaaagttaaaaattcgattgattaa

SEQ ID NO: 73541 - DNA, 960 bp, synthetic construct
  source 1..960: mol_type = other DNA
atgaaagtttccgttgtaacaccaaactacaatggtgaaaaattcctaaaaacatttttgaagtcccttaacgaagatagtcaatacatcggcgaagttattatcgtggacaatggatctgatgacggttctttggactatctgaagaataatagcttttcgttccctttagtgttaatagagaataaggaaaacattggattctctcccgctgttaatcagggaattaagatatctcaaaataaccttattttttcgatcaataatgatacggaaattaagaaaggttcaatcaaatcactagtggatcttattaattccagtgacgatattttttctgtccaagctaagatgctccagtataacaataaaaacctaatcgatgatgttggagatgaatataatttgcttggttggactaaaaaaataggtgaaaaccatcactctaacgaatacaataaagtcaaaaggatattttctagttgtgcaggagcggctatgtataacaagtccattttagacgagattggtctatttgatgataacttctttgcatatatggaagatgtggatttagcaatcagatcccatattaatggttacaggaacttgtcatgccctgacgccattgtctatcatatcggtagtgccacctcagggagcagatataacgagtttaaagttaagctggctgctcgaaataatgtatgggtaatttataagaacttgccagtcccgttaaagattgtaaattttatctttatatttttaggctttctcataaagtacctgttcttttataaaaaaggcttcggctcgacttacttgtcagggatacgtgaaggtttatctgccaaaagtaaaattagcaaagttaagttcgagtcaaagaacaccaagaattacttcaaattggaatttagattaataataaatactattaaattcttgaaaagataa

SEQ ID NO: 73542 - DNA, 858 bp, synthetic construct
  source 1..858: mol_type = other DNA
atggacctttcaattgtaattttaaattatcaaacctttgagctaacaaagaatactattaattctatatttgaatatgaatattcctttgactacgagatcttagtggttgataacgcctcaggtgatgatagtctagttaggttaaaggaatatttcggggataaggtcaatttcatcgcatctaaagagaataatggttttgctgccgggaacaatcaggctttaaagatagcaaatggcaaatatatcctgcttctcaattccgacacgatagtatgggaagatacattagaaaacatttacaactacatggaaaaacacaatgatgtcggagtctccggttgcagagttctgttggaaaacggtgaactggacaaggcttgtaagaggagctttcctaatgtgaagaactcattttttagattgtttcatattccaaccagctcgaaagataatgattacaacttggataatttgcccgacgatggaatttatgaaatcgattgccttactggcgcattcatgttcatgcgagctgatgcgctaaaagacgcgggtctattggatgaaacattcttcatgtatggtgaggatattgatttctgttttagagtaaaaaaaactggttggaagataacgtattacggcaagtcgaaaattactcacctcaaaggagctagtagtaaaaaacaaaaatctaagttgatttacgaattttaccgtgcaatgtatatttattacaagaaacatcatgccgacgactctttatttttgttaaactggatcgtttattttggaatagctatactttgtgttttgaaattattcttaaacttgttcaaaaagaaagattaa

SEQ ID NO: 73543 - DNA, 1404 bp, synthetic construct
  source 1..1404: mol_type = other DNA
atgatcaaagagaatcaaaaactcttaaatttttcattggtattgattgatgttattgtcattggactggctcttctctgttctctatggttaagatttaaaactacgctatttggtccaattggaggtcatctaggcttttttaactacctgttgttctttacattcgccgtgataccggtttacctgatcttatactttgcatttggtctttataagccgcgtagaacgtataagaacatcttttcagaagcaacacaactgatcaaagtaaatatattggcatttatcacattagttagcattttattcattataaaccaacctgatttttcaagaataatgttgattttgttagccattattgcttcattttttggcataatcgaaagatttacaatcagaacgattttgaggaagatgcggatcaataatcgcaatattaagcatatcctgattgttggggataatgagttagctttcagctttgctcgtaagattcgtgaaaacccatacttgggatttgttgtctccggctttttagggcgatcggagcatataggtcgcgaaatagatggttgctccgtcatcggatcattcgaagatattgataaaattcttgacaaaaacagattcgatagggttgtcttggctattcctttaaaatattattataagatcaatgaccttgtggagagttgtgaaagggtcggaattaaagcggagataattcctgattatattaggtacttcccagctcaaccatcggtggacatgatcgaggacataccaattatcaacataagatatgttccattggatgatgacttcaataagttcttaaaatacctttctgattacatcatttccataattgctattattattacctctcctataatggtagttactgccattgcaatcaaattatcttctaatggtccaatcatatttaagcaggaaagaataggttacaacagtaaacccttcatgatgtataaattccgttccatgaaggtgcaggaccccagcgaggaaaaggctgaatggaccacaaaagatgacccaagaaaaactaaagtaggccaattcataagaaagactagtatcgatgaactaccccagttcttcaacgtgttgaaaggggatatgagtgttgtaggtcctagacctgaaagaccatattttgtcgaccaatttaaagaaaccgttccaaaatacatggttaagcatcaagtgaaaccgggtttgactggctgggcgcaaattcacggttgtaggggtgacacttctattaagaaacgaattgaatatgatatagaatatgtagaaaattggcacatgggtctagatttagccataatgattaaaaccgcactaaagaagaaccctaatgcatattaa

SEQ ID NO: 73544 - DNA, 906 bp, synthetic construct
  source 1..906: mol_type = other DNA
atggatgctatagctattacgattttctctattataataatgataggattgggttattttcttaaacgaattgatttcctctctaagaaagacatggacccctttaacaaaatagtaatgtatatcttaatgccctgtatgatatttcatgccatttacaatgctgatttatcgtcacttcctaagttaagcctattgccttttgtgatcttggcttcaagtatcgtcaccggagtcatctcatacttcatcttgaaaagattaaaccttgacgataagcaggtatggagtgtactcgtcaccgtcatgattgctaacactgcttttatgggttacccagtgactttaggaatttacggtcaaactgggtttctgagagcaatattttgtgacattgcaacattgtccatgttcttgctgttgtctttcgttttgatattaagattcggcgggacagtgaagaccgctattaggaaaatagccatctttccaccattatgggcagtgattttaggtttgattttcaatctattgaatataccaattggtgacgtttgtgaatataccgttaattatttgggtcaaggtgccattcctctaatcatgatcactctaggcctctctattgatttttcggcattagctcgtagtaaatccatgattatttttacttccatcatgaagctagcctttttcccattagttgcctttttacttgcaacaaaactgggcctagttgatttacaatacaacgttagcattattgaggcggcaatgccttctggaatgatgagtcttttgcttgcgattacatataaattagattatgaattgacgtcagattgcatactgatcaatactgtaatctctttgattacactaccggttatcatatcattactgtaa

SEQ ID NO: 73545 - DNA, 1131 bp, synthetic construct
  source 1..1131: mol_type = other DNA
atgaatggtatttactattacttgatagcttttgtgatcatctggatgctagtcacaatatttcatgataaattatcaaaccatggtttcgagttaaatttccctattataatgtggaagacccaaaagctgaagggattgatatccaagatttcaaatttttcacccacattttggaaatggtatatgaacgttgggattgttgtagcgttcggtgctatgattcttgttaccggatctataatctcgtccataccctctatttttgaaactccttctgtgtcgattttaattcctggtgttgacattccaggttctcagatttatgttccatttatctacggtttgattggtctggcaactgttgttataattcacgaattttcccacggtatccagagcgtttgtgaaaaaatcccaatcaagtccatgggtctgttgttgtttttcattctccctggggcattcgtcgaacctgacgaaaaaagtttaaaaaattctaaaaacgcctcaaagttaagaatctatgcggctggctcagttgctaatattactttagccgtagttgctttgatgctaataagcttgatctcaattggtattccacattactttgcagaagacggcatttctatcgataggattgtgagtgacagcccttctgagggaatactaaaagagggtatgattttacaagccattgataatcataaaattaatgattcggaatcatatgtcaacattgtcaaaagcttcaaacccggggataatgtaactgtccaaacgaatcaaggcagttattctgtcgtgttgagtaaaaacccaaacaacgattctgttggtttcttcggcatccaagcagctaagcactatgtgttattaaatgatagtctgggaccgataccgtggatattatttgagctatttgaactatttaattgggtgtttatcttaaaccttggaatcggattgttcaacctacttccacttaagccactggatggcggtcatatgcttgaaacactcttgtcctacaaatttaaggaacaattggtaaaaaagttcgtaaatgcattgtccggcgttatggccataataattgtattcagtataattgctggttttttataa

SEQ ID NO: 73546 - DNA, 705 bp, synthetic construct
  source 1..705: mol_type = other DNA
atggtcaaaaagggtaaattgattggaatcggtgttggccctggcgatactgagttgctgacattgaaggctgcaaaagtattagaaaaagtcccagtaatcttttcaccaaagtctgcaaaggaaaaggaaagcattgccctatctatcgtgaggcctattctaaaagaaaggaaggactacaaaaaaataatgattgttgaaccaattttcccgatgatcgaagataaaaaagaacttgaaaagatatgggatagtgcctctgaattagttgcacagtacctgaatacaggtcgcgacgttgcattcattaccctaggtgacacatcgatattcagtacttattcctacttgcaaaaacgattaatggatagatatgagatagaaactattcccgggattacatcatttactgcgtgtgccgctgctaagaacgaagctttggtagagcaaaatgatattctcactattgtcccaaagatcgacagcagaatagagaatattttagagtatacggattccattgttcttatgaaggcttcaagaaacagtacaaagttggaattaaaaataaaaaatgataaaagagaaaaagaaatttattccgtgcaaaactgcacgcgtgaaaatgagaaaataatcgaaggattttctcatgagaaaccttaccttaccacctcgatcataaagtttaaagatgactaa

SEQ ID NO: 73547 - DNA, 963 bp, synthetic construct
  source 1..963: mol_type = other DNA
atgaaagattctaaagaaaaggagcatagaatttctaatttgaaagacctaatcgacaatgtgaaggaagaagattccaatatcgattcacaagaagatagtgagttgataaactatctccacgaggataccgttgatttcgatgaattggaaattaacgacgagttcatctatcatccagatgatgatgaggactacgtaataaatttggaagagtcgccaattgatgaagaatttataattaacactcccaaagaggaagaattaaagaacatgtccgatgacttagaagagccagaagacatcattagtgatgtgtcagaaaacttcgatcagttttttaatgcaaaaatcggtaaaacacctgttttagctattgttagctctgtactggggatcatatttatagcaatctcaataatcattttcgaatccaggagtgatagagtgatagacaatgttgtttctggtgagacgaactttatttctgtcatagttcttggtctgggaatcctattattaatttacggcatatacaaagtctttaatattaagagtcccctaaatggcataacagagagcattaactcgattgacggtaaggaaaaggtcaaaaccaatgcttctaaggaaaaagaaacggaaaagattatccctaaatcaaacatcccattggacaaagactcctataagataggtgaatttgacattggagatataaagaataagtttaaaaagtcaactacttcgaaaaaaccgaaaccacgtccagaagataccaacaatattcctcctgctaaggaaaaggaggaaaataaaaaagaattgacaattgagaaaattgaagatattgagtataagcaagccaaacttgataatgaaactattgatgatattttcgcggaagtagaagacatcgatgaaataccgatcattagcattgattctgaagaaaaagagtaa

SEQ ID NO: 73548 - DNA, 312 bp, synthetic construct
  source 1..312: mol_type = other DNA
atggaattttgtccggagtgtggggcaatgatgtttccaaacaacaatgtgttaaaatgcaattcctgtggttacattaaggaagattctgataataacgattataaggtttcaaagaaaatcgaagctgaagaaactgttaagatgttgggtgaagatgtagacgttggcccaagaacagaagagacatgccccgagtgtggacataatatagcaacctacaaactacttcaaaccaggagtgctgatgaagcgcctactcgtattttcacgtgcgtcaaatgtaaacacacttggagagcctatgactaa

SEQ ID NO: 73549 - DNA, 162 bp, synthetic construct
  source 1..162: mol_type = other DNA
atggcgaaaaaggacaataagatttccatgccccaaacaggtgcaggcctggtgaggtattttgatgaagaaagtcttggaccaaaattgtctcctgagcatatcatagttgctactgtcattgttgctatattatgtttcgtactaagatactcagcctaa

SEQ ID NO: 73550 - DNA, 915 bp, synthetic construct
  source 1..915: mol_type = other DNA
atgataattgaaagtccaattgatttggaattaacacaaatctcaggtcaaactagtcaacctccttggacgaaggttgataactcatacagggaagtcgtgttagtgaataataacccggttatttttgatgttgaacaatccggagaatttttcaatttcaattatatcggaaatatatctaaaaaagaagccgtatcttcgctaaagtatatcttcgatttggaatttgacttgaacaaattttacaaatatttgaatggtcatgcagaactggctgagatgtccaagttttgccacggcctaagactattcttagccccaaatccctttgaatgtatcatttcatcaatctgttctgcaaacaattcaattaaacgttggaccaagtcaattagcgacattaaagagaagtggggcatcaatcataacggttttcacacctttccagaaatctctactttccaagagatattcttggatgctgaagaagaattggacttaactgatgcaggggatatttccaattgtaaaaacaatctcaaatcttgtggggtgggatatcgagcgtcctacatgagaaaagcatctgaacttttcagcttggaaatggacattagtgaaataagcaagatgaactatgatgaggcttttgagacaatactgcaggttccaggtgtaggtcccaaggttgctgattgcattttactttatggtttcaattttagagaggcgtttccatctgatatatggataaaacgcattgtaagttacctttactttgacggtaaagatatttcggttcctaaggtcagggaatttggcatggacgagtttggagataacgccggttatgtccagttatacatgttccattatgctagaaaatcgggtttaatggctaagctgaaataa

SEQ ID NO: 73551 - DNA, 1377 bp, synthetic construct
  source 1..1377: mol_type = other DNA
atgaagctagaaaaaatcgttttgattgtcgccacattgacctcctttttcacagtattcttatcttccgctgtgatggtggcagtgccaactttagcttcggaatttgggatgagcaatattatccaaaattgggtcaccatgctatttttcttagcagtcgctatttttacgatcccatctgggcagctgtctggaaaattcggtcttaaaaaatcaatgatatttggctcaagtgtttatattctaagctctatcgcagctattttttccataaacagtgaaattttcttgatctgtaggttagttcagggtataggtgtttcattcttaaatgtcgcttccatggcaatggtcgtgtcagccttctctccacaagaacgtggtaaagcaattggtatcaacgtgacgggagtttatcttgccacgagcacctctccagtcattgggggatttctaaacttccactttggatggagatctatatttctcacaagcgtgccctttctaatcttgatattagttctcttaataactgaaatcaaggaagaatgggttactatgggggacgttccgatagattggaaaggttctattgtctactcattaggcatattgttgtttatttacggtttcaccaggctggatgaaagtactggcatcatcttgactgttataggtttgattgtattgggagtatttgtagctctggagcttagagagaaataccccgtcttcgatgttaaattctttaagaatcctaagttttcatctgcgaactttgcagctctaacagcctatctcgctacgtttgctgttacaactattgtaaattatcatttgcaatacattagaggttatgattcccaaatggccggtataatcttgttagttgcccctttaattcaagtaattatggctccaatatccggcagattgtcggacaagatcaatccccaaaaattggcggctattggcatgttctttggcgcaatttcacttgccatgcttagtatgctgaatgtttcgaccccattatggtttctaataattgcgatggtatcgcatggtttgggttttggaatattttcatctccgaatacaaatgcaattatgggtagtgttccacagaaggatactcctgtggcttctgcgagcgttgccacaatgcgagttattggtcaaaccatgagtatgggtatgttaacactggtcttcgcattcgtgatgggtaacgtacctatgatagagaagtattttcctcttcttattactagttcccaaattacttgtttaatttgtatggtgttatgcgctgcatcggttttcgcttcactggtaggaatcaaatctaaggaaatgttggagtttaactaa

SEQ ID NO: 73552 - DNA, 804 bp, synthetic construct
  source 1..804: mol_type = other DNA
atgagttcatttaaatccccagtggatactgcaaaggcgatatctaagacagctggagccaagaactctgccaatattgttaatgtgatattgctatcatttttagcaggagcctatattgcattcggtggtttgctagcaatagtatctagcgccggtatgattaaagctggtgctcctcttggtttggaaaaatttgtctttggtgcagtgtttcctgtaggcctcatcatcgttgtgcttgccggaagcgaattgttcacaggcaatgttatgtttatggttatgggggttttagatggatcagcttctattggcggactcgctaaaaactgggtcctaagttgggttttcaactttgttggtgctttatttgttgcctatgttatagcattcatgggcggtttatgtcctaccgacgcatccgtaccggcctatgctattactgctaaagctatagcagtagcagaaggtaaagtaacaatgcccttcactgtagcgttgattaaggccattggttgcaattggttagtctgtttggcggtgtggctggctaatgtgtcggacgatgctatcggtaagatagttgggatctggttcccaattatggcgttcgttaccctgggatttgagcattcggtagcaaacatgtgctttatcccattaggtatgtttttaggcgctaaaggggtcacctggacaacgattatcgtcaataatttgatcccagttacgataggtaacattattggtggaggcctgtttgtcgcttgtatttactggtacactttccttaaagaataa

SEQ ID NO: 73553 - DNA, 1098 bp, synthetic construct
  source 1..1098: mol_type = other DNA
atgattagaaatttaaaggaggttaaagacaataactttgacatcacaaggtcagcagacgaggttaggaacttgtctttcaatgaccatgtctgtttgggatgtgggatatgcgaatctacttgtcctgttgaagcgattacactcaatgcagttgctattgatgctcgtaatagactgtccaacgacatctatttcagtgggcacgagaagattgctcaaaacttccgcgaggactttgatgttcaaaggataagcatagacgaaagtaagtgtgtattgtgcggtatgtgctcgggattatgccctgtggatgccttggtactaacaattgatgatgtgccaattcgagagattgaagcatatcctcattataatgctttttcagaaattgatgatgatgaatgcatctactgtaaaagatgcgaaatagcctgccctcgtgatgcaatcgttatcgaaagagttttaccagacagagctgatttagtcacgggtgaaatcaatgtcgatgatgatgagtgtatttattgcggcatatgtgaagaattatgtcccgcagaagcaattgtcgtggatcatgaaactggtaaggaatctatcgttattgacaaggataaatgcgtatactgtcttgtctgcaaaaagtcttgtcctactaatgcgattaatgccatatgtagactatgtaactatggagagtatgatctagattcttcaaaatcagtagttaagggcaactccatcatagacccagacctttgtgtctactgtggatggtgcgaaggtgtctgtccaaccgatgctgcaaaagtgaaaaaaccgtttaaaggtagtattgaggttgatgatgaaaaatgtcaagcttgtggtgcttgtgtagatatttgtcagtgcaacgctttggcttttccagtaagcactggtccgggttccagaatggcccatgtggttgccaatgatgattactgcgtgcggtgtaaggcatgtgccaaagcatgtcccaacggcgctataaccgtaaaaagaacagaagttgaccacaccccaataaattcggccacgtggaaagaagctctggatgcgattaaggactaa

SEQ ID NO: 73554 - DNA, 231 bp, synthetic construct
  source 1..231: mol_type = other DNA
atggagctaaaagttaatcaagataactgcctggggtgcggcatttgtgtaattgcatgtcccgtgaatgcagctatctctccagaaaatgccggtggtaacggtgcgaagactgaagaagtcattatgatggttgagaatggatttataaaacttttctcacctgaaaagtgtgaattgtgtggaacatgtcagatgttttgcccagttaacgctatatggttagaataa

SEQ ID NO: 73555 - DNA, 570 bp, synthetic construct
  source 1..570: mol_type = other DNA
atgtattatgccaatacctatcttgagaaacctgtagtgccagatgtgaagattactggtgaaggcaatacagaagttctaaaatgcatgttgaacaccggctctgacatataccaaggggcgtgcaagaagagaggatcgacactaaagcaggaatataaaaatgtttctggtacatgttacatggacccacgagatatggcaaaattgggtgtaaacaattgggatacggttcttgttaaaacagattttggagaagtggttgtgaactgcgcagtctcaagggatgctccacatgaagggacggtattcatttgtaaaggtccgtgggctaacactattgtaagtcacgacacttactgttgttccgaccctacctataagggtatcaaatgtactgtcgaaaaaactgatagaaaagtattgctgatggctgatttaatgagatgggtctacaagaaatacgttgatgaggaagatgacgatgtcgttgaaaatatggaaagcttaggtgaactccccgtttatcatggacgtaagtgggaggagttgatagatcatgacttataa

SEQ ID NO: 73556 - DNA, 1683 bp, synthetic construct
  source 1..1683: mol_type = other DNA
atgtcagagtcggagcaccgcatgattgaaattttaaggattctgagtgaacaggaaaagcctactggttccaagctaattgctgatgaactgaaaaacaaagggtttaatctgggcgagcgtgcagtcagatatcatatgcagatcttagacgagaaaggttttactgaaagaatcggtaactctggtagaaaaattacgaaacttggtctcgaaaaattagaaaaagggttgatttatgatcaagttgacttcatttactcaaagtttgaggaaatgatatatttgactgacttcaactatatgacacaagaaggaaaggttgttgtcaacacctccaccatctataatgaagaatcagtggatataattaagaatattatccaaagcgacctttctgtgagcccttacgttaatttaaaccgtattggcaacaatggtgaaatggaggtaactacgttgtgtggtacaacaattgatggcgtgctgcttaacgagggaatcccgagtcaaccaaaatatggcggactactaaagattgaagattcggaacctgtcaaattcactgaattaatctcctacaagaaaacatctgttcccccacttgaagccttctcagcaaaaggatgcacatcaatcatggatgtagtggaaaatggtgaaggaattatccctgccaatttcagattaatacctggtatcggacgagagaaagctatcaatatcatcaataaattggataagataggaattggtggtgtaatagctatttctgaagaggaaaaagatattttgggtctctctgtaccggaaggtatggttggtatatccatagtgggtggaatcacaccattttgtgctgttcaagaacagaatcaggatattgaaataaaaatcgcagaggaaattaaggattttaaaaccttgtctccaataacctctaagattaaacccgtgttaaaggacataaaacccactcctcaacaaaagatatcatttttactttcaaagacgtggaacttgatccaacaagtcaatttcgacattgaaaaaagaaagggggatatcatatccaatgtttcttttattgataaggataaaatagacaaatcgttgtctgtaatggaagaaacctacaatgataatccaaaatatattaatccgtattacaagttaatcaaccatccaactaatgattcaaagataggcattgccacaatctgtagcttgagtattgatggtattttaatagacaatggcgtcatgagtaacccaaaatatggcggtttgcttgaactgaccgaaccaccattatttattgacctaatttcctacaacgggtcaacggaagatcctcacaaaatatttttagctaagaacatgacatcgatcactaggaataacggttctaacaaaattttggctagttttaaagagataccatatatatctagggagcatagtgtccaattgctagagattttgaacaatattggattcagcatatataagattgggaagcccagagaagtaacatacaatgcaaaagcggacaattacaatttcggtatcgttactggcagtggtttaaacactattggtgcgataaaagaaaaaggaattgatgttgaagttaaggcaattgagaagctattgccttttgaaaaaatggatagactctaa

SEQ ID NO: 73557 - DNA, 546 bp, synthetic construct
  source 1..546: mol_type = other DNA
ttgaccgacgttgagataaagatcgaaaacatcgttgccagcgcaagcattggtaaagacattgttcttacggaagtgtcccaagctttggaaggggttaattttaatcgtgagcaatttccaggcttagtcttcaaacttaaagatccgaaaacagcggcattaatattttcatctggtaagctggtatgcacgggagcaaagtcaatagatgattctaagttggcaatcaagaaaactgtagatttgatgaggactatcgataccgaaattcctcatgagtttgaaattaaaattcagaatattgtcgcttctgccaacttggagtccacactaaaccttgaagccgtagctctggaactggaaaatactgaatatgaaccagaacaattccctggtttagtatacagactctcggaccccaaggtggttttgctattattcggctcaggtaaagtggtttgtactggagcgaaaacaaaaagtgacgctaagttgggtgtcgaaagagcttatgatagattaagtgagctagatttaatataa

SEQ ID NO: 73558 - DNA, 2679 bp, synthetic construct
  source 1..2679: mol_type = other DNA
atgaataaagaaaccaagatgacaatagtcaagtcggtttttattattttgatcctgctcgcagtggtgtttgctctaaaaatgcctgccgctgatttacctctcattactgatgaagctaaaggagaatacgttgactcttccggtctaccttatttcagtgaaatggattcatattacaacttgaggttgaccgaggattatatcgatcatggttatgttggggatcaaataataaatggtagtgagtgggacatgcacaggtacgctcctacgggtaatcagattaattatgaactaggtattgtgtatgtgacgtctttcttgcatgatatctttggaggagatcactctgttagagaaatagccttctggacaggggctattatatcaaccctagcagtaattcccgcgtacatcttcagtagaaggttaactaacgagtacggtgcaatcgtagcaacactgattatagctcttgccccaaactactttgcacatacatttccgggcttttttgataccgatatgttctattacatattctcgttgttcttcatattcttctttgtagagagtataagagcgaagaaaatagcatataaattgctatttgcaattttatcaattatatcgattggattgttctcacaaagctggacaggttatatattttacataggcctgatggggatattttcaattgtttatttaatcgcctgctattactttaatattggtgaagattctcaagatgaatattcaagtaaactacattggtttattaaccaaaatgctttaaaatccatcttgatcttgggcattatcggattcattggtctagccatattcaaagggttagatggtgtgactggattattcggaagcttacttagcttactttcattacaatccgcctccagagttgttggcgggttccctaatgtactagtttctgttgccgagatgcaaatcccatccatgcttggcagcggtatgaatagtttatttttggctaacactaatggtgctgtaaacggtattggtggtattggtgttttatttgctggcttaaccgttgcatatttattcgtcagaaacatattccggattaagggaaattctgttaaaacagaatccaacgttaaaccacaaaaatctgaaaggttatcctcctctaaaagactagataataagcgtaaacttaaaattgatctaagcagatataatcttgaatttgtctcggacattttgtctgacaaaaaattgacactgttatatggtactttgtttatcgtatggcttgtcgtaactgctctagctgtaacacgcggttcaagatttatcactacaattgtattgccttttgctttgttaaccggcatatttgtaagtatcgcgatggaatatattagaaataagataaccgacgaccgaattttattggctatcactgcaattgcagccatttttgttgcagttccagtttctactgtcaattccatttttgcgattttggtgtttgttgctatagtgggcatcggtgcagtatcgatttatgtgctcaaaccaaaagccacctctggaaggaaacttccgatcaagaagcatattgcaataatcgccatcgtgctggcgttagtaactccatgtatttgtggtgctttcttgacttcggaatctgttgttccaggcacaagcgattcaatgtggaatgcaatgacgtgggtgaatgaaactcagagtgacgatactgtcttgacatcttggtgggacttcggttacctctttgagattgctgcagataagcaagtgaccttcgatggaggttcacaatctggagatcgtgcattttggcttggccaggccatgacaacggacaatctggaattgtctgccggtatatttagaatgctggatacaacaggggataaagctgttgaatcattggtgaatatcaccgaggacaccggtaaaagcgttgatatcttaattgatattttacccatgaagtccgacgacgcccaaaagacattacaaagtaagtatcacttgacagcggctcaagcaaatgaggtcgtccagtactcacaccctaagaatccccgtcctgttatatttgtcgcctcttctgatatgcttcaaaaagctggctggtggagttacttcggtgcttggaacttcaccaaccaaagctctgaaaactacaattactatgttccaacagagcaggtcaaggttaatccgggttcaactggtaaactggcattgcttgatgaccaggggatgactgtcaatgctgtaatccaaagaggctctggcaacaattcaactactgcatatactgaagctgtttatacggatagtgggaagcagatcatggtaaatgacactccatacaatcccttgaatatttcaaacttaatggttattgaagacggatatgtcatgaagaatcagtcggttggaaatgtaaaagatgcaaactacaccctcctgttgataggtgaaaagaatcaatacactccaattttaatgagtaacgagctagcgaactccatgtttacgcgattatacctgtatggtggagccggtcaaaacatttttgaaaacgtccatacggaaaacggagtgatgttgtttaaggtcaactttaacaatacggctgctggtgcttaa

SEQ ID NO: 73559 - DNA, 447 bp, synthetic construct
  source 1..447: mol_type = other DNA
atgaagttcaatgcatggaacaataatgaaaaattcttctcatcgaaaatcgcacaaaatgtaatttctaccgcttgcggtagcgatattaacacggcctgcggcagtgacgttgccgcttctgcgtgtggttctgatattaacactgcgtgtggaagtgatgtcgctgcctctgcttgtggttccgatattaacactgcttgtggaagcgacgttgcagcttcggcctgcgggtccgacatcaacactgctgtggcagtcatgtggttgttgctgttggtcgttctaatattaacattgcttgtggcagtgatgtggctgttattgttggttgttctcatattaaccctacatgtagatcaaatatcaccacagcttgtagttcaaacagattttaagattaattcaatcttaaatattttatttttttatatactatttttttaa

SEQ ID NO: 73560 - DNA, 582 bp, synthetic construct
  source 1..582: mol_type = other DNA
ttggatcacaaaataacggacttacagatcaacgcactaattggtactaactcaaaatatgaaattttcgagatagacaggcaatacgatattatgagtacctcaattaagatggataaatctaaaaagataaatttcaataaccatatgccacatgagtgtactcttctcaaaaatgtaattgaattaaataataaggaattatacgacaagataaaagattatttctgtttgtactatatttctgccttggaaaatacaattgaaaattcctttagaaagttttggagcctttcggaaagaattataaaagatattcatggcggtatgaaggatgaaaagttagtgaaatatatgggaaaactactgaaaatgtgccgataccctgataagataattcaaagagttaagttcatcaaaattaaacgtaacaacctggttcacgaaaatatccatggtgagataacccagtctgatcaagctatcgtcaaaatcattgctgaaaatttaatcttgtttctaatctgttactttaacgaggttacagatattggggactataagagtttttatgacttgtaa

SEQ ID NO: 73561 - DNA, 177 bp, synthetic construct
  source 1..177: mol_type = other DNA
atgaacgaaaaggataacaggtgggccgaaactataatcggttattgtaatcgtattgacgactacttgaatagatttgacgatgataaagagatatacatgtctgattcactttataaagatgcttgcgcattagttattatcccaattgtcaatctacaaataattttcagataa

SEQ ID NO: 73562 - DNA, 942 bp, synthetic construct
  source 1..942: mol_type = other DNA
atgtttaaatttgataaggaacaacatgtgtttgactttgccggtgtaaagatgggcggtcaaccgggagaataccctactgttctatgtgggacgatcttttatggcggacacaacataatcaacgatgagcttaccggggatttcgaccatgaaagtgctgagaagttgttgaatgatatgattagcatgtccgatataactgggaatccatgtattgcacaagttttcggtcaaactgaggaagccattgtgaaatatttggaatttgttggtgatctatgtgatattccctttctgatagattccacttcagcagatgcacgtgtcgcgggtgctcaatatgcggatgaagtgggattaactgaaagggccatttacaactcgatcaacatgtcggcagacaaatctgaaatggacgctctaaaggaaacaaatatcgattcttcaataatcttaggatttaaccctatgaatagtacagtccaaggtaagattgcaatgtgggagaatggtgatgacggcgcttacgaaaaaggtttgcttgaggtcgctgaagattgcggcatcaccaaattcatgatggatacagccgttaccccattgggtcagggtgctggagttgccggtagagcttcttttgctgaaaaagccaaatggggttatcccgtaggttccggtatccacaatattccttcagcatgggattggctgagagactacaaaaatgagaccggcaataaaactgcattcacggtttgcgacattggagccaacattctccaggtcatgagctgtggggatttcgtattattcggcccaatagacaatgctacaatatgcttcccagctattgcacagacagacatgtttattgctgaagcggcaaaggatttgtctacagaacctattgaaacgcatccaataaataacttattataa

SEQ ID NO: 73563 - DNA, 675 bp, synthetic construct
  source 1..675: mol_type = other DNA
atgttaaaaagagtagatatcgttggaaacccaaatatcggtgtattcatactggccactgatgagtacgctatagtgccttataacctcctggatgaaaaagccgatataataaaggagacattggatgtggatgtcgttaaatccagcatttctggctgcagtcttatcggatctttggcggtagccaattcaaacggtatggtggtgtcaccacatgttttggacagggaaattaaacagttcgaagacttaggtattaacgtagctacggtccccggtcaatatactgcactaggcaatatcattgcagcaaatgataagggagctcttgcatcaccgtttttatctgaaaaggccatcaacattatcgaagagacattggacgtcaatgttgaatccacttcgatggttggtagtgacattataggatcaatgattcaagttacaaataagggctttttgataagctcgaatgctgttaaatctgaaattagttttgcgcaagaagtctttggtgtagaaggggatataggtaccgttgggaagggtatttctctagtgggtgcttgttccattgctaattcaaaaggagcaattgtcgctaaagactctaccggtcctgagatggctagagttgaagaagcattaggcttcttagatgatgacttttaa

SEQ ID NO: 73564 - DNA, 6225 bp, synthetic construct
  source 1..6225: mol_type = other DNA
ttgaaaaaaatattgatatttctattgatcttgatttttgcactgtcaatcaatataacctttgcaagtaatactactaacagttcagatatttacataagtaatgagggtagtgatttttgtggagacgggtcgattgataatccctatcaaactcttaactacaccattgggaaggtctcaaacaactcaaacatctatttgaaaagcggaacatacaactctacaggttacgacattgtcaataagtcaatttctattaatggtattggtgatgttacgattgacggcttaaatggctttatttcacaaagtatttttaaaattaactcgaacgcatcactgtttttgaacaatattaaatttaaaaacggatactgtgacttagacaatgaaactccttcgtgtatcataaaccaagggcgattgtttatcaccaattccacctttgataattttaaaaccagcgtgggagtaatcactaatgaaaattatctctgcatcagcaatgtcaaaacaagtaacttgtctaactctcagttgttttcagctccatataaatacaacattcccattcaatttatttacaatatctggtgttgtgacatctataattcatctattggcgcctcgtataataataaaaacatgactctaacaaattcatttatagagcgattcgtttccaataaggattattcaaatcaaacgtcttatgcttactttaacaattcaaatgttcatctaataacagctaatgattgcgacatgttaatttttaataatacttacatcaactgttactttgatgttgatgacacaactcatacaatcgaatatagcaacctcatttgggataatgtcacactctcaaaatataatgatttattctacttctctttgaaaattggttattctaatttaacagctatttcatcatacttcttgacgtctattctcttcttgtcttccaatgccacaatttcatactcatgtatcctgtctaacattattactgctgtcgtttctaacgtcaatgtgaattataattggtggggggataacaaaggccctaatgtaatgaatggtgagtttagcaaaatcacgtcaaattattgggtagtaatgatggcggattatgatgactctttagttaaaatagatctaagtaaatatacaaacggcttagatgtgtggaatttaaataatccctctaaattaagaactcgtttagtgaaattaagaacggaaactggtaacttaacaaagactagcggttacttggaaaatgctactttttactctgaactgaatggaaataacattaatactatgctttatgcgatggtcgataatcaagttttaagaattgtcgtgggtgagggtaactcggactacgatctctatatttccgatactgaaggtaatgactacttttgcgacggctctttagagaacccatacaagacacttaagaaggttgtttccaaggccattagtggaaataagatctatatattgccgggctactatactttaagttggaacgccaatatcaagatattaaagaatctgacattcatcggtattggtaatgcaaccttatccagaagtaatgctaggaacatttttattgttcaagagaaaggtgtgttgaatatcgaaaacctcacattcacacaggctacttctggctaccacaactactatgatccaataattcatgtaattgatggtgacgtaaatcttaagaatagtaacttctataacattacaacctacggggttgtgtttagcgataaatccgaacatgtgacggttaacaacttgacgcttctaaacgttgaaggtcctgtcgtagtgggtaattcgactaaggtttcaatttataattctaaatttttcaacggtagtgaagcgtccttttatgattcctattattcatttttaatcccagtgtgttctaacttgtctgttgtaaactgtactgttgatggttataaaggtggtttaattaaactaaatcctagatacgaacaaatagccgccaggtcatatatttataactcaacattcttgagaaactatcagtataactatgtttatgcgccgatggtttccacatactcatataattacatgacaggcttttccataattgagaactgcacgttctgtaacaacattgggaacctagtgtttagtaatatcataaataattgcacatttgtaagcaacaagaggattcgttatgaggaaactaacatacattacaacgtaaactatccaaaagctctaatctacgcaaaaataattattaactctaattttaataacaattcgttcatctcgaagaactacgaagacatggtcatccacggcgatgaagtttattactccacctttataaataattcggcagcattcggaggtgcattatctggttcaaaagagatacattatagcatatttataaacaattcggcagcattcggcggtaacgatgtatttgtttataacggggatctgaactgttctagcaactggtgggggtcaaatcaaaagcccgattcctcgcgggtttttgttttcatcggaaccttggtcttggatgattgggtgatattgactatggactataagaatgatagggttattgcttatctggacaacctgttggacaataatggaaacagttatcctctaaatcatgttttaccatctagggctgttattttctccactgaaggtggcgaattgactccctcgaatacttttttggttaataacaaagctagcacttttttaattagactaacttcgagcgatttcaatgtatttgcgcaagtcgataaccagatcacaagtttgacggtttataataacactactcaaatattgatgagtaatgttgtcatatatgggaaggatgtcttgtataacttgtccttgataaatattaacggacacaagatttccaatcaggacctgaatgttataattactcacaaaaattcaatcattgattcattcattgtcaccaccgataaaagtggggatgcctcatttagtgtcgattacgcaatcggtatttaccaggtgaatgttgtataccttggcaatggttattttgaggaatgcaactctagcgctactatcaacgtctcttccattaaaactaagcttcaatcttataaccaaacttactctggtaaaaataataagttctacgcaatattggtcgattaccatggcagatacttgctaaatagggatctgatcttaagaatatttgaccttaatgataatctggttaacaccgttgatgttaagacaggtgtgggtggaagagcagacgtgttattgtctctagatgtgggaaattataaaatgaaatgggattacctgggaaatgaatggtatgaaaagagcacttgtatatcatttgttaccataagacctattgaaactaatatcatacttccaaacacgaccttatatggaaagggaaacgattacgagttcacctttaaggatatgtacggaaacctaatttctaatgagatgatcaccttcaagatctcaaaagaaaatgaatcgagtaaattcagtcttataaccaagaagggaatcgcatccatcaacattaatctacttccaggaaaatacgatttagaagcggtgtatgccggtgataaagtctatggttcttcctttgcttctgcaattctatacgttgaaccaattttcgtaacaatgaatcacaattcttaccaatccctaccgaagaatggtgtcttcactgttattttaaaggatatgtacggaactaaagtcagcggtgaaaatctatcccttgaattgattaacaaggatattcataaggtttatgaggctgtaagtgacgctagtggtcaagccaatttcaaattggacgctcctgaaggagtttactttgcgttgattaattacggaggtaatatttggtacggttcgagcgttagtgctgtgactattgagataaattctaatgtgccgattaatccagtgtatattaacggttctaacttagtacaatattacggtgaagataaatattacctaataaagtttaacgatacgaatgcctattcattagaaggcaaacttgtaaatgtgttaatcaactctgaagattggtctaactcatacactcttgagagcaatgtcttcggtgaagctagaatccaaatagctttggagcctggcacttataacatcacgtacaactataagaatgaatattatggtttgttcgctcaaaattccagtactatatttgtttataaaatgcctacaagcttgatagcatccaacatgattctaaagaaaggcgattcaaaaaatctggaagtgaaacttgtaaataaaaatggagatccaattgctaacctccctgtaattattaagatagacgacaatgagtataatataactacgaatcaaaagggcattgctaaactacttcttaatttagatttgggcacacataatgttacctatagctttaataataaaaactacataagctcaaaaggtaacgtaactattttagtcgttaacgactcgaaaaaaacaaccacccttgtcggtaatgatgtttatacgcgtgaagaccagaccatcaattacactgttctgttatctgatttattggacaatccaatctcatcttcggaaattgtattaaaaattattaatagtgacgatattaatataaaaacctataagggatatacagacgtaaatggtgttgctacatttaagtttaacttaaaatttggtaactacttcgtgaacgcttactataatggaaatagtgtaaacttgcctagtttcacgactaataacctctacatcaaagttttggaaaattacacagagacaatactgttcggaaacgatatcgaaatccataatggtggcgatgactactattccgttgttctctctactgttgatggtgaatttatcaaaaatcaaataatcgagtttataattaaaaataattcttattttacaaacacggacgaaaatgggatcgcctatttaaagatacccttctctccaggttcttatgaagtactgacgaagtttcacggttgcgacaacttaaccagttcatccattcacaactatatttcaatttatggagacttattcaacttctactccaaagatgtggttaaggcatacaacaacggtacccattactatgttgccttatatgatacaaacaatgaacctttgtccaacaagacaatcaatttctacgtaaataatcagacctatcaggacgtgacaaatgccgacggtttcgtgtgctttgaggtctggctgaacccaggaaagtatatcatcaacgcaactttcaagggcgaatacccggacgaatttaccagtgttgtaaataacatcacagtcttaccaacaatcatgggggaaaacctagatgtttactataacgaaaatactgtattctcactatttttgctagattataattgtaagccattagaaaataccgaagtagtcataacaatcggtggtgctaaatattctacgatatctacttttggttccgcaagttggaaattaaaattgaatgccggggtctataatgtcatctgtaagaaccctataaccaccgaaaagataactcgtaaaattaatattaagtccacaataatatctaagaatttggtcaaatactacaaagggtcttcgaagttttcagtaaccttcaaagatcgcttcggtaacttttcgcgcaattctaaggttaaatttattattaataagaaaacgtatgttaaaaccacaaattctagaggtattgtgtccttgaacattaatcttaaaccaggaaaatacacaattaaaacgtataatttaaagactggtgagattaaaacaaataagataaccatcaaaaccttaataatttcaaaaaataagaaagtaaaagcgggtaaaaagatcaattataatgttaaggtattcaattctaaaggtaagattgctaagaaagccacaattaaattcaagatcaaaggcataacttacaagattaaaacgaacaaaaaaggcattgcaaagttaaacatagttcttaaaaagggcaaatatacacttaaaacaagctatttcgggctgagtgtcaagaataaaataactgtgaaataa

SEQ ID NO: 73565 - DNA, 5712 bp, synthetic construct
  source 1..5712: mol_type = other DNA
atgaagaataaaatatttatcattggactcatcattttgattctatttatatcaatctcatcagtgtgtgctaataacgaaaattccacattaaatacatctatcaagatcaacaacgacttaaaccaaataaatttgggcaacgaaataaacttaatagacgaagctccaaaagaagttttgcaagacgaatctgaaatttccatcactccacaaaactacaataaatactttaatgtctacactggtaagtttaaatctgatattgtctcatctaaaataactactgtcaaaataggtaatgtgtcaaagtgtttatttgcattcgaaaagcccgtaaatttaatgccgatagattctagctgtcagattacaaatggggtaatacatctgttgcctggcagcgatggctctacaatttccggtctcaagattatcaataatgattctgttggggacatcaagtacggaggtattttaatttctagagcacacggaatatggcttaccaactcaagcaataaccttatctataataacacaatcatcataggcaatcaaaagggttgttacgccatgcctatgggttattcgaataacaatcgtatcctaaacaacactataatctctggtcttacgtcgtgtattgtcatgggcagatcctgttataataatatttctaataattatattgaaatttgtggctatgaacttttcacgacctcgaatttaatattctttaacccctggggacatgcagactacgatgatggtgtcgccgagtgcaatggaaactatatcgcaaataactatctaaaaaattatggaactggcatctgggcgataacgctgtctctcggatattactccggagatacgcaagtcattaacaatacaattattaaaggttcatccggtattagcactagtgacatgttgttcacccaaccaaagaatattttgataaaagataacacttttattgattgtccaatatctatacttacctgcagtaataacgtcaccatagaaaaaaacaaaatctttggcagttctgaagataacgcaatctacattcaagctaatgatgcacaattgtataaccatagcgtaaccatttcggataactacatagaatttgaaaacctaggttgcgcgatattggtacatagtgacaacgtcacagttgttaataacgaaatccatttatcaaggtacggtacgggtattggtatttctccaaccgattttcctaaagcatcatctaacaattgtaaaatagaaaacaataagctgtatctcagtggtgatatgggcattaggatactgggacataacaccaccatatgtaataactacatctctacaaaggacaagggcattgtcatttcatcttcgggttataaaatatataataatactataattgcgaatataattttgagtgatgatgtgccaatctatattgaaggacatgtggtaaattcaacagtaatgtacaatgaaatcgaaacgaataacagcgaaggtattcatttcaacccttctggtgatctaagtgactattttggcaaggtttctgagaataccatcaatggaattatcgaaaacactgaaactataattgttaatgatacaaacttctatgattactttgatttatccggatatttaaattatgagtttaaaccaaattccaaaaagattatattcttcacatttttaactaataaaaatatttatttcaccgataagatattcttaagtagtaacaaaatgtacaacttattgcacaatgtttcgattaaattttttgagaatgcaagcggctcactaatccaagatttgaatttttataacattgggaataactccatcatcctagatggggtgaatgacgtatcaatcaataacaacgactttacaattctttcaaacaagggaaagaacatttcaacaatttccgttattggtggtgaaaattgcatcatatctaacaataacattttcatgaactctaaaagcaacttcactacagccatttctatttcaaacccgaatggtgccataattaagaaactttccaagaacttcaagatttttaataacaacattttgattaaaacaaatgggattgcaagaggaatttatgcggattcacttgttgagaccaacatactagaaaacaagatcaacattatatctgattcttcggcttatggtatatccatagaaaataccaatgaaatagtatacaacataactattgacaataatttagtggttattaattctaaggagatgagttatctgatcaaactgcaaatgattggcacgtcggatataataaacaactacttagttggctcaagtaatggtatctgcggtattggtgcttacaactctttgaatttgaatataaatcgaaacgaaatttctatcagcggcaaaaaaccaattaatttccctgttttcgacgaattaggtagaaacaacgtggctatctacttaaaatccacagtaataaatggtttttcaagaaacatctttgacatcgagaactcaacaatattgattaaagactcttcctcgattattaaaaatttcaatgttaacagttacgttattgcagattataaccacgatttctattttgactcgcaaaataagttaaaaagcaacatcatcaatgataatagtataattttatttaaaaacttcacgttcaaaaaaataaccaacattaacattccggtaattataaaaccatacaaaaatcttaataacttcactgctacattgattttgtctgaaaatgctaacaaatcatcaatctatggattcaattttattaatgcaaatatcaacttaaatggtgtcgacaatgttaatatctttaacaactcgttcaaatgtagtgaaattacggataacaatggtttgaacaacattatttttaataattcatttgaatttaaattaaacaatgcagatggaatcatttttaatggatgtgccggcggtatttttaccaacaattatattctaattgattctaagaagagcaattttattcttattagaaaggctaacggaactaaggttaataacaattacatcaacgctactggtgatagtttagtattgatcaaatcagattcgtcagaaaacacgcaaattttaaaaaatatcatcaatgttacctctactggcgactttaatgtgtacaatgcttttaaaactcattttgataatattagcaacaatgaaattaaatgtagagggacatcaaatagtgcggtcatttattatgattcttcatcgtcctgcaacaagattgaatttaatgaaatcattagctcctcttccaatggtcgagaatatgccgttgtcttcgataccaagcacgctctgtccaacactattgcaaataactacctaattacttctaacgggtataggagaggtaacgatgccgtatatgcaatatttgaattggtctgtaacaatactcccgtaactatatacgtatcgattaattcaactgaggacggtaatggtagctttacaaatccctacttaaccatccaccaggcattagagaacagtctgagtggagctataatctacatactgcctggttattataaggaatctaacttgattgttaataaaaatattacactcaccgccataaataatgatggagctgtttatattgacgcactgaataatcagttatttacaataactgaaaagggtagtttgactataaatgcattgaagatcttcaatggcttttccgttgaaggtggatcgttgttcttcaactttggttctttaatcatcaacaattcagttatctacaatagttcgagctactatgataacagcaacccaacctttaaattcactaatatacagactccaactctttcctacagttatgattgcgaaaatcttggtttaggaggggctatccttaattacggtaatctcttgataaattcatccaccctattcgataattttgcccataagggtggcctattggcggatttcggcaagtcaacaattaagaactcactgatatttaacaatactgccgtgcatggcggggccattttcacagattcatctcatgaatttaacattgaaaattccagcttcttggagaatttagctattcagacattggactactgttatatccagagaaagtctctagactctggtggttacgagtaccgtagtctatgtgacatgcggccgggctacggtggagccattttcagtaattcttcactaatcatatccaactgcctgtttgagaggaatatcgctaaatcgggtggcgcaattggtcactactctaaaatagagttgaatagtaatcgtcaggggcctaattactatgctgttaatcaaaatgtttatagtcagtttagatatgtgcctaaattgaagattgaaaattcgatatttagatataacgaagccaaagacacaagctgtggtaacctcagtatgatttctgataggatgtataactattactatagcattaactataatggtggagctatctttggttctttaagccaactaacaatctttaactccctatttgagcataatgtagcaaatactgttggtggtgccttgtgcgtgcaatgcgaaaactcagtaattgagagttgtaagttttataataatactgctggggaatacgggggtgcgatcgaggctttcggtacttaccgcatatttaatactgaaatacttaataacaacgcaaaaaacggtggtgctattaagtatacgtcctataactcttatggtcacttacaagaaatgatgtcattatttaatgtcaccgttacgggaaacaaagcgttgtctagtggaggtgccttcattacacaagttgctaattttgcaatcactaattcaaatatttatgataacagtgccccatacggtaatacgttctatggaaaatatgggtatgacagcagttccaacattgatgctcgtaataattggtggggctcggtggatggacctgacgattccgtttggaatagcgcaaattccaagttcaaaaattggttgaatgagaaagtcaattggcatgtgccccacgtgagcggtggaagttctaataatgatgagtctggtattggcaaccagaataacggcgtaaactcatacattccatctagtgtctccactggttcgggggtccatacaggttcaacattaaccaacaatgttaagtcttctggtgcttcttcaaaagggttctcattcacgggcaattggccttccggaacagcaaatggtttcaataatggtgggtctggtgagggtaatgctgtcaactcaaaagacaactctggaaattcccgcacttctattgccggcaatgttaagaatttgaatagcgtgagcaaaatcaatagttctaatgttaacaatcttttttcagtaggtatggatgcaaatgctgccgactcatccgctagttcggcttcctcctctcaagggggggctgatgagagtttttcaaatgcgtacgaaataattaacgaagttaaaaaagagaataatcaaaagttttccatatttaatatattgctgattatagcttggattttctttgtggttggattctatagaaaatacaacgataatgaaaaagagatctaa

SEQ ID NO: 73566 - DNA, 5262 bp, synthetic construct
  source 1..5262: mol_type = other DNA
atgaaatattctaagctatttttgatatcttttgtcttattgttcttcatcgtaagtgcggtgaatgctttagatgcctctgaaatcaccttgaatgcagataattcgatcgatgagatatctaatgaggatatgggtatacttaacgaagtttcaccctcaaatgatataaaacatatttatgtaaacgacactggggacgactccaacataggttcaattaatagtccttatagctcaataagcaaggccattggtgatgtcaattcgtctacaaatacaacgatatacttaagtaaaggaacgttcggaaaaaataatgataccaacttccagtttacaaatgaaataaatacctattttgataattgtaatgtgactttcattggtgagggcaccgataaaacatttatagatggtaaatcaacatacaaattcatgactatactggaaatcacgcctaatttggtttttaaagatatcacatttgttaattttagggggcgcgggtcctctgtttttgaacttttggaagcaggaaatttaacaattgacaattgtgtttttaaagactcatattctactagtaacggtgatacaatttcatcttccaatagcggtgacttaaaaattattaactctcaatttattaattcaaatggtggaataatcagtctattatacgaggatgtatctcccggcaccctgtatttggaaaataatacttttgtcaacatcactaactcggaaaacaatggaattgcagttactagcaactacgctaaagcagtgattaaaaataacaagtttaataatatcacttgtatcaatcagaaccaagtcaccctttatctagaagctcccgatgagggtacactggttttaactgataacaactttgttaattgtgagtgcttgaacgaatattttatggctccagtatacttgtgggcatacgaggaatatgtaatatttgagcggaacatattcctcaattctactggtgcttctggcttcaacatattgctcaacggtagaatggacaacctaaacattagcataggtgctgatgagattaatgtccacaataacgaaattaaccatggtgtaaatattccaattaatataaccgacgatgtcgggaacttggtcttgattaacagtggaatccagcttaatcttataggtgacaataacaattacaccccatacttgagcttaaaaaacaaaaaactcacatttgctactgttcctgagagtggcatttacaatgtaaccatcacatataatgatgggttatcaactactgaagtgttgacgattataaagatcaatatctctagcagccctgtcaacatttgggtctctcctaagggttccgattcgaataatggtagtgaagaaaacccatttaagacaattcagcatgccatagacacgggatttgaaaagtcattcaatgtcatcatatatttggatgaaggtatttattacggtgaaagtaacgtgaatttaataattacgaacaagggtagcctgcaaattatcggcaaaaaatataataaaactatcatcgacggggaacattcaaattggtttttgagtgtggacacctgcgacgttgaggttaaaaatttaaaattcatcaatggtgctggcaacaaaaatctaatctctgggtcaaatttgcttaatcttaaagattgtattgtcgatagtaacatcgcctcaagaaattgctacgttttacatcaaacactatttgataatttgacttacacaaacaatactggtacaatttattacaattataataggaatatcacaaagtcaaactttattaacaacaagaatatttatgattctaccggtattatttatagctcttgggctcctataatcattctggattgtaaattcattaacaatactgcattatatgattatggtgtaatctactctaacaacaacattatgagtcttaataattactactacggaaacaaagcgaaaaattacgggatattctacgcttcgtcgtactctagcaacaagatgattttaataaacgacacatatatcaataatcacgtagacggatcatatggaatcggaatttccccatactcctcggtagtgaattgtaaatttattaataactctgctggtacagatgcgggcataggtagtataacaattacctgctcctttaagaattgttcattcataaacaacagcgccactaagggcggtgttttcgtactgaacgcggttcaacacgctttgggcactacttacgaggaactgatttcatttgacaatgtaactttcgaaaataacaaggctagcatgggtgctgacatttatctgcctccacgtagttccaactcctattactcctatacataccctattgaattaacaattaccttcgataacattactgttacgtccctaactgataatttaacggcgagtgtttatggagttaatggcataatcgttggaggtgcaattcttgaattttacttgaacgagctatacatcggttcttctcaaatcgttaacagtaacgcaatcctagagtacgatggtttttcaaatggaaaagctattgtgaacggaaatattattcatccgtctgtcaaaaataatataaataatgcaacattggatattaagttagacaatgtattaaatcacattgacttctgggtttccaacataggtagtgacgaaaatggcgatgggagtaaaacgaagccatttaagacaattcaatatgcggtgaataaagcctttgaaaattgtcgtgacattactatctatctgggcgaggaaacatattccggtgagaataacacgaatttgactatttcaagcgcaagtaacataacaataataggtaagggaatcggtaagacaatcataaacggtgggaacagcagttatttcgtcaaaatcctcataggcattaacaaaattattattagcgatttgactattatcaatatgactccagataacaggtttgaccttccaattggttcgacatcaccatccggtatacacagtattattaaaagtggttccacatccccaatcaccgttgataagggagccacattatatctaaataatgtaaatatcacagaatgccgtggaggtaatgccataattgatggtgaaggcaacattttcattgacaattccatattatacaaaaatggggtgtcaaagggcattatcaaatgtgaaaatttagtaattaataactcaataattgataaacatttagtgggaggttatccaataataggtacgaacattataataaataataccaaaattacagatgtatttaacattattagaaatggcttctattttatctccaatgctaagaatactaccattgaaaatacatgcgttttgattaacaactgggaaaatccattgaatatattggacattattgaatattatgatactcaaatatgtcctgcagcttgtattgcttcaactaatgccatcattaaaaattcatcctttaaaaatgagtttgaattggtgtacttatggcaatcaactacggactattcatatcataatgtgtactcaggctctaatattgaagcagttaactcttccttcgaaggttatcaattcattatatattcgagaatgctgcaaaatcccatatataagttcgacggatgcacatttaataatattgctaatttgatgattatgatgcagtctagaaactctatagtatctttttccaactcggtcatgttcatatccggcaacaagatcgccagcaataatgcatttaataactcgttcctgtttaacaataactattggggtaacaattcaaagcccgttattccaaactctgtatctaatttccaaataccttctccagataactggattattttaatctcggaaggcgaagaaccagtctttaagcttacagatgggaaaaatgtcactgagtatatatgtaatttgccagctaagatatcgtacgttgccgatgagaacggtgaaatcatccctgttctaaacctcaacggtaatggctacaaatttaatgtggatgaaaacggtaacgttgttcttaatatcagtgctccgatgaaaaacattgttcctaaagttccagttgatgaaactgtcttcgcaaacgatattgaagttattgtaaactcttcttcgaactttaaggctaaattcaccaataagtggggcgattccttaaaaggtattaatgtttcattcatcatcggtgaaaacattatcaacataatcactaacgaaaacggtactgccatattgccggttgactttgatctaggggtctactttgttaaaatcgttaatcccgtgactggtcagttcatcttcaagactatcgacgtgatacttgagaacacggtgactgccaacgacatcattgtaaagtacaatgataagtctaaattctctgtgattttcactgataagtttggaaatccgttaattaacactaatgtcaaatttaaggtaggaaagtatattattaatagaaccactgatgaaaatgggatcgcttcatttgttattaacttcaacgttggtaattacgctgtaaataccatcaatcccgttacgaatcaaagtattgataaaataatcacggtgaataaaatagctactaagttaacctctcctaagctaactgtcacttataatgctggtaagtatttaacgttaattttgaaggattttaacggcaaggcattgattaatcaaaaagtctctattaaaattaatggtaaggtttacacgaaaattaccaattctaaaggacgatctagtttaaagattaatctcccggttaagacctacattacaacactaacctacgcaggagatagaaatcatatcaaatcctctgcaaccactaaagttatcgttaaaaaggcaacccctaagatgacggcgaaaaaagccacttttaagctgaaaacaaagaccaagaagtattcaattattctaaaagataacaggtataaagtgatgaagaaagtgaaggtctatcttaaagtaaaaggtaaaacctatagagcaataaccaattccaaaggaaaagcaacctttaagattacaaagttgactaaaaaaggaaaatattcggccagaataaaatattcaggtaacaaatactttaattcaataacaaaatacgtcaaaataacaatcaagagataa

SEQ ID NO: 73567 - DNA, 492 bp, synthetic construct
  source 1..492: mol_type = other DNA
atgtcaggcaagtctaagattaacgtgtttaacaaaatgacaaaaactgctttggacgaggaaattagcgcttatgtggcgtatcaccgatactatcaaaggctaattgcagtcaaaatagttagtgaggggaataccatcctggatgctgccaagatattgggtaagtcctaccaaacggttcatagatggatcaagacttgtgaatctgaaggcttggagggtctcaaaccctcttttggtggtggacgtccttcaaagttaacttatgatcaactgatggagttggataaaattattgaaaagaccccaaacatgtcgatgaaggacgtacatatccttgttaatgaaaaattcaatgtaaattacagtttaaaacagataggaaagattgtcagaaaattaggttacaattatagcaaagcatgcccaaaattctcaaaatccctagaagatgccgaagaacagttaaaaaaacttaagagaacataa

SEQ ID NO: 73568 - DNA, 1083 bp, synthetic construct
  source 1..1083: mol_type = other DNA
atgaaaatcagtaagattaacttaatcttaagcgtggttttagctattctcattaccatggctacaactgcctcactgttgtccaatgctaacgattcattttcaaaagccgagccaaaagggaatgttagcatagctatcacaggggatgttatgttcgctcgtaacatgccaggtgtcttgagtgctgattcatcgcctttttcaggtgtcagtaatgtaacttccaatgtggatttactactgattaatttcgaaaacgcggccacttcttccgaaaatgccgttaagggtgatgtcccacttaaatgtgacccgagatatgttccactcgcaaaggggaacaataacacaatagcttctcttgccaataatcatgcatttgattacggtattgatggaatgaaggatacaattgaaaacttaaaaaatgcaggaataacgcccatcggagctggtgaaaatgaaaaaacagcgcataatgcagtaactcaggaaattaatggtaggaacataaccatcctaaattatatggattcggacaacttcgcagagtattcttatgatgtaatgccttacgcaaatggttctaaccccggttactccgtatttgacctagctgatgcacaaaagcagattaaagaaaacaatggctctgatttgatcgtggtctatatgcactttggaaatgaatattccaactctccaaatgacaatcaagttaagattgcgcatgagttaatagattctggtgccgatgtggttttgggctctcaccctcatgtgactcaaggaatcgagatgtataacggcaaaccaatattttacagtttgggaaacttcatatttgaccaatcaaaccctgcaacgcactctgcttactttgtccaaattgaccttgtaaacaatactggtgaatgcagtgtttatccaattgtcatttcgggctacctgccgcattacatggactccgacagcggtaacagcttgttaaatgaattgaatcctaacgctgatgagctagaagtttcaaatggtgttggtaaattgagattcaatttaaccgaaggcgatagtaattaa

SEQ ID NO: 73569 - DNA, 1740 bp, synthetic construct
  source 1..1740: mol_type = other DNA
atgatttcttgtgttagtgcaggcgacagcgagatgcaacaagtgaataatgatagtgtcgactccgctaatcaatacgtggaaccagtgaagaacgcttcttttagtaaggttagcaatactaattacctaaaggattcaaacttcacggtaagcttaaaggatgaaaataacgaagtgatcgtcaacaaaacagtttatttcactattgacgatggtttagtaataaataccaccaccgacgggaaaggcagtgccaaactattattgaatatctcaaaaggaacacacactgtcaaatacatatttaatgaaacgggttttactccatttaaatcttcaacgaaggttctcgttattacaacatcaaattcgaagataaaggcctcggcttataaatcttacatcggctttaagaaacattattcctatgctaaacatatcagctttaaaaatacatataagattaccttgactgctgatggaatcccgttatcgaacaggattgttaaatttacaatcaacggtaaatcttacagtaaaaaaacagactcaaaaggagtggccagccttcctattggtttaaaggcaggtagatatcctattaagttctcctatgctggtgaaaaaaacattaaaaaagtcagtggaagctctattgtatatgtaataaagggcatgcctaaaaagataattaaggccaattccctgacctataaaaacaaggtttccgccccatttaaaataaaattggtgaatgggcgtggtaacatattgaagaataaaaaagtcacattcactctagatggccgaacatatacaaagtacacggacaacaatggtatagcaaccatataccttaaattgagttggggtactcatagtttaaaagtttcatccgccaagacctcttactataaatctgtgttaaaaaaatattctatccatataaagtctaaggcggttaataacggtttgtggatgttcagttcggatatgaagaaagctaacttagcatcactgaaaaaggttggaacaaaacatattttcctttacgcaaaggcaattgatgtatggggtagatcggatgttgagaaattcatcaaaactgcatcgggttacggtattaaggttcacctctggatgaaagtgtttaatgatgacaacgataagtggattaatccggttaaaaagggcaaaatcaactatggtctgataaagtccaaaattaatcttgctaaggaatatgctaaagtcaaaggggttgctggaatccattttgattatttgagatatcccggcaatgcttacaaatatagtaacggtgtaaatgcaatcaattacttcacaaaagctgcaactagcgccattcacgcaattaattcaagattcattgtctcagcagcagtaatgcctgagccatcagatatgaaatattactacggtcaggatatttcaaccatggggaagtgcttggacgtcatcataccaatgatttataagggcaactacaatgcgggatcttcctggattcaaaaaacgactctaaagtttgttaaaaagtcaggtcatgctaaaatatggtctggaatccagacttaccactctgaccgctctcccataaagctgacttcctctgctttgcttaaagatgctgatgcggcggctgccggtggagccgatggggtaattttatttaggtatggtctaactaatttgattaactttaacaagttataa

SEQ ID NO: 73570 - DNA, 1542 bp, synthetic construct
  source 1..1542: mol_type = other DNA
atgatgaataaattaagtgtgtttattgttataatcatcatagcactaagcatctcttcggtgtgcgctggtgatagtgaccataataagacggacgactcaatattgggtgaagccgacacgtcaacttcgtcaaacattactagaattggtgtgaatagtatatatgacgatggggtaaatgagacaataaaaaccaactcctctttcgtatcttcgaacgtcgtaacttatgaaacctttagcaccaaaataactgtcagattattgtcgaataacaatccattaaatggcaagaatattattatttctgtcggtaacgtgtcatacaataaaaccactgatgctaatggtaaagttgttttaaatgttaaactcgccaagggaaagtataatgcaatgttttcttatggtggggatgaaaacattaatccttgtcaaaaaacaactacggtaattgttaagactcccatcaagacaaagatctattgcgcagataaaaatattaattacaggcaagatttaaagaataccttcattgtccgtttgattgatgggaatggaaaggctcttaagagtcaaactgtaacgttcaaggtcaatggtaagatgtatattgcaaaaaccgataaaaagggttatgctgaagtgtgtttaaacttaaaaaagggttctttcacggtcggattttcattttacaaaaaatcaccgtactcacattcccacggctcttacaaaataaaggtaaaagctccaattggaaaaggtaacggttattggctttggccagctcatatgaaacatttgaacctcaaatccctttccaagttaggaacaaaacacattttcttacatgtgcaggcgatttccgtttacggaaaaagctctgttatttcttttgcgaaaaaggcccacagatacgggattaaggttcatctgtggatgcaagtatgttgtatccgcggtgataaatgggttcgacctgttaacaaagatggttcattcaagtactcatttataaataagaaagtcaaagaggcaatcagttatgccaaaatacccggcattgatggggttcacttggattacgtcaggtttggcggaactgcgcatttgtataagacaagcacacaatctataaactatatagttaaaaaaacaagtttgggaatccataaggttaaacctaattgcattgtttctgccgcagtcatgccagaaatttcaaagatgatctcttggtacggtcaggacatccctacaatgggaaaatatttggacgtgatagtgccaatggtttacaaaggtaactttaaccaaaaaactgcttggatcacaaaaattgtaagtaaatataagagccaatccaagagtgctgtaatctggggcggtcttcagacataccactcagataacaatgttaagaaactgtcttattccgcactattgaaggatgccaaatcctcgaaagctggcggtgctactggtagcatactgttcagaattggcctaacccattatctaaactttaaaaaggtttaa

SEQ ID NO: 73571 - DNA, 1455 bp, synthetic construct
  source 1..1455: mol_type = other DNA
atgtcggaacaaccgcaatgggactcgtctatatcgtttatttttgcaatgatcggcgccgcagttggtcttggtaatatctggagattcagctacgtgctttactcgaacggtggcggctcatttttcattccttacttaattgcaatagctatcatggggattccatttttgattttagaatatggtgtgggattctcattcaaggaatctttctcatccattatgagaaagatcaagccagagttcgaagtgatcgcctggattttggtattattcgtattcgttgttaccatttactatctggtaatcctaagttgggatctggtatatctatttagctccttcacatttaattggggaacagatactgcttcttactttgtgaacactgttggcggaagctctgatttgactaatgcgaactttttgttaattcctaccacagtctgcgtgttattactatggatctcagtatggtttatatcccacagggacgttgacagtggtattggtcgagtctctaagattcttattcctgctctattcgttattatgggaattatcattgtctatgcattaacacttcccggttctgtcgttgggataaatgccttgatacatcctaactggaatggtctcttaaatgtaaatatctggctagccgcattcgcgcagattatattctctttgagtatgggtcaggctatagcaatcacatatgccagttatttgcctaaaaactctaaattaattgataatgtactgattgttgtgtttgctaactctgcttttgaggtctgtactgcattcggggtcttttcaatattgggttatatgtctttcataaatggaacgcccataacggacttgattaccgaaggcacaggtttagtttttattgtttttccaatgattttcaacatcatggggtcagttggcagaattttagctccaatgttatttttagccatactatttgctggtattacttcagctttgggatattttgagccaatgttgagctccacttccgcaaagctaggatggtcccgtaagaaagcggctagtgtactgtcaatcataggttgtgcgttttcagttcttctaacaactggaatcagtagctacgtagttggtattattgattccttcgtcaatgaatttggcatcctgcttttaattggtgtgcaatgtataatattcgcatgggtctatggtgttgaacattttttgccgcttttaaatgaatattcgtcttttaccgttggtaaaaaatggatctttgtcattaaatacttgctcccatttgttttgataattatgtgggttgtgggtattgtgcaactgtttaccactgcagatgtctttgagatagccattgatttgataatcatcgcttcagttttggtatctgctgttttcttaacgaaactcaaaccaagtggggaataa

SEQ ID NO: 73572 - DNA, 222 bp, synthetic construct
  source 1..222: mol_type = other DNA
atggtcagaaacaaaaggttaaatgctgttattagttttatcctgccaggcttaggtcaaatactcaatggtgacgagaagagaggaataaagttccttatcggtatggttgtattgcatattgttatttactatgctttgaataacgtagtggggtccatgatttcaactctataccacgcgtattctgcctatgatgcatacaaaacatgtgaaatgtaa

SEQ ID NO: 73573 - DNA, 732 bp, synthetic construct
  source 1..732: mol_type = other DNA
atgcaaaatacttctaagtactttaatttgtctgatatgatggttgaatactttaatttcgaaaacaaagaaagagacattccgtattacaaccataatccaagactcacaaagcacgcttggattgtgttgctctccagtgtattaatctctttcatattctatgccttgtttgaagatgtatctgagtttttcgcaagttttatattctgtgctattttactagttcctttaatgtattactccgactgggatttctccctaatcttccataggcctactaaaagtgaaattaaacttgcgttgattctttttattggttatttaatttatgctataatactgggtggagttatcgaggcacttttatcgattactacaacaaccagcgaactgactgttaatgcagagtcattgatttcgcttgtgttttctatgatggctgaagaattaattaaattcataccatttgtcttcatcatgagattggtttacaaatctaccagcaaccgtaagttgtcaattataacctccacatttatcgtcttaatcttttttgggcttctacactatgattttgaaacgtcaattatttcagtgctgttgctacagggcttaggatcattgttcgagctgtatggttacatcaaaactaagaacttatttgtaccctatctaagtcatttgctaacggatgccgtcatctttatattaatattatttggtttgtaa

SEQ ID NO: 73574 - DNA, 435 bp, synthetic construct
  source 1..435: mol_type = other DNA
ttgaacaaaaaaattataggtgtgttactagttttaatagcggctgttgctttcggttcagttgtttatgctgctgaaactgtaactattggcggatttgattttaatgtgcctgacggtttcacagaagacaagagtcatgaaatcgtcaacatggaaaaggagcaaggtggaatcaaatacatcaacaacggcaagctgtttgagaacgacaaaggggatgttgtgaatattcttgttgccaagtatgatgggcacaaagtcaccaataaaattgcaaagggaattgccgatgaaccaaaaacaattggtggtgtagatggttacatagtacataatggcacttttacatcttttgattatgcaaaggaaggtaaattggtagtcatcacgaccaataatgaagatgcaattgaaggattcattatagagtaa

SEQ ID NO: 73575 - DNA, 627 bp, synthetic construct
  source 1..627: mol_type = other DNA
ttgaataaaaaaataatcattgcagctattatcgttgttattatagctgttgtggcaggttttatgcttacctcatccaatagtcaggacaattctaaaataaccattatgggtaacggatcaattcacgagaacggcactattggaataaagctcacaaatggggaaaacacagctttaaaaaacaagacggtccatgtttgtgttaaggactcagaaggtaaaatcgtcgttgataagactgccaaaacctatgtcaatggcgttgttggagtgagattgacaaatgtgtctgctggcgaatacgatgtcaatgtaacgttcgaaggtgatgaaaactacacttcgtcgagtgtatctcaaaagttaaaaatcattgcaggtgaatcggatgatgatccaacatatcctgtcgacgaggacacggtaaccactactgccgatgccagttctactcagtcatcccaatcctcctctcaaagccaatcttacacaccaagtaggtctaatgattatggtggttcaagcagcagtgatgatgatggtggtctggacgcggactatgacgagaacgggaatgaaatgctacccacagtagatgaggaaggaaacgaagtgtcaaattaa

SEQ ID NO: 73576 - DNA, 477 bp, synthetic construct
  source 1..477: mol_type = other DNA
atgtcgttcaataaaaaaacgattataatatttctcattttgattagtgctttcttaatcattggaagcgtttgtgcagagaatttgaaggattttaaggcaaccaagatgcttaaaaaattaaccaaacaaaaaacgctaactgttaaaatttataactttaaacctggtgtcttatgggctccaaaagcaataaagttgaaaaatggcgacgcgattgccggctacgttgaatataaggggaacatgcagtttgaaaagggtactgggatcacttcctggtacatcggatctggtctggatggcgatatagaaccacaccatacaaagcttattaaagccaagttcttctttaaaaacaagaaaggaaaagtcaaaaccaagacagtaaaaggaaatggtggtggtcatatttctacttcactaatcaagggttatgtaccctataaggctaaggtgtcatacaaaacatactaa

SEQ ID NO: 73577 - DNA, 558 bp, synthetic construct
  source 1..558: mol_type = other DNA
atgattattttaataatcttcttttccattattgttttactgtattttggtgttaaaatctctcttatatatgataagactgacagtaagctggaaggatgtttacagatatcaattttgagaaagattaaaatatacaccttgaacctctcatccttaaacaaagataaaaagaatgacgaaaatgagaaaaaaacaaataacgatataaaacaactatttaaattgcttaaaccatgctttggaccttttaagctatttttaaaatcgttcatgaagtgtattaaagtccaaaatcttgaaaatcacctgatttttggtatggactcatacacagatacggcaaaatatattgggtacatttggagtttcatcataatcataaactcttctcataagaacgccaaactaagcgctgaaccgagcttcaatggtattgtgttcgatgtaaatggcattaatgaattagagataaacatcttgaaattgatccccccagtcttgagattaatttctaagaaggaagtaaggactttgatcaaggaggttaaaaagtaa

SEQ ID NO: 73578 - DNA, 675 bp, synthetic construct
  source 1..675: mol_type = other DNA
atgaattttttcagttggggtaagataaacttcaaaaggatgttcagatatgctgttggtctgtttgtcatgaacatcggaatcgcactatcaatcaaatccaatttaggttctacgcccgttgtggcagtgccttacgcgattagtttaataacttctgtcgatctcggttattgtaacatgatatttcaaggttttctcgttttagtggagctaattcttctgggaagagcatttaaaccgaaacatttcttgcaattttttgtcggcgtaatattcggtatatttacttcgctttccatgtttatattgagttttttgcctcttgctaattcgctaacctttcagattatcttcttaatttcaggcattgttctattggcatttggtttgttcttatatgttccaatgaatgctgtaccagtttccgttgatggtgtaacacaagcattggctattctgactaatcagtcatttgcgaagacaaaaatcatttttgatatatctatgataagcatctcattgattgtattattcacattcaccggccacattaacgggagcgtggggattgtaacgatcattgccgccgtctctattggagccactgtcaagttgattaatattgtttacgctaagatctctggaaacgaagctgacttaaagaaaatgtaa

SEQ ID NO: 73579 - DNA, 651 bp, synthetic construct
  source 1..651: mol_type = other DNA
atgtgggtcaaaagaatattgtcctttgtaatcggtctattaatcatgtcgttcggtgtcgcgttttccattgtgtcactgcttggcacaacgcctataagttctatatcttattcgctggctttaatcaccaatatcgatattggaattacgacattcatattcaacgcggctctaattgttatgcagttactcatcttaaggtcaaaattccataagaagagattgttgcaattgattaactgtgtgttgttcggctactttaccgatgtagcactttactttgttgcatttattccatttgactcaagcttatggatgtctgttttattcttgctcataagtatcttcttgaccgcatttggtatattcatttatatgccggctaatatcgccccccttccaggtgaagggtgtgttgaggccattgcaattgttactggctggcgtttttctactataaaaattggttttgatgcttccatggtcgtgatgagcctaataatgtgcggactgtggtatacagacatgtttggtgcagtttacattgggacaattatcagtgccatcatggttggttttactttaagacaaattaataacatatatgctcacattactggagctcaaattaatgtcgtaaataagtaa

SEQ ID NO: 73580 - DNA, 180 bp, synthetic construct
  source 1..180: mol_type = other DNA
atgtttgaaaataatgacactacaattcaggtcgatctaagaaaaaaaaacagtttaaaggaagagataatgtataagaacatcgatgttcaatcatgtatggtgatgttagtagtaatagctgctttgcttttgtccgttatttctgttgtcgcagcccaaaatccatacattatctaa

SEQ ID NO: 73581 - DNA, 321 bp, synthetic construct
  source 1..321: mol_type = other DNA
atgaaaagaactagaatcgtatctcgtaatttcgaaatggtgcttggtattataggatcaattattgggagtttctctggttcgattctcttatttttgggcaccttttataatgttcctactccatttttaggttttgtagctataatcgcgtccttcctaggcttggcttcaagtgtttacgtcaagaaggatacagaaattgctggtgtgggattcatcatcgcaacgatgtttgttattgtcggatctgagtatattaacataataagcgccattttcttgctggttgccggtgtatccgcattatttaggaaataa

SEQ ID NO: 73582 - DNA, 210 bp, synthetic construct
  source 1..210: mol_type = other DNA
atgaaaaaaatcttccaaaatctaattttgcaacccagatatgaaactaagacaactaacaccataaacattgcaaatatcggtttggctgcgtcttttaagttatttacggtaacatcattcccacttaatttaaaccctattgatcataaagccaaacaggcaaagataaataattaccaagtcgctgacaacaatatgtttgtttaa

SEQ ID NO: 73583 - DNA, 696 bp, synthetic construct
  source 1..696: mol_type = other DNA
atgtacggtataatgattaactggctctacgtaattcttttatttattctaggttttatcacttatcgtagacaatccctggacttgttcggtagcgcagtaatgattatcatgggtattgtgataatattttcagctggtaccaactggttattgttaatcgttctattccttgttttatccttaattgccactaaattttctaaaaagtataaactatctttaggtgaatttgaaggaagaagaacctcgaagaatgtcataagtaatggtgtggtagcttgttttatggctgcatttggaggctattactcgcccttcgttggcggtttcattggagccatcgcgacagccacagcggatacattggcttctgagattggggtcttggaccctcatcctaggttgataaccactctgcagaaggtagatccgggaactaatggtgctgttagtgtgttgggcacggttagtgggatcgtcggttcagctattattggtatagcagcatatttcttaggaataatgccaaacccatttttagcaattttagtttcaattatatctggtactatcggctgctttggggatagcattttgggagctttgttcgaaaacaatgggtggcttacgaatgaacacgtcaatttgctggcaacaatcttcggtgcccttgttggcatcctcctaatttaa

SEQ ID NO: 73584 - DNA, 399 bp, synthetic construct
  source 1..399: mol_type = other DNA
atgagaattacagatgagaaactactcagaatatccttaataactgctttgatcggtataattggattaatcatattcacaccatctatcgaagtcaaaaaaattgacattaaagatattactaggtcaatgattgacgaaaaggtatctgtgcgtggcataattaccgatatcaaagaatcaagttcgaagacgaactactttttgactatcagcgatggtgaatccaggattacgctaattatatttgaaaaacaagtttcagagattacttctagaaatcttgatatcggagatttcaaaaataagaaggttgaagttgtaggtaccataacagagtataagtctgatctggaattaattctttcgagcggggacagtttgcgaatcattaactaa

SEQ ID NO: 73585 - DNA, 4473 bp, synthetic construct
  source 1..4473: mol_type = other DNA
ttgaaaaactcaaaaggcaaagtattaactgggaaaaagattacagtcaactattctggtaaaacgtactcacgtacaaccgattccaaaggttgcgtttcctggaacgtgcaaaaaaagccgggaacatattcggtgaaatttactttcaaggccaagggctatcaaaccagcagtaagaccgcaaaagtaacggtaaaggcaatgccaacatcattgacggtgaacaaccttgctttcacatacggtgacggcaacaataagcttaaagcgacactaaaagacaagaaaagaaaggtcctggtaaacaagactgttgtttttaattttaacggtaaaaactataatcaaaagacaaattcgaagggagttgcgacgctaacaataggagctggcccaaagaaatacactaccacaatttcatttacaaatgcaaattatttgaaaagtaaaaagacagtaactgtaactgtcaatagtattcctaccagtttaactgtaaatgatcttacttgcaattatgatgacagcaacgcatacctgtatgccactctaaaagatactaagaataataaattcctgagtggccaaacaatcacctttaaaatcaatgacaagtcgaaaaatgtagttagtgacagcaatggaaaagccgggattaaaatagaagaaaaatctggtacctataatgtcgatgtttcctttgctaagagcccatacgcgagcatttcgaagaagattaacctaaatgtccagggcgctttaacgccggagatcaacatgcacaatggtttttataacgtctctaatttattagtggatttcactggtgataatgctgagtacattgtctattgtagttttgataacggtgcttcttggtacaaggataatcactccttatcttttaaccttacgacatgcaattggagcataatatattattcttctttcagaggtttcaacagcacaattaaccatgttaattacgtcctagatggggatgttccattggtgtgggcctcccatgggtccggcatttacaataccaattttcaggtcaatttgacaagtgttgacttatttgatgaaaagccaataatatattacaccctggacggtagtgaccctacagtccaaagcactatctactcagaacccattaatgttgtaaaaaacaccaatctcaggttttttgcgatggacacatttaaccatagatccgaaataatttctgtgtactacttcattggaaattgcatagctaacctaaacaatggcaaaacatacaacaccatacaaaatgcgatcaacgatgacaaaacaaaaaaaggagacattattgaagtcaacaaagatatcataattgaaaacgttgttatcaacaaaaacatttacttaatttctaacaatgtgatctggcaatctaacaacaagtccccgataatttacatgaaaaatgtaaataatacctttattgagggtttcacttttaaatccgataatgggtcaggtattgaattgaataatgtttcaaattgtgttattcagaataacaatttctataataaatatggttttagtattcataatgagaataaagataatgataatctaaataatatttgtatccaaggaaataatttttatgataattactacaactatattaatttcgaggttctagaaaattcaaaaattattaataataattttgaatctaacaaaaatgtctctgctataaccatccttaattcaaagtccaacattcttataaacaaccagttcactaatttaaactacggaattttaatcaataagtcctacgatgatgtcttctttggcaacaatttctctataaacaatattgggctttatctgaattgtgtggatagtaaagtaatttccaacacttttataaataatcactatggtatttactctataaacgcttctaatctaagaattaatttcaatcgtatagtagacaattctaaattcggtgtttactgtaagaagggtattgttgatgccaataacaattggtggggtaaaaactatataactaataacgccttaaattcaggcgatataaataataatgagaacattggcataaattgttctgcttatctagtcttgaatgtctatgagacgaattacaagattgataatggaattgtttataacgtctcttatgtggctaacttgagatcaaacaattacggggaaattttcaaccagtatttcattccaaattgtaaaattgtgtataatatgtattgtgaatatttatatgataatggtgttgtgtataggggtgttaacagaataattgacttaatgttatctgaaggtagttctattaaagaatatagactcggttttttaaacaatctaactgttacattggatcatcaaaatatctcattcttccgagaaagttcatttaatgcatatgcaaccattgatatcgtcagttctgctatatttaatggttcaaaccttgatatctctgtgagagttccattggttgataatgtagactggttttcgatcgtatgcagatatgtggggaactttaaatcggagttacttttaatctataacggagaagtgcgcaatacaatagttatcgaatcctccttttataacgaagccaagaatgtgttttccaataacttttggaatgctttggatacctatcactcttgcttttcaggttatagaaacaagcaaatatgcgcatacgcttatttatatttgaatgacccttcgttgaacacaatcgaacttttggataataaactaagtaaaagcaacatccaatttaagttgcaagatgtttacaacctgctagctaataataacattactcttaacgatattttactgaatctcatcaagaacagttacagcttgtctgatttagagatgtcatttatcgattacgccaatggaaatcttttcgatacaatgagtgtttcattgaaatatcctggcaatgacagattatttttcgcatttgaagacacgatcaacaaaactttcgtgtggaggggggactcttcagtgtcgttgtacaacatccactacgtaaacggcggctattttgacttgactgcaccattccctattggcgataacggtgacctcatctatgacaacggcaacatctactccataaactataactgtatttacacatttctgtcttcagattacgattgtttgaagacctatacctttgcaaatagcaaaattaataataacgctctaaattattggttaaaccagaagaaccgaacggatgttaacggggaattatattataacataggttatatgaaagcagcttacggtagtttccttgaaggtttactagtaatctactgtaatgatgttgttgctgacgttagtgccgataagttcaacgtatcctggactcgggtaaaccccatggtcatgtcagtctgcgattcgttggagggttactatctgacgggagagtctgatttcaactttggtcgtgaggtagttggtgatgtaaataacattaagtcattcaactttgcttgttcagcatcattttctatcatcgaaaagtacgttatagacgccctcttccctaatgaaggaaataagtcttcggctatgttttctttgatagattcgttatttaataacggcactcttgaatttatagttgaagggaactatacgttgataagaagcctgaatgtttcgaatgtcgtttttgtctacgatgaaactactggaatcttacgtgattgtattaatggatgctatggagcatattgttatgccagccagcaaactgaatgggggcataacttcggtgaaaactcattgaaattagaggacttaattgttggtattataaatggaattgatacctcgttggacaacatgaataatgattggttaggttttgcaggatgtttggcgattactattggtaccggattgttcctcgtgtctaatcctgttggatggagtatcgcgattggtgcaggtttgttaatcggttccggaatgttggccacatattacgccgatgacctcaataaaggttggaattataataggggtgcacacttcatattcgatgtcggtacttcaatgatccccgcaggtgctccatcatctttgataaagtggaatgttggcagtctgggtaagattgttttatccgatggtcatttggtgaggcatgttacgaaaaattccattaataaaggttttgacaaatatctgatgaatttggctaaatctcatggtggaactattgactacggttctcataagattataagatacggcactatagaatcaatatcaaatactatgtacggtacaactaaaaaagatttcatatactactccatccaatattacattaacaagtatattattggtgacatcgtaattaataaaatctttagcaggtaa

SEQ ID NO: 73586 - DNA, 324 bp, synthetic construct
  source 1..324: mol_type = other DNA
atgtcttttgatacaaaaaggaagaaattgataagacacaccattttaatcaatattatcgtcttcctcataatgttattcctaagtatatttttaaacaatgaagtgtatctacaatcctgtccatttattttgctgatgattggaggttacatatctcgtgaatacactgagttatattttaagtacaaacataaatattcatacttccaggttttttttaaagtttgtcttttctcagtaatcgtttcgattatttgttgcgaagtaatcttgagactttatttcggcagcagtatttttttgtttattctgaacaagtaa

SEQ ID NO: 73587 - DNA, 333 bp, synthetic construct
  source 1..333: mol_type = other DNA
atgtcttttaatgaggaaaggggttgtttaatgaagattaccatttgtatatatttgcttcttctggttatctttactagtttatccatcttattctcgaacaaaatttttttggaattgttgccaataattattctggtgataagtattgaacatgtaagagattacgcttgcatctacgaaaaatactttaaacaaaactatagcttgtttaaactatacctaaatgtctctacgattcctactattctcttcgcaatatgttgcgaggccttattgagagtttatttcaattcatcaataatcttaaagtatctaaagatcttaacataa

SEQ ID NO: 73588 - DNA, 963 bp, synthetic construct
  source 1..963: mol_type = other DNA
atgttttattcgtccatcattattgcatttattatcgtctttatcataactgcagtaagcactgctatcttagacatcatctttaggttttttggcaaaagagggtatctgggtaatctataccccaatgtaagagggggcataccccgtgctataggcataattccattcattgtcttgtccttttatatgattcctgtttgcaacagtatgattttaattataggtgtgtttgcattaattgatgatattttggggcggaagaaatgtgttccactaggcattgagtggggtcaactttcacgcggtattggtatcgttttggtgatgattacaggtattcttgaaggatactggatttctgccattttcattgctttaatggtgcaaccgcttaatatctcagacatgcagccgggcagtgcatgtattgttactatgataatgtctgttataaccatgattttcatgttgattgcaggttcgccaatggtaaacgaactgcctgcggtttacacgcctctgttgatatttgtcgtatgtgcagcttactctcctcttgacttttcaggaaaaataatgttgggtgaagttggaaatcatacattcggtgtagcccttggtttagctttttatctagttggtggcctatggtctgttatcttgctcggtttcataactgtcgctctaattgcctttgttaggagaaataacttaagagtcttcttcagacaaaatttaagaatattaaacccaacatttggggattatttcatggatgtgttgaccggtggaggtttgggagatttattccgtaagttgatcctcaaggataagcgatttgatatcaagaaccctttattgatcagtttaggttttagaaggctgttgttcaatccatatgccagccacgcgaaagaatacgctccaaaaaaaataccaaaactaggaaaaggagtgtaa

SEQ ID NO: 73589 - DNA, 909 bp, synthetic construct
  source 1..909: mol_type = other DNA
atgaaagtaatatgttcaagtgaagagtcgctataccgaccagaagcagtaagatggcggcaaagaatggaaatgatggagcctcttggtgattcggttgttttgttaccgtgcagtatgaaaaaaccttattctaattctaaaagtcatcagaagttcaggaaaattgcacgttcatatcaagaacttattgtgacatccccctttggaatctgtccgagagagctggaaaatacattcccaattcaatcttatgatgtaagtactactggttcatggtcacaagatgaaattgaagagactggcaaattaattgctaaatattgtgaagggaagaacattgttgccaatctgtctggcggttacttggagagctgcgaatcctatgttgatgacttcatcaatgtctgcaaggatggacgcccaacttcccctgattcactctacaatttaagaatggaactcaaaaagcaccagaaaataaacaggaaggaaaaaacattacatgaactaagatccatcgccaagtttcaattcggtgaaaatggcgataagtttatccccgacaatgtcaagaccaagggtatgtatcataaaagaatattgtctgatggtaaacaattagctttactaaacaaggatcatggattgtacagattaaacttgtctggtggggaaattttgaaagaattgaatacacatattgtggagatcgactttgaccttacgacgaataccgtatttgcaccaggaatcattaaagcggaccctaaaatagtgccaaacgatgaggtcatagttgtcaaggacgatgctgtcgttggtgttggaaaagctataatgaccggtcacgaaatggaggaatgtcgtaacggcattagcgttaagctgaagcacagggtgaaataa

SEQ ID NO: 73590 - DNA, 1887 bp, synthetic construct
  source 1..1887: mol_type = other DNA
atgaacgtggatagttttggaaagtacagaaatttcttgttgccattaatggatagtatatctgtcattttaggatattacttgatatctgttttgattactgactctttcttgatggacccaatatcggcaataacaaggaatgagatcttaattagtattatactcgcaataattattttgcagacaatctttcggctgacaaagaggtattcaaatattatccgttacgaaaacaaccaagactacattatgtacattcttctttcaataatatctctgcttatagtctcgttgattgaagatataattggtatgaagaatccatcaataaagttcaacctcacaacaggtatcctaatcgggacgctaaccgttgtttaccgtttagtcatcaggtatgctttactgtcagatattgctaacaaaggcatcaactacacaccagaaaatcaagaaaaagtcttaatcataggtggtgggtattctgccaataatatcattaagactttgcaaacctcattaaaaggaaagtacaacattattggtattgtggatgacaataaaaaaagaattggctattccgtagctggagtaaaaattatcggtaacagaaaggatatcctgaaaatatgtgaaaacgaagaaattgatacgatatttttcaccattgtcaatattgacaataagaataaaaaggaaattttagaaatctgtaataaaacgtcagcaaatgtaaaagttctcccggacctacgagaaatcatatcttcggaaaacttgtatggtagcttgagggatattgaaatcgaagatttgcttggtagagaaccagtcgagcttgataataataacatcaaaagtctaatcaataataaggtggtgctagtaaccggtggcgggggctctattggtgaggaactgtgtagacagataatgattcaccaccctaaacagttattgatgctagacatatatgaaaattccctgtacaacattgagctggaacttaaggataattatccgaacgatgatatcaaggcaattattgccaacattagagataaagaaagaatgtttgaaatatttgaagaatactccccagagatcgtttttcatgcagccgcacacaagcatgtgcccctaatggaaaacaacccaactgaagctattaaaaataatgtatttgggacttataatctcgttaatgcgtgtgacaaatataacacgaaacgcttcattttaatttccacagacaaagctgttaatccgactaatataatgggtgctaccaaaaggttatgcgaaatgatcatacaagccaaagataaagagagcgagactgaatttgtggctgttcgttttggaaatgttctaggtagtaacggctctgttgtacccttgtttaagaaacaaattgcgaatggtggtcctgtcactgtaactcataaagacattaccagattcttcatgaccatacctgaagcggtcgctttggtgttgcaatccatcacatatgccaagggcggagagatatttgtattaaatatgggtgaacccgttaaaatttatgatttagctaagagcttgatcgaattatcaggcttaactcttggtaaggatattgacattacatttacaggtttgagacctggagaaaaattatatgaggaaattttaatggatgaggaaaatcttgagggtacggggcatgaaaagatattcattaccgagcctatgaatttcacaatgagagatgttgaagagaagttggatgcatttagagaaatcataaacaaagaaatcactgataaacaaattattaaggaaactatgaaaaaatgcgttcctacttacaaggagccaaaagaggttaacggagagtaa

SEQ ID NO: 73591 - DNA, 570 bp, synthetic construct
  source 1..570: mol_type = other DNA
atggccagaaagttcattacatattttgataaagaaggtaatgactatactgatgagttgataatggctattaaggataaactggatattaccgatattaaaagagtaataattgcttctgcaagtggtgaatctgcattaaaattatacgaagctataggtgatgaagttgagatcataaacgtgactcatcatgttggattcagtggttccaatgagtcagacatttccaagggcatgattaagaaacttgaaaaggtgggaatcaaaacatattttggaagccatgcattttctggcgcggcaaggggagtcaccaacaaattcggagggtactctccactcgatattgtagctaatacgtttcgaatgttctcacatgggatcaaagttggcgtcgaaatatcgatcatggccacagacgcgggtttgattcctgctggtgaagaaataatcgccgttggtggtcgtggccacggtgttgacagcgctgtcatcctaactccagtaaattcaaaagatttgtttgatttaaagattcacgagattatagcaatgcccagagactaa

SEQ ID NO: 73592 - DNA, 180 bp, synthetic construct
  source 1..180: mol_type = other DNA
atgaatgtgcaagagaatttcaacaagtttataaaggacagtaagagagtattaaaagtagctaaaaaaccagatggtgccgaatatagggaattggctaaaatttcagttcttggtgtggcagtcattggtgtcgttggatttgttatagttctactgggctctttgatcgggttataa

SEQ ID NO: 73593 - DNA, 3057 bp, synthetic construct
  source 1..3057: mol_type = other DNA
atgaaactaaagaacaagattttagttttgctattgtttttagtgcttatttgctgccttggggcagtctcggccgctgaagatattaatgagaccataaccgcggattcttcaatagatgacgtgaacactgtgtctgttgaggatgcagttgacgaaaccgtatctgatgactcagacagcgacaagggaatagttgagaatcaagatgttgaaaaaacaaccatgttaactgataggggcgttaatgttaatgcagcaacatggtccaagttgtcacaatatgctggagttattggcactgattatattataactttaactggggactcctacgctactgattcccaaatcaagttcaacaacggtgctacaattatcggttctccaaataactacataactactggctcgtatactaaaacgccatttcttaatacaaattctgctctcaccataaccttcataaatgtcacctttaagaacatgaatgtcgattatcttttaagcttagcaggaacaaatgttttggaaaattgtaatttttataacattaccgcgggaaccggtcataacgccgtaatctataacacagatggaacaatgaacttaactaactgtaacgttatcaattcatctgccggttatggtgtcgtcagcaattataaatcggggacttatacaggggttgttatgaatgtaaatcattgtacattcatcaataactctgctagtgtagaacctggtgcgattaataactgcggtatcttaaatgttgacaattcagaatttattaataataccgcgacttggtgggccggcgccatccacactcattacaatgcccaaactataatcaacaactccctgtttgaagggaatgtcgcaggctggaatggtggcgcattatatacctactccacattaaaggtatataactccattttcaaaagaaataaatgtcacacaaatattggcggtggagctataggtgcttcaagatggtggagtggaaactacgatattacaatagtgaactgtacgtttgaagagaacgaaaactgcaacactaacggaaatggtggtgcaattacggccttgaacagtggggcattgaacgtgcatgactcaactttcatagccaatgttgcaaaaaatggtcaagcaatatcggctttctcgcaagcatttgaaaatattactgccggtattccaaacctaaaagtatacaataatacgttctacaaccacactttgacgacatccgataccgttgaaatatccggcaactacacatttgaaaacaacacatttatcaactgttaccagactaatttggggaccaataacgtatttattaatcctgtaacacttaataacaataatttgattcttaaatcaaataaagagcatttgttgatgagtaatttatctgaaaatattctaaaaaatgctcccaacgtaatatatgtagattctaattctgacaaggactgcgatgaagatccaaatattgatggtcacaattgggaaacggcgtatggaggaatttttgctctgtcaagtgcaatattcaacatctgtgatggtggaaaaatctatctggcagatggtgaatattcctatagaacaaacggtgccattactcacccgaaaaacctgaccataattggtcaaggagcaaatactatcgtggacctgatctcatgtggagaagaaacgacttatacatgtatcttcattaatttaacagtctctggtaaggactacggtaggaacaccaattttattaactgtacatttattaagccaatttcaatatctgctgacataaatctaaactccgttttaaaggaacatgctgtggaaaatggatacgcaaatacatatttgatcaatttcgataactgtgtgtttaaagatgttgttgacgacagaataatcacgttatttgaatatggtgccttgaatttcactgattgcgtttttgagaacattactgctgattcaattgtttatcgtaatagtactggctattttgaggatgactctatttcattccgcaattgcactttcagtaattgtaagttcaatggtgtagtcgactctaagactaatttcgatgatgcgattgtcatcgaggattgtacttatgacggtgatgttgctttgggtactactgaggttgatggtcatttttacgtaaatgctactaaacttaaggtcgtggcggttgctaccaacatgagcatttcttcttctcaacgaggggtcgtagtgattacgctgagagatgctgagggtaatgctgttagtggcgttaacgtgagttacactgttaatggtgtgaacatgtcgggcgttagtgatgcaaatggcaccatcactatttctgacttgacggatgaagtcactgttagtgccaatttcacgggttcggaatcttatttagcttccaacaacaccgctagctttaatttcacaattcccaaagtctcaactaaactctatgtttctagtgtgacgacattttacaatgcaggtaagtatttgactgctaccttaaaggattccaatggtgaagttttggccaatcagaaagtgacaattaagatcaatggtaaaacatataataaaataactaatgctaaaggtcaggctacgttaaaaataagcacgctgttgcctaaaaaatatactgctacggtaaattacgctggggatgatacacatattaaatcgtcagctaatgctaaagtaattgtgaaaaaagcaactcttaaactaacagccaaagccaaaacatttaaaaaatcactaaaaaccaaaaagtacacaataaccctcaagaacaatgtaggtaaggtcatgaaaaagaccaaggtcacattaaagatcaaaggaaaaacatacaaagcatacaccaacagcaagggcatagccacatttaagatcacaaaactaacgaaaaaaggcaaatacaacgcgtacattaagtttgcaggaagcaagtactacaacagcctcaacaagaaggtcaagatcaccctaaagtaa

SEQ ID NO: 73594 - DNA, 1110 bp, synthetic construct
  source 1..1110: mol_type = other DNA
atgtcatttttaaagttcattctgaaaaatccattccgaagaaaaaatagtgcaatattggctattgttggtattgccataggtattgtcgttattgtttctctcggtggcattactgacggtttgatcaatacttttgaagataccatacatgctggtggtgctgactttagcattagtggaaaggaaactggaaactcggcctatggaacgaacacaattgattctagttggaccgaaaaaatagccaaggtacctggtgttgatgaggcttacccaatttatgttgtgctaacgtcggtgggcgatgattacatgaatactttgatcggtatcgatcctgaaggtagtgaactggcagacatatcaatgaaagaaggtaggatatttgaagacaacacctctgaggtcattttaggcgaaatctacgcagaagataataattattctgtgggagacagtatcataattaacggtgaggactttaaagtttccggtatctatgaaactggcgatcaaaacatggctggaggggttttcaccagcatctctaaaatcggagagttaatggatgataaagactcaattagcaacatttacgttaaagtaaacaagggggaagatgcgcaggctgttgctgatagaattgatactaaatatggggataatatcacaaccgtcacatccgtgatggagatgacgcaaatggctgacatgttgaatatgcttcaagcatccacttgggcgatttcgctattggctatagtagtgggtggtcttggcattatcaatacaatgttaatgtctgtatttgagagaactcgtgaaattggtgttctaaaggctgtgggttggtctaataaaaagatccttacaatgattgtcggtgaatcattggtaattacaatagtctcagccattatcgggtccttaattggctttttagcatgtactctgctcggtccccaaatgggaataaatccattgttcacgccgaagatcttcatacaggccttttcaatagcgattattgttggcgttgtcggagggttataccctgcaataaaagcagtaaagctaccacccacagaagccttgaggtatgaataa

SEQ ID NO: 73595 - DNA, 699 bp, synthetic construct
  source 1..699: mol_type = other DNA
atgaatgctgtggaaataaaggagttatataaaagttacgagggcggaaaaataaaagcgttaaatgggattaatctcacgattaaacagggagaatttgtatcgattatcggtccgtcaggttctggcaagtcaaccttgctaaacatgctgggcgcattagacattcctgattcaggaaccatcaatgtcaacgggcacgacttgaaaacatccaagaagttgaatgaatttagatccaagaagatcggtttcatcttccagctacataatttaattcccaacatttctgttgtggaaaatgttgaaatcccaatgtatactcaaaagttatcttcgaaagagatgcgatttagggcattaaagctattggacgatgtcggtcttagtgaaaaatccaaaattttgcctaacaaattgtctggtggtgaaagacaaagagtcgctattgctcgtgccctggccaacaatccatccataatcctagcagatgaaccaacaggatcacttgattctaagacaagcagcaaaatccttaaacaattaattgatttgcatgaggacaaaaatgtgactttgataattgtaactcatgacatggatgtagctaaactggctgatagggttattgaagttttagatggtgaaataatatctgccggtgatgattcactcataaacagtaagattgacgtttaa

SEQ ID NO: 73596 - DNA, 570 bp, synthetic construct
  source 1..570: mol_type = other DNA
atgctacaaagtttaagaccattgttaacaagaatcttgaaccctatagctaagagattgaacattaatcccaacattgtgaccatcatctcaccatttgttgctctacttgccgcttatggttttgctaataagttgttaattttgggtacaatagcaattctgctctcgggctttttagatgtcgtagatggtgctgtcgccagatatcacgagaaatcctccaaattcggtgcttttcttgattcaactatggatcgctttgcagatgcaataatctatatcgggataatattcgggggctactgtgattggcttgtgggaatcctggcaatccattctgcaatatgtgttagctatgtacgtgcaagagccgaatctcaggaagttgactgcaatattggcattgcggaacgtgctgttcgaatgattattctaatgattggtgcgataattggatatttcgccggtgacatttactttacgtacattatttatattttagtaatcttatcttacttcactgttggacaaaggatattgcatgtctggaggcaactgaatgactaa

SEQ ID NO: 73597 - DNA, 1779 bp, synthetic construct
  source 1..1779: mol_type = other DNA
atgacgcgtatttcaattttggacaaggataggtgtcaacctaaaaaatgcgattatttgtgtattaattattgtccaggtgttagaatggacgaggacaccataataattgatgaagatacaaaaaaaccgttgatatctgaagaattatgtgaaggatgcggtatttgtacaaaccgctgcccttttgatgctatcacaattatcaacttacccgaggctgtcggcgagcccatccacaggtttggtcaaaatcaattcgagttatttggcttgccaactttagaagagggcacagtattaggtctactcggtcagaacggtattggtaaatccacaatcatgaatattttatctggtaatctgattcctaatttcggcgacttcgagaacaagcctgaaaactgggatgaggtaatcgaattttacaagggaagctctcttcagaagtacttccgggatttatccgagggcaatataaagaccatcctaaagccacaaatggttgatcaactcccaaaggtggtgaaaggtaaagtgaaagatttgctaacaaatgttaatgaacgagacaaactggattacgttacgcaagaattgcaacttgaaaatgtattggaaagaaaaatggaaaacttaagtggtggggaactacaaagagtggcaatagccgctactgttttgagagaaggggatttttattatttcgatgagcctacttcatggctggatgtatctcaaagattgaatgcagtgaaggtaattcgttcactggcggatgaaggcaaaagtgtccttgtcattgaacatgacctcgctactttagatgcattgtctgataacataaatatcctatatggtcagcctgggggctatggagttgtctctggaagaaaaggtgtccgtttgggcataaacgcctatattaatggatttttgaatgaagaaaacgtaagaattaggaagaatcctattgaatttaccataaggccaccaactccagaagacgagggtgatgttttggccagctactctgacctaaaaaaggagtatgatggattcagattatcggccgatgctggtgaaatattttacgacgaaattataactgccttcggttcaaacggtattggtaaaaccacttttgctaagatgcttgcaggagttgaagaaccaaccaacggtgaaattgatgaagaggttaccatagcatacaagccgcaatacattgtttctaactttgaaggtactgttagtgacttcctatacatgaatgctccatcgttcggttcaaaaatcttcgatagcgagataatgaagccgttaactttggatgagatgttagacaaacccgttaatggcttgagtggaggggaacttcaaagattagctattgctgcaacgctatcgaaagatgcggaaatttatctttttgatgaaccaacagcctttttagatgttgaacagagattgatagctgcgagggttatccgcaaaatggtggaaagtagaaatgccgcttcactgatcgtggaccatgatatcgtatttatcgactacatttcagatagggcaatggtcttcaacggaactcccggtttgaacggtcatgcatccaaaccaacggacctgagaaatgcaatgaacgaatttttaggaaatcttaatattacatttaggagagataaagaaacaaagcgacctagagtcaataaacttgactcctataaggaccgtgaacagaaagagaagggggaatattattacttatccgattaa

SEQ ID NO: 73598 - DNA, 663 bp, synthetic construct
  source 1..663: mol_type = other DNA
atgagcataaaacaggttgtcaaaattgggggaagtttgtttccagattatgcaatagacttagcaagacatctcaaaaatactgattcccttattattttgggaggtggtgaatttgcgaaccttattcgtaaatacgactcagaaattaacttttctcaaaagactagtcattggacggctattgactgtatggacataattgctaagcttgtaaatgataaggttgaatcaacaaaattggcctattcaattgatgaagttcaaaagatttctgacgagggcttcacgccgatcttcgtcgtttccggctttctaagatgcgaagacccctttgaatgttcgtggaacgtgacttctgattccatcgcagcttatatctcgcacctgctgaacgccaacttgttaatcgtcaccaatgtaaatggtatatacacccatgaacctaaagagagcggatctacattcataagtaaaattgatgctaaaaccttactaaattttcaggagtcatcaattgatgtaatgttgccatctttattgttaaagttcggtactgattgttatgttgtgaatggtaagtaccctgaaagggtgctatctttaatagacgataatatcaatgattataacttcgattacacacaaataatcggtgattaa

SEQ ID NO: 73599 - DNA, 270 bp, synthetic construct
  source 1..270: mol_type = other DNA
atgggggaggttcttacgacaatgaaaatcatgcctgacagtccggatatagacctagatgctattaagtctaccatcgaaaattcaatgccagaaagcgcaaaattacatgatatggccgaagagccaatcgcgtttggtttggtggcaattatattacagttcattactgacgatggtgaaggtggatcggagcccgttgaagatatggttcaatctatagaaggcgtagcttccattgaaattactggtgtcggaagattgatgtaa

SEQ ID NO: 73600 - DNA, 729 bp, synthetic construct
  source 1..729: mol_type = other DNA
atgggtaatattatggatagaaccaaaaagatcatcattgcactcataattattgttttgattatattggtaggaattatcgctagtgtctggttcattggtcatgatgttgatttagatgagggtagcaaaacaatattggtatgtgcgattgacgaaagcgaggatcgtccaggtatgggcgcttgcgacatggcattcctggttcatttggaaaacggagctatcaaaaattatactcctgtctatccgggcggtatgacacacccaacggctcaggagcccgctgaagctcaaagtcagggtgccggctcagatttattacttcatgatgccttttgggacgtggataattcgaaaggaatgaatcttgcaaaggaaatagttgaatacagaaccggttcctcagttgactccgttgtagctattaatactaaagcactagacgctattctgtctgccgccgctcctttggaagtgaatggtaagataattaacggaagtgggattgacttcatcagagaagacggatcgaatggtgtgtcaaggggtgatgccgtcatggaaatagtcaaagcgacagccaactctgcaaaagatccagtaaagaagtctgcgatgataaacgctgcagtggatcaatactctaagggcaacatcattatggatcaacaagggtcctttgttgatctattagcatcaaaagggatcgagactttttttaattaa

SEQ ID NO: 73601 - DNA, 915 bp, synthetic construct
  source 1..915: mol_type = other DNA
gtgattaatattatagaagagtttttcatagcaatcggaggcatttctcttttcctcattgatttttttaaaaatttttccttaaaggaaattgaaattgaaaagacgaaggacattaaccagaatatcgctcaaaagttaaatttgcaaaaagacataaaattgcaaaacaacgaaaaggattcaattgataaaattaggaggttgataatcccctatctgacaaataaaaaaataattggactgctcggattactttttctactaataaatttgtttatatctttagagatatctggtatttatattgtattggttttaatgacctacatatttgtattctactatcctcagatccaacagcaacgtaattactccgatataaaccaggaactgccgtatgcactgagacatatcggtattgaattgaagtccggcaaagggcttcatgacacactgcgcaccattaaaaatgccgattatggctctattagccaagagtttaatagaattttagaagagatcaaatttggtaagtcgacggaagaatctttgcttgaaatgtctaccagagttaaatcagaaggtcttactagagccatacaccaaattatcagtactttacgagttggtggtaacttatccaacagtctagatatcatcgctaaagatatctcgttcgacatgcaaattaaattgaaggagtactctcaaaagctaaactcatttatcttaatttacacattcatcgctatcttaactccagtcattagtttgataatgttaatggcgagcagcactgtcatgggtgatatattgtcatcgagtttgttgtttatactatatggagttttcttcccatcaattgtagttttcatgggggtgtttattaaaaagctagaacctaaaatttaa

SEQ ID NO: 73602 - DNA, 1419 bp, synthetic construct
  source 1..1419: mol_type = other DNA
atgaacaataatggaataataccgcaatatgacatcattaaacaagaatatacatctgaagaaaagatattgcttggggaaatcagggaaaacttagttgacttagccatatcaactggtgagaatttccaggtaaatgaaacgaagttaataaataacataaagaactttttattcgaacgtctaaatgacaaccagcaaaacaataacggcaccaacgaatatctggataacttgtctcggaagttgctcagagatattgttggttacggtgaaatcgatccactaattcaagatgatgaattggaagaaattatgattatcggcatcaataagccagtatttgtttatcacaggaaatacggaatgatgaaaaccaacatcacgtttaatgacgagcaagaattgatcgatttaatagatgcaatcgcaagacaaattaaccgacgaattgatcaagaatctccaattttagatggtagattaattgacggttcaagaattaacgccacaatacctccaatctcagctgacggcccatcacttactatacgtaaattcaagaaagatcctcttacaataatcgatttgattaaatcaaaaacaatctctgttgagcttgctgcatttttttggctgtgtttcgacggattgggaattaaatccgctaatgctataatatcgggcgggaccagctccgggaaaacaacgactctcaacgctctgagtgccttcatcaatcccaaagaaagaataattactattgaagatacattagagcttcaaatacctcatgaacatgttatcagaatggaaacaagaccatcgaacgttgaaaataaaggcgagttgactatgaatgatttagttaaaaattccttaaggcaacgcccagataggattatagttggtgaggtcagagctgaggaggcaattactctatttactgcgctgaatactggtcactcaggttttggaaccctacattcgaatgatgcgcgcgaaaccattaccagattgactaatgaaccgatgtctgtacccaagattatgattcaagccattgacttcatcatcatgcagaataggatttacacgtcctctggtgtatcttttagaagaattagtgaagtggctgaggtcgtcggtattgaagaaggtgtcgtgcagttaaataaaatctttcagtggaaccctgaaaccgatacaattgataatgtgagtataagcagtaaaacaatatcccaaattgcaaatctaagtggtaagagcctgaatgaattgtatcacgaaattgagaaaagagagttggttttgaagcatatggtgaactacaatattcgttctgtcgatgacgtaactgcaattatcgagctatactataagaatcctgaaaaggtgttaaataacattatttaa

SEQ ID NO: 73603 - DNA, 1254 bp, synthetic construct
  source 1..1254: mol_type = other DNA
atgattgaaatagtgattgcttgcttcataggcatcctaattggaacgacaacaggtttgataccaggaatccacgtcaacactgctggtgcaatcttatttgcaagctccggcttgttactgacacaattctcaccggaatttctatgtgtattgatggtctcgatgtctgttgcccatgcattgatcgaatttatcccatccatgttgttaggggtcccacaagaagggaccgccacgtcaatacttcctggtcacagaatggttttggagggcaggagtaaagaagtaatacgaatagtggctgtgggaggttttggagcgataatagttacaattttaatgcttccaattttttcgatcatcttgcccatcctacatgatattttgaagccatacacctggattattcttcttgccgcttcgttgtatctcacgtacagattgacagtgaacttcagggatttcttatggtcactacttctgttcatcttatcaggtattttgggttggaccttatttcagagccccataacttccggtgttaccctgatgtgcacattctcaggtttgtttggaataagtactattttgttcagtttaaacgactcttctacgatgcctcaccaaaatccattctacgagctgaacattgattatgataagctgaagagcatttttacaggtggcataaccggtgccattttgggttttctgccagggtttggacctgctcagggtactgtaatagctcaagcagtaagtggtactaacgataatcgtaatgacgatactgtgaatttcttacttgctacatccggcctgaatattagtgactgtttgttttctctcatagcaatatatattatcggcaatcctagaagtggaattgcagtttacatgtcttatttaatttcagaaatgaatattaaccatttaataatcttcatttttgcgtcattgcttgcagtttctgtttctctcatattggccctaaaattaggagattcattttctagactaatgggtattgtaaattataaaaaattatccatatccgtcattctccttcaaattatcatcttatacatcttcattttttattataaatcgcctacttgttacatgaccctagcgttgattactagcactgctttaggcatgttaccccattatattggtgttgggaagtctcatttaatgggtgttctaatcattccggctattgtcatttacatgaaaatgtttatctaa

SEQ ID NO: 73604 - DNA, 498 bp, synthetic construct
  source 1..498: mol_type = other DNA
atgaataaaaaggaaattataattattttgatatttattggtttctgtttcgtatttgcaggaccggtatttgccaaggaaaaggttaaagtaaatgtttctattgacgatcaccccctaaacaataaaggtttcatcgtgatcaaacttgtcgatagtagagggaaagatattgaatccaacggaacaattcattataagattacagatgagtttggtaactacaagtgggcttataaatcatatgatggtgaaatcaggctgaaatacacggcgggtatttataaggtcgatgtgaagttcgatggtgattttcattataattcggctataaaaaataaaagcgttatagttaagactgagaaatttaatccatacacttactatgacaaccataattggggcttaaaccaagaaatcgatgactatatcgaatacaattactgggacgaagacatatacgatgaccctaccaactatgatggcgagggaccataa

SEQ ID NO: 73605 - DNA, 2019 bp, synthetic construct
  source 1..2019: mol_type = other DNA
atgaaaaaattgattgtaggattagccggcaacccgaatgtgggtaaaactaccgtatttaatcagttgactggtatgagacaacacgtcggcaactggccgggtaaaacggtcgaaagggcagagggccacttcacccacggaaattacgagtacgatgttgttgacttaccgggcaactatgctttatcggctcattctatggaagaaatagtgtccagagattttatagtcgacgatgattctgatgtcatcgtgaatgtagttgatgcagctaatctcgaacgtaatttgtatctgacagttcaaatgatggagctgggtgccaatttagtattggctcttaacatgaacgacttcgcaaagaaaaaggaccatataattgatattgatctgatgagtgaactattaggtttctctgttgtggaaataaatgcaaagaataaggacggttttgatgttttgctgtctgctgttgaaaaggcggcttcaaagcccaaaaataccagtgctaaattatcatacggtgatgagttaaaagagcatttgggggatctccaagaactaattgaaagagacaataagttgttggatgttccatctatttggacggcaatcaaattattggagaaggattcaattgtaattcaaaaggtacaacagtcgtccataagttcgcagatcatggccgaaactgacaaggtggccgggcatctccatactatttataaagaaggggctgaagaggttgtcgctaacgctagatatgcatttattgacggtttaatggcggaggctgttaaaagacctgctgttgaaaaggaaacaattacggataaaattgacaaaatcgtcacaaacaggatattagcgccttttatatttattatccttatgtgggccatgttccaactaacatttacagtcggagctcctttccaggacatgattgatcaagcctttggtatgttgagcgaatgggtcgctacattcctaggtgatggattattatcttcatttgtctgcgatggtattataggtggggttgggggtgttctaacgttcttgcccattattattctaatgtttttgtttttaagcatcctagaagattgtggttatctagccagggcagcatttactttagataagataatgcataagatagttgggcttcacggcaaggcgtttattcctatgattctgggatttggttgtggtgtgcctgctatcatggcaacaagaacaatggaaaatgaaggggatcgtatgcttgctatgatgctcgttccatttatgtcttgtactgccagattgcccatctacgctatttttgttgccgccttctttgctgacaacggaggtaatgtcttacttgcaatctacttactcggcatagttgtagcgctaatagttgccgcaatccttaaacgaaccatgtttaaaggcctatccactccttttgttatggagttgccaacttacaaagtgccatccctaaaaggtgtattgttgcatacatgggaaaaagtaaagggattcttacgcaaagccggtacgatcatccttgcttgctccatcgtgctgtggattctgcaaaatatattcccatatggcggaagcgatcctcaaatgagtcttcttggtatgatcggcactgctatagctccaatatttgcgccattgggatttggtacatggcaagcagctgtagcaattattgctggtttggctgccaaggaagtcgtggttgcaacattcggtactcttgcgggtatggaggaagatgatgaagaaggaattactaacttaatacatgacactttcaccccattgtctgcattttcattcatggcatttacattgttgtatactccatgttttgcagctatcggcgccattaaacaggaaaccaacagttataaatgggcactgactatgtgcgctattaccttagtaaccgccttcattgtgtcattcttaatttacaatatcggtttattggcaggattcggataa

SEQ ID NO: 73606 - DNA, 843 bp, synthetic construct
  source 1..843: mol_type = other DNA
atggaaaagattcatttggagacaaagaatttatcttttacttaccctgacggtactaaagctctgaagaatgtgaacattcagattaagaagggggagaagattgcgattatgggaccaaatggtgccggcaaatcgaccctcttttcccatttcaacggtttaacggaacctacctctggtcatgtcgaaattgatggtgaaaagataatctttaatcgtgaggagctactgaaagtaagacaaaaggtagggatcgtctttcaagatcccaacgaccaactgttcgctccaactgtgaaagaagatgttgctttcggacctatgaatttagggcttgattatgatgaagttaaaaacagaatcgccgaaagtttgaagatggttggtatgagtggttttgaagataaaacaccacaccatctaagcggaggccaacaaaaaagaatagctattgcaggcatcgttgcgatgaaacccgaaattatgatcttagatgaaccaacagcaggtcttgatccagaaggtgttgacaaagttttgaatatcttgaataaccttaacaatgaaggaatgtctattgtaatctcatcacatgacattgagatggtaaatcatttcgcagataaaatattcattttgtacaacggtgagataatagccaaaggcaacaagcaccagatattttccaataaagagttattaaagaaagctcacctaaaagcaccgacaaccacggagattttatataaattgaaagaaaacggactcgacgtcaatactgaaaaaataactgttgatgaaacagtggaagaaatcttgaatatagaaaggattaagtaa

SEQ ID NO: 73607 - DNA, 831 bp, synthetic construct
  source 1..831: mol_type = other DNA
atggttgacataacacagataatgaggtttgatgaattgtcgtcacaaaacagccctattcataatctagagggacgtattaaattaataaccactatttttattatcttagttagcgtcatttccaaagaactttttatcccaataatattggaaataatcttgttaaacatattaaagattgcagacttatcctatattaattctgcgaagagactcttgatgttgctgccttttggcggagctataattgtattccaaccatttattcaaccagggaatataatctggtcctattcttggttgcatattactgattttggtcttaattgggcaattttgctactggttaggatgattgtctgtttaactgctataatcatctattcatcaacaacccccctacaagaaatggcaagttcattcagaaaactaaagatgccgagagatctcgccatgattctttctatcatggtcagatttttatttttgttcgttgatgagcttgccgctatccgaaaaagtcaaaaatctagaaacttcaacatccactctaagaatacaacgtacaagtggagagtaaaacaagtgggttacacgataggtatgatgtttttaaaatcatacgaacaaggtgagcgcgttcataaaagtatggtgtcccgtggattttcggatacttcagaaatgtttgacgaaaagaaatctcctgaaaagagcgattatatattcattatctcgattattattgtagtgattatcctggagattatcatgttcaaatatagtggtcagttgggttacttcggccagaatttatctattaactaa

SEQ ID NO: 73608 - DNA, 306 bp, synthetic construct
  source 1..306: mol_type = other DNA
atggataaaaaggatatgtcactgatcattgttgcagtagtcatatgcattgttatctcgtgtctttcaccatacattgcttctggcgatccagacggtttggaaaagtctgctgaagatgcgtccgtccctgaagactttcaaattgagccaataaatggtatccccgacgctatcttccctgattatgcatttgcaagcgccccggataatcagggattacaaattgtggccctaataataggtgctattttgactctcggtgtagggtatggagttgccacaattttaaaaagtagaaactaa

SEQ ID NO: 73609 - DNA, 639 bp, synthetic construct
  source 1..639: mol_type = other DNA
ttgcatatacctgatggttttatacctattgcacaatgtcttgtatactatgtcattttgatagtggcactatacttttctgtgaagtgggccaaaagcaacttagatgaaaaaaggataccgctcttggcagtccttgcggccggtatctttgcaatcatgtccatgaacatgccaatcccctttggtactagtggtcacatggttggcggtgctttagtagcaattgtattcctggcacctgaagctgctgttctagtcttcacagttgttttactgatccaggcgttgattttcggcgacggtggaattacagctctgggggcaaatgtattgaatatggctattgttggaggttttgtaggtttatatacctttaaaaccctaaatggaaagataggcaagtatcccgcagccgggattgctgcatggctagctacggtcttggctgccttagcctgcgctattgaaatgggcattgctggtacattcccagtgaatgttggtatcccatctatggttttgtaccatttctttattggaataattgaggctatattaactgtgatcgttcttgtcgccttggataaatttagaccagacttactctcatggaacaaaactgaaggatcggcgtaa

SEQ ID NO: 73610 - DNA, 1275 bp, synthetic construct
  source 1..1275: mol_type = other DNA
atgagcattatttattccaagatcacttcagtgataaacaagataagtgatgaaattcatagatctttcttgtttacgacaatcttttctattttaagattcattgaactccaatggatcaatagctattttaaggagttgtatcccaatgaaaaatttctgaattttttaaacaacagtatcttaaaaaaaaatttgtttaatccattaatcgtccttctactattttctttctttttgattttatcgataaagtccccatctaagtctctggttattacattgattgtcggttttatcgcatttttcataggctctaccatattaccaaagtacttcttaaacaacaatatcagaattattgaatttaataaaaaggatatatactcaattggtttttgtctgatattagttagtatcatcttctttggaatatgtattgcttctgtcggtggcatccctcttttaaaaccaagcattcgttacctactaaaacctatatttactatgcctgtgttcttaataataccaggtacctgcttagtggccagtgcttatttaaaagatttccaaatgaaaaatattacacgttcacaagcacgcttcaggttcatatttttgcttgctatagacactgccttacttttactcctaggttatagaactccgctagtggctgcatttctcatcataattataatcggtttctatggcaatatcatttcactttgggaagttattataagcggattgattggtataggtgctattataggtatcggttatttcaggtcgctttctgagatgacgatcacctcatcgaccaatccattttacactttgcaatcacgagcggatttcactttacatgttttgaacttgcttgattttgtaggaggcaatgcaggactgacacacgggcatttgttgaccagttccattccggggtctgatttgggacctagaatgctaattgggaaaattattgcgtggagaacagaagtcacagttacccccacgctaattggacagatggtagtagactttggtaagataggtgtagctgttgagatgtgtattttgggcttcattttgggtattggattcaaaatcatgcagaaaactaaaaactatttttacattgccatttactcattgattctgacttattccattttaggcatcgaaactggtattttggacatacaagttctgttttacttcgcaacagccatctttatttatcttattaacatcaagaaatcccagcaataa

SEQ ID NO: 73611 - DNA, 774 bp, synthetic construct
  source 1..774: mol_type = other DNA
atgaaaataaaatttactttaattgattacttaattatcattttggtcgtatgtgccatttcatttgcattcatccacatcacaacagataactcgtctgaagtgcaaaagaccgtgttcgatgcatctacgatcaataagattccagatacttattttaactattatagagatgggtacattgtaggaactactgtcgatggttttaatgctagcactggcgaaaagataacactaaatggcactataaagtggattggaaacaacggtggaacagacgttaagattttagttgaatccgacaataccacttatctggttggtctatataaaagtattcccgaagcggatatttacatcgataaaatttcactggagactaatggcagtacctacccaaatttagtagaaattaaagcaagtccggaaaatatctcaacaatcaatgatttgaataaaaatttatcaaactcggacttcgaaatatctacgataatctctcttgactccttggacttggttaaaatccaagagatagctaacaaaataaattctcatgataaaaggatggctattaagactcctagttcaggtttggggaatagcctgatattggaaaacgctaataaacagacacttgacgatgccaattctgttctaggtaatattaacggtctcaccgatgagcttacgattagaatatacaactgctccgactcccaattagagcaggtcaagaacagctataatattaccaacatacgtacattttaa

SEQ ID NO: 73612 - DNA, 900 bp, synthetic construct
  source 1..900: mol_type = other DNA
atgaactacaagaagcttgtcctggttggttgtattagtgcatttgttgctattctgacttcagttatgggtgttgcaggtaccattatcggttcagttatatcttctgttctttataacatgctaacagaggtcttggaaaatcccatcggcaaaaagaccttcagcccttcctttgaatgggaaatcgcatatgtatttccacttatcgtaatagctataattcagttcatcttaatttcagctttattatcggaagttggtattctaccttatacttttgtcaatgtttacttatcaatacaggaaatcgccaacaataatctatacagaattttaggattggcattgctcgtgatgagtgtgtatccgtttgtcttaaaaaggggcattgttaaaaaatcaaacggaacggtgattgcatttgtcggtctaatctttctggcccgtgggttcgtggatttgggaaacaggattacagagatttatcatgccgtattcgtctattttgatttgccaatagctatcattgcttttgtcttgttagtattcgtgataattaacatactcatatcagcgaaatctgtggaaaatgagttcaaggtaattagccacagtactaacgaagaaaatttttcctctccaaatgttcgaagagttcatcactccagaaaacacaatgatttcaactatgctgaacgcgacatatctagacaaaattaccaaaatatgaataaacataagcatggtgacaacgttcatgaagtaaagtttaaaaaagtagttaaacaagagtctgatagaagcaagagttcgaatagtaatcaagaagcggggatcaatgagtcttcgggcaacattcaattcgaatccaatgatttgttggatgactacaagtaa

SEQ ID NO: 73613 - DNA, 501 bp, synthetic construct
  source 1..501: mol_type = other DNA
gtggaaagtattttggtaaatagcgacttatgcgatggatgtatgaattgtgagaacatgtgcgcatcagtccacaatgccagtaggataaaaattattgagcatgattcttcattttattccattgtatgtcaacattgtgaaaatgctccatgtataaagatctgcccaaccgaagcagtcactgaggagggtgtggatacagaaaaatgtataggctgtggtttgtgtgttatgatttgcccgtttggtgcgatgacattccagtccaaagttgctgaaaaatgcgacttatgtgctgaccgtgaagaagggcctgcgtgtattaagtcatgcactaaaagagctatttctatcgccgatcctgaaaagatccgatctaaaaaccaacaaaaatacctagctaagatggccggcatctatgaacccgattcgaaaaagggtggattcgttcatgtcataacgggtcaggcaagagcaagacttgtttttgatgaataa

SEQ ID NO: 73614 - DNA, 1605 bp, synthetic construct
  source 1..1605: mol_type = other DNA
atgaaggtcctgattatcacaggtgagttggcctaccccttaataaaagaggtcgttagtaattcaaaagaggacataattgtacacattgccgacaacactcaagttgcagcctttttaacccctaaacaaataattaaggaagtaaagacttgtttttcaaaccaattagatgaaattgatatgatcttagtcccaggtttgatcaaaaaaggaacaaaagaaataactaaagaacttggcatcccgaccttcaagggatcaactgatggggcggatcttgcaatggtgctaaatttagtgggtactattgaattgtctgaagataagcctgccgacaagttgattgatgaagaaaagagaaaaaaagcttttaaattcattgacgaatttgaaaatgacaaagaaaatatcgaaaaacttctaaaaaagccaaataatatcttaatcaagaaccttccagtcggcgaggattttccaatgcgtgtattgtctgagattgctaacgccccctttttatcaaaggaagcattgattaataaatgccagtactttgttgactcaggagccgatatgattgacatagggatggctgccggtgaagacttctccgataaaattcctgagttgattgataccctgcgccctattgtgggtggtcgaccactaagtattgacacattaaacacgaacgagataaaggtggcagctgaaaatggtatcgacctggttttatcgcttgatttgggcaataactctgaagttaaagaaatactaaaagagaaaaacattcctgctgttttactgccaacaaacttttcccaaggtaagtctccaaaatctccggctgaaagagtcgaagcaatgaaccagttgataaaggacactgaaggtctcaaatatgttgcagatttaattttagatcccgtaaacagttctagcattgtggaatccataatcgcttgtaatgaatttcataaaacaaaccctgctccaatgtttttcggtgtgggcaatgttactgagttaatggatgctgattcgggtggagttaatgttttgctagcgggaattggtatggaattgggtgtaagcatattgtttacacccgaagaatcggggaagacaagaggtagcgtgtatgaactcgctacagcatctaaaatgatgtttcttgcaaagcataggaaatccattccaaaagatctgggtattaatctcgttgcgttcaaagataaacataaaagaaatgatattatactaaatgagcgtgatggcataccagaaaccatgcaagagaagcctatgaaattcataagggacaaggcaggcagttttaaaatcaacgttgattacggaacgacggtcaagcacagtaagatcactgccactcacttcaagaagaataagccggatatcgtaattgtagggcataatgctagagaaatttatgaagaaatcattaccaaagagttggttaccagaatggagcatgcagcgtatctaggttcagaattgcaaaaagctgagatagctatgatcacgggaaaagaatacgtccaggatttcgacttattcaaaaatcctgatgaatttaagaagtaa

SEQ ID NO: 73615 - DNA, 405 bp, synthetic construct
  source 1..405: mol_type = other DNA
atgaaagctgataacgcaatcataattgtattagtcgtcttgataattctatgtggtgccgttgcacttgttattactaacaatggaatttcatttaataatacatctgactctgttgtgaacaatacaacgaatacaaccaatatcactgctaatgatacggatgaaactggtgcgactcacgataccgggctggtagcttccagttcagatgatggttcctcttacagttcgagtgggtatagcagctcttcgggctcaaacagcggttctagttcaggacatcaatcagacaactctcaatcctcaagcggtagtgaatccagttctggatcagaatccaattcagaaccagagtctgattctgccggtcagtcggaaggctcgtccgcagacttcgagtaa

SEQ ID NO: 73616 - DNA, 483 bp, synthetic construct
  source 1..483: mol_type = other DNA
atgaaaaccaagtttgtgagcttactgtcgatccttctcggattaataattgtcatttttcccatcatgggggttattggagtaggttccttgattggtttgtccgcattgttgatgtctatttatttactaatcgttgggatagccataatagactataacaattctggtgctattctggatctcgtattaggacttatccttctattcttgagtatctgtttgatattcaatccatctttactgggatttctaactgaaatttcaatgtatttcgcgggtataatgctaattattgttgctgttgtctcattaataaataacagaaattctagatacggtttttacagcggcatcattggtatcatcctgggtttattgtatataattattggcacgtacctatcaaaccctattattcttggtacattgatcggcatttggttagtgataagtggtattttgaaattaatggataggtaa

SEQ ID NO: 73617 - DNA, 192 bp, synthetic construct; identical to SEQ ID NO: 72981
  source 1..192: mol_type = other DNA

SEQ ID NO: 73618 - protein, 64 aa, Methanobrevibacter gottschalkii; identical to SEQ ID NO: 10252

SEQ ID NO: 73619 - protein, 304 aa, Methanobrevibacter gottschalkii; identical to SEQ ID NO: 10256

SEQ ID NO: 73620 - protein, 491 aa, Methanobrevibacter gottschalkii; identical to SEQ ID NO: 10263

SEQ ID NO: 73621 - protein, 536 aa, Methanobrevibacter gottschalkii; identical to SEQ ID NO: 10271

SEQ ID NO: 73622 - protein, 37 aa, Methanobrevibacter gottschalkii; identical to SEQ ID NO: 10272

SEQ ID NO: 73623 - protein, 686 aa, Methanobrevibacter gottschalkii; identical to SEQ ID NO: 10279

SEQ ID NO: 73624 - protein, 485 aa, Methanobrevibacter gottschalkii; identical to SEQ ID NO: 10280

SEQ ID NO: 73625 - protein, 954 aa, Methanobrevibacter gottschalkii; identical to SEQ ID NO: 10281

SEQ ID NO: 73626 - protein, 1472 aa, Methanobrevibacter gottschalkii; identical to SEQ ID NO: 10282

SEQ ID NO: 73627 - protein, 450 aa, Methanobrevibacter gottschalkii; identical to SEQ ID NO: 10284

SEQ ID NO: 73628 - protein, 125 aa, Methanobrevibacter gottschalkii; identical to SEQ ID NO: 10291

SEQ ID NO: 73629 - protein, 267 aa, Methanobrevibacter gottschalkii; identical to SEQ ID NO: 10295

SEQ ID NO: 73630 - protein, 454 aa, Methanobrevibacter gottschalkii; identical to SEQ ID NO: 10302

SEQ ID NO: 73631 - protein, 611 aa, Methanobrevibacter gottschalkii; identical to SEQ ID NO: 10303

SEQ ID NO: 73632 - protein, 196 aa, Methanobrevibacter gottschalkii; identical to SEQ ID NO: 10306

SEQ ID NO: 73633 - protein, 225 aa, Methanobrevibacter gottschalkii; identical to SEQ ID NO: 10308

SEQ ID NO: 73634 - protein, 356 aa, Methanobrevibacter gottschalkii; identical to SEQ ID NO: 10322

SEQ ID NO: 73635 - protein, 419 aa, Methanobrevibacter gottschalkii; identical to SEQ ID NO: 10325

SEQ ID NO: 73636 - protein, 319 aa, Methanobrevibacter gottschalkii; identical to SEQ ID NO: 10329

SEQ ID NO: 73637 - protein, 1415 aa, Methanobrevibacter gottschalkii; identical to SEQ ID NO: 10341

SEQ ID NO: 73638 - protein, 382 aa, Methanobrevibacter gottschalkii; identical to SEQ ID NO: 10342

SEQ ID NO: 73639 - protein, 227 aa, Methanobrevibacter gottschalkii; identical to SEQ ID NO: 10343

SEQ ID NO: 73640 - protein, 63 aa, Methanobrevibacter gottschalkii; identical to SEQ ID NO: 10347

SEQ ID NO: 73641 - protein, 282 aa, Methanobrevibacter gottschalkii; identical to SEQ ID NO: 10349

SEQ ID NO: 73642 - protein, 67 aa, Methanobrevibacter gottschalkii; identical to SEQ ID NO: 10350

SEQ ID NO: 73643 - protein, 352 aa, Methanobrevibacter gottschalkii; identical to SEQ ID NO: 10353

SEQ ID NO: 73644 - protein, 295 aa, Methanobrevibacter gottschalkii; identical to SEQ ID NO: 10355

SEQ ID NO: 73645 - protein, 484 aa, Methanobrevibacter gottschalkii; identical to SEQ ID NO: 10357

SEQ ID NO: 73646 - protein, 269 aa, Methanobrevibacter gottschalkii; identical to SEQ ID NO: 10367

SEQ ID NO: 73647 - protein, 74 aa, Methanobrevibacter gottschalkii; identical to SEQ ID NO: 10368

SEQ ID NO: 73648 - protein, 77 aa, Methanobrevibacter gottschalkii; identical to SEQ ID NO: 10373

SEQ ID NO: 73649 - protein, 116 aa, Methanobrevibacter gottschalkii; identical to SEQ ID NO: 10383

SEQ ID NO: 73650 - protein, 112 aa, Methanobrevibacter gottschalkii; identical to SEQ ID NO: 10385

SEQ ID NO: 73651 - protein, 169 aa, Methanobrevibacter gottschalkii; identical to SEQ ID NO: 10386

SEQ ID NO: 73652 - protein, 162 aa, Methanobrevibacter gottschalkii; identical to SEQ ID NO: 10391

SEQ ID NO: 73653 - protein, 298 aa, Methanobrevibacter gottschalkii; identical to SEQ ID NO: 10392

SEQ ID NO: 73654 - protein, 226 aa, Methanobrevibacter gottschalkii; identical to SEQ ID NO: 10399

SEQ ID NO: 73655 - protein, 193 aa, Methanobrevibacter gottschalkii; identical to SEQ ID NO: 10405

SEQ ID NO: 73656 - protein, 190 aa, Methanobrevibacter gottschalkii; identical to SEQ ID NO: 10406

SEQ ID NO: 73657 - protein, 315 aa, Methanobrevibacter gottschalkii; identical to SEQ ID NO: 10407

SEQ ID NO: 73658 - protein, 60 aa, Methanobrevibacter gottschalkii; identical to SEQ ID NO: 10408

SEQ ID NO: 73659 - protein, 213 aa, Methanobrevibacter gottschalkii; identical to SEQ ID NO: 10411

SEQ ID NO: 73660 - protein, 230 aa, Methanobrevibacter gottschalkii; identical to SEQ ID NO: 10432

SEQ ID NO: 73661 - protein, 122 aa, Methanobrevibacter gottschalkii; identical to SEQ ID NO: 10438

SEQ ID NO: 73662 - protein, 135 aa, Methanobrevibacter gottschalkii; identical to SEQ ID NO: 10439

SEQ ID NO: 73663 - protein, 139 aa, Methanobrevibacter gottschalkii; identical to SEQ ID NO: 10443

SEQ ID NO: 73664 - protein, 48 aa, Methanobrevibacter gottschalkii; identical to SEQ ID NO: 10460

SEQ ID NO: 73665 - protein, 143 aa, Methanobrevibacter gottschalkii; identical to SEQ ID NO: 10462

SEQ ID NO: 73666 - protein, 249 aa, Methanobrevibacter gottschalkii; identical to SEQ ID NO: 10463

SEQ ID NO: 73667 - protein, 250 aa, Methanobrevibacter gottschalkii; identical to SEQ ID NO: 10465

SEQ ID NO: 73668 - protein, 165 aa, Methanobrevibacter gottschalkii; identical to SEQ ID NO: 10475

SEQ ID NO: 73669 - protein, 82 aa, Methanobrevibacter gottschalkii; identical to SEQ ID NO: 10476

SEQ ID NO: 73670 - protein, 86 aa, Methanobrevibacter gottschalkii; identical to SEQ ID NO: 10478

SEQ ID NO: 73671 - protein, 197 aa, Methanobrevibacter gottschalkii; identical to SEQ ID NO: 10479

SEQ ID NO: 73672 - protein, 231 aa, Methanobrevibacter gottschalkii; identical to SEQ ID NO: 10480

SEQ ID NO: 73673 - protein, 223 aa, Methanobrevibacter gottschalkii; identical to SEQ ID NO: 10481

SEQ ID NO: 73674 - protein, 76 aa, Methanobrevibacter gottschalkii; identical to SEQ ID NO: 10482

SEQ ID NO: 73675 - protein, 290 aa, Methanobrevibacter gottschalkii; identical to SEQ ID NO: 10483

SEQ ID NO: 73676 - protein, 84 aa, Methanobrevibacter gottschalkii; identical to SEQ ID NO: 10484

SEQ ID NO: 73677 - protein, 101 aa, Methanobrevibacter gottschalkii; identical to SEQ ID NO: 10485

SEQ ID NO: 73678 - protein, 149 aa, Methanobrevibacter gottschalkii; identical to SEQ ID NO: 10487

SEQ ID NO: 73679 - protein, 211 aa, Methanobrevibacter gottschalkii; identical to SEQ ID NO: 10495

SEQ ID NO: 73680 - protein, 121 aa, Methanobrevibacter gottschalkii; identical to SEQ ID NO: 10497

SEQ ID NO: 73681 - protein, 330 aa, Methanobrevibacter gottschalkii; identical to SEQ ID NO: 10501

SEQ ID NO: 73682 - protein, 330 aa, Methanobrevibacter gottschalkii; identical to SEQ ID NO: 10502

SEQ ID NO: 73683 - protein, 329 aa, Methanobrevibacter gottschalkii; identical to SEQ ID NO: 10503

SEQ ID NO: 73684 - protein, 330 aa, Methanobrevibacter gottschalkii; identical to SEQ ID NO: 10504

SEQ ID NO: 73685 - protein, 319 aa, Methanobrevibacter gottschalkii; identical to SEQ ID NO: 10505

SEQ ID NO: 73686 - protein, 73 aa, Methanobrevibacter gottschalkii; identical to SEQ ID NO: 10510

SEQ ID NO: 73687 - protein, 232 aa, Methanobrevibacter gottschalkii; identical to SEQ ID NO: 10512

SEQ ID NO: 73688 - protein, 139 aa, Methanobrevibacter gottschalkii; identical to SEQ ID NO: 10513

SEQ ID NO: 73689 - protein, 216 aa, Methanobrevibacter gottschalkii; identical to SEQ ID NO: 10515

SEQ ID NO: 73690 - protein, 99 aa, Methanobrevibacter gottschalkii; identical to SEQ ID NO: 10517

SEQ ID NO: 73691 - protein, 125 aa, Methanobrevibacter gottschalkii; identical to SEQ ID NO: 10522

SEQ ID NO: 73692 - protein, 310 aa, Methanobrevibacter gottschalkii; identical to SEQ ID NO: 10525

SEQ ID NO: 73693 - protein, 709 aa, Methanobrevibacter gottschalkii; identical to SEQ ID NO: 10527

SEQ ID NO: 73694 - protein, 73 aa, Methanobrevibacter gottschalkii; identical to SEQ ID NO: 10538

SEQ ID NO: 73695 - protein, 994 aa, Methanobrevibacter gottschalkii; identical to SEQ ID NO: 10539

SEQ ID NO: 73696 - protein, 571 aa, Methanobrevibacter gottschalkii; identical to SEQ ID NO: 10540

SEQ ID NO: 73697 - protein, 118 aa, Methanobrevibacter gottschalkii; identical to SEQ ID NO: 10543

SEQ ID NO: 73698 - protein, 209 aa, Methanobrevibacter gottschalkii; identical to SEQ ID NO: 10545

SEQ ID NO: 73699 - protein, 172 aa, Methanobrevibacter gottschalkii; identical to SEQ ID NO: 10559

SEQ ID NO: 73700 - protein, 203 aa, Methanobrevibacter gottschalkii; identical to SEQ ID NO: 10564

SEQ ID NO: 73701 - protein, 118 aa, Methanobrevibacter gottschalkii; identical to SEQ ID NO: 10566

SEQ ID NO: 73702 - protein, 253 aa, Methanobrevibacter gottschalkii; identical to SEQ ID NO: 10573

SEQ ID NO: 73703 - protein, 203 aa, Methanobrevibacter gottschalkii; identical to SEQ ID NO: 10580

SEQ ID NO: 73704 - protein, 212 aa, Methanobrevibacter gottschalkii; identical to SEQ ID NO: 10586

SEQ ID NO: 73705 - protein, 1312 aa, Methanobrevibacter gottschalkii; identical to SEQ ID NO: 10591

SEQ ID NO: 73706 - protein, 58 aa, Methanobrevibacter gottschalkii; identical to SEQ ID NO: 10606

SEQ ID NO: 73707 - protein, 104 aa, Methanobrevibacter gottschalkii; identical to SEQ ID NO: 10608

SEQ ID NO: 73708 - protein, 682 aa, Methanobrevibacter gottschalkii; identical to SEQ ID NO: 10613

SEQ ID NO: 73709 - protein, 1864 aa, Methanobrevibacter gottschalkii; identical to SEQ ID NO: 10616

SEQ ID NO: 73710 - protein, 1703 aa, Methanobrevibacter gottschalkii; identical to SEQ ID NO: 10623

SEQ ID NO: 73711 - protein, 235 aa, Methanobrevibacter gottschalkii; identical to SEQ ID NO: 10624

SEQ ID NO: 73712 - protein, 111 aa, Methanobrevibacter gottschalkii; identical to SEQ ID NO: 10626

SEQ ID NO: 73713 - protein, 846 aa, Methanobrevibacter gottschalkii; identical to SEQ ID NO: 10627

SEQ ID NO: 73714 - protein, 601 aa, Methanobrevibacter gottschalkii; identical to SEQ ID NO: 10629

SEQ ID NO: 73715 - protein, 568 aa, Methanobrevibacter gottschalkii; identical to SEQ ID NO: 10630

SEQ ID NO: 73716 - protein, 123 aa, Methanobrevibacter gottschalkii; identical to SEQ ID NO: 10633

SEQ ID NO: 73717 - protein, 1855 aa, Methanobrevibacter gottschalkii; identical to SEQ ID NO: 10638

SEQ ID NO: 73718 - protein, 862 aa, Methanobrevibacter gottschalkii; identical to SEQ ID NO: 10639

SEQ ID NO: 73719 - protein, 161 aa, Methanobrevibacter gottschalkii; identical to SEQ ID NO: 10641

SEQ ID NO: 73720 - protein, 330 aa, Methanobrevibacter gottschalkii; identical to SEQ ID NO: 10648

SEQ ID NO: 73721 - protein, 236 aa, Methanobrevibacter gottschalkii; identical to SEQ ID NO: 10651

SEQ ID NO: 73722 - protein, 107 aa, Methanobrevibacter gottschalkii; identical to SEQ ID NO: 10653

SEQ ID NO: 73723 - protein, 271 aa, Methanobrevibacter gottschalkii; identical to SEQ ID NO: 10655

SEQ ID NO: 73724 - protein, 250 aa, Methanobrevibacter gottschalkii; identical to SEQ ID NO: 10658

SEQ ID NO: 73725 - protein, 518 aa, Methanobrevibacter gottschalkii; identical to SEQ ID NO: 10663

SEQ ID NO: 73726 - protein, 237 aa, Methanobrevibacter gottschalkii; identical to SEQ ID NO: 10665

SEQ ID NO: 73727 - protein, 281 aa, Methanobrevibacter gottschalkii; identical to SEQ ID NO: 10667

SEQ ID NO: 73728 - protein, 1218 aa, Methanobrevibacter gottschalkii; identical to SEQ ID NO: 10671

SEQ ID NO: 73729 - protein, 1202 aa, Methanobrevibacter gottschalkii; identical to SEQ ID NO: 10677

SEQ ID NO: 73730 - protein, 1609 aa, Methanobrevibacter gottschalkii; identical to SEQ ID NO: 10697

SEQ ID NO: 73731 - protein, 168 aa, Methanobrevibacter gottschalkii; identical to SEQ ID NO: 10703

SEQ ID NO: 73732 - protein, 461 aa, Methanobrevibacter gottschalkii; identical to SEQ ID NO: 10718

SEQ ID NO: 73733 - protein, 228 aa, Methanobrevibacter gottschalkii; identical to SEQ ID NO: 10721

SEQ ID NO: 73734 - protein, 549 aa, Methanobrevibacter gottschalkii; identical to SEQ ID NO: 10727

SEQ ID NO: 73735 - protein, 191 aa, Methanobrevibacter gottschalkii; identical to SEQ ID NO: 10734

SEQ ID NO: 73736 - protein, 118 aa, Methanobrevibacter gottschalkii; identical to SEQ ID NO: 10735

SEQ ID NO: 73737 - protein, 73 aa, Methanobrevibacter gottschalkii; identical to SEQ ID NO: 10736

SEQ ID NO: 73738 - protein, 342 aa, Methanobrevibacter gottschalkii; identical to SEQ ID NO: 10737

SEQ ID NO: 73739 - protein, 78 aa, Methanobrevibacter gottschalkii; identical to SEQ ID NO: 10743

SEQ ID NO: 73740 - protein, 114 aa, Methanobrevibacter gottschalkii; identical to SEQ ID NO: 10744

SEQ ID NO: 73741 - protein, 171 aa, Methanobrevibacter gottschalkii; identical to SEQ ID NO: 10745

SEQ ID NO: 73742 - protein, 85 aa, Methanobrevibacter gottschalkii; identical to SEQ ID NO: 10752

SEQ ID NO: 73743 - protein, 887 aa, Methanobrevibacter gottschalkii; identical to SEQ ID NO: 10758

SEQ ID NO: 73744 - protein, 182 aa, Methanobrevibacter gottschalkii; identical to SEQ ID NO: 10762

SEQ ID NO: 73745 - protein, 117 aa, Methanobrevibacter gottschalkii; identical to SEQ ID NO: 10770

SEQ ID NO: 73746 - protein, 83 aa, Methanobrevibacter gottschalkii; identical to SEQ ID NO: 10792

SEQ ID NO: 73747 - protein, 89 aa, Methanobrevibacter gottschalkii; identical to SEQ ID NO: 10793

SEQ ID NO: 73748 - protein, 127 aa, Methanobrevibacter gottschalkii; identical to SEQ ID NO: 10797

SEQ ID NO: 73749 - protein, 189 aa, Methanobrevibacter gottschalkii; identical to SEQ ID NO: 10799

SEQ ID NO: 73750 - protein, 596 aa, Methanobrevibacter gottschalkii; identical to SEQ ID NO: 10839

SEQ ID NO: 73751 - protein, 581 aa, Methanobrevibacter gottschalkii; identical to SEQ ID NO: 10840

SEQ ID NO: 73752 - protein, 193 aa, Methanobrevibacter gottschalkii; identical to SEQ ID NO: 10841

SEQ ID NO: 73753 - protein, 477 aa, Methanobrevibacter gottschalkii; identical to SEQ ID NO: 10843

SEQ ID NO: 73754 - protein, 238 aa, Methanobrevibacter gottschalkii; identical to SEQ ID NO: 10848

SEQ ID NO: 73755 - protein, 784 aa, Methanobrevibacter gottschalkii; identical to SEQ ID NO: 10850

SEQ ID NO: 73756 - protein, 456 aa, Methanobrevibacter gottschalkii; identical to SEQ ID NO: 10851

SEQ ID NO: 73757 - protein, 542 aa, Methanobrevibacter gottschalkii; identical to SEQ ID NO: 10856

SEQ ID NO: 73758 - protein, 539 aa, Methanobrevibacter gottschalkii; identical to SEQ ID NO: 10857

SEQ ID NO: 73759 - protein, 362 aa, Methanobrevibacter gottschalkii; identical to SEQ ID NO: 10868

SEQ ID NO: 73760 - protein, 425 aa, Methanobrevibacter gottschalkii; identical to SEQ ID NO: 10874

SEQ ID NO: 73761 - protein, 358 aa, Methanobrevibacter gottschalkii; identical to SEQ ID NO: 10882

SEQ ID NO: 73762 - protein, 423 aa, Methanobrevibacter gottschalkii; identical to SEQ ID NO: 10885

SEQ ID NO: 73763 - protein, 246 aa, Methanobrevibacter gottschalkii; identical to SEQ ID NO: 10905

SEQ ID NO: 73764 - protein, 128 aa, Methanobrevibacter gottschalkii; identical to SEQ ID NO: 10931

SEQ ID NO: 73765 - protein, 302 aa, Methanobrevibacter gottschalkii; identical to SEQ ID NO: 10932

SEQ ID NO: 73766 - protein, 958 aa, Methanobrevibacter gottschalkii; identical to SEQ ID NO: 10935

SEQ ID NO: 73767 - protein, 60 aa, Methanobrevibacter gottschalkii; identical to SEQ ID NO: 10939

SEQ ID NO: 73768 - protein, 68 aa, Methanobrevibacter gottschalkii; identical to SEQ ID NO: 10940

SEQ ID NO: 73769 - protein, 382 aa, Methanobrevibacter gottschalkii; identical to SEQ ID NO: 10941

SEQ ID NO: 73770 - protein, 90 aa, Methanobrevibacter gottschalkii; identical to SEQ ID NO: 10944

SEQ ID NO: 73771 - protein, 606 aa, Methanobrevibacter gottschalkii; identical to SEQ ID NO: 10945

SEQ ID NO: 73772 - protein, 92 aa, Methanobrevibacter gottschalkii; identical to SEQ ID NO: 10961

SEQ ID NO: 73773 - protein, 192 aa, Methanobrevibacter gottschalkii; identical to SEQ ID NO: 10978

SEQ ID NO: 73774 - protein, 588 aa, Methanobrevibacter gottschalkii; identical to SEQ ID NO: 10983

SEQ ID NO: 73775 - protein, 185 aa, Methanobrevibacter gottschalkii; identical to SEQ ID NO: 10984

SEQ ID NO: 73776 - protein, 140 aa, Methanobrevibacter gottschalkii; identical to SEQ ID NO: 10990

SEQ ID NO: 73777 - protein, 56 aa, Methanobrevibacter gottschalkii; identical to SEQ ID NO: 10992

SEQ ID NO: 73778 - protein, 551 aa, Methanobrevibacter gottschalkii; identical to SEQ ID NO: 11010

SEQ ID NO: 73779 - protein, 443 aa, Methanobrevibacter gottschalkii; identical to SEQ ID NO: 11013

SEQ ID NO: 73780 - protein, 334 aa, Methanobrevibacter gottschalkii; identical to SEQ ID NO: 11021

SEQ ID NO: 73781 - protein, 491 aa, Methanobrevibacter gottschalkii; identical to SEQ ID NO: 11024

SEQ ID NO: 73782 - protein, 312 aa, Methanobrevibacter gottschalkii; identical to SEQ ID NO: 11032

SEQ ID NO: 73783 - protein, 348 aa, Methanobrevibacter gottschalkii; identical to SEQ ID NO: 11034

SEQ ID NO: 73784 - protein, 698 aa, Methanobrevibacter gottschalkii; identical to SEQ ID NO: 11037

SEQ ID NO: 73785 - protein, 875 aa, Methanobrevibacter gottschalkii; identical to SEQ ID NO: 11041

SEQ ID NO: 73786 - protein, 159 aa, Methanobrevibacter gottschalkii; identical to SEQ ID NO: 11042

SEQ ID NO: 73787 - protein, 459 aa, Methanobrevibacter gottschalkii; identical to SEQ ID NO: 11054

SEQ ID NO: 73788 - protein, 131 aa, Methanobrevibacter gottschalkii; identical to SEQ ID NO: 11056

SEQ ID NO: 73789 - protein, 149 aa, Methanobrevibacter gottschalkii; identical to SEQ ID NO: 11057

SEQ ID NO: 73790 - protein, 155 aa, Methanobrevibacter gottschalkii; identical to SEQ ID NO: 11069

SEQ ID NO: 73791 - protein, 332 aa, Methanobrevibacter gottschalkii; identical to SEQ ID NO: 11073

SEQ ID NO: 73792 - protein, 495 aa, Methanobrevibacter gottschalkii; identical to SEQ ID NO: 11083

SEQ ID NO: 73793 - protein, 122 aa, Methanobrevibacter gottschalkii; identical to SEQ ID NO: 11115

SEQ ID NO: 73794 - protein, 257 aa, Methanobrevibacter gottschalkii; identical to SEQ ID NO: 11124

SEQ ID NO: 73795 - protein, 282 aa, Methanobrevibacter gottschalkii; identical to SEQ ID NO: 11126

SEQ ID NO: 73796 - protein, 682 aa, Methanobrevibacter gottschalkii; identical to SEQ ID NO: 11134

SEQ ID NO: 73797 - protein, 159 aa, Methanobrevibacter gottschalkii; identical to SEQ ID NO: 11137

SEQ ID NO: 73798 - protein, 81 aa, Methanobrevibacter gottschalkii; identical to SEQ ID NO: 11138

SEQ ID NO: 73799 - protein, 221 aa, Methanobrevibacter gottschalkii; identical to SEQ ID NO: 11140

SEQ ID NO: 73800 - protein, 95 aa, Methanobrevibacter gottschalkii; identical to SEQ ID NO: 11141

SEQ ID NO: 73801 - protein, 229 aa, Methanobrevibacter gottschalkii; identical to SEQ ID NO: 11142

SEQ ID NO: 73802 - protein, 280 aa, Methanobrevibacter gottschalkii; identical to SEQ ID NO: 11143

SEQ ID NO: 73803 - protein, 115 aa, Methanobrevibacter gottschalkii; identical to SEQ ID NO: 11146

SEQ ID NO: 73804 - protein, 59 aa, Methanobrevibacter gottschalkii; identical to SEQ ID NO: 11158

SEQ ID NO: 73805 - protein, 282 aa, Methanobrevibacter gottschalkii; identical to SEQ ID NO: 11159

SEQ ID NO: 73806 - protein, 179 aa, Methanobrevibacter gottschalkii; identical to SEQ ID NO: 11165

SEQ ID NO: 73807 - protein, 179 aa, Methanobrevibacter gottschalkii; identical to SEQ ID NO: 11177

SEQ ID NO: 73808 - protein, 202 aa, Methanobrevibacter gottschalkii; identical to SEQ ID NO: 11183

SEQ ID NO: 73809 - protein, 294 aa, Methanobrevibacter gottschalkii; identical to SEQ ID NO: 11186

SEQ ID NO: 73810 - protein, 139 aa, Methanobrevibacter gottschalkii; identical to SEQ ID NO: 11199

SEQ ID NO: 73811 - protein, 76 aa, Methanobrevibacter gottschalkii; identical to SEQ ID NO: 11203

SEQ ID NO: 73812 - protein, 463 aa, Methanobrevibacter gottschalkii; identical to SEQ ID NO: 11205

SEQ ID NO: 73813 - protein, 104 aa, Methanobrevibacter gottschalkii; identical to SEQ ID NO: 11215

SEQ ID NO: 73814 - protein, 243 aa, Methanobrevibacter gottschalkii; identical to SEQ ID NO: 11217

SEQ ID NO: 73815 - protein, 274 aa, Methanobrevibacter gottschalkii; identical to SEQ ID NO: 11218

SEQ ID NO: 73816 - protein, 210 aa, Methanobrevibacter gottschalkii; identical to SEQ ID NO: 11219

SEQ ID NO: 73817 - protein, 211 aa, Methanobrevibacter gottschalkii; identical to SEQ ID NO: 11226

SEQ ID NO: 73818 - protein, 451 aa, Methanobrevibacter gottschalkii; identical to SEQ ID NO: 11227

SEQ ID NO: 73819 - protein, 288 aa, Methanobrevibacter gottschalkii; identical to SEQ ID NO: 11232

SEQ ID NO: 73820 - protein, 142 aa, Methanobrevibacter gottschalkii; identical to SEQ ID NO: 11233

SEQ ID NO: 73821 - protein, 267 aa, Methanobrevibacter gottschalkii; identical to SEQ ID NO: 11234

SEQ ID NO: 73822 - protein, 127 aa, Methanobrevibacter gottschalkii; identical to SEQ ID NO: 11238

SEQ ID NO: 73823 - protein, 343 aa, Methanobrevibacter gottschalkii; identical to SEQ ID NO: 11242

SEQ ID NO: 73824 - protein, 236 aa, Methanobrevibacter gottschalkii; identical to SEQ ID NO: 11247

SEQ ID NO: 73825 - protein, 224 aa, Methanobrevibacter gottschalkii; identical to SEQ ID NO: 11248

SEQ ID NO: 73826 - protein, 360 aa, Methanobrevibacter gottschalkii; identical to SEQ ID NO: 11268

SEQ ID NO: 73827 - protein, 143 aa, Methanobrevibacter gottschalkii; identical to SEQ ID NO: 11272

SEQ ID NO: 73828 - protein, 243 aa, Methanobrevibacter gottschalkii; identical to SEQ ID NO: 11273

SEQ ID NO: 73829 - protein, 342 aa, Methanobrevibacter gottschalkii; identical to SEQ ID NO: 11274

SEQ ID NO: 73830 - protein, 131 aa, Methanobrevibacter gottschalkii; identical to SEQ ID NO: 11276

SEQ ID NO: 73831 - protein, 165 aa, Methanobrevibacter gottschalkii; identical to SEQ ID NO: 11277

SEQ ID NO: 73832 - protein, 189 aa, Methanobrevibacter gottschalkii; identical to SEQ ID NO: 11290

SEQ ID NO: 73833 - protein, 209 aa, Methanobrevibacter gottschalkii; identical to SEQ ID NO: 11299

SEQ ID NO: 73834 - protein, 908 aa, Methanobrevibacter gottschalkii; identical to SEQ ID NO: 11301

SEQ ID NO: 73835 - protein, 337 aa, Methanobrevibacter gottschalkii; identical to SEQ ID NO: 11305

SEQ ID NO: 73836 - protein, 262 aa, Methanobrevibacter gottschalkii; identical to SEQ ID NO: 11312

SEQ ID NO: 73837 - protein, 352 aa, Methanobrevibacter gottschalkii; identical to SEQ ID NO: 11322

SEQ ID NO: 73838 - protein, 101 aa, Methanobrevibacter gottschalkii; identical to SEQ ID NO: 11326

SEQ ID NO: 73839 - protein, 363 aa, Methanobrevibacter gottschalkii; identical to SEQ ID NO: 11329

SEQ ID NO: 73840 - protein, 128 aa, Methanobrevibacter gottschalkii; identical to SEQ ID NO: 11338

SEQ ID NO: 73841 - protein, 356 aa, Methanobrevibacter gottschalkii; identical to SEQ ID NO: 11341

SEQ ID NO: 73842 - protein, 565 aa, Methanobrevibacter gottschalkii; identical to SEQ ID NO: 11350

SEQ ID NO: 73843 - protein, 284 aa, Methanobrevibacter gottschalkii; identical to SEQ ID NO: 11351

SEQ ID NO: 73844 - protein, 461 aa, Methanobrevibacter gottschalkii; identical to SEQ ID NO: 11355

SEQ ID NO: 73845 - protein, 216 aa, Methanobrevibacter gottschalkii; identical to SEQ ID NO: 11357

SEQ ID NO: 73846 - protein, 159 aa, Methanobrevibacter gottschalkii; identical to SEQ ID NO: 11358

SEQ ID NO: 73847 - protein, 145 aa, Methanobrevibacter gottschalkii; identical to SEQ ID NO: 11365

SEQ ID NO: 73848 - protein, 177 aa, Methanobrevibacter gottschalkii; identical to SEQ ID NO: 11367

SEQ ID NO: 73849 - protein, 641 aa, Methanobrevibacter gottschalkii; identical to SEQ ID NO: 11368

SEQ ID NO: 73850 - protein, 369 aa, Methanobrevibacter gottschalkii; identical to SEQ ID NO: 11372

SEQ ID NO: 73851 - protein, 172 aa, Methanobrevibacter gottschalkii; identical to SEQ ID NO: 11385

SEQ ID NO: 73852 - protein, 809 aa, Methanobrevibacter gottschalkii; identical to SEQ ID NO: 11388

SEQ ID NO: 73853 - protein, 310 aa, Methanobrevibacter gottschalkii; identical to SEQ ID NO: 11410

SEQ ID NO: 73854 - protein, 260 aa, Methanobrevibacter gottschalkii; identical to SEQ ID NO: 11421

SEQ ID NO: 73855 - protein, 332 aa, Methanobrevibacter gottschalkii; identical to SEQ ID NO: 11426

SEQ ID NO: 73856 - protein, 71 aa, Methanobrevibacter gottschalkii; identical to SEQ ID NO: 11428

SEQ ID NO: 73857 - protein, 281 aa, Methanobrevibacter gottschalkii; identical to SEQ ID NO: 11431

SEQ ID NO: 73858 - protein, 514 aa, Methanobrevibacter gottschalkii; identical to SEQ ID NO: 11434

SEQ ID NO: 73859 - protein, 312 aa, Methanobrevibacter gottschalkii; identical to SEQ ID NO: 11447

SEQ ID NO: 73860 - protein, 622 aa, Methanobrevibacter gottschalkii; identical to SEQ ID NO: 11452

SEQ ID NO: 73861 - protein, 355 aa, Methanobrevibacter gottschalkii; identical to SEQ ID NO: 11457

SEQ ID NO: 73862 - protein, 136 aa, Methanobrevibacter gottschalkii; identical to SEQ ID NO: 11469

SEQ ID NO: 73863 - protein, 231 aa, Methanobrevibacter gottschalkii; identical to SEQ ID NO: 11474

SEQ ID NO: 73864 - protein, 389 aa, Methanobrevibacter gottschalkii; identical to SEQ ID NO: 11475

SEQ ID NO: 73865 - protein, 239 aa, Methanobrevibacter gottschalkii; identical to SEQ ID NO: 11476

SEQ ID NO: 73866 - protein, 378 aa, Methanobrevibacter gottschalkii; identical to SEQ ID NO: 11482

SEQ ID NO: 73867 - protein, 411 aa, Methanobrevibacter gottschalkii; identical to SEQ ID NO: 11485

SEQ ID NO: 73868 - protein, 310 aa, Methanobrevibacter gottschalkii; identical to SEQ ID NO: 11494

SEQ ID NO: 73869 - protein, 79 aa, Methanobrevibacter gottschalkii; identical to SEQ ID NO: 11495

SEQ ID NO: 73870 - protein, 68 aa, Methanobrevibacter gottschalkii; identical to SEQ ID NO: 11496

SEQ ID NO: 73871 - protein, 238 aa, Methanobrevibacter gottschalkii; identical to SEQ ID NO: 11497

SEQ ID NO: 73872 - protein, 109 aa, Methanobrevibacter gottschalkii; identical to SEQ ID NO: 11498

SEQ ID NO: 73873 - protein, 271 aa, Methanobrevibacter gottschalkii; identical to SEQ ID NO: 11499

SEQ ID NO: 73874 - protein, 233 aa, Methanobrevibacter gottschalkii; identical to SEQ ID NO: 11500

SEQ ID NO: 73875 - protein, 292 aa, Methanobrevibacter gottschalkii; identical to SEQ ID NO: 11501

SEQ ID NO: 73876 - protein, 443 aa, Methanobrevibacter gottschalkii; identical to SEQ ID NO: 11506

SEQ ID NO: 73877 - protein, 390 aa, Methanobrevibacter gottschalkii; identical to SEQ ID NO: 11511

SEQ ID NO: 73878 - protein, 439 aa, Methanobrevibacter gottschalkii; identical to SEQ ID NO: 11513

SEQ ID NO: 73879 - protein, 314 aa, Methanobrevibacter gottschalkii; identical to SEQ ID NO: 11514

SEQ ID NO: 73880 - protein, 340 aa, Methanobrevibacter gottschalkii; identical to SEQ ID NO: 11530

SEQ ID NO: 73881 - protein, 241 aa, Methanobrevibacter gottschalkii; identical to SEQ ID NO: 11537

SEQ ID NO: 73882 - protein, 492 aa, Methanobrevibacter gottschalkii; identical to SEQ ID NO: 11544

SEQ ID NO: 73883 - protein, 332 aa, Methanobrevibacter gottschalkii; identical to SEQ ID NO: 11549

SEQ ID NO: 73884 - protein, 148 aa, Methanobrevibacter gottschalkii; identical to SEQ ID NO: 11551

SEQ ID NO: 73885 - protein, 163 aa, Methanobrevibacter gottschalkii; identical to SEQ ID NO: 11552

SEQ ID NO: 73886 - protein, 83 aa, Methanobrevibacter gottschalkii; identical to SEQ ID NO: 11554

SEQ ID NO: 73887 - protein, 93 aa, Methanobrevibacter gottschalkii; identical to SEQ ID NO: 11556

SEQ ID NO: 73888 - protein, 111 aa, Methanobrevibacter gottschalkii; identical to SEQ ID NO: 11557

SEQ ID NO: 73889 - protein, 484 aa, Methanobrevibacter gottschalkii; identical to SEQ ID NO: 11558

SEQ ID NO: 73890 - protein, 128 aa, Methanobrevibacter gottschalkii; identical to SEQ ID NO: 11559

SEQ ID NO: 73891 - protein, 140 aa, Methanobrevibacter gottschalkii; identical to SEQ ID NO: 11561

SEQ ID NO: 73892 - protein, 88 aa, Methanobrevibacter gottschalkii; identical to SEQ ID NO: 11562

SEQ ID NO: 73893 - protein, 321 aa, Methanobrevibacter gottschalkii; identical to SEQ ID NO: 11564

SEQ ID NO: 73894 - protein, 234 aa, Methanobrevibacter gottschalkii; identical to SEQ ID NO: 11565

SEQ ID NO: 73895 - protein, 377 aa, Methanobrevibacter gottschalkii; identical to SEQ ID NO: 11572

SEQ ID NO: 73896 - protein, 477 aa, Methanobrevibacter gottschalkii; identical to SEQ ID NO: 11575

SEQ ID NO: 73897 - protein, 268 aa, Methanobrevibacter gottschalkii; identical to SEQ ID NO: 11581

SEQ ID NO: 73898 - protein, 474 aa, Methanobrevibacter gottschalkii; identical to SEQ ID NO: 11584

SEQ ID NO: 73899 - protein, 1604 aa, Methanobrevibacter gottschalkii; identical to SEQ ID NO: 11596

SEQ ID NO: 73900 - protein, 280 aa, Methanobrevibacter gottschalkii; identical to SEQ ID NO: 11597

SEQ ID NO: 73901 - protein, 176 aa, Methanobrevibacter gottschalkii; identical to SEQ ID NO: 11599

SEQ ID NO: 73902 - protein, 136 aa, Methanobrevibacter gottschalkii; identical to SEQ ID NO: 11600

SEQ ID NO: 73903 - protein, 189 aa, Methanobrevibacter gottschalkii; identical to SEQ ID NO: 11604

SEQ ID NO: 73904 - protein, 404 aa, Methanobrevibacter gottschalkii; identical to SEQ ID NO: 11605

SEQ ID NO: 73905 - protein, 133 aa, Methanobrevibacter gottschalkii; identical to SEQ ID NO: 11622

SEQ ID NO: 73906 - protein, 258 aa, Methanobrevibacter gottschalkii; identical to SEQ ID NO: 11623

SEQ ID NO: 73907 - protein, 830 aa, Methanobrevibacter gottschalkii; identical to SEQ ID NO: 11626

SEQ ID NO: 73908 - protein, 145 aa, Methanobrevibacter gottschalkii; identical to SEQ ID NO: 11631

SEQ ID NO: 73909 - protein, 161 aa, Methanobrevibacter gottschalkii; identical to SEQ ID NO: 11636

SEQ ID NO: 73910 - protein, 301 aa, Methanobrevibacter gottschalkii; identical to SEQ ID NO: 11637

SEQ ID NO: 73911 - protein, 135 aa, Methanobrevibacter gottschalkii; identical to SEQ ID NO: 11638

SEQ ID NO: 73912 - protein, 71 aa, Methanobrevibacter gottschalkii; identical to SEQ ID NO: 11639

SEQ ID NO: 73913 - protein, 706 aa, Methanobrevibacter gottschalkii; identical to SEQ ID NO: 11643

SEQ ID NO: 73914 - protein, 283 aa, Methanobrevibacter gottschalkii; identical to SEQ ID NO: 11644

SEQ ID NO: 73915 - protein, 109 aa, Methanobrevibacter gottschalkii; identical to SEQ ID NO: 11647

SEQ ID NO: 73916 - protein, 318 aa, Methanobrevibacter gottschalkii; identical to SEQ ID NO: 11652

SEQ ID NO: 73917 - protein, 194 aa, Methanobrevibacter gottschalkii; identical to SEQ ID NO: 11678

SEQ ID NO: 73918 - protein, 112 aa, Methanobrevibacter gottschalkii; identical to SEQ ID NO: 11679

SEQ ID NO: 73919 - protein, 227 aa, Methanobrevibacter gottschalkii; identical to SEQ ID NO: 11681

SEQ ID NO: 73920 - protein, 171 aa, Methanobrevibacter gottschalkii; identical to SEQ ID NO: 11682

SEQ ID NO: 73921 - protein, 976 aa, Methanobrevibacter gottschalkii; identical to SEQ ID NO: 11683

SEQ ID NO: 73922 - protein, 207 aa, Methanobrevibacter gottschalkii; identical to SEQ ID NO: 11684

SEQ ID NO: 73923 - protein, 160 aa, Methanobrevibacter gottschalkii; identical to SEQ ID NO: 11685

SEQ ID NO: 73924 - protein, 353 aa, Methanobrevibacter gottschalkii; identical to SEQ ID NO: 11691

SEQ ID NO: 73925 - protein, 300 aa, Methanobrevibacter gottschalkii; identical to SEQ ID NO: 11692

SEQ ID NO: 73926 - protein, 110 aa, Methanobrevibacter gottschalkii; identical to SEQ ID NO: 11701

SEQ ID NO: 73927 - protein, 277 aa, Methanobrevibacter gottschalkii; identical to SEQ ID NO: 11703

SEQ ID NO: 73928 - protein, 454 aa, Methanobrevibacter gottschalkii; identical to SEQ ID NO: 11705

SEQ ID NO: 73929 - protein, 141 aa, Methanobrevibacter gottschalkii; identical to SEQ ID NO: 11709

SEQ ID NO: 73930 - protein, 370 aa, Methanobrevibacter gottschalkii; identical to SEQ ID NO: 11716

SEQ ID NO: 73931 - protein, 401 aa, Methanobrevibacter gottschalkii; identical to SEQ ID NO: 11724

SEQ ID NO: 73932 - protein, 135 aa, Methanobrevibacter gottschalkii; identical to SEQ ID NO: 11727

SEQ ID NO: 73933 - protein, 547 aa, Methanobrevibacter gottschalkii; identical to SEQ ID NO: 11734

SEQ ID NO: 73934 - protein, 434 aa, Methanobrevibacter gottschalkii; identical to SEQ ID NO: 11735

SEQ ID NO: 73935 - protein, 344 aa, Methanobrevibacter gottschalkii; identical to SEQ ID NO: 11742

SEQ ID NO: 73936 - protein, 423 aa, Methanobrevibacter gottschalkii; identical to SEQ ID NO: 11751

SEQ ID NO: 73937 - protein, 288 aa, Methanobrevibacter gottschalkii; identical to SEQ ID NO: 11752

SEQ ID NO: 73938 - protein, 312 aa, Methanobrevibacter gottschalkii; identical to SEQ ID NO: 11753

SEQ ID NO: 73939 - protein, 565 aa, Methanobrevibacter gottschalkii; identical to SEQ ID NO: 11763

SEQ ID NO: 73940 - protein, 33 aa, Methanobrevibacter gottschalkii; identical to SEQ ID NO: 11766

SEQ ID NO: 73941 - protein, 414 aa, Methanobrevibacter gottschalkii; identical to SEQ ID NO: 11769

SEQ ID NO: 73942 - protein, 105 aa, Methanobrevibacter gottschalkii; identical to SEQ ID NO: 11778

SEQ ID NO: 73943 - protein, 92 aa, Methanobrevibacter gottschalkii; identical to SEQ ID NO: 11779

SEQ ID NO: 73944 - protein, 359 aa, Methanobrevibacter gottschalkii; identical to SEQ ID NO: 11780

SEQ ID NO: 73945 - protein, 319 aa, Methanobrevibacter gottschalkii; identical to SEQ ID NO: 11782

SEQ ID NO: 73946 - protein, 285 aa, Methanobrevibacter gottschalkii; identical to SEQ ID NO: 11783

SEQ ID NO: 73947 - protein, 467 aa, Methanobrevibacter gottschalkii; identical to SEQ ID NO: 11784

SEQ ID NO: 73948 - protein, 376 aa, Methanobrevibacter gottschalkii; identical to SEQ ID NO: 11798

SEQ ID NO: 73949 - protein, 234 aa, Methanobrevibacter gottschalkii; identical to SEQ ID NO: 11801

SEQ ID NO: 73950 - protein, 320 aa, Methanobrevibacter gottschalkii; identical to SEQ ID NO: 11803

SEQ ID NO: 73951 - protein, 103 aa, Methanobrevibacter gottschalkii; identical to SEQ ID NO: 11804

SEQ ID NO: 73952 - protein, 458 aa, Methanobrevibacter gottschalkii; identical to SEQ ID NO: 11817

SEQ ID NO: 73953 - protein, 267 aa, Methanobrevibacter gottschalkii; identical to SEQ ID NO: 11839

SEQ ID NO: 73954 - protein, 365 aa, Methanobrevibacter gottschalkii; identical to SEQ ID NO: 11845

SEQ ID NO: 73955 - protein, 76 aa, Methanobrevibacter gottschalkii; identical to SEQ ID NO: 11846

SEQ ID NO: 73956 - protein, 189 aa, Methanobrevibacter gottschalkii; identical to SEQ ID NO: 11847

SEQ ID NO: 73957 - protein, 560 aa, Methanobrevibacter gottschalkii; identical to SEQ ID NO: 11853

SEQ ID NO: 73958 - protein, 892 aa, Methanobrevibacter gottschalkii; identical to SEQ ID NO: 11869

SEQ ID NO: 73959 - protein, 148 aa, Methanobrevibacter gottschalkii; identical to SEQ ID NO: 11874

SEQ ID NO: 73960 - protein, 313 aa, Methanobrevibacter gottschalkii; identical to SEQ ID NO: 11890

SEQ ID NO: 73961 - protein, 224 aa, Methanobrevibacter gottschalkii; identical to SEQ ID NO: 11899

SEQ ID NO: 73962 - protein, 1903 aa, Methanobrevibacter gottschalkii; identical to SEQ ID NO: 11903

SEQ ID NO: 73963 - protein, 163 aa, Methanobrevibacter gottschalkii; identical to SEQ ID NO: 11905

SEQ ID NO: 73964 - protein, 484 aa, Methanobrevibacter gottschalkii; identical to SEQ ID NO: 11912

SEQ ID NO: 73965 - protein, 243 aa, Methanobrevibacter gottschalkii; identical to SEQ ID NO: 11914

SEQ ID NO: 73966 - protein, 208 aa, Methanobrevibacter gottschalkii; identical to SEQ ID NO: 11916

SEQ ID NO: 73967 - protein, 185 aa, Methanobrevibacter gottschalkii; identical to SEQ ID NO: 11928

SEQ ID NO: 73968 - protein, 224 aa, Methanobrevibacter gottschalkii; identical to SEQ ID NO: 11931

SEQ ID NO: 73969 - protein, 216 aa, Methanobrevibacter gottschalkii; identical to SEQ ID NO: 11932

SEQ ID NO: 73970 - protein, 59 aa, Methanobrevibacter gottschalkii; identical to SEQ ID NO: 11935

SEQ ID NO: 73971 - protein, 106 aa, Methanobrevibacter gottschalkii; identical to SEQ ID NO: 11937

SEQ ID NO: 73972 - protein, 231 aa, Methanobrevibacter gottschalkii; identical to SEQ ID NO: 11944

SEQ ID NO: 73973 - protein, 132 aa, Methanobrevibacter gottschalkii; identical to SEQ ID NO: 11954

SEQ ID NO: 73974 - protein, 1490 aa, Methanobrevibacter gottschalkii; identical to SEQ ID NO: 11961

SEQ ID NO: 73975 - protein, 107 aa, Methanobrevibacter gottschalkii; identical to SEQ ID NO: 11962

SEQ ID NO: 73976 - protein, 110 aa, Methanobrevibacter gottschalkii; identical to SEQ ID NO: 11963

SEQ ID NO: 73977 - protein, 320 aa, Methanobrevibacter gottschalkii; identical to SEQ ID NO: 11967

SEQ ID NO: 73978 - protein, 302 aa, Methanobrevibacter gottschalkii; identical to SEQ ID NO: 11973

SEQ ID NO: 73979 - protein, 628 aa, Methanobrevibacter gottschalkii; identical to SEQ ID NO: 11976

SEQ ID NO: 73980 - protein, 1018 aa, Methanobrevibacter gottschalkii; identical to SEQ ID NO: 11987

SEQ ID NO: 73981 - protein, 189 aa, Methanobrevibacter gottschalkii; identical to SEQ ID NO: 11994

SEQ ID NO: 73982 - protein, 592 aa, Methanobrevibacter gottschalkii; identical to SEQ ID NO: 12000

SEQ ID NO: 73983 - protein, 242 aa, Methanobrevibacter gottschalkii; identical to SEQ ID NO: 12005

SEQ ID NO: 73984 - protein, 417 aa, Methanobrevibacter gottschalkii; identical to SEQ ID NO: 12010

SEQ ID NO: 73985 - protein, 672 aa, Methanobrevibacter gottschalkii; identical to SEQ ID NO: 12013

SEQ ID NO: 73986 - protein, 280 aa, Methanobrevibacter gottschalkii; identical to SEQ ID NO: 12016

SEQ ID NO: 73987 - protein, 276 aa, Methanobrevibacter gottschalkii; identical to SEQ ID NO: 12017

SEQ ID NO: 73988 - protein, 212 aa, Methanobrevibacter gottschalkii; identical to SEQ ID NO: 12019

SEQ ID NO: 73989 - protein, 424 aa, Methanobrevibacter gottschalkii; identical to SEQ ID NO: 12020

SEQ ID NO: 73990 - protein, 257 aa, Methanobrevibacter gottschalkii; identical to SEQ ID NO: 12021

SEQ ID NO: 73991 - protein, 299 aa, Methanobrevibacter gottschalkii; identical to SEQ ID NO: 12031

SEQ ID NO: 73992 - protein, 166 aa, Methanobrevibacter gottschalkii; identical to SEQ ID NO: 12035

SEQ ID NO: 73993 - protein, 160 aa, Methanobrevibacter gottschalkii; identical to SEQ ID NO: 12049

SEQ ID NO: 73994 - DNA, 194 bp, Methanobrevibacter gottschalkii; identical to SEQ ID NO: 6652
  source 1..194: mol_type = genomic DNA

SEQ ID NO: 73995 - DNA, 915 bp, Methanobrevibacter gottschalkii; identical to SEQ ID NO: 6656
  source 1..915: mol_type = genomic DNA

SEQ ID NO: 73996 - DNA, 1476 bp, Methanobrevibacter gottschalkii; identical to SEQ ID NO: 6663
  source 1..1476: mol_type = genomic DNA

SEQ ID NO: 73997 - DNA, 1611 bp, Methanobrevibacter gottschalkii; identical to SEQ ID NO: 6671
  source 1..1611: mol_type = genomic DNA

SEQ ID NO: 73998 - DNA, 114 bp, Methanobrevibacter gottschalkii; identical to SEQ ID NO: 6672
  source 1..114: mol_type = genomic DNA

SEQ ID NO: 73999 - DNA, 2061 bp, Methanobrevibacter gottschalkii; identical to SEQ ID NO: 6679
  source 1..2061: mol_type = genomic DNA

SEQ ID NO: 74000 - DNA, 1458 bp, Methanobrevibacter gottschalkii; identical to SEQ ID NO: 6680
  source 1..1458: mol_type = genomic DNA

SEQ ID NO: 74001 - DNA, 2865 bp, Methanobrevibacter gottschalkii; identical to SEQ ID NO: 6681
  source 1..2865: mol_type = genomic DNA

SEQ ID NO: 74002 - DNA, 4419 bp, Methanobrevibacter gottschalkii; identical to SEQ ID NO: 6682
  source 1..4419: mol_type = genomic DNA

SEQ ID NO: 74003 - DNA, 1353 bp, Methanobrevibacter gottschalkii; identical to SEQ ID NO: 6684
  source 1..1353: mol_type = genomic DNA

SEQ ID NO: 74004 - DNA, 378 bp, Methanobrevibacter gottschalkii; identical to SEQ ID NO: 6691
  source 1..378: mol_type = genomic DNA

SEQ ID NO: 74005 - DNA, 804 bp, Methanobrevibacter gottschalkii; identical to SEQ ID NO: 6695
  source 1..804: mol_type = genomic DNA

SEQ ID NO: 74006 - DNA, 1365 bp, Methanobrevibacter gottschalkii; identical to SEQ ID NO: 6702
  source 1..1365: mol_type = genomic DNA

SEQ ID NO: 74007 - DNA, 1836 bp, Methanobrevibacter gottschalkii; identical to SEQ ID NO: 6703
  source 1..1836: mol_type = genomic DNA

SEQ ID NO: 74008 - DNA, 591 bp, Methanobrevibacter gottschalkii; identical to SEQ ID NO: 6706
  source 1..591: mol_type = genomic DNA

SEQ ID NO: 74009 - DNA, 678 bp, Methanobrevibacter gottschalkii; identical to SEQ ID NO: 6708
  source 1..678: mol_type = genomic DNA

SEQ ID NO: 74010 - DNA, 1071 bp, Methanobrevibacter gottschalkii; identical to SEQ ID NO: 6722
  source 1..1071: mol_type = genomic DNA

SEQ ID NO: 74011 - DNA, 1260 bp, Methanobrevibacter gottschalkii; identical to SEQ ID NO: 6725
  source 1..1260: mol_type = genomic DNA

SEQ ID NO: 74012 - DNA, 960 bp, Methanobrevibacter gottschalkii; identical to SEQ ID NO: 6729
  source 1..960: mol_type = genomic DNA

SEQ ID NO: 74013 - DNA, 4248 bp, Methanobrevibacter gottschalkii; identical to SEQ ID NO: 6741
  source 1..4248: mol_type = genomic DNA

SEQ ID NO: 74014 - DNA, 1149 bp, Methanobrevibacter gottschalkii; identical to SEQ ID NO: 6742
  source 1..1149: mol_type = genomic DNA

SEQ ID NO: 74015 - DNA, 684 bp, Methanobrevibacter gottschalkii; identical to SEQ ID NO: 6743
  source 1..684: mol_type = genomic DNA

SEQ ID NO: 74016 - DNA, 192 bp, Methanobrevibacter gottschalkii; identical to SEQ ID NO: 6747
  source 1..192: mol_type = genomic DNA

SEQ ID NO: 74017 - DNA, 849 bp, Methanobrevibacter gottschalkii; identical to SEQ ID NO: 6749
  source 1..849: mol_type = genomic DNA

SEQ ID NO: 74018 - DNA, 204 bp, Methanobrevibacter gottschalkii; identical to SEQ ID NO: 6750
  source 1..204: mol_type = genomic DNA

SEQ ID NO: 74019 - DNA, 1059 bp, Methanobrevibacter gottschalkii; identical to SEQ ID NO: 6753
  source 1..1059: mol_type = genomic DNA

SEQ ID NO: 74020 - DNA, 888 bp, Methanobrevibacter gottschalkii; identical to SEQ ID NO: 6755
  source 1..888: mol_type = genomic DNA

SEQ ID NO: 74021 - DNA, 1455 bp, Methanobrevibacter gottschalkii; identical to SEQ ID NO: 6757
  source 1..1455: mol_type = genomic DNA

SEQ ID NO: 74022 - DNA, 810 bp, Methanobrevibacter gottschalkii; identical to SEQ ID NO: 6767
  source 1..810: mol_type = genomic DNA

SEQ ID NO: 74023 - DNA, 225 bp, Methanobrevibacter gottschalkii; identical to SEQ ID NO: 6768
  source 1..225: mol_type = genomic DNA

SEQ ID NO: 74024 - DNA, 234 bp, Methanobrevibacter gottschalkii; identical to SEQ ID NO: 6773
  source 1..234: mol_type = genomic DNA

SEQ ID NO: 74025 - DNA, 351 bp, Methanobrevibacter gottschalkii; identical to SEQ ID NO: 6783
  source 1..351: mol_type = genomic DNA

SEQ ID NO: 74026 - DNA, 339 bp, Methanobrevibacter gottschalkii; identical to SEQ ID NO: 6785
  source 1..339: mol_type = genomic DNA

SEQ ID NO: 74027 - DNA, 510 bp, Methanobrevibacter gottschalkii; identical to SEQ ID NO: 6786
  source 1..510: mol_type = genomic DNA

SEQ ID NO: 74028 - DNA, 489 bp, Methanobrevibacter gottschalkii; identical to SEQ ID NO: 6791
  source 1..489: mol_type = genomic DNA

SEQ ID NO: 74029 - DNA, 897 bp, Methanobrevibacter gottschalkii; identical to SEQ ID NO: 6792
  source 1..897: mol_type = genomic DNA

SEQ ID NO: 74030 - DNA, 681 bp, Methanobrevibacter gottschalkii; identical to SEQ ID NO: 6799
  source 1..681: mol_type = genomic DNA

SEQ ID NO: 74031 - DNA, 582 bp, Methanobrevibacter gottschalkii; identical to SEQ ID NO: 6805
  source 1..582: mol_type = genomic DNA

SEQ ID NO: 74032 - DNA, 573 bp, Methanobrevibacter gottschalkii; identical to SEQ ID NO: 6806
  source 1..573: mol_type = genomic DNA

SEQ ID NO: 74033 - DNA, 948 bp, Methanobrevibacter gottschalkii; identical to SEQ ID NO: 6807
  source 1..948: mol_type = genomic DNA

SEQ ID NO: 74034 - DNA, 183 bp, Methanobrevibacter gottschalkii; identical to SEQ ID NO: 6808
  source 1..183: mol_type = genomic DNA

SEQ ID NO: 74035 - DNA, 642 bp, Methanobrevibacter gottschalkii; identical to SEQ ID NO: 6811
  source 1..642: mol_type = genomic DNA

SEQ ID NO: 74036 - DNA, 693 bp, Methanobrevibacter gottschalkii; identical to SEQ ID NO: 6832
  source 1..693: mol_type = genomic DNA

SEQ ID NO: 74037 - DNA, 369 bp, Methanobrevibacter gottschalkii; identical to SEQ ID NO: 6838
  source 1..369: mol_type = genomic DNA

SEQ ID NO: 74038 - DNA, 408 bp, Methanobrevibacter gottschalkii; identical to SEQ ID NO: 6839
  source 1..408: mol_type = genomic DNA

SEQ ID NO: 74039 - DNA, 420 bp, Methanobrevibacter gottschalkii; identical to SEQ ID NO: 6843
  source 1..420: mol_type = genomic DNA

SEQ ID NO: 74040 - DNA, 147 bp, Methanobrevibacter gottschalkii; identical to SEQ ID NO: 6860
  source 1..147: mol_type = genomic DNA

SEQ ID NO: 74041 - DNA, 432 bp, Methanobrevibacter gottschalkii; identical to SEQ ID NO: 6862
  source 1..432: mol_type = genomic DNA

SEQ ID NO: 74042 - DNA, 750 bp, Methanobrevibacter gottschalkii; identical to SEQ ID NO: 6863
  source 1..750: mol_type = genomic DNA

SEQ ID NO: 74043 - DNA, 753 bp, Methanobrevibacter gottschalkii; identical to SEQ ID NO: 6865
  source 1..753: mol_type = genomic DNA

SEQ ID NO: 74044 - DNA, 498 bp, Methanobrevibacter gottschalkii; identical to SEQ ID NO: 6875
  source 1..498: mol_type = genomic DNA

SEQ ID NO: 74045 - DNA, 249 bp, Methanobrevibacter gottschalkii; identical to SEQ ID NO: 6876
  source 1..249: mol_type = genomic DNA

SEQ ID NO: 74046 - DNA, 261 bp, Methanobrevibacter gottschalkii; identical to SEQ ID NO: 6878
  source 1..261: mol_type = genomic DNA

SEQ ID NO: 74047 - DNA, 594 bp, Methanobrevibacter gottschalkii; identical to SEQ ID NO: 6879
  source 1..594: mol_type = genomic DNA

SEQ ID NO: 74048 - DNA, 696 bp, Methanobrevibacter gottschalkii; identical to SEQ ID NO: 6880
  source 1..696: mol_type = genomic DNA

SEQ ID NO: 74049 - DNA, 672 bp, Methanobrevibacter gottschalkii; identical to SEQ ID NO: 6881
  source 1..672: mol_type = genomic DNA

SEQ ID NO: 74050 - DNA, 231 bp, Methanobrevibacter gottschalkii; identical to SEQ ID NO: 6882
  source 1..231: mol_type = genomic DNA

SEQ ID NO: 74051 - DNA, 873 bp, Methanobrevibacter gottschalkii; identical to SEQ ID NO: 6883
  source 1..873: mol_type = genomic DNA

SEQ ID NO: 74052 - DNA, 255 bp, Methanobrevibacter gottschalkii; identical to SEQ ID NO: 6884
  source 1..255: mol_type = genomic DNA

SEQ ID NO: 74053 - DNA, 306 bp, Methanobrevibacter gottschalkii; identical to SEQ ID NO: 6885
  source 1..306: mol_type = genomic DNA

SEQ ID NO: 74054 - DNA, 450 bp, Methanobrevibacter gottschalkii; identical to SEQ ID NO: 6887
  source 1..450: mol_type = genomic DNA

SEQ ID NO: 74055 - DNA, 636 bp, Methanobrevibacter gottschalkii; identical to SEQ ID NO: 6895
  source 1..636: mol_type = genomic DNA

SEQ ID NO: 74056 - DNA, 366 bp, Methanobrevibacter gottschalkii; identical to SEQ ID NO: 6897
  source 1..366: mol_type = genomic DNA

SEQ ID NO: 74057 - DNA, 993 bp, Methanobrevibacter gottschalkii; identical to SEQ ID NO: 6901
  source 1..993: mol_type = genomic DNA

SEQ ID NO: 74058 - DNA, 993 bp, Methanobrevibacter gottschalkii; identical to SEQ ID NO: 6902
  source 1..993: mol_type = genomic DNA

SEQ ID NO: 74059 - DNA, 990 bp, Methanobrevibacter gottschalkii; identical to SEQ ID NO: 6903
  source 1..990: mol_type = genomic DNA

SEQ ID NO: 74060 - DNA, 993 bp, Methanobrevibacter gottschalkii; identical to SEQ ID NO: 6904
  source 1..993: mol_type = genomic DNA

SEQ ID NO: 74061 - DNA, 960 bp, Methanobrevibacter gottschalkii; identical to SEQ ID NO: 6905
  source 1..960: mol_type = genomic DNA

SEQ ID NO: 74062 - DNA, 222 bp, Methanobrevibacter gottschalkii; identical to SEQ ID NO: 6910
  source 1..222: mol_type = genomic DNA

SEQ ID NO: 74063 - DNA, 699 bp, Methanobrevibacter gottschalkii; identical to SEQ ID NO: 6912
  source 1..699: mol_type = genomic DNA

SEQ ID NO: 74064 - DNA, 420 bp, Methanobrevibacter gottschalkii; identical to SEQ ID NO: 6913
  source 1..420: mol_type = genomic DNA

SEQ ID NO: 74065 - DNA, 651 bp, Methanobrevibacter gottschalkii; identical to SEQ ID NO: 6915
  source 1..651: mol_type = genomic DNA

SEQ ID NO: 74066 - DNA, 300 bp, Methanobrevibacter gottschalkii; identical to SEQ ID NO: 6917
  source 1..300: mol_type = genomic DNA

SEQ ID NO: 74067 - DNA, 378 bp, Methanobrevibacter gottschalkii; identical to SEQ ID NO: 6922
  source 1..378: mol_type = genomic DNA

SEQ ID NO: 74068 - DNA, 933 bp, Methanobrevibacter gottschalkii; identical to SEQ ID NO: 6925
  source 1..933: mol_type = genomic DNA

SEQ ID NO: 74069 - DNA, 2130 bp, Methanobrevibacter gottschalkii; identical to SEQ ID NO: 6927
  source 1..2130: mol_type = genomic DNA

SEQ ID NO: 74070 - DNA, 222 bp, Methanobrevibacter gottschalkii; identical to SEQ ID NO: 6938
  source 1..222: mol_type = genomic DNA

SEQ ID NO: 74071 - DNA, 2985 bp, Methanobrevibacter gottschalkii; identical to SEQ ID NO: 6939
  source 1..2985: mol_type = genomic DNA

SEQ ID NO: 74072 - DNA, 1716 bp, Methanobrevibacter gottschalkii; identical to SEQ ID NO: 6940
  source 1..1716: mol_type = genomic DNA

SEQ ID NO: 74073 - DNA, 357 bp, Methanobrevibacter gottschalkii; identical to SEQ ID NO: 6943
  source 1..357: mol_type = genomic DNA

SEQ ID NO: 74074 - DNA, 630 bp, Methanobrevibacter gottschalkii; identical to SEQ ID NO: 6945
  source 1..630: mol_type = genomic DNA

SEQ ID NO: 74075 - DNA, 519 bp, Methanobrevibacter gottschalkii; identical to SEQ ID NO: 6959
  source 1..519: mol_type = genomic DNA

SEQ ID NO: 74076 - DNA, 612 bp, Methanobrevibacter gottschalkii; identical to SEQ ID NO: 6964
  source 1..612: mol_type = genomic DNA

SEQ ID NO: 74077 - DNA, 357 bp, Methanobrevibacter gottschalkii; identical to SEQ ID NO: 6966
  source 1..357: mol_type = genomic DNA

SEQ ID NO: 74078 - DNA, 762 bp, Methanobrevibacter gottschalkii; identical to SEQ ID NO: 6973
  source 1..762: mol_type = genomic DNA

SEQ ID NO: 74079 - DNA, 612 bp, Methanobrevibacter gottschalkii; identical to SEQ ID NO: 6980
  source 1..612: mol_type = genomic DNA

SEQ ID NO: 74080 - DNA, 639 bp, Methanobrevibacter gottschalkii; identical to SEQ ID NO: 6986
  source 1..639: mol_type = genomic DNA

SEQ ID NO: 74081 - DNA, 3939 bp, Methanobrevibacter gottschalkii; identical to SEQ ID NO: 6991
  source 1..3939: mol_type = genomic DNA

SEQ ID NO: 74082 - DNA, 177 bp, Methanobrevibacter gottschalkii; identical to SEQ ID NO: 7006
  source 1..177: mol_type = genomic DNA

SEQ ID NO: 74083 - DNA, 315 bp, Methanobrevibacter gottschalkii; identical to SEQ ID NO: 7008
  source 1..315: mol_type = genomic DNA

SEQ ID NO: 74084 - DNA, 2049 bp, Methanobrevibacter gottschalkii; identical to SEQ ID NO: 7013
  source 1..2049: mol_type = genomic DNA

SEQ ID NO: 74085 - DNA, 5595 bp, Methanobrevibacter gottschalkii; identical to SEQ ID NO: 7016
  source 1..5595: mol_type = genomic DNA

SEQ ID NO: 74086 - DNA, 5112 bp, Methanobrevibacter gottschalkii; identical to SEQ ID NO: 7023
  source 1..5112: mol_type = genomic DNA

SEQ ID NO: 74087 - DNA, 708 bp, Methanobrevibacter gottschalkii; identical to SEQ ID NO: 7024
  source 1..708: mol_type = genomic DNA

SEQ ID NO: 74088 - DNA, 336 bp, Methanobrevibacter gottschalkii; identical to SEQ ID NO: 7026
  source 1..336: mol_type = genomic DNA

SEQ ID NO: 74089 - DNA, 2541 bp, Methanobrevibacter gottschalkii; identical to SEQ ID NO: 7027
  source 1..2541: mol_type = genomic DNA

SEQ ID NO: 74090 - DNA, 1806 bp, Methanobrevibacter gottschalkii; identical to SEQ ID NO: 7029
  source 1..1806: mol_type = genomic DNA

SEQ ID NO: 74091 - DNA, 1707 bp, Methanobrevibacter gottschalkii; identical to SEQ ID NO: 7030
  source 1..1707: mol_type = genomic DNA

SEQ ID NO: 74092 - DNA, 372 bp, Methanobrevibacter gottschalkii; identical to SEQ ID NO: 7033
  source 1..372: mol_type = genomic DNA

SEQ ID NO: 74093 - DNA, 5568 bp, Methanobrevibacter gottschalkii; identical to SEQ ID NO: 7038
  source 1..5568: mol_type = genomic DNA

SEQ ID NO: 74094 - DNA, 2589 bp, Methanobrevibacter gottschalkii; identical to SEQ ID NO: 7039
  source 1..2589: mol_type = genomic DNA

SEQ ID NO: 74095 - DNA, 486 bp, Methanobrevibacter gottschalkii; identical to SEQ ID NO: 7041
  source 1..486: mol_type = genomic DNA

SEQ ID NO: 74096 - DNA, 993 bp, Methanobrevibacter gottschalkii; identical to SEQ ID NO: 7048
  source 1..993: mol_type = genomic DNA

SEQ ID NO: 74097 - DNA, 711 bp, Methanobrevibacter gottschalkii; identical to SEQ ID NO: 7051
  source 1..711: mol_type = genomic DNA

SEQ ID NO: 74098 - DNA, 324 bp, Methanobrevibacter gottschalkii; identical to SEQ ID NO: 7053
  source 1..324: mol_type = genomic DNA

SEQ ID NO: 74099 - DNA, 816 bp, Methanobrevibacter gottschalkii; identical to SEQ ID NO: 7055
  source 1..816: mol_type = genomic DNA

SEQ ID NO: 74100 - DNA, 753 bp, Methanobrevibacter gottschalkii; identical to SEQ ID NO: 7058
  source 1..753: mol_type = genomic DNA

SEQ ID NO: 74101 - DNA, 1557 bp, Methanobrevibacter gottschalkii; identical to SEQ ID NO: 7063
  source 1..1557: mol_type = genomic DNA

SEQ ID NO: 74102 - DNA, 714 bp, Methanobrevibacter gottschalkii; identical to SEQ ID NO: 7065
  source 1..714: mol_type = genomic DNA

SEQ ID NO: 74103 - DNA, 846 bp, Methanobrevibacter gottschalkii; identical to SEQ ID NO: 7067
  source 1..846: mol_type = genomic DNA

SEQ ID NO: 74104 - DNA, 3657 bp, Methanobrevibacter gottschalkii; identical to SEQ ID NO: 7071
  source 1..3657: mol_type = genomic DNA

SEQ ID NO: 74105 - DNA, 3609 bp, Methanobrevibacter gottschalkii; identical to SEQ ID NO: 7077
  source 1..3609: mol_type = genomic DNA

SEQ ID NO: 74106 - DNA, 4830 bp, Methanobrevibacter gottschalkii; identical to SEQ ID NO: 7097
  source 1..4830: mol_type = genomic DNA

SEQ ID NO: 74107 - DNA, 507 bp, Methanobrevibacter gottschalkii; identical to SEQ ID NO: 7103
  source 1..507: mol_type = genomic DNA

SEQ ID NO: 74108 - DNA, 1386 bp, Methanobrevibacter gottschalkii; identical to SEQ ID NO: 7118
  source 1..1386: mol_type = genomic DNA

SEQ ID NO: 74109 - DNA, 687 bp, Methanobrevibacter gottschalkii; identical to SEQ ID NO: 7121
  source 1..687: mol_type = genomic DNA

SEQ ID NO: 74110 - DNA, 1650 bp, Methanobrevibacter gottschalkii; identical to SEQ ID NO: 7127
  source 1..1650: mol_type = genomic DNA

SEQ ID NO: 74111 - DNA, 576 bp, Methanobrevibacter gottschalkii; identical to SEQ ID NO: 7134
  source 1..576: mol_type = genomic DNA

SEQ ID NO: 74112 - DNA, 357 bp, Methanobrevibacter gottschalkii; identical to SEQ ID NO: 7135
  source 1..357: mol_type = genomic DNA

SEQ ID NO: 74113 - DNA, 222 bp, Methanobrevibacter gottschalkii; identical to SEQ ID NO: 7136
  source 1..222: mol_type = genomic DNA

SEQ ID NO: 74114 - DNA, 1029 bp, Methanobrevibacter gottschalkii; identical to SEQ ID NO: 7137
  source 1..1029: mol_type = genomic DNA

SEQ ID NO: 74115 - DNA, 237 bp, Methanobrevibacter gottschalkii; identical to SEQ ID NO: 7143
  source 1..237: mol_type = genomic DNA

SEQ ID NO: 74116 - DNA, 345 bp, Methanobrevibacter gottschalkii; identical to SEQ ID NO: 7144
  source 1..345: mol_type = genomic DNA

SEQ ID NO: 74117 - DNA, 516 bp, Methanobrevibacter gottschalkii; identical to SEQ ID NO: 7145
  source 1..516: mol_type = genomic DNA

SEQ ID NO: 74118 - DNA, 258 bp, Methanobrevibacter gottschalkii; identical to SEQ ID NO: 7152
  source 1..258: mol_type = genomic DNA

SEQ ID NO: 74119 - DNA, 2664 bp, Methanobrevibacter gottschalkii; identical to SEQ ID NO: 7158
  source 1..2664: mol_type = genomic DNA

SEQ ID NO: 74120 - DNA, 549 bp, Methanobrevibacter gottschalkii; identical to SEQ ID NO: 7162
  source 1..549: mol_type = genomic DNA

SEQ ID NO: 74121 - DNA, 354 bp, Methanobrevibacter gottschalkii; identical to SEQ ID NO: 7170
  source 1..354: mol_type = genomic DNA

SEQ ID NO: 74122 - DNA, 252 bp, Methanobrevibacter gottschalkii; identical to SEQ ID NO: 7192
  source 1..252: mol_type = genomic DNA

SEQ ID NO: 74123 - DNA, 270 bp, Methanobrevibacter gottschalkii; identical to SEQ ID NO: 7193
  source 1..270: mol_type = genomic DNA

SEQ ID NO: 74124 - DNA, 384 bp, Methanobrevibacter gottschalkii; identical to SEQ ID NO: 7197
  source 1..384: mol_type = genomic DNA

SEQ ID NO: 74125 - DNA, 570 bp, Methanobrevibacter gottschalkii; identical to SEQ ID NO: 7199
  source 1..570: mol_type = genomic DNA

SEQ ID NO: 74126 - DNA, 1791 bp, Methanobrevibacter gottschalkii; identical to SEQ ID NO: 7239
  source 1..1791: mol_type = genomic DNA

SEQ ID NO: 74127 - DNA, 1746 bp, Methanobrevibacter gottschalkii; identical to SEQ ID NO: 7240
  source 1..1746: mol_type = genomic DNA

SEQ ID NO: 74128 - DNA, 582 bp, Methanobrevibacter gottschalkii; identical to SEQ ID NO: 7241
  source 1..582: mol_type = genomic DNA

SEQ ID NO: 74129 - DNA, 1434 bp, Methanobrevibacter gottschalkii; identical to SEQ ID NO: 7243
  source 1..1434: mol_type = genomic DNA

SEQ ID NO: 74130 - DNA, 717 bp, Methanobrevibacter gottschalkii; identical to SEQ ID NO: 7248
  source 1..717: mol_type = genomic DNA

SEQ ID NO: 74131 - DNA, 2355 bp, Methanobrevibacter gottschalkii; identical to SEQ ID NO: 7250
  source 1..2355: mol_type = genomic DNA

SEQ ID NO: 74132 - DNA, 1371 bp, Methanobrevibacter gottschalkii; identical to SEQ ID NO: 7251
  source 1..1371: mol_type = genomic DNA

SEQ ID NO: 74133 - DNA, 1629 bp, Methanobrevibacter gottschalkii; identical to SEQ ID NO: 7256
  source 1..1629: mol_type = genomic DNA

SEQ ID NO: 74134 - DNA, 1620 bp, Methanobrevibacter gottschalkii; identical to SEQ ID NO: 7257
  source 1..1620: mol_type = genomic DNA

SEQ ID NO: 74135 - DNA, 1089 bp, Methanobrevibacter gottschalkii; identical to SEQ ID NO: 7268
  source 1..1089: mol_type = genomic DNA

SEQ ID NO: 74136 - DNA, 1278 bp, Methanobrevibacter gottschalkii; identical to SEQ ID NO: 7274
  source 1..1278: mol_type = genomic DNA

SEQ ID NO: 74137 - DNA, 1077 bp, Methanobrevibacter gottschalkii; identical to SEQ ID NO: 7282
  source 1..1077: mol_type = genomic DNA

SEQ ID NO: 74138 - DNA, 1272 bp, Methanobrevibacter gottschalkii; identical to SEQ ID NO: 7285
  source 1..1272: mol_type = genomic DNA

SEQ ID NO: 74139 - DNA, 741 bp, Methanobrevibacter gottschalkii; identical to SEQ ID NO: 7305
  source 1..741: mol_type = genomic DNA

SEQ ID NO: 74140 - DNA, 387 bp, Methanobrevibacter gottschalkii; identical to SEQ ID NO: 7331
  source 1..387: mol_type = genomic DNA

SEQ ID NO: 74141 - DNA, 909 bp, Methanobrevibacter gottschalkii; identical to SEQ ID NO: 7332
  source 1..909: mol_type = genomic DNA

SEQ ID NO: 74142 - DNA, 2877 bp, Methanobrevibacter gottschalkii; identical to SEQ ID NO: 7335
  source 1..2877: mol_type = genomic DNA

SEQ ID NO: 74143 - DNA, 183 bp, Methanobrevibacter gottschalkii; identical to SEQ ID NO: 7339
  source 1..183: mol_type = genomic DNA

SEQ ID NO: 74144 - DNA, 207 bp, Methanobrevibacter gottschalkii; identical to SEQ ID NO: 7340
  source 1..207: mol_type = genomic DNA

SEQ ID NO: 74145 - DNA, 1149 bp, Methanobrevibacter gottschalkii; identical to SEQ ID NO: 7341
  source 1..1149: mol_type = genomic DNA

SEQ ID NO: 74146 - DNA, 273 bp, Methanobrevibacter gottschalkii; identical to SEQ ID NO: 7344
  source 1..273: mol_type = genomic DNA

SEQ ID NO: 74147 - DNA, 1821 bp, Methanobrevibacter gottschalkii; identical to SEQ ID NO: 7345
  source 1..1821: mol_type = genomic DNA

SEQ ID NO: 74148 - DNA, 279 bp, Methanobrevibacter gottschalkii; identical to SEQ ID NO: 7361
  source 1..279: mol_type = genomic DNA

SEQ ID NO: 74149 - DNA, 579 bp, Methanobrevibacter gottschalkii; identical to SEQ ID NO: 7378
  source 1..579: mol_type = genomic DNA

SEQ ID NO: 74150 - DNA, 1767 bp, Methanobrevibacter gottschalkii; identical to SEQ ID NO: 7383
  source 1..1767: mol_type = genomic DNA

SEQ ID NO: 74151 - DNA, 558 bp, Methanobrevibacter gottschalkii; identical to SEQ ID NO: 7384
  source 1..558: mol_type = genomic DNA

SEQ ID NO: 74152 - DNA, 423 bp, Methanobrevibacter gottschalkii; identical to SEQ ID NO: 7390
  source 1..423: mol_type = genomic DNA

SEQ ID NO: 74153 - DNA, 171 bp, Methanobrevibacter gottschalkii; identical to SEQ ID NO: 7392
  source 1..171: mol_type = genomic DNA

SEQ ID NO: 74154 - DNA, 1656 bp, Methanobrevibacter gottschalkii; identical to SEQ ID NO: 7410
  source 1..1656: mol_type = genomic DNA

SEQ ID NO: 74155 - DNA, 1332 bp, Methanobrevibacter gottschalkii; identical to SEQ ID NO: 7413
  source 1..1332: mol_type = genomic DNA

SEQ ID NO: 74156 - DNA, 1005 bp, Methanobrevibacter gottschalkii; identical to SEQ ID NO: 7421
  source 1..1005: mol_type = genomic DNA

SEQ ID NO: 74157 - DNA, 1476 bp, Methanobrevibacter gottschalkii; identical to SEQ ID NO: 7424
  source 1..1476: mol_type = genomic DNA

SEQ ID NO: 74158 - DNA, 939 bp, Methanobrevibacter gottschalkii; identical to SEQ ID NO: 7432
  source 1..939: mol_type = genomic DNA

SEQ ID NO: 74159 - DNA, 1047 bp, Methanobrevibacter gottschalkii; identical to SEQ ID NO: 7434
  source 1..1047: mol_type = genomic DNA

SEQ ID NO: 74160 - DNA, 2097 bp, Methanobrevibacter gottschalkii; identical to SEQ ID NO: 7437
  source 1..2097: mol_type = genomic DNA

SEQ ID NO: 74161 - DNA, 2628 bp, Methanobrevibacter gottschalkii; identical to SEQ ID NO: 7441
  source 1..2628: mol_type = genomic DNA

SEQ ID NO: 74162 - DNA, 480 bp, Methanobrevibacter gottschalkii; identical to SEQ ID NO: 7442
  source 1..480: mol_type = genomic DNA

SEQ ID NO: 74163 - DNA, 1380 bp, Methanobrevibacter gottschalkii; identical to SEQ ID NO: 7454
  source 1..1380: mol_type = genomic DNA

SEQ ID NO: 74164 - DNA, 396 bp, Methanobrevibacter gottschalkii; identical to SEQ ID NO: 7456
  source 1..396: mol_type = genomic DNA

SEQ ID NO: 74165 - DNA, 450 bp, Methanobrevibacter gottschalkii; identical to SEQ ID NO: 7457
  source 1..450: mol_type = genomic DNA

SEQ ID NO: 74166 - DNA, 468 bp, Methanobrevibacter gottschalkii; identical to SEQ ID NO: 7469
  source 1..468: mol_type = genomic DNA

SEQ ID NO: 74167 - DNA, 999 bp, Methanobrevibacter gottschalkii; identical to SEQ ID NO: 7473
  source 1..999: mol_type = genomic DNA

SEQ ID NO: 74168 - DNA, 1488 bp, Methanobrevibacter gottschalkii; identical to SEQ ID NO: 7483
  source 1..1488: mol_type = genomic DNA

SEQ ID NO: 74169 - DNA, 369 bp, Methanobrevibacter gottschalkii; identical to SEQ ID NO: 7515
  source 1..369: mol_type = genomic DNA

SEQ ID NO: 74170 - DNA, 774 bp, Methanobrevibacter gottschalkii; identical to SEQ ID NO: 7524
  source 1..774: mol_type = genomic DNA

SEQ ID NO: 74171 - DNA, 849 bp, Methanobrevibacter gottschalkii; identical to SEQ ID NO: 7526
  source 1..849: mol_type = genomic DNA

SEQ ID NO: 74172 - DNA, 2049 bp, Methanobrevibacter gottschalkii; identical to SEQ ID NO: 7534
  source 1..2049: mol_type = genomic DNA

SEQ ID NO: 74173 - DNA, 480 bp, Methanobrevibacter gottschalkii; identical to SEQ ID NO: 7537
  source 1..480: mol_type = genomic DNA

SEQ ID NO: 74174 - DNA, 246 bp, Methanobrevibacter gottschalkii; identical to SEQ ID NO: 7538
  source 1..246: mol_type = genomic DNA

SEQ ID NO: 74175 - DNA, 666 bp, Methanobrevibacter gottschalkii; identical to SEQ ID NO: 7540
  source 1..666: mol_type = genomic DNA

SEQ ID NO: 74176 - DNA, 288 bp, Methanobrevibacter gottschalkii; identical to SEQ ID NO: 7541
  source 1..288: mol_type = genomic DNA

SEQ ID NO: 74177 - DNA, 690 bp, Methanobrevibacter gottschalkii; identical to SEQ ID NO: 7542
  source 1..690: mol_type = genomic DNA

SEQ ID NO: 74178 - DNA, 843 bp, Methanobrevibacter gottschalkii; identical to SEQ ID NO: 7543
  source 1..843: mol_type = genomic DNA

SEQ ID NO: 74179 - DNA, 348 bp, Methanobrevibacter gottschalkii; identical to SEQ ID NO: 7546
  source 1..348: mol_type = genomic DNA

SEQ ID NO: 74180 - DNA, 180 bp, Methanobrevibacter gottschalkii; identical to SEQ ID NO: 7558
  source 1..180: mol_type = genomic DNA

SEQ ID NO: 74181 - DNA, 849 bp, Methanobrevibacter gottschalkii; identical to SEQ ID NO: 7559
  source 1..849: mol_type = genomic DNA

SEQ ID NO: 74182 - DNA, 540 bp, Methanobrevibacter gottschalkii; identical to SEQ ID NO: 7565
  source 1..540: mol_type = genomic DNA

SEQ ID NO: 74183 - DNA, 540 bp, Methanobrevibacter gottschalkii; identical to SEQ ID NO: 7577
  source 1..540: mol_type = genomic DNA

SEQ ID NO: 74184 - DNA, 609 bp, Methanobrevibacter gottschalkii; identical to SEQ ID NO: 7583
  source 1..609: mol_type = genomic DNA

SEQ ID NO: 74185 - DNA, 885 bp, Methanobrevibacter gottschalkii; identical to SEQ ID NO: 7586
  source 1..885: mol_type = genomic DNA

SEQ ID NO: 74186 - DNA, 420 bp, Methanobrevibacter gottschalkii; identical to SEQ ID NO: 7599
  source 1..420: mol_type = genomic DNA

SEQ ID NO: 74187 - DNA, 231 bp, Methanobrevibacter gottschalkii; identical to SEQ ID NO: 7603
  source 1..231: mol_type = genomic DNA

SEQ ID NO: 74188 - DNA, 1392 bp, Methanobrevibacter gottschalkii; identical to SEQ ID NO: 7605
  source 1..1392: mol_type = genomic DNA

SEQ ID NO: 74189 - DNA, 315 bp, Methanobrevibacter gottschalkii; identical to SEQ ID NO: 7615
  source 1..315: mol_type = genomic DNA

SEQ ID NO: 74190 - DNA, 732 bp, Methanobrevibacter gottschalkii; identical to SEQ ID NO: 7617
  source 1..732: mol_type = genomic DNA

SEQ ID NO: 74191 - DNA, 825 bp, Methanobrevibacter gottschalkii; identical to SEQ ID NO: 7618
  source 1..825: mol_type = genomic DNA

SEQ ID NO: 74192 - DNA, 633 bp, Methanobrevibacter gottschalkii; identical to SEQ ID NO: 7619
  source 1..633: mol_type = genomic DNA

SEQ ID NO: 74193 - DNA, 636 bp, Methanobrevibacter gottschalkii; identical to SEQ ID NO: 7626
  source 1..636: mol_type = genomic DNA

SEQ ID NO: 74194 - DNA, 1356 bp, Methanobrevibacter gottschalkii; identical to SEQ ID NO: 7627
  source 1..1356: mol_type = genomic DNA

SEQ ID NO: 74195 - DNA, 867 bp, Methanobrevibacter gottschalkii; identical to SEQ ID NO: 7632
  source 1..867: mol_type = genomic DNA

SEQ ID NO: 74196 - DNA, 429 bp, Methanobrevibacter gottschalkii; identical to SEQ ID NO: 7633
  source 1..429: mol_type = genomic DNA

SEQ ID NO: 74197 - DNA, 804 bp, Methanobrevibacter gottschalkii; identical to SEQ ID NO: 7634
  source 1..804: mol_type = genomic DNA

SEQ ID NO: 74198 - DNA, 384 bp, Methanobrevibacter gottschalkii; identical to SEQ ID NO: 7638
  source 1..384: mol_type = genomic DNA

SEQ ID NO: 74199 - DNA, 1032 bp, Methanobrevibacter gottschalkii; identical to SEQ ID NO: 7642
  source 1..1032: mol_type = genomic DNA

SEQ ID NO: 74200 - DNA, 711 bp, Methanobrevibacter gottschalkii; identical to SEQ ID NO: 7647
  source 1..711: mol_type = genomic DNA

SEQ ID NO: 74201 - DNA, 675 bp, Methanobrevibacter gottschalkii; identical to SEQ ID NO: 7648
  source 1..675: mol_type = genomic DNA

SEQ ID NO: 74202 - DNA, 1083 bp, Methanobrevibacter gottschalkii; identical to SEQ ID NO: 7668
  source 1..1083: mol_type = genomic DNA

SEQ ID NO: 74203 - DNA, 432 bp, Methanobrevibacter gottschalkii; identical to SEQ ID NO: 7672
  source 1..432: mol_type = genomic DNA

SEQ ID NO: 74204 - DNA, 732 bp, Methanobrevibacter gottschalkii; identical to SEQ ID NO: 7673
  source 1..732: mol_type = genomic DNA

SEQ ID NO: 74205 - DNA, 1029 bp, Methanobrevibacter gottschalkii; identical to SEQ ID NO: 7674
  source 1..1029: mol_type = genomic DNA

SEQ ID NO: 74206 - DNA, 396 bp, Methanobrevibacter gottschalkii; identical to SEQ ID NO: 7676
  source 1..396: mol_type = genomic DNA

SEQ ID NO: 74207 - DNA, 498 bp, Methanobrevibacter gottschalkii; identical to SEQ ID NO: 7677
  source 1..498: mol_type = genomic DNA

SEQ ID NO: 74208 - DNA, 570 bp, Methanobrevibacter gottschalkii; identical to SEQ ID NO: 7690
  source 1..570: mol_type = genomic DNA

SEQ ID NO: 74209 - DNA, 630 bp, Methanobrevibacter gottschalkii; identical to SEQ ID NO: 7699
  source 1..630: mol_type = genomic DNA

SEQ ID NO: 74210 - DNA, 2727 bp, Methanobrevibacter gottschalkii; identical to SEQ ID NO: 7701
  source 1..2727: mol_type = genomic DNA

SEQ ID NO: 74211 - DNA, 1014 bp, Methanobrevibacter gottschalkii; identical to SEQ ID NO: 7705
  source 1..1014: mol_type = genomic DNA

SEQ ID NO: 74212 - DNA, 789 bp, Methanobrevibacter gottschalkii; identical to SEQ ID NO: 7712
  source 1..789: mol_type = genomic DNA

SEQ ID NO: 74213 - DNA, 1059 bp, Methanobrevibacter gottschalkii; identical to SEQ ID NO: 7722
  source 1..1059: mol_type = genomic DNA

SEQ ID NO: 74214 - DNA, 306 bp, Methanobrevibacter gottschalkii; identical to SEQ ID NO: 7726
  source 1..306: mol_type = genomic DNA

SEQ ID NO: 74215 - DNA, 1092 bp, Methanobrevibacter gottschalkii; identical to SEQ ID NO: 7729
  source 1..1092: mol_type = genomic DNA

SEQ ID NO: 74216 - DNA, 387 bp, Methanobrevibacter gottschalkii; identical to SEQ ID NO: 7738
  source 1..387: mol_type = genomic DNA

SEQ ID NO: 74217 - DNA, 1071 bp, Methanobrevibacter gottschalkii; identical to SEQ ID NO: 7741
  source 1..1071: mol_type = genomic DNA

SEQ ID NO: 74218 - DNA, 1698 bp, Methanobrevibacter gottschalkii; identical to SEQ ID NO: 7750
  source 1..1698: mol_type = genomic DNA

SEQ ID NO: 74219 - DNA, 855 bp, Methanobrevibacter gottschalkii; identical to SEQ ID NO: 7751
  source 1..855: mol_type = genomic DNA

SEQ ID NO: 74220 - DNA, 1386 bp, Methanobrevibacter gottschalkii; identical to SEQ ID NO: 7755
  source 1..1386: mol_type = genomic DNA

SEQ ID NO: 74221 - DNA, 651 bp, Methanobrevibacter gottschalkii; identical to SEQ ID NO: 7757
  source 1..651: mol_type = genomic DNA

SEQ ID NO: 74222 - DNA, 480 bp, Methanobrevibacter gottschalkii; identical to SEQ ID NO: 7758
  source 1..480: mol_type = genomic DNA

SEQ ID NO: 74223 - DNA, 438 bp, Methanobrevibacter gottschalkii; identical to SEQ ID NO: 7765
  source 1..438: mol_type = genomic DNA

SEQ ID NO: 74224 - DNA, 534 bp, Methanobrevibacter gottschalkii; identical to SEQ ID NO: 7767
  source 1..534: mol_type = genomic DNA

SEQ ID NO: 74225 - DNA, 1926 bp, Methanobrevibacter gottschalkii; identical to SEQ ID NO: 7768
  source 1..1926: mol_type = genomic DNA

SEQ ID NO: 74226 - DNA, 1110 bp, Methanobrevibacter gottschalkii; identical to SEQ ID NO: 7772
  source 1..1110: mol_type = genomic DNA

SEQ ID NO: 74227 - DNA, 519 bp, Methanobrevibacter gottschalkii; identical to SEQ ID NO: 7785
  source 1..519: mol_type = genomic DNA

SEQ ID NO: 74228 - DNA, 2430 bp, Methanobrevibacter gottschalkii; identical to SEQ ID NO: 7788
  source 1..2430: mol_type = genomic DNA

SEQ ID NO: 74229 - DNA, 933 bp, Methanobrevibacter gottschalkii; identical to SEQ ID NO: 7810
  source 1..933: mol_type = genomic DNA

SEQ ID NO: 74230 - DNA, 783 bp, Methanobrevibacter gottschalkii; identical to SEQ ID NO: 7821
  source 1..783: mol_type = genomic DNA

SEQ ID NO: 74231 - DNA, 999 bp, Methanobrevibacter gottschalkii; identical to SEQ ID NO: 7826
  source 1..999: mol_type = genomic DNA

SEQ ID NO: 74232 - DNA, 216 bp, Methanobrevibacter gottschalkii; identical to SEQ ID NO: 7828
  source 1..216: mol_type = genomic DNA

SEQ ID NO: 74233 - DNA, 846 bp, Methanobrevibacter gottschalkii; identical to SEQ ID NO: 7831
  source 1..846: mol_type = genomic DNA

SEQ ID NO: 74234 - DNA, 1545 bp, Methanobrevibacter gottschalkii; identical to SEQ ID NO: 7834
  source 1..1545: mol_type = genomic DNA

SEQ ID NO: 74235 - DNA, 939 bp, Methanobrevibacter gottschalkii; identical to SEQ ID NO: 7847
  source 1..939: mol_type = genomic DNA

SEQ ID NO: 74236 - DNA, 1869 bp, Methanobrevibacter gottschalkii; identical to SEQ ID NO: 7852
  source 1..1869: mol_type = genomic DNA

SEQ ID NO: 74237 - DNA, 1068 bp, Methanobrevibacter gottschalkii; identical to SEQ ID NO: 7857
  source 1..1068: mol_type = genomic DNA

SEQ ID NO: 74238 - DNA, 411 bp, Methanobrevibacter gottschalkii; identical to SEQ ID NO: 7869
  source 1..411: mol_type = genomic DNA

SEQ ID NO: 74239 - DNA, 696 bp, Methanobrevibacter gottschalkii; identical to SEQ ID NO: 7874
  source 1..696: mol_type = genomic DNA

SEQ ID NO: 74240 - DNA, 1170 bp, Methanobrevibacter gottschalkii; identical to SEQ ID NO: 7875
  source 1..1170: mol_type = genomic DNA

SEQ ID NO: 74241 - DNA, 720 bp, Methanobrevibacter gottschalkii; identical to SEQ ID NO: 7876
  source 1..720: mol_type = genomic DNA

SEQ ID NO: 74242 - DNA, 1137 bp, Methanobrevibacter gottschalkii; identical to SEQ ID NO: 7882
  source 1..1137: mol_type = genomic DNA

SEQ ID NO: 74243 - DNA, 1236 bp, Methanobrevibacter gottschalkii; identical to SEQ ID NO: 7885
  source 1..1236: mol_type = genomic DNA

SEQ ID NO: 74244 - DNA, 933 bp, Methanobrevibacter gottschalkii; identical to SEQ ID NO: 7894
  source 1..933: mol_type = genomic DNA

SEQ ID NO: 74245 - DNA, 240 bp, Methanobrevibacter gottschalkii; identical to SEQ ID NO: 7895
  source 1..240: mol_type = genomic DNA

SEQ ID NO: 74246 - DNA, 207 bp, Methanobrevibacter gottschalkii; identical to SEQ ID NO: 7896
  source 1..207: mol_type = genomic DNA

SEQ ID NO: 74247 - DNA, 717 bp, Methanobrevibacter gottschalkii; identical to SEQ ID NO: 7897
  source 1..717: mol_type = genomic DNA

SEQ ID NO: 74248 - DNA, 330 bp, Methanobrevibacter gottschalkii; identical to SEQ ID NO: 7898
  source 1..330: mol_type = genomic DNA

SEQ ID NO: 74249 - DNA, 816 bp, Methanobrevibacter gottschalkii; identical to SEQ ID NO: 7899
  source 1..816: mol_type = genomic DNA

SEQ ID NO: 74250 - DNA, 702 bp, Methanobrevibacter gottschalkii; identical to SEQ ID NO: 7900
  source 1..702: mol_type = genomic DNA

SEQ ID NO: 74251 - DNA, 879 bp, Methanobrevibacter gottschalkii; identical to SEQ ID NO: 7901
  source 1..879: mol_type = genomic DNA

SEQ ID NO: 74252 - DNA, 1332 bp, Methanobrevibacter gottschalkii; identical to SEQ ID NO: 7906
  source 1..1332: mol_type = genomic DNA

SEQ ID NO: 74253 - DNA, 1173 bp, Methanobrevibacter gottschalkii; identical to SEQ ID NO: 7911
  source 1..1173: mol_type = genomic DNA

SEQ ID NO: 74254 - DNA, 1320 bp, Methanobrevibacter gottschalkii; identical to SEQ ID NO: 7913
  source 1..1320: mol_type = genomic DNA

SEQ ID NO: 74255 - DNA, 945 bp, Methanobrevibacter gottschalkii; identical to SEQ ID NO: 7914
  source 1..945: mol_type = genomic DNA

SEQ ID NO: 74256 - DNA, 1023 bp, Methanobrevibacter gottschalkii; identical to SEQ ID NO: 7930
  source 1..1023: mol_type = genomic DNA

SEQ ID NO: 74257 - DNA, 726 bp, Methanobrevibacter gottschalkii; identical to SEQ ID NO: 7937
  source 1..726: mol_type = genomic DNA

SEQ ID NO: 74258 - DNA, 1479 bp, Methanobrevibacter gottschalkii; identical to SEQ ID NO: 7944
  source 1..1479: mol_type = genomic DNA

SEQ ID NO: 74259 - DNA, 999 bp, Methanobrevibacter gottschalkii; identical to SEQ ID NO: 7949
  source 1..999: mol_type = genomic DNA

SEQ ID NO: 74260 - DNA, 447 bp, Methanobrevibacter gottschalkii; identical to SEQ ID NO: 7951
  source 1..447: mol_type = genomic DNA

SEQ ID NO: 74261 - DNA, 492 bp, Methanobrevibacter gottschalkii; identical to SEQ ID NO: 7952
  source 1..492: mol_type = genomic DNA

SEQ ID NO: 74262 - DNA, 252 bp, Methanobrevibacter gottschalkii; identical to SEQ ID NO: 7954
  source 1..252: mol_type = genomic DNA

SEQ ID NO: 74263 - DNA, 282 bp, Methanobrevibacter gottschalkii; identical to SEQ ID NO: 7956
  source 1..282: mol_type = genomic DNA

SEQ ID NO: 74264 - DNA, 336 bp, Methanobrevibacter gottschalkii; identical to SEQ ID NO: 7957
  source 1..336: mol_type = genomic DNA

SEQ ID NO: 74265 - DNA, 1455 bp, Methanobrevibacter gottschalkii; identical to SEQ ID NO: 7958
  source 1..1455: mol_type = genomic DNA

SEQ ID NO: 74266 - DNA, 387 bp, Methanobrevibacter gottschalkii; identical to SEQ ID NO: 7959
  source 1..387: mol_type = genomic DNA

SEQ ID NO: 74267 - DNA, 423 bp, Methanobrevibacter gottschalkii; identical to SEQ ID NO: 7961
  source 1..423: mol_type = genomic DNA

SEQ ID NO: 74268 - DNA, 267 bp, Methanobrevibacter gottschalkii; identical to SEQ ID NO: 7962
  source 1..267: mol_type = genomic DNA

SEQ ID NO: 74269 - DNA, 966 bp, Methanobrevibacter gottschalkii; identical to SEQ ID NO: 7964
  source 1..966: mol_type = genomic DNA

SEQ ID NO: 74270 - DNA, 705 bp, Methanobrevibacter gottschalkii; identical to SEQ ID NO: 7965
  source 1..705: mol_type = genomic DNA

SEQ ID NO: 74271 - DNA, 1134 bp, Methanobrevibacter gottschalkii; identical to SEQ ID NO: 7972
  source 1..1134: mol_type = genomic DNA

SEQ ID NO: 74272 - DNA, 1434 bp, Methanobrevibacter gottschalkii; identical to SEQ ID NO: 7975
  source 1..1434: mol_type = genomic DNA

SEQ ID NO: 74273 - DNA, 807 bp, Methanobrevibacter gottschalkii; identical to SEQ ID NO: 7981
  source 1..807: mol_type = genomic DNA

SEQ ID NO: 74274 - DNA, 1425 bp, Methanobrevibacter gottschalkii; identical to SEQ ID NO: 7984
  source 1..1425: mol_type = genomic DNA

SEQ ID NO: 74275 - DNA, 4815 bp, Methanobrevibacter gottschalkii; identical to SEQ ID NO: 7996
  source 1..4815: mol_type = genomic DNA

SEQ ID NO: 74276 - DNA, 843 bp, Methanobrevibacter gottschalkii; identical to SEQ ID NO: 7997
  source 1..843: mol_type = genomic DNA

SEQ ID NO: 74277 - DNA, 531 bp, Methanobrevibacter gottschalkii; identical to SEQ ID NO: 7999
  source 1..531: mol_type = genomic DNA

SEQ ID NO: 74278 - DNA, 411 bp, Methanobrevibacter gottschalkii; identical to SEQ ID NO: 8000
  source 1..411: mol_type = genomic DNA

SEQ ID NO: 74279 - DNA, 570 bp, Methanobrevibacter gottschalkii; identical to SEQ ID NO: 8004
  source 1..570: mol_type = genomic DNA

SEQ ID NO: 74280 - DNA, 1215 bp, Methanobrevibacter gottschalkii; identical to SEQ ID NO: 8005
  source 1..1215: mol_type = genomic DNA

SEQ ID NO: 74281 - DNA, 402 bp, Methanobrevibacter gottschalkii; identical to SEQ ID NO: 8022
  source 1..402: mol_type = genomic DNA

SEQ ID NO: 74282 - DNA, 777 bp, Methanobrevibacter gottschalkii; identical to SEQ ID NO: 8023
  source 1..777: mol_type = genomic DNA

SEQ ID NO: 74283 - DNA, 2493 bp, Methanobrevibacter gottschalkii; identical to SEQ ID NO: 8026
  source 1..2493: mol_type = genomic DNA

SEQ ID NO: 74284 - DNA, 438 bp, Methanobrevibacter gottschalkii; identical to SEQ ID NO: 8031
  source 1..438: mol_type = genomic DNA

SEQ ID NO: 74285 - DNA, 486 bp, Methanobrevibacter gottschalkii; identical to SEQ ID NO: 8036
  source 1..486: mol_type = genomic DNA

SEQ ID NO: 74286 - DNA, 906 bp, Methanobrevibacter gottschalkii; identical to SEQ ID NO: 8037
  source 1..906: mol_type = genomic DNA

SEQ ID NO: 74287 - DNA, 408 bp, Methanobrevibacter gottschalkii; identical to SEQ ID NO: 8038
  source 1..408: mol_type = genomic DNA

SEQ ID NO: 74288 - DNA, 216 bp, Methanobrevibacter gottschalkii; identical to SEQ ID NO: 8039
  source 1..216: mol_type = genomic DNA

SEQ ID NO: 74289 - DNA, 2121 bp, Methanobrevibacter gottschalkii; identical to SEQ ID NO: 8043
  source 1..2121: mol_type = genomic DNA

SEQ ID NO: 74290 - DNA, 852 bp, Methanobrevibacter gottschalkii; identical to SEQ ID NO: 8044
  source 1..852: mol_type = genomic DNA

SEQ ID NO: 74291 - DNA, 330 bp, Methanobrevibacter gottschalkii; identical to SEQ ID NO: 8047
  source 1..330: mol_type = genomic DNA

SEQ ID NO: 74292 - DNA, 957 bp, Methanobrevibacter gottschalkii; identical to SEQ ID NO: 8052
  source 1..957: mol_type = genomic DNA

SEQ ID NO: 74293 - DNA, 585 bp, Methanobrevibacter gottschalkii; identical to SEQ ID NO: 8078
  source 1..585: mol_type = genomic DNA

SEQ ID NO: 74294 - DNA, 339 bp, Methanobrevibacter gottschalkii; identical to SEQ ID NO: 8079
  source 1..339: mol_type = genomic DNA

SEQ ID NO: 74295 - DNA, 684 bp, Methanobrevibacter gottschalkii; identical to SEQ ID NO: 8081
  source 1..684: mol_type = genomic DNA

SEQ ID NO: 74296 - DNA, 516 bp, Methanobrevibacter gottschalkii; identical to SEQ ID NO: 8082
  source 1..516: mol_type = genomic DNA

SEQ ID NO: 74297 - DNA, 2931 bp, Methanobrevibacter gottschalkii; identical to SEQ ID NO: 8083
  source 1..2931: mol_type = genomic DNA

SEQ ID NO: 74298 - DNA, 624 bp, Methanobrevibacter gottschalkii; identical to SEQ ID NO: 8084
  source 1..624: mol_type = genomic DNA

SEQ ID NO: 74299 - DNA, 483 bp, Methanobrevibacter gottschalkii; identical to SEQ ID NO: 8085
  source 1..483: mol_type = genomic DNA

SEQ ID NO: 74300 - DNA, 1062 bp, Methanobrevibacter gottschalkii; identical to SEQ ID NO: 8091
  source 1..1062: mol_type = genomic DNA

SEQ ID NO: 74301 - DNA, 903 bp, Methanobrevibacter gottschalkii; identical to SEQ ID NO: 8092
  source 1..903: mol_type = genomic DNA

SEQ ID NO: 74302 - DNA, 333 bp, Methanobrevibacter gottschalkii; identical to SEQ ID NO: 8101
  source 1..333: mol_type = genomic DNA

SEQ ID NO: 74303 - DNA, 834 bp, Methanobrevibacter gottschalkii; identical to SEQ ID NO: 8103
  source 1..834: mol_type = genomic DNA

SEQ ID NO: 74304 - DNA, 1365 bp, Methanobrevibacter gottschalkii; identical to SEQ ID NO: 8105
  source 1..1365: mol_type = genomic DNA

SEQ ID NO: 74305 - DNA, 426 bp, Methanobrevibacter gottschalkii; identical to SEQ ID NO: 8109
  source 1..426: mol_type = genomic DNA

SEQ ID NO: 74306 - DNA, 1113 bp, Methanobrevibacter gottschalkii; identical to SEQ ID NO: 8116
  source 1..1113: mol_type = genomic DNA

SEQ ID NO: 74307 - DNA, 1206 bp, Methanobrevibacter gottschalkii; identical to SEQ ID NO: 8124
  source 1..1206: mol_type = genomic DNA

SEQ ID NO: 74308 - DNA, 408 bp, Methanobrevibacter gottschalkii; identical to SEQ ID NO: 8127
  source 1..408: mol_type = genomic DNA

SEQ ID NO: 74309 - DNA, 1644 bp, Methanobrevibacter gottschalkii; identical to SEQ ID NO: 8134
  source 1..1644: mol_type = genomic DNA

SEQ ID NO: 74310 - DNA, 1305 bp, Methanobrevibacter gottschalkii; identical to SEQ ID NO: 8135
  source 1..1305: mol_type = genomic DNA

SEQ ID NO: 74311 - DNA, 1035 bp, Methanobrevibacter gottschalkii; identical to SEQ ID NO: 8142
  source 1..1035: mol_type = genomic DNA

SEQ ID NO: 74312 - DNA, 1272 bp, Methanobrevibacter gottschalkii; identical to SEQ ID NO: 8151
  source 1..1272: mol_type = genomic DNA

SEQ ID NO: 74313 - DNA, 867 bp, Methanobrevibacter gottschalkii; identical to SEQ ID NO: 8152
  source 1..867: mol_type = genomic DNA

SEQ ID NO: 74314 - DNA, 939 bp, Methanobrevibacter gottschalkii; identical to SEQ ID NO: 8153
  source 1..939: mol_type = genomic DNA

SEQ ID NO: 74315 - DNA, 1698 bp, Methanobrevibacter gottschalkii; identical to SEQ ID NO: 8163
  source 1..1698: mol_type = genomic DNA

SEQ ID NO: 74316 - DNA, 102 bp, Methanobrevibacter gottschalkii; identical to SEQ ID NO: 8166
  source 1..102: mol_type = genomic DNA

SEQ ID NO: 74317 - DNA, 1245 bp, Methanobrevibacter gottschalkii; identical to SEQ ID NO: 8169
  source 1..1245: mol_type = genomic DNA

SEQ ID NO: 74318 - DNA, 318 bp, Methanobrevibacter gottschalkii; identical to SEQ ID NO: 8178
  source 1..318: mol_type = genomic DNA

SEQ ID NO: 74319 - DNA, 279 bp, Methanobrevibacter gottschalkii; identical to SEQ ID NO: 8179
  source 1..279: mol_type = genomic DNA

SEQ ID NO: 74320 - DNA, 1080 bp, Methanobrevibacter gottschalkii; identical to SEQ ID NO: 8180
  source 1..1080: mol_type = genomic DNA

SEQ ID NO: 74321 - DNA, 960 bp, Methanobrevibacter gottschalkii; identical to SEQ ID NO: 8182
  source 1..960: mol_type = genomic DNA

SEQ ID NO: 74322 - DNA, 858 bp, Methanobrevibacter gottschalkii; identical to SEQ ID NO: 8183
  source 1..858: mol_type = genomic DNA

SEQ ID NO: 74323 - DNA, 1404 bp, Methanobrevibacter gottschalkii; identical to SEQ ID NO: 8184
  source 1..1404: mol_type = genomic DNA

SEQ ID NO: 74324 - DNA, 1131 bp, Methanobrevibacter gottschalkii; identical to SEQ ID NO: 8198
  source 1..1131: mol_type = genomic DNA

SEQ ID NO: 74325 - DNA, 705 bp, Methanobrevibacter gottschalkii; identical to SEQ ID NO: 8201
  source 1..705: mol_type = genomic DNA

SEQ ID NO: 74326 - DNA, 963 bp, Methanobrevibacter gottschalkii; identical to SEQ ID NO: 8203
  source 1..963: mol_type = genomic DNA

SEQ ID NO: 74327 - DNA, 312 bp, Methanobrevibacter gottschalkii; identical to SEQ ID NO: 8204
  source 1..312: mol_type = genomic DNA

SEQ ID NO: 74328 - DNA, 1377 bp, Methanobrevibacter gottschalkii; identical to SEQ ID NO: 8217
  source 1..1377: mol_type = genomic DNA

SEQ ID NO: 74329 - DNA, 804 bp, Methanobrevibacter gottschalkii; identical to SEQ ID NO: 8239
  source 1..804: mol_type = genomic DNA

SEQ ID NO: 74330 - DNA, 1098 bp, Methanobrevibacter gottschalkii; identical to SEQ ID NO: 8245
  source 1..1098: mol_type = genomic DNA

SEQ ID NO: 74331 - DNA, 231 bp, Methanobrevibacter gottschalkii; identical to SEQ ID NO: 8246
  source 1..231: mol_type = genomic DNA

SEQ ID NO: 74332 - DNA, 570 bp, Methanobrevibacter gottschalkii; identical to SEQ ID NO: 8247
  source 1..570: mol_type = genomic DNA

SEQ ID NO: 74333 - DNA, 1683 bp, Methanobrevibacter gottschalkii; identical to SEQ ID NO: 8253
  source 1..1683: mol_type = genomic DNA

SEQ ID NO: 74334 - DNA, 2679 bp, Methanobrevibacter gottschalkii; identical to SEQ ID NO: 8269
  source 1..2679: mol_type = genomic DNA

SEQ ID NO: 74335 - DNA, 447 bp, Methanobrevibacter gottschalkii; identical to SEQ ID NO: 8274
  source 1..447: mol_type = genomic DNA

SEQ ID NO: 74336 - DNA, 942 bp, Methanobrevibacter gottschalkii; identical to SEQ ID NO: 8290
  source 1..942: mol_type = genomic DNA

SEQ ID NO: 74337 - DNA, 675 bp, Methanobrevibacter gottschalkii; identical to SEQ ID NO: 8299
  source 1..675: mol_type = genomic DNA

SEQ ID NO: 74338 - DNA, 5712 bp, Methanobrevibacter gottschalkii; identical to SEQ ID NO: 8303
  source 1..5712: mol_type = genomic DNA

SEQ ID NO: 74339 - DNA, 492 bp, Methanobrevibacter gottschalkii; identical to SEQ ID NO: 8305
  source 1..492: mol_type = genomic DNA

SEQ ID NO: 74340 - DNA, 1455 bp, Methanobrevibacter gottschalkii; identical to SEQ ID NO: 8312
  source 1..1455: mol_type = genomic DNA

SEQ ID NO: 74341 - DNA, 732 bp, Methanobrevibacter gottschalkii; identical to SEQ ID NO: 8314
  source 1..732: mol_type = genomic DNA

SEQ ID NO: 74342 - DNA, 627 bp, Methanobrevibacter gottschalkii; identical to SEQ ID NO: 8316
  source 1..627: mol_type = genomic DNA

SEQ ID NO: 74343 - DNA, 558 bp, Methanobrevibacter gottschalkii; identical to SEQ ID NO: 8328
  source 1..558: mol_type = genomic DNA

SEQ ID NO: 74344 - DNA, 675 bp, Methanobrevibacter gottschalkii; identical to SEQ ID NO: 8331
  source 1..675: mol_type = genomic DNA

SEQ ID NO: 74345 - DNA, 651 bp, Methanobrevibacter gottschalkii; identical to SEQ ID NO: 8332
  source 1..651: mol_type = genomic DNA

SEQ ID NO: 74346 - DNA, 180 bp, Methanobrevibacter gottschalkii; identical to SEQ ID NO: 8335
  source 1..180: mol_type = genomic DNA

SEQ ID NO: 74347 - DNA, 321 bp, Methanobrevibacter gottschalkii; identical to SEQ ID NO: 8337
  source 1..321: mol_type = genomic DNA

SEQ ID NO: 74348 - DNA, 696 bp, Methanobrevibacter gottschalkii; identical to SEQ ID NO: 8344
  source 1..696: mol_type = genomic DNA

SEQ ID NO: 74349 - DNA, 399 bp, Methanobrevibacter gottschalkii; identical to SEQ ID NO: 8354
  source 1..399: mol_type = genomic DNA

SEQ ID NO: 74350 - DNA, 4473 bp, Methanobrevibacter gottschalkii; identical to SEQ ID NO: 8361
  source 1..4473: mol_type = genomic DNA

SEQ ID NO: 74351 - DNA, 324 bp, Methanobrevibacter gottschalkii; identical to SEQ ID NO: 8362
  source 1..324: mol_type = genomic DNA

SEQ ID NO: 74352 - DNA, 333 bp, Methanobrevibacter gottschalkii; identical to SEQ ID NO: 8363
  source 1..333: mol_type = genomic DNA

SEQ ID NO: 74353 - DNA, 963 bp, Methanobrevibacter gottschalkii; identical to SEQ ID NO: 8367
  source 1..963: mol_type = genomic DNA

SEQ ID NO: 74354 - DNA, 909 bp, Methanobrevibacter gottschalkii; identical to SEQ ID NO: 8373
  source 1..909: mol_type = genomic DNA

SEQ ID NO: 74355 - DNA, 1887 bp, Methanobrevibacter gottschalkii; identical to SEQ ID NO: 8376
  source 1..1887: mol_type = genomic DNA

SEQ ID NO: 74356 - DNA, 3057 bp, Methanobrevibacter gottschalkii; identical to SEQ ID NO: 8387
  source 1..3057: mol_type = genomic DNA

SEQ ID NO: 74357 - DNA, 570 bp, Methanobrevibacter gottschalkii; identical to SEQ ID NO: 8394
  source 1..570: mol_type = genomic DNA

SEQ ID NO: 74358 - DNA, 1779 bp, Methanobrevibacter gottschalkii; identical to SEQ ID NO: 8400
  source 1..1779: mol_type = genomic DNA

SEQ ID NO: 74359 - DNA, 729 bp, Methanobrevibacter gottschalkii; identical to SEQ ID NO: 8405
  source 1..729: mol_type = genomic DNA

SEQ ID NO: 74360 - DNA, 1254 bp, Methanobrevibacter gottschalkii; identical to SEQ ID NO: 8410
  source 1..1254: mol_type = genomic DNA

SEQ ID NO: 74361 - DNA, 2019 bp, Methanobrevibacter gottschalkii; identical to SEQ ID NO: 8413
  source 1..2019: mol_type = genomic DNA

SEQ ID NO: 74362 - DNA, 843 bp, Methanobrevibacter gottschalkii; identical to SEQ ID NO: 8416
  source 1..843: mol_type = genomic DNA

SEQ ID NO: 74363 - DNA, 831 bp, Methanobrevibacter gottschalkii; identical to SEQ ID NO: 8417
  source 1..831: mol_type = genomic DNA

SEQ ID NO: 74364 - DNA, 639 bp, Methanobrevibacter gottschalkii; identical to SEQ ID NO: 8419
  source 1..639: mol_type = genomic DNA

SEQ ID NO: 74365 - DNA, 1275 bp, Methanobrevibacter gottschalkii; identical to SEQ ID NO: 8420
  source 1..1275: mol_type = genomic DNA

SEQ ID NO: 74366 - DNA, 774 bp, Methanobrevibacter gottschalkii; identical to SEQ ID NO: 8421
  source 1..774: mol_type = genomic DNA

SEQ ID NO: 74367 - DNA, 900 bp, Methanobrevibacter gottschalkii; identical to SEQ ID NO: 8431
  source 1..900: mol_type = genomic DNA

SEQ ID NO: 74368 - DNA, 501 bp, Methanobrevibacter gottschalkii; identical to SEQ ID NO: 8435
  source 1..501: mol_type = genomic DNA

SEQ ID NO: 74369 - DNA, 483 bp, Methanobrevibacter gottschalkii; identical to SEQ ID NO: 8449
  source 1..483: mol_type = genomic DNA

SEQ ID NO: 74370 - DNA, 192 bp, synthetic construct; identical to SEQ ID NO: 72344
  source 1..192: mol_type = other DNA

SEQ ID NO: 74371 - DNA, 915 bp, synthetic construct; identical to SEQ ID NO: 72345
  source 1..915: mol_type = other DNA

SEQ ID NO: 74372 - DNA, 1476 bp, synthetic construct; identical to SEQ ID NO: 72346
  source 1..1476: mol_type = other DNA

SEQ ID NO: 74373 - DNA, 1611 bp, synthetic construct; identical to SEQ ID NO: 72350
  source 1..1611: mol_type = other DNA

SEQ ID NO: 74374 - DNA, 114 bp, synthetic construct; identical to SEQ ID NO: 72351
  source 1..114: mol_type = other DNA

SEQ ID NO: 74375 - DNA, 2061 bp, synthetic construct; identical to SEQ ID NO: 72356
  source 1..2061: mol_type = other DNA

SEQ ID NO: 74376 - DNA, 1458 bp, synthetic construct; identical to SEQ ID NO: 72357
  source 1..1458: mol_type = other DNA

SEQ ID NO: 74377 - DNA, 2865 bp, synthetic construct; identical to SEQ ID NO: 72358
  source 1..2865: mol_type = other DNA

SEQ ID NO: 74378 - DNA, 4419 bp, synthetic construct; identical to SEQ ID NO: 72359
  source 1..4419: mol_type = other DNA

SEQ ID NO: 74379 - DNA, 1353 bp, synthetic construct; identical to SEQ ID NO: 72361
  source 1..1353: mol_type = other DNA

SEQ ID NO: 74380 - DNA, 378 bp, synthetic construct; identical to SEQ ID NO: 72362
  source 1..378: mol_type = other DNA

SEQ ID NO: 74381 - DNA, 804 bp, synthetic construct; identical to SEQ ID NO: 72363
  source 1..804: mol_type = other DNA

SEQ ID NO: 74382 - DNA, 1365 bp, synthetic construct; identical to SEQ ID NO: 72365
  source 1..1365: mol_type = other DNA

SEQ ID NO: 74383 - DNA, 1836 bp, synthetic construct; identical to SEQ ID NO: 72366
  source 1..1836: mol_type = other DNA

SEQ ID NO: 74384 - DNA, 591 bp, synthetic construct; identical to SEQ ID NO: 72367
  source 1..591: mol_type = other DNA

SEQ ID NO: 74385 - DNA, 678 bp, synthetic construct; identical to SEQ ID NO: 72368
  source 1..678: mol_type = other DNA

SEQ ID NO: 74386 - DNA, 1071 bp, synthetic construct; identical to SEQ ID NO: 72370
  source 1..1071: mol_type = other DNA

SEQ ID NO: 74387 - DNA, 1260 bp, synthetic construct; identical to SEQ ID NO: 72373
  source 1..1260: mol_type = other DNA

SEQ ID NO: 74388 - DNA, 960 bp, synthetic construct; identical to SEQ ID NO: 72374
  source 1..960: mol_type = other DNA

SEQ ID NO: 74389 - DNA, 4248 bp, synthetic construct; identical to SEQ ID NO: 72380
  source 1..4248: mol_type = other DNA

SEQ ID NO: 74390 - DNA, 1149 bp, synthetic construct; identical to SEQ ID NO: 72381
  source 1..1149: mol_type = other DNA

SEQ ID NO: 74391 - DNA, 684 bp, synthetic construct; identical to SEQ ID NO: 72382
  source 1..684: mol_type = other DNA

SEQ ID NO: 74392 - DNA, 192 bp, synthetic construct; identical to SEQ ID NO: 72383
  source 1..192: mol_type = other DNA

SEQ ID NO: 74393 - DNA, 849 bp, synthetic construct; identical to SEQ ID NO: 72384
  source 1..849: mol_type = other DNA

SEQ ID NO: 74394 - DNA, 204 bp, synthetic construct; identical to SEQ ID NO: 72385
  source 1..204: mol_type = other DNA

SEQ ID NO: 74395 - DNA, 1059 bp, synthetic construct; identical to SEQ ID NO: 72387
  source 1..1059: mol_type = other DNA

SEQ ID NO: 74396 - DNA, 888 bp, synthetic construct; identical to SEQ ID NO: 72389
  source 1..888: mol_type = other DNA

SEQ ID NO: 74397 - DNA, 1455 bp, synthetic construct; identical to SEQ ID NO: 72390
  source 1..1455: mol_type = other DNA

SEQ ID NO: 74398 - DNA, 810 bp, synthetic construct; identical to SEQ ID NO: 72393
  source 1..810: mol_type = other DNA

SEQ ID NO: 74399 - DNA, 225 bp, synthetic construct; identical to SEQ ID NO: 72394
  source 1..225: mol_type = other DNA

SEQ ID NO: 74400 - DNA, 234 bp, synthetic construct; identical to SEQ ID NO: 72397
  source 1..234: mol_type = other DNA

SEQ ID NO: 74401 - DNA, 351 bp, synthetic construct; identical to SEQ ID NO: 72402
  source 1..351: mol_type = other DNA

SEQ ID NO: 74402 - DNA, 339 bp, synthetic construct; identical to SEQ ID NO: 72404
  source 1..339: mol_type = other DNA

SEQ ID NO: 74403 - DNA, 510 bp, synthetic construct; identical to SEQ ID NO: 72405
  source 1..510: mol_type = other DNA

SEQ ID NO: 74404 - DNA, 489 bp, synthetic construct; identical to SEQ ID NO: 72406
  source 1..489: mol_type = other DNA

SEQ ID NO: 74405 - DNA, 897 bp, synthetic construct; identical to SEQ ID NO: 72407
  source 1..897: mol_type = other DNA

SEQ ID NO: 74406 - DNA, 681 bp, synthetic construct; identical to SEQ ID NO: 72409
  source 1..681: mol_type = other DNA

SEQ ID NO: 74407 - DNA, 582 bp, synthetic construct; identical to SEQ ID NO: 72411
  source 1..582: mol_type = other DNA

SEQ ID NO: 74408 - DNA, 573 bp, synthetic construct; identical to SEQ ID NO: 72412
  source 1..573: mol_type = other DNA

SEQ ID NO: 74409 - DNA, 948 bp, synthetic construct; identical to SEQ ID NO: 72413
  source 1..948: mol_type = other DNA

SEQ ID NO: 74410 - DNA, 183 bp, synthetic construct; identical to SEQ ID NO: 72414
  source 1..183: mol_type = other DNA

SEQ ID NO: 74411 - DNA, 642 bp, synthetic construct; identical to SEQ ID NO: 72416
  source 1..642: mol_type = other DNA

SEQ ID NO: 74412 - DNA, 693 bp, synthetic construct; identical to SEQ ID NO: 72419
  source 1..693: mol_type = other DNA

SEQ ID NO: 74413 - DNA, 369 bp, synthetic construct; identical to SEQ ID NO: 72420
  source 1..369: mol_type = other DNA

SEQ ID NO: 74414 - DNA, 408 bp, synthetic construct; identical to SEQ ID NO: 72421
  source 1..408: mol_type = other DNA

SEQ ID NO: 74415 - DNA, 420 bp, synthetic construct; identical to SEQ ID NO: 72422
  source 1..420: mol_type = other DNA

SEQ ID NO: 74416 - DNA, 147 bp, synthetic construct; identical to SEQ ID NO: 72425
  source 1..147: mol_type = other DNA

SEQ ID NO: 74417 - DNA, 432 bp, synthetic construct; identical to SEQ ID NO: 72426
  source 1..432: mol_type = other DNA

SEQ ID NO: 74418 - DNA, 750 bp, synthetic construct; identical to SEQ ID NO: 72427
  source 1..750: mol_type = other DNA

SEQ ID NO: 74419 - DNA, 753 bp, synthetic construct; identical to SEQ ID NO: 72428
  source 1..753: mol_type = other DNA

SEQ ID NO: 74420 - DNA, 498 bp, synthetic construct; identical to SEQ ID NO: 72430
  source 1..498: mol_type = other DNA

SEQ ID NO: 74421 - DNA, 249 bp, synthetic construct; identical to SEQ ID NO: 72431
  source 1..249: mol_type = other DNA

SEQ ID NO: 74422 - DNA, 261 bp, synthetic construct; identical to SEQ ID NO: 72433
  source 1..261: mol_type = other DNA

SEQ ID NO: 74423 - DNA, 594 bp, synthetic construct; identical to SEQ ID NO: 72434
  source 1..594: mol_type = other DNA

SEQ ID NO: 74424 - DNA, 696 bp, synthetic construct; identical to SEQ ID NO: 72435
  source 1..696: mol_type = other DNA

SEQ ID NO: 74425 - DNA, 672 bp, synthetic construct; identical to SEQ ID NO: 72436
  source 1..672: mol_type = other DNA

SEQ ID NO: 74426 - DNA, 231 bp, synthetic construct; identical to SEQ ID NO: 72437
  source 1..231: mol_type = other DNA

SEQ ID NO: 74427 - DNA, 873 bp, synthetic construct; identical to SEQ ID NO: 72438
  source 1..873: mol_type = other DNA

SEQ ID NO: 74428 - DNA, 255 bp, synthetic construct; identical to SEQ ID NO: 72439
  source 1..255: mol_type = other DNA

SEQ ID NO: 74429 - DNA, 306 bp, synthetic construct; identical to SEQ ID NO: 72440
  source 1..306: mol_type = other DNA

SEQ ID NO: 74430 - DNA, 450 bp, synthetic construct; identical to SEQ ID NO: 72441
  source 1..450: mol_type = other DNA

SEQ ID NO: 74431 - DNA, 636 bp, synthetic construct; identical to SEQ ID NO: 72442
  source 1..636: mol_type = other DNA

SEQ ID NO: 74432 - DNA, 366 bp, synthetic construct; identical to SEQ ID NO: 72444
  source 1..366: mol_type = other DNA

SEQ ID NO: 74433 - DNA, 993 bp, synthetic construct; identical to SEQ ID NO: 72447
  source 1..993: mol_type = other DNA

SEQ ID NO: 74434 - DNA, 993 bp, synthetic construct; identical to SEQ ID NO: 72448
  source 1..993: mol_type = other DNA

SEQ ID NO: 74435 - DNA, 990 bp, synthetic construct; identical to SEQ ID NO: 72449
  source 1..990: mol_type = other DNA

SEQ ID NO: 74436 - DNA, 993 bp, synthetic construct; identical to SEQ ID NO: 72450
  source 1..993: mol_type = other DNA

SEQ ID NO: 74437 - DNA, 960 bp, synthetic construct; identical to SEQ ID NO: 72451
  source 1..960: mol_type = other DNA

SEQ ID NO: 74438 - DNA, 222 bp, synthetic construct; identical to SEQ ID NO: 72453
  source 1..222: mol_type = other DNA

SEQ ID NO: 74439 - DNA, 699 bp, synthetic construct; identical to SEQ ID NO: 72454
  source 1..699: mol_type = other DNA

SEQ ID NO: 74440 - DNA, 420 bp, synthetic construct; identical to SEQ ID NO: 72455
  source 1..420: mol_type = other DNA

SEQ ID NO: 74441 - DNA, 651 bp, synthetic construct; identical to SEQ ID NO: 72457
  source 1..651: mol_type = other DNA

SEQ ID NO: 74442 - DNA, 300 bp, synthetic construct; identical to SEQ ID NO: 72459
  source 1..300: mol_type = other DNA

SEQ ID NO: 74443 - DNA, 378 bp, synthetic construct; identical to SEQ ID NO: 72460
  source 1..378: mol_type = other DNA

SEQ ID NO: 74444 - DNA, 933 bp, synthetic construct; identical to SEQ ID NO: 72462
  source 1..933: mol_type = other DNA

SEQ ID NO: 74445 - DNA, 2130 bp, synthetic construct; identical to SEQ ID NO: 72463
  source 1..2130: mol_type = other DNA

SEQ ID NO: 74446 - DNA, 222 bp, synthetic construct; identical to SEQ ID NO: 72468
  source 1..222: mol_type = other DNA

SEQ ID NO: 74447 - DNA, 2985 bp, synthetic construct; identical to SEQ ID NO: 72469
  source 1..2985: mol_type = other DNA

SEQ ID NO: 74448 - DNA, 1716 bp, synthetic construct; identical to SEQ ID NO: 72470
  source 1..1716: mol_type = other DNA

SEQ ID NO: 74449 - DNA, 357 bp, synthetic construct; identical to SEQ ID NO: 72472
  source 1..357: mol_type = other DNA

SEQ ID NO: 74450 - DNA, 630 bp, synthetic construct; identical to SEQ ID NO: 72473
  source 1..630: mol_type = other DNA

SEQ ID NO: 74451 - DNA, 519 bp, synthetic construct; identical to SEQ ID NO: 72477
  source 1..519: mol_type = other DNA

SEQ ID NO: 74452 - DNA, 612 bp, synthetic construct; identical to SEQ ID NO: 72478
  source 1..612: mol_type = other DNA

SEQ ID NO: 74453 - DNA, 357 bp, synthetic construct; identical to SEQ ID NO: 72479
  source 1..357: mol_type = other DNA

SEQ ID NO: 74454 - DNA, 762 bp, synthetic construct; identical to SEQ ID NO: 72480
  source 1..762: mol_type = other DNA

SEQ ID NO: 74455 - DNA, 612 bp, synthetic construct; identical to SEQ ID NO: 72485
  source 1..612: mol_type = other DNA

SEQ ID NO: 74456 - DNA, 639 bp, synthetic construct; identical to SEQ ID NO: 72487
  source 1..639: mol_type = other DNA

SEQ ID NO: 74457 - DNA, 3939 bp, synthetic construct; identical to SEQ ID NO: 72488
  source 1..3939: mol_type = other DNA

SEQ ID NO: 74458 - DNA, 177 bp, synthetic construct; identical to SEQ ID NO: 72489
  source 1..177: mol_type = other DNA

SEQ ID NO: 74459 - DNA, 315 bp, synthetic construct; identical to SEQ ID NO: 72490
  source 1..315: mol_type = other DNA

SEQ ID NO: 74460 - DNA, 2049 bp, synthetic construct; identical to SEQ ID NO: 72491
  source 1..2049: mol_type = other DNA

SEQ ID NO: 74461 - DNA, 5595 bp, synthetic construct; identical to SEQ ID NO: 72493
  source 1..5595: mol_type = other DNA

SEQ ID NO: 74462 - DNA, 5112 bp, synthetic construct; identical to SEQ ID NO: 72496
  source 1..5112: mol_type = other DNA

SEQ ID NO: 74463 - DNA, 708 bp, synthetic construct; identical to SEQ ID NO: 72497
  source 1..708: mol_type = other DNA

SEQ ID NO: 74464 - DNA, 336 bp, synthetic construct; identical to SEQ ID NO: 72499
  source 1..336: mol_type = other DNA

SEQ ID NO: 74465 - DNA, 2541 bp, synthetic construct; identical to SEQ ID NO: 72500
  source 1..2541: mol_type = other DNA

SEQ ID NO: 74466 - DNA, 1806 bp, synthetic construct; identical to SEQ ID NO: 72501
  source 1..1806: mol_type = other DNA

SEQ ID NO: 74467 - DNA, 1707 bp, synthetic construct; identical to SEQ ID NO: 72502
  source 1..1707: mol_type = other DNA

SEQ ID NO: 74468 - DNA, 372 bp, synthetic construct; identical to SEQ ID NO: 72505
  source 1..372: mol_type = other DNA

SEQ ID NO: 74469 - DNA, 5568 bp, synthetic construct; identical to SEQ ID NO: 72507
  source 1..5568: mol_type = other DNA

SEQ ID NO: 74470 - DNA, 2589 bp, synthetic construct; identical to SEQ ID NO: 72508
  source 1..2589: mol_type = other DNA

SEQ ID NO: 74471 - DNA, 486 bp, synthetic construct; identical to SEQ ID NO: 72510
  source 1..486: mol_type = other DNA

SEQ ID NO: 74472 - DNA, 993 bp, synthetic construct; identical to SEQ ID NO: 72512
  source 1..993: mol_type = other DNA

SEQ ID NO: 74473 - DNA, 711 bp, synthetic construct; identical to SEQ ID NO: 72513
  source 1..711: mol_type = other DNA

SEQ ID NO: 74474 - DNA, 324 bp, synthetic construct; identical to SEQ ID NO: 72515
  source 1..324: mol_type = other DNA

SEQ ID NO: 74475 - DNA, 816 bp, synthetic construct; identical to SEQ ID NO: 72516
  source 1..816: mol_type = other DNA

SEQ ID NO: 74476 - DNA, 753 bp, synthetic construct; identical to SEQ ID NO: 72519
  source 1..753: mol_type = other DNA

SEQ ID NO: 74477 - DNA, 1557 bp, synthetic construct; identical to SEQ ID NO: 72521
  source 1..1557: mol_type = other DNA

SEQ ID NO: 74478 - DNA, 714 bp, synthetic construct; identical to SEQ ID NO: 72522
  source 1..714: mol_type = other DNA

SEQ ID NO: 74479 - DNA, 846 bp, synthetic construct; identical to SEQ ID NO: 72523
  source 1..846: mol_type = other DNA

SEQ ID NO: 74480 - DNA, 3657 bp, synthetic construct; identical to SEQ ID NO: 72525
  source 1..3657: mol_type = other DNA

SEQ ID NO: 74481 - DNA, 3609 bp, synthetic construct; identical to SEQ ID NO: 72527
  source 1..3609: mol_type = other DNA

SEQ ID NO: 74482 - DNA, 4830 bp, synthetic construct; identical to SEQ ID NO: 72529
  source 1..4830: mol_type = other DNA

SEQ ID NO: 74483 - DNA, 507 bp, synthetic construct; identical to SEQ ID NO: 72531
  source 1..507: mol_type = other DNA

SEQ ID NO: 74484 - DNA, 1386 bp, synthetic construct; identical to SEQ ID NO: 72534
  source 1..1386: mol_type = other DNA

SEQ ID NO: 74485 - DNA, 687 bp, synthetic construct; identical to SEQ ID NO: 72535
  source 1..687: mol_type = other DNA

SEQ ID NO: 74486 - DNA, 1650 bp, synthetic construct; identical to SEQ ID NO: 72537
  source 1..1650: mol_type = other DNA

SEQ ID NO: 74487 - DNA, 576 bp, synthetic construct; identical to SEQ ID NO: 72540
  source 1..576: mol_type = other DNA

SEQ ID NO: 74488 - DNA, 357 bp, synthetic construct; identical to SEQ ID NO: 72541
  source 1..357: mol_type = other DNA

SEQ ID NO: 74489 - DNA, 222 bp, synthetic construct; identical to SEQ ID NO: 72542
  source 1..222: mol_type = other DNA

SEQ ID NO: 74490 - DNA, 1029 bp, synthetic construct; identical to SEQ ID NO: 72543
  source 1..1029: mol_type = other DNA

SEQ ID NO: 74491 - DNA, 237 bp, synthetic construct; identical to SEQ ID NO: 72545
  source 1..237: mol_type = other DNA

SEQ ID NO: 74492 - DNA, 345 bp, synthetic construct; identical to SEQ ID NO: 72546
  source 1..345: mol_type = other DNA

SEQ ID NO: 74493 - DNA, 516 bp, synthetic construct; identical to SEQ ID NO: 72547
  source 1..516: mol_type = other DNA

SEQ ID NO: 74494 - DNA, 258 bp, synthetic construct; identical to SEQ ID NO: 72550
  source 1..258: mol_type = other DNA

SEQ ID NO: 74495 - DNA, 2664 bp, synthetic construct; identical to SEQ ID NO: 72554
  source 1..2664: mol_type = other DNA

SEQ ID NO: 74496 - DNA, 549 bp, synthetic construct; identical to SEQ ID NO: 72556
  source 1..549: mol_type = other DNA

SEQ ID NO: 74497 - DNA, 354 bp, synthetic construct; identical to SEQ ID NO: 72559
  source 1..354: mol_type = other DNA

SEQ ID NO: 74498 - DNA, 252 bp, synthetic construct; identical to SEQ ID NO: 72565
  source 1..252: mol_type = other DNA

SEQ ID NO: 74499 - DNA, 270 bp, synthetic construct; identical to SEQ ID NO: 72566
  source 1..270: mol_type = other DNA

SEQ ID NO: 74500 - DNA, 384 bp, synthetic construct; identical to SEQ ID NO: 72568
  source 1..384: mol_type = other DNA

SEQ ID NO: 74501 - DNA, 570 bp, synthetic construct; identical to SEQ ID NO: 72569
  source 1..570: mol_type = other DNA

SEQ ID NO: 74502 - DNA, 1791 bp, synthetic construct; identical to SEQ ID NO: 72579
  source 1..1791: mol_type = other DNA

SEQ ID NO: 74503 - DNA, 1746 bp, synthetic construct; identical to SEQ ID NO: 72580
  source 1..1746: mol_type = other DNA

SEQ ID NO: 74504 - DNA, 582 bp, synthetic construct; identical to SEQ ID NO: 72581
  source 1..582: mol_type = other DNA

SEQ ID NO: 74505 - DNA, 1434 bp, synthetic construct; identical to SEQ ID NO: 72583
  source 1..1434: mol_type = other DNA

SEQ ID NO: 74506 - DNA, 717 bp, synthetic construct; identical to SEQ ID NO: 72587
  source 1..717: mol_type = other DNA

SEQ ID NO: 74507 - DNA, 2355 bp, synthetic construct; identical to SEQ ID NO: 72588
  source 1..2355: mol_type = other DNA

SEQ ID NO: 74508 - DNA, 1371 bp, synthetic construct; identical to SEQ ID NO: 72589
  source 1..1371: mol_type = other DNA

SEQ ID NO: 74509 - DNA, 1629 bp, synthetic construct; identical to SEQ ID NO: 72594
  source 1..1629: mol_type = other DNA

SEQ ID NO: 74510 - DNA, 1620 bp, synthetic construct; identical to SEQ ID NO: 72595
  source 1..1620: mol_type = other DNA

SEQ ID NO: 74511 - DNA, 1089 bp, synthetic construct; identical to SEQ ID NO: 72603
  source 1..1089: mol_type = other DNA

SEQ ID NO: 74512 - DNA, 1278 bp, synthetic construct; identical to SEQ ID NO: 72606
  source 1..1278: mol_type = other DNA

SEQ ID NO: 74513 - DNA, 1077 bp, synthetic construct; identical to SEQ ID NO: 72607
  source 1..1077: mol_type = other DNA

SEQ ID NO: 74514 - DNA, 1272 bp, synthetic construct; identical to SEQ ID NO: 72608
  source 1..1272: mol_type = other DNA

SEQ ID NO: 74515 - DNA, 741 bp, synthetic construct; identical to SEQ ID NO: 72609
  source 1..741: mol_type = other DNA

SEQ ID NO: 74516 - DNA, 387 bp, synthetic construct; identical to SEQ ID NO: 72615
  source 1..387: mol_type = other DNA

SEQ ID NO: 74517 - DNA, 909 bp, synthetic construct; identical to SEQ ID NO: 72616
  source 1..909: mol_type = other DNA

SEQ ID NO: 74518 - DNA, 2877 bp, synthetic construct; identical to SEQ ID NO: 72617
  source 1..2877: mol_type = other DNA

SEQ ID NO: 74519 - DNA, 183 bp, synthetic construct; identical to SEQ ID NO: 72618
  source 1..183: mol_type = other DNA

SEQ ID NO: 74520 - DNA, 207 bp, synthetic construct; identical to SEQ ID NO: 72619
  source 1..207: mol_type = other DNA

SEQ ID NO: 74521 - DNA, 1149 bp, synthetic construct; identical to SEQ ID NO: 72620
  source 1..1149: mol_type = other DNA

SEQ ID NO: 74522 - DNA, 273 bp, synthetic construct; identical to SEQ ID NO: 72622
  source 1..273: mol_type = other DNA

SEQ ID NO: 74523 - DNA, 1821 bp, synthetic construct; identical to SEQ ID NO: 72623
  source 1..1821: mol_type = other DNA

SEQ ID NO: 74524 - DNA, 279 bp, synthetic construct; identical to SEQ ID NO: 72624
  source 1..279: mol_type = other DNA

SEQ ID NO: 74525 - DNA, 579 bp, synthetic construct; identical to SEQ ID NO: 72626
  source 1..579: mol_type = other DNA

SEQ ID NO: 74526 - DNA, 1767 bp, synthetic construct; identical to SEQ ID NO: 72627
  source 1..1767: mol_type = other DNA

SEQ ID NO: 74527 - DNA, 558 bp, synthetic construct; identical to SEQ ID NO: 72628
  source 1..558: mol_type = other DNA

SEQ ID NO: 74528 - DNA, 423 bp, synthetic construct; identical to SEQ ID NO: 72629
  source 1..423: mol_type = other DNA

SEQ ID NO: 74529 - DNA, 171 bp, synthetic construct; identical to SEQ ID NO: 72630
  source 1..171: mol_type = other DNA

SEQ ID NO: 74530 - DNA, 1656 bp, synthetic construct; identical to SEQ ID NO: 72631
  source 1..1656: mol_type = other DNA

SEQ ID NO: 74531 - DNA, 1332 bp, synthetic construct; identical to SEQ ID NO: 72632
  source 1..1332: mol_type = other DNA

SEQ ID NO: 74532 - DNA, 1005 bp, synthetic construct; identical to SEQ ID NO: 72635
  source 1..1005: mol_type = other DNA

SEQ ID NO: 74533 - DNA, 1476 bp, synthetic construct; identical to SEQ ID NO: 72636
  source 1..1476: mol_type = other DNA

SEQ ID NO: 74534 - DNA, 939 bp, synthetic construct; identical to SEQ ID NO: 72638
  source 1..939: mol_type = other DNA

SEQ ID NO: 74535 - DNA, 1047 bp, synthetic construct; identical to SEQ ID NO: 72639
  source 1..1047: mol_type = other DNA

SEQ ID NO: 74536 - DNA, 2097 bp, synthetic construct; identical to SEQ ID NO: 72640
  source 1..2097: mol_type = other DNA

SEQ ID NO: 74537 - DNA, 2628 bp, synthetic construct; identical to SEQ ID NO: 72641
  source 1..2628: mol_type = other DNA

SEQ ID NO: 74538 - DNA, 480 bp, synthetic construct; identical to SEQ ID NO: 72642
  source 1..480: mol_type = other DNA

SEQ ID NO: 74539 - DNA, 1380 bp, synthetic construct; identical to SEQ ID NO: 72644
  source 1..1380: mol_type = other DNA

SEQ ID NO: 74540 - DNA, 396 bp, synthetic construct; identical to SEQ ID NO: 72645
  source 1..396: mol_type = other DNA

SEQ ID NO: 74541 - DNA, 450 bp, synthetic construct; identical to SEQ ID NO: 72646
  source 1..450: mol_type = other DNA

SEQ ID NO: 74542 - DNA, 468 bp, synthetic construct; identical to SEQ ID NO: 72648
  source 1..468: mol_type = other DNA

SEQ ID NO: 74543 - DNA, 999 bp, synthetic construct; identical to SEQ ID NO: 72651
  source 1..999: mol_type = other DNA

SEQ ID NO: 74544 - DNA, 1488 bp, synthetic construct; identical to SEQ ID NO: 72655
  source 1..1488: mol_type = other DNA

SEQ ID NO: 74545 - DNA, 369 bp, synthetic construct; identical to SEQ ID NO: 72665
  source 1..369: mol_type = other DNA

SEQ ID NO: 74546 - DNA, 774 bp, synthetic construct; identical to SEQ ID NO: 72669
  source 1..774: mol_type = other DNA

SEQ ID NO: 74547 - DNA, 849 bp, synthetic construct; identical to SEQ ID NO: 72670
  source 1..849: mol_type = other DNA

SEQ ID NO: 74548 - DNA, 2049 bp, synthetic construct; identical to SEQ ID NO: 72671
  source 1..2049: mol_type = other DNA

SEQ ID NO: 74549 - DNA, 480 bp, synthetic construct; identical to SEQ ID NO: 72672
  source 1..480: mol_type = other DNA

SEQ ID NO: 74550 - DNA, 246 bp, synthetic construct; identical to SEQ ID NO: 72673
  source 1..246: mol_type = other DNA

SEQ ID NO: 74551 - DNA, 666 bp, synthetic construct; identical to SEQ ID NO: 72674
  source 1..666: mol_type = other DNA

SEQ ID NO: 74552 - DNA, 288 bp, synthetic construct; identical to SEQ ID NO: 72675
  source 1..288: mol_type = other DNA

SEQ ID NO: 74553 - DNA, 690 bp, synthetic construct; identical to SEQ ID NO: 72676
  source 1..690: mol_type = other DNA

SEQ ID NO: 74554 - DNA, 843 bp, synthetic construct; identical to SEQ ID NO: 72677
  source 1..843: mol_type = other DNA

SEQ ID NO: 74555 - DNA, 348 bp, synthetic construct; identical to SEQ ID NO: 72678
  source 1..348: mol_type = other DNA

SEQ ID NO: 74556 - DNA, 180 bp, synthetic construct; identical to SEQ ID NO: 72680
  source 1..180: mol_type = other DNA

SEQ ID NO: 74557 - DNA, 849 bp, synthetic construct; identical to SEQ ID NO: 72681
  source 1..849: mol_type = other DNA

SEQ ID NO: 74558 - DNA, 540 bp, synthetic construct; identical to SEQ ID NO: 72682
  source 1..540: mol_type = other DNA

SEQ ID NO: 74559 - DNA, 540 bp, synthetic construct; identical to SEQ ID NO: 72686
  source 1..540: mol_type = other DNA

SEQ ID NO: 74560 - DNA, 609 bp, synthetic construct; identical to SEQ ID NO: 72689
  source 1..609: mol_type = other DNA

SEQ ID NO: 74561 - DNA, 885 bp, synthetic construct; identical to SEQ ID NO: 72692
  source 1..885: mol_type = other DNA

SEQ ID NO: 74562 - DNA, 420 bp, synthetic construct; identical to SEQ ID NO: 72695
  source 1..420: mol_type = other DNA

SEQ ID NO: 74563 - DNA, 231 bp, synthetic construct; identical to SEQ ID NO: 72696
  source 1..231: mol_type = other DNA

SEQ ID NO: 74564 - DNA, 1392 bp, synthetic construct; identical to SEQ ID NO: 72697
  source 1..1392: mol_type = other DNA

SEQ ID NO: 74565 - DNA, 315 bp, synthetic construct; identical to SEQ ID NO: 72700
  source 1..315: mol_type = other DNA

SEQ ID NO: 74566 - DNA, 732 bp, synthetic construct; identical to SEQ ID NO: 72702
  source 1..732: mol_type = other DNA

SEQ ID NO: 74567 - DNA, 825 bp, synthetic construct; identical to SEQ ID NO: 72703
  source 1..825: mol_type = other DNA

SEQ ID NO: 74568 - DNA, 633 bp, synthetic construct; identical to SEQ ID NO: 72704
  source 1..633: mol_type = other DNA

SEQ ID NO: 74569 - DNA, 636 bp, synthetic construct; identical to SEQ ID NO: 72706
  source 1..636: mol_type = other DNA

SEQ ID NO: 74570 - DNA, 1356 bp, synthetic construct; identical to SEQ ID NO: 72707
  source 1..1356: mol_type = other DNA

SEQ ID NO: 74571 - DNA, 867 bp, synthetic construct; identical to SEQ ID NO: 72711
  source 1..867: mol_type = other DNA

SEQ ID NO: 74572 - DNA, 429 bp, synthetic construct; identical to SEQ ID NO: 72712
  source 1..429: mol_type = other DNA

SEQ ID NO: 74573 - DNA, 804 bp, synthetic construct; identical to SEQ ID NO: 72713
  source 1..804: mol_type = other DNA

SEQ ID NO: 74574 - DNA, 384 bp, synthetic construct; identical to SEQ ID NO: 72714
  source 1..384: mol_type = other DNA

SEQ ID NO: 74575 - DNA, 1032 bp, synthetic construct; identical to SEQ ID NO: 72715
  source 1..1032: mol_type = other DNA

SEQ ID NO: 74576 - DNA, 711 bp, synthetic construct; identical to SEQ ID NO: 72716
  source 1..711: mol_type = other DNA

SEQ ID NO: 74577 - DNA, 675 bp, synthetic construct; identical to SEQ ID NO: 72717
  source 1..675: mol_type = other DNA

SEQ ID NO: 74578 - DNA, 1083 bp, synthetic construct; identical to SEQ ID NO: 72723
  source 1..1083: mol_type = other DNA

SEQ ID NO: 74579 - DNA, 432 bp, synthetic construct; identical to SEQ ID NO: 72724
  source 1..432: mol_type = other DNA

SEQ ID NO: 74580 - DNA, 732 bp, synthetic construct; identical to SEQ ID NO: 72725
  source 1..732: mol_type = other DNA

SEQ ID NO: 74581 - DNA, 1029 bp, synthetic construct; identical to SEQ ID NO: 72726
  source 1..1029: mol_type = other DNA

SEQ ID NO: 74582 - DNA, 396 bp, synthetic construct; identical to SEQ ID NO: 72727
  source 1..396: mol_type = other DNA

SEQ ID NO: 74583 - DNA, 498 bp, synthetic construct; identical to SEQ ID NO: 72728
  source 1..498: mol_type = other DNA

SEQ ID NO: 74584 - DNA, 570 bp, synthetic construct; identical to SEQ ID NO: 72730
  source 1..570: mol_type = other DNA

SEQ ID NO: 74585 - DNA, 630 bp, synthetic construct; identical to SEQ ID NO: 72732
  source 1..630: mol_type = other DNA

SEQ ID NO: 74586 - DNA, 2727 bp, synthetic construct; identical to SEQ ID NO: 72733
  source 1..2727: mol_type = other DNA

SEQ ID NO: 74587 - DNA, 1014 bp, synthetic construct; identical to SEQ ID NO: 72734
  source 1..1014: mol_type = other DNA

SEQ ID NO: 74588 - DNA, 789 bp, synthetic construct; identical to SEQ ID NO: 72736
  source 1..789: mol_type = other DNA

SEQ ID NO: 74589 - DNA, 1059 bp, synthetic construct; identical to SEQ ID NO: 72738
  source 1..1059: mol_type = other DNA

SEQ ID NO: 74590 - DNA, 306 bp, synthetic construct; identical to SEQ ID NO: 72741
  source 1..306: mol_type = other DNA

SEQ ID NO: 74591 - DNA, 1092 bp, synthetic construct; identical to SEQ ID NO: 72743
  source 1..1092: mol_type = other DNA

SEQ ID NO: 74592 - DNA, 387 bp, synthetic construct; identical to SEQ ID NO: 72746
  source 1..387: mol_type = other DNA

SEQ ID NO: 74593 - DNA, 1071 bp, synthetic construct; identical to SEQ ID NO: 72747
  source 1..1071: mol_type = other DNA

SEQ ID NO: 74594 - DNA, 1698 bp, synthetic construct; identical to SEQ ID NO: 72753
  source 1..1698: mol_type = other DNA

SEQ ID NO: 74595 - DNA, 855 bp, synthetic construct; identical to SEQ ID NO: 72754
  source 1..855: mol_type = other DNA

SEQ ID NO: 74596 - DNA, 1386 bp, synthetic construct; identical to SEQ ID NO: 72755
  source 1..1386: mol_type = other DNA

SEQ ID NO: 74597 - DNA, 651 bp, synthetic construct; identical to SEQ ID NO: 72756
  source 1..651: mol_type = other DNA

SEQ ID NO: 74598 - DNA, 480 bp, synthetic construct; identical to SEQ ID NO: 72757
  source 1..480: mol_type = other DNA

SEQ ID NO: 74599 - DNA, 438 bp, synthetic construct; identical to SEQ ID NO: 72760
  source 1..438: mol_type = other DNA

SEQ ID NO: 74600 - DNA, 534 bp, synthetic construct; identical to SEQ ID NO: 72762
  source 1..534: mol_type = other DNA

SEQ ID NO: 74601 - DNA, 1926 bp, synthetic construct; identical to SEQ ID NO: 72763
  source 1..1926: mol_type = other DNA

SEQ ID NO: 74602 - DNA, 1110 bp, synthetic construct; identical to SEQ ID NO: 72765
  source 1..1110: mol_type = other DNA

SEQ ID NO: 74603 - DNA, 519 bp, synthetic construct; identical to SEQ ID NO: 72766
  source 1..519: mol_type = other DNA

SEQ ID NO: 74604 - DNA, 2430 bp, synthetic construct; identical to SEQ ID NO: 72767
  source 1..2430: mol_type = other DNA

SEQ ID NO: 74605 - DNA, 933 bp, synthetic construct; identical to SEQ ID NO: 72769
  source 1..933: mol_type = other DNA

SEQ ID NO: 74606 - DNA, 783 bp, synthetic construct; identical to SEQ ID NO: 72770
  source 1..783: mol_type = other DNA

SEQ ID NO: 74607 - DNA, 999 bp, synthetic construct; identical to SEQ ID NO: 72771
  source 1..999: mol_type = other DNA

SEQ ID NO: 74608 - DNA, 216 bp, synthetic construct; identical to SEQ ID NO: 72772
  source 1..216: mol_type = other DNA

SEQ ID NO: 74609 - DNA, 846 bp, synthetic construct; identical to SEQ ID NO: 72773
  source 1..846: mol_type = other DNA

SEQ ID NO: 74610 - DNA, 1545 bp, synthetic construct; identical to SEQ ID NO: 72776
  source 1..1545: mol_type = other DNA

SEQ ID NO: 74611 - DNA, 939 bp, synthetic construct; identical to SEQ ID NO: 72777
  source 1..939: mol_type = other DNA

SEQ ID NO: 74612 - DNA, 1869 bp, synthetic construct; identical to SEQ ID NO: 72779
  source 1..1869: mol_type = other DNA

SEQ ID NO: 74613 - DNA, 1068 bp, synthetic construct; identical to SEQ ID NO: 72780
  source 1..1068: mol_type = other DNA

SEQ ID NO: 74614 - DNA, 411 bp, synthetic construct; identical to SEQ ID NO: 72784
  source 1..411: mol_type = other DNA

SEQ ID NO: 74615 - DNA, 696 bp, synthetic construct; identical to SEQ ID NO: 72786
  source 1..696: mol_type = other DNA

SEQ ID NO: 74616 - DNA, 1170 bp, synthetic construct; identical to SEQ ID NO: 72787
  source 1..1170: mol_type = other DNA

SEQ ID NO: 74617 - DNA, 720 bp, synthetic construct; identical to SEQ ID NO: 72788
  source 1..720: mol_type = other DNA

SEQ ID NO: 74618 - DNA, 1137 bp, synthetic construct; identical to SEQ ID NO: 72790
  source 1..1137: mol_type = other DNA

SEQ ID NO: 74619 - DNA, 1236 bp, synthetic construct; identical to SEQ ID NO: 72791
  source 1..1236: mol_type = other DNA

SEQ ID NO: 74620 - DNA, 933 bp, synthetic construct; identical to SEQ ID NO: 72792
  source 1..933: mol_type = other DNA

SEQ ID NO: 74621 - DNA, 240 bp, synthetic construct; identical to SEQ ID NO: 72793
  source 1..240: mol_type = other DNA

SEQ ID NO: 74622 - DNA, 207 bp, synthetic construct; identical to SEQ ID NO: 72794
  source 1..207: mol_type = other DNA

SEQ ID NO: 74623 - DNA, 717 bp, synthetic construct; identical to SEQ ID NO: 72795
  source 1..717: mol_type = other DNA

SEQ ID NO: 74624 - DNA, 330 bp, synthetic construct; identical to SEQ ID NO: 72796
  source 1..330: mol_type = other DNA

SEQ ID NO: 74625 - DNA, 816 bp, synthetic construct; identical to SEQ ID NO: 72797
  source 1..816: mol_type = other DNA

SEQ ID NO: 74626 - DNA, 702 bp, synthetic construct; identical to SEQ ID NO: 72798
  source 1..702: mol_type = other DNA

SEQ ID NO: 74627 - DNA, 879 bp, synthetic construct; identical to SEQ ID NO: 72799
  source 1..879: mol_type = other DNA

SEQ ID NO: 74628 - DNA, 1332 bp, synthetic construct; identical to SEQ ID NO: 72800
  source 1..1332: mol_type = other DNA

SEQ ID NO: 74629 - DNA, 1173 bp, synthetic construct; identical to SEQ ID NO: 72801
  source 1..1173: mol_type = other DNA
